United States Patent Application Publication US 2005/0255487 A1 - sequence listing, part 16

SEQ ID NO: 418916 - RNA, 19 nt, Homo sapiens
  misc_RNA (1)...(19): siRNA sense strand
agaacuagccuuugcuuua

SEQ ID NO: 418917 - RNA, 19 nt, Homo sapiens
  misc_RNA (1)...(19): siRNA sense strand
guacagcgaugaugucaag

SEQ ID NO: 418918 - RNA, 19 nt, Homo sapiens
  misc_RNA (1)...(19): siRNA sense strand
gaacaagggugccgaucag

SEQ ID NO: 418919 - RNA, 19 nt, Homo sapiens
  misc_RNA (1)...(19): siRNA sense strand
caacagaacuagccuuugc

SEQ ID NO: 418920 - RNA, 19 nt, Homo sapiens
  misc_RNA (1)...(19): siRNA sense strand
caacauagaagaaagaauc

SEQ ID NO: 418921 - RNA, 19 nt, Homo sapiens
  misc_RNA (1)...(19): siRNA sense strand
gcucuagacuuuguucgua

SEQ ID NO: 418922 - RNA, 19 nt, Homo sapiens
  misc_RNA (1)...(19): siRNA sense strand
cgacgucuucuucaaauua

SEQ ID NO: 418923 - RNA, 19 nt, Homo sapiens
  misc_RNA (1)...(19): siRNA sense strand
gagauguggucuugaguau

SEQ ID NO: 418924 - RNA, 19 nt, Homo sapiens
  misc_RNA (1)...(19): siRNA sense strand
guaagucccuagaugaaau

SEQ ID NO: 418925 - RNA, 19 nt, Homo sapiens
  misc_RNA (1)...(19): siRNA sense strand
gcuaaugcaucuggaguuu

SEQ ID NO: 418926 - RNA, 19 nt, Homo sapiens
  misc_RNA (1)...(19): siRNA sense strand
gaagaagaaagcagacauu

SEQ ID NO: 418927 - RNA, 19 nt, Homo sapiens
  misc_RNA (1)...(19): siRNA sense strand
uagagaggcugguugacua

SEQ ID NO: 418928 - RNA, 19 nt, Homo sapiens
  misc_RNA (1)...(19): siRNA sense strand
gaaaucggacaggaucuua

SEQ ID NO: 418929 - RNA, 19 nt, Homo sapiens
  misc_RNA (1)...(19): siRNA sense strand
caaagccugugacuauuau

SEQ ID NO: 418930 - RNA, 19 nt, Homo sapiens
  misc_RNA (1)...(19): siRNA sense strand
cgaauaacguuacuucaag

SEQ ID NO: 418931 - RNA, 19 nt, Homo sapiens
  misc_RNA (1)...(19): siRNA sense strand
gaaagcagacauuguguuc

SEQ ID NO: 418932 - RNA, 19 nt, Homo sapiens
  misc_RNA (1)...(19): siRNA sense strand
gggcucugcucuagacuuu

SEQ ID NO: 418933 - RNA, 19 nt, Homo sapiens
  misc_RNA (1)...(19): siRNA sense strand
gaggaaacaucggcacuug

SEQ ID NO: 418934 - RNA, 19 nt, Homo sapiens
  misc_RNA (1)...(19): siRNA sense strand
gaaauaguggacacaguuu

SEQ ID NO: 418935 - RNA, 19 nt, Homo sapiens
  misc_RNA (1)...(19): siRNA sense strand
gaucgaggauggagugcuu

SEQ ID NO: 418936 - RNA, 19 nt, Homo sapiens
  misc_RNA (1)...(19): siRNA sense strand
caaacgacgucuucuucaa

SEQ ID NO: 418937 - RNA, 19 nt, Homo sapiens
  misc_RNA (1)...(19): siRNA sense strand
gaaccugggcuaaauggaa

SEQ ID NO: 418938 - RNA, 19 nt, Homo sapiens
  misc_RNA (1)...(19): siRNA sense strand
cagagaugcucgagaaguu

SEQ ID NO: 418939 - RNA, 19 nt, Homo sapiens
  misc_RNA (1)...(19): siRNA sense strand
gaagaaagaaucaugaacu

SEQ ID NO: 418940 - RNA, 19 nt, Homo sapiens
  misc_RNA (1)...(19): siRNA sense strand
cagagucgcuucccaagau

SEQ ID NO: 418941 - RNA, 19 nt, Homo sapiens
  misc_RNA (1)...(19): siRNA sense strand
caacgaagccggugacuac

SEQ ID NO: 418942 - RNA, 19 nt, Homo sapiens
  misc_RNA (1)...(19): siRNA sense strand
ucacagacuuccuggagaa

SEQ ID NO: 418943 - RNA, 19 nt, Homo sapiens
  misc_RNA (1)...(19): siRNA sense strand
acggagaucuggcugauuu

SEQ ID NO: 418944 - RNA, 19 nt, Homo sapiens
  misc_RNA (1)...(19): siRNA sense strand
gaacagaaucagccagaug

SEQ ID NO: 418945 - RNA, 19 nt, Homo sapiens
  misc_RNA (1)...(19): siRNA sense strand
gcaaugcccuggaguacgu

SEQ ID NO: 418946 - RNA, 19 nt, Homo sapiens
  misc_RNA (1)...(19): siRNA sense strand
ucacagagaugcagaccau

SEQ ID NO: 418947 - RNA, 19 nt, Homo sapiens
  misc_RNA (1)...(19): siRNA sense strand
ucgaugagcucaaugugaa

SEQ ID NO: 418948 - RNA, 19 nt, Homo sapiens
  misc_RNA (1)...(19): siRNA sense strand
acaaagacggccacuguua

SEQ ID NO: 418949 - RNA, 19 nt, Homo sapiens
  misc_RNA (1)...(19): siRNA sense strand
ugacaacauugccgagaaa

SEQ ID NO: 418950 - RNA, 19 nt, Homo sapiens
  misc_RNA (1)...(19): siRNA sense strand
ccaagaggcagauuauuga

SEQ ID NO: 418951 - RNA, 19 nt, Homo sapiens
  misc_RNA (1)...(19): siRNA sense strand
ucuacaagauuaucgauga

SEQ ID NO: 418952 - RNA, 19 nt, Homo sapiens
  misc_RNA (1)...(19): siRNA sense strand
ggagagaggacccaaagga

SEQ ID NO: 418953 - RNA, 19 nt, Homo sapiens
  misc_RNA (1)...(19): siRNA sense strand
ggcgaggguuuauguauga

SEQ ID NO: 418954 - RNA, 19 nt, Homo sapiens
  misc_RNA (1)...(19): siRNA sense strand
ggaccaggcccgaguucua

SEQ ID NO: 418955 - RNA, 19 nt, Homo sapiens
  misc_RNA (1)...(19): siRNA sense strand
caaguaaauguuccgaaua

SEQ ID NO: 418956 - RNA, 19 nt, Homo sapiens
  misc_RNA (1)...(19): siRNA sense strand
cagagaggcugugcucaaa

SEQ ID NO: 418957 - RNA, 19 nt, Homo sapiens
  misc_RNA (1)...(19): siRNA sense strand
ggagaaagaggagauguug

SEQ ID NO: 418958 - RNA, 19 nt, Homo sapiens
  misc_RNA (1)...(19): siRNA sense strand
gguggaggccuuugacuuu

SEQ ID NO: 418959 - RNA, 19 nt, Homo sapiens
  misc_RNA (1)...(19): siRNA sense strand
ggaagacacgccaacacua

SEQ ID NO: 418960 - RNA, 19 nt, Homo sapiens
  misc_RNA (1)...(19): siRNA sense strand
ucaacaaaguggucuacaa

SEQ ID NO: 418961 - RNA, 19 nt, Homo sapiens
  misc_RNA (1)...(19): siRNA sense strand
ggaaguuucaguacaaaga

SEQ ID NO: 418962 - RNA, 19 nt, Homo sapiens
  misc_RNA (1)...(19): siRNA sense strand
ccacaaagacggccacugu

SEQ ID NO: 418963 - RNA, 19 nt, Homo sapiens
  misc_RNA (1)...(19): siRNA sense strand
ggaaacagugugauugguu

SEQ ID NO: 418964 - RNA, 19 nt, Homo sapiens
  misc_RNA (1)...(19): siRNA sense strand
cauagagaaugucuuugaa

SEQ ID NO: 418965 - RNA, 19 nt, Homo sapiens
  misc_RNA (1)...(19): siRNA sense strand
gauaggagaacaaggcauu

SEQ ID NO: 418966 - RNA, 19 nt, Homo sapiens
  misc_RNA (1)...(19): siRNA sense strand
aagaggagauguugggauu

SEQ ID NO: 418967 - RNA, 19 nt, Homo sapiens
  misc_RNA (1)...(19): siRNA sense strand
gacauucuguuccucuuug

SEQ ID NO: 418968 - RNA, 19 nt, Homo sapiens
  misc_RNA (1)...(19): siRNA sense strand
uaaaugcccuugcuguuac

SEQ ID NO: 418969 - RNA, 19 nt, Homo sapiens
  misc_RNA (1)...(19): siRNA sense strand
gauaaaugcccuugcuguu

SEQ ID NO: 418970 - RNA, 19 nt, Homo sapiens
  misc_RNA (1)...(19): siRNA sense strand
ggaaagauagcguccaaca

SEQ ID NO: 418971 - RNA, 19 nt, Homo sapiens
  misc_RNA (1)...(19): siRNA sense strand
cagagagcuucccaacaua

SEQ ID NO: 418972 - RNA, 19 nt, Homo sapiens
  misc_RNA (1)...(19): siRNA sense strand
gaagagggcgucccacagu

SEQ ID NO: 418973 - RNA, 19 nt, Homo sapiens
  misc_RNA (1)...(19): siRNA sense strand
caucaacgcuuugcagauc

SEQ ID NO: 418974 - RNA, 19 nt, Homo sapiens
  misc_RNA (1)...(19): siRNA sense strand
gaaaggagaaagaggagau

SEQ ID NO: 418975 - RNA, 19 nt, Homo sapiens
  misc_RNA (1)...(19): siRNA sense strand
ggugguaagucccuagaug

SEQ ID NO: 418976 - RNA, 19 nt, Homo sapiens
  misc_RNA (1)...(19): siRNA sense strand
acaaguaaauguuccgaau

SEQ ID NO: 418977 - RNA, 19 nt, Homo sapiens
  misc_RNA (1)...(19): siRNA sense strand
gaugcgagauguggucuug

SEQ ID NO: 418978 - RNA, 19 nt, Homo sapiens
  misc_RNA (1)...(19): siRNA sense strand
uccaaagcaucaaagauaa

SEQ ID NO: 418979 - RNA, 19 nt, Homo sapiens
  misc_RNA (1)...(19): siRNA sense strand
gggcgaggguuuauguaug

SEQ ID NO: 418980 - RNA, 19 nt, Homo sapiens
  misc_RNA (1)...(19): siRNA sense strand
ugaagagaaugaagaucaa

SEQ ID NO: 418981 - RNA, 19 nt, Homo sapiens
  misc_RNA (1)...(19): siRNA sense strand
ccacggaaguuucaguaca

SEQ ID NO: 418982 - RNA, 19 nt, Homo sapiens
  misc_RNA (1)...(19): siRNA sense strand
acaaagccugugacuauua

SEQ ID NO: 418983 - RNA, 19 nt, Homo sapiens
  misc_RNA (1)...(19): siRNA sense strand
ccaccacccuguuccaguu

SEQ ID NO: 418984 - RNA, 19 nt, Homo sapiens
  misc_RNA (1)...(19): siRNA sense strand
gagaggacccaaaggagaa

SEQ ID NO: 418985 - RNA, 19 nt, Homo sapiens
  misc_RNA (1)...(19): siRNA sense strand
gguggaagaugcacaggau

SEQ ID NO: 418986 - RNA, 19 nt, Homo sapiens
  misc_RNA (1)...(19): siRNA sense strand
gaagggcgaaguaggagaa

SEQ ID NO: 418987 - RNA, 19 nt, Homo sapiens
  misc_RNA (1)...(19): siRNA sense strand
aaagaaccuugugaaguuu

SEQ ID NO: 418988 - RNA, 19 nt, Homo sapiens
  misc_RNA (1)...(19): siRNA sense strand
gcucugcucuagacuuugu

SEQ ID NO: 418989 - RNA, 19 nt, Homo sapiens
  misc_RNA (1)...(19): siRNA sense strand
ccauagagaaugucuuuga

SEQ ID NO: 418990 - RNA, 19 nt, Homo sapiens
  misc_RNA (1)...(19): siRNA sense strand
gcagggaaccagggccuua

SEQ ID NO: 418991 - RNA, 19 nt, Homo sapiens
  misc_RNA (1)...(19): siRNA sense strand
cgacauggcuuucaucuua

SEQ ID NO: 418992 - RNA, 19 nt, Homo sapiens
  misc_RNA (1)...(19): siRNA sense strand
caaagaaccuugugaaguu

SEQ ID NO: 418993 - RNA, 19 nt, Homo sapiens
  misc_RNA (1)...(19): siRNA sense strand
ggacuuggauuaugaacua

SEQ ID NO: 418994 - RNA, 19 nt, Homo sapiens
  misc_RNA (1)...(19): siRNA sense strand
ucaaugagaugaagaagua

SEQ ID NO: 418995 - RNA, 19 nt, Homo sapiens
  misc_RNA (1)...(19): siRNA sense strand
caacaaagccugugacuau

SEQ ID NO: 418996 - RNA, 19 nt, Homo sapiens
  misc_RNA (1)...(19): siRNA sense strand
ggagagaccucacagacuu

SEQ ID NO: 418997 - RNA, 19 nt, Homo sapiens
  misc_RNA (1)...(19): siRNA sense strand
ggacacaguuuaugaagau

SEQ ID NO: 418998 - RNA, 19 nt, Homo sapiens
  misc_RNA (1)...(19): siRNA sense strand
ggaggagguuggaaagaua

SEQ ID NO: 418999 - RNA, 19 nt, Homo sapiens
  misc_RNA (1)...(19): siRNA sense strand
gauguggucuugaguauug

SEQ ID NO: 419000 - RNA, 19 nt, Homo sapiens
  misc_RNA (1)...(19): siRNA sense strand
gaaagggaauccuggaaga

SEQ ID NO: 419001 - RNA, 19 nt, Homo sapiens
  misc_RNA (1)...(19): siRNA sense strand
gaacggcacucaagguuuc

SEQ ID NO: 419002 - RNA, 19 nt, Homo sapiens
  misc_RNA (1)...(19): siRNA sense strand
gcagggauuucauauuaaa

SEQ ID NO: 419003 - RNA, 19 nt, Homo sapiens
  misc_RNA (1)...(19): siRNA sense strand
gaauugcgguggcucagua

SEQ ID NO: 419004 - RNA, 19 nt, Homo sapiens
  misc_RNA (1)...(19): siRNA sense strand
gaagaaagcagacauugug

SEQ ID NO: 419005 - RNA, 19 nt, Homo sapiens
  misc_RNA (1)...(19): siRNA sense strand
uugcagggauuucauauua

SEQ ID NO: 419006 - RNA, 19 nt, Homo sapiens
  misc_RNA (1)...(19): siRNA sense strand
gaacuagccuuugcuuuag

SEQ ID NO: 419007 - RNA, 19 nt, Homo sapiens
  misc_RNA (1)...(19): siRNA sense strand
gcaggaaggugaacaucaa

SEQ ID NO: 419008 - RNA, 19 nt, Homo sapiens
  misc_RNA (1)...(19): siRNA sense strand
gaaagaguuuguccagaga

SEQ ID NO: 419009 - RNA, 19 nt, Homo sapiens
  misc_RNA (1)...(19): siRNA sense strand
gaagacacgccaacacuaa

SEQ ID NO: 419010 - RNA, 19 nt, Homo sapiens
  misc_RNA (1)...(19): siRNA sense strand
gaaggaacuugcagggauu

SEQ ID NO: 419011 - RNA, 19 nt, Homo sapiens
  misc_RNA (1)...(19): siRNA sense strand
gaagagaagcagcauaaug

SEQ ID NO: 419012 - RNA, 19 nt, Homo sapiens
  misc_RNA (1)...(19): siRNA sense strand
ucagagagcuucccaacau

SEQ ID NO: 419013 - RNA, 19 nt, Homo sapiens
  misc_RNA (1)...(19): siRNA sense strand
gaaagaaugugaaaagguu

SEQ ID NO: 419014 - RNA, 19 nt, Homo sapiens
  misc_RNA (1)...(19): siRNA sense strand
caacaaaguggucuacaaa

SEQ ID NO: 419015 - RNA, 19 nt, Homo sapiens
  misc_RNA (1)...(19): siRNA sense strand
gacuuucucuacaagauua

SEQ ID NO: 419016 - RNA, 19 nt, Homo sapiens
  misc_RNA (1)...(19): siRNA sense strand
agaacuagccuuugcuuua

SEQ ID NO: 419017 - RNA, 19 nt, Homo sapiens
  misc_RNA (1)...(19): siRNA sense strand
guacagcgaugaugucaag

SEQ ID NO: 419018 - RNA, 19 nt, Homo sapiens
  misc_RNA (1)...(19): siRNA sense strand
gaacaagggugccgaucag

SEQ ID NO: 419019 - RNA, 19 nt, Homo sapiens
  misc_RNA (1)...(19): siRNA sense strand
caacagaacuagccuuugc

SEQ ID NO: 419020 - RNA, 19 nt, Homo sapiens
  misc_RNA (1)...(19): siRNA sense strand
caacauagaagaaagaauc

SEQ ID NO: 419021 - RNA, 19 nt, Homo sapiens
  misc_RNA (1)...(19): siRNA sense strand
gcucuagacuuuguucgua

SEQ ID NO: 419022 - RNA, 19 nt, Homo sapiens
  misc_RNA (1)...(19): siRNA sense strand
cgacgucuucuucaaauua

SEQ ID NO: 419023 - RNA, 19 nt, Homo sapiens
  misc_RNA (1)...(19): siRNA sense strand
gagauguggucuugaguau

SEQ ID NO: 419024 - RNA, 19 nt, Homo sapiens
  misc_RNA (1)...(19): siRNA sense strand
guaagucccuagaugaaau

SEQ ID NO: 419025 - RNA, 19 nt, Homo sapiens
  misc_RNA (1)...(19): siRNA sense strand
gcuaaugcaucuggaguuu

SEQ ID NO: 419026 - RNA, 19 nt, Homo sapiens
  misc_RNA (1)...(19): siRNA sense strand
gaagaagaaagcagacauu

SEQ ID NO: 419027 - RNA, 19 nt, Homo sapiens
  misc_RNA (1)...(19): siRNA sense strand
uagagaggcugguugacua

SEQ ID NO: 419028 - RNA, 19 nt, Homo sapiens
  misc_RNA (1)...(19): siRNA sense strand
gaaaucggacaggaucuua

SEQ ID NO: 419029 - RNA, 19 nt, Homo sapiens
  misc_RNA (1)...(19): siRNA sense strand
caaagccugugacuauuau

SEQ ID NO: 419030 - RNA, 19 nt, Homo sapiens
  misc_RNA (1)...(19): siRNA sense strand
cgaauaacguuacuucaag

SEQ ID NO: 419031 - RNA, 19 nt, Homo sapiens
  misc_RNA (1)...(19): siRNA sense strand
gaaagcagacauuguguuc

SEQ ID NO: 419032 - RNA, 19 nt, Homo sapiens
  misc_RNA (1)...(19): siRNA sense strand
gggcucugcucuagacuuu

SEQ ID NO: 419033 - RNA, 19 nt, Homo sapiens
  misc_RNA (1)...(19): siRNA sense strand
gaggaaacaucggcacuug

SEQ ID NO: 419034 - RNA, 19 nt, Homo sapiens
  misc_RNA (1)...(19): siRNA sense strand
gaaauaguggacacaguuu

SEQ ID NO: 419035 - RNA, 19 nt, Homo sapiens
  misc_RNA (1)...(19): siRNA sense strand
gaucgaggauggagugcuu

SEQ ID NO: 419036 - RNA, 19 nt, Homo sapiens
  misc_RNA (1)...(19): siRNA sense strand
caaacgacgucuucuucaa

SEQ ID NO: 419037 - RNA, 19 nt, Homo sapiens
  misc_RNA (1)...(19): siRNA sense strand
gaaccugggcuaaauggaa

SEQ ID NO: 419038 - RNA, 19 nt, Homo sapiens
  misc_RNA (1)...(19): siRNA sense strand
cagagaugcucgagaaguu

SEQ ID NO: 419039 - RNA, 19 nt, Homo sapiens
  misc_RNA (1)...(19): siRNA sense strand
gaagaaagaaucaugaacu

SEQ ID NO: 419040 - RNA, 19 nt, Homo sapiens
  misc_RNA (1)...(19): siRNA sense strand
cagagucgcuucccaagau

SEQ ID NO: 419041 - RNA, 19 nt, Homo sapiens
  misc_RNA (1)...(19): siRNA sense strand
caacgaagccggugacuac

SEQ ID NO: 419042 - RNA, 19 nt, Homo sapiens
  misc_RNA (1)...(19): siRNA sense strand
ucacagacuuccuggagaa

SEQ ID NO: 419043 - RNA, 19 nt, Homo sapiens
  misc_RNA (1)...(19): siRNA sense strand
acggagaucuggcugauuu

SEQ ID NO: 419044 - RNA, 19 nt, Homo sapiens
  misc_RNA (1)...(19): siRNA sense strand
gaacagaaucagccagaug

SEQ ID NO: 419045 - RNA, 19 nt, Homo sapiens
  misc_RNA (1)...(19): siRNA sense strand
gcaaugcccuggaguacgu

SEQ ID NO: 419046 - RNA, 19 nt, Homo sapiens
  misc_RNA (1)...(19): siRNA sense strand
ucacagagaugcagaccau

SEQ ID NO: 419047 - RNA, 19 nt, Homo sapiens
  misc_RNA (1)...(19): siRNA sense strand
ucgaugagcucaaugugaa

SEQ ID NO: 419048 - RNA, 19 nt, Homo sapiens
  misc_RNA (1)...(19): siRNA sense strand
acaaagacggccacuguua

SEQ ID NO: 419049 - RNA, 19 nt, Homo sapiens
  misc_RNA (1)...(19): siRNA sense strand
ugacaacauugccgagaaa

SEQ ID NO: 419050 - RNA, 19 nt, Homo sapiens
  misc_RNA (1)...(19): siRNA sense strand
ccaagaggcagauuauuga

SEQ ID NO: 419051 - RNA, 19 nt, Homo sapiens
  misc_RNA (1)...(19): siRNA sense strand
ucuacaagauuaucgauga

SEQ ID NO: 419052 - RNA, 19 nt, Homo sapiens
  misc_RNA (1)...(19): siRNA sense strand
ggagagaggacccaaagga

SEQ ID NO: 419053 - RNA, 19 nt, Homo sapiens
  misc_RNA (1)...(19): siRNA sense strand
ggcgaggguuuauguauga

SEQ ID NO: 419054 - RNA, 19 nt, Homo sapiens
  misc_RNA (1)...(19): siRNA sense strand
ggaccaggcccgaguucua

SEQ ID NO: 419055 - RNA, 19 nt, Homo sapiens
  misc_RNA (1)...(19): siRNA sense strand
caaguaaauguuccgaaua

SEQ ID NO: 419056 - RNA, 19 nt, Homo sapiens
  misc_RNA (1)...(19): siRNA sense strand
cagagaggcugugcucaaa

SEQ ID NO: 419057 - RNA, 19 nt, Homo sapiens
  misc_RNA (1)...(19): siRNA sense strand
ggagaaagaggagauguug

SEQ ID NO: 419058 - RNA, 19 nt, Homo sapiens
  misc_RNA (1)...(19): siRNA sense strand
gguggaggccuuugacuuu

SEQ ID NO: 419059 - RNA, 19 nt, Homo sapiens
  misc_RNA (1)...(19): siRNA sense strand
ggaagacacgccaacacua

SEQ ID NO: 419060 - RNA, 19 nt, Homo sapiens
  misc_RNA (1)...(19): siRNA sense strand
ucaacaaaguggucuacaa

SEQ ID NO: 419061 - RNA, 19 nt, Homo sapiens
  misc_RNA (1)...(19): siRNA sense strand
ggaaguuucaguacaaaga

SEQ ID NO: 419062 - RNA, 19 nt, Homo sapiens
  misc_RNA (1)...(19): siRNA sense strand
ccacaaagacggccacugu

SEQ ID NO: 419063 - RNA, 19 nt, Homo sapiens
  misc_RNA (1)...(19): siRNA sense strand
ggaaacagugugauugguu

SEQ ID NO: 419064 - RNA, 19 nt, Homo sapiens
  misc_RNA (1)...(19): siRNA sense strand
cauagagaaugucuuugaa

SEQ ID NO: 419065 - RNA, 19 nt, Homo sapiens
  misc_RNA (1)...(19): siRNA sense strand
gauaggagaacaaggcauu

SEQ ID NO: 419066 - RNA, 19 nt, Homo sapiens
  misc_RNA (1)...(19): siRNA sense strand
aagaggagauguugggauu

SEQ ID NO: 419067 - RNA, 19 nt, Homo sapiens
  misc_RNA (1)...(19): siRNA sense strand
gacauucuguuccucuuug

SEQ ID NO: 419068 - RNA, 19 nt, Homo sapiens
  misc_RNA (1)...(19): siRNA sense strand
uaaaugcccuugcuguuac

SEQ ID NO: 419069 - RNA, 19 nt, Homo sapiens
  misc_RNA (1)...(19): siRNA sense strand
gauaaaugcccuugcuguu

SEQ ID NO: 419070 - RNA, 19 nt, Homo sapiens
  misc_RNA (1)...(19): siRNA sense strand
ggaaagauagcguccaaca

SEQ ID NO: 419071 - RNA, 19 nt, Homo sapiens
  misc_RNA (1)...(19): siRNA sense strand
cagagagcuucccaacaua

SEQ ID NO: 419072 - RNA, 19 nt, Homo sapiens
  misc_RNA (1)...(19): siRNA sense strand
gaagagggcgucccacagu

SEQ ID NO: 419073 - RNA, 19 nt, Homo sapiens
  misc_RNA (1)...(19): siRNA sense strand
caucaacgcuuugcagauc

SEQ ID NO: 419074 - RNA, 19 nt, Homo sapiens
  misc_RNA (1)...(19): siRNA sense strand
gaaaggagaaagaggagau

SEQ ID NO: 419075 - RNA, 19 nt, Homo sapiens
  misc_RNA (1)...(19): siRNA sense strand
ggugguaagucccuagaug

SEQ ID NO: 419076 - RNA, 19 nt, Homo sapiens
  misc_RNA (1)...(19): siRNA sense strand
acaaguaaauguuccgaau

SEQ ID NO: 419077 - RNA, 19 nt, Homo sapiens
  misc_RNA (1)...(19): siRNA sense strand
gaugcgagauguggucuug

SEQ ID NO: 419078 - RNA, 19 nt, Homo sapiens
  misc_RNA (1)...(19): siRNA sense strand
uccaaagcaucaaagauaa

SEQ ID NO: 419079 - RNA, 19 nt, Homo sapiens
  misc_RNA (1)...(19): siRNA sense strand
gggcgaggguuuauguaug

SEQ ID NO: 419080 - RNA, 19 nt, Homo sapiens
  misc_RNA (1)...(19): siRNA sense strand
ugaagagaaugaagaucaa

SEQ ID NO: 419081 - RNA, 19 nt, Homo sapiens
  misc_RNA (1)...(19): siRNA sense strand
ccacggaaguuucaguaca

SEQ ID NO: 419082 - RNA, 19 nt, Homo sapiens
  misc_RNA (1)...(19): siRNA sense strand
acaaagccugugacuauua

SEQ ID NO: 419083 - RNA, 19 nt, Homo sapiens
  misc_RNA (1)...(19): siRNA sense strand
ccaccacccuguuccaguu

SEQ ID NO: 419084 - RNA, 19 nt, Homo sapiens
  misc_RNA (1)...(19): siRNA sense strand
gagaggacccaaaggagaa

SEQ ID NO: 419085 - RNA, 19 nt, Homo sapiens
  misc_RNA (1)...(19): siRNA sense strand
gguggaagaugcacaggau

SEQ ID NO: 419086 - RNA, 19 nt, Homo sapiens
  misc_RNA (1)...(19): siRNA sense strand
gaagggcgaaguaggagaa

SEQ ID NO: 419087 - RNA, 19 nt, Homo sapiens
  misc_RNA (1)...(19): siRNA sense strand
aaagaaccuugugaaguuu

SEQ ID NO: 419088 - RNA, 19 nt, Homo sapiens
  misc_RNA (1)...(19): siRNA sense strand
gcucugcucuagacuuugu

SEQ ID NO: 419089 - RNA, 19 nt, Homo sapiens
  misc_RNA (1)...(19): siRNA sense strand
ccauagagaaugucuuuga

SEQ ID NO: 419090 - RNA, 19 nt, Homo sapiens
  misc_RNA (1)...(19): siRNA sense strand
gcagggaaccagggccuua

SEQ ID NO: 419091 - RNA, 19 nt, Homo sapiens
  misc_RNA (1)...(19): siRNA sense strand
cgacauggcuuucaucuua

SEQ ID NO: 419092 - RNA, 19 nt, Homo sapiens
  misc_RNA (1)...(19): siRNA sense strand
caaagaaccuugugaaguu

SEQ ID NO: 419093 - RNA, 19 nt, Homo sapiens
  misc_RNA (1)...(19): siRNA sense strand
ggacuuggauuaugaacua

SEQ ID NO: 419094 - RNA, 19 nt, Homo sapiens
  misc_RNA (1)...(19): siRNA sense strand
ucaaugagaugaagaagua

SEQ ID NO: 419095 - RNA, 19 nt, Homo sapiens
  misc_RNA (1)...(19): siRNA sense strand
caacaaagccugugacuau

SEQ ID NO: 419096 - RNA, 19 nt, Homo sapiens
  misc_RNA (1)...(19): siRNA sense strand
ggagagaccucacagacuu

SEQ ID NO: 419097 - RNA, 19 nt, Homo sapiens
  misc_RNA (1)...(19): siRNA sense strand
ggacacaguuuaugaagau

SEQ ID NO: 419098 - RNA, 19 nt, Homo sapiens
  misc_RNA (1)...(19): siRNA sense strand
ggaggagguuggaaagaua

SEQ ID NO: 419099 - RNA, 19 nt, Homo sapiens
  misc_RNA (1)...(19): siRNA sense strand
gauguggucuugaguauug

SEQ ID NO: 419100 - RNA, 19 nt, Homo sapiens
  misc_RNA (1)...(19): siRNA sense strand
gaaagggaauccuggaaga

SEQ ID NO: 419101 - RNA, 19 nt, Homo sapiens
  misc_RNA (1)...(19): siRNA sense strand
gaacggcacucaagguuuc

SEQ ID NO: 419102 - RNA, 19 nt, Homo sapiens
  misc_RNA (1)...(19): siRNA sense strand
gcagggauuucauauuaaa

SEQ ID NO: 419103 - RNA, 19 nt, Homo sapiens
  misc_RNA (1)...(19): siRNA sense strand
gaauugcgguggcucagua

SEQ ID NO: 419104 - RNA, 19 nt, Homo sapiens
  misc_RNA (1)...(19): siRNA sense strand
gaagaaagcagacauugug

SEQ ID NO: 419105 - RNA, 19 nt, Homo sapiens
  misc_RNA (1)...(19): siRNA sense strand
uugcagggauuucauauua

SEQ ID NO: 419106 - RNA, 19 nt, Homo sapiens
  misc_RNA (1)...(19): siRNA sense strand
gaacuagccuuugcuuuag

SEQ ID NO: 419107 - RNA, 19 nt, Homo sapiens
  misc_RNA (1)...(19): siRNA sense strand
gcaggaaggugaacaucaa

SEQ ID NO: 419108 - RNA, 19 nt, Homo sapiens
  misc_RNA (1)...(19): siRNA sense strand
gaaagaguuuguccagaga

SEQ ID NO: 419109 - RNA, 19 nt, Homo sapiens
  misc_RNA (1)...(19): siRNA sense strand
gaagacacgccaacacuaa

SEQ ID NO: 419110 - RNA, 19 nt, Homo sapiens
  misc_RNA (1)...(19): siRNA sense strand
gaaggaacuugcagggauu

SEQ ID NO: 419111 - RNA, 19 nt, Homo sapiens
  misc_RNA (1)...(19): siRNA sense strand
gaagagaagcagcauaaug

SEQ ID NO: 419112 - RNA, 19 nt, Homo sapiens
  misc_RNA (1)...(19): siRNA sense strand
ucagagagcuucccaacau

SEQ ID NO: 419113 - RNA, 19 nt, Homo sapiens
  misc_RNA (1)...(19): siRNA sense strand
gaaagaaugugaaaagguu

SEQ ID NO: 419114 - RNA, 19 nt, Homo sapiens
  misc_RNA (1)...(19): siRNA sense strand
caacaaaguggucuacaaa

SEQ ID NO: 419115 - RNA, 19 nt, Homo sapiens
  misc_RNA (1)...(19): siRNA sense strand
gacuuucucuacaagauua

SEQ ID NO: 419116 - RNA, 19 nt, Homo sapiens
  misc_RNA (1)...(19): siRNA sense strand
agaacuagccuuugcuuua

SEQ ID NO: 419117 - RNA, 19 nt, Homo sapiens
  misc_RNA (1)...(19): siRNA sense strand
guacagcgaugaugucaag

SEQ ID NO: 419118 - RNA, 19 nt, Homo sapiens
  misc_RNA (1)...(19): siRNA sense strand
gaacaagggugccgaucag

SEQ ID NO: 419119 - RNA, 19 nt, Homo sapiens
  misc_RNA (1)...(19): siRNA sense strand
caacagaacuagccuuugc

SEQ ID NO: 419120 - RNA, 19 nt, Homo sapiens
  misc_RNA (1)...(19): siRNA sense strand
caacauagaagaaagaauc

SEQ ID NO: 419121 - RNA, 19 nt, Homo sapiens
  misc_RNA (1)...(19): siRNA sense strand
gcucuagacuuuguucgua

SEQ ID NO: 419122 - RNA, 19 nt, Homo sapiens
  misc_RNA (1)...(19): siRNA sense strand
cgacgucuucuucaaauua

SEQ ID NO: 419123 - RNA, 19 nt, Homo sapiens
  misc_RNA (1)...(19): siRNA sense strand
gagauguggucuugaguau

SEQ ID NO: 419124 - RNA, 19 nt, Homo sapiens
  misc_RNA (1)...(19): siRNA sense strand
guaagucccuagaugaaau

SEQ ID NO: 419125 - RNA, 19 nt, Homo sapiens
  misc_RNA (1)...(19): siRNA sense strand
gcuaaugcaucuggaguuu

SEQ ID NO: 419126 - RNA, 19 nt, Homo sapiens
  misc_RNA (1)...(19): siRNA sense strand
gaagaagaaagcagacauu

SEQ ID NO: 419127 - RNA, 19 nt, Homo sapiens
  misc_RNA (1)...(19): siRNA sense strand
uagagaggcugguugacua

SEQ ID NO: 419128 - RNA, 19 nt, Homo sapiens
  misc_RNA (1)...(19): siRNA sense strand
gaaaucggacaggaucuua

SEQ ID NO: 419129 - RNA, 19 nt, Homo sapiens
  misc_RNA (1)...(19): siRNA sense strand
caaagccugugacuauuau

SEQ ID NO: 419130 - RNA, 19 nt, Homo sapiens
  misc_RNA (1)...(19): siRNA sense strand
cgaauaacguuacuucaag

SEQ ID NO: 419131 - RNA, 19 nt, Homo sapiens
  misc_RNA (1)...(19): siRNA sense strand
gaaagcagacauuguguuc

SEQ ID NO: 419132 - RNA, 19 nt, Homo sapiens
  misc_RNA (1)...(19): siRNA sense strand
gggcucugcucuagacuuu

SEQ ID NO: 419133 - RNA, 19 nt, Homo sapiens
  misc_RNA (1)...(19): siRNA sense strand
gaggaaacaucggcacuug

SEQ ID NO: 419134 - RNA, 19 nt, Homo sapiens
  misc_RNA (1)...(19): siRNA sense strand
gaaauaguggacacaguuu

SEQ ID NO: 419135 - RNA, 19 nt, Homo sapiens
  misc_RNA (1)...(19): siRNA sense strand
gaucgaggauggagugcuu

SEQ ID NO: 419136 - RNA, 19 nt, Homo sapiens
  misc_RNA (1)...(19): siRNA sense strand
caaacgacgucuucuucaa

SEQ ID NO: 419137 - RNA, 19 nt, Homo sapiens
  misc_RNA (1)...(19): siRNA sense strand
gaaccugggcuaaauggaa

SEQ ID NO: 419138 - RNA, 19 nt, Homo sapiens
  misc_RNA (1)...(19): siRNA sense strand
cagagaugcucgagaaguu

SEQ ID NO: 419139 - RNA, 19 nt, Homo sapiens
  misc_RNA (1)...(19): siRNA sense strand
gaagaaagaaucaugaacu

SEQ ID NO: 419140 - RNA, 19 nt, Homo sapiens
  misc_RNA (1)...(19): siRNA sense strand
cagagucgcuucccaagau

SEQ ID NO: 419141 - RNA, 19 nt, Homo sapiens
  misc_RNA (1)...(19): siRNA sense strand
caacgaagccggugacuac

SEQ ID NO: 419142 - RNA, 19 nt, Homo sapiens
  misc_RNA (1)...(19): siRNA sense strand
ucacagacuuccuggagaa

SEQ ID NO: 419143 - RNA, 19 nt, Homo sapiens
  misc_RNA (1)...(19): siRNA sense strand
acggagaucuggcugauuu

SEQ ID NO: 419144 - RNA, 19 nt, Homo sapiens
  misc_RNA (1)...(19): siRNA sense strand
gaacagaaucagccagaug

SEQ ID NO: 419145 - RNA, 19 nt, Homo sapiens
  misc_RNA (1)...(19): siRNA sense strand
gcaaugcccuggaguacgu

SEQ ID NO: 419146 - RNA, 19 nt, Homo sapiens
  misc_RNA (1)...(19): siRNA sense strand
ucacagagaugcagaccau

SEQ ID NO: 419147 - RNA, 19 nt, Homo sapiens
  misc_RNA (1)...(19): siRNA sense strand
ucgaugagcucaaugugaa

SEQ ID NO: 419148 - RNA, 19 nt, Homo sapiens
  misc_RNA (1)...(19): siRNA sense strand
acaaagacggccacuguua

SEQ ID NO: 419149 - RNA, 19 nt, Homo sapiens
  misc_RNA (1)...(19): siRNA sense strand
ugacaacauugccgagaaa

SEQ ID NO: 419150 - RNA, 19 nt, Homo sapiens
  misc_RNA (1)...(19): siRNA sense strand
ccaagaggcagauuauuga

SEQ ID NO: 419151 - RNA, 19 nt, Homo sapiens
  misc_RNA (1)...(19): siRNA sense strand
ucuacaagauuaucgauga

SEQ ID NO: 419152 - RNA, 19 nt, Homo sapiens
  misc_RNA (1)...(19): siRNA sense strand
ggagagaggacccaaagga

SEQ ID NO: 419153 - RNA, 19 nt, Homo sapiens
  misc_RNA (1)...(19): siRNA sense strand
ggcgaggguuuauguauga

SEQ ID NO: 419154 - RNA, 19 nt, Homo sapiens
  misc_RNA (1)...(19): siRNA sense strand
ggaccaggcccgaguucua

SEQ ID NO: 419155 - RNA, 19 nt, Homo sapiens
  misc_RNA (1)...(19): siRNA sense strand
caaguaaauguuccgaaua

SEQ ID NO: 419156 - RNA, 19 nt, Homo sapiens
  misc_RNA (1)...(19): siRNA sense strand
cagagaggcugugcucaaa

SEQ ID NO: 419157 - RNA, 19 nt, Homo sapiens
  misc_RNA (1)...(19): siRNA sense strand
ggagaaagaggagauguug

SEQ ID NO: 419158 - RNA, 19 nt, Homo sapiens
  misc_RNA (1)...(19): siRNA sense strand
gguggaggccuuugacuuu

SEQ ID NO: 419159 - RNA, 19 nt, Homo sapiens
  misc_RNA (1)...(19): siRNA sense strand
ggaagacacgccaacacua

SEQ ID NO: 419160 - RNA, 19 nt, Homo sapiens
  misc_RNA (1)...(19): siRNA sense strand
ucaacaaaguggucuacaa

SEQ ID NO: 419161 - RNA, 19 nt, Homo sapiens
  misc_RNA (1)...(19): siRNA sense strand
ggaaguuucaguacaaaga

SEQ ID NO: 419162 - RNA, 19 nt, Homo sapiens
  misc_RNA (1)...(19): siRNA sense strand
ccacaaagacggccacugu

SEQ ID NO: 419163 - RNA, 19 nt, Homo sapiens
  misc_RNA (1)...(19): siRNA sense strand
ggaaacagugugauugguu

SEQ ID NO: 419164 - RNA, 19 nt, Homo sapiens
  misc_RNA (1)...(19): siRNA sense strand
cauagagaaugucuuugaa

SEQ ID NO: 419165 - RNA, 19 nt, Homo sapiens
  misc_RNA (1)...(19): siRNA sense strand
gauaggagaacaaggcauu

SEQ ID NO: 419166 - RNA, 19 nt, Homo sapiens
  misc_RNA (1)...(19): siRNA sense strand
aagaggagauguugggauu

SEQ ID NO: 419167 - RNA, 19 nt, Homo sapiens
  misc_RNA (1)...(19): siRNA sense strand
gacauucuguuccucuuug

SEQ ID NO: 419168 - RNA, 19 nt, Homo sapiens
  misc_RNA (1)...(19): siRNA sense strand
uaaaugcccuugcuguuac

SEQ ID NO: 419169 - RNA, 19 nt, Homo sapiens
  misc_RNA (1)...(19): siRNA sense strand
gauaaaugcccuugcuguu

SEQ ID NO: 419170 - RNA, 19 nt, Homo sapiens
  misc_RNA (1)...(19): siRNA sense strand
ggaaagauagcguccaaca

SEQ ID NO: 419171 - RNA, 19 nt, Homo sapiens
  misc_RNA (1)...(19): siRNA sense strand
cagagagcuucccaacaua

SEQ ID NO: 419172 - RNA, 19 nt, Homo sapiens
  misc_RNA (1)...(19): siRNA sense strand
gaagagggcgucccacagu

SEQ ID NO: 419173 - RNA, 19 nt, Homo sapiens
  misc_RNA (1)...(19): siRNA sense strand
caucaacgcuuugcagauc

SEQ ID NO: 419174 - RNA, 19 nt, Homo sapiens
  misc_RNA (1)...(19): siRNA sense strand
gaaaggagaaagaggagau

SEQ ID NO: 419175 - RNA, 19 nt, Homo sapiens
  misc_RNA (1)...(19): siRNA sense strand
ggugguaagucccuagaug

SEQ ID NO: 419176 - RNA, 19 nt, Homo sapiens
  misc_RNA (1)...(19): siRNA sense strand
acaaguaaauguuccgaau

SEQ ID NO: 419177 - RNA, 19 nt, Homo sapiens
  misc_RNA (1)...(19): siRNA sense strand
gaugcgagauguggucuug

SEQ ID NO: 419178 - RNA, 19 nt, Homo sapiens
  misc_RNA (1)...(19): siRNA sense strand
uccaaagcaucaaagauaa

SEQ ID NO: 419179 - RNA, 19 nt, Homo sapiens
  misc_RNA (1)...(19): siRNA sense strand
gggcgaggguuuauguaug

SEQ ID NO: 419180 - RNA, 19 nt, Homo sapiens
  misc_RNA (1)...(19): siRNA sense strand
ugaagagaaugaagaucaa

SEQ ID NO: 419181 - RNA, 19 nt, Homo sapiens
  misc_RNA (1)...(19): siRNA sense strand
ccacggaaguuucaguaca

SEQ ID NO: 419182 - RNA, 19 nt, Homo sapiens
  misc_RNA (1)...(19): siRNA sense strand
acaaagccugugacuauua

SEQ ID NO: 419183 - RNA, 19 nt, Homo sapiens
  misc_RNA (1)...(19): siRNA sense strand
ccaccacccuguuccaguu

SEQ ID NO: 419184 - RNA, 19 nt, Homo sapiens
  misc_RNA (1)...(19): siRNA sense strand
gagaggacccaaaggagaa

SEQ ID NO: 419185 - RNA, 19 nt, Homo sapiens
  misc_RNA (1)...(19): siRNA sense strand
gguggaagaugcacaggau

SEQ ID NO: 419186 - RNA, 19 nt, Homo sapiens
  misc_RNA (1)...(19): siRNA sense strand
gaagggcgaaguaggagaa

SEQ ID NO: 419187 - RNA, 19 nt, Homo sapiens
  misc_RNA (1)...(19): siRNA sense strand
aaagaaccuugugaaguuu

SEQ ID NO: 419188 - RNA, 19 nt, Homo sapiens
  misc_RNA (1)...(19): siRNA sense strand
gcucugcucuagacuuugu

SEQ ID NO: 419189 - RNA, 19 nt, Homo sapiens
  misc_RNA (1)...(19): siRNA sense strand
ccauagagaaugucuuuga

SEQ ID NO: 419190 - RNA, 19 nt, Homo sapiens
  misc_RNA (1)...(19): siRNA sense strand
gcagggaaccagggccuua

SEQ ID NO: 419191 - RNA, 19 nt, Homo sapiens
  misc_RNA (1)...(19): siRNA sense strand
cgacauggcuuucaucuua

SEQ ID NO: 419192 - RNA, 19 nt, Homo sapiens
  misc_RNA (1)...(19): siRNA sense strand
caaagaaccuugugaaguu

SEQ ID NO: 419193 - RNA, 19 nt, Homo sapiens
  misc_RNA (1)...(19): siRNA sense strand
ggacuuggauuaugaacua

SEQ ID NO: 419194 - RNA, 19 nt, Homo sapiens
  misc_RNA (1)...(19): siRNA sense strand
ucaaugagaugaagaagua

SEQ ID NO: 419195 - RNA, 19 nt, Homo sapiens
  misc_RNA (1)...(19): siRNA sense strand
caacaaagccugugacuau

SEQ ID NO: 419196 - RNA, 19 nt, Homo sapiens
  misc_RNA (1)...(19): siRNA sense strand
ggagagaccucacagacuu

SEQ ID NO: 419197 - RNA, 19 nt, Homo sapiens
  misc_RNA (1)...(19): siRNA sense strand
ggacacaguuuaugaagau

SEQ ID NO: 419198 - RNA, 19 nt, Homo sapiens
  misc_RNA (1)...(19): siRNA sense strand
ggaggagguuggaaagaua

SEQ ID NO: 419199 - RNA, 19 nt, Homo sapiens
  misc_RNA (1)...(19): siRNA sense strand
gauguggucuugaguauug

SEQ ID NO: 419200 - RNA, 19 nt, Homo sapiens
  misc_RNA (1)...(19): siRNA sense strand
gaaagggaauccuggaaga

SEQ ID NO: 419201 - RNA, 19 nt, Homo sapiens
  misc_RNA (1)...(19): siRNA sense strand
gaacggcacucaagguuuc

SEQ ID NO: 419202 - RNA, 19 nt, Homo sapiens
  misc_RNA (1)...(19): siRNA sense strand
gcagggauuucauauuaaa

SEQ ID NO: 419203 - RNA, 19 nt, Homo sapiens
  misc_RNA (1)...(19): siRNA sense strand
gaauugcgguggcucagua

SEQ ID NO: 419204 - RNA, 19 nt, Homo sapiens
  misc_RNA (1)...(19): siRNA sense strand
gaagaaagcagacauugug

SEQ ID NO: 419205 - RNA, 19 nt, Homo sapiens
  misc_RNA (1)...(19): siRNA sense strand
uugcagggauuucauauua

SEQ ID NO: 419206 - RNA, 19 nt, Homo sapiens
  misc_RNA (1)...(19): siRNA sense strand
gaacuagccuuugcuuuag

SEQ ID NO: 419207 - RNA, 19 nt, Homo sapiens
  misc_RNA (1)...(19): siRNA sense strand
gcaggaaggugaacaucaa

SEQ ID NO: 419208 - RNA, 19 nt, Homo sapiens
  misc_RNA (1)...(19): siRNA sense strand
gaaagaguuuguccagaga

SEQ ID NO: 419209 - RNA, 19 nt, Homo sapiens
  misc_RNA (1)...(19): siRNA sense strand
gaagacacgccaacacuaa

SEQ ID NO: 419210 - RNA, 19 nt, Homo sapiens
  misc_RNA (1)...(19): siRNA sense strand
gaaggaacuugcagggauu

SEQ ID NO: 419211 - RNA, 19 nt, Homo sapiens
  misc_RNA (1)...(19): siRNA sense strand
gaagagaagcagcauaaug

SEQ ID NO: 419212 - RNA, 19 nt, Homo sapiens
  misc_RNA (1)...(19): siRNA sense strand
ucagagagcuucccaacau

SEQ ID NO: 419213 - RNA, 19 nt, Homo sapiens
  misc_RNA (1)...(19): siRNA sense strand
gaaagaaugugaaaagguu

SEQ ID NO: 419214 - RNA, 19 nt, Homo sapiens
  misc_RNA (1)...(19): siRNA sense strand
caacaaaguggucuacaaa

SEQ ID NO: 419215 - RNA, 19 nt, Homo sapiens
  misc_RNA (1)...(19): siRNA sense strand
gacuuucucuacaagauua

SEQ ID NO: 419216 - RNA, 19 nt, Homo sapiens
  misc_RNA (1)...(19): siRNA sense strand
agaacuagccuuugcuuua

SEQ ID NO: 419217 - RNA, 19 nt, Homo sapiens
  misc_RNA (1)...(19): siRNA sense strand
guacagcgaugaugucaag

SEQ ID NO: 419218 - RNA, 19 nt, Homo sapiens
  misc_RNA (1)...(19): siRNA sense strand
gaacaagggugccgaucag

SEQ ID NO: 419219 - RNA, 19 nt, Homo sapiens
  misc_RNA (1)...(19): siRNA sense strand
caacagaacuagccuuugc

SEQ ID NO: 419220 - RNA, 19 nt, Homo sapiens
  misc_RNA (1)...(19): siRNA sense strand
caacauagaagaaagaauc

SEQ ID NO: 419221 - RNA, 19 nt, Homo sapiens
  misc_RNA (1)...(19): siRNA sense strand
gcucuagacuuuguucgua

SEQ ID NO: 419222 - RNA, 19 nt, Homo sapiens
  misc_RNA (1)...(19): siRNA sense strand
cgacgucuucuucaaauua

SEQ ID NO: 419223 - RNA, 19 nt, Homo sapiens
  misc_RNA (1)...(19): siRNA sense strand
gagauguggucuugaguau

SEQ ID NO: 419224 - RNA, 19 nt, Homo sapiens
  misc_RNA (1)...(19): siRNA sense strand
guaagucccuagaugaaau

SEQ ID NO: 419225 - RNA, 19 nt, Homo sapiens
  misc_RNA (1)...(19): siRNA sense strand
gcuaaugcaucuggaguuu

SEQ ID NO: 419226 - RNA, 19 nt, Homo sapiens
  misc_RNA (1)...(19): siRNA sense strand
gaagaagaaagcagacauu

SEQ ID NO: 419227 - RNA, 19 nt, Homo sapiens
  misc_RNA (1)...(19): siRNA sense strand
uagagaggcugguugacua

SEQ ID NO: 419228 - RNA, 19 nt, Homo sapiens
  misc_RNA (1)...(19): siRNA sense strand
gaaaucggacaggaucuua

SEQ ID NO: 419229 - RNA, 19 nt, Homo sapiens
  misc_RNA (1)...(19): siRNA sense strand
caaagccugugacuauuau

SEQ ID NO: 419230 - RNA, 19 nt, Homo sapiens
  misc_RNA (1)...(19): siRNA sense strand
cgaauaacguuacuucaag

SEQ ID NO: 419231 - RNA, 19 nt, Homo sapiens
  misc_RNA (1)...(19): siRNA sense strand
gaaagcagacauuguguuc

SEQ ID NO: 419232 - RNA, 19 nt, Homo sapiens
  misc_RNA (1)...(19): siRNA sense strand
gggcucugcucuagacuuu

SEQ ID NO: 419233 - RNA, 19 nt, Homo sapiens
  misc_RNA (1)...(19): siRNA sense strand
gaggaaacaucggcacuug

SEQ ID NO: 419234 - RNA, 19 nt, Homo sapiens
  misc_RNA (1)...(19): siRNA sense strand
gaaauaguggacacaguuu

SEQ ID NO: 419235 - RNA, 19 nt, Homo sapiens
  misc_RNA (1)...(19): siRNA sense strand
gaucgaggauggagugcuu

SEQ ID NO: 419236 - RNA, 19 nt, Homo sapiens
  misc_RNA (1)...(19): siRNA sense strand
caaacgacgucuucuucaa

SEQ ID NO: 419237 - RNA, 19 nt, Homo sapiens
  misc_RNA (1)...(19): siRNA sense strand
gaaccugggcuaaauggaa

SEQ ID NO: 419238 - RNA, 19 nt, Homo sapiens
  misc_RNA (1)...(19): siRNA sense strand
cagagaugcucgagaaguu

SEQ ID NO: 419239 - RNA, 19 nt, Homo sapiens
  misc_RNA (1)...(19): siRNA sense strand
gaagaaagaaucaugaacu

SEQ ID NO: 419240 - RNA, 19 nt, Homo sapiens
  misc_RNA (1)...(19): siRNA sense strand
cagagucgcuucccaagau

SEQ ID NO: 419241 - RNA, 19 nt, Homo sapiens
  misc_RNA (1)...(19): siRNA sense strand
caacgaagccggugacuac

SEQ ID NO: 419242 - RNA, 19 nt, Homo sapiens
  misc_RNA (1)...(19): siRNA sense strand
ucacagacuuccuggagaa

SEQ ID NO: 419243 - RNA, 19 nt, Homo sapiens
  misc_RNA (1)...(19): siRNA sense strand
acggagaucuggcugauuu

SEQ ID NO: 419244 - RNA, 19 nt, Homo sapiens
  misc_RNA (1)...(19): siRNA sense strand
gaacagaaucagccagaug

SEQ ID NO: 419245 - RNA, 19 nt, Homo sapiens
  misc_RNA (1)...(19): siRNA sense strand
gcaaugcccuggaguacgu

SEQ ID NO: 419246 - RNA, 19 nt, Homo sapiens
  misc_RNA (1)...(19): siRNA sense strand
ucacagagaugcagaccau

SEQ ID NO: 419247 - RNA, 19 nt, Homo sapiens
  misc_RNA (1)...(19): siRNA sense strand
ucgaugagcucaaugugaa

SEQ ID NO: 419248 - RNA, 19 nt, Homo sapiens
  misc_RNA (1)...(19): siRNA sense strand
acaaagacggccacuguua

SEQ ID NO: 419249 - RNA, 19 nt, Homo sapiens
  misc_RNA (1)...(19): siRNA sense strand
ugacaacauugccgagaaa

SEQ ID NO: 419250 - RNA, 19 nt, Homo sapiens
  misc_RNA (1)...(19): siRNA sense strand
ccaagaggcagauuauuga

SEQ ID NO: 419251 - RNA, 19 nt, Homo sapiens
  misc_RNA (1)...(19): siRNA sense strand
ucuacaagauuaucgauga

SEQ ID NO: 419252 - RNA, 19 nt, Homo sapiens
  misc_RNA (1)...(19): siRNA sense strand
ggagagaggacccaaagga

SEQ ID NO: 419253 - RNA, 19 nt, Homo sapiens
  misc_RNA (1)...(19): siRNA sense strand
ggcgaggguuuauguauga

SEQ ID NO: 419254 - RNA, 19 nt, Homo sapiens
  misc_RNA (1)...(19): siRNA sense strand
ggaccaggcccgaguucua

SEQ ID NO: 419255 - RNA, 19 nt, Homo sapiens
  misc_RNA (1)...(19): siRNA sense strand
caaguaaauguuccgaaua

SEQ ID NO: 419256 - RNA, 19 nt, Homo sapiens
  misc_RNA (1)...(19): siRNA sense strand
cagagaggcugugcucaaa

SEQ ID NO: 419257 - RNA, 19 nt, Homo sapiens
  misc_RNA (1)...(19): siRNA sense strand
ggagaaagaggagauguug

SEQ ID NO: 419258 - RNA, 19 nt, Homo sapiens
  misc_RNA (1)...(19): siRNA sense strand
gguggaggccuuugacuuu

SEQ ID NO: 419259 - RNA, 19 nt, Homo sapiens
  misc_RNA (1)...(19): siRNA sense strand
ggaagacacgccaacacua

SEQ ID NO: 419260 - RNA, 19 nt, Homo sapiens
  misc_RNA (1)...(19): siRNA sense strand
ucaacaaaguggucuacaa

SEQ ID NO: 419261 - RNA, 19 nt, Homo sapiens
  misc_RNA (1)...(19): siRNA sense strand
ggaaguuucaguacaaaga

SEQ ID NO: 419262 - RNA, 19 nt, Homo sapiens
  misc_RNA (1)...(19): siRNA sense strand
ccacaaagacggccacugu

SEQ ID NO: 419263 - RNA, 19 nt, Homo sapiens
  misc_RNA (1)...(19): siRNA sense strand
ggaaacagugugauugguu

SEQ ID NO: 419264 - RNA, 19 nt, Homo sapiens
  misc_RNA (1)...(19): siRNA sense strand
cauagagaaugucuuugaa

SEQ ID NO: 419265 - RNA, 19 nt, Homo sapiens
  misc_RNA (1)...(19): siRNA sense strand
gauaggagaacaaggcauu

SEQ ID NO: 419266 - RNA, 19 nt, Homo sapiens
  misc_RNA (1)...(19): siRNA sense strand
aagaggagauguugggauu

SEQ ID NO: 419267 - RNA, 19 nt, Homo sapiens
  misc_RNA (1)...(19): siRNA sense strand
gacauucuguuccucuuug

SEQ ID NO: 419268 - RNA, 19 nt, Homo sapiens
  misc_RNA (1)...(19): siRNA sense strand
uaaaugcccuugcuguuac

SEQ ID NO: 419269 - RNA, 19 nt, Homo sapiens
  misc_RNA (1)...(19): siRNA sense strand
gauaaaugcccuugcuguu

SEQ ID NO: 419270 - RNA, 19 nt, Homo sapiens
  misc_RNA (1)...(19): siRNA sense strand
ggaaagauagcguccaaca

SEQ ID NO: 419271 - RNA, 19 nt, Homo sapiens
  misc_RNA (1)...(19): siRNA sense strand
cagagagcuucccaacaua

SEQ ID NO: 419272 - RNA, 19 nt, Homo sapiens
  misc_RNA (1)...(19): siRNA sense strand
gaagagggcgucccacagu

SEQ ID NO: 419273 - RNA, 19 nt, Homo sapiens
  misc_RNA (1)...(19): siRNA sense strand
caucaacgcuuugcagauc

SEQ ID NO: 419274 - RNA, 19 nt, Homo sapiens
  misc_RNA (1)...(19): siRNA sense strand
gaaaggagaaagaggagau

SEQ ID NO: 419275 - RNA, 19 nt, Homo sapiens
  misc_RNA (1)...(19): siRNA sense strand
ggugguaagucccuagaug

SEQ ID NO: 419276 - RNA, 19 nt, Homo sapiens
  misc_RNA (1)...(19): siRNA sense strand
acaaguaaauguuccgaau

SEQ ID NO: 419277 - RNA, 19 nt, Homo sapiens
  misc_RNA (1)...(19): siRNA sense strand
gaugcgagauguggucuug

SEQ ID NO: 419278 - RNA, 19 nt, Homo sapiens
  misc_RNA (1)...(19): siRNA sense strand
uccaaagcaucaaagauaa

SEQ ID NO: 419279 - RNA, 19 nt, Homo sapiens
  misc_RNA (1)...(19): siRNA sense strand
gggcgaggguuuauguaug

SEQ ID NO: 419280 - RNA, 19 nt, Homo sapiens
  misc_RNA (1)...(19): siRNA sense strand
ugaagagaaugaagaucaa

SEQ ID NO: 419281 - RNA, 19 nt, Homo sapiens
  misc_RNA (1)...(19): siRNA sense strand
ccacggaaguuucaguaca

SEQ ID NO: 419282 - RNA, 19 nt, Homo sapiens
  misc_RNA (1)...(19): siRNA sense strand
acaaagccugugacuauua

SEQ ID NO: 419283 - RNA, 19 nt, Homo sapiens
  misc_RNA (1)...(19): siRNA sense strand
ccaccacccuguuccaguu

SEQ ID NO: 419284 - RNA, 19 nt, Homo sapiens
  misc_RNA (1)...(19): siRNA sense strand
gagaggacccaaaggagaa

SEQ ID NO: 419285 - RNA, 19 nt, Homo sapiens
  misc_RNA (1)...(19): siRNA sense strand
gguggaagaugcacaggau

SEQ ID NO: 419286 - RNA, 19 nt, Homo sapiens
  misc_RNA (1)...(19): siRNA sense strand
gaagggcgaaguaggagaa

SEQ ID NO: 419287 - RNA, 19 nt, Homo sapiens
  misc_RNA (1)...(19): siRNA sense strand
aaagaaccuugugaaguuu

SEQ ID NO: 419288 - RNA, 19 nt, Homo sapiens
  misc_RNA (1)...(19): siRNA sense strand
gcucugcucuagacuuugu

SEQ ID NO: 419289 - RNA, 19 nt, Homo sapiens
  misc_RNA (1)...(19): siRNA sense strand
ccauagagaaugucuuuga

SEQ ID NO: 419290 - RNA, 19 nt, Homo sapiens
  misc_RNA (1)...(19): siRNA sense strand
gcagggaaccagggccuua

SEQ ID NO: 419291 - RNA, 19 nt, Homo sapiens
  misc_RNA (1)...(19): siRNA sense strand
cgacauggcuuucaucuua

SEQ ID NO: 419292 - RNA, 19 nt, Homo sapiens
  misc_RNA (1)...(19): siRNA sense strand
caaagaaccuugugaaguu

SEQ ID NO: 419293 - RNA, 19 nt, Homo sapiens
  misc_RNA (1)...(19): siRNA sense strand
ggacuuggauuaugaacua

SEQ ID NO: 419294 - RNA, 19 nt, Homo sapiens
  misc_RNA (1)...(19): siRNA sense strand
ucaaugagaugaagaagua

SEQ ID NO: 419295 - RNA, 19 nt, Homo sapiens
  misc_RNA (1)...(19): siRNA sense strand
caacaaagccugugacuau

SEQ ID NO: 419296 - RNA, 19 nt, Homo sapiens
  misc_RNA (1)...(19): siRNA sense strand
ggagagaccucacagacuu

SEQ ID NO: 419297 - RNA, 19 nt, Homo sapiens
  misc_RNA (1)...(19): siRNA sense strand
ggacacaguuuaugaagau

SEQ ID NO: 419298 - RNA, 19 nt, Homo sapiens
  misc_RNA (1)...(19): siRNA sense strand
ggaggagguuggaaagaua

SEQ ID NO: 419299 - RNA, 19 nt, Homo sapiens
  misc_RNA (1)...(19): siRNA sense strand
gauguggucuugaguauug

SEQ ID NO: 419300 - RNA, 19 nt, Homo sapiens
  misc_RNA (1)...(19): siRNA sense strand
gaaagggaauccuggaaga

SEQ ID NO: 419301 - RNA, 19 nt, Homo sapiens
  misc_RNA (1)...(19): siRNA sense strand
gaacggcacucaagguuuc

SEQ ID NO: 419302 - RNA, 19 nt, Homo sapiens
  misc_RNA (1)...(19): siRNA sense strand
gcagggauuucauauuaaa

SEQ ID NO: 419303 - RNA, 19 nt, Homo sapiens
  misc_RNA (1)...(19): siRNA sense strand
gaauugcgguggcucagua

SEQ ID NO: 419304 - RNA, 19 nt, Homo sapiens
  misc_RNA (1)...(19): siRNA sense strand
gaagaaagcagacauugug

SEQ ID NO: 419305 - RNA, 19 nt, Homo sapiens
  misc_RNA (1)...(19): siRNA sense strand
uugcagggauuucauauua

SEQ ID NO: 419306 - RNA, 19 nt, Homo sapiens
  misc_RNA (1)...(19): siRNA sense strand
gaacuagccuuugcuuuag

SEQ ID NO: 419307 - RNA, 19 nt, Homo sapiens
  misc_RNA (1)...(19): siRNA sense strand
gcaggaaggugaacaucaa

SEQ ID NO: 419308 - RNA, 19 nt, Homo sapiens
  misc_RNA (1)...(19): siRNA sense strand
gaaagaguuuguccagaga

SEQ ID NO: 419309 - RNA, 19 nt, Homo sapiens
  misc_RNA (1)...(19): siRNA sense strand
gaagacacgccaacacuaa

SEQ ID NO: 419310 - RNA, 19 nt, Homo sapiens
  misc_RNA (1)...(19): siRNA sense strand
gaaggaacuugcagggauu

SEQ ID NO: 419311 - RNA, 19 nt, Homo sapiens
  misc_RNA (1)...(19): siRNA sense strand
gaagagaagcagcauaaug

SEQ ID NO: 419312 - RNA, 19 nt, Homo sapiens
  misc_RNA (1)...(19): siRNA sense strand
ucagagagcuucccaacau

SEQ ID NO: 419313 - RNA, 19 nt, Homo sapiens
  misc_RNA (1)...(19): siRNA sense strand
gaaagaaugugaaaagguu

SEQ ID NO: 419314 - RNA, 19 nt, Homo sapiens
  misc_RNA (1)...(19): siRNA sense strand
caacaaaguggucuacaaa

SEQ ID NO: 419315 - RNA, 19 nt, Homo sapiens
  misc_RNA (1)...(19): siRNA sense strand
gacuuucucuacaagauua

SEQ ID NO: 419316 - RNA, 19 nt, Homo sapiens
  misc_RNA (1)...(19): siRNA sense strand
agaacuagccuuugcuuua

SEQ ID NO: 419317 - RNA, 19 nt, Homo sapiens
  misc_RNA (1)...(19): siRNA sense strand
guacagcgaugaugucaag

SEQ ID NO: 419318 - RNA, 19 nt, Homo sapiens
  misc_RNA (1)...(19): siRNA sense strand
gaacaagggugccgaucag

SEQ ID NO: 419319 - RNA, 19 nt, Homo sapiens
  misc_RNA (1)...(19): siRNA sense strand
caacagaacuagccuuugc

SEQ ID NO: 419320 - RNA, 19 nt, Homo sapiens
  misc_RNA (1)...(19): siRNA sense strand
caacauagaagaaagaauc

SEQ ID NO: 419321 - RNA, 19 nt, Homo sapiens
  misc_RNA (1)...(19): siRNA sense strand
gcucuagacuuuguucgua

SEQ ID NO: 419322 - RNA, 19 nt, Homo sapiens
  misc_RNA (1)...(19): siRNA sense strand
cgacgucuucuucaaauua

SEQ ID NO: 419323 - RNA, 19 nt, Homo sapiens
  misc_RNA (1)...(19): siRNA sense strand
gagauguggucuugaguau

SEQ ID NO: 419324 - RNA, 19 nt, Homo sapiens
  misc_RNA (1)...(19): siRNA sense strand
guaagucccuagaugaaau

SEQ ID NO: 419325 - RNA, 19 nt, Homo sapiens
  misc_RNA (1)...(19): siRNA sense strand
gcuaaugcaucuggaguuu

SEQ ID NO: 419326 - RNA, 19 nt, Homo sapiens
  misc_RNA (1)...(19): siRNA sense strand
gaagaagaaagcagacauu

SEQ ID NO: 419327 - RNA, 19 nt, Homo sapiens
  misc_RNA (1)...(19): siRNA sense strand
uagagaggcugguugacua

SEQ ID NO: 419328 - RNA, 19 nt, Homo sapiens
  misc_RNA (1)...(19): siRNA sense strand
gaaaucggacaggaucuua

SEQ ID NO: 419329 - RNA, 19 nt, Homo sapiens
  misc_RNA (1)...(19): siRNA sense strand
caaagccugugacuauuau

SEQ ID NO: 419330 - RNA, 19 nt, Homo sapiens
  misc_RNA (1)...(19): siRNA sense strand
cgaauaacguuacuucaag

SEQ ID NO: 419331 - RNA, 19 nt, Homo sapiens
  misc_RNA (1)...(19): siRNA sense strand
gaaagcagacauuguguuc

SEQ ID NO: 419332 - RNA, 19 nt, Homo sapiens
  misc_RNA (1)...(19): siRNA sense strand
gggcucugcucuagacuuu

SEQ ID NO: 419333 - RNA, 19 nt, Homo sapiens
  misc_RNA (1)...(19): siRNA sense strand
gaggaaacaucggcacuug

SEQ ID NO: 419334 - RNA, 19 nt, Homo sapiens
  misc_RNA (1)...(19): siRNA sense strand
gaaauaguggacacaguuu

SEQ ID NO: 419335 - RNA, 19 nt, Homo sapiens
  misc_RNA (1)...(19): siRNA sense strand
gaucgaggauggagugcuu

SEQ ID NO: 419336 - RNA, 19 nt, Homo sapiens
  misc_RNA (1)...(19): siRNA sense strand
caaacgacgucuucuucaa

SEQ ID NO: 419337 - RNA, 19 nt, Homo sapiens
  misc_RNA (1)...(19): siRNA sense strand
gaaccugggcuaaauggaa

SEQ ID NO: 419338 - RNA, 19 nt, Homo sapiens
  misc_RNA (1)...(19): siRNA sense strand
cagagaugcucgagaaguu

SEQ ID NO: 419339 - RNA, 19 nt, Homo sapiens
  misc_RNA (1)...(19): siRNA sense strand
gaagaaagaaucaugaacu

SEQ ID NO: 419340 - RNA, 19 nt, Homo sapiens
  misc_RNA (1)...(19): siRNA sense strand
cagagucgcuucccaagau

SEQ ID NO: 419341 - RNA, 19 nt, Homo sapiens
  misc_RNA (1)...(19): siRNA sense strand
caacgaagccggugacuac

SEQ ID NO: 419342 - RNA, 19 nt, Homo sapiens
  misc_RNA (1)...(19): siRNA sense strand
ucacagacuuccuggagaa

SEQ ID NO: 419343 - RNA, 19 nt, Homo sapiens
  misc_RNA (1)...(19): siRNA sense strand
acggagaucuggcugauuu

SEQ ID NO: 419344 - RNA, 19 nt, Homo sapiens
  misc_RNA (1)...(19): siRNA sense strand
gaacagaaucagccagaug

SEQ ID NO: 419345 - RNA, 19 nt, Homo sapiens
  misc_RNA (1)...(19): siRNA sense strand
gcaaugcccuggaguacgu

SEQ ID NO: 419346 - RNA, 19 nt, Homo sapiens
  misc_RNA (1)...(19): siRNA sense strand
ucacagagaugcagaccau

SEQ ID NO: 419347 - RNA, 19 nt, Homo sapiens
  misc_RNA (1)...(19): siRNA sense strand
ucgaugagcucaaugugaa

SEQ ID NO: 419348 - RNA, 19 nt, Homo sapiens
  misc_RNA (1)...(19): siRNA sense strand
acaaagacggccacuguua

SEQ ID NO: 419349 - RNA, 19 nt, Homo sapiens
  misc_RNA (1)...(19): siRNA sense strand
ugacaacauugccgagaaa

SEQ ID NO: 419350 - RNA, 19 nt, Homo sapiens
  misc_RNA (1)...(19): siRNA sense strand
ccaagaggcagauuauuga

SEQ ID NO: 419351 - RNA, 19 nt, Homo sapiens
  misc_RNA (1)...(19): siRNA sense strand
ucuacaagauuaucgauga

SEQ ID NO: 419352 - RNA, 19 nt, Homo sapiens
  misc_RNA (1)...(19): siRNA sense strand
ggagagaggacccaaagga

SEQ ID NO: 419353 - RNA, 19 nt, Homo sapiens
  misc_RNA (1)...(19): siRNA sense strand
ggcgaggguuuauguauga

SEQ ID NO: 419354 - RNA, 19 nt, Homo sapiens
  misc_RNA (1)...(19): siRNA sense strand
ggaccaggcccgaguucua

SEQ ID NO: 419355 - RNA, 19 nt, Homo sapiens
  misc_RNA (1)...(19): siRNA sense strand
caaguaaauguuccgaaua

SEQ ID NO: 419356 - RNA, 19 nt, Homo sapiens
  misc_RNA (1)...(19): siRNA sense strand
cagagaggcugugcucaaa

SEQ ID NO: 419357 - RNA, 19 nt, Homo sapiens
  misc_RNA (1)...(19): siRNA sense strand
ggagaaagaggagauguug

SEQ ID NO: 419358 - RNA, 19 nt, Homo sapiens
  misc_RNA (1)...(19): siRNA sense strand
gguggaggccuuugacuuu

SEQ ID NO: 419359 - RNA, 19 nt, Homo sapiens
  misc_RNA (1)...(19): siRNA sense strand
ggaagacacgccaacacua

SEQ ID NO: 419360 - RNA, 19 nt, Homo sapiens
  misc_RNA (1)...(19): siRNA sense strand
ucaacaaaguggucuacaa

SEQ ID NO: 419361 - RNA, 19 nt, Homo sapiens
  misc_RNA (1)...(19): siRNA sense strand
ggaaguuucaguacaaaga

SEQ ID NO: 419362 - RNA, 19 nt, Homo sapiens
  misc_RNA (1)...(19): siRNA sense strand
ccacaaagacggccacugu

SEQ ID NO: 419363 - RNA, 19 nt, Homo sapiens
  misc_RNA (1)...(19): siRNA sense strand
ggaaacagugugauugguu

SEQ ID NO: 419364 - RNA, 19 nt, Homo sapiens
  misc_RNA (1)...(19): siRNA sense strand
cauagagaaugucuuugaa

SEQ ID NO: 419365 - RNA, 19 nt, Homo sapiens
  misc_RNA (1)...(19): siRNA sense strand
gauaggagaacaaggcauu

SEQ ID NO: 419366 - RNA, 19 nt, Homo sapiens
  misc_RNA (1)...(19): siRNA sense strand
aagaggagauguugggauu

SEQ ID NO: 419367 - RNA, 19 nt, Homo sapiens
  misc_RNA (1)...(19): siRNA sense strand
gacauucuguuccucuuug

SEQ ID NO: 419368 - RNA, 19 nt, Homo sapiens
  misc_RNA (1)...(19): siRNA sense strand
uaaaugcccuugcuguuac

SEQ ID NO: 419369 - RNA, 19 nt, Homo sapiens
  misc_RNA (1)...(19): siRNA sense strand
gauaaaugcccuugcuguu

SEQ ID NO: 419370 - RNA, 19 nt, Homo sapiens
  misc_RNA (1)...(19): siRNA sense strand
ggaaagauagcguccaaca

SEQ ID NO: 419371 - RNA, 19 nt, Homo sapiens
  misc_RNA (1)...(19): siRNA sense strand
cagagagcuucccaacaua

SEQ ID NO: 419372 - RNA, 19 nt, Homo sapiens
  misc_RNA (1)...(19): siRNA sense strand
gaagagggcgucccacagu

SEQ ID NO: 419373 - RNA, 19 nt, Homo sapiens
  misc_RNA (1)...(19): siRNA sense strand
caucaacgcuuugcagauc

SEQ ID NO: 419374 - RNA, 19 nt, Homo sapiens
  misc_RNA (1)...(19): siRNA sense strand
gaaaggagaaagaggagau

SEQ ID NO: 419375 - RNA, 19 nt, Homo sapiens
  misc_RNA (1)...(19): siRNA sense strand
ggugguaagucccuagaug

SEQ ID NO: 419376 - RNA, 19 nt, Homo sapiens
  misc_RNA (1)...(19): siRNA sense strand
acaaguaaauguuccgaau

SEQ ID NO: 419377 - RNA, 19 nt, Homo sapiens
  misc_RNA (1)...(19): siRNA sense strand
gaugcgagauguggucuug

SEQ ID NO: 419378 - RNA, 19 nt, Homo sapiens
  misc_RNA (1)...(19): siRNA sense strand
uccaaagcaucaaagauaa

SEQ ID NO: 419379 - RNA, 19 nt, Homo sapiens
  misc_RNA (1)...(19): siRNA sense strand
gggcgaggguuuauguaug

SEQ ID NO: 419380 - RNA, 19 nt, Homo sapiens
  misc_RNA (1)...(19): siRNA sense strand
ugaagagaaugaagaucaa

SEQ ID NO: 419381 - RNA, 19 nt, Homo sapiens
  misc_RNA (1)...(19): siRNA sense strand
ccacggaaguuucaguaca

SEQ ID NO: 419382 - RNA, 19 nt, Homo sapiens
  misc_RNA (1)...(19): siRNA sense strand
acaaagccugugacuauua

SEQ ID NO: 419383 - RNA, 19 nt, Homo sapiens
  misc_RNA (1)...(19): siRNA sense strand
ccaccacccuguuccaguu

SEQ ID NO: 419384 - RNA, 19 nt, Homo sapiens
  misc_RNA (1)...(19): siRNA sense strand
gagaggacccaaaggagaa

SEQ ID NO: 419385 - RNA, 19 nt, Homo sapiens
  misc_RNA (1)...(19): siRNA sense strand
gguggaagaugcacaggau

SEQ ID NO: 419386 - RNA, 19 nt, Homo sapiens
  misc_RNA (1)...(19): siRNA sense strand
gaagggcgaaguaggagaa

SEQ ID NO: 419387 - RNA, 19 nt, Homo sapiens
  misc_RNA (1)...(19): siRNA sense strand
aaagaaccuugugaaguuu

SEQ ID NO: 419388 - RNA, 19 nt, Homo sapiens
  misc_RNA (1)...(19): siRNA sense strand
gcucugcucuagacuuugu

SEQ ID NO: 419389 - RNA, 19 nt, Homo sapiens
  misc_RNA (1)...(19): siRNA sense strand
ccauagagaaugucuuuga

SEQ ID NO: 419390 - RNA, 19 nt, Homo sapiens
  misc_RNA (1)...(19): siRNA sense strand
gcagggaaccagggccuua

SEQ ID NO: 419391 - RNA, 19 nt, Homo sapiens
  misc_RNA (1)...(19): siRNA sense strand
cgacauggcuuucaucuua

SEQ ID NO: 419392 - RNA, 19 nt, Homo sapiens
  misc_RNA (1)...(19): siRNA sense strand
caaagaaccuugugaaguu

SEQ ID NO: 419393 - RNA, 19 nt, Homo sapiens
  misc_RNA (1)...(19): siRNA sense strand
ggacuuggauuaugaacua

SEQ ID NO: 419394 - RNA, 19 nt, Homo sapiens
  misc_RNA (1)...(19): siRNA sense strand
ucaaugagaugaagaagua

SEQ ID NO: 419395 - RNA, 19 nt, Homo sapiens
  misc_RNA (1)...(19): siRNA sense strand
caacaaagccugugacuau

SEQ ID NO: 419396 - RNA, 19 nt, Homo sapiens
  misc_RNA (1)...(19): siRNA sense strand
ggagagaccucacagacuu

SEQ ID NO: 419397 - RNA, 19 nt, Homo sapiens
  misc_RNA (1)...(19): siRNA sense strand
ggacacaguuuaugaagau

SEQ ID NO: 419398 - RNA, 19 nt, Homo sapiens
  misc_RNA (1)...(19): siRNA sense strand
ggaggagguuggaaagaua

SEQ ID NO: 419399 - RNA, 19 nt, Homo sapiens
  misc_RNA (1)...(19): siRNA sense strand
gauguggucuugaguauug

SEQ ID NO: 419400 - RNA, 19 nt, Homo sapiens
  misc_RNA (1)...(19): siRNA sense strand
gaaagggaauccuggaaga

SEQ ID NO: 419401 - RNA, 19 nt, Homo sapiens
  misc_RNA (1)...(19): siRNA sense strand
gaacggcacucaagguuuc

SEQ ID NO: 419402 - RNA, 19 nt, Homo sapiens
  misc_RNA (1)...(19): siRNA sense strand
gcagggauuucauauuaaa

SEQ ID NO: 419403 - RNA, 19 nt, Homo sapiens
  misc_RNA (1)...(19): siRNA sense strand
gaauugcgguggcucagua

SEQ ID NO: 419404 - RNA, 19 nt, Homo sapiens
  misc_RNA (1)...(19): siRNA sense strand
gaagaaagcagacauugug

SEQ ID NO: 419405 - RNA, 19 nt, Homo sapiens
  misc_RNA (1)...(19): siRNA sense strand
uugcagggauuucauauua

SEQ ID NO: 419406 - RNA, 19 nt, Homo sapiens
  misc_RNA (1)...(19): siRNA sense strand
gaacuagccuuugcuuuag

SEQ ID NO: 419407 - RNA, 19 nt, Homo sapiens
  misc_RNA (1)...(19): siRNA sense strand
gcaggaaggugaacaucaa

SEQ ID NO: 419408 - RNA, 19 nt, Homo sapiens
  misc_RNA (1)...(19): siRNA sense strand
gaaagaguuuguccagaga

SEQ ID NO: 419409 - RNA, 19 nt, Homo sapiens
  misc_RNA (1)...(19): siRNA sense strand
gaagacacgccaacacuaa

SEQ ID NO: 419410 - RNA, 19 nt, Homo sapiens
  misc_RNA (1)...(19): siRNA sense strand
gaaggaacuugcagggauu

SEQ ID NO: 419411 - RNA, 19 nt, Homo sapiens
  misc_RNA (1)...(19): siRNA sense strand
gaagagaagcagcauaaug

SEQ ID NO: 419412 - RNA, 19 nt, Homo sapiens
  misc_RNA (1)...(19): siRNA sense strand
ucagagagcuucccaacau

SEQ ID NO: 419413 - RNA, 19 nt, Homo sapiens
  misc_RNA (1)...(19): siRNA sense strand
gaaagaaugugaaaagguu

SEQ ID NO: 419414 - RNA, 19 nt, Homo sapiens
  misc_RNA (1)...(19): siRNA sense strand
caacaaaguggucuacaaa

SEQ ID NO: 419415 - RNA, 19 nt, Homo sapiens
  misc_RNA (1)...(19): siRNA sense strand
gacuuucucuacaagauua

SEQ ID NO: 419416 - RNA, 19 nt, Homo sapiens
  misc_RNA (1)...(19): siRNA sense strand
agaacuagccuuugcuuua

SEQ ID NO: 419417 - RNA, 19 nt, Homo sapiens
  misc_RNA (1)...(19): siRNA sense strand
guacagcgaugaugucaag

SEQ ID NO: 419418 - RNA, 19 nt, Homo sapiens
  misc_RNA (1)...(19): siRNA sense strand
gaacaagggugccgaucag

SEQ ID NO: 419419 - RNA, 19 nt, Homo sapiens
  misc_RNA (1)...(19): siRNA sense strand
caacagaacuagccuuugc

SEQ ID NO: 419420 - RNA, 19 nt, Homo sapiens
  misc_RNA (1)...(19): siRNA sense strand
caacauagaagaaagaauc

SEQ ID NO: 419421 - RNA, 19 nt, Homo sapiens
  misc_RNA (1)...(19): siRNA sense strand
gcucuagacuuuguucgua

SEQ ID NO: 419422 - RNA, 19 nt, Homo sapiens
  misc_RNA (1)...(19): siRNA sense strand
cgacgucuucuucaaauua

SEQ ID NO: 419423 - RNA, 19 nt, Homo sapiens
  misc_RNA (1)...(19): siRNA sense strand
gagauguggucuugaguau

SEQ ID NO: 419424 - RNA, 19 nt, Homo sapiens
  misc_RNA (1)...(19): siRNA sense strand
guaagucccuagaugaaau

SEQ ID NO: 419425 - RNA, 19 nt, Homo sapiens
  misc_RNA (1)...(19): siRNA sense strand
gcuaaugcaucuggaguuu

SEQ ID NO: 419426 - RNA, 19 nt, Homo sapiens
  misc_RNA (1)...(19): siRNA sense strand
gaagaagaaagcagacauu

SEQ ID NO: 419427 - RNA, 19 nt, Homo sapiens
  misc_RNA (1)...(19): siRNA sense strand
uagagaggcugguugacua

SEQ ID NO: 419428 - RNA, 19 nt, Homo sapiens
  misc_RNA (1)...(19): siRNA sense strand
gaaaucggacaggaucuua

SEQ ID NO: 419429 - RNA, 19 nt, Homo sapiens
  misc_RNA (1)...(19): siRNA sense strand
caaagccugugacuauuau

SEQ ID NO: 419430 - RNA, 19 nt, Homo sapiens
  misc_RNA (1)...(19): siRNA sense strand
cgaauaacguuacuucaag

SEQ ID NO: 419431 - RNA, 19 nt, Homo sapiens
  misc_RNA (1)...(19): siRNA sense strand
gaaagcagacauuguguuc

SEQ ID NO: 419432 - RNA, 19 nt, Homo sapiens
  misc_RNA (1)...(19): siRNA sense strand
gggcucugcucuagacuuu

SEQ ID NO: 419433 - RNA, 19 nt, Homo sapiens
  misc_RNA (1)...(19): siRNA sense strand
gaggaaacaucggcacuug

SEQ ID NO: 419434 - RNA, 19 nt, Homo sapiens
  misc_RNA (1)...(19): siRNA sense strand
gaaauaguggacacaguuu

SEQ ID NO: 419435 - RNA, 19 nt, Homo sapiens
  misc_RNA (1)...(19): siRNA sense strand
gaucgaggauggagugcuu

SEQ ID NO: 419436 - RNA, 19 nt, Homo sapiens
  misc_RNA (1)...(19): siRNA sense strand
caaacgacgucuucuucaa

SEQ ID NO: 419437 - RNA, 19 nt, Homo sapiens
  misc_RNA (1)...(19): siRNA sense strand
gaaccugggcuaaauggaa

SEQ ID NO: 419438 - RNA, 19 nt, Homo sapiens
  misc_RNA (1)...(19): siRNA sense strand
cagagaugcucgagaaguu

SEQ ID NO: 419439 - RNA, 19 nt, Homo sapiens
  misc_RNA (1)...(19): siRNA sense strand
gaagaaagaaucaugaacu

SEQ ID NO: 419440 - RNA, 19 nt, Homo sapiens
  misc_RNA (1)...(19): siRNA sense strand
cagagucgcuucccaagau

SEQ ID NO: 419441 - RNA, 19 nt, Homo sapiens
  misc_RNA (1)...(19): siRNA sense strand
caacgaagccggugacuac

SEQ ID NO: 419442 - RNA, 19 nt, Homo sapiens
  misc_RNA (1)...(19): siRNA sense strand
ucacagacuuccuggagaa

SEQ ID NO: 419443 - RNA, 19 nt, Homo sapiens
  misc_RNA (1)...(19): siRNA sense strand
acggagaucuggcugauuu

SEQ ID NO: 419444 - RNA, 19 nt, Homo sapiens
  misc_RNA (1)...(19): siRNA sense strand
gaacagaaucagccagaug

SEQ ID NO: 419445 - RNA, 19 nt, Homo sapiens
  misc_RNA (1)...(19): siRNA sense strand
gcaaugcccuggaguacgu

SEQ ID NO: 419446 - RNA, 19 nt, Homo sapiens
  misc_RNA (1)...(19): siRNA sense strand
ucacagagaugcagaccau

SEQ ID NO: 419447 - RNA, 19 nt, Homo sapiens
  misc_RNA (1)...(19): siRNA sense strand
ucgaugagcucaaugugaa

SEQ ID NO: 419448 - RNA, 19 nt, Homo sapiens
  misc_RNA (1)...(19): siRNA sense strand
acaaagacggccacuguua

SEQ ID NO: 419449 - RNA, 19 nt, Homo sapiens
  misc_RNA (1)...(19): siRNA sense strand
ugacaacauugccgagaaa

SEQ ID NO: 419450 - RNA, 19 nt, Homo sapiens
  misc_RNA (1)...(19): siRNA sense strand
ccaagaggcagauuauuga

SEQ ID NO: 419451 - RNA, 19 nt, Homo sapiens
  misc_RNA (1)...(19): siRNA sense strand
ucuacaagauuaucgauga

SEQ ID NO: 419452 - RNA, 19 nt, Homo sapiens
  misc_RNA (1)...(19): siRNA sense strand
ggagagaggacccaaagga

SEQ ID NO: 419453 - RNA, 19 nt, Homo sapiens
  misc_RNA (1)...(19): siRNA sense strand
ggcgaggguuuauguauga

SEQ ID NO: 419454 - RNA, 19 nt, Homo sapiens
  misc_RNA (1)...(19): siRNA sense strand
ggaccaggcccgaguucua

SEQ ID NO: 419455 - RNA, 19 nt, Homo sapiens
  misc_RNA (1)...(19): siRNA sense strand
caaguaaauguuccgaaua

SEQ ID NO: 419456 - RNA, 19 nt, Homo sapiens
  misc_RNA (1)...(19): siRNA sense strand
cagagaggcugugcucaaa

SEQ ID NO: 419457 - RNA, 19 nt, Homo sapiens
  misc_RNA (1)...(19): siRNA sense strand
ggagaaagaggagauguug

SEQ ID NO: 419458 - RNA, 19 nt, Homo sapiens
  misc_RNA (1)...(19): siRNA sense strand
gguggaggccuuugacuuu

SEQ ID NO: 419459 - RNA, 19 nt, Homo sapiens
  misc_RNA (1)...(19): siRNA sense strand
ggaagacacgccaacacua

SEQ ID NO: 419460 - RNA, 19 nt, Homo sapiens
  misc_RNA (1)...(19): siRNA sense strand
ucaacaaaguggucuacaa

SEQ ID NO: 419461 - RNA, 19 nt, Homo sapiens
  misc_RNA (1)...(19): siRNA sense strand
ggaaguuucaguacaaaga

SEQ ID NO: 419462 - RNA, 19 nt, Homo sapiens
  misc_RNA (1)...(19): siRNA sense strand
ccacaaagacggccacugu

SEQ ID NO: 419463 - RNA, 19 nt, Homo sapiens
  misc_RNA (1)...(19): siRNA sense strand
ggaaacagugugauugguu

SEQ ID NO: 419464 - RNA, 19 nt, Homo sapiens
  misc_RNA (1)...(19): siRNA sense strand
cauagagaaugucuuugaa

SEQ ID NO: 419465 - RNA, 19 nt, Homo sapiens
  misc_RNA (1)...(19): siRNA sense strand
gauaggagaacaaggcauu

SEQ ID NO: 419466 - RNA, 19 nt, Homo sapiens
  misc_RNA (1)...(19): siRNA sense strand
aagaggagauguugggauu

SEQ ID NO: 419467 - RNA, 19 nt, Homo sapiens
  misc_RNA (1)...(19): siRNA sense strand
gacauucuguuccucuuug

SEQ ID NO: 419468 - RNA, 19 nt, Homo sapiens
  misc_RNA (1)...(19): siRNA sense strand
uaaaugcccuugcuguuac

SEQ ID NO: 419469 - RNA, 19 nt, Homo sapiens
  misc_RNA (1)...(19): siRNA sense strand
gauaaaugcccuugcuguu

SEQ ID NO: 419470 - RNA, 19 nt, Homo sapiens
  misc_RNA (1)...(19): siRNA sense strand
ggaaagauagcguccaaca

SEQ ID NO: 419471 - RNA, 19 nt, Homo sapiens
  misc_RNA (1)...(19): siRNA sense strand
cagagagcuucccaacaua

SEQ ID NO: 419472 - RNA, 19 nt, Homo sapiens
  misc_RNA (1)...(19): siRNA sense strand
gaagagggcgucccacagu

SEQ ID NO: 419473 - RNA, 19 nt, Homo sapiens
  misc_RNA (1)...(19): siRNA sense strand
caucaacgcuuugcagauc

SEQ ID NO: 419474 - RNA, 19 nt, Homo sapiens
  misc_RNA (1)...(19): siRNA sense strand
gaaaggagaaagaggagau

SEQ ID NO: 419475 - RNA, 19 nt, Homo sapiens
  misc_RNA (1)...(19): siRNA sense strand
ggugguaagucccuagaug

SEQ ID NO: 419476 - RNA, 19 nt, Homo sapiens
  misc_RNA (1)...(19): siRNA sense strand
acaaguaaauguuccgaau

SEQ ID NO: 419477 - RNA, 19 nt, Homo sapiens
  misc_RNA (1)...(19): siRNA sense strand
gaugcgagauguggucuug

SEQ ID NO: 419478 - RNA, 19 nt, Homo sapiens
  misc_RNA (1)...(19): siRNA sense strand
uccaaagcaucaaagauaa

SEQ ID NO: 419479 - RNA, 19 nt, Homo sapiens
  misc_RNA (1)...(19): siRNA sense strand
gggcgaggguuuauguaug

SEQ ID NO: 419480 - RNA, 19 nt, Homo sapiens
  misc_RNA (1)...(19): siRNA sense strand
ugaagagaaugaagaucaa

SEQ ID NO: 419481 - RNA, 19 nt, Homo sapiens
  misc_RNA (1)...(19): siRNA sense strand
ccacggaaguuucaguaca

SEQ ID NO: 419482 - RNA, 19 nt, Homo sapiens
  misc_RNA (1)...(19): siRNA sense strand
acaaagccugugacuauua

SEQ ID NO: 419483 - RNA, 19 nt, Homo sapiens
  misc_RNA (1)...(19): siRNA sense strand
ccaccacccuguuccaguu

SEQ ID NO: 419484 - RNA, 19 nt, Homo sapiens
  misc_RNA (1)...(19): siRNA sense strand
gagaggacccaaaggagaa

SEQ ID NO: 419485 - RNA, 19 nt, Homo sapiens
  misc_RNA (1)...(19): siRNA sense strand
gguggaagaugcacaggau

SEQ ID NO: 419486 - RNA, 19 nt, Homo sapiens
  misc_RNA (1)...(19): siRNA sense strand
gaagggcgaaguaggagaa

SEQ ID NO: 419487 - RNA, 19 nt, Homo sapiens
  misc_RNA (1)...(19): siRNA sense strand
aaagaaccuugugaaguuu

SEQ ID NO: 419488 - RNA, 19 nt, Homo sapiens
  misc_RNA (1)...(19): siRNA sense strand
gcucugcucuagacuuugu

SEQ ID NO: 419489 - RNA, 19 nt, Homo sapiens
  misc_RNA (1)...(19): siRNA sense strand
ccauagagaaugucuuuga

SEQ ID NO: 419490 - RNA, 19 nt, Homo sapiens
  misc_RNA (1)...(19): siRNA sense strand
gcagggaaccagggccuua

SEQ ID NO: 419491 - RNA, 19 nt, Homo sapiens
  misc_RNA (1)...(19): siRNA sense strand
cgacauggcuuucaucuua

SEQ ID NO: 419492 - RNA, 19 nt, Homo sapiens
  misc_RNA (1)...(19): siRNA sense strand
caaagaaccuugugaaguu

SEQ ID NO: 419493 - RNA, 19 nt, Homo sapiens
  misc_RNA (1)...(19): siRNA sense strand
ggacuuggauuaugaacua

SEQ ID NO: 419494 - RNA, 19 nt, Homo sapiens
  misc_RNA (1)...(19): siRNA sense strand
ucaaugagaugaagaagua

SEQ ID NO: 419495 - RNA, 19 nt, Homo sapiens
  misc_RNA (1)...(19): siRNA sense strand
caacaaagccugugacuau

SEQ ID NO: 419496 - RNA, 19 nt, Homo sapiens
  misc_RNA (1)...(19): siRNA sense strand
ggagagaccucacagacuu

SEQ ID NO: 419497 - RNA, 19 nt, Homo sapiens
  misc_RNA (1)...(19): siRNA sense strand
ggacacaguuuaugaagau

SEQ ID NO: 419498 - RNA, 19 nt, Homo sapiens
  misc_RNA (1)...(19): siRNA sense strand
ggaggagguuggaaagaua

SEQ ID NO: 419499 - RNA, 19 nt, Homo sapiens
  misc_RNA (1)...(19): siRNA sense strand
gauguggucuugaguauug

SEQ ID NO: 419500 - RNA, 19 nt, Homo sapiens
  misc_RNA (1)...(19): siRNA sense strand
gaaagggaauccuggaaga

SEQ ID NO: 419501 - RNA, 19 nt, Homo sapiens
  misc_RNA (1)...(19): siRNA sense strand
gaacggcacucaagguuuc

SEQ ID NO: 419502 - RNA, 19 nt, Homo sapiens
  misc_RNA (1)...(19): siRNA sense strand
gcagggauuucauauuaaa

SEQ ID NO: 419503 - RNA, 19 nt, Homo sapiens
  misc_RNA (1)...(19): siRNA sense strand
gaauugcgguggcucagua

SEQ ID NO: 419504 - RNA, 19 nt, Homo sapiens
  misc_RNA (1)...(19): siRNA sense strand
gaagaaagcagacauugug

SEQ ID NO: 419505 - RNA, 19 nt, Homo sapiens
  misc_RNA (1)...(19): siRNA sense strand
uugcagggauuucauauua

SEQ ID NO: 419506 - RNA, 19 nt, Homo sapiens
  misc_RNA (1)...(19): siRNA sense strand
gaacuagccuuugcuuuag

SEQ ID NO: 419507 - RNA, 19 nt, Homo sapiens
  misc_RNA (1)...(19): siRNA sense strand
gcaggaaggugaacaucaa

SEQ ID NO: 419508 - RNA, 19 nt, Homo sapiens
  misc_RNA (1)...(19): siRNA sense strand
gaaagaguuuguccagaga

SEQ ID NO: 419509 - RNA, 19 nt, Homo sapiens
  misc_RNA (1)...(19): siRNA sense strand
gaagacacgccaacacuaa

SEQ ID NO: 419510 - RNA, 19 nt, Homo sapiens
  misc_RNA (1)...(19): siRNA sense strand
gaaggaacuugcagggauu

SEQ ID NO: 419511 - RNA, 19 nt, Homo sapiens
  misc_RNA (1)...(19): siRNA sense strand
gaagagaagcagcauaaug

SEQ ID NO: 419512 - RNA, 19 nt, Homo sapiens
  misc_RNA (1)...(19): siRNA sense strand
ucagagagcuucccaacau

SEQ ID NO: 419513 - RNA, 19 nt, Homo sapiens
  misc_RNA (1)...(19): siRNA sense strand
gaaagaaugugaaaagguu

SEQ ID NO: 419514 - RNA, 19 nt, Homo sapiens
  misc_RNA (1)...(19): siRNA sense strand
caacaaaguggucuacaaa

SEQ ID NO: 419515 - RNA, 19 nt, Homo sapiens
  misc_RNA (1)...(19): siRNA sense strand
gacuuucucuacaagauua

SEQ ID NO: 419516 - RNA, 19 nt, Homo sapiens
  misc_RNA (1)...(19): siRNA sense strand
agaacuagccuuugcuuua

SEQ ID NO: 419517 - RNA, 19 nt, Homo sapiens
  misc_RNA (1)...(19): siRNA sense strand
guacagcgaugaugucaag

SEQ ID NO: 419518 - RNA, 19 nt, Homo sapiens
  misc_RNA (1)...(19): siRNA sense strand
gaacaagggugccgaucag

SEQ ID NO: 419519 - RNA, 19 nt, Homo sapiens
  misc_RNA (1)...(19): siRNA sense strand
caacagaacuagccuuugc

SEQ ID NO: 419520 - RNA, 19 nt, Homo sapiens
  misc_RNA (1)...(19): siRNA sense strand
caacauagaagaaagaauc

SEQ ID NO: 419521 - RNA, 19 nt, Homo sapiens
  misc_RNA (1)...(19): siRNA sense strand
gcucuagacuuuguucgua

SEQ ID NO: 419522 - RNA, 19 nt, Homo sapiens
  misc_RNA (1)...(19): siRNA sense strand
cgacgucuucuucaaauua

SEQ ID NO: 419523 - RNA, 19 nt, Homo sapiens
  misc_RNA (1)...(19): siRNA sense strand
gagauguggucuugaguau

SEQ ID NO: 419524 - RNA, 19 nt, Homo sapiens
  misc_RNA (1)...(19): siRNA sense strand
guaagucccuagaugaaau

SEQ ID NO: 419525 - RNA, 19 nt, Homo sapiens
  misc_RNA (1)...(19): siRNA sense strand
gcuaaugcaucuggaguuu

SEQ ID NO: 419526 - RNA, 19 nt, Homo sapiens
  misc_RNA (1)...(19): siRNA sense strand
gaagaagaaagcagacauu

SEQ ID NO: 419527 - RNA, 19 nt, Homo sapiens
  misc_RNA (1)...(19): siRNA sense strand
uagagaggcugguugacua

SEQ ID NO: 419528 - RNA, 19 nt, Homo sapiens
  misc_RNA (1)...(19): siRNA sense strand
gaaaucggacaggaucuua

SEQ ID NO: 419529 - RNA, 19 nt, Homo sapiens
  misc_RNA (1)...(19): siRNA sense strand
caaagccugugacuauuau

SEQ ID NO: 419530 - RNA, 19 nt, Homo sapiens
  misc_RNA (1)...(19): siRNA sense strand
cgaauaacguuacuucaag

SEQ ID NO: 419531 - RNA, 19 nt, Homo sapiens
  misc_RNA (1)...(19): siRNA sense strand
gaaagcagacauuguguuc

SEQ ID NO: 419532 - RNA, 19 nt, Homo sapiens
  misc_RNA (1)...(19): siRNA sense strand
gggcucugcucuagacuuu

SEQ ID NO: 419533 - RNA, 19 nt, Homo sapiens
  misc_RNA (1)...(19): siRNA sense strand
gaggaaacaucggcacuug

SEQ ID NO: 419534 - RNA, 19 nt, Homo sapiens
  misc_RNA (1)...(19): siRNA sense strand
gaaauaguggacacaguuu

SEQ ID NO: 419535 - RNA, 19 nt, Homo sapiens
  misc_RNA (1)...(19): siRNA sense strand
gaucgaggauggagugcuu

SEQ ID NO: 419536 - RNA, 19 nt, Homo sapiens
  misc_RNA (1)...(19): siRNA sense strand
caaacgacgucuucuucaa

SEQ ID NO: 419537 - RNA, 19 nt, Homo sapiens
  misc_RNA (1)...(19): siRNA sense strand
gaaccugggcuaaauggaa

SEQ ID NO: 419538 - RNA, 19 nt, Homo sapiens
  misc_RNA (1)...(19): siRNA sense strand
cagagaugcucgagaaguu

SEQ ID NO: 419539 - RNA, 19 nt, Homo sapiens
  misc_RNA (1)...(19): siRNA sense strand
gaagaaagaaucaugaacu

SEQ ID NO: 419540 - RNA, 19 nt, Homo sapiens
  misc_RNA (1)...(19): siRNA sense strand
cagagucgcuucccaagau

SEQ ID NO: 419541 - RNA, 19 nt, Homo sapiens
  misc_RNA (1)...(19): siRNA sense strand
caacgaagccggugacuac

SEQ ID NO: 419542 - RNA, 19 nt, Homo sapiens
  misc_RNA (1)...(19): siRNA sense strand
ucacagacuuccuggagaa

SEQ ID NO: 419543 - RNA, 19 nt, Homo sapiens
  misc_RNA (1)...(19): siRNA sense strand
acggagaucuggcugauuu

SEQ ID NO: 419544 - RNA, 19 nt, Homo sapiens
  misc_RNA (1)...(19): siRNA sense strand
gaacagaaucagccagaug

SEQ ID NO: 419545 - RNA, 19 nt, Homo sapiens
  misc_RNA (1)...(19): siRNA sense strand
gcaaugcccuggaguacgu

SEQ ID NO: 419546 - RNA, 19 nt, Homo sapiens
  misc_RNA (1)...(19): siRNA sense strand
ucacagagaugcagaccau

SEQ ID NO: 419547 - RNA, 19 nt, Homo sapiens
  misc_RNA (1)...(19): siRNA sense strand
ucgaugagcucaaugugaa

SEQ ID NO: 419548 - RNA, 19 nt, Homo sapiens
  misc_RNA (1)...(19): siRNA sense strand
acaaagacggccacuguua

SEQ ID NO: 419549 - RNA, 19 nt, Homo sapiens
  misc_RNA (1)...(19): siRNA sense strand
ugacaacauugccgagaaa

SEQ ID NO: 419550 - RNA, 19 nt, Homo sapiens
  misc_RNA (1)...(19): siRNA sense strand
ccaagaggcagauuauuga

SEQ ID NO: 419551 - RNA, 19 nt, Homo sapiens
  misc_RNA (1)...(19): siRNA sense strand
ucuacaagauuaucgauga

SEQ ID NO: 419552 - RNA, 19 nt, Homo sapiens
  misc_RNA (1)...(19): siRNA sense strand
ggagagaggacccaaagga

SEQ ID NO: 419553 - RNA, 19 nt, Homo sapiens
  misc_RNA (1)...(19): siRNA sense strand
ggcgaggguuuauguauga

SEQ ID NO: 419554 - RNA, 19 nt, Homo sapiens
  misc_RNA (1)...(19): siRNA sense strand
ggaccaggcccgaguucua

SEQ ID NO: 419555 - RNA, 19 nt, Homo sapiens
  misc_RNA (1)...(19): siRNA sense strand
caaguaaauguuccgaaua

SEQ ID NO: 419556 - RNA, 19 nt, Homo sapiens
  misc_RNA (1)...(19): siRNA sense strand
cagagaggcugugcucaaa

SEQ ID NO: 419557 - RNA, 19 nt, Homo sapiens
  misc_RNA (1)...(19): siRNA sense strand
ggagaaagaggagauguug

SEQ ID NO: 419558 - RNA, 19 nt, Homo sapiens
  misc_RNA (1)...(19): siRNA sense strand
gguggaggccuuugacuuu

SEQ ID NO: 419559 - RNA, 19 nt, Homo sapiens
  misc_RNA (1)...(19): siRNA sense strand
ggaagacacgccaacacua

SEQ ID NO: 419560 - RNA, 19 nt, Homo sapiens
  misc_RNA (1)...(19): siRNA sense strand
ucaacaaaguggucuacaa

SEQ ID NO: 419561 - RNA, 19 nt, Homo sapiens
  misc_RNA (1)...(19): siRNA sense strand
ggaaguuucaguacaaaga

SEQ ID NO: 419562 - RNA, 19 nt, Homo sapiens
  misc_RNA (1)...(19): siRNA sense strand
ccacaaagacggccacugu

SEQ ID NO: 419563 - RNA, 19 nt, Homo sapiens
  misc_RNA (1)...(19): siRNA sense strand
ggaaacagugugauugguu

SEQ ID NO: 419564 - RNA, 19 nt, Homo sapiens
  misc_RNA (1)...(19): siRNA sense strand
cauagagaaugucuuugaa

SEQ ID NO: 419565 - RNA, 19 nt, Homo sapiens
  misc_RNA (1)...(19): siRNA sense strand
gauaggagaacaaggcauu

SEQ ID NO: 419566 - RNA, 19 nt, Homo sapiens
  misc_RNA (1)...(19): siRNA sense strand
aagaggagauguugggauu

SEQ ID NO: 419567 - RNA, 19 nt, Homo sapiens
  misc_RNA (1)...(19): siRNA sense strand
gacauucuguuccucuuug

SEQ ID NO: 419568 - RNA, 19 nt, Homo sapiens
  misc_RNA (1)...(19): siRNA sense strand
uaaaugcccuugcuguuac

SEQ ID NO: 419569 - RNA, 19 nt, Homo sapiens
  misc_RNA (1)...(19): siRNA sense strand
gauaaaugcccuugcuguu

SEQ ID NO: 419570 - RNA, 19 nt, Homo sapiens
  misc_RNA (1)...(19): siRNA sense strand
ggaaagauagcguccaaca

SEQ ID NO: 419571 - RNA, 19 nt, Homo sapiens
  misc_RNA (1)...(19): siRNA sense strand
cagagagcuucccaacaua

SEQ ID NO: 419572 - RNA, 19 nt, Homo sapiens
  misc_RNA (1)...(19): siRNA sense strand
gaagagggcgucccacagu

SEQ ID NO: 419573 - RNA, 19 nt, Homo sapiens
  misc_RNA (1)...(19): siRNA sense strand
caucaacgcuuugcagauc

SEQ ID NO: 419574 - RNA, 19 nt, Homo sapiens
  misc_RNA (1)...(19): siRNA sense strand
gaaaggagaaagaggagau

SEQ ID NO: 419575 - RNA, 19 nt, Homo sapiens
  misc_RNA (1)...(19): siRNA sense strand
ggugguaagucccuagaug

SEQ ID NO: 419576 - RNA, 19 nt, Homo sapiens
  misc_RNA (1)...(19): siRNA sense strand
acaaguaaauguuccgaau

SEQ ID NO: 419577 - RNA, 19 nt, Homo sapiens
  misc_RNA (1)...(19): siRNA sense strand
gaugcgagauguggucuug

SEQ ID NO: 419578 - RNA, 19 nt, Homo sapiens
  misc_RNA (1)...(19): siRNA sense strand
uccaaagcaucaaagauaa

SEQ ID NO: 419579 - RNA, 19 nt, Homo sapiens
  misc_RNA (1)...(19): siRNA sense strand
gggcgaggguuuauguaug

SEQ ID NO: 419580 - RNA, 19 nt, Homo sapiens
  misc_RNA (1)...(19): siRNA sense strand
ugaagagaaugaagaucaa

SEQ ID NO: 419581 - RNA, 19 nt, Homo sapiens
  misc_RNA (1)...(19): siRNA sense strand
ccacggaaguuucaguaca

SEQ ID NO: 419582 - RNA, 19 nt, Homo sapiens
  misc_RNA (1)...(19): siRNA sense strand
acaaagccugugacuauua

SEQ ID NO: 419583 - RNA, 19 nt, Homo sapiens
  misc_RNA (1)...(19): siRNA sense strand
ccaccacccuguuccaguu

SEQ ID NO: 419584 - RNA, 19 nt, Homo sapiens
  misc_RNA (1)...(19): siRNA sense strand
gagaggacccaaaggagaa

SEQ ID NO: 419585 - RNA, 19 nt, Homo sapiens
  misc_RNA (1)...(19): siRNA sense strand
gguggaagaugcacaggau

SEQ ID NO: 419586 - RNA, 19 nt, Homo sapiens
  misc_RNA (1)...(19): siRNA sense strand
gaagggcgaaguaggagaa

SEQ ID NO: 419587 - RNA, 19 nt, Homo sapiens
  misc_RNA (1)...(19): siRNA sense strand
aaagaaccuugugaaguuu

SEQ ID NO: 419588 - RNA, 19 nt, Homo sapiens
  misc_RNA (1)...(19): siRNA sense strand
gcucugcucuagacuuugu

SEQ ID NO: 419589 - RNA, 19 nt, Homo sapiens
  misc_RNA (1)...(19): siRNA sense strand
ccauagagaaugucuuuga

SEQ ID NO: 419590 - RNA, 19 nt, Homo sapiens
  misc_RNA (1)...(19): siRNA sense strand
gcagggaaccagggccuua

SEQ ID NO: 419591 - RNA, 19 nt, Homo sapiens
  misc_RNA (1)...(19): siRNA sense strand
gcagaaaguuccuagauuu

SEQ ID NO: 419592 - RNA, 19 nt, Homo sapiens
  misc_RNA (1)...(19): siRNA sense strand
gaucugcucuauguuaaua

SEQ ID NO: 419593 - RNA, 19 nt, Homo sapiens
  misc_RNA (1)...(19): siRNA sense strand
gaaccuacauaacaaugaa

SEQ ID NO: 419594 - RNA, 19 nt, Homo sapiens
  misc_RNA (1)...(19): siRNA sense strand
gcaaugaaccuacauaaca

SEQ ID NO: 419595 - RNA, 19 nt, Homo sapiens
  misc_RNA (1)...(19): siRNA sense strand
gaugaucugcucuauguua

SEQ ID NO: 419596 - RNA, 19 nt, Homo sapiens
  misc_RNA (1)...(19): siRNA sense strand
ggaaaaccaugucuucuuu

SEQ ID NO: 419597 - RNA, 19 nt, Homo sapiens
  misc_RNA (1)...(19): siRNA sense strand
caaugaaccuacauaacaa

SEQ ID NO: 419598 - RNA, 19 nt, Homo sapiens
  misc_RNA (1)...(19): siRNA sense strand
ugacugauguccacacuug

SEQ ID NO: 419599 - RNA, 19 nt, Homo sapiens
  misc_RNA (1)...(19): siRNA sense strand
ccaaagagacagcauuuau

SEQ ID NO: 419600 - RNA, 19 nt, Homo sapiens
  misc_RNA (1)...(19): siRNA sense strand
caaagagacagcauuuauu

SEQ ID NO: 419601 - RNA, 19 nt, Homo sapiens
  misc_RNA (1)...(19): siRNA sense strand
gagacagcauuuauuuaug

SEQ ID NO: 419602 - RNA, 19 nt, Homo sapiens
  misc_RNA (1)...(19): siRNA sense strand
uaauaagucucccaacuac

SEQ ID NO: 419603 - RNA, 19 nt, Homo sapiens
  misc_RNA (1)...(19): siRNA sense strand
ggccauuuguugaaggaua

SEQ ID NO: 419604 - RNA, 19 nt, Homo sapiens
  misc_RNA (1)...(19): siRNA sense strand
aggaugaucugcucuaugu

SEQ ID NO: 419605 - RNA, 19 nt, Homo sapiens
  misc_RNA (1)...(19): siRNA sense strand
gccauuuguugaaggauaa

SEQ ID NO: 419606 - RNA, 19 nt, Homo sapiens
  misc_RNA (1)...(19): siRNA sense strand
ccaaguugaugucaguaga

SEQ ID NO: 419607 - RNA, 19 nt, Homo sapiens
  misc_RNA (1)...(19): siRNA sense strand
gugaaagcaugacugaugu

SEQ ID NO: 419608 - RNA, 19 nt, Homo sapiens
  misc_RNA (1)...(19): siRNA sense strand
agauggaacugcaugauca

SEQ ID NO: 419609 - RNA, 19 nt, Homo sapiens
  misc_RNA (1)...(19): siRNA sense strand
guggagaggugugagugua

SEQ ID NO: 419610 - RNA, 19 nt, Homo sapiens
  misc_RNA (1)...(19): siRNA sense strand
uuaauaagucucccaacua

SEQ ID NO: 419611 - RNA, 19 nt, Homo sapiens
  misc_RNA (1)...(19): siRNA sense strand
guuaauaagucucccaacu

SEQ ID NO: 419612 - RNA, 19 nt, Homo sapiens
  misc_RNA (1)...(19): siRNA sense strand
gcaugugguucagcagaaa

SEQ ID NO: 419613 - RNA, 19 nt, Homo sapiens
  misc_RNA (1)...(19): siRNA sense strand
agaaggagcugugcaagag

SEQ ID NO: 419614 - RNA, 19 nt, Homo sapiens
  misc_RNA (1)...(19): siRNA sense strand
caaaguacuauuagcaaug

SEQ ID NO: 419615 - RNA, 19 nt, Homo sapiens
  misc_RNA (1)...(19): siRNA sense strand
gcaccaaagagacagcauu

SEQ ID NO: 419616 - RNA, 19 nt, Homo sapiens
  misc_RNA (1)...(19): siRNA sense strand
gugaaaacaugcuggaaaa

SEQ ID NO: 419617 - RNA, 19 nt, Homo sapiens
  misc_RNA (1)...(19): siRNA sense strand
caccaaagagacagcauuu

SEQ ID NO: 419618 - RNA, 19 nt, Homo sapiens
  misc_RNA (1)...(19): siRNA sense strand
ggaaaauaccaauccauaa

SEQ ID NO: 419619 - RNA, 19 nt, Homo sapiens
  misc_RNA (1)...(19): siRNA sense strand
aaagauuggccauuuguug

SEQ ID NO: 419620 - RNA, 19 nt, Homo sapiens
  misc_RNA (1)...(19): siRNA sense strand
ccgaugauguccaguaugg

SEQ ID NO: 419621 - RNA, 19 nt, Homo sapiens
  misc_RNA (1)...(19): siRNA sense strand
aaauaccaauccauaagga

SEQ ID NO: 419622 - RNA, 19 nt, Homo sapiens
  misc_RNA (1)...(19): siRNA sense strand
uaaggaugaucugcucuau

SEQ ID NO: 419623 - RNA, 19 nt, Homo sapiens
  misc_RNA (1)...(19): siRNA sense strand
gaaacaccacgggcaaaga

SEQ ID NO: 419624 - RNA, 19 nt, Homo sapiens
  misc_RNA (1)...(19): siRNA sense strand
ggcaggcugucgccaaguu

SEQ ID NO: 419625 - RNA, 19 nt, Homo sapiens
  misc_RNA (1)...(19): siRNA sense strand
aaacaccacgggcaaagaa

SEQ ID NO: 419626 - RNA, 19 nt, Homo sapiens
  misc_RNA (1)...(19): siRNA sense strand
uagcaaugaaccuacauaa

SEQ ID NO: 419627 - RNA, 19 nt, Homo sapiens
  misc_RNA (1)...(19): siRNA sense strand
aagcugggcugcgccaauu

SEQ ID NO: 419628 - RNA, 19 nt, Homo sapiens
  misc_RNA (1)...(19): siRNA sense strand
ggcaugugguucagcagaa

SEQ ID NO: 419629 - RNA, 19 nt, Homo sapiens
  misc_RNA (1)...(19): siRNA sense strand
gaaaauaccaauccauaag

SEQ ID NO: 419630 - RNA, 19 nt, Homo sapiens
  misc_RNA (1)...(19): siRNA sense strand
agcagaaaguuccuagauu

SEQ ID NO: 419631 - RNA, 19 nt, Homo sapiens
  misc_RNA (1)...(19): siRNA sense strand
ggagaggugugaguguaag

SEQ ID NO: 419632 - RNA, 19 nt, Homo sapiens
  misc_RNA (1)...(19): siRNA sense strand
cagcagaaaguuccuagau

SEQ ID NO: 419633 - RNA, 19 nt, Homo sapiens
  misc_RNA (1)...(19): siRNA sense strand
ugugaaagcaugacugaug

SEQ ID NO: 419634 - RNA, 19 nt, Homo sapiens
  misc_RNA (1)...(19): siRNA sense strand
ggugugaaagcaugacuga

SEQ ID NO: 419635 - RNA, 19 nt, Homo sapiens
  misc_RNA (1)...(19): siRNA sense strand
gggcaaagaaaacaaagua

SEQ ID NO: 419636 - RNA, 19 nt, Homo sapiens
  misc_RNA (1)...(19): siRNA sense strand
ggacacaaggcagagaaug

SEQ ID NO: 419637 - RNA, 19 nt, Homo sapiens
  misc_RNA (1)...(19): siRNA sense strand
gagauggaacugcaugauc

SEQ ID NO: 419638 - RNA, 19 nt, Homo sapiens
  misc_RNA (1)...(19): siRNA sense strand
gcaggcaacaugacagagu

SEQ ID NO: 419639 - RNA, 19 nt, Homo sapiens
  misc_RNA (1)...(19): siRNA sense strand
cagaaggagcugugcaaga

SEQ ID NO: 419640 - RNA, 19 nt, Homo sapiens
  misc_RNA (1)...(19): siRNA sense strand
gaaaagauuggccauuugu

SEQ ID NO: 419641 - RNA, 19 nt, Homo sapiens
  misc_RNA (1)...(19): siRNA sense strand
gcuccgaugauguccagua

SEQ ID NO: 419642 - RNA, 19 nt, Homo sapiens
  misc_RNA (1)...(19): siRNA sense strand
gcgccaauuugccgcugaa

SEQ ID NO: 419643 - RNA, 19 nt, Homo sapiens
  misc_RNA (1)...(19): siRNA sense strand
gagguuacaacacccaugu

SEQ ID NO: 419644 - RNA, 19 nt, Homo sapiens
  misc_RNA (1)...(19): siRNA sense strand
gaagcugggcugcgccaau

SEQ ID NO: 419645 - RNA, 19 nt, Homo sapiens
  misc_RNA (1)...(19): siRNA sense strand
ggaaacaccacgggcaaag

SEQ ID NO: 419646 - RNA, 19 nt, Homo sapiens
  misc_RNA (1)...(19): siRNA sense strand
aagauuggccauuuguuga

SEQ ID NO: 419647 - RNA, 19 nt, Homo sapiens
  misc_RNA (1)...(19): siRNA sense strand
ugaaaagauuggccauuug

SEQ ID NO: 419648 - RNA, 19 nt, Homo sapiens
  misc_RNA (1)...(19): siRNA sense strand
gagcagcggcaccaaagag

SEQ ID NO: 419649 - RNA, 19 nt, Homo sapiens
  misc_RNA (1)...(19): siRNA sense strand
gauaagaaacugggaaucc

SEQ ID NO: 419650 - RNA, 19 nt, Homo sapiens
  misc_RNA (1)...(19): siRNA sense strand
cggcuccugugcugugaaa

SEQ ID NO: 419651 - RNA, 19 nt, Homo sapiens
  misc_RNA (1)...(19): siRNA sense strand
gaaugcaaccguacaucag

SEQ ID NO: 419652 - RNA, 19 nt, Homo sapiens
  misc_RNA (1)...(19): siRNA sense strand
gagagauggaacugcauga

SEQ ID NO: 419653 - RNA, 19 nt, Homo sapiens
  misc_RNA (1)...(19): siRNA sense strand
uguagaagauaagaaacug

SEQ ID NO: 419654 - RNA, 19 nt, Homo sapiens
  misc_RNA (1)...(19): siRNA sense strand
gcucuauguuaauaagucu

SEQ ID NO: 419655 - RNA, 19 nt, Homo sapiens
  misc_RNA (1)...(19): siRNA sense strand
augaucugcucuauguuaa

SEQ ID NO: 419656 - RNA, 19 nt, Homo sapiens
  misc_RNA (1)...(19): siRNA sense strand
agaaugcaaccguacauca

SEQ ID NO: 419657 - RNA, 19 nt, Homo sapiens
  misc_RNA (1)...(19): siRNA sense strand
uugaaaagauuggccauuu

SEQ ID NO: 419658 - RNA, 19 nt, Homo sapiens
  misc_RNA (1)...(19): siRNA sense strand
ccaauuugccgcugaacag

SEQ ID NO: 419659 - RNA, 19 nt, Homo sapiens
  misc_RNA (1)...(19): siRNA sense strand
uauuagcaaugaaccuaca

SEQ ID NO: 419660 - RNA, 19 nt, Homo sapiens
  misc_RNA (1)...(19): siRNA sense strand
gaggugugaguguaaguuc

SEQ ID NO: 419661 - RNA, 19 nt, Homo sapiens
  misc_RNA (1)...(19): siRNA sense strand
aaaaugcgcaggagagaaa

SEQ ID NO: 419662 - RNA, 19 nt, Homo sapiens
  misc_RNA (1)...(19): siRNA sense strand
ccagauaucagacaaaaca

SEQ ID NO: 419663 - RNA, 19 nt, Homo sapiens
  misc_RNA (1)...(19): siRNA sense strand
ugaaccuacauaacaauga

SEQ ID NO: 419664 - RNA, 19 nt, Homo sapiens
  misc_RNA (1)...(19): siRNA sense strand
gcugggcugcgccaauuug

SEQ ID NO: 419665 - RNA, 19 nt, Homo sapiens
  misc_RNA (1)...(19): siRNA sense strand
gauuggccauuuguugaag

SEQ ID NO: 419666 - RNA, 19 nt, Homo sapiens
  misc_RNA (1)...(19): siRNA sense strand
gccagaaggagcugugcaa

SEQ ID NO: 419667 - RNA, 19 nt, Homo sapiens
  misc_RNA (1)...(19): siRNA sense strand
gggcugcuccgaugauguc

SEQ ID NO: 419668 - RNA, 19 nt, Homo sapiens
  misc_RNA (1)...(19): siRNA sense strand
ucgccaaguugaugucagu

SEQ ID NO: 419669 - RNA, 19 nt, Homo sapiens
  misc_RNA (1)...(19): siRNA sense strand
aaccaugucuucuuuugaa

SEQ ID NO: 419670 - RNA, 19 nt, Homo sapiens
  misc_RNA (1)...(19): siRNA sense strand
gcaggcugucgccaaguug

SEQ ID NO: 419671 - RNA, 19 nt, Homo sapiens
  misc_RNA (1)...(19): siRNA sense strand
guucaucuggugcugcuau

SEQ ID NO: 419672 - RNA, 19 nt, Homo sapiens
  misc_RNA (1)...(19): siRNA sense strand
gagaaugcaaccguacauc

SEQ ID NO: 419673 - RNA, 19 nt, Homo sapiens
  misc_RNA (1)...(19): siRNA sense strand
gugcaggcaacaugacaga

SEQ ID NO: 419674 - RNA, 19 nt, Homo sapiens
  misc_RNA (1)...(19): siRNA sense strand
auaagucucccaacuacug

SEQ ID NO: 419675 - RNA, 19 nt, Homo sapiens
  misc_RNA (1)...(19): siRNA sense strand
gaucagaggaaaauaccaa

SEQ ID NO: 419676 - RNA, 19 nt, Homo sapiens
  misc_RNA (1)...(19): siRNA sense strand
caguauggcaugugguuca

SEQ ID NO: 419677 - RNA, 19 nt, Homo sapiens
  misc_RNA (1)...(19): siRNA sense strand
gcagaaaguuccuagauuu

SEQ ID NO: 419678 - RNA, 19 nt, Homo sapiens
  misc_RNA (1)...(19): siRNA sense strand
gaucugcucuauguuaaua

SEQ ID NO: 419679 - RNA, 19 nt, Homo sapiens
  misc_RNA (1)...(19): siRNA sense strand
gaaccuacauaacaaugaa

SEQ ID NO: 419680 - RNA, 19 nt, Homo sapiens
  misc_RNA (1)...(19): siRNA sense strand
gcaaugaaccuacauaaca

SEQ ID NO: 419681 - RNA, 19 nt, Homo sapiens
  misc_RNA (1)...(19): siRNA sense strand
gaugaucugcucuauguua

SEQ ID NO: 419682 - RNA, 19 nt, Homo sapiens
  misc_RNA (1)...(19): siRNA sense strand
ggaaaaccaugucuucuuu

SEQ ID NO: 419683 - RNA, 19 nt, Homo sapiens
  misc_RNA (1)...(19): siRNA sense strand
caaugaaccuacauaacaa

SEQ ID NO: 419684 - RNA, 19 nt, Homo sapiens
  misc_RNA (1)...(19): siRNA sense strand
ugacugauguccacacuug

SEQ ID NO: 419685 - RNA, 19 nt, Homo sapiens
  misc_RNA (1)...(19): siRNA sense strand
ccaaagagacagcauuuau

SEQ ID NO: 419686 - RNA, 19 nt, Homo sapiens
  misc_RNA (1)...(19): siRNA sense strand
caaagagacagcauuuauu

SEQ ID NO: 419687 - RNA, 19 nt, Homo sapiens
  misc_RNA (1)...(19): siRNA sense strand
gagacagcauuuauuuaug

SEQ ID NO: 419688 - RNA, 19 nt, Homo sapiens
  misc_RNA (1)...(19): siRNA sense strand
uaauaagucucccaacuac

SEQ ID NO: 419689 - RNA, 19 nt, Homo sapiens
  misc_RNA (1)...(19): siRNA sense strand
ggccauuuguugaaggaua

SEQ ID NO: 419690 - RNA, 19 nt, Homo sapiens
  misc_RNA (1)...(19): siRNA sense strand
aggaugaucugcucuaugu

SEQ ID NO: 419691 - RNA, 19 nt, Homo sapiens
  misc_RNA (1)...(19): siRNA sense strand
gccauuuguugaaggauaa

SEQ ID NO: 419692 - RNA, 19 nt, Homo sapiens
  misc_RNA (1)...(19): siRNA sense strand
ccaaguugaugucaguaga

SEQ ID NO: 419693 - RNA, 19 nt, Homo sapiens
  misc_RNA (1)...(19): siRNA sense strand
gugaaagcaugacugaugu

SEQ ID NO: 419694 - RNA, 19 nt, Homo sapiens
  misc_RNA (1)...(19): siRNA sense strand
agauggaacugcaugauca

SEQ ID NO: 419695 - RNA, 19 nt, Homo sapiens
  misc_RNA (1)...(19): siRNA sense strand
guggagaggugugagugua

SEQ ID NO: 419696 - RNA, 19 nt, Homo sapiens
  misc_RNA (1)...(19): siRNA sense strand
uuaauaagucucccaacua

SEQ ID NO: 419697 - RNA, 19 nt, Homo sapiens
  misc_RNA (1)...(19): siRNA sense strand
guuaauaagucucccaacu

SEQ ID NO: 419698 - RNA, 19 nt, Homo sapiens
  misc_RNA (1)...(19): siRNA sense strand
gcaugugguucagcagaaa

SEQ ID NO: 419699 - RNA, 19 nt, Homo sapiens
  misc_RNA (1)...(19): siRNA sense strand
agaaggagcugugcaagag

SEQ ID NO: 419700 - RNA, 19 nt, Homo sapiens
  misc_RNA (1)...(19): siRNA sense strand
caaaguacuauuagcaaug

SEQ ID NO: 419701 - RNA, 19 nt, Homo sapiens
  misc_RNA (1)...(19): siRNA sense strand
gcaccaaagagacagcauu

SEQ ID NO: 419702 - RNA, 19 nt, Homo sapiens
  misc_RNA (1)...(19): siRNA sense strand
gugaaaacaugcuggaaaa

SEQ ID NO: 419703 - RNA, 19 nt, Homo sapiens
  misc_RNA (1)...(19): siRNA sense strand
caccaaagagacagcauuu

SEQ ID NO: 419704 - RNA, 19 nt, Homo sapiens
  misc_RNA (1)...(19): siRNA sense strand
ggaaaauaccaauccauaa

SEQ ID NO: 419705 - RNA, 19 nt, Homo sapiens
  misc_RNA (1)...(19): siRNA sense strand
aaagauuggccauuuguug

SEQ ID NO: 419706 - RNA, 19 nt, Homo sapiens
  misc_RNA (1)...(19): siRNA sense strand
ccgaugauguccaguaugg

SEQ ID NO: 419707 - RNA, 19 nt, Homo sapiens
  misc_RNA (1)...(19): siRNA sense strand
aaauaccaauccauaagga

SEQ ID NO: 419708 - RNA, 19 nt, Homo sapiens
  misc_RNA (1)...(19): siRNA sense strand
uaaggaugaucugcucuau

SEQ ID NO: 419709 - RNA, 19 nt, Homo sapiens
  misc_RNA (1)...(19): siRNA sense strand
gaaacaccacgggcaaaga

SEQ ID NO: 419710 - RNA, 19 nt, Homo sapiens
  misc_RNA (1)...(19): siRNA sense strand
ggcaggcugucgccaaguu

SEQ ID NO: 419711 - RNA, 19 nt, Homo sapiens
  misc_RNA (1)...(19): siRNA sense strand
aaacaccacgggcaaagaa

SEQ ID NO: 419712 - RNA, 19 nt, Homo sapiens
  misc_RNA (1)...(19): siRNA sense strand
uagcaaugaaccuacauaa

SEQ ID NO: 419713 - RNA, 19 nt, Homo sapiens
  misc_RNA (1)...(19): siRNA sense strand
aagcugggcugcgccaauu

SEQ ID NO: 419714 - RNA, 19 nt, Homo sapiens
  misc_RNA (1)...(19): siRNA sense strand
ggcaugugguucagcagaa

SEQ ID NO: 419715 - RNA, 19 nt, Homo sapiens
  misc_RNA (1)...(19): siRNA sense strand
gaaaauaccaauccauaag

SEQ ID NO: 419716 - RNA, 19 nt, Homo sapiens
  misc_RNA (1)...(19): siRNA sense strand
agcagaaaguuccuagauu

SEQ ID NO: 419717 - RNA, 19 nt, Homo sapiens
  misc_RNA (1)...(19): siRNA sense strand
ggagaggugugaguguaag

SEQ ID NO: 419718 - RNA, 19 nt, Homo sapiens
  misc_RNA (1)...(19): siRNA sense strand
cagcagaaaguuccuagau

SEQ ID NO: 419719 - RNA, 19 nt, Homo sapiens
  misc_RNA (1)...(19): siRNA sense strand
ugugaaagcaugacugaug

SEQ ID NO: 419720 - RNA, 19 nt, Homo sapiens
  misc_RNA (1)...(19): siRNA sense strand
ggugugaaagcaugacuga

SEQ ID NO: 419721 - RNA, 19 nt, Homo sapiens
  misc_RNA (1)...(19): siRNA sense strand
gggcaaagaaaacaaagua

SEQ ID NO: 419722 - RNA, 19 nt, Homo sapiens
  misc_RNA (1)...(19): siRNA sense strand
ggacacaaggcagagaaug

SEQ ID NO: 419723 - RNA, 19 nt, Homo sapiens
  misc_RNA (1)...(19): siRNA sense strand
gagauggaacugcaugauc

SEQ ID NO: 419724 - RNA, 19 nt, Homo sapiens
  misc_RNA (1)...(19): siRNA sense strand
gcaggcaacaugacagagu

SEQ ID NO: 419725 - RNA, 19 nt, Homo sapiens
  misc_RNA (1)...(19): siRNA sense strand
cagaaggagcugugcaaga

SEQ ID NO: 419726 - RNA, 19 nt, Homo sapiens
  misc_RNA (1)...(19): siRNA sense strand
gaaaagauuggccauuugu

SEQ ID NO: 419727 - RNA, 19 nt, Homo sapiens
  misc_RNA (1)...(19): siRNA sense strand
gcuccgaugauguccagua

SEQ ID NO: 419728 - RNA, 19 nt, Homo sapiens
  misc_RNA (1)...(19): siRNA sense strand
gcgccaauuugccgcugaa

SEQ ID NO: 419729 - RNA, 19 nt, Homo sapiens
  misc_RNA (1)...(19): siRNA sense strand
gagguuacaacacccaugu

SEQ ID NO: 419730 - RNA, 19 nt, Homo sapiens
  misc_RNA (1)...(19): siRNA sense strand
gaagcugggcugcgccaau

SEQ ID NO: 419731 - RNA, 19 nt, Homo sapiens
  misc_RNA (1)...(19): siRNA sense strand
ggaaacaccacgggcaaag

SEQ ID NO: 419732 - RNA, 19 nt, Homo sapiens
  misc_RNA (1)...(19): siRNA sense strand
aagauuggccauuuguuga

SEQ ID NO: 419733 - RNA, 19 nt, Homo sapiens
  misc_RNA (1)...(19): siRNA sense strand
ugaaaagauuggccauuug

SEQ ID NO: 419734 - RNA, 19 nt, Homo sapiens
  misc_RNA (1)...(19): siRNA sense strand
gagcagcggcaccaaagag

SEQ ID NO: 419735 - RNA, 19 nt, Homo sapiens
  misc_RNA (1)...(19): siRNA sense strand
gauaagaaacugggaaucc

SEQ ID NO: 419736 - RNA, 19 nt, Homo sapiens
  misc_RNA (1)...(19): siRNA sense strand
cggcuccugugcugugaaa

SEQ ID NO: 419737 - RNA, 19 nt, Homo sapiens
  misc_RNA (1)...(19): siRNA sense strand
gaaugcaaccguacaucag

SEQ ID NO: 419738 - RNA, 19 nt, Homo sapiens
  misc_RNA (1)...(19): siRNA sense strand
gagagauggaacugcauga

SEQ ID NO: 419739 - RNA, 19 nt, Homo sapiens
  misc_RNA (1)...(19): siRNA sense strand
uguagaagauaagaaacug

SEQ ID NO: 419740 - RNA, 19 nt, Homo sapiens
  misc_RNA (1)...(19): siRNA sense strand
gcucuauguuaauaagucu

SEQ ID NO: 419741 - RNA, 19 nt, Homo sapiens
  misc_RNA (1)...(19): siRNA sense strand
augaucugcucuauguuaa

SEQ ID NO: 419742 - RNA, 19 nt, Homo sapiens
  misc_RNA (1)...(19): siRNA sense strand
agaaugcaaccguacauca

SEQ ID NO: 419743 - RNA, 19 nt, Homo sapiens
  misc_RNA (1)...(19): siRNA sense strand
uugaaaagauuggccauuu

SEQ ID NO: 419744 - RNA, 19 nt, Homo sapiens
  misc_RNA (1)...(19): siRNA sense strand
ccaauuugccgcugaacag

SEQ ID NO: 419745 - RNA, 19 nt, Homo sapiens
  misc_RNA (1)...(19): siRNA sense strand
uauuagcaaugaaccuaca

SEQ ID NO: 419746 - RNA, 19 nt, Homo sapiens
  misc_RNA (1)...(19): siRNA sense strand
gaggugugaguguaaguuc

SEQ ID NO: 419747 - RNA, 19 nt, Homo sapiens
  misc_RNA (1)...(19): siRNA sense strand
aaaaugcgcaggagagaaa

SEQ ID NO: 419748 - RNA, 19 nt, Homo sapiens
  misc_RNA (1)...(19): siRNA sense strand
ccagauaucagacaaaaca

SEQ ID NO: 419749 - RNA, 19 nt, Homo sapiens
  misc_RNA (1)...(19): siRNA sense strand
ugaaccuacauaacaauga

SEQ ID NO: 419750 - RNA, 19 nt, Homo sapiens
  misc_RNA (1)...(19): siRNA sense strand
gcugggcugcgccaauuug

SEQ ID NO: 419751 - RNA, 19 nt, Homo sapiens
  misc_RNA (1)...(19): siRNA sense strand
gauuggccauuuguugaag

SEQ ID NO: 419752 - RNA, 19 nt, Homo sapiens
  misc_RNA (1)...(19): siRNA sense strand
gccagaaggagcugugcaa

SEQ ID NO: 419753 - RNA, 19 nt, Homo sapiens
  misc_RNA (1)...(19): siRNA sense strand
gggcugcuccgaugauguc

SEQ ID NO: 419754 - RNA, 19 nt, Homo sapiens
  misc_RNA (1)...(19): siRNA sense strand
ucgccaaguugaugucagu

SEQ ID NO: 419755 - RNA, 19 nt, Homo sapiens
  misc_RNA (1)...(19): siRNA sense strand
aaccaugucuucuuuugaa

SEQ ID NO: 419756 - RNA, 19 nt, Homo sapiens
  misc_RNA (1)...(19): siRNA sense strand
gcaggcugucgccaaguug

SEQ ID NO: 419757 - RNA, 19 nt, Homo sapiens
  misc_RNA (1)...(19): siRNA sense strand
guucaucuggugcugcuau

SEQ ID NO: 419758 - RNA, 19 nt, Homo sapiens
  misc_RNA (1)...(19): siRNA sense strand
gagaaugcaaccguacauc

SEQ ID NO: 419759 - RNA, 19 nt, Homo sapiens
  misc_RNA (1)...(19): siRNA sense strand
gugcaggcaacaugacaga

SEQ ID NO: 419760 - RNA, 19 nt, Homo sapiens
  misc_RNA (1)...(19): siRNA sense strand
auaagucucccaacuacug

SEQ ID NO: 419761 - RNA, 19 nt, Homo sapiens
  misc_RNA (1)...(19): siRNA sense strand
gaucagaggaaaauaccaa

SEQ ID NO: 419762 - RNA, 19 nt, Homo sapiens
  misc_RNA (1)...(19): siRNA sense strand
caguauggcaugugguuca

SEQ ID NO: 419763 - RNA, 19 nt, Homo sapiens
  misc_RNA (1)...(19): siRNA sense strand
gcaaagcugucaucgugaa

SEQ ID NO: 419764 - RNA, 19 nt, Homo sapiens
  misc_RNA (1)...(19): siRNA sense strand
caauaaggaugucuucaga

SEQ ID NO: 419765 - RNA, 19 nt, Homo sapiens
  misc_RNA (1)...(19): siRNA sense strand
agaagaagaucgccaagag

SEQ ID NO: 419766 - RNA, 19 nt, Homo sapiens
  misc_RNA (1)...(19): siRNA sense strand
gaagaagaucgccaagaga

SEQ ID NO: 419767 - RNA, 19 nt, Homo sapiens
  misc_RNA (1)...(19): siRNA sense strand
acaaaacugucgucaauaa

SEQ ID NO: 419768 - RNA, 19 nt, Homo sapiens
  misc_RNA (1)...(19): siRNA sense strand
auaaggaugucuucagaga

SEQ ID NO: 419769 - RNA, 19 nt, Homo sapiens
  misc_RNA (1)...(19): siRNA sense strand
aaacugucgucaauaagga

SEQ ID NO: 419770 - RNA, 19 nt, Homo sapiens
  misc_RNA (1)...(19): siRNA sense strand
caagguacucuguggauau

SEQ ID NO: 419771 - RNA, 19 nt, Homo sapiens
  misc_RNA (1)...(19): siRNA sense strand
gaugauggcaccucagauc

SEQ ID NO: 419772 - RNA, 19 nt, Homo sapiens
  misc_RNA (1)...(19): siRNA sense strand
acaagguacucuguggaua

SEQ ID NO: 419773 - RNA, 19 nt, Homo sapiens
  misc_RNA (1)...(19): siRNA sense strand
aaggaugucuucagagauc

SEQ ID NO: 419774 - RNA, 19 nt, Homo sapiens
  misc_RNA (1)...(19): siRNA sense strand
gauacaagacaggcaagaa

SEQ ID NO: 419775 - RNA, 19 nt, Homo sapiens
  misc_RNA (1)...(19): siRNA sense strand
ggaggccaaggucaaguuu

SEQ ID NO: 419776 - RNA, 19 nt, Homo sapiens
  misc_RNA (1)...(19): siRNA sense strand
gugaagaacauugaugaug

SEQ ID NO: 419777 - RNA, 19 nt, Homo sapiens
  misc_RNA (1)...(19): siRNA sense strand
aagcugucaucgugaagaa

SEQ ID NO: 419778 - RNA, 19 nt, Homo sapiens
  misc_RNA (1)...(19): siRNA sense strand
aagaagaucgccaagagau

SEQ ID NO: 419779 - RNA, 19 nt, Homo sapiens
  misc_RNA (1)...(19): siRNA sense strand
gauauccccuuggacaaaa

SEQ ID NO: 419780 - RNA, 19 nt, Homo sapiens
  misc_RNA (1)...(19): siRNA sense strand
gggaggccaaggucaaguu

SEQ ID NO: 419781 - RNA, 19 nt, Homo sapiens
  misc_RNA (1)...(19): siRNA sense strand
gccaugggcaagaagaaga

SEQ ID NO: 419782 - RNA, 19 nt, Homo sapiens
  misc_RNA (1)...(19): siRNA sense strand
agacaggcaagaacaagug

SEQ ID NO: 419783 - RNA, 19 nt, Homo sapiens
  misc_RNA (1)...(19): siRNA sense strand
ucaauaaggaugucuucag

SEQ ID NO: 419784 - RNA, 19 nt, Homo sapiens
  misc_RNA (1)...(19): siRNA sense strand
cugggaagguggugcuugu

SEQ ID NO: 419785 - RNA, 19 nt, Homo sapiens
  misc_RNA (1)...(19): siRNA sense strand
gcugucaucgugaagaaca

SEQ ID NO: 419786 - RNA, 19 nt, Homo sapiens
  misc_RNA (1)...(19): siRNA sense strand
gacgggaggccaaggucaa

SEQ ID NO: 419787 - RNA, 19 nt, Homo sapiens
  misc_RNA (1)...(19): siRNA sense strand
caagacaggcaagaacaag

SEQ ID NO: 419788 - RNA, 19 nt, Homo sapiens
  misc_RNA (1)...(19): siRNA sense strand
guugagaccuuguauaaua

SEQ ID NO: 419789 - RNA, 19 nt, Homo sapiens
  misc_RNA (1)...(19): siRNA sense strand
ggacagcacuuuauaauac

SEQ ID NO: 419790 - RNA, 19 nt, Homo sapiens
  misc_RNA (1)...(19): siRNA sense strand
ggaaaccacugcaagcaaa

SEQ ID NO: 419791 - RNA, 19 nt, Homo sapiens
  misc_RNA (1)...(19): siRNA sense strand
uaacggugcuaacucuaua

SEQ ID NO: 419792 - RNA, 19 nt, Homo sapiens
  misc_RNA (1)...(19): siRNA sense strand
gaaguuagcucgguucaac

SEQ ID NO: 419793 - RNA, 19 nt, Homo sapiens
  misc_RNA (1)...(19): siRNA sense strand
ggaaaacucccguugauua

SEQ ID NO: 419794 - RNA, 19 nt, Homo sapiens
  misc_RNA (1)...(19): siRNA sense strand
gauaaaguacaucccaaua

SEQ ID NO: 419795 - RNA, 19 nt, Homo sapiens
  misc_RNA (1)...(19): siRNA sense strand
ccaaagaucuuagcaagca

SEQ ID NO: 419796 - RNA, 19 nt, Homo sapiens
  misc_RNA (1)...(19): siRNA sense strand
guucaacgcccaugaguuu

SEQ ID NO: 419797 - RNA, 19 nt, Homo sapiens
  misc_RNA (1)...(19): siRNA sense strand
cgccauaucucccaaguga

SEQ ID NO: 419798 - RNA, 19 nt, Homo sapiens
  misc_RNA (1)...(19): siRNA sense strand
guuugagacuguuaucuuu

SEQ ID NO: 419799 - RNA, 19 nt, Homo sapiens
  misc_RNA (1)...(19): siRNA sense strand
gcagacagcagccuggauu

SEQ ID NO: 419800 - RNA, 19 nt, Homo sapiens
  misc_RNA (1)...(19): siRNA sense strand
caauaaagcggaauucauc

SEQ ID NO: 419801 - RNA, 19 nt, Homo sapiens
  misc_RNA (1)...(19): siRNA sense strand
gacccugcgucuauuauga

SEQ ID NO: 419802 - RNA, 19 nt, Homo sapiens
  misc_RNA (1)...(19): siRNA sense strand
ucauugacauucucaguga

SEQ ID NO: 419803 - RNA, 19 nt, Homo sapiens
  misc_RNA (1)...(19): siRNA sense strand
ggacagacuagccuucuau

SEQ ID NO: 419804 - RNA, 19 nt, Homo sapiens
  misc_RNA (1)...(19): siRNA sense strand
gaacagggaaucuugaaac

SEQ ID NO: 419805 - RNA, 19 nt, Homo sapiens
  misc_RNA (1)...(19): siRNA sense strand
caacacugcuucagauggu

SEQ ID NO: 419806 - RNA, 19 nt, Homo sapiens
  misc_RNA (1)...(19): siRNA sense strand
caagccaacuucuuucauc

SEQ ID NO: 419807 - RNA, 19 nt, Homo sapiens
  misc_RNA (1)...(19): siRNA sense strand
uuuacaggcugaauuauug

SEQ ID NO: 419808 - RNA, 19 nt, Homo sapiens
  misc_RNA (1)...(19): siRNA sense strand
gaaguugacaggcgagaga

SEQ ID NO: 419809 - RNA, 19 nt, Homo sapiens
  misc_RNA (1)...(19): siRNA sense strand
uaauaacggugcuaacucu

SEQ ID NO: 419810 - RNA, 19 nt, Homo sapiens
  misc_RNA (1)...(19): siRNA sense strand
gcagagcgccucguggaaa

SEQ ID NO: 419811 - RNA, 19 nt, Homo sapiens
  misc_RNA (1)...(19): siRNA sense strand
gcaggaaaccagaucacaa

SEQ ID NO: 419812 - RNA, 19 nt, Homo sapiens
  misc_RNA (1)...(19): siRNA sense strand
gaagacacagauuuggaaa

SEQ ID NO: 419813 - RNA, 19 nt, Homo sapiens
  misc_RNA (1)...(19): siRNA sense strand
caggaaaccagaucacaaa

SEQ ID NO: 419814 - RNA, 19 nt, Homo sapiens
  misc_RNA (1)...(19): siRNA sense strand
gaaaucagggcagacagaa

SEQ ID NO: 419815 - RNA, 19 nt, Homo sapiens
  misc_RNA (1)...(19): siRNA sense strand
uugaagaacuugccaugga

SEQ ID NO: 419816 - RNA, 19 nt, Homo sapiens
  misc_RNA (1)...(19): siRNA sense strand
gcacaagccaacuucuuuc

SEQ ID NO: 419817 - RNA, 19 nt, Homo sapiens
  misc_RNA (1)...(19): siRNA sense strand
agacuagccuucuaucucu

SEQ ID NO: 419818 - RNA, 19 nt, Homo sapiens
  misc_RNA (1)...(19): siRNA sense strand
gagaacagggaaucuugaa

SEQ ID NO: 419819 - RNA, 19 nt, Homo sapiens
  misc_RNA (1)...(19): siRNA sense strand
ugaagaacuugccauggau

SEQ ID NO: 419820 - RNA, 19 nt, Homo sapiens
  misc_RNA (1)...(19): siRNA sense strand
cgaagacacagauuuggaa

SEQ ID NO: 419821 - RNA, 19 nt, Homo sapiens
  misc_RNA (1)...(19): siRNA sense strand
gagcacaagccaacuucuu

SEQ ID NO: 419822 - RNA, 19 nt, Homo sapiens
  misc_RNA (1)...(19): siRNA sense strand
agacgaagacacagauuug

SEQ ID NO: 419823 - RNA, 19 nt, Homo sapiens
  misc_RNA (1)...(19): siRNA sense strand
guaaauaggggaacguuuu

SEQ ID NO: 419824 - RNA, 19 nt, Homo sapiens
  misc_RNA (1)...(19): siRNA sense strand
aaauggacagcacuuuaua

SEQ ID NO: 419825 - RNA, 19 nt, Homo sapiens
  misc_RNA (1)...(19): siRNA sense strand
ggcaaaagcugcuaagaag

SEQ ID NO: 419826 - RNA, 19 nt, Homo sapiens
  misc_RNA (1)...(19): siRNA sense strand
ggagacagcagggcaguuc

SEQ ID NO: 419827 - RNA, 19 nt, Homo sapiens
  misc_RNA (1)...(19): siRNA sense strand
ugguugagaccuuguauaa

SEQ ID NO: 419828 - RNA, 19 nt, Homo sapiens
  misc_RNA (1)...(19): siRNA sense strand
gauguuagcguucguccau

SEQ ID NO: 419829 - RNA, 19 nt, Homo sapiens
  misc_RNA (1)...(19): siRNA sense strand
agccaaguaucagauguua

SEQ ID NO: 419830 - RNA, 19 nt, Homo sapiens
  misc_RNA (1)...(19): siRNA sense strand
guggaagacguaaagcuaa

SEQ ID NO: 419831 - RNA, 19 nt, Homo sapiens
  misc_RNA (1)...(19): siRNA sense strand
acgaucagcccgacuauga

SEQ ID NO: 419832 - RNA, 19 nt, Homo sapiens
  misc_RNA (1)...(19): siRNA sense strand
cagagcgccucguggaaau

SEQ ID NO: 419833 - RNA, 19 nt, Homo sapiens
  misc_RNA (1)...(19): siRNA sense strand
gcaaggagggcaccaugag

SEQ ID NO: 419834 - RNA, 19 nt, Homo sapiens
  misc_RNA (1)...(19): siRNA sense strand
gcugaauuauuggcaguau

SEQ ID NO: 419835 - RNA, 19 nt, Homo sapiens
  misc_RNA (1)...(19): siRNA sense strand
ccaagugaggcaucugaaa

SEQ ID NO: 419836 - RNA, 19 nt, Homo sapiens
  misc_RNA (1)...(19): siRNA sense strand
caaaagcugcuaagaagaa

SEQ ID NO: 419837 - RNA, 19 nt, Homo sapiens
  misc_RNA (1)...(19): siRNA sense strand
cuauaugggagcauucuuu

SEQ ID NO: 419838 - RNA, 19 nt, Homo sapiens
  misc_RNA (1)...(19): siRNA sense strand
cgaaaucagggcagacaga

SEQ ID NO: 419839 - RNA, 19 nt, Homo sapiens
  misc_RNA (1)...(19): siRNA sense strand
guacucaucaacacgaaau

SEQ ID NO: 419840 - RNA, 19 nt, Homo sapiens
  misc_RNA (1)...(19): siRNA sense strand
gccuggauuugucugaauu

SEQ ID NO: 419841 - RNA, 19 nt, Homo sapiens
  misc_RNA (1)...(19): siRNA sense strand
gaaaacucccguugauuau

SEQ ID NO: 419842 - RNA, 19 nt, Homo sapiens
  misc_RNA (1)...(19): siRNA sense strand
gauuuuacaggcugaauua

SEQ ID NO: 419843 - RNA, 19 nt, Homo sapiens
  misc_RNA (1)...(19): siRNA sense strand
gagccaaguaucagauguu

SEQ ID NO: 419844 - RNA, 19 nt, Homo sapiens
  misc_RNA (1)...(19): siRNA sense strand
uaaagcggaauucaucaga

SEQ ID NO: 419845 - RNA, 19 nt, Homo sapiens
  misc_RNA (1)...(19): siRNA sense strand
ccaauaaagcggaauucau

SEQ ID NO: 419846 - RNA, 19 nt, Homo sapiens
  misc_RNA (1)...(19): siRNA sense strand
gcuggacccugcgucuauu

SEQ ID NO: 419847 - RNA, 19 nt, Homo sapiens
  misc_RNA (1)...(19): siRNA sense strand
uggaagacguaaagcuaau

SEQ ID NO: 419848 - RNA, 19 nt, Homo sapiens
  misc_RNA (1)...(19): siRNA sense strand
cagacgaagacacagauuu

SEQ ID NO: 419849 - RNA, 19 nt, Homo sapiens
  misc_RNA (1)...(19): siRNA sense strand
uugccacgcuggucauuga

SEQ ID NO: 419850 - RNA, 19 nt, Homo sapiens
  misc_RNA (1)...(19): siRNA sense strand
uggacagcacuuuauaaua

SEQ ID NO: 419851 - RNA, 19 nt, Homo sapiens
  misc_RNA (1)...(19): siRNA sense strand
aaacucccguugauuaugc

SEQ ID NO: 419852 - RNA, 19 nt, Homo sapiens
  misc_RNA (1)...(19): siRNA sense strand
ggaugacgauagugugacu

SEQ ID NO: 419853 - RNA, 19 nt, Homo sapiens
  misc_RNA (1)...(19): siRNA sense strand
cagcguggcaucagacgaa

SEQ ID NO: 419854 - RNA, 19 nt, Homo sapiens
  misc_RNA (1)...(19): siRNA sense strand
gaguacucaucaacacgaa

SEQ ID NO: 419855 - RNA, 19 nt, Homo sapiens
  misc_RNA (1)...(19): siRNA sense strand
cugaauuauuggcaguaua

SEQ ID NO: 419856 - RNA, 19 nt, Homo sapiens
  misc_RNA (1)...(19): siRNA sense strand
caaagaucuuagcaagcaa

SEQ ID NO: 419857 - RNA, 19 nt, Homo sapiens
  misc_RNA (1)...(19): siRNA sense strand
gugagaacagggaaucuug

SEQ ID NO: 419858 - RNA, 19 nt, Homo sapiens
  misc_RNA (1)...(19): siRNA sense strand
gaucagcccgacuaugaca

SEQ ID NO: 419859 - RNA, 19 nt, Homo sapiens
  misc_RNA (1)...(19): siRNA sense strand
uagugugacugccaaagau

SEQ ID NO: 419860 - RNA, 19 nt, Homo sapiens
  misc_RNA (1)...(19): siRNA sense strand
gacagcagccuggauuugu

SEQ ID NO: 419861 - RNA, 19 nt, Homo sapiens
  misc_RNA (1)...(19): siRNA sense strand
gagcagacccaggcacaca

SEQ ID NO: 419862 - RNA, 19 nt, Homo sapiens
  misc_RNA (1)...(19): siRNA sense strand
ugagcuaacggacagacua

SEQ ID NO: 419863 - RNA, 19 nt, Homo sapiens
  misc_RNA (1)...(19): siRNA sense strand
caagugaggcaucugaaac

SEQ ID NO: 419864 - RNA, 19 nt, Homo sapiens
  misc_RNA (1)...(19): siRNA sense strand
cggacagacuagccuucua

SEQ ID NO: 419865 - RNA, 19 nt, Homo sapiens
  misc_RNA (1)...(19): siRNA sense strand
ggacccugcgucuauuaug

SEQ ID NO: 419866 - RNA, 19 nt, Homo sapiens
  misc_RNA (1)...(19): siRNA sense strand
cagcagggcaguucucucu

SEQ ID NO: 419867 - RNA, 19 nt, Homo sapiens
  misc_RNA (1)...(19): siRNA sense strand
gagcuaacggacagacuag

SEQ ID NO: 419868 - RNA, 19 nt, Homo sapiens
  misc_RNA (1)...(19): siRNA sense strand
acaggauucuagugggaaa

SEQ ID NO: 419869 - RNA, 19 nt, Homo sapiens
  misc_RNA (1)...(19): siRNA sense strand
caaagcagggcagauuuua

SEQ ID NO: 419870 - RNA, 19 nt, Homo sapiens
  misc_RNA (1)...(19): siRNA sense strand
ccaaguaucagauguuagc

SEQ ID NO: 419871 - RNA, 19 nt, Homo sapiens
  misc_RNA (1)...(19): siRNA sense strand
gacccaggcacacaggauu

SEQ ID NO: 419872 - RNA, 19 nt, Homo sapiens
  misc_RNA (1)...(19): siRNA sense strand
caucagacgaagacacaga

SEQ ID NO: 419873 - RNA, 19 nt, Homo sapiens
  misc_RNA (1)...(19): siRNA sense strand
acaacgaucagcccgacua

SEQ ID NO: 419874 - RNA, 19 nt, Homo sapiens
  misc_RNA (1)...(19): siRNA sense strand
uauaugggagcauucuuug

SEQ ID NO: 419875 - RNA, 19 nt, Homo sapiens
  misc_RNA (1)...(19): siRNA sense strand
cuccaacacugcuucagau

SEQ ID NO: 419876 - RNA, 19 nt, Homo sapiens
  misc_RNA (1)...(19): siRNA sense strand
cagacuagccuucuaucuc

SEQ ID NO: 419877 - RNA, 19 nt, Homo sapiens
  misc_RNA (1)...(19): siRNA sense strand
ugagaacagggaaucuuga

SEQ ID NO: 419878 - RNA, 19 nt, Homo sapiens
  misc_RNA (1)...(19): siRNA sense strand
uugagacuguuaucuuuag

SEQ ID NO: 419879 - RNA, 19 nt, Homo sapiens
  misc_RNA (1)...(19): siRNA sense strand
caacgaucagcccgacuau

SEQ ID NO: 419880 - RNA, 19 nt, Homo sapiens
  misc_RNA (1)...(19): siRNA sense strand
cagccuggauuugucugaa

SEQ ID NO: 419881 - RNA, 19 nt, Homo sapiens
  misc_RNA (1)...(19): siRNA sense strand
aauggacagcacuuuauaa

SEQ ID NO: 419882 - RNA, 19 nt, Homo sapiens
  misc_RNA (1)...(19): siRNA sense strand
aguggaagacguaaagcua

SEQ ID NO: 419883 - RNA, 19 nt, Homo sapiens
  misc_RNA (1)...(19): siRNA sense strand
aaucagggcagacagaagu

SEQ ID NO: 419884 - RNA, 19 nt, Homo sapiens
  misc_RNA (1)...(19): siRNA sense strand
agacacagauuuggaaacc

SEQ ID NO: 419885 - RNA, 19 nt, Homo sapiens
  misc_RNA (1)...(19): siRNA sense strand
auguggagcucauacugaa

SEQ ID NO: 419886 - RNA, 19 nt, Homo sapiens
  misc_RNA (1)...(19): siRNA sense strand
uauaauaacggugcuaacu

SEQ ID NO: 419887 - RNA, 19 nt, Homo sapiens
  misc_RNA (1)...(19): siRNA sense strand
ucagggcagacagaaguua

SEQ ID NO: 419888 - RNA, 19 nt, Homo sapiens
  misc_RNA (1)...(19): siRNA sense strand
guugagaccuuguauaaua

SEQ ID NO: 419889 - RNA, 19 nt, Homo sapiens
  misc_RNA (1)...(19): siRNA sense strand
ggacagcacuuuauaauac

SEQ ID NO: 419890 - RNA, 19 nt, Homo sapiens
  misc_RNA (1)...(19): siRNA sense strand
ggaaaccacugcaagcaaa

SEQ ID NO: 419891 - RNA, 19 nt, Homo sapiens
  misc_RNA (1)...(19): siRNA sense strand
uaacggugcuaacucuaua

SEQ ID NO: 419892 - RNA, 19 nt, Homo sapiens
  misc_RNA (1)...(19): siRNA sense strand
gaaguuagcucgguucaac

SEQ ID NO: 419893 - RNA, 19 nt, Homo sapiens
  misc_RNA (1)...(19): siRNA sense strand
ggaaaacucccguugauua

SEQ ID NO: 419894 - RNA, 19 nt, Homo sapiens
  misc_RNA (1)...(19): siRNA sense strand
gauaaaguacaucccaaua

SEQ ID NO: 419895 - RNA, 19 nt, Homo sapiens
  misc_RNA (1)...(19): siRNA sense strand
ccaaagaucuuagcaagca

SEQ ID NO: 419896 - RNA, 19 nt, Homo sapiens
  misc_RNA (1)...(19): siRNA sense strand
guucaacgcccaugaguuu

SEQ ID NO: 419897 - RNA, 19 nt, Homo sapiens
  misc_RNA (1)...(19): siRNA sense strand
cgccauaucucccaaguga

SEQ ID NO: 419898 - RNA, 19 nt, Homo sapiens
  misc_RNA (1)...(19): siRNA sense strand
guuugagacuguuaucuuu

SEQ ID NO: 419899 - RNA, 19 nt, Homo sapiens
  misc_RNA (1)...(19): siRNA sense strand
gcagacagcagccuggauu

SEQ ID NO: 419900 - RNA, 19 nt, Homo sapiens
  misc_RNA (1)...(19): siRNA sense strand
caauaaagcggaauucauc

SEQ ID NO: 419901 - RNA, 19 nt, Homo sapiens
  misc_RNA (1)...(19): siRNA sense strand
gacccugcgucuauuauga

SEQ ID NO: 419902 - RNA, 19 nt, Homo sapiens
  misc_RNA (1)...(19): siRNA sense strand
ucauugacauucucaguga

SEQ ID NO: 419903 - RNA, 19 nt, Homo sapiens
  misc_RNA (1)...(19): siRNA sense strand
ggacagacuagccuucuau

SEQ ID NO: 419904 - RNA, 19 nt, Homo sapiens
  misc_RNA (1)...(19): siRNA sense strand
gaacagggaaucuugaaac

SEQ ID NO: 419905 - RNA, 19 nt, Homo sapiens
  misc_RNA (1)...(19): siRNA sense strand
caacacugcuucagauggu

SEQ ID NO: 419906 - RNA, 19 nt, Homo sapiens
  misc_RNA (1)...(19): siRNA sense strand
caagccaacuucuuucauc

SEQ ID NO: 419907 - RNA, 19 nt, Homo sapiens
  misc_RNA (1)...(19): siRNA sense strand
uuuacaggcugaauuauug

SEQ ID NO: 419908 - RNA, 19 nt, Homo sapiens
  misc_RNA (1)...(19): siRNA sense strand
gaaguugacaggcgagaga

SEQ ID NO: 419909 - RNA, 19 nt, Homo sapiens
  misc_RNA (1)...(19): siRNA sense strand
uaauaacggugcuaacucu

SEQ ID NO: 419910 - RNA, 19 nt, Homo sapiens
  misc_RNA (1)...(19): siRNA sense strand
gcagagcgccucguggaaa

SEQ ID NO: 419911 - RNA, 19 nt, Homo sapiens
  misc_RNA (1)...(19): siRNA sense strand
gcaggaaaccagaucacaa

SEQ ID NO: 419912 - RNA, 19 nt, Homo sapiens
  misc_RNA (1)...(19): siRNA sense strand
gaagacacagauuuggaaa

SEQ ID NO: 419913 - RNA, 19 nt, Homo sapiens
  misc_RNA (1)...(19): siRNA sense strand
caggaaaccagaucacaaa

SEQ ID NO: 419914 - RNA, 19 nt, Homo sapiens
  misc_RNA (1)...(19): siRNA sense strand
gaaaucagggcagacagaa

SEQ ID NO: 419915 - RNA, 19 nt, Homo sapiens
  misc_RNA (1)...(19): siRNA sense strand
uugaagaacuugccaugga

SEQ ID NO: 419916 - RNA, 19 nt, Homo sapiens
  misc_RNA (1)...(19): siRNA sense strand
gcacaagccaacuucuuuc

SEQ ID NO: 419917 - RNA, 19 nt, Homo sapiens
  misc_RNA (1)...(19): siRNA sense strand
agacuagccuucuaucucu

SEQ ID NO: 419918 - RNA, 19 nt, Homo sapiens
  misc_RNA (1)...(19): siRNA sense strand
gagaacagggaaucuugaa

SEQ ID NO: 419919 - RNA, 19 nt, Homo sapiens
  misc_RNA (1)...(19): siRNA sense strand
ugaagaacuugccauggau

SEQ ID NO: 419920 - RNA, 19 nt, Homo sapiens
  misc_RNA (1)...(19): siRNA sense strand
cgaagacacagauuuggaa

SEQ ID NO: 419921 - RNA, 19 nt, Homo sapiens
  misc_RNA (1)...(19): siRNA sense strand
gagcacaagccaacuucuu

SEQ ID NO: 419922 - RNA, 19 nt, Homo sapiens
  misc_RNA (1)...(19): siRNA sense strand
agacgaagacacagauuug

SEQ ID NO: 419923 - RNA, 19 nt, Homo sapiens
  misc_RNA (1)...(19): siRNA sense strand
guaaauaggggaacguuuu

SEQ ID NO: 419924 - RNA, 19 nt, Homo sapiens
  misc_RNA (1)...(19): siRNA sense strand
aaauggacagcacuuuaua

SEQ ID NO: 419925 - RNA, 19 nt, Homo sapiens
  misc_RNA (1)...(19): siRNA sense strand
ggcaaaagcugcuaagaag

SEQ ID NO: 419926 - RNA, 19 nt, Homo sapiens
  misc_RNA (1)...(19): siRNA sense strand
ggagacagcagggcaguuc

SEQ ID NO: 419927 - RNA, 19 nt, Homo sapiens
  misc_RNA (1)...(19): siRNA sense strand
ugguugagaccuuguauaa

SEQ ID NO: 419928 - RNA, 19 nt, Homo sapiens
  misc_RNA (1)...(19): siRNA sense strand
gauguuagcguucguccau

SEQ ID NO: 419929 - RNA, 19 nt, Homo sapiens
  misc_RNA (1)...(19): siRNA sense strand
agccaaguaucagauguua

SEQ ID NO: 419930 - RNA, 19 nt, Homo sapiens
  misc_RNA (1)...(19): siRNA sense strand
guggaagacguaaagcuaa

SEQ ID NO: 419931 - RNA, 19 nt, Homo sapiens
  misc_RNA (1)...(19): siRNA sense strand
acgaucagcccgacuauga

SEQ ID NO: 419932 - RNA, 19 nt, Homo sapiens
  misc_RNA (1)...(19): siRNA sense strand
cagagcgccucguggaaau

SEQ ID NO: 419933 - RNA, 19 nt, Homo sapiens
  misc_RNA (1)...(19): siRNA sense strand
gcaaggagggcaccaugag

SEQ ID NO: 419934 - RNA, 19 nt, Homo sapiens
  misc_RNA (1)...(19): siRNA sense strand
gcugaauuauuggcaguau

SEQ ID NO: 419935 - RNA, 19 nt, Homo sapiens
  misc_RNA (1)...(19): siRNA sense strand
ccaagugaggcaucugaaa

SEQ ID NO: 419936 - RNA, 19 nt, Homo sapiens
  misc_RNA (1)...(19): siRNA sense strand
caaaagcugcuaagaagaa

SEQ ID NO: 419937 - RNA, 19 nt, Homo sapiens
  misc_RNA (1)...(19): siRNA sense strand
cuauaugggagcauucuuu

SEQ ID NO: 419938 - RNA, 19 nt, Homo sapiens
  misc_RNA (1)...(19): siRNA sense strand
cgaaaucagggcagacaga

SEQ ID NO: 419939 - RNA, 19 nt, Homo sapiens
  misc_RNA (1)...(19): siRNA sense strand
guacucaucaacacgaaau

SEQ ID NO: 419940 - RNA, 19 nt, Homo sapiens
  misc_RNA (1)...(19): siRNA sense strand
gccuggauuugucugaauu

SEQ ID NO: 419941 - RNA, 19 nt, Homo sapiens
  misc_RNA (1)...(19): siRNA sense strand
gaaaacucccguugauuau

SEQ ID NO: 419942 - RNA, 19 nt, Homo sapiens
  misc_RNA (1)...(19): siRNA sense strand
gauuuuacaggcugaauua

SEQ ID NO: 419943 - RNA, 19 nt, Homo sapiens
  misc_RNA (1)...(19): siRNA sense strand
gagccaaguaucagauguu

SEQ ID NO: 419944 - RNA, 19 nt, Homo sapiens
  misc_RNA (1)...(19): siRNA sense strand
uaaagcggaauucaucaga

SEQ ID NO: 419945 - RNA, 19 nt, Homo sapiens
  misc_RNA (1)...(19): siRNA sense strand
ccaauaaagcggaauucau

SEQ ID NO: 419946 - RNA, 19 nt, Homo sapiens
  misc_RNA (1)...(19): siRNA sense strand
gcuggacccugcgucuauu

SEQ ID NO: 419947 - RNA, 19 nt, Homo sapiens
  misc_RNA (1)...(19): siRNA sense strand
uggaagacguaaagcuaau

SEQ ID NO: 419948 - RNA, 19 nt, Homo sapiens
  misc_RNA (1)...(19): siRNA sense strand
cagacgaagacacagauuu

SEQ ID NO: 419949 - RNA, 19 nt, Homo sapiens
  misc_RNA (1)...(19): siRNA sense strand
uugccacgcuggucauuga

SEQ ID NO: 419950 - RNA, 19 nt, Homo sapiens
  misc_RNA (1)...(19): siRNA sense strand
uggacagcacuuuauaaua

SEQ ID NO: 419951 - RNA, 19 nt, Homo sapiens
  misc_RNA (1)...(19): siRNA sense strand
aaacucccguugauuaugc

SEQ ID NO: 419952 - RNA, 19 nt, Homo sapiens
  misc_RNA (1)...(19): siRNA sense strand
ggaugacgauagugugacu

SEQ ID NO: 419953 - RNA, 19 nt, Homo sapiens
  misc_RNA (1)...(19): siRNA sense strand
cagcguggcaucagacgaa

SEQ ID NO: 419954 - RNA, 19 nt, Homo sapiens
  misc_RNA (1)...(19): siRNA sense strand
gaguacucaucaacacgaa

SEQ ID NO: 419955 - RNA, 19 nt, Homo sapiens
  misc_RNA (1)...(19): siRNA sense strand
cugaauuauuggcaguaua

SEQ ID NO: 419956 - RNA, 19 nt, Homo sapiens
  misc_RNA (1)...(19): siRNA sense strand
caaagaucuuagcaagcaa

SEQ ID NO: 419957 - RNA, 19 nt, Homo sapiens
  misc_RNA (1)...(19): siRNA sense strand
gugagaacagggaaucuug

SEQ ID NO: 419958 - RNA, 19 nt, Homo sapiens
  misc_RNA (1)...(19): siRNA sense strand
gaucagcccgacuaugaca

SEQ ID NO: 419959 - RNA, 19 nt, Homo sapiens
  misc_RNA (1)...(19): siRNA sense strand
uagugugacugccaaagau

SEQ ID NO: 419960 - RNA, 19 nt, Homo sapiens
  misc_RNA (1)...(19): siRNA sense strand
gacagcagccuggauuugu

SEQ ID NO: 419961 - RNA, 19 nt, Homo sapiens
  misc_RNA (1)...(19): siRNA sense strand
gagcagacccaggcacaca

SEQ ID NO: 419962 - RNA, 19 nt, Homo sapiens
  misc_RNA (1)...(19): siRNA sense strand
ugagcuaacggacagacua

SEQ ID NO: 419963 - RNA, 19 nt, Homo sapiens
  misc_RNA (1)...(19): siRNA sense strand
caagugaggcaucugaaac

SEQ ID NO: 419964 - RNA, 19 nt, Homo sapiens
  misc_RNA (1)...(19): siRNA sense strand
cggacagacuagccuucua

SEQ ID NO: 419965 - RNA, 19 nt, Homo sapiens
  misc_RNA (1)...(19): siRNA sense strand
ggacccugcgucuauuaug

SEQ ID NO: 419966 - RNA, 19 nt, Homo sapiens
  misc_RNA (1)...(19): siRNA sense strand
cagcagggcaguucucucu

SEQ ID NO: 419967 - RNA, 19 nt, Homo sapiens
  misc_RNA (1)...(19): siRNA sense strand
gagcuaacggacagacuag

SEQ ID NO: 419968 - RNA, 19 nt, Homo sapiens
  misc_RNA (1)...(19): siRNA sense strand
acaggauucuagugggaaa

SEQ ID NO: 419969 - RNA, 19 nt, Homo sapiens
  misc_RNA (1)...(19): siRNA sense strand
caaagcagggcagauuuua

SEQ ID NO: 419970 - RNA, 19 nt, Homo sapiens
  misc_RNA (1)...(19): siRNA sense strand
ccaaguaucagauguuagc

SEQ ID NO: 419971 - RNA, 19 nt, Homo sapiens
  misc_RNA (1)...(19): siRNA sense strand
gacccaggcacacaggauu

SEQ ID NO: 419972 - RNA, 19 nt, Homo sapiens
  misc_RNA (1)...(19): siRNA sense strand
caucagacgaagacacaga

SEQ ID NO: 419973 - RNA, 19 nt, Homo sapiens
  misc_RNA (1)...(19): siRNA sense strand
acaacgaucagcccgacua

SEQ ID NO: 419974 - RNA, 19 nt, Homo sapiens
  misc_RNA (1)...(19): siRNA sense strand
uauaugggagcauucuuug

SEQ ID NO: 419975 - RNA, 19 nt, Homo sapiens
  misc_RNA (1)...(19): siRNA sense strand
cuccaacacugcuucagau

SEQ ID NO: 419976 - RNA, 19 nt, Homo sapiens
  misc_RNA (1)...(19): siRNA sense strand
cagacuagccuucuaucuc

SEQ ID NO: 419977 - RNA, 19 nt, Homo sapiens
  misc_RNA (1)...(19): siRNA sense strand
ugagaacagggaaucuuga

SEQ ID NO: 419978 - RNA, 19 nt, Homo sapiens
  misc_RNA (1)...(19): siRNA sense strand
uugagacuguuaucuuuag

SEQ ID NO: 419979 - RNA, 19 nt, Homo sapiens
  misc_RNA (1)...(19): siRNA sense strand
caacgaucagcccgacuau

SEQ ID NO: 419980 - RNA, 19 nt, Homo sapiens
  misc_RNA (1)...(19): siRNA sense strand
cagccuggauuugucugaa

SEQ ID NO: 419981 - RNA, 19 nt, Homo sapiens
  misc_RNA (1)...(19): siRNA sense strand
aauggacagcacuuuauaa

SEQ ID NO: 419982 - RNA, 19 nt, Homo sapiens
  misc_RNA (1)...(19): siRNA sense strand
aguggaagacguaaagcua

SEQ ID NO: 419983 - RNA, 19 nt, Homo sapiens
  misc_RNA (1)...(19): siRNA sense strand
aaucagggcagacagaagu

SEQ ID NO: 419984 - RNA, 19 nt, Homo sapiens
  misc_RNA (1)...(19): siRNA sense strand
agacacagauuuggaaacc

SEQ ID NO: 419985 - RNA, 19 nt, Homo sapiens
  misc_RNA (1)...(19): siRNA sense strand
auguggagcucauacugaa

SEQ ID NO: 419986 - RNA, 19 nt, Homo sapiens
  misc_RNA (1)...(19): siRNA sense strand
uauaauaacggugcuaacu

SEQ ID NO: 419987 - RNA, 19 nt, Homo sapiens
  misc_RNA (1)...(19): siRNA sense strand
ucagggcagacagaaguua

SEQ ID NO: 419988 - RNA, 19 nt, Homo sapiens
  misc_RNA (1)...(19): siRNA sense strand
guugagaccuuguauaaua

SEQ ID NO: 419989 - RNA, 19 nt, Homo sapiens
  misc_RNA (1)...(19): siRNA sense strand
ggacagcacuuuauaauac

SEQ ID NO: 419990 - RNA, 19 nt, Homo sapiens
  misc_RNA (1)...(19): siRNA sense strand
ggaaaccacugcaagcaaa

SEQ ID NO: 419991 - RNA, 19 nt, Homo sapiens
  misc_RNA (1)...(19): siRNA sense strand
uaacggugcuaacucuaua

SEQ ID NO: 419992 - RNA, 19 nt, Homo sapiens
  misc_RNA (1)...(19): siRNA sense strand
gaaguuagcucgguucaac

SEQ ID NO: 419993 - RNA, 19 nt, Homo sapiens
  misc_RNA (1)...(19): siRNA sense strand
ggaaaacucccguugauua

SEQ ID NO: 419994 - RNA, 19 nt, Homo sapiens
  misc_RNA (1)...(19): siRNA sense strand
gauaaaguacaucccaaua

SEQ ID NO: 419995 - RNA, 19 nt, Homo sapiens
  misc_RNA (1)...(19): siRNA sense strand
ccaaagaucuuagcaagca

SEQ ID NO: 419996 - RNA, 19 nt, Homo sapiens
  misc_RNA (1)...(19): siRNA sense strand
guucaacgcccaugaguuu

SEQ ID NO: 419997 - RNA, 19 nt, Homo sapiens
  misc_RNA (1)...(19): siRNA sense strand
cgccauaucucccaaguga

SEQ ID NO: 419998 - RNA, 19 nt, Homo sapiens
  misc_RNA (1)...(19): siRNA sense strand
guuugagacuguuaucuuu

SEQ ID NO: 419999 - RNA, 19 nt, Homo sapiens
  misc_RNA (1)...(19): siRNA sense strand
gcagacagcagccuggauu

SEQ ID NO: 420000 - RNA, 19 nt, Homo sapiens
  misc_RNA (1)...(19): siRNA sense strand
caauaaagcggaauucauc

SEQ ID NO: 420001 - RNA, 19 nt, Homo sapiens
  misc_RNA (1)...(19): siRNA sense strand
gacccugcgucuauuauga

SEQ ID NO: 420002 - RNA, 19 nt, Homo sapiens
  misc_RNA (1)...(19): siRNA sense strand
ucauugacauucucaguga

SEQ ID NO: 420003 - RNA, 19 nt, Homo sapiens
  misc_RNA (1)...(19): siRNA sense strand
ggacagacuagccuucuau

SEQ ID NO: 420004 - RNA, 19 nt, Homo sapiens
  misc_RNA (1)...(19): siRNA sense strand
gaacagggaaucuugaaac

SEQ ID NO: 420005 - RNA, 19 nt, Homo sapiens
  misc_RNA (1)...(19): siRNA sense strand
caacacugcuucagauggu

SEQ ID NO: 420006 - RNA, 19 nt, Homo sapiens
  misc_RNA (1)...(19): siRNA sense strand
caagccaacuucuuucauc

SEQ ID NO: 420007 - RNA, 19 nt, Homo sapiens
  misc_RNA (1)...(19): siRNA sense strand
uuuacaggcugaauuauug

SEQ ID NO: 420008 - RNA, 19 nt, Homo sapiens
  misc_RNA (1)...(19): siRNA sense strand
gaaguugacaggcgagaga

SEQ ID NO: 420009 - RNA, 19 nt, Homo sapiens
  misc_RNA (1)...(19): siRNA sense strand
uaauaacggugcuaacucu

SEQ ID NO: 420010 - RNA, 19 nt, Homo sapiens
  misc_RNA (1)...(19): siRNA sense strand
gcagagcgccucguggaaa

SEQ ID NO: 420011 - RNA, 19 nt, Homo sapiens
  misc_RNA (1)...(19): siRNA sense strand
gcaggaaaccagaucacaa

SEQ ID NO: 420012 - RNA, 19 nt, Homo sapiens
  misc_RNA (1)...(19): siRNA sense strand
gaagacacagauuuggaaa

SEQ ID NO: 420013 - RNA, 19 nt, Homo sapiens
  misc_RNA (1)...(19): siRNA sense strand
caggaaaccagaucacaaa

SEQ ID NO: 420014 - RNA, 19 nt, Homo sapiens
  misc_RNA (1)...(19): siRNA sense strand
gaaaucagggcagacagaa

SEQ ID NO: 420015 - RNA, 19 nt, Homo sapiens
  misc_RNA (1)...(19): siRNA sense strand
uugaagaacuugccaugga

SEQ ID NO: 420016 - RNA, 19 nt, Homo sapiens
  misc_RNA (1)...(19): siRNA sense strand
gcacaagccaacuucuuuc

SEQ ID NO: 420017 - RNA, 19 nt, Homo sapiens
  misc_RNA (1)...(19): siRNA sense strand
agacuagccuucuaucucu

SEQ ID NO: 420018 - RNA, 19 nt, Homo sapiens
  misc_RNA (1)...(19): siRNA sense strand
gagaacagggaaucuugaa

SEQ ID NO: 420019 - RNA, 19 nt, Homo sapiens
  misc_RNA (1)...(19): siRNA sense strand
ugaagaacuugccauggau

SEQ ID NO: 420020 - RNA, 19 nt, Homo sapiens
  misc_RNA (1)...(19): siRNA sense strand
cgaagacacagauuuggaa

SEQ ID NO: 420021 - RNA, 19 nt, Homo sapiens
  misc_RNA (1)...(19): siRNA sense strand
gagcacaagccaacuucuu

SEQ ID NO: 420022 - RNA, 19 nt, Homo sapiens
  misc_RNA (1)...(19): siRNA sense strand
agacgaagacacagauuug

SEQ ID NO: 420023 - RNA, 19 nt, Homo sapiens
  misc_RNA (1)...(19): siRNA sense strand
guaaauaggggaacguuuu

SEQ ID NO: 420024 - RNA, 19 nt, Homo sapiens
  misc_RNA (1)...(19): siRNA sense strand
aaauggacagcacuuuaua

SEQ ID NO: 420025 - RNA, 19 nt, Homo sapiens
  misc_RNA (1)...(19): siRNA sense strand
ggcaaaagcugcuaagaag

SEQ ID NO: 420026 - RNA, 19 nt, Homo sapiens
  misc_RNA (1)...(19): siRNA sense strand
ggagacagcagggcaguuc

SEQ ID NO: 420027 - RNA, 19 nt, Homo sapiens
  misc_RNA (1)...(19): siRNA sense strand
ugguugagaccuuguauaa

SEQ ID NO: 420028 - RNA, 19 nt, Homo sapiens
  misc_RNA (1)...(19): siRNA sense strand
gauguuagcguucguccau

SEQ ID NO: 420029 - RNA, 19 nt, Homo sapiens
  misc_RNA (1)...(19): siRNA sense strand
agccaaguaucagauguua

SEQ ID NO: 420030 - RNA, 19 nt, Homo sapiens
  misc_RNA (1)...(19): siRNA sense strand
guggaagacguaaagcuaa

SEQ ID NO: 420031 - RNA, 19 nt, Homo sapiens
  misc_RNA (1)...(19): siRNA sense strand
acgaucagcccgacuauga

SEQ ID NO: 420032 - RNA, 19 nt, Homo sapiens
  misc_RNA (1)...(19): siRNA sense strand
cagagcgccucguggaaau

SEQ ID NO: 420033 - RNA, 19 nt, Homo sapiens
  misc_RNA (1)...(19): siRNA sense strand
gcaaggagggcaccaugag

SEQ ID NO: 420034 - RNA, 19 nt, Homo sapiens
  misc_RNA (1)...(19): siRNA sense strand
gcugaauuauuggcaguau

SEQ ID NO: 420035 - RNA, 19 nt, Homo sapiens
  misc_RNA (1)...(19): siRNA sense strand
ccaagugaggcaucugaaa

SEQ ID NO: 420036 - RNA, 19 nt, Homo sapiens
  misc_RNA (1)...(19): siRNA sense strand
caaaagcugcuaagaagaa

SEQ ID NO: 420037 - RNA, 19 nt, Homo sapiens
  misc_RNA (1)...(19): siRNA sense strand
cuauaugggagcauucuuu

SEQ ID NO: 420038 - RNA, 19 nt, Homo sapiens
  misc_RNA (1)...(19): siRNA sense strand
cgaaaucagggcagacaga

SEQ ID NO: 420039 - RNA, 19 nt, Homo sapiens
  misc_RNA (1)...(19): siRNA sense strand
guacucaucaacacgaaau

SEQ ID NO: 420040 - RNA, 19 nt, Homo sapiens
  misc_RNA (1)...(19): siRNA sense strand
gccuggauuugucugaauu

SEQ ID NO: 420041 - RNA, 19 nt, Homo sapiens
  misc_RNA (1)...(19): siRNA sense strand
gaaaacucccguugauuau

SEQ ID NO: 420042 - RNA, 19 nt, Homo sapiens
  misc_RNA (1)...(19): siRNA sense strand
gauuuuacaggcugaauua

SEQ ID NO: 420043 - RNA, 19 nt, Homo sapiens
  misc_RNA (1)...(19): siRNA sense strand
gagccaaguaucagauguu

SEQ ID NO: 420044 - RNA, 19 nt, Homo sapiens
  misc_RNA (1)...(19): siRNA sense strand
uaaagcggaauucaucaga

SEQ ID NO: 420045 - RNA, 19 nt, Homo sapiens
  misc_RNA (1)...(19): siRNA sense strand
ccaauaaagcggaauucau

SEQ ID NO: 420046 - RNA, 19 nt, Homo sapiens
  misc_RNA (1)...(19): siRNA sense strand
gcuggacccugcgucuauu

SEQ ID NO: 420047 - RNA, 19 nt, Homo sapiens
  misc_RNA (1)...(19): siRNA sense strand
uggaagacguaaagcuaau

SEQ ID NO: 420048 - RNA, 19 nt, Homo sapiens
  misc_RNA (1)...(19): siRNA sense strand
cagacgaagacacagauuu

SEQ ID NO: 420049 - RNA, 19 nt, Homo sapiens
  misc_RNA (1)...(19): siRNA sense strand
uugccacgcuggucauuga

SEQ ID NO: 420050 - RNA, 19 nt, Homo sapiens
  misc_RNA (1)...(19): siRNA sense strand
uggacagcacuuuauaaua

SEQ ID NO: 420051 - RNA, 19 nt, Homo sapiens
  misc_RNA (1)...(19): siRNA sense strand
aaacucccguugauuaugc

SEQ ID NO: 420052 - RNA, 19 nt, Homo sapiens
  misc_RNA (1)...(19): siRNA sense strand
ggaugacgauagugugacu

SEQ ID NO: 420053 - RNA, 19 nt, Homo sapiens
  misc_RNA (1)...(19): siRNA sense strand
cagcguggcaucagacgaa

SEQ ID NO: 420054 - RNA, 19 nt, Homo sapiens
  misc_RNA (1)...(19): siRNA sense strand
gaguacucaucaacacgaa

SEQ ID NO: 420055 - RNA, 19 nt, Homo sapiens
  misc_RNA (1)...(19): siRNA sense strand
cugaauuauuggcaguaua

SEQ ID NO: 420056 - RNA, 19 nt, Homo sapiens
  misc_RNA (1)...(19): siRNA sense strand
caaagaucuuagcaagcaa

SEQ ID NO: 420057 - RNA, 19 nt, Homo sapiens
  misc_RNA (1)...(19): siRNA sense strand
gugagaacagggaaucuug

SEQ ID NO: 420058 - RNA, 19 nt, Homo sapiens
  misc_RNA (1)...(19): siRNA sense strand
gaucagcccgacuaugaca

SEQ ID NO: 420059 - RNA, 19 nt, Homo sapiens
  misc_RNA (1)...(19): siRNA sense strand
uagugugacugccaaagau

SEQ ID NO: 420060 - RNA, 19 nt, Homo sapiens
  misc_RNA (1)...(19): siRNA sense strand
gacagcagccuggauuugu

SEQ ID NO: 420061 - RNA, 19 nt, Homo sapiens
  misc_RNA (1)...(19): siRNA sense strand
gagcagacccaggcacaca

SEQ ID NO: 420062 - RNA, 19 nt, Homo sapiens
  misc_RNA (1)...(19): siRNA sense strand
ugagcuaacggacagacua

SEQ ID NO: 420063 - RNA, 19 nt, Homo sapiens
  misc_RNA (1)...(19): siRNA sense strand
caagugaggcaucugaaac

SEQ ID NO: 420064 - RNA, 19 nt, Homo sapiens
  misc_RNA (1)...(19): siRNA sense strand
cggacagacuagccuucua

SEQ ID NO: 420065 - RNA, 19 nt, Homo sapiens
  misc_RNA (1)...(19): siRNA sense strand
ggacccugcgucuauuaug

SEQ ID NO: 420066 - RNA, 19 nt, Homo sapiens
  misc_RNA (1)...(19): siRNA sense strand
cagcagggcaguucucucu

SEQ ID NO: 420067 - RNA, 19 nt, Homo sapiens
  misc_RNA (1)...(19): siRNA sense strand
gagcuaacggacagacuag

SEQ ID NO: 420068 - RNA, 19 nt, Homo sapiens
  misc_RNA (1)...(19): siRNA sense strand
acaggauucuagugggaaa

SEQ ID NO: 420069 - RNA, 19 nt, Homo sapiens
  misc_RNA (1)...(19): siRNA sense strand
caaagcagggcagauuuua

SEQ ID NO: 420070 - RNA, 19 nt, Homo sapiens
  misc_RNA (1)...(19): siRNA sense strand
ccaaguaucagauguuagc

SEQ ID NO: 420071 - RNA, 19 nt, Homo sapiens
  misc_RNA (1)...(19): siRNA sense strand
gacccaggcacacaggauu

SEQ ID NO: 420072 - RNA, 19 nt, Homo sapiens
  misc_RNA (1)...(19): siRNA sense strand
caucagacgaagacacaga

SEQ ID NO: 420073 - RNA, 19 nt, Homo sapiens
  misc_RNA (1)...(19): siRNA sense strand
acaacgaucagcccgacua

SEQ ID NO: 420074 - RNA, 19 nt, Homo sapiens
  misc_RNA (1)...(19): siRNA sense strand
uauaugggagcauucuuug

SEQ ID NO: 420075 - RNA, 19 nt, Homo sapiens
  misc_RNA (1)...(19): siRNA sense strand
cuccaacacugcuucagau

SEQ ID NO: 420076 - RNA, 19 nt, Homo sapiens
  misc_RNA (1)...(19): siRNA sense strand
cagacuagccuucuaucuc

SEQ ID NO: 420077 - RNA, 19 nt, Homo sapiens
  misc_RNA (1)...(19): siRNA sense strand
ugagaacagggaaucuuga

SEQ ID NO: 420078 - RNA, 19 nt, Homo sapiens
  misc_RNA (1)...(19): siRNA sense strand
uugagacuguuaucuuuag

SEQ ID NO: 420079 - RNA, 19 nt, Homo sapiens
  misc_RNA (1)...(19): siRNA sense strand
caacgaucagcccgacuau

SEQ ID NO: 420080 - RNA, 19 nt, Homo sapiens
  misc_RNA (1)...(19): siRNA sense strand
cagccuggauuugucugaa

SEQ ID NO: 420081 - RNA, 19 nt, Homo sapiens
  misc_RNA (1)...(19): siRNA sense strand
aauggacagcacuuuauaa

SEQ ID NO: 420082 - RNA, 19 nt, Homo sapiens
  misc_RNA (1)...(19): siRNA sense strand
aguggaagacguaaagcua

SEQ ID NO: 420083 - RNA, 19 nt, Homo sapiens
  misc_RNA (1)...(19): siRNA sense strand
aaucagggcagacagaagu

SEQ ID NO: 420084 - RNA, 19 nt, Homo sapiens
  misc_RNA (1)...(19): siRNA sense strand
agacacagauuuggaaacc

SEQ ID NO: 420085 - RNA, 19 nt, Homo sapiens
  misc_RNA (1)...(19): siRNA sense strand
auguggagcucauacugaa

SEQ ID NO: 420086 - RNA, 19 nt, Homo sapiens
  misc_RNA (1)...(19): siRNA sense strand
uauaauaacggugcuaacu

SEQ ID NO: 420087 - RNA, 19 nt, Homo sapiens
  misc_RNA (1)...(19): siRNA sense strand
ucagggcagacagaaguua

SEQ ID NO: 420088 - RNA, 19 nt, Homo sapiens
  misc_RNA (1)...(19): siRNA sense strand
guugagaccuuguauaaua

SEQ ID NO: 420089 - RNA, 19 nt, Homo sapiens
  misc_RNA (1)...(19): siRNA sense strand
ggacagcacuuuauaauac

SEQ ID NO: 420090 - RNA, 19 nt, Homo sapiens
  misc_RNA (1)...(19): siRNA sense strand
ggaaaccacugcaagcaaa

SEQ ID NO: 420091 - RNA, 19 nt, Homo sapiens
  misc_RNA (1)...(19): siRNA sense strand
uaacggugcuaacucuaua

SEQ ID NO: 420092 - RNA, 19 nt, Homo sapiens
  misc_RNA (1)...(19): siRNA sense strand
gaaguuagcucgguucaac

SEQ ID NO: 420093 - RNA, 19 nt, Homo sapiens
  misc_RNA (1)...(19): siRNA sense strand
ggaaaacucccguugauua

SEQ ID NO: 420094 - RNA, 19 nt, Homo sapiens
  misc_RNA (1)...(19): siRNA sense strand
gauaaaguacaucccaaua

SEQ ID NO: 420095 - RNA, 19 nt, Homo sapiens
  misc_RNA (1)...(19): siRNA sense strand
ccaaagaucuuagcaagca

SEQ ID NO: 420096 - RNA, 19 nt, Homo sapiens
  misc_RNA (1)...(19): siRNA sense strand
guucaacgcccaugaguuu

SEQ ID NO: 420097 - RNA, 19 nt, Homo sapiens
  misc_RNA (1)...(19): siRNA sense strand
cgccauaucucccaaguga

SEQ ID NO: 420098 - RNA, 19 nt, Homo sapiens
  misc_RNA (1)...(19): siRNA sense strand
guuugagacuguuaucuuu

SEQ ID NO: 420099 - RNA, 19 nt, Homo sapiens
  misc_RNA (1)...(19): siRNA sense strand
gcagacagcagccuggauu

SEQ ID NO: 420100 - RNA, 19 nt, Homo sapiens
  misc_RNA (1)...(19): siRNA sense strand
caauaaagcggaauucauc

SEQ ID NO: 420101 - RNA, 19 nt, Homo sapiens
  misc_RNA (1)...(19): siRNA sense strand
gacccugcgucuauuauga

SEQ ID NO: 420102 - RNA, 19 nt, Homo sapiens
  misc_RNA (1)...(19): siRNA sense strand
ucauugacauucucaguga

SEQ ID NO: 420103 - RNA, 19 nt, Homo sapiens
  misc_RNA (1)...(19): siRNA sense strand
ggacagacuagccuucuau

SEQ ID NO: 420104 - RNA, 19 nt, Homo sapiens
  misc_RNA (1)...(19): siRNA sense strand
gaacagggaaucuugaaac

SEQ ID NO: 420105 - RNA, 19 nt, Homo sapiens
  misc_RNA (1)...(19): siRNA sense strand
caacacugcuucagauggu

SEQ ID NO: 420106 - RNA, 19 nt, Homo sapiens
  misc_RNA (1)...(19): siRNA sense strand
caagccaacuucuuucauc

SEQ ID NO: 420107 - RNA, 19 nt, Homo sapiens
  misc_RNA (1)...(19): siRNA sense strand
uuuacaggcugaauuauug

SEQ ID NO: 420108 - RNA, 19 nt, Homo sapiens
  misc_RNA (1)...(19): siRNA sense strand
gaaguugacaggcgagaga

SEQ ID NO: 420109 - RNA, 19 nt, Homo sapiens
  misc_RNA (1)...(19): siRNA sense strand
uaauaacggugcuaacucu

SEQ ID NO: 420110 - RNA, 19 nt, Homo sapiens
  misc_RNA (1)...(19): siRNA sense strand
gcagagcgccucguggaaa

SEQ ID NO: 420111 - RNA, 19 nt, Homo sapiens
  misc_RNA (1)...(19): siRNA sense strand
gcaggaaaccagaucacaa

SEQ ID NO: 420112 - RNA, 19 nt, Homo sapiens
  misc_RNA (1)...(19): siRNA sense strand
gaagacacagauuuggaaa

SEQ ID NO: 420113 - RNA, 19 nt, Homo sapiens
  misc_RNA (1)...(19): siRNA sense strand
caggaaaccagaucacaaa

SEQ ID NO: 420114 - RNA, 19 nt, Homo sapiens
  misc_RNA (1)...(19): siRNA sense strand
gaaaucagggcagacagaa

SEQ ID NO: 420115 - RNA, 19 nt, Homo sapiens
  misc_RNA (1)...(19): siRNA sense strand
uugaagaacuugccaugga

SEQ ID NO: 420116 - RNA, 19 nt, Homo sapiens
  misc_RNA (1)...(19): siRNA sense strand
gcacaagccaacuucuuuc

SEQ ID NO: 420117 - RNA, 19 nt, Homo sapiens
  misc_RNA (1)...(19): siRNA sense strand
agacuagccuucuaucucu

SEQ ID NO: 420118 - RNA, 19 nt, Homo sapiens
  misc_RNA (1)...(19): siRNA sense strand
gagaacagggaaucuugaa

SEQ ID NO: 420119 - RNA, 19 nt, Homo sapiens
  misc_RNA (1)...(19): siRNA sense strand
ugaagaacuugccauggau

SEQ ID NO: 420120 - RNA, 19 nt, Homo sapiens
  misc_RNA (1)...(19): siRNA sense strand
cgaagacacagauuuggaa

SEQ ID NO: 420121 - RNA, 19 nt, Homo sapiens
  misc_RNA (1)...(19): siRNA sense strand
gagcacaagccaacuucuu

SEQ ID NO: 420122 - RNA, 19 nt, Homo sapiens
  misc_RNA (1)...(19): siRNA sense strand
agacgaagacacagauuug

SEQ ID NO: 420123 - RNA, 19 nt, Homo sapiens
  misc_RNA (1)...(19): siRNA sense strand
guaaauaggggaacguuuu

SEQ ID NO: 420124 - RNA, 19 nt, Homo sapiens
  misc_RNA (1)...(19): siRNA sense strand
aaauggacagcacuuuaua

SEQ ID NO: 420125 - RNA, 19 nt, Homo sapiens
  misc_RNA (1)...(19): siRNA sense strand
ggcaaaagcugcuaagaag

SEQ ID NO: 420126 - RNA, 19 nt, Homo sapiens
  misc_RNA (1)...(19): siRNA sense strand
ggagacagcagggcaguuc

SEQ ID NO: 420127 - RNA, 19 nt, Homo sapiens
  misc_RNA (1)...(19): siRNA sense strand
ugguugagaccuuguauaa

SEQ ID NO: 420128 - RNA, 19 nt, Homo sapiens
  misc_RNA (1)...(19): siRNA sense strand
gauguuagcguucguccau

SEQ ID NO: 420129 - RNA, 19 nt, Homo sapiens
  misc_RNA (1)...(19): siRNA sense strand
agccaaguaucagauguua

SEQ ID NO: 420130 - RNA, 19 nt, Homo sapiens
  misc_RNA (1)...(19): siRNA sense strand
guggaagacguaaagcuaa

SEQ ID NO: 420131 - RNA, 19 nt, Homo sapiens
  misc_RNA (1)...(19): siRNA sense strand
cagagcgccucguggaaau

SEQ ID NO: 420132 - RNA, 19 nt, Homo sapiens
  misc_RNA (1)...(19): siRNA sense strand
gcaaggagggcaccaugag

SEQ ID NO: 420133 - RNA, 19 nt, Homo sapiens
  misc_RNA (1)...(19): siRNA sense strand
gcugaauuauuggcaguau

SEQ ID NO: 420134 - RNA, 19 nt, Homo sapiens
  misc_RNA (1)...(19): siRNA sense strand
ccaagugaggcaucugaaa

SEQ ID NO: 420135 - RNA, 19 nt, Homo sapiens
  misc_RNA (1)...(19): siRNA sense strand
caaaagcugcuaagaagaa

SEQ ID NO: 420136 - RNA, 19 nt, Homo sapiens
  misc_RNA (1)...(19): siRNA sense strand
cuauaugggagcauucuuu

SEQ ID NO: 420137 - RNA, 19 nt, Homo sapiens
  misc_RNA (1)...(19): siRNA sense strand
cgaaaucagggcagacaga

SEQ ID NO: 420138 - RNA, 19 nt, Homo sapiens
  misc_RNA (1)...(19): siRNA sense strand
guacucaucaacacgaaau

SEQ ID NO: 420139 - RNA, 19 nt, Homo sapiens
  misc_RNA (1)...(19): siRNA sense strand
gccuggauuugucugaauu

SEQ ID NO: 420140 - RNA, 19 nt, Homo sapiens
  misc_RNA (1)...(19): siRNA sense strand
gaaaacucccguugauuau

SEQ ID NO: 420141 - RNA, 19 nt, Homo sapiens
  misc_RNA (1)...(19): siRNA sense strand
gauuuuacaggcugaauua

SEQ ID NO: 420142 - RNA, 19 nt, Homo sapiens
  misc_RNA (1)...(19): siRNA sense strand
gagccaaguaucagauguu

SEQ ID NO: 420143 - RNA, 19 nt, Homo sapiens
  misc_RNA (1)...(19): siRNA sense strand
uaaagcggaauucaucaga

SEQ ID NO: 420144 - RNA, 19 nt, Homo sapiens
  misc_RNA (1)...(19): siRNA sense strand
ccaauaaagcggaauucau

SEQ ID NO: 420145 - RNA, 19 nt, Homo sapiens
  misc_RNA (1)...(19): siRNA sense strand
gcuggacccugcgucuauu

SEQ ID NO: 420146 - RNA, 19 nt, Homo sapiens
  misc_RNA (1)...(19): siRNA sense strand
uggaagacguaaagcuaau

SEQ ID NO: 420147 - RNA, 19 nt, Homo sapiens
  misc_RNA (1)...(19): siRNA sense strand
cagacgaagacacagauuu

SEQ ID NO: 420148 - RNA, 19 nt, Homo sapiens
  misc_RNA (1)...(19): siRNA sense strand
uugccacgcuggucauuga

SEQ ID NO: 420149 - RNA, 19 nt, Homo sapiens
  misc_RNA (1)...(19): siRNA sense strand
uggacagcacuuuauaaua

SEQ ID NO: 420150 - RNA, 19 nt, Homo sapiens
  misc_RNA (1)...(19): siRNA sense strand
aaacucccguugauuaugc

SEQ ID NO: 420151 - RNA, 19 nt, Homo sapiens
  misc_RNA (1)...(19): siRNA sense strand
ggaugacgauagugugacu

SEQ ID NO: 420152 - RNA, 19 nt, Homo sapiens
  misc_RNA (1)...(19): siRNA sense strand
cagcguggcaucagacgaa

SEQ ID NO: 420153 - RNA, 19 nt, Homo sapiens
  misc_RNA (1)...(19): siRNA sense strand
gaguacucaucaacacgaa

SEQ ID NO: 420154 - RNA, 19 nt, Homo sapiens
  misc_RNA (1)...(19): siRNA sense strand
cugaauuauuggcaguaua

SEQ ID NO: 420155 - RNA, 19 nt, Homo sapiens
  misc_RNA (1)...(19): siRNA sense strand
caaagaucuuagcaagcaa

SEQ ID NO: 420156 - RNA, 19 nt, Homo sapiens
  misc_RNA (1)...(19): siRNA sense strand
gugagaacagggaaucuug

SEQ ID NO: 420157 - RNA, 19 nt, Homo sapiens
  misc_RNA (1)...(19): siRNA sense strand
gaucagcccgacuaugaca

SEQ ID NO: 420158 - RNA, 19 nt, Homo sapiens
  misc_RNA (1)...(19): siRNA sense strand
uagugugacugccaaagau

SEQ ID NO: 420159 - RNA, 19 nt, Homo sapiens
  misc_RNA (1)...(19): siRNA sense strand
gacagcagccuggauuugu

SEQ ID NO: 420160 - RNA, 19 nt, Homo sapiens
  misc_RNA (1)...(19): siRNA sense strand
gagcagacccaggcacaca

SEQ ID NO: 420161 - RNA, 19 nt, Homo sapiens
  misc_RNA (1)...(19): siRNA sense strand
ugagcuaacggacagacua

SEQ ID NO: 420162 - RNA, 19 nt, Homo sapiens
  misc_RNA (1)...(19): siRNA sense strand
caagugaggcaucugaaac

SEQ ID NO: 420163 - RNA, 19 nt, Homo sapiens
  misc_RNA (1)...(19): siRNA sense strand
cggacagacuagccuucua

SEQ ID NO: 420164 - RNA, 19 nt, Homo sapiens
  misc_RNA (1)...(19): siRNA sense strand
ggacccugcgucuauuaug

SEQ ID NO: 420165 - RNA, 19 nt, Homo sapiens
  misc_RNA (1)...(19): siRNA sense strand
cagcagggcaguucucucu

SEQ ID NO: 420166 - RNA, 19 nt, Homo sapiens
  misc_RNA (1)...(19): siRNA sense strand
gagcuaacggacagacuag

SEQ ID NO: 420167 - RNA, 19 nt, Homo sapiens
  misc_RNA (1)...(19): siRNA sense strand
acaggauucuagugggaaa

SEQ ID NO: 420168 - RNA, 19 nt, Homo sapiens
  misc_RNA (1)...(19): siRNA sense strand
caaagcagggcagauuuua

SEQ ID NO: 420169 - RNA, 19 nt, Homo sapiens
  misc_RNA (1)...(19): siRNA sense strand
ccaaguaucagauguuagc

SEQ ID NO: 420170 - RNA, 19 nt, Homo sapiens
  misc_RNA (1)...(19): siRNA sense strand
gacccaggcacacaggauu

SEQ ID NO: 420171 - RNA, 19 nt, Homo sapiens
  misc_RNA (1)...(19): siRNA sense strand
caucagacgaagacacaga

SEQ ID NO: 420172 - RNA, 19 nt, Homo sapiens
  misc_RNA (1)...(19): siRNA sense strand
uauaugggagcauucuuug

SEQ ID NO: 420173 - RNA, 19 nt, Homo sapiens
  misc_RNA (1)...(19): siRNA sense strand
cuccaacacugcuucagau

SEQ ID NO: 420174 - RNA, 19 nt, Homo sapiens
  misc_RNA (1)...(19): siRNA sense strand
cagacuagccuucuaucuc

SEQ ID NO: 420175 - RNA, 19 nt, Homo sapiens
  misc_RNA (1)...(19): siRNA sense strand
ugagaacagggaaucuuga

SEQ ID NO: 420176 - RNA, 19 nt, Homo sapiens
  misc_RNA (1)...(19): siRNA sense strand
uugagacuguuaucuuuag

SEQ ID NO: 420177 - RNA, 19 nt, Homo sapiens
  misc_RNA (1)...(19): siRNA sense strand
cagccuggauuugucugaa

SEQ ID NO: 420178 - RNA, 19 nt, Homo sapiens
  misc_RNA (1)...(19): siRNA sense strand
aauggacagcacuuuauaa

SEQ ID NO: 420179 - RNA, 19 nt, Homo sapiens
  misc_RNA (1)...(19): siRNA sense strand
aguggaagacguaaagcua

SEQ ID NO: 420180 - RNA, 19 nt, Homo sapiens
  misc_RNA (1)...(19): siRNA sense strand
gaauucaucagagccaagu

SEQ ID NO: 420181 - RNA, 19 nt, Homo sapiens
  misc_RNA (1)...(19): siRNA sense strand
agacacagauuuggaaacc

SEQ ID NO: 420182 - RNA, 19 nt, Homo sapiens
  misc_RNA (1)...(19): siRNA sense strand
auguggagcucauacugaa

SEQ ID NO: 420183 - RNA, 19 nt, Homo sapiens
  misc_RNA (1)...(19): siRNA sense strand
ucagggcagacagaaguua

SEQ ID NO: 420184 - RNA, 19 nt, Homo sapiens
  misc_RNA (1)...(19): siRNA sense strand
aaucagggcagacagaagu

SEQ ID NO: 420185 - RNA, 19 nt, Homo sapiens
  misc_RNA (1)...(19): siRNA sense strand
uauaauaacggugcuaacu

SEQ ID NO: 420186 - RNA, 19 nt, Homo sapiens
  misc_RNA (1)...(19): siRNA sense strand
ggcaaggagggcaccauga

SEQ ID NO: 420187 - RNA, 19 nt, Homo sapiens
  misc_RNA (1)...(19): siRNA sense strand
ggcaucagacgaagacaca

SEQ ID NO: 420188 - RNA, 19 nt, Homo sapiens
  misc_RNA (1)...(19): siRNA sense strand
guugagaccuuguauaaua

SEQ ID NO: 420189 - RNA, 19 nt, Homo sapiens
  misc_RNA (1)...(19): siRNA sense strand
ggacagcacuuuauaauac

SEQ ID NO: 420190 - RNA, 19 nt, Homo sapiens
  misc_RNA (1)...(19): siRNA sense strand
ggaaaccacugcaagcaaa

SEQ ID NO: 420191 - RNA, 19 nt, Homo sapiens
  misc_RNA (1)...(19): siRNA sense strand
uaacggugcuaacucuaua

SEQ ID NO: 420192 - RNA, 19 nt, Homo sapiens
  misc_RNA (1)...(19): siRNA sense strand
gaaguuagcucgguucaac

SEQ ID NO: 420193 - RNA, 19 nt, Homo sapiens
  misc_RNA (1)...(19): siRNA sense strand
ggaaaacucccguugauua

SEQ ID NO: 420194 - RNA, 19 nt, Homo sapiens
  misc_RNA (1)...(19): siRNA sense strand
gauaaaguacaucccaaua

SEQ ID NO: 420195 - RNA, 19 nt, Homo sapiens
  misc_RNA (1)...(19): siRNA sense strand
ccaaagaucuuagcaagca

SEQ ID NO: 420196 - RNA, 19 nt, Homo sapiens
  misc_RNA (1)...(19): siRNA sense strand
guucaacgcccaugaguuu

SEQ ID NO: 420197 - RNA, 19 nt, Homo sapiens
  misc_RNA (1)...(19): siRNA sense strand
cgccauaucucccaaguga

SEQ ID NO: 420198 - RNA, 19 nt, Homo sapiens
  misc_RNA (1)...(19): siRNA sense strand
guuugagacuguuaucuuu

SEQ ID NO: 420199 - RNA, 19 nt, Homo sapiens
  misc_RNA (1)...(19): siRNA sense strand
gcagacagcagccuggauu

SEQ ID NO: 420200 - RNA, 19 nt, Homo sapiens
  misc_RNA (1)...(19): siRNA sense strand
caauaaagcggaauucauc

SEQ ID NO: 420201 - RNA, 19 nt, Homo sapiens
  misc_RNA (1)...(19): siRNA sense strand
gacccugcgucuauuauga

SEQ ID NO: 420202 - RNA, 19 nt, Homo sapiens
  misc_RNA (1)...(19): siRNA sense strand
ucauugacauucucaguga

SEQ ID NO: 420203 - RNA, 19 nt, Homo sapiens
  misc_RNA (1)...(19): siRNA sense strand
ggacagacuagccuucuau

SEQ ID NO: 420204 - RNA, 19 nt, Homo sapiens
  misc_RNA (1)...(19): siRNA sense strand
gaacagggaaucuugaaac

SEQ ID NO: 420205 - RNA, 19 nt, Homo sapiens
  misc_RNA (1)...(19): siRNA sense strand
caacacugcuucagauggu

SEQ ID NO: 420206 - RNA, 19 nt, Homo sapiens
  misc_RNA (1)...(19): siRNA sense strand
caagccaacuucuuucauc

SEQ ID NO: 420207 - RNA, 19 nt, Homo sapiens
  misc_RNA (1)...(19): siRNA sense strand
uuuacaggcugaauuauug

SEQ ID NO: 420208 - RNA, 19 nt, Homo sapiens
  misc_RNA (1)...(19): siRNA sense strand
gaaguugacaggcgagaga

SEQ ID NO: 420209 - RNA, 19 nt, Homo sapiens
  misc_RNA (1)...(19): siRNA sense strand
uaauaacggugcuaacucu

SEQ ID NO: 420210 - RNA, 19 nt, Homo sapiens
  misc_RNA (1)...(19): siRNA sense strand
gcagagcgccucguggaaa

SEQ ID NO: 420211 - RNA, 19 nt, Homo sapiens
  misc_RNA (1)...(19): siRNA sense strand
gcaggaaaccagaucacaa

SEQ ID NO: 420212 - RNA, 19 nt, Homo sapiens
  misc_RNA (1)...(19): siRNA sense strand
gaagacacagauuuggaaa

SEQ ID NO: 420213 - RNA, 19 nt, Homo sapiens
  misc_RNA (1)...(19): siRNA sense strand
caggaaaccagaucacaaa

SEQ ID NO: 420214 - RNA, 19 nt, Homo sapiens
  misc_RNA (1)...(19): siRNA sense strand
gaaaucagggcagacagaa

SEQ ID NO: 420215 - RNA, 19 nt, Homo sapiens
  misc_RNA (1)...(19): siRNA sense strand
uugaagaacuugccaugga

SEQ ID NO: 420216 - RNA, 19 nt, Homo sapiens
  misc_RNA (1)...(19): siRNA sense strand
gcacaagccaacuucuuuc

SEQ ID NO: 420217 - RNA, 19 nt, Homo sapiens
  misc_RNA (1)...(19): siRNA sense strand
agacuagccuucuaucucu

SEQ ID NO: 420218 - RNA, 19 nt, Homo sapiens
  misc_RNA (1)...(19): siRNA sense strand
gagaacagggaaucuugaa

SEQ ID NO: 420219 - RNA, 19 nt, Homo sapiens
  misc_RNA (1)...(19): siRNA sense strand
ugaagaacuugccauggau

SEQ ID NO: 420220 - RNA, 19 nt, Homo sapiens
  misc_RNA (1)...(19): siRNA sense strand
cgaagacacagauuuggaa

SEQ ID NO: 420221 - RNA, 19 nt, Homo sapiens
  misc_RNA (1)...(19): siRNA sense strand
gagcacaagccaacuucuu

SEQ ID NO: 420222 - RNA, 19 nt, Homo sapiens
  misc_RNA (1)...(19): siRNA sense strand
agacgaagacacagauuug

SEQ ID NO: 420223 - RNA, 19 nt, Homo sapiens
  misc_RNA (1)...(19): siRNA sense strand
guaaauaggggaacguuuu

SEQ ID NO: 420224 - RNA, 19 nt, Homo sapiens
  misc_RNA (1)...(19): siRNA sense strand
aaauggacagcacuuuaua

SEQ ID NO: 420225 - RNA, 19 nt, Homo sapiens
  misc_RNA (1)...(19): siRNA sense strand
ggcaaaagcugcuaagaag

SEQ ID NO: 420226 - RNA, 19 nt, Homo sapiens
  misc_RNA (1)...(19): siRNA sense strand
ggagacagcagggcaguuc

SEQ ID NO: 420227 - RNA, 19 nt, Homo sapiens
  misc_RNA (1)...(19): siRNA sense strand
ugguugagaccuuguauaa

SEQ ID NO: 420228 - RNA, 19 nt, Homo sapiens
  misc_RNA (1)...(19): siRNA sense strand
gauguuagcguucguccau

SEQ ID NO: 420229 - RNA, 19 nt, Homo sapiens
  misc_RNA (1)...(19): siRNA sense strand
agccaaguaucagauguua

SEQ ID NO: 420230 - RNA, 19 nt, Homo sapiens
  misc_RNA (1)...(19): siRNA sense strand
guggaagacguaaagcuaa

SEQ ID NO: 420231 - RNA, 19 nt, Homo sapiens
  misc_RNA (1)...(19): siRNA sense strand
acgaucagcccgacuauga

SEQ ID NO: 420232 - RNA, 19 nt, Homo sapiens
  misc_RNA (1)...(19): siRNA sense strand
cagagcgccucguggaaau

SEQ ID NO: 420233 - RNA, 19 nt, Homo sapiens
  misc_RNA (1)...(19): siRNA sense strand
gcaaggagggcaccaugag

SEQ ID NO: 420234 - RNA, 19 nt, Homo sapiens
  misc_RNA (1)...(19): siRNA sense strand
gcugaauuauuggcaguau

SEQ ID NO: 420235 - RNA, 19 nt, Homo sapiens
  misc_RNA (1)...(19): siRNA sense strand
ccaagugaggcaucugaaa

SEQ ID NO: 420236 - RNA, 19 nt, Homo sapiens
  misc_RNA (1)...(19): siRNA sense strand
caaaagcugcuaagaagaa

SEQ ID NO: 420237 - RNA, 19 nt, Homo sapiens
  misc_RNA (1)...(19): siRNA sense strand
cuauaugggagcauucuuu

SEQ ID NO: 420238 - RNA, 19 nt, Homo sapiens
  misc_RNA (1)...(19): siRNA sense strand
cgaaaucagggcagacaga

SEQ ID NO: 420239 - RNA, 19 nt, Homo sapiens
  misc_RNA (1)...(19): siRNA sense strand
guacucaucaacacgaaau

SEQ ID NO: 420240 - RNA, 19 nt, Homo sapiens
  misc_RNA (1)...(19): siRNA sense strand
gccuggauuugucugaauu

SEQ ID NO: 420241 - RNA, 19 nt, Homo sapiens
  misc_RNA (1)...(19): siRNA sense strand
gaaaacucccguugauuau

SEQ ID NO: 420242 - RNA, 19 nt, Homo sapiens
  misc_RNA (1)...(19): siRNA sense strand
gauuuuacaggcugaauua

SEQ ID NO: 420243 - RNA, 19 nt, Homo sapiens
  misc_RNA (1)...(19): siRNA sense strand
gagccaaguaucagauguu

SEQ ID NO: 420244 - RNA, 19 nt, Homo sapiens
  misc_RNA (1)...(19): siRNA sense strand
uaaagcggaauucaucaga

SEQ ID NO: 420245 - RNA, 19 nt, Homo sapiens
  misc_RNA (1)...(19): siRNA sense strand
ccaauaaagcggaauucau

SEQ ID NO: 420246 - RNA, 19 nt, Homo sapiens
  misc_RNA (1)...(19): siRNA sense strand
gcuggacccugcgucuauu

SEQ ID NO: 420247 - RNA, 19 nt, Homo sapiens
  misc_RNA (1)...(19): siRNA sense strand
uggaagacguaaagcuaau

SEQ ID NO: 420248 - RNA, 19 nt, Homo sapiens
  misc_RNA (1)...(19): siRNA sense strand
cagacgaagacacagauuu

SEQ ID NO: 420249 - RNA, 19 nt, Homo sapiens
  misc_RNA (1)...(19): siRNA sense strand
uugccacgcuggucauuga

SEQ ID NO: 420250 - RNA, 19 nt, Homo sapiens
  misc_RNA (1)...(19): siRNA sense strand
uggacagcacuuuauaaua

SEQ ID NO: 420251 - RNA, 19 nt, Homo sapiens
  misc_RNA (1)...(19): siRNA sense strand
aaacucccguugauuaugc

SEQ ID NO: 420252 - RNA, 19 nt, Homo sapiens
  misc_RNA (1)...(19): siRNA sense strand
ggaugacgauagugugacu

SEQ ID NO: 420253 - RNA, 19 nt, Homo sapiens
  misc_RNA (1)...(19): siRNA sense strand
cagcguggcaucagacgaa

SEQ ID NO: 420254 - RNA, 19 nt, Homo sapiens
  misc_RNA (1)...(19): siRNA sense strand
gaguacucaucaacacgaa

SEQ ID NO: 420255 - RNA, 19 nt, Homo sapiens
  misc_RNA (1)...(19): siRNA sense strand
cugaauuauuggcaguaua

SEQ ID NO: 420256 - RNA, 19 nt, Homo sapiens
  misc_RNA (1)...(19): siRNA sense strand
caaagaucuuagcaagcaa

SEQ ID NO: 420257 - RNA, 19 nt, Homo sapiens
  misc_RNA (1)...(19): siRNA sense strand
gugagaacagggaaucuug

SEQ ID NO: 420258 - RNA, 19 nt, Homo sapiens
  misc_RNA (1)...(19): siRNA sense strand
gaucagcccgacuaugaca

SEQ ID NO: 420259 - RNA, 19 nt, Homo sapiens
  misc_RNA (1)...(19): siRNA sense strand
uagugugacugccaaagau

SEQ ID NO: 420260 - RNA, 19 nt, Homo sapiens
  misc_RNA (1)...(19): siRNA sense strand
gacagcagccuggauuugu

SEQ ID NO: 420261 - RNA, 19 nt, Homo sapiens
  misc_RNA (1)...(19): siRNA sense strand
gagcagacccaggcacaca

SEQ ID NO: 420262 - RNA, 19 nt, Homo sapiens
  misc_RNA (1)...(19): siRNA sense strand
ugagcuaacggacagacua

SEQ ID NO: 420263 - RNA, 19 nt, Homo sapiens
  misc_RNA (1)...(19): siRNA sense strand
caagugaggcaucugaaac

SEQ ID NO: 420264 - RNA, 19 nt, Homo sapiens
  misc_RNA (1)...(19): siRNA sense strand
cggacagacuagccuucua

SEQ ID NO: 420265 - RNA, 19 nt, Homo sapiens
  misc_RNA (1)...(19): siRNA sense strand
ggacccugcgucuauuaug

SEQ ID NO: 420266 - RNA, 19 nt, Homo sapiens
  misc_RNA (1)...(19): siRNA sense strand
cagcagggcaguucucucu

SEQ ID NO: 420267 - RNA, 19 nt, Homo sapiens
  misc_RNA (1)...(19): siRNA sense strand
gagcuaacggacagacuag

SEQ ID NO: 420268 - RNA, 19 nt, Homo sapiens
  misc_RNA (1)...(19): siRNA sense strand
acaggauucuagugggaaa

SEQ ID NO: 420269 - RNA, 19 nt, Homo sapiens
  misc_RNA (1)...(19): siRNA sense strand
caaagcagggcagauuuua

SEQ ID NO: 420270 - RNA, 19 nt, Homo sapiens
  misc_RNA (1)...(19): siRNA sense strand
ccaaguaucagauguuagc

SEQ ID NO: 420271 - RNA, 19 nt, Homo sapiens
  misc_RNA (1)...(19): siRNA sense strand
gacccaggcacacaggauu

SEQ ID NO: 420272 - RNA, 19 nt, Homo sapiens
  misc_RNA (1)...(19): siRNA sense strand
caucagacgaagacacaga

SEQ ID NO: 420273 - RNA, 19 nt, Homo sapiens
  misc_RNA (1)...(19): siRNA sense strand
acaacgaucagcccgacua

SEQ ID NO: 420274 - RNA, 19 nt, Homo sapiens
  misc_RNA (1)...(19): siRNA sense strand
uauaugggagcauucuuug

SEQ ID NO: 420275 - RNA, 19 nt, Homo sapiens
  misc_RNA (1)...(19): siRNA sense strand
cuccaacacugcuucagau

SEQ ID NO: 420276 - RNA, 19 nt, Homo sapiens
  misc_RNA (1)...(19): siRNA sense strand
cagacuagccuucuaucuc

SEQ ID NO: 420277 - RNA, 19 nt, Homo sapiens
  misc_RNA (1)...(19): siRNA sense strand
ugagaacagggaaucuuga

SEQ ID NO: 420278 - RNA, 19 nt, Homo sapiens
  misc_RNA (1)...(19): siRNA sense strand
uugagacuguuaucuuuag

SEQ ID NO: 420279 - RNA, 19 nt, Homo sapiens
  misc_RNA (1)...(19): siRNA sense strand
caacgaucagcccgacuau

SEQ ID NO: 420280 - RNA, 19 nt, Homo sapiens
  misc_RNA (1)...(19): siRNA sense strand
cagccuggauuugucugaa

SEQ ID NO: 420281 - RNA, 19 nt, Homo sapiens
  misc_RNA (1)...(19): siRNA sense strand
aauggacagcacuuuauaa

SEQ ID NO: 420282 - RNA, 19 nt, Homo sapiens
  misc_RNA (1)...(19): siRNA sense strand
aguggaagacguaaagcua

SEQ ID NO: 420283 - RNA, 19 nt, Homo sapiens
  misc_RNA (1)...(19): siRNA sense strand
aaucagggcagacagaagu

SEQ ID NO: 420284 - RNA, 19 nt, Homo sapiens
  misc_RNA (1)...(19): siRNA sense strand
agacacagauuuggaaacc

SEQ ID NO: 420285 - RNA, 19 nt, Homo sapiens
  misc_RNA (1)...(19): siRNA sense strand
auguggagcucauacugaa

SEQ ID NO: 420286 - RNA, 19 nt, Homo sapiens
  misc_RNA (1)...(19): siRNA sense strand
uauaauaacggugcuaacu

SEQ ID NO: 420287 - RNA, 19 nt, Homo sapiens
  misc_RNA (1)...(19): siRNA sense strand
ucagggcagacagaaguua

SEQ ID NO: 420288 - RNA, 19 nt, Homo sapiens
  misc_RNA (1)...(19): siRNA sense strand
guugagaccuuguauaaua

SEQ ID NO: 420289 - RNA, 19 nt, Homo sapiens
  misc_RNA (1)...(19): siRNA sense strand
ggacagcacuuuauaauac

SEQ ID NO: 420290 - RNA, 19 nt, Homo sapiens
  misc_RNA (1)...(19): siRNA sense strand
ggaaaccacugcaagcaaa

SEQ ID NO: 420291 - RNA, 19 nt, Homo sapiens
  misc_RNA (1)...(19): siRNA sense strand
uaacggugcuaacucuaua

SEQ ID NO: 420292 - RNA, 19 nt, Homo sapiens
  misc_RNA (1)...(19): siRNA sense strand
gaaguuagcucgguucaac

SEQ ID NO: 420293 - RNA, 19 nt, Homo sapiens
  misc_RNA (1)...(19): siRNA sense strand
ggaaaacucccguugauua

SEQ ID NO: 420294 - RNA, 19 nt, Homo sapiens
  misc_RNA (1)...(19): siRNA sense strand
gauaaaguacaucccaaua

SEQ ID NO: 420295 - RNA, 19 nt, Homo sapiens
  misc_RNA (1)...(19): siRNA sense strand
ccaaagaucuuagcaagca

SEQ ID NO: 420296 - RNA, 19 nt, Homo sapiens
  misc_RNA (1)...(19): siRNA sense strand
guucaacgcccaugaguuu

SEQ ID NO: 420297 - RNA, 19 nt, Homo sapiens
  misc_RNA (1)...(19): siRNA sense strand
cgccauaucucccaaguga

SEQ ID NO: 420298 - RNA, 19 nt, Homo sapiens
  misc_RNA (1)...(19): siRNA sense strand
guuugagacuguuaucuuu

SEQ ID NO: 420299 - RNA, 19 nt, Homo sapiens
  misc_RNA (1)...(19): siRNA sense strand
gcagacagcagccuggauu

SEQ ID NO: 420300 - RNA, 19 nt, Homo sapiens
  misc_RNA (1)...(19): siRNA sense strand
caauaaagcggaauucauc

SEQ ID NO: 420301 - RNA, 19 nt, Homo sapiens
  misc_RNA (1)...(19): siRNA sense strand
gacccugcgucuauuauga

SEQ ID NO: 420302 - RNA, 19 nt, Homo sapiens
  misc_RNA (1)...(19): siRNA sense strand
ucauugacauucucaguga

SEQ ID NO: 420303 - RNA, 19 nt, Homo sapiens
  misc_RNA (1)...(19): siRNA sense strand
ggacagacuagccuucuau

SEQ ID NO: 420304 - RNA, 19 nt, Homo sapiens
  misc_RNA (1)...(19): siRNA sense strand
gaacagggaaucuugaaac

SEQ ID NO: 420305 - RNA, 19 nt, Homo sapiens
  misc_RNA (1)...(19): siRNA sense strand
caacacugcuucagauggu

SEQ ID NO: 420306 - RNA, 19 nt, Homo sapiens
  misc_RNA (1)...(19): siRNA sense strand
caagccaacuucuuucauc

SEQ ID NO: 420307 - RNA, 19 nt, Homo sapiens
  misc_RNA (1)...(19): siRNA sense strand
uuuacaggcugaauuauug

SEQ ID NO: 420308 - RNA, 19 nt, Homo sapiens
  misc_RNA (1)...(19): siRNA sense strand
gaaguugacaggcgagaga

SEQ ID NO: 420309 - RNA, 19 nt, Homo sapiens
  misc_RNA (1)...(19): siRNA sense strand
uaauaacggugcuaacucu

SEQ ID NO: 420310 - RNA, 19 nt, Homo sapiens
  misc_RNA (1)...(19): siRNA sense strand
gcagagcgccucguggaaa

SEQ ID NO: 420311 - RNA, 19 nt, Homo sapiens
  misc_RNA (1)...(19): siRNA sense strand
gcaggaaaccagaucacaa

SEQ ID NO: 420312 - RNA, 19 nt, Homo sapiens
  misc_RNA (1)...(19): siRNA sense strand
gaagacacagauuuggaaa

SEQ ID NO: 420313 - RNA, 19 nt, Homo sapiens
  misc_RNA (1)...(19): siRNA sense strand
caggaaaccagaucacaaa

SEQ ID NO: 420314 - RNA, 19 nt, Homo sapiens
  misc_RNA (1)...(19): siRNA sense strand
gaaaucagggcagacagaa

SEQ ID NO: 420315 - RNA, 19 nt, Homo sapiens
  misc_RNA (1)...(19): siRNA sense strand
uugaagaacuugccaugga

SEQ ID NO: 420316 - RNA, 19 nt, Homo sapiens
  misc_RNA (1)...(19): siRNA sense strand
gcacaagccaacuucuuuc

SEQ ID NO: 420317 - RNA, 19 nt, Homo sapiens
  misc_RNA (1)...(19): siRNA sense strand
agacuagccuucuaucucu

SEQ ID NO: 420318 - RNA, 19 nt, Homo sapiens
  misc_RNA (1)...(19): siRNA sense strand
gagaacagggaaucuugaa

SEQ ID NO: 420319 - RNA, 19 nt, Homo sapiens
  misc_RNA (1)...(19): siRNA sense strand
ugaagaacuugccauggau

SEQ ID NO: 420320 - RNA, 19 nt, Homo sapiens
  misc_RNA (1)...(19): siRNA sense strand
cgaagacacagauuuggaa

SEQ ID NO: 420321 - RNA, 19 nt, Homo sapiens
  misc_RNA (1)...(19): siRNA sense strand
gagcacaagccaacuucuu

SEQ ID NO: 420322 - RNA, 19 nt, Homo sapiens
  misc_RNA (1)...(19): siRNA sense strand
agacgaagacacagauuug

SEQ ID NO: 420323 - RNA, 19 nt, Homo sapiens
  misc_RNA (1)...(19): siRNA sense strand
guaaauaggggaacguuuu

SEQ ID NO: 420324 - RNA, 19 nt, Homo sapiens
  misc_RNA (1)...(19): siRNA sense strand
aaauggacagcacuuuaua

SEQ ID NO: 420325 - RNA, 19 nt, Homo sapiens
  misc_RNA (1)...(19): siRNA sense strand
ggcaaaagcugcuaagaag

SEQ ID NO: 420326 - RNA, 19 nt, Homo sapiens
  misc_RNA (1)...(19): siRNA sense strand
ggagacagcagggcaguuc

SEQ ID NO: 420327 - RNA, 19 nt, Homo sapiens
  misc_RNA (1)...(19): siRNA sense strand
ugguugagaccuuguauaa

SEQ ID NO: 420328 - RNA, 19 nt, Homo sapiens
  misc_RNA (1)...(19): siRNA sense strand
gauguuagcguucguccau

SEQ ID NO: 420329 - RNA, 19 nt, Homo sapiens
  misc_RNA (1)...(19): siRNA sense strand
agccaaguaucagauguua

SEQ ID NO: 420330 - RNA, 19 nt, Homo sapiens
  misc_RNA (1)...(19): siRNA sense strand
guggaagacguaaagcuaa

SEQ ID NO: 420331 - RNA, 19 nt, Homo sapiens
  misc_RNA (1)...(19): siRNA sense strand
acgaucagcccgacuauga

SEQ ID NO: 420332 - RNA, 19 nt, Homo sapiens
  misc_RNA (1)...(19): siRNA sense strand
cagagcgccucguggaaau

SEQ ID NO: 420333 - RNA, 19 nt, Homo sapiens
  misc_RNA (1)...(19): siRNA sense strand
gcaaggagggcaccaugag

SEQ ID NO: 420334 - RNA, 19 nt, Homo sapiens
  misc_RNA (1)...(19): siRNA sense strand
gcugaauuauuggcaguau

SEQ ID NO: 420335 - RNA, 19 nt, Homo sapiens
  misc_RNA (1)...(19): siRNA sense strand
ccaagugaggcaucugaaa

SEQ ID NO: 420336 - RNA, 19 nt, Homo sapiens
  misc_RNA (1)...(19): siRNA sense strand
caaaagcugcuaagaagaa

SEQ ID NO: 420337 - RNA, 19 nt, Homo sapiens
  misc_RNA (1)...(19): siRNA sense strand
cuauaugggagcauucuuu

SEQ ID NO: 420338 - RNA, 19 nt, Homo sapiens
  misc_RNA (1)...(19): siRNA sense strand
cgaaaucagggcagacaga

SEQ ID NO: 420339 - RNA, 19 nt, Homo sapiens
  misc_RNA (1)...(19): siRNA sense strand
guacucaucaacacgaaau

SEQ ID NO: 420340 - RNA, 19 nt, Homo sapiens
  misc_RNA (1)...(19): siRNA sense strand
gccuggauuugucugaauu

SEQ ID NO: 420341 - RNA, 19 nt, Homo sapiens
  misc_RNA (1)...(19): siRNA sense strand
gaaaacucccguugauuau

SEQ ID NO: 420342 - RNA, 19 nt, Homo sapiens
  misc_RNA (1)...(19): siRNA sense strand
gauuuuacaggcugaauua

SEQ ID NO: 420343 - RNA, 19 nt, Homo sapiens
  misc_RNA (1)...(19): siRNA sense strand
gagccaaguaucagauguu

SEQ ID NO: 420344 - RNA, 19 nt, Homo sapiens
  misc_RNA (1)...(19): siRNA sense strand
uaaagcggaauucaucaga

SEQ ID NO: 420345 - RNA, 19 nt, Homo sapiens
  misc_RNA (1)...(19): siRNA sense strand
ccaauaaagcggaauucau

SEQ ID NO: 420346 - RNA, 19 nt, Homo sapiens
  misc_RNA (1)...(19): siRNA sense strand
gcuggacccugcgucuauu

SEQ ID NO: 420347 - RNA, 19 nt, Homo sapiens
  misc_RNA (1)...(19): siRNA sense strand
uggaagacguaaagcuaau

SEQ ID NO: 420348 - RNA, 19 nt, Homo sapiens
  misc_RNA (1)...(19): siRNA sense strand
cagacgaagacacagauuu

SEQ ID NO: 420349 - RNA, 19 nt, Homo sapiens
  misc_RNA (1)...(19): siRNA sense strand
uugccacgcuggucauuga

SEQ ID NO: 420350 - RNA, 19 nt, Homo sapiens
  misc_RNA (1)...(19): siRNA sense strand
uggacagcacuuuauaaua

SEQ ID NO: 420351 - RNA, 19 nt, Homo sapiens
  misc_RNA (1)...(19): siRNA sense strand
aaacucccguugauuaugc

SEQ ID NO: 420352 - RNA, 19 nt, Homo sapiens
  misc_RNA (1)...(19): siRNA sense strand
ggaugacgauagugugacu

SEQ ID NO: 420353 - RNA, 19 nt, Homo sapiens
  misc_RNA (1)...(19): siRNA sense strand
cagcguggcaucagacgaa

SEQ ID NO: 420354 - RNA, 19 nt, Homo sapiens
  misc_RNA (1)...(19): siRNA sense strand
gaguacucaucaacacgaa

SEQ ID NO: 420355 - RNA, 19 nt, Homo sapiens
  misc_RNA (1)...(19): siRNA sense strand
cugaauuauuggcaguaua

SEQ ID NO: 420356 - RNA, 19 nt, Homo sapiens
  misc_RNA (1)...(19): siRNA sense strand
caaagaucuuagcaagcaa

SEQ ID NO: 420357 - RNA, 19 nt, Homo sapiens
  misc_RNA (1)...(19): siRNA sense strand
gugagaacagggaaucuug

SEQ ID NO: 420358 - RNA, 19 nt, Homo sapiens
  misc_RNA (1)...(19): siRNA sense strand
gaucagcccgacuaugaca

SEQ ID NO: 420359 - RNA, 19 nt, Homo sapiens
  misc_RNA (1)...(19): siRNA sense strand
uagugugacugccaaagau

SEQ ID NO: 420360 - RNA, 19 nt, Homo sapiens
  misc_RNA (1)...(19): siRNA sense strand
gacagcagccuggauuugu

SEQ ID NO: 420361 - RNA, 19 nt, Homo sapiens
  misc_RNA (1)...(19): siRNA sense strand
gagcagacccaggcacaca

SEQ ID NO: 420362 - RNA, 19 nt, Homo sapiens
  misc_RNA (1)...(19): siRNA sense strand
ugagcuaacggacagacua

SEQ ID NO: 420363 - RNA, 19 nt, Homo sapiens
  misc_RNA (1)...(19): siRNA sense strand
caagugaggcaucugaaac

SEQ ID NO: 420364 - RNA, 19 nt, Homo sapiens
  misc_RNA (1)...(19): siRNA sense strand
cggacagacuagccuucua

SEQ ID NO: 420365 - RNA, 19 nt, Homo sapiens
  misc_RNA (1)...(19): siRNA sense strand
ggacccugcgucuauuaug

SEQ ID NO: 420366 - RNA, 19 nt, Homo sapiens
  misc_RNA (1)...(19): siRNA sense strand
cagcagggcaguucucucu

SEQ ID NO: 420367 - RNA, 19 nt, Homo sapiens
  misc_RNA (1)...(19): siRNA sense strand
gagcuaacggacagacuag

SEQ ID NO: 420368 - RNA, 19 nt, Homo sapiens
  misc_RNA (1)...(19): siRNA sense strand
acaggauucuagugggaaa

SEQ ID NO: 420369 - RNA, 19 nt, Homo sapiens
  misc_RNA (1)...(19): siRNA sense strand
caaagcagggcagauuuua

SEQ ID NO: 420370 - RNA, 19 nt, Homo sapiens
  misc_RNA (1)...(19): siRNA sense strand
ccaaguaucagauguuagc

SEQ ID NO: 420371 - RNA, 19 nt, Homo sapiens
  misc_RNA (1)...(19): siRNA sense strand
gacccaggcacacaggauu

SEQ ID NO: 420372 - RNA, 19 nt, Homo sapiens
  misc_RNA (1)...(19): siRNA sense strand
caucagacgaagacacaga

SEQ ID NO: 420373 - RNA, 19 nt, Homo sapiens
  misc_RNA (1)...(19): siRNA sense strand
acaacgaucagcccgacua

SEQ ID NO: 420374 - RNA, 19 nt, Homo sapiens
  misc_RNA (1)...(19): siRNA sense strand
uauaugggagcauucuuug

SEQ ID NO: 420375 - RNA, 19 nt, Homo sapiens
  misc_RNA (1)...(19): siRNA sense strand
cuccaacacugcuucagau

SEQ ID NO: 420376 - RNA, 19 nt, Homo sapiens
  misc_RNA (1)...(19): siRNA sense strand
cagacuagccuucuaucuc

SEQ ID NO: 420377 - RNA, 19 nt, Homo sapiens
  misc_RNA (1)...(19): siRNA sense strand
ugagaacagggaaucuuga

SEQ ID NO: 420378 - RNA, 19 nt, Homo sapiens
  misc_RNA (1)...(19): siRNA sense strand
uugagacuguuaucuuuag

SEQ ID NO: 420379 - RNA, 19 nt, Homo sapiens
  misc_RNA (1)...(19): siRNA sense strand
caacgaucagcccgacuau

SEQ ID NO: 420380 - RNA, 19 nt, Homo sapiens
  misc_RNA (1)...(19): siRNA sense strand
cagccuggauuugucugaa

SEQ ID NO: 420381 - RNA, 19 nt, Homo sapiens
  misc_RNA (1)...(19): siRNA sense strand
aauggacagcacuuuauaa

SEQ ID NO: 420382 - RNA, 19 nt, Homo sapiens
  misc_RNA (1)...(19): siRNA sense strand
aguggaagacguaaagcua

SEQ ID NO: 420383 - RNA, 19 nt, Homo sapiens
  misc_RNA (1)...(19): siRNA sense strand
aaucagggcagacagaagu

SEQ ID NO: 420384 - RNA, 19 nt, Homo sapiens
  misc_RNA (1)...(19): siRNA sense strand
agacacagauuuggaaacc

SEQ ID NO: 420385 - RNA, 19 nt, Homo sapiens
  misc_RNA (1)...(19): siRNA sense strand
auguggagcucauacugaa

SEQ ID NO: 420386 - RNA, 19 nt, Homo sapiens
  misc_RNA (1)...(19): siRNA sense strand
uauaauaacggugcuaacu

SEQ ID NO: 420387 - RNA, 19 nt, Homo sapiens
  misc_RNA (1)...(19): siRNA sense strand
ucagggcagacagaaguua

SEQ ID NO: 420388 - RNA, 19 nt, Homo sapiens
  misc_RNA (1)...(19): siRNA sense strand
guugagaccuuguauaaua

SEQ ID NO: 420389 - RNA, 19 nt, Homo sapiens
  misc_RNA (1)...(19): siRNA sense strand
ggacagcacuuuauaauac

SEQ ID NO: 420390 - RNA, 19 nt, Homo sapiens
  misc_RNA (1)...(19): siRNA sense strand
ggaaaccacugcaagcaaa

SEQ ID NO: 420391 - RNA, 19 nt, Homo sapiens
  misc_RNA (1)...(19): siRNA sense strand
uaacggugcuaacucuaua

SEQ ID NO: 420392 - RNA, 19 nt, Homo sapiens
  misc_RNA (1)...(19): siRNA sense strand
gaaguuagcucgguucaac

SEQ ID NO: 420393 - RNA, 19 nt, Homo sapiens
  misc_RNA (1)...(19): siRNA sense strand
ggaaaacucccguugauua

SEQ ID NO: 420394 - RNA, 19 nt, Homo sapiens
  misc_RNA (1)...(19): siRNA sense strand
gauaaaguacaucccaaua

SEQ ID NO: 420395 - RNA, 19 nt, Homo sapiens
  misc_RNA (1)...(19): siRNA sense strand
ccaaagaucuuagcaagca

SEQ ID NO: 420396 - RNA, 19 nt, Homo sapiens
  misc_RNA (1)...(19): siRNA sense strand
guucaacgcccaugaguuu

SEQ ID NO: 420397 - RNA, 19 nt, Homo sapiens
  misc_RNA (1)...(19): siRNA sense strand
cgccauaucucccaaguga

SEQ ID NO: 420398 - RNA, 19 nt, Homo sapiens
  misc_RNA (1)...(19): siRNA sense strand
guuugagacuguuaucuuu

SEQ ID NO: 420399 - RNA, 19 nt, Homo sapiens
  misc_RNA (1)...(19): siRNA sense strand
gcagacagcagccuggauu

SEQ ID NO: 420400 - RNA, 19 nt, Homo sapiens
  misc_RNA (1)...(19): siRNA sense strand
caauaaagcggaauucauc

SEQ ID NO: 420401 - RNA, 19 nt, Homo sapiens
  misc_RNA (1)...(19): siRNA sense strand
gacccugcgucuauuauga

SEQ ID NO: 420402 - RNA, 19 nt, Homo sapiens
  misc_RNA (1)...(19): siRNA sense strand
ucauugacauucucaguga

SEQ ID NO: 420403 - RNA, 19 nt, Homo sapiens
  misc_RNA (1)...(19): siRNA sense strand
ggacagacuagccuucuau

SEQ ID NO: 420404 - RNA, 19 nt, Homo sapiens
  misc_RNA (1)...(19): siRNA sense strand
gaacagggaaucuugaaac

SEQ ID NO: 420405 - RNA, 19 nt, Homo sapiens
  misc_RNA (1)...(19): siRNA sense strand
caacacugcuucagauggu

SEQ ID NO: 420406 - RNA, 19 nt, Homo sapiens
  misc_RNA (1)...(19): siRNA sense strand
caagccaacuucuuucauc

SEQ ID NO: 420407 - RNA, 19 nt, Homo sapiens
  misc_RNA (1)...(19): siRNA sense strand
uuuacaggcugaauuauug

SEQ ID NO: 420408 - RNA, 19 nt, Homo sapiens
  misc_RNA (1)...(19): siRNA sense strand
gaaguugacaggcgagaga

SEQ ID NO: 420409 - RNA, 19 nt, Homo sapiens
  misc_RNA (1)...(19): siRNA sense strand
uaauaacggugcuaacucu

SEQ ID NO: 420410 - RNA, 19 nt, Homo sapiens
  misc_RNA (1)...(19): siRNA sense strand
gcagagcgccucguggaaa

SEQ ID NO: 420411 - RNA, 19 nt, Homo sapiens
  misc_RNA (1)...(19): siRNA sense strand
gcaggaaaccagaucacaa

SEQ ID NO: 420412 - RNA, 19 nt, Homo sapiens
  misc_RNA (1)...(19): siRNA sense strand
gaagacacagauuuggaaa

SEQ ID NO: 420413 - RNA, 19 nt, Homo sapiens
  misc_RNA (1)...(19): siRNA sense strand
caggaaaccagaucacaaa

SEQ ID NO: 420414 - RNA, 19 nt, Homo sapiens
  misc_RNA (1)...(19): siRNA sense strand
gaaaucagggcagacagaa

SEQ ID NO: 420415 - RNA, 19 nt, Homo sapiens
  misc_RNA (1)...(19): siRNA sense strand
uugaagaacuugccaugga

SEQ ID NO: 420416 - RNA, 19 nt, Homo sapiens
  misc_RNA (1)...(19): siRNA sense strand
gcacaagccaacuucuuuc

SEQ ID NO: 420417 - RNA, 19 nt, Homo sapiens
  misc_RNA (1)...(19): siRNA sense strand
agacuagccuucuaucucu

SEQ ID NO: 420418 - RNA, 19 nt, Homo sapiens
  misc_RNA (1)...(19): siRNA sense strand
gagaacagggaaucuugaa

SEQ ID NO: 420419 - RNA, 19 nt, Homo sapiens
  misc_RNA (1)...(19): siRNA sense strand
ugaagaacuugccauggau

SEQ ID NO: 420420 - RNA, 19 nt, Homo sapiens
  misc_RNA (1)...(19): siRNA sense strand
cgaagacacagauuuggaa

SEQ ID NO: 420421 - RNA, 19 nt, Homo sapiens
  misc_RNA (1)...(19): siRNA sense strand
gagcacaagccaacuucuu

SEQ ID NO: 420422 - RNA, 19 nt, Homo sapiens
  misc_RNA (1)...(19): siRNA sense strand
agacgaagacacagauuug

SEQ ID NO: 420423 - RNA, 19 nt, Homo sapiens
  misc_RNA (1)...(19): siRNA sense strand
guaaauaggggaacguuuu

SEQ ID NO: 420424 - RNA, 19 nt, Homo sapiens
  misc_RNA (1)...(19): siRNA sense strand
aaauggacagcacuuuaua

SEQ ID NO: 420425 - RNA, 19 nt, Homo sapiens
  misc_RNA (1)...(19): siRNA sense strand
ggcaaaagcugcuaagaag

SEQ ID NO: 420426 - RNA, 19 nt, Homo sapiens
  misc_RNA (1)...(19): siRNA sense strand
ggagacagcagggcaguuc

SEQ ID NO: 420427 - RNA, 19 nt, Homo sapiens
  misc_RNA (1)...(19): siRNA sense strand
ugguugagaccuuguauaa

SEQ ID NO: 420428 - RNA, 19 nt, Homo sapiens
  misc_RNA (1)...(19): siRNA sense strand
gauguuagcguucguccau

SEQ ID NO: 420429 - RNA, 19 nt, Homo sapiens
  misc_RNA (1)...(19): siRNA sense strand
agccaaguaucagauguua

SEQ ID NO: 420430 - RNA, 19 nt, Homo sapiens
  misc_RNA (1)...(19): siRNA sense strand
guggaagacguaaagcuaa

SEQ ID NO: 420431 - RNA, 19 nt, Homo sapiens
  misc_RNA (1)...(19): siRNA sense strand
acgaucagcccgacuauga

SEQ ID NO: 420432 - RNA, 19 nt, Homo sapiens
  misc_RNA (1)...(19): siRNA sense strand
cagagcgccucguggaaau

SEQ ID NO: 420433 - RNA, 19 nt, Homo sapiens
  misc_RNA (1)...(19): siRNA sense strand
gcaaggagggcaccaugag

SEQ ID NO: 420434 - RNA, 19 nt, Homo sapiens
  misc_RNA (1)...(19): siRNA sense strand
gcugaauuauuggcaguau

SEQ ID NO: 420435 - RNA, 19 nt, Homo sapiens
  misc_RNA (1)...(19): siRNA sense strand
ccaagugaggcaucugaaa

SEQ ID NO: 420436 - RNA, 19 nt, Homo sapiens
  misc_RNA (1)...(19): siRNA sense strand
caaaagcugcuaagaagaa

SEQ ID NO: 420437 - RNA, 19 nt, Homo sapiens
  misc_RNA (1)...(19): siRNA sense strand
cuauaugggagcauucuuu

SEQ ID NO: 420438 - RNA, 19 nt, Homo sapiens
  misc_RNA (1)...(19): siRNA sense strand
cgaaaucagggcagacaga

SEQ ID NO: 420439 - RNA, 19 nt, Homo sapiens
  misc_RNA (1)...(19): siRNA sense strand
guacucaucaacacgaaau

SEQ ID NO: 420440 - RNA, 19 nt, Homo sapiens
  misc_RNA (1)...(19): siRNA sense strand
gccuggauuugucugaauu

SEQ ID NO: 420441 - RNA, 19 nt, Homo sapiens
  misc_RNA (1)...(19): siRNA sense strand
gaaaacucccguugauuau

SEQ ID NO: 420442 - RNA, 19 nt, Homo sapiens
  misc_RNA (1)...(19): siRNA sense strand
gauuuuacaggcugaauua

SEQ ID NO: 420443 - RNA, 19 nt, Homo sapiens
  misc_RNA (1)...(19): siRNA sense strand
gagccaaguaucagauguu

SEQ ID NO: 420444 - RNA, 19 nt, Homo sapiens
  misc_RNA (1)...(19): siRNA sense strand
uaaagcggaauucaucaga

SEQ ID NO: 420445 - RNA, 19 nt, Homo sapiens
  misc_RNA (1)...(19): siRNA sense strand
ccaauaaagcggaauucau

SEQ ID NO: 420446 - RNA, 19 nt, Homo sapiens
  misc_RNA (1)...(19): siRNA sense strand
gcuggacccugcgucuauu

SEQ ID NO: 420447 - RNA, 19 nt, Homo sapiens
  misc_RNA (1)...(19): siRNA sense strand
uggaagacguaaagcuaau

SEQ ID NO: 420448 - RNA, 19 nt, Homo sapiens
  misc_RNA (1)...(19): siRNA sense strand
cagacgaagacacagauuu

SEQ ID NO: 420449 - RNA, 19 nt, Homo sapiens
  misc_RNA (1)...(19): siRNA sense strand
uugccacgcuggucauuga

SEQ ID NO: 420450 - RNA, 19 nt, Homo sapiens
  misc_RNA (1)...(19): siRNA sense strand
uggacagcacuuuauaaua

SEQ ID NO: 420451 - RNA, 19 nt, Homo sapiens
  misc_RNA (1)...(19): siRNA sense strand
aaacucccguugauuaugc

SEQ ID NO: 420452 - RNA, 19 nt, Homo sapiens
  misc_RNA (1)...(19): siRNA sense strand
ggaugacgauagugugacu

SEQ ID NO: 420453 - RNA, 19 nt, Homo sapiens
  misc_RNA (1)...(19): siRNA sense strand
cagcguggcaucagacgaa

SEQ ID NO: 420454 - RNA, 19 nt, Homo sapiens
  misc_RNA (1)...(19): siRNA sense strand
gaguacucaucaacacgaa

SEQ ID NO: 420455 - RNA, 19 nt, Homo sapiens
  misc_RNA (1)...(19): siRNA sense strand
cugaauuauuggcaguaua

SEQ ID NO: 420456 - RNA, 19 nt, Homo sapiens
  misc_RNA (1)...(19): siRNA sense strand
caaagaucuuagcaagcaa

SEQ ID NO: 420457 - RNA, 19 nt, Homo sapiens
  misc_RNA (1)...(19): siRNA sense strand
gugagaacagggaaucuug

SEQ ID NO: 420458 - RNA, 19 nt, Homo sapiens
  misc_RNA (1)...(19): siRNA sense strand
gaucagcccgacuaugaca

SEQ ID NO: 420459 - RNA, 19 nt, Homo sapiens
  misc_RNA (1)...(19): siRNA sense strand
uagugugacugccaaagau

SEQ ID NO: 420460 - RNA, 19 nt, Homo sapiens
  misc_RNA (1)...(19): siRNA sense strand
gacagcagccuggauuugu

SEQ ID NO: 420461 - RNA, 19 nt, Homo sapiens
  misc_RNA (1)...(19): siRNA sense strand
gagcagacccaggcacaca

SEQ ID NO: 420462 - RNA, 19 nt, Homo sapiens
  misc_RNA (1)...(19): siRNA sense strand
ugagcuaacggacagacua

SEQ ID NO: 420463 - RNA, 19 nt, Homo sapiens
  misc_RNA (1)...(19): siRNA sense strand
caagugaggcaucugaaac

SEQ ID NO: 420464 - RNA, 19 nt, Homo sapiens
  misc_RNA (1)...(19): siRNA sense strand
cggacagacuagccuucua

SEQ ID NO: 420465 - RNA, 19 nt, Homo sapiens
  misc_RNA (1)...(19): siRNA sense strand
ggacccugcgucuauuaug

SEQ ID NO: 420466 - RNA, 19 nt, Homo sapiens
  misc_RNA (1)...(19): siRNA sense strand
cagcagggcaguucucucu

SEQ ID NO: 420467 - RNA, 19 nt, Homo sapiens
  misc_RNA (1)...(19): siRNA sense strand
gagcuaacggacagacuag

SEQ ID NO: 420468 - RNA, 19 nt, Homo sapiens
  misc_RNA (1)...(19): siRNA sense strand
acaggauucuagugggaaa

SEQ ID NO: 420469 - RNA, 19 nt, Homo sapiens
  misc_RNA (1)...(19): siRNA sense strand
caaagcagggcagauuuua

SEQ ID NO: 420470 - RNA, 19 nt, Homo sapiens
  misc_RNA (1)...(19): siRNA sense strand
ccaaguaucagauguuagc

SEQ ID NO: 420471 - RNA, 19 nt, Homo sapiens
  misc_RNA (1)...(19): siRNA sense strand
gacccaggcacacaggauu

SEQ ID NO: 420472 - RNA, 19 nt, Homo sapiens
  misc_RNA (1)...(19): siRNA sense strand
caucagacgaagacacaga

SEQ ID NO: 420473 - RNA, 19 nt, Homo sapiens
  misc_RNA (1)...(19): siRNA sense strand
acaacgaucagcccgacua

SEQ ID NO: 420474 - RNA, 19 nt, Homo sapiens
  misc_RNA (1)...(19): siRNA sense strand
uauaugggagcauucuuug

SEQ ID NO: 420475 - RNA, 19 nt, Homo sapiens
  misc_RNA (1)...(19): siRNA sense strand
cuccaacacugcuucagau

SEQ ID NO: 420476 - RNA, 19 nt, Homo sapiens
  misc_RNA (1)...(19): siRNA sense strand
cagacuagccuucuaucuc

SEQ ID NO: 420477 - RNA, 19 nt, Homo sapiens
  misc_RNA (1)...(19): siRNA sense strand
ugagaacagggaaucuuga

SEQ ID NO: 420478 - RNA, 19 nt, Homo sapiens
  misc_RNA (1)...(19): siRNA sense strand
uugagacuguuaucuuuag

SEQ ID NO: 420479 - RNA, 19 nt, Homo sapiens
  misc_RNA (1)...(19): siRNA sense strand
caacgaucagcccgacuau

SEQ ID NO: 420480 - RNA, 19 nt, Homo sapiens
  misc_RNA (1)...(19): siRNA sense strand
cagccuggauuugucugaa

SEQ ID NO: 420481 - RNA, 19 nt, Homo sapiens
  misc_RNA (1)...(19): siRNA sense strand
aauggacagcacuuuauaa

SEQ ID NO: 420482 - RNA, 19 nt, Homo sapiens
  misc_RNA (1)...(19): siRNA sense strand
aguggaagacguaaagcua

SEQ ID NO: 420483 - RNA, 19 nt, Homo sapiens
  misc_RNA (1)...(19): siRNA sense strand
aaucagggcagacagaagu

SEQ ID NO: 420484 - RNA, 19 nt, Homo sapiens
  misc_RNA (1)...(19): siRNA sense strand
agacacagauuuggaaacc

SEQ ID NO: 420485 - RNA, 19 nt, Homo sapiens
  misc_RNA (1)...(19): siRNA sense strand
auguggagcucauacugaa

SEQ ID NO: 420486 - RNA, 19 nt, Homo sapiens
  misc_RNA (1)...(19): siRNA sense strand
uauaauaacggugcuaacu

SEQ ID NO: 420487 - RNA, 19 nt, Homo sapiens
  misc_RNA (1)...(19): siRNA sense strand
ucagggcagacagaaguua

SEQ ID NO: 420488 - RNA, 19 nt, Homo sapiens
  misc_RNA (1)...(19): siRNA sense strand
guugagaccuuguauaaua

SEQ ID NO: 420489 - RNA, 19 nt, Homo sapiens
  misc_RNA (1)...(19): siRNA sense strand
ggacagcacuuuauaauac

SEQ ID NO: 420490 - RNA, 19 nt, Homo sapiens
  misc_RNA (1)...(19): siRNA sense strand
ggaaaccacugcaagcaaa

SEQ ID NO: 420491 - RNA, 19 nt, Homo sapiens
  misc_RNA (1)...(19): siRNA sense strand
uaacggugcuaacucuaua

SEQ ID NO: 420492 - RNA, 19 nt, Homo sapiens
  misc_RNA (1)...(19): siRNA sense strand
gaaguuagcucgguucaac

SEQ ID NO: 420493 - RNA, 19 nt, Homo sapiens
  misc_RNA (1)...(19): siRNA sense strand
ggaaaacucccguugauua

SEQ ID NO: 420494 - RNA, 19 nt, Homo sapiens
  misc_RNA (1)...(19): siRNA sense strand
gauaaaguacaucccaaua

SEQ ID NO: 420495 - RNA, 19 nt, Homo sapiens
  misc_RNA (1)...(19): siRNA sense strand
ccaaagaucuuagcaagca

SEQ ID NO: 420496 - RNA, 19 nt, Homo sapiens
  misc_RNA (1)...(19): siRNA sense strand
guucaacgcccaugaguuu

SEQ ID NO: 420497 - RNA, 19 nt, Homo sapiens
  misc_RNA (1)...(19): siRNA sense strand
cgccauaucucccaaguga

SEQ ID NO: 420498 - RNA, 19 nt, Homo sapiens
  misc_RNA (1)...(19): siRNA sense strand
guuugagacuguuaucuuu

SEQ ID NO: 420499 - RNA, 19 nt, Homo sapiens
  misc_RNA (1)...(19): siRNA sense strand
gcagacagcagccuggauu

SEQ ID NO: 420500 - RNA, 19 nt, Homo sapiens
  misc_RNA (1)...(19): siRNA sense strand
caauaaagcggaauucauc

SEQ ID NO: 420501 - RNA, 19 nt, Homo sapiens
  misc_RNA (1)...(19): siRNA sense strand
gacccugcgucuauuauga

SEQ ID NO: 420502 - RNA, 19 nt, Homo sapiens
  misc_RNA (1)...(19): siRNA sense strand
ucauugacauucucaguga

SEQ ID NO: 420503 - RNA, 19 nt, Homo sapiens
  misc_RNA (1)...(19): siRNA sense strand
ggacagacuagccuucuau

SEQ ID NO: 420504 - RNA, 19 nt, Homo sapiens
  misc_RNA (1)...(19): siRNA sense strand
gaacagggaaucuugaaac

SEQ ID NO: 420505 - RNA, 19 nt, Homo sapiens
  misc_RNA (1)...(19): siRNA sense strand
caacacugcuucagauggu

SEQ ID NO: 420506 - RNA, 19 nt, Homo sapiens
  misc_RNA (1)...(19): siRNA sense strand
caagccaacuucuuucauc

SEQ ID NO: 420507 - RNA, 19 nt, Homo sapiens
  misc_RNA (1)...(19): siRNA sense strand
uuuacaggcugaauuauug

SEQ ID NO: 420508 - RNA, 19 nt, Homo sapiens
  misc_RNA (1)...(19): siRNA sense strand
gaaguugacaggcgagaga

SEQ ID NO: 420509 - RNA, 19 nt, Homo sapiens
  misc_RNA (1)...(19): siRNA sense strand
uaauaacggugcuaacucu

SEQ ID NO: 420510 - RNA, 19 nt, Homo sapiens
  misc_RNA (1)...(19): siRNA sense strand
gcagagcgccucguggaaa

SEQ ID NO: 420511 - RNA, 19 nt, Homo sapiens
  misc_RNA (1)...(19): siRNA sense strand
gcaggaaaccagaucacaa

SEQ ID NO: 420512 - RNA, 19 nt, Homo sapiens
  misc_RNA (1)...(19): siRNA sense strand
gaagacacagauuuggaaa

SEQ ID NO: 420513 - RNA, 19 nt, Homo sapiens
  misc_RNA (1)...(19): siRNA sense strand
caggaaaccagaucacaaa

SEQ ID NO: 420514 - RNA, 19 nt, Homo sapiens
  misc_RNA (1)...(19): siRNA sense strand
gaaaucagggcagacagaa

SEQ ID NO: 420515 - RNA, 19 nt, Homo sapiens
  misc_RNA (1)...(19): siRNA sense strand
uugaagaacuugccaugga

SEQ ID NO: 420516 - RNA, 19 nt, Homo sapiens
  misc_RNA (1)...(19): siRNA sense strand
gcacaagccaacuucuuuc

SEQ ID NO: 420517 - RNA, 19 nt, Homo sapiens
  misc_RNA (1)...(19): siRNA sense strand
agacuagccuucuaucucu

SEQ ID NO: 420518 - RNA, 19 nt, Homo sapiens
  misc_RNA (1)...(19): siRNA sense strand
gagaacagggaaucuugaa

SEQ ID NO: 420519 - RNA, 19 nt, Homo sapiens
  misc_RNA (1)...(19): siRNA sense strand
ugaagaacuugccauggau

SEQ ID NO: 420520 - RNA, 19 nt, Homo sapiens
  misc_RNA (1)...(19): siRNA sense strand
cgaagacacagauuuggaa

SEQ ID NO: 420521 - RNA, 19 nt, Homo sapiens
  misc_RNA (1)...(19): siRNA sense strand
gagcacaagccaacuucuu

SEQ ID NO: 420522 - RNA, 19 nt, Homo sapiens
  misc_RNA (1)...(19): siRNA sense strand
agacgaagacacagauuug

SEQ ID NO: 420523 - RNA, 19 nt, Homo sapiens
  misc_RNA (1)...(19): siRNA sense strand
guaaauaggggaacguuuu

SEQ ID NO: 420524 - RNA, 19 nt, Homo sapiens
  misc_RNA (1)...(19): siRNA sense strand
aaauggacagcacuuuaua

SEQ ID NO: 420525 - RNA, 19 nt, Homo sapiens
  misc_RNA (1)...(19): siRNA sense strand
ggcaaaagcugcuaagaag

SEQ ID NO: 420526 - RNA, 19 nt, Homo sapiens
  misc_RNA (1)...(19): siRNA sense strand
ggagacagcagggcaguuc

SEQ ID NO: 420527 - RNA, 19 nt, Homo sapiens
  misc_RNA (1)...(19): siRNA sense strand
ugguugagaccuuguauaa

SEQ ID NO: 420528 - RNA, 19 nt, Homo sapiens
  misc_RNA (1)...(19): siRNA sense strand
gauguuagcguucguccau

SEQ ID NO: 420529 - RNA, 19 nt, Homo sapiens
  misc_RNA (1)...(19): siRNA sense strand
agccaaguaucagauguua

SEQ ID NO: 420530 - RNA, 19 nt, Homo sapiens
  misc_RNA (1)...(19): siRNA sense strand
guggaagacguaaagcuaa

SEQ ID NO: 420531 - RNA, 19 nt, Homo sapiens
  misc_RNA (1)...(19): siRNA sense strand
cagagcgccucguggaaau

SEQ ID NO: 420532 - RNA, 19 nt, Homo sapiens
  misc_RNA (1)...(19): siRNA sense strand
gcaaggagggcaccaugag

SEQ ID NO: 420533 - RNA, 19 nt, Homo sapiens
  misc_RNA (1)...(19): siRNA sense strand
gcugaauuauuggcaguau

SEQ ID NO: 420534 - RNA, 19 nt, Homo sapiens
  misc_RNA (1)...(19): siRNA sense strand
ccaagugaggcaucugaaa

SEQ ID NO: 420535 - RNA, 19 nt, Homo sapiens
  misc_RNA (1)...(19): siRNA sense strand
caaaagcugcuaagaagaa

SEQ ID NO: 420536 - RNA, 19 nt, Homo sapiens
  misc_RNA (1)...(19): siRNA sense strand
cuauaugggagcauucuuu

SEQ ID NO: 420537 - RNA, 19 nt, Homo sapiens
  misc_RNA (1)...(19): siRNA sense strand
cgaaaucagggcagacaga

SEQ ID NO: 420538 - RNA, 19 nt, Homo sapiens
  misc_RNA (1)...(19): siRNA sense strand
guacucaucaacacgaaau

SEQ ID NO: 420539 - RNA, 19 nt, Homo sapiens
  misc_RNA (1)...(19): siRNA sense strand
gccuggauuugucugaauu

SEQ ID NO: 420540 - RNA, 19 nt, Homo sapiens
  misc_RNA (1)...(19): siRNA sense strand
gaaaacucccguugauuau

SEQ ID NO: 420541 - RNA, 19 nt, Homo sapiens
  misc_RNA (1)...(19): siRNA sense strand
gauuuuacaggcugaauua

SEQ ID NO: 420542 - RNA, 19 nt, Homo sapiens
  misc_RNA (1)...(19): siRNA sense strand
gagccaaguaucagauguu

SEQ ID NO: 420543 - RNA, 19 nt, Homo sapiens
  misc_RNA (1)...(19): siRNA sense strand
uaaagcggaauucaucaga

SEQ ID NO: 420544 - RNA, 19 nt, Homo sapiens
  misc_RNA (1)...(19): siRNA sense strand
ccaauaaagcggaauucau

SEQ ID NO: 420545 - RNA, 19 nt, Homo sapiens
  misc_RNA (1)...(19): siRNA sense strand
gcuggacccugcgucuauu

SEQ ID NO: 420546 - RNA, 19 nt, Homo sapiens
  misc_RNA (1)...(19): siRNA sense strand
uggaagacguaaagcuaau

SEQ ID NO: 420547 - RNA, 19 nt, Homo sapiens
  misc_RNA (1)...(19): siRNA sense strand
cagacgaagacacagauuu

SEQ ID NO: 420548 - RNA, 19 nt, Homo sapiens
  misc_RNA (1)...(19): siRNA sense strand
uugccacgcuggucauuga

SEQ ID NO: 420549 - RNA, 19 nt, Homo sapiens
  misc_RNA (1)...(19): siRNA sense strand
uggacagcacuuuauaaua

SEQ ID NO: 420550 - RNA, 19 nt, Homo sapiens
  misc_RNA (1)...(19): siRNA sense strand
aaacucccguugauuaugc

SEQ ID NO: 420551 - RNA, 19 nt, Homo sapiens
  misc_RNA (1)...(19): siRNA sense strand
ggaugacgauagugugacu

SEQ ID NO: 420552 - RNA, 19 nt, Homo sapiens
  misc_RNA (1)...(19): siRNA sense strand
cagcguggcaucagacgaa

SEQ ID NO: 420553 - RNA, 19 nt, Homo sapiens
  misc_RNA (1)...(19): siRNA sense strand
gaguacucaucaacacgaa

SEQ ID NO: 420554 - RNA, 19 nt, Homo sapiens
  misc_RNA (1)...(19): siRNA sense strand
cugaauuauuggcaguaua

SEQ ID NO: 420555 - RNA, 19 nt, Homo sapiens
  misc_RNA (1)...(19): siRNA sense strand
caaagaucuuagcaagcaa

SEQ ID NO: 420556 - RNA, 19 nt, Homo sapiens
  misc_RNA (1)...(19): siRNA sense strand
gugagaacagggaaucuug

SEQ ID NO: 420557 - RNA, 19 nt, Homo sapiens
  misc_RNA (1)...(19): siRNA sense strand
gaucagcccgacuaugaca

SEQ ID NO: 420558 - RNA, 19 nt, Homo sapiens
  misc_RNA (1)...(19): siRNA sense strand
uagugugacugccaaagau

SEQ ID NO: 420559 - RNA, 19 nt, Homo sapiens
  misc_RNA (1)...(19): siRNA sense strand
gacagcagccuggauuugu

SEQ ID NO: 420560 - RNA, 19 nt, Homo sapiens
  misc_RNA (1)...(19): siRNA sense strand
gagcagacccaggcacaca

SEQ ID NO: 420561 - RNA, 19 nt, Homo sapiens
  misc_RNA (1)...(19): siRNA sense strand
ugagcuaacggacagacua

SEQ ID NO: 420562 - RNA, 19 nt, Homo sapiens
  misc_RNA (1)...(19): siRNA sense strand
caagugaggcaucugaaac

SEQ ID NO: 420563 - RNA, 19 nt, Homo sapiens
  misc_RNA (1)...(19): siRNA sense strand
cggacagacuagccuucua

SEQ ID NO: 420564 - RNA, 19 nt, Homo sapiens
  misc_RNA (1)...(19): siRNA sense strand
ggacccugcgucuauuaug

SEQ ID NO: 420565 - RNA, 19 nt, Homo sapiens
  misc_RNA (1)...(19): siRNA sense strand
cagcagggcaguucucucu

SEQ ID NO: 420566 - RNA, 19 nt, Homo sapiens
  misc_RNA (1)...(19): siRNA sense strand
gagcuaacggacagacuag

SEQ ID NO: 420567 - RNA, 19 nt, Homo sapiens
  misc_RNA (1)...(19): siRNA sense strand
acaggauucuagugggaaa

SEQ ID NO: 420568 - RNA, 19 nt, Homo sapiens
  misc_RNA (1)...(19): siRNA sense strand
caaagcagggcagauuuua

SEQ ID NO: 420569 - RNA, 19 nt, Homo sapiens
  misc_RNA (1)...(19): siRNA sense strand
ccaaguaucagauguuagc

SEQ ID NO: 420570 - RNA, 19 nt, Homo sapiens
  misc_RNA (1)...(19): siRNA sense strand
gacccaggcacacaggauu

SEQ ID NO: 420571 - RNA, 19 nt, Homo sapiens
  misc_RNA (1)...(19): siRNA sense strand
caucagacgaagacacaga

SEQ ID NO: 420572 - RNA, 19 nt, Homo sapiens
  misc_RNA (1)...(19): siRNA sense strand
uauaugggagcauucuuug

SEQ ID NO: 420573 - RNA, 19 nt, Homo sapiens
  misc_RNA (1)...(19): siRNA sense strand
cuccaacacugcuucagau

SEQ ID NO: 420574 - RNA, 19 nt, Homo sapiens
  misc_RNA (1)...(19): siRNA sense strand
cagacuagccuucuaucuc

SEQ ID NO: 420575 - RNA, 19 nt, Homo sapiens
  misc_RNA (1)...(19): siRNA sense strand
ugagaacagggaaucuuga

SEQ ID NO: 420576 - RNA, 19 nt, Homo sapiens
  misc_RNA (1)...(19): siRNA sense strand
uugagacuguuaucuuuag

SEQ ID NO: 420577 - RNA, 19 nt, Homo sapiens
  misc_RNA (1)...(19): siRNA sense strand
cagccuggauuugucugaa

SEQ ID NO: 420578 - RNA, 19 nt, Homo sapiens
  misc_RNA (1)...(19): siRNA sense strand
aauggacagcacuuuauaa

SEQ ID NO: 420579 - RNA, 19 nt, Homo sapiens
  misc_RNA (1)...(19): siRNA sense strand
aguggaagacguaaagcua

SEQ ID NO: 420580 - RNA, 19 nt, Homo sapiens
  misc_RNA (1)...(19): siRNA sense strand
gaauucaucagagccaagu

SEQ ID NO: 420581 - RNA, 19 nt, Homo sapiens
  misc_RNA (1)...(19): siRNA sense strand
agacacagauuuggaaacc

SEQ ID NO: 420582 - RNA, 19 nt, Homo sapiens
  misc_RNA (1)...(19): siRNA sense strand
auguggagcucauacugaa

SEQ ID NO: 420583 - RNA, 19 nt, Homo sapiens
  misc_RNA (1)...(19): siRNA sense strand
ucagggcagacagaaguua

SEQ ID NO: 420584 - RNA, 19 nt, Homo sapiens
  misc_RNA (1)...(19): siRNA sense strand
aaucagggcagacagaagu

SEQ ID NO: 420585 - RNA, 19 nt, Homo sapiens
  misc_RNA (1)...(19): siRNA sense strand
uauaauaacggugcuaacu

SEQ ID NO: 420586 - RNA, 19 nt, Homo sapiens
  misc_RNA (1)...(19): siRNA sense strand
ggcaaggagggcaccauga

SEQ ID NO: 420587 - RNA, 19 nt, Homo sapiens
  misc_RNA (1)...(19): siRNA sense strand
ggcaucagacgaagacaca

SEQ ID NO: 420588 - RNA, 19 nt, Homo sapiens
  misc_RNA (1)...(19): siRNA sense strand
aggaggagcuggagaauua

SEQ ID NO: 420589 - RNA, 19 nt, Homo sapiens
  misc_RNA (1)...(19): siRNA sense strand
ucauugagcuguccaccaa

SEQ ID NO: 420590 - RNA, 19 nt, Homo sapiens
  misc_RNA (1)...(19): siRNA sense strand
cgagauuucaguccaagua

SEQ ID NO: 420591 - RNA, 19 nt, Homo sapiens
  misc_RNA (1)...(19): siRNA sense strand
ggaggaagaagcagcugaa

SEQ ID NO: 420592 - RNA, 19 nt, Homo sapiens
  misc_RNA (1)...(19): siRNA sense strand
ucgaggagguggaggagaa

SEQ ID NO: 420593 - RNA, 19 nt, Homo sapiens
  misc_RNA (1)...(19): siRNA sense strand
uccaggaacugcgagauuu

SEQ ID NO: 420594 - RNA, 19 nt, Homo sapiens
  misc_RNA (1)...(19): siRNA sense strand
gggaggaggacgaggugua

SEQ ID NO: 420595 - RNA, 19 nt, Homo sapiens
  misc_RNA (1)...(19): siRNA sense strand
gacgaucgacagccucauu

SEQ ID NO: 420596 - RNA, 19 nt, Homo sapiens
  misc_RNA (1)...(19): siRNA sense strand
ggaggacgacgaggagaug

SEQ ID NO: 420597 - RNA, 19 nt, Homo sapiens
  misc_RNA (1)...(19): siRNA sense strand
gcaggacgagggagagcuu

SEQ ID NO: 420598 - RNA, 19 nt, Homo sapiens
  misc_RNA (1)...(19): siRNA sense strand
cggaccugcugcuccagua

SEQ ID NO: 420599 - RNA, 19 nt, Homo sapiens
  misc_RNA (1)...(19): siRNA sense strand
gaccugcugcuccaguauu

SEQ ID NO: 420600 - RNA, 19 nt, Homo sapiens
  misc_RNA (1)...(19): siRNA sense strand
gcccucagacuccggagaa

SEQ ID NO: 420601 - RNA, 19 nt, Homo sapiens
  misc_RNA (1)...(19): siRNA sense strand
ggacgacgaggagauggau

SEQ ID NO: 420602 - RNA, 19 nt, Homo sapiens
  misc_RNA (1)...(19): siRNA sense strand
gagauuucaguccaaguag

SEQ ID NO: 420603 - RNA, 19 nt, Homo sapiens
  misc_RNA (1)...(19): siRNA sense strand
ggaccugcugcuccaguau

SEQ ID NO: 420604 - RNA, 19 nt, Homo sapiens
  misc_RNA (1)...(19): siRNA sense strand
gaggagcgagagagugcaa

SEQ ID NO: 420605 - RNA, 19 nt, Homo sapiens
  misc_RNA (1)...(19): siRNA sense strand
gcaggaggagcuggagaau

SEQ ID NO: 420606 - RNA, 19 nt, Homo sapiens
  misc_RNA (1)...(19): siRNA sense strand
ucccgaaacccacaaguuc

SEQ ID NO: 420607 - RNA, 19 nt, Homo sapiens
  misc_RNA (1)...(19): siRNA sense strand
ggaggaggacgagguguac

SEQ ID NO: 420608 - RNA, 19 nt, Homo sapiens
  misc_RNA (1)...(19): siRNA sense strand
acaccuaggcgaggcauug

SEQ ID NO: 420609 - RNA, 19 nt, Homo sapiens
  misc_RNA (1)...(19): siRNA sense strand
gcucuuggcugguguugug

SEQ ID NO: 420610 - RNA, 19 nt, Homo sapiens
  misc_RNA (1)...(19): siRNA sense strand
ggucagaggucguggaaac

SEQ ID NO: 420611 - RNA, 19 nt, Homo sapiens
  misc_RNA (1)...(19): siRNA sense strand
gcaggucgauucgccgauu

SEQ ID NO: 420612 - RNA, 19 nt, Homo sapiens
  misc_RNA (1)...(19): siRNA sense strand
ugucagagcugguguacuc

SEQ ID NO: 420613 - RNA, 19 nt, Homo sapiens
  misc_RNA (1)...(19): siRNA sense strand
ggaccauccugcugcucua

SEQ ID NO: 420614 - RNA, 19 nt, Homo sapiens
  misc_RNA (1)...(19): siRNA sense strand
ccacagcccuggcaaccau

SEQ ID NO: 420615 - RNA, 19 nt, Homo sapiens
  misc_RNA (1)...(19): siRNA sense strand
ggagaccaucgcagaguuu

SEQ ID NO: 420616 - RNA, 19 nt, Homo sapiens
  misc_RNA (1)...(19): siRNA sense strand
gcguggagguguucaugga

SEQ ID NO: 420617 - RNA, 19 nt, Homo sapiens
  misc_RNA (1)...(19): siRNA sense strand
gccugagccuccugaguga

SEQ ID NO: 420618 - RNA, 19 nt, Homo sapiens
  misc_RNA (1)...(19): siRNA sense strand
gcaaccaugagcaguccua

SEQ ID NO: 420619 - RNA, 19 nt, Homo sapiens
  misc_RNA (1)...(19): siRNA sense strand
ccauccugcugcucuacua

SEQ ID NO: 420620 - RNA, 19 nt, Homo sapiens
  misc_RNA (1)...(19): siRNA sense strand
guggaaacccuggcucuug

SEQ ID NO: 420621 - RNA, 19 nt, Homo sapiens
  misc_RNA (1)...(19): siRNA sense strand
gugcgaacccuccagaaca

SEQ ID NO: 420622 - RNA, 19 nt, Homo sapiens
  misc_RNA (1)...(19): siRNA sense strand
gguguacucugccucuaac

SEQ ID NO: 420623 - RNA, 19 nt, Homo sapiens
  misc_RNA (1)...(19): siRNA sense strand
cugcugcgcucuccuuucu

SEQ ID NO: 420624 - RNA, 19 nt, Homo sapiens
  misc_RNA (1)...(19): siRNA sense strand
gcucaaugacgggauccua

SEQ ID NO: 420625 - RNA, 19 nt, Homo sapiens
  misc_RNA (1)...(19): siRNA sense strand
ugcuugugcugcucaauga

SEQ ID NO: 420626 - RNA, 19 nt, Homo sapiens
  misc_RNA (1)...(19): siRNA sense strand
gacggcagcagcagcauca

SEQ ID NO: 420627 - RNA, 19 nt, Homo sapiens
  misc_RNA (1)...(19): siRNA sense strand
aggagaccaucgcagaguu

SEQ ID NO: 420628 - RNA, 19 nt, Homo sapiens
  misc_RNA (1)...(19): siRNA sense strand
gcucuuggcugguguugug

SEQ ID NO: 420629 - RNA, 19 nt, Homo sapiens
  misc_RNA (1)...(19): siRNA sense strand
ggucagaggucguggaaac

SEQ ID NO: 420630 - RNA, 19 nt, Homo sapiens
  misc_RNA (1)...(19): siRNA sense strand
gcaggucgauucgccgauu

SEQ ID NO: 420631 - RNA, 19 nt, Homo sapiens
  misc_RNA (1)...(19): siRNA sense strand
ugucagagcugguguacuc

SEQ ID NO: 420632 - RNA, 19 nt, Homo sapiens
  misc_RNA (1)...(19): siRNA sense strand
ggaccauccugcugcucua

SEQ ID NO: 420633 - RNA, 19 nt, Homo sapiens
  misc_RNA (1)...(19): siRNA sense strand
ccacagcccuggcaaccau

SEQ ID NO: 420634 - RNA, 19 nt, Homo sapiens
  misc_RNA (1)...(19): siRNA sense strand
ggagaccaucgcagaguuu

SEQ ID NO: 420635 - RNA, 19 nt, Homo sapiens
  misc_RNA (1)...(19): siRNA sense strand
gcguggagguguucaugga

SEQ ID NO: 420636 - RNA, 19 nt, Homo sapiens
  misc_RNA (1)...(19): siRNA sense strand
gccugagccuccugaguga

SEQ ID NO: 420637 - RNA, 19 nt, Homo sapiens
  misc_RNA (1)...(19): siRNA sense strand
gcaaccaugagcaguccua

SEQ ID NO: 420638 - RNA, 19 nt, Homo sapiens
  misc_RNA (1)...(19): siRNA sense strand
ccauccugcugcucuacua

SEQ ID NO: 420639 - RNA, 19 nt, Homo sapiens
  misc_RNA (1)...(19): siRNA sense strand
guggaaacccuggcucuug

SEQ ID NO: 420640 - RNA, 19 nt, Homo sapiens
  misc_RNA (1)...(19): siRNA sense strand
gugcgaacccuccagaaca

SEQ ID NO: 420641 - RNA, 19 nt, Homo sapiens
  misc_RNA (1)...(19): siRNA sense strand
gguguacucugccucuaac

SEQ ID NO: 420642 - RNA, 19 nt, Homo sapiens
  misc_RNA (1)...(19): siRNA sense strand
cugcugcgcucuccuuucu

SEQ ID NO: 420643 - RNA, 19 nt, Homo sapiens
  misc_RNA (1)...(19): siRNA sense strand
gcucaaugacgggauccua

SEQ ID NO: 420644 - RNA, 19 nt, Homo sapiens
  misc_RNA (1)...(19): siRNA sense strand
ugcuugugcugcucaauga

SEQ ID NO: 420645 - RNA, 19 nt, Homo sapiens
  misc_RNA (1)...(19): siRNA sense strand
gacggcagcagcagcauca

SEQ ID NO: 420646 - RNA, 19 nt, Homo sapiens
  misc_RNA (1)...(19): siRNA sense strand
aggagaccaucgcagaguu

SEQ ID NO: 420647 - RNA, 19 nt, Homo sapiens
  misc_RNA (1)...(19): siRNA sense strand
gcgacgagauggacaauaa

SEQ ID NO: 420648 - RNA, 19 nt, Homo sapiens
  misc_RNA (1)...(19): siRNA sense strand
gagauggacaauaagauga

SEQ ID NO: 420649 - RNA, 19 nt, Homo sapiens
  misc_RNA (1)...(19): siRNA sense strand
gcaagaagucgagcgaaga

SEQ ID NO: 420650 - RNA, 19 nt, Homo sapiens
  misc_RNA (1)...(19): siRNA sense strand
cgagauggacaauaagaug

SEQ ID NO: 420651 - RNA, 19 nt, Homo sapiens
  misc_RNA (1)...(19): siRNA sense strand
gacgagauggacaauaaga

SEQ ID NO: 420652 - RNA, 19 nt, Homo sapiens
  misc_RNA (1)...(19): siRNA sense strand
caagaagucgagcgaagau

SEQ ID NO: 420653 - RNA, 19 nt, Homo sapiens
  misc_RNA (1)...(19): siRNA sense strand
cugacaagcugagcaagau

SEQ ID NO: 420654 - RNA, 19 nt, Homo sapiens
  misc_RNA (1)...(19): siRNA sense strand
gcacccagucgcucaacga

SEQ ID NO: 420655 - RNA, 19 nt, Homo sapiens
  misc_RNA (1)...(19): siRNA sense strand
gcaagauccagacgcucaa

SEQ ID NO: 420656 - RNA, 19 nt, Homo sapiens
  misc_RNA (1)...(19): siRNA sense strand
ccacgcugcccucugacaa

SEQ ID NO: 420657 - RNA, 19 nt, Homo sapiens
  misc_RNA (1)...(19): siRNA sense strand
gaaacaagcuugaccacua

SEQ ID NO: 420658 - RNA, 19 nt, Homo sapiens
  misc_RNA (1)...(19): siRNA sense strand
ugaagaagcuguaugacau

SEQ ID NO: 420659 - RNA, 19 nt, Homo sapiens
  misc_RNA (1)...(19): siRNA sense strand
ccaacaagcaccagauuaa

SEQ ID NO: 420660 - RNA, 19 nt, Homo sapiens
  misc_RNA (1)...(19): siRNA sense strand
ugaagaagauagaagacaa

SEQ ID NO: 420661 - RNA, 19 nt, Homo sapiens
  misc_RNA (1)...(19): siRNA sense strand
gaagaaggcauauguucga

SEQ ID NO: 420662 - RNA, 19 nt, Homo sapiens
  misc_RNA (1)...(19): siRNA sense strand
aaacaagcuugaccacuau

SEQ ID NO: 420663 - RNA, 19 nt, Homo sapiens
  misc_RNA (1)...(19): siRNA sense strand
gaagauagaagacaacaac

SEQ ID NO: 420664 - RNA, 19 nt, Homo sapiens
  misc_RNA (1)...(19): siRNA sense strand
gagagaagaaggcauaugu

SEQ ID NO: 420665 - RNA, 19 nt, Homo sapiens
  misc_RNA (1)...(19): siRNA sense strand
gaagcuguaugacauugau

SEQ ID NO: 420666 - RNA, 19 nt, Homo sapiens
  misc_RNA (1)...(19): siRNA sense strand
gaagaagcuguaugacauu

SEQ ID NO: 420667 - RNA, 19 nt, Homo sapiens
  misc_RNA (1)...(19): siRNA sense strand
gagaagaaggcauauguuc

SEQ ID NO: 420668 - RNA, 19 nt, Homo sapiens
  misc_RNA (1)...(19): siRNA sense strand
caagaaggcaguguugaaa

SEQ ID NO: 420669 - RNA, 19 nt, Homo sapiens
  misc_RNA (1)...(19): siRNA sense strand
caacaagcaccagauuaaa

SEQ ID NO: 420670 - RNA, 19 nt, Homo sapiens
  misc_RNA (1)...(19): siRNA sense strand
ggagacagcccaaauaucc

SEQ ID NO: 420671 - RNA, 19 nt, Homo sapiens
  misc_RNA (1)...(19): siRNA sense strand
gauagaagacaacaacaca

SEQ ID NO: 420672 - RNA, 19 nt, Homo sapiens
  misc_RNA (1)...(19): siRNA sense strand
ccaagaaggcaguguugaa

SEQ ID NO: 420673 - RNA, 19 nt, Homo sapiens
  misc_RNA (1)...(19): siRNA sense strand
gccaacaagcaccagauua

SEQ ID NO: 420674 - RNA, 19 nt, Homo sapiens
  misc_RNA (1)...(19): siRNA sense strand
uccuaaagcugaagccaaa

SEQ ID NO: 420675 - RNA, 19 nt, Homo sapiens
  misc_RNA (1)...(19): siRNA sense strand
ccacugagucugccaugaa

SEQ ID NO: 420676 - RNA, 19 nt, Homo sapiens
  misc_RNA (1)...(19): siRNA sense strand
ccaaauauccucggaagag

SEQ ID NO: 420677 - RNA, 19 nt, Homo sapiens
  misc_RNA (1)...(19): siRNA sense strand
uuacgaugcuuuggauguu

SEQ ID NO: 420678 - RNA, 19 nt, Homo sapiens
  misc_RNA (1)...(19): siRNA sense strand
ccaugaagaagauagaaga

SEQ ID NO: 420679 - RNA, 19 nt, Homo sapiens
  misc_RNA (1)...(19): siRNA sense strand
ugauuacgaugcuuuggau

SEQ ID NO: 420680 - RNA, 19 nt, Homo sapiens
  misc_RNA (1)...(19): siRNA sense strand
gugaagaagcuguaugaca

SEQ ID NO: 420681 - RNA, 19 nt, Homo sapiens
  misc_RNA (1)...(19): siRNA sense strand
ugaccacuaugcuaucauc

SEQ ID NO: 420682 - RNA, 19 nt, Homo sapiens
  misc_RNA (1)...(19): siRNA sense strand
caaggucaacacccugauu

SEQ ID NO: 420683 - RNA, 19 nt, Homo sapiens
  misc_RNA (1)...(19): siRNA sense strand
agaaggcaguguugaaagg

SEQ ID NO: 420684 - RNA, 19 nt, Homo sapiens
  misc_RNA (1)...(19): siRNA sense strand
gaagaagauagaagacaac

SEQ ID NO: 420685 - RNA, 19 nt, Homo sapiens
  misc_RNA (1)...(19): siRNA sense strand
acaagcaccagauuaaaca

SEQ ID NO: 420686 - RNA, 19 nt, Homo sapiens
  misc_RNA (1)...(19): siRNA sense strand
aagaagcuguaugacauug

SEQ ID NO: 420687 - RNA, 19 nt, Homo sapiens
  misc_RNA (1)...(19): siRNA sense strand
ggagagaagaaggcauaug

SEQ ID NO: 420688 - RNA, 19 nt, Homo sapiens
  misc_RNA (1)...(19): siRNA sense strand
caacaaaauugggaucauc

SEQ ID NO: 420689 - RNA, 19 nt, Homo sapiens
  misc_RNA (1)...(19): siRNA sense strand
ucgacuggcuccugauuac

SEQ ID NO: 420690 - RNA, 19 nt, Homo sapiens
  misc_RNA (1)...(19): siRNA sense strand
ccggagacagcccaaauau

SEQ ID NO: 420691 - RNA, 19 nt, Homo sapiens
  misc_RNA (1)...(19): siRNA sense strand
guucauuguggauguuaaa

SEQ ID NO: 420692 - RNA, 19 nt, Homo sapiens
  misc_RNA (1)...(19): siRNA sense strand
ggccaagaaggcaguguug

SEQ ID NO: 420693 - RNA, 19 nt, Homo sapiens
  misc_RNA (1)...(19): siRNA sense strand
caaaauugggaucaucuaa

SEQ ID NO: 420694 - RNA, 19 nt, Homo sapiens
  misc_RNA (1)...(19): siRNA sense strand
agucugccaugaagaagau

SEQ ID NO: 420695 - RNA, 19 nt, Homo sapiens
  misc_RNA (1)...(19): siRNA sense strand
aagcuugaccacuaugcua

SEQ ID NO: 420696 - RNA, 19 nt, Homo sapiens
  misc_RNA (1)...(19): siRNA sense strand
ccaggagaaacaagcuuga

SEQ ID NO: 420697 - RNA, 19 nt, Homo sapiens
  misc_RNA (1)...(19): siRNA sense strand
agagaagaaggcauauguu

SEQ ID NO: 420698 - RNA, 19 nt, Homo sapiens
  misc_RNA (1)...(19): siRNA sense strand
gaaggcaguguugaaaggu

SEQ ID NO: 420699 - RNA, 19 nt, Homo sapiens
  misc_RNA (1)...(19): siRNA sense strand
ggccugauggagagaagaa

SEQ ID NO: 420700 - RNA, 19 nt, Homo sapiens
  misc_RNA (1)...(19): siRNA sense strand
gccgaaagcgaagaaggaa

SEQ ID NO: 420701 - RNA, 19 nt, Homo sapiens
  misc_RNA (1)...(19): siRNA sense strand
ggaauuaugucauccagaa

SEQ ID NO: 420702 - RNA, 19 nt, Homo sapiens
  misc_RNA (1)...(19): siRNA sense strand
gcacagagccuccuagaga

SEQ ID NO: 420703 - RNA, 19 nt, Homo sapiens
  misc_RNA (1)...(19): siRNA sense strand
ggagugagauugagucaga

SEQ ID NO: 420704 - RNA, 19 nt, Homo sapiens
  misc_RNA (1)...(19): siRNA sense strand
ucagggcgcuugaaagaua

SEQ ID NO: 420705 - RNA, 19 nt, Homo sapiens
  misc_RNA (1)...(19): siRNA sense strand
caagagcgguugagcauga

SEQ ID NO: 420706 - RNA, 19 nt, Homo sapiens
  misc_RNA (1)...(19): siRNA sense strand
gcagacagcugaugacucu

SEQ ID NO: 420707 - RNA, 19 nt, Homo sapiens
  misc_RNA (1)...(19): siRNA sense strand
ugaaagauauccuggcuau

SEQ ID NO: 420708 - RNA, 19 nt, Homo sapiens
  misc_RNA (1)...(19): siRNA sense strand
gcacugaggacuaugaaga

SEQ ID NO: 420709 - RNA, 19 nt, Homo sapiens
  misc_RNA (1)...(19): siRNA sense strand
gaucagaaauacgucuuug

SEQ ID NO: 420710 - RNA, 19 nt, Homo sapiens
  misc_RNA (1)...(19): siRNA sense strand
gcagugaccggaauuaugu

SEQ ID NO: 420711 - RNA, 19 nt, Homo sapiens
  misc_RNA (1)...(19): siRNA sense strand
gaucagcgccuccuugcaa

SEQ ID NO: 420712 - RNA, 19 nt, Homo sapiens
  misc_RNA (1)...(19): siRNA sense strand
ggccggagauguaugaaau

SEQ ID NO: 420713 - RNA, 19 nt, Homo sapiens
  misc_RNA (1)...(19): siRNA sense strand
ugaagccgauucugcguuu

SEQ ID NO: 420714 - RNA, 19 nt, Homo sapiens
  misc_RNA (1)...(19): siRNA sense strand
ggaggacgccagcaaagaa

SEQ ID NO: 420715 - RNA, 19 nt, Homo sapiens
  misc_RNA (1)...(19): siRNA sense strand
gaauggcaguuucaagaag

SEQ ID NO: 420716 - RNA, 19 nt, Homo sapiens
  misc_RNA (1)...(19): siRNA sense strand
cacaacgcauaaccaaaua

SEQ ID NO: 420717 - RNA, 19 nt, Homo sapiens
  misc_RNA (1)...(19): siRNA sense strand
ggacgcaacucggaccaau

SEQ ID NO: 420718 - RNA, 19 nt, Homo sapiens
  misc_RNA (1)...(19): siRNA sense strand
ccaaacaccgaguccauuu

SEQ ID NO: 420719 - RNA, 19 nt, Homo sapiens
  misc_RNA (1)...(19): siRNA sense strand
caucagggcgcuugaaaga

SEQ ID NO: 420720 - RNA, 19 nt, Homo sapiens
  misc_RNA (1)...(19): siRNA sense strand
aaagcgauguuucugauca

SEQ ID NO: 420721 - RNA, 19 nt, Homo sapiens
  misc_RNA (1)...(19): siRNA sense strand
gaaauacgucuuugcuucu

SEQ ID NO: 420722 - RNA, 19 nt, Homo sapiens
  misc_RNA (1)...(19): siRNA sense strand
gaaaauggggagagaauga

SEQ ID NO: 420723 - RNA, 19 nt, Homo sapiens
  misc_RNA (1)...(19): siRNA sense strand
ccaaacagcccggacuuga

SEQ ID NO: 420724 - RNA, 19 nt, Homo sapiens
  misc_RNA (1)...(19): siRNA sense strand
acacaacgcauaaccaaau

SEQ ID NO: 420725 - RNA, 19 nt, Homo sapiens
  misc_RNA (1)...(19): siRNA sense strand
cacagagccuccuagagaa

SEQ ID NO: 420726 - RNA, 19 nt, Homo sapiens
  misc_RNA (1)...(19): siRNA sense strand
ggagggcagugaccggaau

SEQ ID NO: 420727 - RNA, 19 nt, Homo sapiens
  misc_RNA (1)...(19): siRNA sense strand
ggagaucgcagggaagaug

SEQ ID NO: 420728 - RNA, 19 nt, Homo sapiens
  misc_RNA (1)...(19): siRNA sense strand
caaacagcccggacuugaa

SEQ ID NO: 420729 - RNA, 19 nt, Homo sapiens
  misc_RNA (1)...(19): siRNA sense strand
gaagauggaccugaagucu

SEQ ID NO: 420730 - RNA, 19 nt, Homo sapiens
  misc_RNA (1)...(19): siRNA sense strand
caagaaaauuggcaacuuc

SEQ ID NO: 420731 - RNA, 19 nt, Homo sapiens
  misc_RNA (1)...(19): siRNA sense strand
caaggaggacgccagcaaa

SEQ ID NO: 420732 - RNA, 19 nt, Homo sapiens
  misc_RNA (1)...(19): siRNA sense strand
aagaauggcaguuucaaga

SEQ ID NO: 420733 - RNA, 19 nt, Homo sapiens
  misc_RNA (1)...(19): siRNA sense strand
acaaugaagcuguuaguca

SEQ ID NO: 420734 - RNA, 19 nt, Homo sapiens
  misc_RNA (1)...(19): siRNA sense strand
ugagggaaguggccaacga

SEQ ID NO: 420735 - RNA, 19 nt, Homo sapiens
  misc_RNA (1)...(19): siRNA sense strand
ggaccaaucacaggagaga

SEQ ID NO: 420736 - RNA, 19 nt, Homo sapiens
  misc_RNA (1)...(19): siRNA sense strand
cagcaaagaagacgucauc

SEQ ID NO: 420737 - RNA, 19 nt, Homo sapiens
  misc_RNA (1)...(19): siRNA sense strand
cccgucaucucguuacaaa

SEQ ID NO: 420738 - RNA, 19 nt, Homo sapiens
  misc_RNA (1)...(19): siRNA sense strand
ucacaggagagauggauga

SEQ ID NO: 420739 - RNA, 19 nt, Homo sapiens
  misc_RNA (1)...(19): siRNA sense strand
caccaagaauggcaguuuc

SEQ ID NO: 420740 - RNA, 19 nt, Homo sapiens
  misc_RNA (1)...(19): siRNA sense strand
ccacgagacuccgggacuu

SEQ ID NO: 420741 - RNA, 19 nt, Homo sapiens
  misc_RNA (1)...(19): siRNA sense strand
gaauuaugucauccagaaa

SEQ ID NO: 420742 - RNA, 19 nt, Homo sapiens
  misc_RNA (1)...(19): siRNA sense strand
ccaccaagaauggcaguuu

SEQ ID NO: 420743 - RNA, 19 nt, Homo sapiens
  misc_RNA (1)...(19): siRNA sense strand
gggagagaaugaaagaaaa

SEQ ID NO: 420744 - RNA, 19 nt, Homo sapiens
  misc_RNA (1)...(19): siRNA sense strand
gcucagugacagugacauu

SEQ ID NO: 420745 - RNA, 19 nt, Homo sapiens
  misc_RNA (1)...(19): siRNA sense strand
agacgucaucuucuucuaa

SEQ ID NO: 420746 - RNA, 19 nt, Homo sapiens
  misc_RNA (1)...(19): siRNA sense strand
gcauucuccugguuacaca

SEQ ID NO: 420747 - RNA, 19 nt, Homo sapiens
  misc_RNA (1)...(19): siRNA sense strand
uccgagggcuucucucuca

SEQ ID NO: 420748 - RNA, 19 nt, Homo sapiens
  misc_RNA (1)...(19): siRNA sense strand
gagugcauucuccugguua

SEQ ID NO: 420749 - RNA, 19 nt, Homo sapiens
  misc_RNA (1)...(19): siRNA sense strand
gagcgcaucauccagaaca

SEQ ID NO: 420750 - RNA, 19 nt, Homo sapiens
  misc_RNA (1)...(19): siRNA sense strand
ucccuuacaucuccaaaca

SEQ ID NO: 420751 - RNA, 19 nt, Homo sapiens
  misc_RNA (1)...(19): siRNA sense strand
ccaaggaggacgccagcaa

SEQ ID NO: 420752 - RNA, 19 nt, Homo sapiens
  misc_RNA (1)...(19): siRNA sense strand
aauggcaguuucaagaaga

SEQ ID NO: 420753 - RNA, 19 nt, Homo sapiens
  misc_RNA (1)...(19): siRNA sense strand
gcaacucggaccaaucaca

SEQ ID NO: 420754 - RNA, 19 nt, Homo sapiens
  misc_RNA (1)...(19): siRNA sense strand
ggcagugaccggaauuaug

SEQ ID NO: 420755 - RNA, 19 nt, Homo sapiens
  misc_RNA (1)...(19): siRNA sense strand
ucaagaucaugcugaaggu

SEQ ID NO: 420756 - RNA, 19 nt, Homo sapiens
  misc_RNA (1)...(19): siRNA sense strand
ccugggagcucugaggaau

SEQ ID NO: 420757 - RNA, 19 nt, Homo sapiens
  misc_RNA (1)...(19): siRNA sense strand
aaacagcccggacuugaag

SEQ ID NO: 420758 - RNA, 19 nt, Homo sapiens
  misc_RNA (1)...(19): siRNA sense strand
uugcuucuguggacucaaa

SEQ ID NO: 420759 - RNA, 19 nt, Homo sapiens
  misc_RNA (1)...(19): siRNA sense strand
ggaagauggaccugaaguc

SEQ ID NO: 420760 - RNA, 19 nt, Homo sapiens
  misc_RNA (1)...(19): siRNA sense strand
uuacacaacgcauaaccaa

SEQ ID NO: 420761 - RNA, 19 nt, Homo sapiens
  misc_RNA (1)...(19): siRNA sense strand
agaucaugcugaaggugua

SEQ ID NO: 420762 - RNA, 19 nt, Homo sapiens
  misc_RNA (1)...(19): siRNA sense strand
uuaagcagacagcugauga

SEQ ID NO: 420763 - RNA, 19 nt, Homo sapiens
  misc_RNA (1)...(19): siRNA sense strand
ugucccagcugcuccugaa

SEQ ID NO: 420764 - RNA, 19 nt, Homo sapiens
  misc_RNA (1)...(19): siRNA sense strand
cagcggauccagacacugu

SEQ ID NO: 420765 - RNA, 19 nt, Homo sapiens
  misc_RNA (1)...(19): siRNA sense strand
agaauggcaguuucaagaa

SEQ ID NO: 420766 - RNA, 19 nt, Homo sapiens
  misc_RNA (1)...(19): siRNA sense strand
gucagacggccacgaguuu

SEQ ID NO: 420767 - RNA, 19 nt, Homo sapiens
  misc_RNA (1)...(19): siRNA sense strand
ggcuacgacugcacaaaca

SEQ ID NO: 420768 - RNA, 19 nt, Homo sapiens
  misc_RNA (1)...(19): siRNA sense strand
gaugacucucugucccuua

SEQ ID NO: 420769 - RNA, 19 nt, Homo sapiens
  misc_RNA (1)...(19): siRNA sense strand
gaaccucaucaaagauauc

SEQ ID NO: 420770 - RNA, 19 nt, Homo sapiens
  misc_RNA (1)...(19): siRNA sense strand
ugaaccucaucaaagauau

SEQ ID NO: 420771 - RNA, 19 nt, Homo sapiens
  misc_RNA (1)...(19): siRNA sense strand
gugcggacgcucaagauca

SEQ ID NO: 420772 - RNA, 19 nt, Homo sapiens
  misc_RNA (1)...(19): siRNA sense strand
aaagagggagguggugaaa

SEQ ID NO: 420773 - RNA, 19 nt, Homo sapiens
  misc_RNA (1)...(19): siRNA sense strand
aggaggagcugcaguucag

SEQ ID NO: 420774 - RNA, 19 nt, Homo sapiens
  misc_RNA (1)...(19): siRNA sense strand
cagcguccuucgaccugaa

SEQ ID NO: 420775 - RNA, 19 nt, Homo sapiens
  misc_RNA (1)...(19): siRNA sense strand
caagaauggcaguuucaag

SEQ ID NO: 420776 - RNA, 19 nt, Homo sapiens
  misc_RNA (1)...(19): siRNA sense strand
caugaaagaccagcugauc

SEQ ID NO: 420777 - RNA, 19 nt, Homo sapiens
  misc_RNA (1)...(19): siRNA sense strand
cagaaauacgucuuugcuu

SEQ ID NO: 420778 - RNA, 19 nt, Homo sapiens
  misc_RNA (1)...(19): siRNA sense strand
gaugcagccuacgccaaga

SEQ ID NO: 420779 - RNA, 19 nt, Homo sapiens
  misc_RNA (1)...(19): siRNA sense strand
uguuagucauuacaaguug

SEQ ID NO: 420780 - RNA, 19 nt, Homo sapiens
  misc_RNA (1)...(19): siRNA sense strand
ccacaaugaagcuguuagu

SEQ ID NO: 420781 - RNA, 19 nt, Homo sapiens
  misc_RNA (1)...(19): siRNA sense strand
gggcagugaccggaauuau

SEQ ID NO: 420782 - RNA, 19 nt, Homo sapiens
  misc_RNA (1)...(19): siRNA sense strand
gggagcuaauucucaaguc

SEQ ID NO: 420783 - RNA, 19 nt, Homo sapiens
  misc_RNA (1)...(19): siRNA sense strand
ggggagagaaugaaagaaa

SEQ ID NO: 420784 - RNA, 19 nt, Homo sapiens
  misc_RNA (1)...(19): siRNA sense strand
ccuccugguucagcaguuu

SEQ ID NO: 420785 - RNA, 19 nt, Homo sapiens
  misc_RNA (1)...(19): siRNA sense strand
ggagacgcacagccacuuc

SEQ ID NO: 420786 - RNA, 19 nt, Homo sapiens
  misc_RNA (1)...(19): siRNA sense strand
gcuccaaagaggacaggaa

SEQ ID NO: 420787 - RNA, 19 nt, Homo sapiens
  misc_RNA (1)...(19): siRNA sense strand
ccaccuggagggcaugcua

SEQ ID NO: 420788 - RNA, 19 nt, Homo sapiens
  misc_RNA (1)...(19): siRNA sense strand
ucaagaaaauuggcaacuu

SEQ ID NO: 420789 - RNA, 19 nt, Homo sapiens
  misc_RNA (1)...(19): siRNA sense strand
gcuguuagucauuacaagu

SEQ ID NO: 420790 - RNA, 19 nt, Homo sapiens
  misc_RNA (1)...(19): siRNA sense strand
ccaggagggcugagaccuu

SEQ ID NO: 420791 - RNA, 19 nt, Homo sapiens
  misc_RNA (1)...(19): siRNA sense strand
acagagccuccuagagaaa

SEQ ID NO: 420792 - RNA, 19 nt, Homo sapiens
  misc_RNA (1)...(19): siRNA sense strand
gaucgcacagagccuccua

SEQ ID NO: 420793 - RNA, 19 nt, Homo sapiens
  misc_RNA (1)...(19): siRNA sense strand
cagggcgcuugaaagauau

SEQ ID NO: 420794 - RNA, 19 nt, Homo sapiens
  misc_RNA (1)...(19): siRNA sense strand
cacaucagggcgcuugaaa

SEQ ID NO: 420795 - RNA, 19 nt, Homo sapiens
  misc_RNA (1)...(19): siRNA sense strand
ucaagaacgggcucaccuu

SEQ ID NO: 420796 - RNA, 19 nt, Homo sapiens
  misc_RNA (1)...(19): siRNA sense strand
ccaaggucagugaguguga

SEQ ID NO: 420797 - RNA, 19 nt, Homo sapiens
  misc_RNA (1)...(19): siRNA sense strand
acacggaagcuggcacuga

SEQ ID NO: 420798 - RNA, 19 nt, Homo sapiens
  misc_RNA (1)...(19): siRNA sense strand
gaagcuguuagucauuaca

SEQ ID NO: 420799 - RNA, 19 nt, Homo sapiens
  misc_RNA (1)...(19): siRNA sense strand
ccaagaauggcaguuucaa

SEQ ID NO: 420800 - RNA, 19 nt, Homo sapiens
  misc_RNA (1)...(19): siRNA sense strand
gggaagauggaccugaagu

SEQ ID NO: 420801 - RNA, 19 nt, Homo sapiens
  misc_RNA (1)...(19): siRNA sense strand
gcacaaagauggagucaag

SEQ ID NO: 420802 - RNA, 19 nt, Homo sapiens
  misc_RNA (1)...(19): siRNA sense strand
gaaagaaguugcagaagca

SEQ ID NO: 420803 - RNA, 19 nt, Homo sapiens
  misc_RNA (1)...(19): siRNA sense strand
gaaaggaggcugcacauag

SEQ ID NO: 420804 - RNA, 19 nt, Homo sapiens
  misc_RNA (1)...(19): siRNA sense strand
ucaccaagcucagcaagua

SEQ ID NO: 420805 - RNA, 19 nt, Homo sapiens
  misc_RNA (1)...(19): siRNA sense strand
ucacugaacugcagaggaa

SEQ ID NO: 420806 - RNA, 19 nt, Homo sapiens
  misc_RNA (1)...(19): siRNA sense strand
gcucagaacucaucuacuc

SEQ ID NO: 420807 - RNA, 19 nt, Homo sapiens
  misc_RNA (1)...(19): siRNA sense strand
ggacagagaccuccaugug

SEQ ID NO: 420808 - RNA, 19 nt, Homo sapiens
  misc_RNA (1)...(19): siRNA sense strand
ggagaaagacgaucauuac

SEQ ID NO: 420809 - RNA, 19 nt, Homo sapiens
  misc_RNA (1)...(19): siRNA sense strand
ggaccaacgucaucaacga

SEQ ID NO: 420810 - RNA, 19 nt, Homo sapiens
  misc_RNA (1)...(19): siRNA sense strand
ggagucaagugcuggagaa

SEQ ID NO: 420811 - RNA, 19 nt, Homo sapiens
  misc_RNA (1)...(19): siRNA sense strand
cgaauguucuuucucuuug

SEQ ID NO: 420812 - RNA, 19 nt, Homo sapiens
  misc_RNA (1)...(19): siRNA sense strand
gagaagacacagagaaaga

SEQ ID NO: 420813 - RNA, 19 nt, Homo sapiens
  misc_RNA (1)...(19): siRNA sense strand
gggagcagcuggcuaucaa

SEQ ID NO: 420814 - RNA, 19 nt, Homo sapiens
  misc_RNA (1)...(19): siRNA sense strand
gaacaucgaggacaucuac

SEQ ID NO: 420815 - RNA, 19 nt, Homo sapiens
  misc_RNA (1)...(19): siRNA sense strand
gcacugagcgggacuacau

SEQ ID NO: 420816 - RNA, 19 nt, Homo sapiens
  misc_RNA (1)...(19): siRNA sense strand
cagcucaucuacuguaaga

SEQ ID NO: 420817 - RNA, 19 nt, Homo sapiens
  misc_RNA (1)...(19): siRNA sense strand
gcacagggacuucaaggau

SEQ ID NO: 420818 - RNA, 19 nt, Homo sapiens
  misc_RNA (1)...(19): siRNA sense strand
gaauguucuuucucuuuga

SEQ ID NO: 420819 - RNA, 19 nt, Homo sapiens
  misc_RNA (1)...(19): siRNA sense strand
gucaagugcuggagaaaga

SEQ ID NO: 420820 - RNA, 19 nt, Homo sapiens
  misc_RNA (1)...(19): siRNA sense strand
caacgggacugaaccacau

SEQ ID NO: 420821 - RNA, 19 nt, Homo sapiens
  misc_RNA (1)...(19): siRNA sense strand
gaagcaggcccacgucgaa

SEQ ID NO: 420822 - RNA, 19 nt, Homo sapiens
  misc_RNA (1)...(19): siRNA sense strand
aggaggaccuguaugauga

SEQ ID NO: 420823 - RNA, 19 nt, Homo sapiens
  misc_RNA (1)...(19): siRNA sense strand
gagaacaucgacaagauug

SEQ ID NO: 420824 - RNA, 19 nt, Homo sapiens
  misc_RNA (1)...(19): siRNA sense strand
gcgaggaggaccuguauga

SEQ ID NO: 420825 - RNA, 19 nt, Homo sapiens
  misc_RNA (1)...(19): siRNA sense strand
gcgaauguucuuucucuuu

SEQ ID NO: 420826 - RNA, 19 nt, Homo sapiens
  misc_RNA (1)...(19): siRNA sense strand
ggagcugacucgaguuaca

SEQ ID NO: 420827 - RNA, 19 nt, Homo sapiens
  misc_RNA (1)...(19): siRNA sense strand
ccaggaagcccgagcagaa

SEQ ID NO: 420828 - RNA, 19 nt, Homo sapiens
  misc_RNA (1)...(19): siRNA sense strand
gaggaggaccuguaugaug

SEQ ID NO: 420829 - RNA, 19 nt, Homo sapiens
  misc_RNA (1)...(19): siRNA sense strand
gagcggaagcggagacuug

SEQ ID NO: 420830 - RNA, 19 nt, Homo sapiens
  misc_RNA (1)...(19): siRNA sense strand
gaacguggcccagcucauc

SEQ ID NO: 420831 - RNA, 19 nt, Homo sapiens
  misc_RNA (1)...(19): siRNA sense strand
gacagagaccuccauguga

SEQ ID NO: 420832 - RNA, 19 nt, Homo sapiens
  misc_RNA (1)...(19): siRNA sense strand
cagcgaauguucuuucucu

SEQ ID NO: 420833 - RNA, 19 nt, Homo sapiens
  misc_RNA (1)...(19): siRNA sense strand
ugucugcgcugacgaagug

SEQ ID NO: 420834 - RNA, 19 nt, Homo sapiens
  misc_RNA (1)...(19): siRNA sense strand
gucaggagcucagaacuca

SEQ ID NO: 420835 - RNA, 19 nt, Homo sapiens
  misc_RNA (1)...(19): siRNA sense strand
aaaggaggcugcacauagg

SEQ ID NO: 420836 - RNA, 19 nt, Homo sapiens
  misc_RNA (1)...(19): siRNA sense strand
ggacugggagggagaagau

SEQ ID NO: 420837 - RNA, 19 nt, Homo sapiens
  misc_RNA (1)...(19): siRNA sense strand
gcagcuggcuaucaaugag

SEQ ID NO: 420838 - RNA, 19 nt, Homo sapiens
  misc_RNA (1)...(19): siRNA sense strand
uggagaaagacgaucauua

SEQ ID NO: 420839 - RNA, 19 nt, Homo sapiens
  misc_RNA (1)...(19): siRNA sense strand
agagaaagaaguugcagaa

SEQ ID NO: 420840 - RNA, 19 nt, Homo sapiens
  misc_RNA (1)...(19): siRNA sense strand
ugacuccggugcagaagau

SEQ ID NO: 420841 - RNA, 19 nt, Homo sapiens
  misc_RNA (1)...(19): siRNA sense strand
gagcgaggaggaccuguau

SEQ ID NO: 420842 - RNA, 19 nt, Homo sapiens
  misc_RNA (1)...(19): siRNA sense strand
ggagcgaggaggaccugua

SEQ ID NO: 420843 - RNA, 19 nt, Homo sapiens
  misc_RNA (1)...(19): siRNA sense strand
gccgcgacguguuguacua

SEQ ID NO: 420844 - RNA, 19 nt, Homo sapiens
  misc_RNA (1)...(19): siRNA sense strand
ucagaaggcguuccacaug

SEQ ID NO: 420845 - RNA, 19 nt, Homo sapiens
  misc_RNA (1)...(19): siRNA sense strand
gagcagcuggcuaucaaug

SEQ ID NO: 420846 - RNA, 19 nt, Homo sapiens
  misc_RNA (1)...(19): siRNA sense strand
cgaaaggaggcugcacaua

SEQ ID NO: 420847 - RNA, 19 nt, Homo sapiens
  misc_RNA (1)...(19): siRNA sense strand
gcagcugcguaccaucuuc

SEQ ID NO: 420848 - RNA, 19 nt, Homo sapiens
  misc_RNA (1)...(19): siRNA sense strand
gaagaaccagcaggugaga

SEQ ID NO: 420849 - RNA, 19 nt, Homo sapiens
  misc_RNA (1)...(19): siRNA sense strand
gagcagcaaggaccagaug

SEQ ID NO: 420850 - RNA, 19 nt, Homo sapiens
  misc_RNA (1)...(19): siRNA sense strand
ugauggagcucuggacaca

SEQ ID NO: 420851 - RNA, 19 nt, Homo sapiens
  misc_RNA (1)...(19): siRNA sense strand
gaagacacagagaaagaag

SEQ ID NO: 420852 - RNA, 19 nt, Homo sapiens
  misc_RNA (1)...(19): siRNA sense strand
agacacagagaaagaaguu

SEQ ID NO: 420853 - RNA, 19 nt, Homo sapiens
  misc_RNA (1)...(19): siRNA sense strand
gcucaucuacuguaagaag

SEQ ID NO: 420854 - RNA, 19 nt, Homo sapiens
  misc_RNA (1)...(19): siRNA sense strand
uugaaucucccuagaagaa

SEQ ID NO: 420855 - RNA, 19 nt, Homo sapiens
  misc_RNA (1)...(19): siRNA sense strand
ugagaacaucgacaagauu

SEQ ID NO: 420856 - RNA, 19 nt, Homo sapiens
  misc_RNA (1)...(19): siRNA sense strand
acagggacuucaaggaugu

SEQ ID NO: 420857 - RNA, 19 nt, Homo sapiens
  misc_RNA (1)...(19): siRNA sense strand
agaagaagccauccacucu

SEQ ID NO: 420858 - RNA, 19 nt, Homo sapiens
  misc_RNA (1)...(19): siRNA sense strand
gagcucagaacucaucuac

SEQ ID NO: 420859 - RNA, 19 nt, Homo sapiens
  misc_RNA (1)...(19): siRNA sense strand
uugagaacaucgacaagau

SEQ ID NO: 420860 - RNA, 19 nt, Homo sapiens
  misc_RNA (1)...(19): siRNA sense strand
caagccgacuuccagaucu

SEQ ID NO: 420861 - RNA, 19 nt, Homo sapiens
  misc_RNA (1)...(19): siRNA sense strand
gagcagcugcguaccaucu

SEQ ID NO: 420862 - RNA, 19 nt, Homo sapiens
  misc_RNA (1)...(19): siRNA sense strand
caagcgcgcagacauguuc

SEQ ID NO: 420863 - RNA, 19 nt, Homo sapiens
  misc_RNA (1)...(19): siRNA sense strand
uggagaagacacagagaaa

SEQ ID NO: 420864 - RNA, 19 nt, Homo sapiens
  misc_RNA (1)...(19): siRNA sense strand
caccagcucaucuacugua

SEQ ID NO: 420865 - RNA, 19 nt, Homo sapiens
  misc_RNA (1)...(19): siRNA sense strand
acauggagccugcccagaa

SEQ ID NO: 420866 - RNA, 19 nt, Homo sapiens
  misc_RNA (1)...(19): siRNA sense strand
uacacagccucaagccaaa

SEQ ID NO: 420867 - RNA, 19 nt, Homo sapiens
  misc_RNA (1)...(19): siRNA sense strand
ggaagcggagacuugagaa

SEQ ID NO: 420868 - RNA, 19 nt, Homo sapiens
  misc_RNA (1)...(19): siRNA sense strand
ggagaagacacagagaaag

SEQ ID NO: 420869 - RNA, 19 nt, Homo sapiens
  misc_RNA (1)...(19): siRNA sense strand
caggugagaagcccaguug

SEQ ID NO: 420870 - RNA, 19 nt, Homo sapiens
  misc_RNA (1)...(19): siRNA sense strand
gaacaucgacaagauugcu

SEQ ID NO: 420871 - RNA, 19 nt, Homo sapiens
  misc_RNA (1)...(19): siRNA sense strand
gcggagacuugagaacauc

SEQ ID NO: 420872 - RNA, 19 nt, Homo sapiens
  misc_RNA (1)...(19): siRNA sense strand
cauggagccugcccagaag

SEQ ID NO: 420873 - RNA, 19 nt, Homo sapiens
  misc_RNA (1)...(19): siRNA sense strand
gauggaugccaccaacaga

SEQ ID NO: 420874 - RNA, 19 nt, Homo sapiens
  misc_RNA (1)...(19): siRNA sense strand
ugcagaagaugauugacau

SEQ ID NO: 420875 - RNA, 19 nt, Homo sapiens
  misc_RNA (1)...(19): siRNA sense strand
uggcccagcucaucaacga

SEQ ID NO: 420876 - RNA, 19 nt, Homo sapiens
  misc_RNA (1)...(19): siRNA sense strand
cagcagcgaauguucuuuc

SEQ ID NO: 420877 - RNA, 19 nt, Homo sapiens
  misc_RNA (1)...(19): siRNA sense strand
acaaagauggagucaagug

SEQ ID NO: 420878 - RNA, 19 nt, Homo sapiens
  misc_RNA (1)...(19): siRNA sense strand
aagccgacuuccagaucua

SEQ ID NO: 420879 - RNA, 19 nt, Homo sapiens
  misc_RNA (1)...(19): siRNA sense strand
gcaagcgcgcagacauguu

SEQ ID NO: 420880 - RNA, 19 nt, Homo sapiens
  misc_RNA (1)...(19): siRNA sense strand
agaagacacagagaaagaa

SEQ ID NO: 420881 - RNA, 19 nt, Homo sapiens
  misc_RNA (1)...(19): siRNA sense strand
ccaacgucaucaacgagau

SEQ ID NO: 420882 - RNA, 19 nt, Homo sapiens
  misc_RNA (1)...(19): siRNA sense strand
ggaacaucgaggacaucua

SEQ ID NO: 420883 - RNA, 19 nt, Homo sapiens
  misc_RNA (1)...(19): siRNA sense strand
cuuugaaucucccuagaag

SEQ ID NO: 420884 - RNA, 19 nt, Homo sapiens
  misc_RNA (1)...(19): siRNA sense strand
gaaggacagagaccuccau

SEQ ID NO: 420885 - RNA, 19 nt, Homo sapiens
  misc_RNA (1)...(19): siRNA sense strand
caugggcccuccucugcau

SEQ ID NO: 420886 - RNA, 19 nt, Homo sapiens
  misc_RNA (1)...(19): siRNA sense strand
ucaagcaccugcgcgacau

SEQ ID NO: 420887 - RNA, 19 nt, Homo sapiens
  misc_RNA (1)...(19): siRNA sense strand
cggaagcggagacuugaga

SEQ ID NO: 420888 - RNA, 19 nt, Homo sapiens
  misc_RNA (1)...(19): siRNA sense strand
ggucaggagcucagaacuc

SEQ ID NO: 420889 - RNA, 19 nt, Homo sapiens
  misc_RNA (1)...(19): siRNA sense strand
gagaaagaaguugcagaag

SEQ ID NO: 420890 - RNA, 19 nt, Homo sapiens
  misc_RNA (1)...(19): siRNA sense strand
gacuugagaacaucgacaa

SEQ ID NO: 420891 - RNA, 19 nt, Homo sapiens
  misc_RNA (1)...(19): siRNA sense strand
gcacaaagauggagucaag

SEQ ID NO: 420892 - RNA, 19 nt, Homo sapiens
  misc_RNA (1)...(19): siRNA sense strand
gaaagaaguugcagaagca

SEQ ID NO: 420893 - RNA, 19 nt, Homo sapiens
  misc_RNA (1)...(19): siRNA sense strand
gaaaggaggcugcacauag

SEQ ID NO: 420894 - RNA, 19 nt, Homo sapiens
  misc_RNA (1)...(19): siRNA sense strand
ucaccaagcucagcaagua

SEQ ID NO: 420895 - RNA, 19 nt, Homo sapiens
  misc_RNA (1)...(19): siRNA sense strand
ucacugaacugcagaggaa

SEQ ID NO: 420896 - RNA, 19 nt, Homo sapiens
  misc_RNA (1)...(19): siRNA sense strand
gcucagaacucaucuacuc

SEQ ID NO: 420897 - RNA, 19 nt, Homo sapiens
  misc_RNA (1)...(19): siRNA sense strand
ggacagagaccuccaugug

SEQ ID NO: 420898 - RNA, 19 nt, Homo sapiens
  misc_RNA (1)...(19): siRNA sense strand
ggagaaagacgaucauuac

SEQ ID NO: 420899 - RNA, 19 nt, Homo sapiens
  misc_RNA (1)...(19): siRNA sense strand
ggaccaacgucaucaacga

SEQ ID NO: 420900 - RNA, 19 nt, Homo sapiens
  misc_RNA (1)...(19): siRNA sense strand
ggagucaagugcuggagaa

SEQ ID NO: 420901 - RNA, 19 nt, Homo sapiens
  misc_RNA (1)...(19): siRNA sense strand
cgaauguucuuucucuuug

SEQ ID NO: 420902 - RNA, 19 nt, Homo sapiens
  misc_RNA (1)...(19): siRNA sense strand
gagaagacacagagaaaga

SEQ ID NO: 420903 - RNA, 19 nt, Homo sapiens
  misc_RNA (1)...(19): siRNA sense strand
gggagcagcuggcuaucaa

SEQ ID NO: 420904 - RNA, 19 nt, Homo sapiens
  misc_RNA (1)...(19): siRNA sense strand
gaacaucgaggacaucuac

SEQ ID NO: 420905 - RNA, 19 nt, Homo sapiens
  misc_RNA (1)...(19): siRNA sense strand
gcacugagcgggacuacau

SEQ ID NO: 420906 - RNA, 19 nt, Homo sapiens
  misc_RNA (1)...(19): siRNA sense strand
cagcucaucuacuguaaga

SEQ ID NO: 420907 - RNA, 19 nt, Homo sapiens
  misc_RNA (1)...(19): siRNA sense strand
gcacagggacuucaaggau

SEQ ID NO: 420908 - RNA, 19 nt, Homo sapiens
  misc_RNA (1)...(19): siRNA sense strand
gaauguucuuucucuuuga

SEQ ID NO: 420909 - RNA, 19 nt, Homo sapiens
  misc_RNA (1)...(19): siRNA sense strand
gucaagugcuggagaaaga

SEQ ID NO: 420910 - RNA, 19 nt, Homo sapiens
  misc_RNA (1)...(19): siRNA sense strand
caacgggacugaaccacau

SEQ ID NO: 420911 - RNA, 19 nt, Homo sapiens
  misc_RNA (1)...(19): siRNA sense strand
gaagcaggcccacgucgaa

SEQ ID NO: 420912 - RNA, 19 nt, Homo sapiens
  misc_RNA (1)...(19): siRNA sense strand
aggaggaccuguaugauga

SEQ ID NO: 420913 - RNA, 19 nt, Homo sapiens
  misc_RNA (1)...(19): siRNA sense strand
gagaacaucgacaagauug

SEQ ID NO: 420914 - RNA, 19 nt, Homo sapiens
  misc_RNA (1)...(19): siRNA sense strand
gcgaggaggaccuguauga

SEQ ID NO: 420915 - RNA, 19 nt, Homo sapiens
  misc_RNA (1)...(19): siRNA sense strand
gcgaauguucuuucucuuu

SEQ ID NO: 420916 - RNA, 19 nt, Homo sapiens
  misc_RNA (1)...(19): siRNA sense strand
ggagcugacucgaguuaca

SEQ ID NO: 420917 - RNA, 19 nt, Homo sapiens
  misc_RNA (1)...(19): siRNA sense strand
ccaggaagcccgagcagaa

SEQ ID NO: 420918 - RNA, 19 nt, Homo sapiens
  misc_RNA (1)...(19): siRNA sense strand
gaggaggaccuguaugaug

SEQ ID NO: 420919 - RNA, 19 nt, Homo sapiens
  misc_RNA (1)...(19): siRNA sense strand
gagcggaagcggagacuug

SEQ ID NO: 420920 - RNA, 19 nt, Homo sapiens
  misc_RNA (1)...(19): siRNA sense strand
gaacguggcccagcucauc

SEQ ID NO: 420921 - RNA, 19 nt, Homo sapiens
  misc_RNA (1)...(19): siRNA sense strand
gacagagaccuccauguga

SEQ ID NO: 420922 - RNA, 19 nt, Homo sapiens
  misc_RNA (1)...(19): siRNA sense strand
cagcgaauguucuuucucu

SEQ ID NO: 420923 - RNA, 19 nt, Homo sapiens
  misc_RNA (1)...(19): siRNA sense strand
ugucugcgcugacgaagug

SEQ ID NO: 420924 - RNA, 19 nt, Homo sapiens
  misc_RNA (1)...(19): siRNA sense strand
gucaggagcucagaacuca

SEQ ID NO: 420925 - RNA, 19 nt, Homo sapiens
  misc_RNA (1)...(19): siRNA sense strand
aaaggaggcugcacauagg

SEQ ID NO: 420926 - RNA, 19 nt, Homo sapiens
  misc_RNA (1)...(19): siRNA sense strand
ggacugggagggagaagau

SEQ ID NO: 420927 - RNA, 19 nt, Homo sapiens
  misc_RNA (1)...(19): siRNA sense strand
gcagcuggcuaucaaugag

SEQ ID NO: 420928 - RNA, 19 nt, Homo sapiens
  misc_RNA (1)...(19): siRNA sense strand
uggagaaagacgaucauua

SEQ ID NO: 420929 - RNA, 19 nt, Homo sapiens
  misc_RNA (1)...(19): siRNA sense strand
agagaaagaaguugcagaa

SEQ ID NO: 420930 - RNA, 19 nt, Homo sapiens
  misc_RNA (1)...(19): siRNA sense strand
ugacuccggugcagaagau

SEQ ID NO: 420931 - RNA, 19 nt, Homo sapiens
  misc_RNA (1)...(19): siRNA sense strand
gagcgaggaggaccuguau

SEQ ID NO: 420932 - RNA, 19 nt, Homo sapiens
  misc_RNA (1)...(19): siRNA sense strand
ggagcgaggaggaccugua

SEQ ID NO: 420933 - RNA, 19 nt, Homo sapiens
  misc_RNA (1)...(19): siRNA sense strand
gccgcgacguguuguacua

SEQ ID NO: 420934 - RNA, 19 nt, Homo sapiens
  misc_RNA (1)...(19): siRNA sense strand
ucagaaggcguuccacaug

SEQ ID NO: 420935 - RNA, 19 nt, Homo sapiens
  misc_RNA (1)...(19): siRNA sense strand
gagcagcuggcuaucaaug

SEQ ID NO: 420936 - RNA, 19 nt, Homo sapiens
  misc_RNA (1)...(19): siRNA sense strand
cgaaaggaggcugcacaua

SEQ ID NO: 420937 - RNA, 19 nt, Homo sapiens
  misc_RNA (1)...(19): siRNA sense strand
gcagcugcguaccaucuuc

SEQ ID NO: 420938 - RNA, 19 nt, Homo sapiens
  misc_RNA (1)...(19): siRNA sense strand
gaagaaccagcaggugaga

SEQ ID NO: 420939 - RNA, 19 nt, Homo sapiens
  misc_RNA (1)...(19): siRNA sense strand
gagcagcaaggaccagaug

SEQ ID NO: 420940 - RNA, 19 nt, Homo sapiens
  misc_RNA (1)...(19): siRNA sense strand
ugauggagcucuggacaca

SEQ ID NO: 420941 - RNA, 19 nt, Homo sapiens
  misc_RNA (1)...(19): siRNA sense strand
gaagacacagagaaagaag

SEQ ID NO: 420942 - RNA, 19 nt, Homo sapiens
  misc_RNA (1)...(19): siRNA sense strand
agacacagagaaagaaguu

SEQ ID NO: 420943 - RNA, 19 nt, Homo sapiens
  misc_RNA (1)...(19): siRNA sense strand
gcucaucuacuguaagaag

SEQ ID NO: 420944 - RNA, 19 nt, Homo sapiens
  misc_RNA (1)...(19): siRNA sense strand
uugaaucucccuagaagaa

SEQ ID NO: 420945 - RNA, 19 nt, Homo sapiens
  misc_RNA (1)...(19): siRNA sense strand
ugagaacaucgacaagauu

SEQ ID NO: 420946 - RNA, 19 nt, Homo sapiens
  misc_RNA (1)...(19): siRNA sense strand
acagggacuucaaggaugu

SEQ ID NO: 420947 - RNA, 19 nt, Homo sapiens
  misc_RNA (1)...(19): siRNA sense strand
agaagaagccauccacucu

SEQ ID NO: 420948 - RNA, 19 nt, Homo sapiens
  misc_RNA (1)...(19): siRNA sense strand
gagcucagaacucaucuac

SEQ ID NO: 420949 - RNA, 19 nt, Homo sapiens
  misc_RNA (1)...(19): siRNA sense strand
uugagaacaucgacaagau

SEQ ID NO: 420950 - RNA, 19 nt, Homo sapiens
  misc_RNA (1)...(19): siRNA sense strand
caagccgacuuccagaucu

SEQ ID NO: 420951 - RNA, 19 nt, Homo sapiens
  misc_RNA (1)...(19): siRNA sense strand
gagcagcugcguaccaucu

SEQ ID NO: 420952 - RNA, 19 nt, Homo sapiens
  misc_RNA (1)...(19): siRNA sense strand
caagcgcgcagacauguuc

SEQ ID NO: 420953 - RNA, 19 nt, Homo sapiens
  misc_RNA (1)...(19): siRNA sense strand
uggagaagacacagagaaa

SEQ ID NO: 420954 - RNA, 19 nt, Homo sapiens
  misc_RNA (1)...(19): siRNA sense strand
caccagcucaucuacugua

SEQ ID NO: 420955 - RNA, 19 nt, Homo sapiens
  misc_RNA (1)...(19): siRNA sense strand
acauggagccugcccagaa

SEQ ID NO: 420956 - RNA, 19 nt, Homo sapiens
  misc_RNA (1)...(19): siRNA sense strand
uacacagccucaagccaaa

SEQ ID NO: 420957 - RNA, 19 nt, Homo sapiens
  misc_RNA (1)...(19): siRNA sense strand
ggaagcggagacuugagaa

SEQ ID NO: 420958 - RNA, 19 nt, Homo sapiens
  misc_RNA (1)...(19): siRNA sense strand
ggagaagacacagagaaag

SEQ ID NO: 420959 - RNA, 19 nt, Homo sapiens
  misc_RNA (1)...(19): siRNA sense strand
caggugagaagcccaguug

SEQ ID NO: 420960 - RNA, 19 nt, Homo sapiens
  misc_RNA (1)...(19): siRNA sense strand
gaacaucgacaagauugcu

SEQ ID NO: 420961 - RNA, 19 nt, Homo sapiens
  misc_RNA (1)...(19): siRNA sense strand
gcggagacuugagaacauc

SEQ ID NO: 420962 - RNA, 19 nt, Homo sapiens
  misc_RNA (1)...(19): siRNA sense strand
cauggagccugcccagaag

SEQ ID NO: 420963 - RNA, 19 nt, Homo sapiens
  misc_RNA (1)...(19): siRNA sense strand
gauggaugccaccaacaga

SEQ ID NO: 420964 - RNA, 19 nt, Homo sapiens
  misc_RNA (1)...(19): siRNA sense strand
ugcagaagaugauugacau

SEQ ID NO: 420965 - RNA, 19 nt, Homo sapiens
  misc_RNA (1)...(19): siRNA sense strand
uggcccagcucaucaacga

SEQ ID NO: 420966 - RNA, 19 nt, Homo sapiens
  misc_RNA (1)...(19): siRNA sense strand
cagcagcgaauguucuuuc

SEQ ID NO: 420967 - RNA, 19 nt, Homo sapiens
  misc_RNA (1)...(19): siRNA sense strand
acaaagauggagucaagug

SEQ ID NO: 420968 - RNA, 19 nt, Homo sapiens
  misc_RNA (1)...(19): siRNA sense strand
aagccgacuuccagaucua

SEQ ID NO: 420969 - RNA, 19 nt, Homo sapiens
  misc_RNA (1)...(19): siRNA sense strand
gcaagcgcgcagacauguu

SEQ ID NO: 420970 - RNA, 19 nt, Homo sapiens
  misc_RNA (1)...(19): siRNA sense strand
agaagacacagagaaagaa

SEQ ID NO: 420971 - RNA, 19 nt, Homo sapiens
  misc_RNA (1)...(19): siRNA sense strand
ccaacgucaucaacgagau

SEQ ID NO: 420972 - RNA, 19 nt, Homo sapiens
  misc_RNA (1)...(19): siRNA sense strand
ggaacaucgaggacaucua

SEQ ID NO: 420973 - RNA, 19 nt, Homo sapiens
  misc_RNA (1)...(19): siRNA sense strand
cuuugaaucucccuagaag

SEQ ID NO: 420974 - RNA, 19 nt, Homo sapiens
  misc_RNA (1)...(19): siRNA sense strand
gaaggacagagaccuccau

SEQ ID NO: 420975 - RNA, 19 nt, Homo sapiens
  misc_RNA (1)...(19): siRNA sense strand
caugggcccuccucugcau

SEQ ID NO: 420976 - RNA, 19 nt, Homo sapiens
  misc_RNA (1)...(19): siRNA sense strand
ucaagcaccugcgcgacau

SEQ ID NO: 420977 - RNA, 19 nt, Homo sapiens
  misc_RNA (1)...(19): siRNA sense strand
cggaagcggagacuugaga

SEQ ID NO: 420978 - RNA, 19 nt, Homo sapiens
  misc_RNA (1)...(19): siRNA sense strand
ggucaggagcucagaacuc

SEQ ID NO: 420979 - RNA, 19 nt, Homo sapiens
  misc_RNA (1)...(19): siRNA sense strand
gagaaagaaguugcagaag

SEQ ID NO: 420980 - RNA, 19 nt, Homo sapiens
  misc_RNA (1)...(19): siRNA sense strand
gacuugagaacaucgacaa

SEQ ID NO: 420981 - RNA, 19 nt, Homo sapiens
  misc_RNA (1)...(19): siRNA sense strand
ggacauaccuuuaaaccuu

SEQ ID NO: 420982 - RNA, 19 nt, Homo sapiens
  misc_RNA (1)...(19): siRNA sense strand
acacacagcugaagaauaa

SEQ ID NO: 420983 - RNA, 19 nt, Homo sapiens
  misc_RNA (1)...(19): siRNA sense strand
ggacuuugcuggagguuaa

SEQ ID NO: 420984 - RNA, 19 nt, Homo sapiens
  misc_RNA (1)...(19): siRNA sense strand
gcagaugacugauuuggaa

SEQ ID NO: 420985 - RNA, 19 nt, Homo sapiens
  misc_RNA (1)...(19): siRNA sense strand
auacgaaacuccacaaaua

SEQ ID NO: 420986 - RNA, 19 nt, Homo sapiens
  misc_RNA (1)...(19): siRNA sense strand
gaauggaacuccuggcaaa

SEQ ID NO: 420987 - RNA, 19 nt, Homo sapiens
  misc_RNA (1)...(19): siRNA sense strand
uaaaggaggucaucuggaa

SEQ ID NO: 420988 - RNA, 19 nt, Homo sapiens
  misc_RNA (1)...(19): siRNA sense strand
gaaacuaugucuggagaaa

SEQ ID NO: 420989 - RNA, 19 nt, Homo sapiens
  misc_RNA (1)...(19): siRNA sense strand
uaaagugaaugaagaggua

SEQ ID NO: 420990 - RNA, 19 nt, Homo sapiens
  misc_RNA (1)...(19): siRNA sense strand
caaagaggaugaagaagau

SEQ ID NO: 420991 - RNA, 19 nt, Homo sapiens
  misc_RNA (1)...(19): siRNA sense strand
gaugaugauugcacgguua

SEQ ID NO: 420992 - RNA, 19 nt, Homo sapiens
  misc_RNA (1)...(19): siRNA sense strand
aaagagagacuuacuauug

SEQ ID NO: 420993 - RNA, 19 nt, Homo sapiens
  misc_RNA (1)...(19): siRNA sense strand
gcucagagauccuuaugau

SEQ ID NO: 420994 - RNA, 19 nt, Homo sapiens
  misc_RNA (1)...(19): siRNA sense strand
ggaagcccauggcaucuuu

SEQ ID NO: 420995 - RNA, 19 nt, Homo sapiens
  misc_RNA (1)...(19): siRNA sense strand
ccacaaauaagaagaguaa

SEQ ID NO: 420996 - RNA, 19 nt, Homo sapiens
  misc_RNA (1)...(19): siRNA sense strand
agagugaguugauaucuaa

SEQ ID NO: 420997 - RNA, 19 nt, Homo sapiens
  misc_RNA (1)...(19): siRNA sense strand
gugaauuagugccaucuua

SEQ ID NO: 420998 - RNA, 19 nt, Homo sapiens
  misc_RNA (1)...(19): siRNA sense strand
gaucucagcuucaauacag

SEQ ID NO: 420999 - RNA, 19 nt, Homo sapiens
  misc_RNA (1)...(19): siRNA sense strand
uguagaagcuguaagaaau

SEQ ID NO: 421000 - RNA, 19 nt, Homo sapiens
  misc_RNA (1)...(19): siRNA sense strand
gaagauacacauuccaguu

SEQ ID NO: 421001 - RNA, 19 nt, Homo sapiens
  misc_RNA (1)...(19): siRNA sense strand
guaaagcuuuggauucaga

SEQ ID NO: 421002 - RNA, 19 nt, Homo sapiens
  misc_RNA (1)...(19): siRNA sense strand
gaaguucgauguaugaaaa

SEQ ID NO: 421003 - RNA, 19 nt, Homo sapiens
  misc_RNA (1)...(19): siRNA sense strand
gaauguagaagcuguaaga

SEQ ID NO: 421004 - RNA, 19 nt, Homo sapiens
  misc_RNA (1)...(19): siRNA sense strand
gcgagugcccucugauuua

SEQ ID NO: 421005 - RNA, 19 nt, Homo sapiens
  misc_RNA (1)...(19): siRNA sense strand
gccugaaacuucuaaauau

SEQ ID NO: 421006 - RNA, 19 nt, Homo sapiens
  misc_RNA (1)...(19): siRNA sense strand
gaacucagaagucaagaga

SEQ ID NO: 421007 - RNA, 19 nt, Homo sapiens
  misc_RNA (1)...(19): siRNA sense strand
ggaaaggaauguagaagcu

SEQ ID NO: 421008 - RNA, 19 nt, Homo sapiens
  misc_RNA (1)...(19): siRNA sense strand
uacgagaacuaguaaauug

SEQ ID NO: 421009 - RNA, 19 nt, Homo sapiens
  misc_RNA (1)...(19): siRNA sense strand
gcacgccuguguccucauu

SEQ ID NO: 421010 - RNA, 19 nt, Homo sapiens
  misc_RNA (1)...(19): siRNA sense strand
ggaaugcaguggagaugau

SEQ ID NO: 421011 - RNA, 19 nt, Homo sapiens
  misc_RNA (1)...(19): siRNA sense strand
gaacaaauaggcccugaag

SEQ ID NO: 421012 - RNA, 19 nt, Homo sapiens
  misc_RNA (1)...(19): siRNA sense strand
gaccggagcaguauagaaa

SEQ ID NO: 421013 - RNA, 19 nt, Homo sapiens
  misc_RNA (1)...(19): siRNA sense strand
aagagagacuuacuauuga

SEQ ID NO: 421014 - RNA, 19 nt, Homo sapiens
  misc_RNA (1)...(19): siRNA sense strand
guacauuacucaguuggaa

SEQ ID NO: 421015 - RNA, 19 nt, Homo sapiens
  misc_RNA (1)...(19): siRNA sense strand
ggucagaagacaucucuaa

SEQ ID NO: 421016 - RNA, 19 nt, Homo sapiens
  misc_RNA (1)...(19): siRNA sense strand
cagcuuaguucaagaagug

SEQ ID NO: 421017 - RNA, 19 nt, Homo sapiens
  misc_RNA (1)...(19): siRNA sense strand
ccaaagaggaugaagaaga

SEQ ID NO: 421018 - RNA, 19 nt, Homo sapiens
  misc_RNA (1)...(19): siRNA sense strand
gcaaaugaaggauacuuga

SEQ ID NO: 421019 - RNA, 19 nt, Homo sapiens
  misc_RNA (1)...(19): siRNA sense strand
ugugcgagguuacuacuua

SEQ ID NO: 421020 - RNA, 19 nt, Homo sapiens
  misc_RNA (1)...(19): siRNA sense strand
gagagcagauccuguuuac

SEQ ID NO: 421021 - RNA, 19 nt, Homo sapiens
  misc_RNA (1)...(19): siRNA sense strand
gacauaccuuuaaaccuuu

SEQ ID NO: 421022 - RNA, 19 nt, Homo sapiens
  misc_RNA (1)...(19): siRNA sense strand
gacugcagaugacugauuu

SEQ ID NO: 421023 - RNA, 19 nt, Homo sapiens
  misc_RNA (1)...(19): siRNA sense strand
cgagugcccucugauuuaa

SEQ ID NO: 421024 - RNA, 19 nt, Homo sapiens
  misc_RNA (1)...(19): siRNA sense strand
aaacagagcuuuuggaauc

SEQ ID NO: 421025 - RNA, 19 nt, Homo sapiens
  misc_RNA (1)...(19): siRNA sense strand
gaaugaagagguagccaaa

SEQ ID NO: 421026 - RNA, 19 nt, Homo sapiens
  misc_RNA (1)...(19): siRNA sense strand
gguagucuaucacuucgaa

SEQ ID NO: 421027 - RNA, 19 nt, Homo sapiens
  misc_RNA (1)...(19): siRNA sense strand
agacaucucuaacccaaga

SEQ ID NO: 421028 - RNA, 19 nt, Homo sapiens
  misc_RNA (1)...(19): siRNA sense strand
gaaacuccacaaauaagaa

SEQ ID NO: 421029 - RNA, 19 nt, Homo sapiens
  misc_RNA (1)...(19): siRNA sense strand
ucaccaacuuucuuucaaa

SEQ ID NO: 421030 - RNA, 19 nt, Homo sapiens
  misc_RNA (1)...(19): siRNA sense strand
ggacuuacucgcaaaugaa

SEQ ID NO: 421031 - RNA, 19 nt, Homo sapiens
  misc_RNA (1)...(19): siRNA sense strand
cacaacagcuugauacucu

SEQ ID NO: 421032 - RNA, 19 nt, Homo sapiens
  misc_RNA (1)...(19): siRNA sense strand
ggauucagaugcuguugug

SEQ ID NO: 421033 - RNA, 19 nt, Homo sapiens
  misc_RNA (1)...(19): siRNA sense strand
acucagaagucaagagauu

SEQ ID NO: 421034 - RNA, 19 nt, Homo sapiens
  misc_RNA (1)...(19): siRNA sense strand
caguugcggucuuguagua

SEQ ID NO: 421035 - RNA, 19 nt, Homo sapiens
  misc_RNA (1)...(19): siRNA sense strand
gcagguagucuaucacuuc

SEQ ID NO: 421036 - RNA, 19 nt, Homo sapiens
  misc_RNA (1)...(19): siRNA sense strand
caacaaguaauacagaaga

SEQ ID NO: 421037 - RNA, 19 nt, Homo sapiens
  misc_RNA (1)...(19): siRNA sense strand
ucagagauccuuaugaugu

SEQ ID NO: 421038 - RNA, 19 nt, Homo sapiens
  misc_RNA (1)...(19): siRNA sense strand
caccagacuuuaccaguga

SEQ ID NO: 421039 - RNA, 19 nt, Homo sapiens
  misc_RNA (1)...(19): siRNA sense strand
caucaguugccaauuguua

SEQ ID NO: 421040 - RNA, 19 nt, Homo sapiens
  misc_RNA (1)...(19): siRNA sense strand
gaauuugcaucugacuuug

SEQ ID NO: 421041 - RNA, 19 nt, Homo sapiens
  misc_RNA (1)...(19): siRNA sense strand
cagaagaaguaacacaaca

SEQ ID NO: 421042 - RNA, 19 nt, Homo sapiens
  misc_RNA (1)...(19): siRNA sense strand
guguaaagcuuuggauuca

SEQ ID NO: 421043 - RNA, 19 nt, Homo sapiens
  misc_RNA (1)...(19): siRNA sense strand
ggaauuagaagagggagaa

SEQ ID NO: 421044 - RNA, 19 nt, Homo sapiens
  misc_RNA (1)...(19): siRNA sense strand
agacuuuaccagugaauua

SEQ ID NO: 421045 - RNA, 19 nt, Homo sapiens
  misc_RNA (1)...(19): siRNA sense strand
ccucauugcuccaaacugu

SEQ ID NO: 421046 - RNA, 19 nt, Homo sapiens
  misc_RNA (1)...(19): siRNA sense strand
uauguggguuccaguagua

SEQ ID NO: 421047 - RNA, 19 nt, Homo sapiens
  misc_RNA (1)...(19): siRNA sense strand
gaacuaguaaauugucguu

SEQ ID NO: 421048 - RNA, 19 nt, Homo sapiens
  misc_RNA (1)...(19): siRNA sense strand
acaaauaggcccugaagau

SEQ ID NO: 421049 - RNA, 19 nt, Homo sapiens
  misc_RNA (1)...(19): siRNA sense strand
ggccaaagaggaugaagaa

SEQ ID NO: 421050 - RNA, 19 nt, Homo sapiens
  misc_RNA (1)...(19): siRNA sense strand
aaacaaccuuaaagagaga

SEQ ID NO: 421051 - RNA, 19 nt, Homo sapiens
  misc_RNA (1)...(19): siRNA sense strand
cagagauccuuaugauguu

SEQ ID NO: 421052 - RNA, 19 nt, Homo sapiens
  misc_RNA (1)...(19): siRNA sense strand
gagcaacacgucacuaaag

SEQ ID NO: 421053 - RNA, 19 nt, Homo sapiens
  misc_RNA (1)...(19): siRNA sense strand
ggacugcagaugacugauu

SEQ ID NO: 421054 - RNA, 19 nt, Homo sapiens
  misc_RNA (1)...(19): siRNA sense strand
agucaucaguugccaauug

SEQ ID NO: 421055 - RNA, 19 nt, Homo sapiens
  misc_RNA (1)...(19): siRNA sense strand
acuagacauugauccauua

SEQ ID NO: 421056 - RNA, 19 nt, Homo sapiens
  misc_RNA (1)...(19): siRNA sense strand
caacauggaauuagaagag

SEQ ID NO: 421057 - RNA, 19 nt, Homo sapiens
  misc_RNA (1)...(19): siRNA sense strand
gagcguguucgggaaauua

SEQ ID NO: 421058 - RNA, 19 nt, Homo sapiens
  misc_RNA (1)...(19): siRNA sense strand
ucauggaacugaucagcuu

SEQ ID NO: 421059 - RNA, 19 nt, Homo sapiens
  misc_RNA (1)...(19): siRNA sense strand
gaagucaagagauuuguca

SEQ ID NO: 421060 - RNA, 19 nt, Homo sapiens
  misc_RNA (1)...(19): siRNA sense strand
uagagaauuucagcacuuu

SEQ ID NO: 421061 - RNA, 19 nt, Homo sapiens
  misc_RNA (1)...(19): siRNA sense strand
ccugaaacuucuaaauaug

SEQ ID NO: 421062 - RNA, 19 nt, Homo sapiens
  misc_RNA (1)...(19): siRNA sense strand
agggagaacucauggaaga

SEQ ID NO: 421063 - RNA, 19 nt, Homo sapiens
  misc_RNA (1)...(19): siRNA sense strand
gagaaaaugauguggaaua

SEQ ID NO: 421064 - RNA, 19 nt, Homo sapiens
  misc_RNA (1)...(19): siRNA sense strand
ugaagaagaugaggagaag

SEQ ID NO: 421065 - RNA, 19 nt, Homo sapiens
  misc_RNA (1)...(19): siRNA sense strand
gaaaaggacaaaugugaaa

SEQ ID NO: 421066 - RNA, 19 nt, Homo sapiens
  misc_RNA (1)...(19): siRNA sense strand
caaaugaaggauacuugaa

SEQ ID NO: 421067 - RNA, 19 nt, Homo sapiens
  misc_RNA (1)...(19): siRNA sense strand
guucaccaguccuguaaug

SEQ ID NO: 421068 - RNA, 19 nt, Homo sapiens
  misc_RNA (1)...(19): siRNA sense strand
cuucaacucugcagucuca

SEQ ID NO: 421069 - RNA, 19 nt, Homo sapiens
  misc_RNA (1)...(19): siRNA sense strand
gaagaugaggagaagauuc

SEQ ID NO: 421070 - RNA, 19 nt, Homo sapiens
  misc_RNA (1)...(19): siRNA sense strand
agaauuugcaucugacuuu

SEQ ID NO: 421071 - RNA, 19 nt, Homo sapiens
  misc_RNA (1)...(19): siRNA sense strand
aagagugaguugauaucua

SEQ ID NO: 421072 - RNA, 19 nt, Homo sapiens
  misc_RNA (1)...(19): siRNA sense strand
gaucagcuuaguucaagaa

SEQ ID NO: 421073 - RNA, 19 nt, Homo sapiens
  misc_RNA (1)...(19): siRNA sense strand
ugccugaaacuucuaaaua

SEQ ID NO: 421074 - RNA, 19 nt, Homo sapiens
  misc_RNA (1)...(19): siRNA sense strand
caaauaggcccugaagauc

SEQ ID NO: 421075 - RNA, 19 nt, Homo sapiens
  misc_RNA (1)...(19): siRNA sense strand
gaaaauagucguucaaagg

SEQ ID NO: 421076 - RNA, 19 nt, Homo sapiens
  misc_RNA (1)...(19): siRNA sense strand
aaacucaaauggccgaagu

SEQ ID NO: 421077 - RNA, 19 nt, Homo sapiens
  misc_RNA (1)...(19): siRNA sense strand
ggaagcaacaggcaaugug

SEQ ID NO: 421078 - RNA, 19 nt, Homo sapiens
  misc_RNA (1)...(19): siRNA sense strand
gauguggaauauaacaaca

SEQ ID NO: 421079 - RNA, 19 nt, Homo sapiens
  misc_RNA (1)...(19): siRNA sense strand
uaacacaacagcuugauac

SEQ ID NO: 421080 - RNA, 19 nt, Homo sapiens
  misc_RNA (1)...(19): siRNA sense strand
guaacacaacagcuugaua

SEQ ID NO: 421081 - RNA, 19 nt, Homo sapiens
  misc_RNA (1)...(19): siRNA sense strand
gaucaaaucucgucagaaa

SEQ ID NO: 421082 - RNA, 19 nt, Homo sapiens
  misc_RNA (1)...(19): siRNA sense strand
gaaagagccucgaaauuug

SEQ ID NO: 421083 - RNA, 19 nt, Homo sapiens
  misc_RNA (1)...(19): siRNA sense strand
agacagagauuugggauua

SEQ ID NO: 421084 - RNA, 19 nt, Homo sapiens
  misc_RNA (1)...(19): siRNA sense strand
ggaggaaugugaaguagaa

SEQ ID NO: 421085 - RNA, 19 nt, Homo sapiens
  misc_RNA (1)...(19): siRNA sense strand
gagaagaccugagcucauu

SEQ ID NO: 421086 - RNA, 19 nt, Homo sapiens
  misc_RNA (1)...(19): siRNA sense strand
ggacugaccuuggcugaaa

SEQ ID NO: 421087 - RNA, 19 nt, Homo sapiens
  misc_RNA (1)...(19): siRNA sense strand
gacaggaagugauuaauga

SEQ ID NO: 421088 - RNA, 19 nt, Homo sapiens
  misc_RNA (1)...(19): siRNA sense strand
gauagaggcugaccuugaa

SEQ ID NO: 421089 - RNA, 19 nt, Homo sapiens
  misc_RNA (1)...(19): siRNA sense strand
gaaaugagaccucuguuau

SEQ ID NO: 421090 - RNA, 19 nt, Homo sapiens
  misc_RNA (1)...(19): siRNA sense strand
gcagaucacugucgucaga

SEQ ID NO: 421091 - RNA, 19 nt, Homo sapiens
  misc_RNA (1)...(19): siRNA sense strand
ggaguacauucauaagaua

SEQ ID NO: 421092 - RNA, 19 nt, Homo sapiens
  misc_RNA (1)...(19): siRNA sense strand
gaaacuauuugauccuuga

SEQ ID NO: 421093 - RNA, 19 nt, Homo sapiens
  misc_RNA (1)...(19): siRNA sense strand
ggacauaugcccuuuagaa

SEQ ID NO: 421094 - RNA, 19 nt, Homo sapiens
  misc_RNA (1)...(19): siRNA sense strand
ugaaagagccucgaaauuu

SEQ ID NO: 421095 - RNA, 19 nt, Homo sapiens
  misc_RNA (1)...(19): siRNA sense strand
gaagaaagcugcagaucac

SEQ ID NO: 421096 - RNA, 19 nt, Homo sapiens
  misc_RNA (1)...(19): siRNA sense strand
ugaaaugucugcagaucua

SEQ ID NO: 421097 - RNA, 19 nt, Homo sapiens
  misc_RNA (1)...(19): siRNA sense strand
gaggagaaauugaaacaug

SEQ ID NO: 421098 - RNA, 19 nt, Homo sapiens
  misc_RNA (1)...(19): siRNA sense strand
ugaaagagcucauguucga

SEQ ID NO: 421099 - RNA, 19 nt, Homo sapiens
  misc_RNA (1)...(19): siRNA sense strand
ccauguaguuucacaauuu

SEQ ID NO: 421100 - RNA, 19 nt, Homo sapiens
  misc_RNA (1)...(19): siRNA sense strand
ggaggaaaguuacaccauu

SEQ ID NO: 421101 - RNA, 19 nt, Homo sapiens
  misc_RNA (1)...(19): siRNA sense strand
gaaggugaauagagauaaa

SEQ ID NO: 421102 - RNA, 19 nt, Homo sapiens
  misc_RNA (1)...(19): siRNA sense strand
gcucaggaauuuggauuua

SEQ ID NO: 421103 - RNA, 19 nt, Homo sapiens
  misc_RNA (1)...(19): siRNA sense strand
acagauagcuccuccaaga

SEQ ID NO: 421104 - RNA, 19 nt, Homo sapiens
  misc_RNA (1)...(19): siRNA sense strand
gcaagaugcugaaaguaau

SEQ ID NO: 421105 - RNA, 19 nt, Homo sapiens
  misc_RNA (1)...(19): siRNA sense strand
ggaagugauuaaugaauug

SEQ ID NO: 421106 - RNA, 19 nt, Homo sapiens
  misc_RNA (1)...(19): siRNA sense strand
caaaggcacuuagaagauu

SEQ ID NO: 421107 - RNA, 19 nt, Homo sapiens
  misc_RNA (1)...(19): siRNA sense strand
gagaguagauccgagauau

SEQ ID NO: 421108 - RNA, 19 nt, Homo sapiens
  misc_RNA (1)...(19): siRNA sense strand
ccagaaagaugacaaugga

SEQ ID NO: 421109 - RNA, 19 nt, Homo sapiens
  misc_RNA (1)...(19): siRNA sense strand
cgagauauauggucuuguu

SEQ ID NO: 421110 - RNA, 19 nt, Homo sapiens
  misc_RNA (1)...(19): siRNA sense strand
gaucagcccucacagacaa

SEQ ID NO: 421111 - RNA, 19 nt, Homo sapiens
  misc_RNA (1)...(19): siRNA sense strand
cgaaggagauaaugaugaa

SEQ ID NO: 421112 - RNA, 19 nt, Homo sapiens
  misc_RNA (1)...(19): siRNA sense strand
ccacuucuguuggauaaua

SEQ ID NO: 421113 - RNA, 19 nt, Homo sapiens
  misc_RNA (1)...(19): siRNA sense strand
gagcagaagaugaugauuu

SEQ ID NO: 421114 - RNA, 19 nt, Homo sapiens
  misc_RNA (1)...(19): siRNA sense strand
caacagauaacaaagcuuu

SEQ ID NO: 421115 - RNA, 19 nt, Homo sapiens
  misc_RNA (1)...(19): siRNA sense strand
gaaagaugacaauggauuu

SEQ ID NO: 421116 - RNA, 19 nt, Homo sapiens
  misc_RNA (1)...(19): siRNA sense strand
uaaagaagguggaggaaag

SEQ ID NO: 421117 - RNA, 19 nt, Homo sapiens
  misc_RNA (1)...(19): siRNA sense strand
uugaagagcucaggaauuu

SEQ ID NO: 421118 - RNA, 19 nt, Homo sapiens
  misc_RNA (1)...(19): siRNA sense strand
aaucaaaucugguuccuau

SEQ ID NO: 421119 - RNA, 19 nt, Homo sapiens
  misc_RNA (1)...(19): siRNA sense strand
ccacaaagccaauuccauu

SEQ ID NO: 421120 - RNA, 19 nt, Homo sapiens
  misc_RNA (1)...(19): siRNA sense strand
gcagaaaguugagcgcauu

SEQ ID NO: 421121 - RNA, 19 nt, Homo sapiens
  misc_RNA (1)...(19): siRNA sense strand
gagaauuuaucuagaggaa

SEQ ID NO: 421122 - RNA, 19 nt, Homo sapiens
  misc_RNA (1)...(19): siRNA sense strand
caaaucugguuccuaugua

SEQ ID NO: 421123 - RNA, 19 nt, Homo sapiens
  misc_RNA (1)...(19): siRNA sense strand
gaacucuggugacucauuc

SEQ ID NO: 421124 - RNA, 19 nt, Homo sapiens
  misc_RNA (1)...(19): siRNA sense strand
gaauuguucuacacugaaa

SEQ ID NO: 421125 - RNA, 19 nt, Homo sapiens
  misc_RNA (1)...(19): siRNA sense strand
gacaauggcgcucagauuu

SEQ ID NO: 421126 - RNA, 19 nt, Homo sapiens
  misc_RNA (1)...(19): siRNA sense strand
gaacaccugcccaaagauu

SEQ ID NO: 421127 - RNA, 19 nt, Homo sapiens
  misc_RNA (1)...(19): siRNA sense strand
gaggaaaguuacaccauuc

SEQ ID NO: 421128 - RNA, 19 nt, Homo sapiens
  misc_RNA (1)...(19): siRNA sense strand
gaacaugaacagaucaaug

SEQ ID NO: 421129 - RNA, 19 nt, Homo sapiens
  misc_RNA (1)...(19): siRNA sense strand
ccagagcauugaauuacua

SEQ ID NO: 421130 - RNA, 19 nt, Homo sapiens
  misc_RNA (1)...(19): siRNA sense strand
caggaagacuggcaacauu

SEQ ID NO: 421131 - RNA, 19 nt, Homo sapiens
  misc_RNA (1)...(19): siRNA sense strand
gauaagaagcagaaaguug

SEQ ID NO: 421132 - RNA, 19 nt, Homo sapiens
  misc_RNA (1)...(19): siRNA sense strand
gggaagauuugcugacaug

SEQ ID NO: 421133 - RNA, 19 nt, Homo sapiens
  misc_RNA (1)...(19): siRNA sense strand
ggcaacauuucccaagaua

SEQ ID NO: 421134 - RNA, 19 nt, Homo sapiens
  misc_RNA (1)...(19): siRNA sense strand
caacagauaagaagcagaa

SEQ ID NO: 421135 - RNA, 19 nt, Homo sapiens
  misc_RNA (1)...(19): siRNA sense strand
agagguacgugaucuguuu

SEQ ID NO: 421136 - RNA, 19 nt, Homo sapiens
  misc_RNA (1)...(19): siRNA sense strand
ggaggaggaaugugaagua

SEQ ID NO: 421137 - RNA, 19 nt, Homo sapiens
  misc_RNA (1)...(19): siRNA sense strand
gagagucaccaacagauaa

SEQ ID NO: 421138 - RNA, 19 nt, Homo sapiens
  misc_RNA (1)...(19): siRNA sense strand
uaaaggaaguuggagaaga

SEQ ID NO: 421139 - RNA, 19 nt, Homo sapiens
  misc_RNA (1)...(19): siRNA sense strand
gauauuauucccacucaaa

SEQ ID NO: 421140 - RNA, 19 nt, Homo sapiens
  misc_RNA (1)...(19): siRNA sense strand
gaagagaaggauguuaauu

SEQ ID NO: 421141 - RNA, 19 nt, Homo sapiens
  misc_RNA (1)...(19): siRNA sense strand
ccgaacaccugcccaaaga

SEQ ID NO: 421142 - RNA, 19 nt, Homo sapiens
  misc_RNA (1)...(19): siRNA sense strand
gaaauuuggguuuguugaa

SEQ ID NO: 421143 - RNA, 19 nt, Homo sapiens
  misc_RNA (1)...(19): siRNA sense strand
gaagaacggugggcauugg

SEQ ID NO: 421144 - RNA, 19 nt, Homo sapiens
  misc_RNA (1)...(19): siRNA sense strand
caagagcaguuauccaaag

SEQ ID NO: 421145 - RNA, 19 nt, Homo sapiens
  misc_RNA (1)...(19): siRNA sense strand
gaaucuaccuuaauaucgu

SEQ ID NO: 421146 - RNA, 19 nt, Homo sapiens
  misc_RNA (1)...(19): siRNA sense strand
caauggcgcucagauuuau

SEQ ID NO: 421147 - RNA, 19 nt, Homo sapiens
  misc_RNA (1)...(19): siRNA sense strand
ucaggacucugccaaguug

SEQ ID NO: 421148 - RNA, 19 nt, Homo sapiens
  misc_RNA (1)...(19): siRNA sense strand
ggagggaaagagaaugaua

SEQ ID NO: 421149 - RNA, 19 nt, Homo sapiens
  misc_RNA (1)...(19): siRNA sense strand
ccaauuccaugucuucugu

SEQ ID NO: 421150 - RNA, 19 nt, Homo sapiens
  misc_RNA (1)...(19): siRNA sense strand
gaacaggaacggcuacagu

SEQ ID NO: 421151 - RNA, 19 nt, Homo sapiens
  misc_RNA (1)...(19): siRNA sense strand
cagacaagcacucagauaa

SEQ ID NO: 421152 - RNA, 19 nt, Homo sapiens
  misc_RNA (1)...(19): siRNA sense strand
uauaaggcauggaaguauu

SEQ ID NO: 421153 - RNA, 19 nt, Homo sapiens
  misc_RNA (1)...(19): siRNA sense strand
aaaggaaguuggagaagau

SEQ ID NO: 421154 - RNA, 19 nt, Homo sapiens
  misc_RNA (1)...(19): siRNA sense strand
ucagaccuguauaaacaua

SEQ ID NO: 421155 - RNA, 19 nt, Homo sapiens
  misc_RNA (1)...(19): siRNA sense strand
cguauagcaccucauauua

SEQ ID NO: 421156 - RNA, 19 nt, Homo sapiens
  misc_RNA (1)...(19): siRNA sense strand
gaguagauccgagauauau

SEQ ID NO: 421157 - RNA, 19 nt, Homo sapiens
  misc_RNA (1)...(19): siRNA sense strand
caaaggaacaacauacaga

SEQ ID NO: 421158 - RNA, 19 nt, Homo sapiens
  misc_RNA (1)...(19): siRNA sense strand
cgacaaguggcaacagaua

SEQ ID NO: 421159 - RNA, 19 nt, Homo sapiens
  misc_RNA (1)...(19): siRNA sense strand
ucauuuggcuguuuucuua

SEQ ID NO: 421160 - RNA, 19 nt, Homo sapiens
  misc_RNA (1)...(19): siRNA sense strand
cuauguagcucucacuguu

SEQ ID NO: 421161 - RNA, 19 nt, Homo sapiens
  misc_RNA (1)...(19): siRNA sense strand
caggagaguuccacagaug

SEQ ID NO: 421162 - RNA, 19 nt, Homo sapiens
  misc_RNA (1)...(19): siRNA sense strand
cauaugcccuuuagaacug

SEQ ID NO: 421163 - RNA, 19 nt, Homo sapiens
  misc_RNA (1)...(19): siRNA sense strand
gagauaaugaugaagaaga

SEQ ID NO: 421164 - RNA, 19 nt, Homo sapiens
  misc_RNA (1)...(19): siRNA sense strand
agaaaugagaccucuguua

SEQ ID NO: 421165 - RNA, 19 nt, Homo sapiens
  misc_RNA (1)...(19): siRNA sense strand
gcagagccauggaacuaca

SEQ ID NO: 421166 - RNA, 19 nt, Homo sapiens
  misc_RNA (1)...(19): siRNA sense strand
aaagcgagcugacuaaacu

SEQ ID NO: 421167 - RNA, 19 nt, Homo sapiens
  misc_RNA (1)...(19): siRNA sense strand
gaugaaaugucugcagauc

SEQ ID NO: 421168 - RNA, 19 nt, Homo sapiens
  misc_RNA (1)...(19): siRNA sense strand
guauagcaccucauauuau

SEQ ID NO: 421169 - RNA, 19 nt, Homo sapiens
  misc_RNA (1)...(19): siRNA sense strand
agaaacagauccuggagau

SEQ ID NO: 421170 - RNA, 19 nt, Homo sapiens
  misc_RNA (1)...(19): siRNA sense strand
caucaguucuuucuagauc

SEQ ID NO: 421171 - RNA, 19 nt, Homo sapiens
  misc_RNA (1)...(19): siRNA sense strand
uaaguugaguacaguguug

SEQ ID NO: 421172 - RNA, 19 nt, Homo sapiens
  misc_RNA (1)...(19): siRNA sense strand
gaagagcucaggaauuugg

SEQ ID NO: 421173 - RNA, 19 nt, Homo sapiens
  misc_RNA (1)...(19): siRNA sense strand
gggagaaggugaagaaagc

SEQ ID NO: 421174 - RNA, 19 nt, Homo sapiens
  misc_RNA (1)...(19): siRNA sense strand
caaaugcaaaggcuuacua

SEQ ID NO: 421175 - RNA, 19 nt, Homo sapiens
  misc_RNA (1)...(19): siRNA sense strand
caacugaaggauauuauuc

SEQ ID NO: 421176 - RNA, 19 nt, Homo sapiens
  misc_RNA (1)...(19): siRNA sense strand
aagugaggaugaacaauuu

SEQ ID NO: 421177 - RNA, 19 nt, Homo sapiens
  misc_RNA (1)...(19): siRNA sense strand
gccacuauauccaaacuau

SEQ ID NO: 421178 - RNA, 19 nt, Homo sapiens
  misc_RNA (1)...(19): siRNA sense strand
uagaaagggugacugaaca

SEQ ID NO: 421179 - RNA, 19 nt, Homo sapiens
  misc_RNA (1)...(19): siRNA sense strand
ugaaggagcaauccacaaa

SEQ ID NO: 421180 - RNA, 19 nt, Homo sapiens
  misc_RNA (1)...(19): siRNA sense strand
uaaaucaggcugucaagga

SEQ ID NO: 421181 - RNA, 19 nt, Homo sapiens
  misc_RNA (1)...(19): siRNA sense strand
gagcaagggugcagagcaa

SEQ ID NO: 421182 - RNA, 19 nt, Homo sapiens
  misc_RNA (1)...(19): siRNA sense strand
uugaauagcugcuguaauc

SEQ ID NO: 421183 - RNA, 19 nt, Homo sapiens
  misc_RNA (1)...(19): siRNA sense strand
caaauucauuccuguuuca

SEQ ID NO: 421184 - RNA, 19 nt, Homo sapiens
  misc_RNA (1)...(19): siRNA sense strand
uuacuggguuccuugaaua

SEQ ID NO: 421185 - RNA, 19 nt, Homo sapiens
  misc_RNA (1)...(19): siRNA sense strand
gaagaugacuuuugugauc

SEQ ID NO: 421186 - RNA, 19 nt, Homo sapiens
  misc_RNA (1)...(19): siRNA sense strand
caacaaacaguacggguau

SEQ ID NO: 421187 - RNA, 19 nt, Homo sapiens
  misc_RNA (1)...(19): siRNA sense strand
guucaaagcuucccaugcu

SEQ ID NO: 421188 - RNA, 19 nt, Homo sapiens
  misc_RNA (1)...(19): siRNA sense strand
gcacggugaagaugacuuu

SEQ ID NO: 421189 - RNA, 19 nt, Homo sapiens
  misc_RNA (1)...(19): siRNA sense strand
uggaaggacucgccuaaau

SEQ ID NO: 421190 - RNA, 19 nt, Homo sapiens
  misc_RNA (1)...(19): siRNA sense strand
ggaaggacucgccuaaauc

SEQ ID NO: 421191 - RNA, 19 nt, Homo sapiens
  misc_RNA (1)...(19): siRNA sense strand
gaaggacucgccuaaaucu

SEQ ID NO: 421192 - RNA, 19 nt, Homo sapiens
  misc_RNA (1)...(19): siRNA sense strand
caccaucacugcauuacug

SEQ ID NO: 421193 - RNA, 19 nt, Homo sapiens
  misc_RNA (1)...(19): siRNA sense strand
ucaaauucauuccuguuuc

SEQ ID NO: 421194 - RNA, 19 nt, Homo sapiens
  misc_RNA (1)...(19): siRNA sense strand
ugaucgaggugaacaaugu

SEQ ID NO: 421195 - RNA, 19 nt, Homo sapiens
  misc_RNA (1)...(19): siRNA sense strand
cuucaagacuguguucaaa

SEQ ID NO: 421196 - RNA, 19 nt, Homo sapiens
  misc_RNA (1)...(19): siRNA sense strand
aaucgaagcccaacaaaca

SEQ ID NO: 421197 - RNA, 19 nt, Homo sapiens
  misc_RNA (1)...(19): siRNA sense strand
gccaaaacaugaaggaaaa

SEQ ID NO: 421198 - RNA, 19 nt, Homo sapiens
  misc_RNA (1)...(19): siRNA sense strand
ccaaguccaucaaauucau

SEQ ID NO: 421199 - RNA, 19 nt, Homo sapiens
  misc_RNA (1)...(19): siRNA sense strand
guacggguauguggaagga

SEQ ID NO: 421200 - RNA, 19 nt, Homo sapiens
  misc_RNA (1)...(19): siRNA sense strand
acgaggagcuggccaaacu

SEQ ID NO: 421201 - RNA, 19 nt, Homo sapiens
  misc_RNA (1)...(19): siRNA sense strand
gcuacggcuucaucugcua

SEQ ID NO: 421202 - RNA, 19 nt, Homo sapiens
  misc_RNA (1)...(19): siRNA sense strand
ucaagacuguguucaaagc

SEQ ID NO: 421203 - RNA, 19 nt, Homo sapiens
  misc_RNA (1)...(19): siRNA sense strand
gaucgugacggcuuacauc

SEQ ID NO: 421204 - RNA, 19 nt, Homo sapiens
  misc_RNA (1)...(19): siRNA sense strand
ucauuccuguuucaacuug

SEQ ID NO: 421205 - RNA, 19 nt, Homo sapiens
  misc_RNA (1)...(19): siRNA sense strand
gcuacaacaucuggugcaa

SEQ ID NO: 421206 - RNA, 19 nt, Homo sapiens
  misc_RNA (1)...(19): siRNA sense strand
guggccaucuccuucaaga

SEQ ID NO: 421207 - RNA, 19 nt, Homo sapiens
  misc_RNA (1)...(19): siRNA sense strand
caucaccaucacugcauua

SEQ ID NO: 421208 - RNA, 19 nt, Homo sapiens
  misc_RNA (1)...(19): siRNA sense strand
aguaugagcagaagacaga

SEQ ID NO: 421209 - RNA, 19 nt, Homo sapiens
  misc_RNA (1)...(19): siRNA sense strand
cgaagcccaacaaacagua

SEQ ID NO: 421210 - RNA, 19 nt, Homo sapiens
  misc_RNA (1)...(19): siRNA sense strand
ggcuucaucugcuacaaca

SEQ ID NO: 421211 - RNA, 19 nt, Homo sapiens
  misc_RNA (1)...(19): siRNA sense strand
caucaaauucauuccuguu

SEQ ID NO: 421212 - RNA, 19 nt, Homo sapiens
  misc_RNA (1)...(19): siRNA sense strand
ucaacaaagaagauacuga

SEQ ID NO: 421213 - RNA, 19 nt, Homo sapiens
  misc_RNA (1)...(19): siRNA sense strand
ccaucaccaucacugcauu

SEQ ID NO: 421214 - RNA, 19 nt, Homo sapiens
  misc_RNA (1)...(19): siRNA sense strand
gcauuacuggguuccuuga

SEQ ID NO: 421215 - RNA, 19 nt, Homo sapiens
  misc_RNA (1)...(19): siRNA sense strand
caacgaggagcuggccaaa

SEQ ID NO: 421216 - RNA, 19 nt, Homo sapiens
  misc_RNA (1)...(19): siRNA sense strand
gugccuacgugaccuggau

SEQ ID NO: 421217 - RNA, 19 nt, Homo sapiens
  misc_RNA (1)...(19): siRNA sense strand
cuuccaaguccaucaaauu

SEQ ID NO: 421218 - RNA, 19 nt, Homo sapiens
  misc_RNA (1)...(19): siRNA sense strand
ugagcacgccgcaguacuu

SEQ ID NO: 421219 - RNA, 19 nt, Homo sapiens
  misc_RNA (1)...(19): siRNA sense strand
ucgccuaaaucuuccaagu

SEQ ID NO: 421220 - RNA, 19 nt, Homo sapiens
  misc_RNA (1)...(19): siRNA sense strand
uacuucgucuucuccauga

SEQ ID NO: 421221 - RNA, 19 nt, Homo sapiens
  misc_RNA (1)...(19): siRNA sense strand
caaguccaucaaauucauu

SEQ ID NO: 421222 - RNA, 19 nt, Homo sapiens
  misc_RNA (1)...(19): siRNA sense strand
aagacuguguucaaagcuu

SEQ ID NO: 421223 - RNA, 19 nt, Homo sapiens
  misc_RNA (1)...(19): siRNA sense strand
gccacccgcucaagacucu

SEQ ID NO: 421224 - RNA, 19 nt, Homo sapiens
  misc_RNA (1)...(19): siRNA sense strand
ggccaucuccuucaagacu

SEQ ID NO: 421225 - RNA, 19 nt, Homo sapiens
  misc_RNA (1)...(19): siRNA sense strand
gcacgccgcaguacuucgu

SEQ ID NO: 421226 - RNA, 19 nt, Homo sapiens
  misc_RNA (1)...(19): siRNA sense strand
gagcacgccgcaguacuuc

SEQ ID NO: 421227 - RNA, 19 nt, Homo sapiens
  misc_RNA (1)...(19): siRNA sense strand
gcccucaccuuccaccuua

SEQ ID NO: 421228 - RNA, 19 nt, Homo sapiens
  misc_RNA (1)...(19): siRNA sense strand
ggaccacccuggcuaucuu

SEQ ID NO: 421229 - RNA, 19 nt, Homo sapiens
  misc_RNA (1)...(19): siRNA sense strand
gccaagauccgaacaguga

SEQ ID NO: 421230 - RNA, 19 nt, Homo sapiens
  misc_RNA (1)...(19): siRNA sense strand
gaugaagauuccaccaaug

SEQ ID NO: 421231 - RNA, 19 nt, Homo sapiens
  misc_RNA (1)...(19): siRNA sense strand
gaacagugaagaugaccuu

SEQ ID NO: 421232 - RNA, 19 nt, Homo sapiens
  misc_RNA (1)...(19): siRNA sense strand
gcccaggccugaagaguca

SEQ ID NO: 421233 - RNA, 19 nt, Homo sapiens
  misc_RNA (1)...(19): siRNA sense strand
cagugaagaugaccuuugu

SEQ ID NO: 421234 - RNA, 19 nt, Homo sapiens
  misc_RNA (1)...(19): siRNA sense strand
ugaugaagauuccaccaau

SEQ ID NO: 421235 - RNA, 19 nt, Homo sapiens
  misc_RNA (1)...(19): siRNA sense strand
cagccucccucaagucuuc

SEQ ID NO: 421236 - RNA, 19 nt, Homo sapiens
  misc_RNA (1)...(19): siRNA sense strand
uugcugggcucccuucuuc

SEQ ID NO: 421237 - RNA, 19 nt, Homo sapiens
  misc_RNA (1)...(19): siRNA sense strand
cacccuggcuaucuucguu

SEQ ID NO: 421238 - RNA, 19 nt, Homo sapiens
  misc_RNA (1)...(19): siRNA sense strand
gugcagggccgucaaguac

SEQ ID NO: 421239 - RNA, 19 nt, Homo sapiens
  misc_RNA (1)...(19): siRNA sense strand
ggaucuacaugggcuucaa

SEQ ID NO: 421240 - RNA, 19 nt, Homo sapiens
  misc_RNA (1)...(19): siRNA sense strand
gggccaagauccgaacagu

SEQ ID NO: 421241 - RNA, 19 nt, Homo sapiens
  misc_RNA (1)...(19): siRNA sense strand
gacaggcccucaccuucca

SEQ ID NO: 421242 - RNA, 19 nt, Homo sapiens
  misc_RNA (1)...(19): siRNA sense strand
gauccgaacagugaagaug

SEQ ID NO: 421243 - RNA, 19 nt, Homo sapiens
  misc_RNA (1)...(19): siRNA sense strand
ggacaagaaugccccugau

SEQ ID NO: 421244 - RNA, 19 nt, Homo sapiens
  misc_RNA (1)...(19): siRNA sense strand
augaggagcuggccaaggu

SEQ ID NO: 421245 - RNA, 19 nt, Homo sapiens
  misc_RNA (1)...(19): siRNA sense strand
gaaugccccugaugaagau

SEQ ID NO: 421246 - RNA, 19 nt, Homo sapiens
  misc_RNA (1)...(19): siRNA sense strand
gcagggccgucaaguaccu

SEQ ID NO: 421247 - RNA, 19 nt, Homo sapiens
  misc_RNA (1)...(19): siRNA sense strand
cuucuucaguguccagaug

SEQ ID NO: 421248 - RNA, 19 nt, Homo sapiens
  misc_RNA (1)...(19): siRNA sense strand
ccgcugagaccaucaucuu

SEQ ID NO: 421249 - RNA, 19 nt, Homo sapiens
  misc_RNA (1)...(19): siRNA sense strand
cugagaccaucaucuuuua

SEQ ID NO: 421250 - RNA, 19 nt, Homo sapiens
  misc_RNA (1)...(19): siRNA sense strand
gggcucccuucuucagugu

SEQ ID NO: 421251 - RNA, 19 nt, Homo sapiens
  misc_RNA (1)...(19): siRNA sense strand
gcugagaccaucaucuuuu

SEQ ID NO: 421252 - RNA, 19 nt, Homo sapiens
  misc_RNA (1)...(19): siRNA sense strand
cagcaucaacaccaucuca

SEQ ID NO: 421253 - RNA, 19 nt, Homo sapiens
  misc_RNA (1)...(19): siRNA sense strand
uucaccaucucuaugcuuu

SEQ ID NO: 421254 - RNA, 19 nt, Homo sapiens
  misc_RNA (1)...(19): siRNA sense strand
gcauguuugccuccaccua

SEQ ID NO: 421255 - RNA, 19 nt, Homo sapiens
  misc_RNA (1)...(19): siRNA sense strand
ggacuuggagcuggcagau

SEQ ID NO: 421256 - RNA, 19 nt, Homo sapiens
  misc_RNA (1)...(19): siRNA sense strand
caagaaugccccugaugaa

SEQ ID NO: 421257 - RNA, 19 nt, Homo sapiens
  misc_RNA (1)...(19): siRNA sense strand
acagugaagaugaccuuug

SEQ ID NO: 421258 - RNA, 19 nt, Homo sapiens
  misc_RNA (1)...(19): siRNA sense strand
gagaagagcugaagaguaa

SEQ ID NO: 421259 - RNA, 19 nt, Homo sapiens
  misc_RNA (1)...(19): siRNA sense strand
ccacaucucugaucacuua

SEQ ID NO: 421260 - RNA, 19 nt, Homo sapiens
  misc_RNA (1)...(19): siRNA sense strand
gcagagaucuucaccaaca

SEQ ID NO: 421261 - RNA, 19 nt, Homo sapiens
  misc_RNA (1)...(19): siRNA sense strand
cccaagggcuggaauguua

SEQ ID NO: 421262 - RNA, 19 nt, Homo sapiens
  misc_RNA (1)...(19): siRNA sense strand
ggaauguuaucuacaguau

SEQ ID NO: 421263 - RNA, 19 nt, Homo sapiens
  misc_RNA (1)...(19): siRNA sense strand
gaaaugacccgcaaucucu

SEQ ID NO: 421264 - RNA, 19 nt, Homo sapiens
  misc_RNA (1)...(19): siRNA sense strand
ggaaauacggcuucaucua

SEQ ID NO: 421265 - RNA, 19 nt, Homo sapiens
  misc_RNA (1)...(19): siRNA sense strand
gaaauacggcuucaucuac

SEQ ID NO: 421266 - RNA, 19 nt, Homo sapiens
  misc_RNA (1)...(19): siRNA sense strand
caaccgaacuccucuuugg

SEQ ID NO: 421267 - RNA, 19 nt, Homo sapiens
  misc_RNA (1)...(19): siRNA sense strand
ggguugcucugaagacuuu

SEQ ID NO: 421268 - RNA, 19 nt, Homo sapiens
  misc_RNA (1)...(19): siRNA sense strand
aaauggaccuccuacaaug

SEQ ID NO: 421269 - RNA, 19 nt, Homo sapiens
  misc_RNA (1)...(19): siRNA sense strand
gcaaucaagacaacaaguu

SEQ ID NO: 421270 - RNA, 19 nt, Homo sapiens
  misc_RNA (1)...(19): siRNA sense strand
aaauacaucggguguguua

SEQ ID NO: 421271 - RNA, 19 nt, Homo sapiens
  misc_RNA (1)...(19): siRNA sense strand
ggaucuggcugccucucua

SEQ ID NO: 421272 - RNA, 19 nt, Homo sapiens
  misc_RNA (1)...(19): siRNA sense strand
uuaaauggauaccagauuc

SEQ ID NO: 421273 - RNA, 19 nt, Homo sapiens
  misc_RNA (1)...(19): siRNA sense strand
ggaacaacuuaaauacauc

SEQ ID NO: 421274 - RNA, 19 nt, Homo sapiens
  misc_RNA (1)...(19): siRNA sense strand
uggcagagaucuucaccaa

SEQ ID NO: 421275 - RNA, 19 nt, Homo sapiens
  misc_RNA (1)...(19): siRNA sense strand
gcacuaaagcaaucuucaa

SEQ ID NO: 421276 - RNA, 19 nt, Homo sapiens
  misc_RNA (1)...(19): siRNA sense strand
uaaauggaccuccuacaau

SEQ ID NO: 421277 - RNA, 19 nt, Homo sapiens
  misc_RNA (1)...(19): siRNA sense strand
caagagcaaucaagacaac

SEQ ID NO: 421278 - RNA, 19 nt, Homo sapiens
  misc_RNA (1)...(19): siRNA sense strand
uacaucggguguguuauua

SEQ ID NO: 421279 - RNA, 19 nt, Homo sapiens
  misc_RNA (1)...(19): siRNA sense strand
gcagccacaucucugauca

SEQ ID NO: 421280 - RNA, 19 nt, Homo sapiens
  misc_RNA (1)...(19): siRNA sense strand
ccaacaaggaagaauuuaa

SEQ ID NO: 421281 - RNA, 19 nt, Homo sapiens
  misc_RNA (1)...(19): siRNA sense strand
gcugaagaguaaggguuua

SEQ ID NO: 421282 - RNA, 19 nt, Homo sapiens
  misc_RNA (1)...(19): siRNA sense strand
cgagaagagcugaagagua

SEQ ID NO: 421283 - RNA, 19 nt, Homo sapiens
  misc_RNA (1)...(19): siRNA sense strand
ggaaaugacccgcaaucuc

SEQ ID NO: 421284 - RNA, 19 nt, Homo sapiens
  misc_RNA (1)...(19): siRNA sense strand
gaucuucaccaacaaggaa

SEQ ID NO: 421285 - RNA, 19 nt, Homo sapiens
  misc_RNA (1)...(19): siRNA sense strand
gagagcggcuggacaugca

SEQ ID NO: 421286 - RNA, 19 nt, Homo sapiens
  misc_RNA (1)...(19): siRNA sense strand
gaacauucgcgccaagauc

SEQ ID NO: 421287 - RNA, 19 nt, Homo sapiens
  misc_RNA (1)...(19): siRNA sense strand
cuaaauggaccuccuacaa

SEQ ID NO: 421288 - RNA, 19 nt, Homo sapiens
  misc_RNA (1)...(19): siRNA sense strand
ggacaugcaggcacuaaag

SEQ ID NO: 421289 - RNA, 19 nt, Homo sapiens
  misc_RNA (1)...(19): siRNA sense strand
ggagacccuucgacugaau

SEQ ID NO: 421290 - RNA, 19 nt, Homo sapiens
  misc_RNA (1)...(19): siRNA sense strand
uuaaauacaucgggugugu

SEQ ID NO: 421291 - RNA, 19 nt, Homo sapiens
  misc_RNA (1)...(19): siRNA sense strand
gggcuggaauguuaucuac

SEQ ID NO: 421292 - RNA, 19 nt, Homo sapiens
  misc_RNA (1)...(19): siRNA sense strand
aaauacggcuucaucuaca

SEQ ID NO: 421293 - RNA, 19 nt, Homo sapiens
  misc_RNA (1)...(19): siRNA sense strand
cugcaagauucacccauuu

SEQ ID NO: 421294 - RNA, 19 nt, Homo sapiens
  misc_RNA (1)...(19): siRNA sense strand
caccaacaaggaagaauuu

SEQ ID NO: 421295 - RNA, 19 nt, Homo sapiens
  misc_RNA (1)...(19): siRNA sense strand
gcagaugaagcgcaggaaa

SEQ ID NO: 421296 - RNA, 19 nt, Homo sapiens
  misc_RNA (1)...(19): siRNA sense strand
gcuggaauguuaucuacag

SEQ ID NO: 421297 - RNA, 19 nt, Homo sapiens
  misc_RNA (1)...(19): siRNA sense strand
gcauccagguucagcuuca

SEQ ID NO: 421298 - RNA, 19 nt, Homo sapiens
  misc_RNA (1)...(19): siRNA sense strand
gcaagagcaaucaagacaa

SEQ ID NO: 421299 - RNA, 19 nt, Homo sapiens
  misc_RNA (1)...(19): siRNA sense strand
uaggagcuguguaggcaaa

SEQ ID NO: 421300 - RNA, 19 nt, Homo sapiens
  misc_RNA (1)...(19): siRNA sense strand
agaugaagcgcaggaaaua

SEQ ID NO: 421301 - RNA, 19 nt, Homo sapiens
  misc_RNA (1)...(19): siRNA sense strand
caaguuggacauggaaauu

SEQ ID NO: 421302 - RNA, 19 nt, Homo sapiens
  misc_RNA (1)...(19): siRNA sense strand
ccugcaagauucacccauu

SEQ ID NO: 421303 - RNA, 19 nt, Homo sapiens
  misc_RNA (1)...(19): siRNA sense strand
caucggguguguuauuaag

SEQ ID NO: 421304 - RNA, 19 nt, Homo sapiens
  misc_RNA (1)...(19): siRNA sense strand
cuacaagacgcaucuguuc

SEQ ID NO: 421305 - RNA, 19 nt, Homo sapiens
  misc_RNA (1)...(19): siRNA sense strand
ggacaaucucccugcaaga

SEQ ID NO: 421306 - RNA, 19 nt, Homo sapiens
  misc_RNA (1)...(19): siRNA sense strand
gaucuggcugccucucuaa

SEQ ID NO: 421307 - RNA, 19 nt, Homo sapiens
  misc_RNA (1)...(19): siRNA sense strand
gcacaagcagcgcaagaag

SEQ ID NO: 421308 - RNA, 19 nt, Homo sapiens
  misc_RNA (1)...(19): siRNA sense strand
guggaggccuucgaggaaa

SEQ ID NO: 421309 - RNA, 19 nt, Homo sapiens
  misc_RNA (1)...(19): siRNA sense strand
aaaccagucccaccgugua

SEQ ID NO: 421310 - RNA, 19 nt, Homo sapiens
  misc_RNA (1)...(19): siRNA sense strand
acuggcagcuucuaaaugg

SEQ ID NO: 421311 - RNA, 19 nt, Homo sapiens
  misc_RNA (1)...(19): siRNA sense strand
gaggaaaugacccgcaauc

SEQ ID NO: 421312 - RNA, 19 nt, Homo sapiens
  misc_RNA (1)...(19): siRNA sense strand
ggagcuguguaggcaaaga

SEQ ID NO: 421313 - RNA, 19 nt, Homo sapiens
  misc_RNA (1)...(19): siRNA sense strand
ucaccaacaaggaagaauu

SEQ ID NO: 421314 - RNA, 19 nt, Homo sapiens
  misc_RNA (1)...(19): siRNA sense strand
cagaugaagcgcaggaaau

SEQ ID NO: 421315 - RNA, 19 nt, Homo sapiens
  misc_RNA (1)...(19): siRNA sense strand
auacaucggguguguuauu

SEQ ID NO: 421316 - RNA, 19 nt, Homo sapiens
  misc_RNA (1)...(19): siRNA sense strand
gcgcaucgagcagaacauu

SEQ ID NO: 421317 - RNA, 19 nt, Homo sapiens
  misc_RNA (1)...(19): siRNA sense strand
gaagagcugaagaguaagg

SEQ ID NO: 421318 - RNA, 19 nt, Homo sapiens
  misc_RNA (1)...(19): siRNA sense strand
guucagcuucauuccauuu

SEQ ID NO: 421319 - RNA, 19 nt, Homo sapiens
  misc_RNA (1)...(19): siRNA sense strand
aagacgcgcugcagcuguu

SEQ ID NO: 421320 - RNA, 19 nt, Homo sapiens
  misc_RNA (1)...(19): siRNA sense strand
caggaaauacggcuucauc

SEQ ID NO: 421321 - RNA, 19 nt, Homo sapiens
  misc_RNA (1)...(19): siRNA sense strand
gcacgacuccucgcacaag

SEQ ID NO: 421322 - RNA, 19 nt, Homo sapiens
  misc_RNA (1)...(19): siRNA sense strand
cagagaucuucaccaacaa

SEQ ID NO: 421323 - RNA, 19 nt, Homo sapiens
  misc_RNA (1)...(19): siRNA sense strand
gagcuggccaggcauugug

SEQ ID NO: 421324 - RNA, 19 nt, Homo sapiens
  misc_RNA (1)...(19): siRNA sense strand
gagcuguguaggcaaagaa

SEQ ID NO: 421325 - RNA, 19 nt, Homo sapiens
  misc_RNA (1)...(19): siRNA sense strand
ggugaagcgccucauguuc

SEQ ID NO: 421326 - RNA, 19 nt, Homo sapiens
  misc_RNA (1)...(19): siRNA sense strand
ggacauggaaauuuuggaa

SEQ ID NO: 421327 - RNA, 19 nt, Homo sapiens
  misc_RNA (1)...(19): siRNA sense strand
ugacuggcagcuucuaaau

SEQ ID NO: 421328 - RNA, 19 nt, Homo sapiens
  misc_RNA (1)...(19): siRNA sense strand
ucggguguguuauuaagga

SEQ ID NO: 421329 - RNA, 19 nt, Homo sapiens
  misc_RNA (1)...(19): siRNA sense strand
ccagaaagugcgagaagag

SEQ ID NO: 421330 - RNA, 19 nt, Homo sapiens
  misc_RNA (1)...(19): siRNA sense strand
gguuucggguugcucugaa

SEQ ID NO: 421331 - RNA, 19 nt, Homo sapiens
  misc_RNA (1)...(19): siRNA sense strand
cuguguaggcaaagaauuu

SEQ ID NO: 421332 - RNA, 19 nt, Homo sapiens
  misc_RNA (1)...(19): siRNA sense strand
gugacuggcagcuucuaaa

SEQ ID NO: 421333 - RNA, 19 nt, Homo sapiens
  misc_RNA (1)...(19): siRNA sense strand
gcaucgagcagaacauucg

SEQ ID NO: 421334 - RNA, 19 nt, Homo sapiens
  misc_RNA (1)...(19): siRNA sense strand
acaagcagcgcaagaaggu

SEQ ID NO: 421335 - RNA, 19 nt, Homo sapiens
  misc_RNA (1)...(19): siRNA sense strand
gagcaaucaagacaacaag

SEQ ID NO: 421336 - RNA, 19 nt, Homo sapiens
  misc_RNA (1)...(19): siRNA sense strand
uggaauguuaucuacagua

SEQ ID NO: 421337 - RNA, 19 nt, Homo sapiens
  misc_RNA (1)...(19): siRNA sense strand
ucacuuaccuggggcucua

SEQ ID NO: 421338 - RNA, 19 nt, Homo sapiens
  misc_RNA (1)...(19): siRNA sense strand
gacuggcagcuucuaaaug

SEQ ID NO: 421339 - RNA, 19 nt, Homo sapiens
  misc_RNA (1)...(19): siRNA sense strand
aauacggcuucaucuacaa

SEQ ID NO: 421340 - RNA, 19 nt, Homo sapiens
  misc_RNA (1)...(19): siRNA sense strand
gagaagagcugaagaguaa

SEQ ID NO: 421341 - RNA, 19 nt, Homo sapiens
  misc_RNA (1)...(19): siRNA sense strand
ccacaucucugaucacuua

SEQ ID NO: 421342 - RNA, 19 nt, Homo sapiens
  misc_RNA (1)...(19): siRNA sense strand
gcagagaucuucaccaaca

SEQ ID NO: 421343 - RNA, 19 nt, Homo sapiens
  misc_RNA (1)...(19): siRNA sense strand
cccaagggcuggaauguua

SEQ ID NO: 421344 - RNA, 19 nt, Homo sapiens
  misc_RNA (1)...(19): siRNA sense strand
ggaauguuaucuacaguau

SEQ ID NO: 421345 - RNA, 19 nt, Homo sapiens
  misc_RNA (1)...(19): siRNA sense strand
gaaaugacccgcaaucucu

SEQ ID NO: 421346 - RNA, 19 nt, Homo sapiens
  misc_RNA (1)...(19): siRNA sense strand
ggaaauacggcuucaucua

SEQ ID NO: 421347 - RNA, 19 nt, Homo sapiens
  misc_RNA (1)...(19): siRNA sense strand
gaaauacggcuucaucuac

SEQ ID NO: 421348 - RNA, 19 nt, Homo sapiens
  misc_RNA (1)...(19): siRNA sense strand
caaccgaacuccucuuugg

SEQ ID NO: 421349 - RNA, 19 nt, Homo sapiens
  misc_RNA (1)...(19): siRNA sense strand
ggguugcucugaagacuuu

SEQ ID NO: 421350 - RNA, 19 nt, Homo sapiens
  misc_RNA (1)...(19): siRNA sense strand
aaauggaccuccuacaaug

SEQ ID NO: 421351 - RNA, 19 nt, Homo sapiens
  misc_RNA (1)...(19): siRNA sense strand
gcaaucaagacaacaaguu

SEQ ID NO: 421352 - RNA, 19 nt, Homo sapiens
  misc_RNA (1)...(19): siRNA sense strand
aaauacaucggguguguua

SEQ ID NO: 421353 - RNA, 19 nt, Homo sapiens
  misc_RNA (1)...(19): siRNA sense strand
ggaucuggcugccucucua

SEQ ID NO: 421354 - RNA, 19 nt, Homo sapiens
  misc_RNA (1)...(19): siRNA sense strand
uuaaauggauaccagauuc

SEQ ID NO: 421355 - RNA, 19 nt, Homo sapiens
  misc_RNA (1)...(19): siRNA sense strand
ggaacaacuuaaauacauc

SEQ ID NO: 421356 - RNA, 19 nt, Homo sapiens
  misc_RNA (1)...(19): siRNA sense strand
uggcagagaucuucaccaa

SEQ ID NO: 421357 - RNA, 19 nt, Homo sapiens
  misc_RNA (1)...(19): siRNA sense strand
gcacuaaagcaaucuucaa

SEQ ID NO: 421358 - RNA, 19 nt, Homo sapiens
  misc_RNA (1)...(19): siRNA sense strand
uaaauggaccuccuacaau

SEQ ID NO: 421359 - RNA, 19 nt, Homo sapiens
  misc_RNA (1)...(19): siRNA sense strand
caagagcaaucaagacaac

SEQ ID NO: 421360 - RNA, 19 nt, Homo sapiens
  misc_RNA (1)...(19): siRNA sense strand
uacaucggguguguuauua

SEQ ID NO: 421361 - RNA, 19 nt, Homo sapiens
  misc_RNA (1)...(19): siRNA sense strand
gcagccacaucucugauca

SEQ ID NO: 421362 - RNA, 19 nt, Homo sapiens
  misc_RNA (1)...(19): siRNA sense strand
ccaacaaggaagaauuuaa

SEQ ID NO: 421363 - RNA, 19 nt, Homo sapiens
  misc_RNA (1)...(19): siRNA sense strand
gcugaagaguaaggguuua

SEQ ID NO: 421364 - RNA, 19 nt, Homo sapiens
  misc_RNA (1)...(19): siRNA sense strand
cgagaagagcugaagagua

SEQ ID NO: 421365 - RNA, 19 nt, Homo sapiens
  misc_RNA (1)...(19): siRNA sense strand
ggaaaugacccgcaaucuc

SEQ ID NO: 421366 - RNA, 19 nt, Homo sapiens
  misc_RNA (1)...(19): siRNA sense strand
gaucuucaccaacaaggaa

SEQ ID NO: 421367 - RNA, 19 nt, Homo sapiens
  misc_RNA (1)...(19): siRNA sense strand
gagagcggcuggacaugca

SEQ ID NO: 421368 - RNA, 19 nt, Homo sapiens
  misc_RNA (1)...(19): siRNA sense strand
gaacauucgcgccaagauc

SEQ ID NO: 421369 - RNA, 19 nt, Homo sapiens
  misc_RNA (1)...(19): siRNA sense strand
cuaaauggaccuccuacaa

SEQ ID NO: 421370 - RNA, 19 nt, Homo sapiens
  misc_RNA (1)...(19): siRNA sense strand
ggacaugcaggcacuaaag

SEQ ID NO: 421371 - RNA, 19 nt, Homo sapiens
  misc_RNA (1)...(19): siRNA sense strand
ggagacccuucgacugaau

SEQ ID NO: 421372 - RNA, 19 nt, Homo sapiens
  misc_RNA (1)...(19): siRNA sense strand
uuaaauacaucgggugugu

SEQ ID NO: 421373 - RNA, 19 nt, Homo sapiens
  misc_RNA (1)...(19): siRNA sense strand
gggcuggaauguuaucuac

SEQ ID NO: 421374 - RNA, 19 nt, Homo sapiens
  misc_RNA (1)...(19): siRNA sense strand
aaauacggcuucaucuaca

SEQ ID NO: 421375 - RNA, 19 nt, Homo sapiens
  misc_RNA (1)...(19): siRNA sense strand
cugcaagauucacccauuu

SEQ ID NO: 421376 - RNA, 19 nt, Homo sapiens
  misc_RNA (1)...(19): siRNA sense strand
caccaacaaggaagaauuu

SEQ ID NO: 421377 - RNA, 19 nt, Homo sapiens
  misc_RNA (1)...(19): siRNA sense strand
gcuggaauguuaucuacag

SEQ ID NO: 421378 - RNA, 19 nt, Homo sapiens
  misc_RNA (1)...(19): siRNA sense strand
gcauccagguucagcuuca

SEQ ID NO: 421379 - RNA, 19 nt, Homo sapiens
  misc_RNA (1)...(19): siRNA sense strand
gcaagagcaaucaagacaa

SEQ ID NO: 421380 - RNA, 19 nt, Homo sapiens
  misc_RNA (1)...(19): siRNA sense strand
uaggagcuguguaggcaaa

SEQ ID NO: 421381 - RNA, 19 nt, Homo sapiens
  misc_RNA (1)...(19): siRNA sense strand
caaguuggacauggaaauu

SEQ ID NO: 421382 - RNA, 19 nt, Homo sapiens
  misc_RNA (1)...(19): siRNA sense strand
ccugcaagauucacccauu

SEQ ID NO: 421383 - RNA, 19 nt, Homo sapiens
  misc_RNA (1)...(19): siRNA sense strand
caucggguguguuauuaag

SEQ ID NO: 421384 - RNA, 19 nt, Homo sapiens
  misc_RNA (1)...(19): siRNA sense strand
cuacaagacgcaucuguuc

SEQ ID NO: 421385 - RNA, 19 nt, Homo sapiens
  misc_RNA (1)...(19): siRNA sense strand
ggacaaucucccugcaaga

SEQ ID NO: 421386 - RNA, 19 nt, Homo sapiens
  misc_RNA (1)...(19): siRNA sense strand
gcacaagcagcgcaagaag

SEQ ID NO: 421387 - RNA, 19 nt, Homo sapiens
  misc_RNA (1)...(19): siRNA sense strand
gaucuggcugccucucuaa

SEQ ID NO: 421388 - RNA, 19 nt, Homo sapiens
  misc_RNA (1)...(19): siRNA sense strand
guggaggccuucgaggaaa

SEQ ID NO: 421389 - RNA, 19 nt, Homo sapiens
  misc_RNA (1)...(19): siRNA sense strand
aaaccagucccaccgugua

SEQ ID NO: 421390 - RNA, 19 nt, Homo sapiens
  misc_RNA (1)...(19): siRNA sense strand
acuggcagcuucuaaaugg

SEQ ID NO: 421391 - RNA, 19 nt, Homo sapiens
  misc_RNA (1)...(19): siRNA sense strand
gaggaaaugacccgcaauc

SEQ ID NO: 421392 - RNA, 19 nt, Homo sapiens
  misc_RNA (1)...(19): siRNA sense strand
ggagcuguguaggcaaaga

SEQ ID NO: 421393 - RNA, 19 nt, Homo sapiens
  misc_RNA (1)...(19): siRNA sense strand
ucaccaacaaggaagaauu

SEQ ID NO: 421394 - RNA, 19 nt, Homo sapiens
  misc_RNA (1)...(19): siRNA sense strand
auacaucggguguguuauu

SEQ ID NO: 421395 - RNA, 19 nt, Homo sapiens
  misc_RNA (1)...(19): siRNA sense strand
gcgcaucgagcagaacauu

SEQ ID NO: 421396 - RNA, 19 nt, Homo sapiens
  misc_RNA (1)...(19): siRNA sense strand
gaagagcugaagaguaagg

SEQ ID NO: 421397 - RNA, 19 nt, Homo sapiens
  misc_RNA (1)...(19): siRNA sense strand
guucagcuucauuccauuu

SEQ ID NO: 421398 - RNA, 19 nt, Homo sapiens
  misc_RNA (1)...(19): siRNA sense strand
aagacgcgcugcagcuguu

SEQ ID NO: 421399 - RNA, 19 nt, Homo sapiens
  misc_RNA (1)...(19): siRNA sense strand
gcacgacuccucgcacaag

SEQ ID NO: 421400 - RNA, 19 nt, Homo sapiens
  misc_RNA (1)...(19): siRNA sense strand
caggaaauacggcuucauc

SEQ ID NO: 421401 - RNA, 19 nt, Homo sapiens
  misc_RNA (1)...(19): siRNA sense strand
ggugaagcgccucauguuc

SEQ ID NO: 421402 - RNA, 19 nt, Homo sapiens
  misc_RNA (1)...(19): siRNA sense strand
gagcuggccaggcauugug

SEQ ID NO: 421403 - RNA, 19 nt, Homo sapiens
  misc_RNA (1)...(19): siRNA sense strand
gagcuguguaggcaaagaa

SEQ ID NO: 421404 - RNA, 19 nt, Homo sapiens
  misc_RNA (1)...(19): siRNA sense strand
cagagaucuucaccaacaa

SEQ ID NO: 421405 - RNA, 19 nt, Homo sapiens
  misc_RNA (1)...(19): siRNA sense strand
ggacauggaaauuuuggaa

SEQ ID NO: 421406 - RNA, 19 nt, Homo sapiens
  misc_RNA (1)...(19): siRNA sense strand
ugacuggcagcuucuaaau

SEQ ID NO: 421407 - RNA, 19 nt, Homo sapiens
  misc_RNA (1)...(19): siRNA sense strand
ucggguguguuauuaagga

SEQ ID NO: 421408 - RNA, 19 nt, Homo sapiens
  misc_RNA (1)...(19): siRNA sense strand
ccagaaagugcgagaagag

SEQ ID NO: 421409 - RNA, 19 nt, Homo sapiens
  misc_RNA (1)...(19): siRNA sense strand
gguuucggguugcucugaa

SEQ ID NO: 421410 - RNA, 19 nt, Homo sapiens
  misc_RNA (1)...(19): siRNA sense strand
cuguguaggcaaagaauuu

SEQ ID NO: 421411 - RNA, 19 nt, Homo sapiens
  misc_RNA (1)...(19): siRNA sense strand
gugacuggcagcuucuaaa

SEQ ID NO: 421412 - RNA, 19 nt, Homo sapiens
  misc_RNA (1)...(19): siRNA sense strand
gcaucgagcagaacauucg

SEQ ID NO: 421413 - RNA, 19 nt, Homo sapiens
  misc_RNA (1)...(19): siRNA sense strand
acaagcagcgcaagaaggu

SEQ ID NO: 421414 - RNA, 19 nt, Homo sapiens
  misc_RNA (1)...(19): siRNA sense strand
gagcaaucaagacaacaag

SEQ ID NO: 421415 - RNA, 19 nt, Homo sapiens
  misc_RNA (1)...(19): siRNA sense strand
uggaauguuaucuacagua

SEQ ID NO: 421416 - RNA, 19 nt, Homo sapiens
  misc_RNA (1)...(19): siRNA sense strand
aauacggcuucaucuacaa

SEQ ID NO: 421417 - RNA, 19 nt, Homo sapiens
  misc_RNA (1)...(19): siRNA sense strand
gacuggcagcuucuaaaug

SEQ ID NO: 421418 - RNA, 19 nt, Homo sapiens
  misc_RNA (1)...(19): siRNA sense strand
ucacuuaccuggggcucua

SEQ ID NO: 421419 - RNA, 19 nt, Homo sapiens
  misc_RNA (1)...(19): siRNA sense strand
guacaucgaugccgugaag

SEQ ID NO: 421420 - RNA, 19 nt, Homo sapiens
  misc_RNA (1)...(19): siRNA sense strand
ucacggcucuguugaaugu

SEQ ID NO: 421421 - RNA, 19 nt, Homo sapiens
  misc_RNA (1)...(19): siRNA sense strand
gaaggacacuaucaguaca

SEQ ID NO: 421422 - RNA, 19 nt, Homo sapiens
  misc_RNA (1)...(19): siRNA sense strand
gacaucagcuccugguuca

SEQ ID NO: 421423 - RNA, 19 nt, Homo sapiens
  misc_RNA (1)...(19): siRNA sense strand
ggaggaggccuucgaguuc

SEQ ID NO: 421424 - RNA, 19 nt, Homo sapiens
  misc_RNA (1)...(19): siRNA sense strand
ggacugcccaaaccacuuu

SEQ ID NO: 421425 - RNA, 19 nt, Homo sapiens
  misc_RNA (1)...(19): siRNA sense strand
gcaguucgucuucagcuuu

SEQ ID NO: 421426 - RNA, 19 nt, Homo sapiens
  misc_RNA (1)...(19): siRNA sense strand
gcaucccaguggaagauaa

SEQ ID NO: 421427 - RNA, 19 nt, Homo sapiens
  misc_RNA (1)...(19): siRNA sense strand
caucacggcucuguugaau

SEQ ID NO: 421428 - RNA, 19 nt, Homo sapiens
  misc_RNA (1)...(19): siRNA sense strand
gggcaucacggcucuguug

SEQ ID NO: 421429 - RNA, 19 nt, Homo sapiens
  misc_RNA (1)...(19): siRNA sense strand
uggccuaccugaugaugaa

SEQ ID NO: 421430 - RNA, 19 nt, Homo sapiens
  misc_RNA (1)...(19): siRNA sense strand
ccaccucucccagcuguua

SEQ ID NO: 421431 - RNA, 19 nt, Homo sapiens
  misc_RNA (1)...(19): siRNA sense strand
caucaucucgcccaacuuc

SEQ ID NO: 421432 - RNA, 19 nt, Homo sapiens
  misc_RNA (1)...(19): siRNA sense strand
ugaaggacacuaucaguac

SEQ ID NO: 421433 - RNA, 19 nt, Homo sapiens
  misc_RNA (1)...(19): siRNA sense strand
ccacuuugaaggacacuau

SEQ ID NO: 421434 - RNA, 19 nt, Homo sapiens
  misc_RNA (1)...(19): siRNA sense strand
gcaucacggcucuguugaa

SEQ ID NO: 421435 - RNA, 19 nt, Homo sapiens
  misc_RNA (1)...(19): siRNA sense strand
caucagcuccugguucaug

SEQ ID NO: 421436 - RNA, 19 nt, Homo sapiens
  misc_RNA (1)...(19): siRNA sense strand
uugaaggacacuaucagua

SEQ ID NO: 421437 - RNA, 19 nt, Homo sapiens
  misc_RNA (1)...(19): siRNA sense strand
caagugcaucccaguggaa

SEQ ID NO: 421438 - RNA, 19 nt, Homo sapiens
  misc_RNA (1)...(19): siRNA sense strand
ccuaccugaugaugaagaa

SEQ ID NO: 421439 - RNA, 19 nt, Homo sapiens
  misc_RNA (1)...(19): siRNA sense strand
uggaggaggccuucgaguu

SEQ ID NO: 421440 - RNA, 19 nt, Homo sapiens
  misc_RNA (1)...(19): siRNA sense strand
ugccuggccuaccugauga

SEQ ID NO: 421441 - RNA, 19 nt, Homo sapiens
  misc_RNA (1)...(19): siRNA sense strand
caguucgucuucagcuuuc

SEQ ID NO: 421442 - RNA, 19 nt, Homo sapiens
  misc_RNA (1)...(19): siRNA sense strand
uggaagccauagaguacau

SEQ ID NO: 421443 - RNA, 19 nt, Homo sapiens
  misc_RNA (1)...(19): siRNA sense strand
ucgcccaacuucagcuuca

SEQ ID NO: 421444 - RNA, 19 nt, Homo sapiens
  misc_RNA (1)...(19): siRNA sense strand
guacaucgaugccgugaag

SEQ ID NO: 421445 - RNA, 19 nt, Homo sapiens
  misc_RNA (1)...(19): siRNA sense strand
ucacggcucuguugaaugu

SEQ ID NO: 421446 - RNA, 19 nt, Homo sapiens
  misc_RNA (1)...(19): siRNA sense strand
gaaggacacuaucaguaca

SEQ ID NO: 421447 - RNA, 19 nt, Homo sapiens
  misc_RNA (1)...(19): siRNA sense strand
gacaucagcuccugguuca

SEQ ID NO: 421448 - RNA, 19 nt, Homo sapiens
  misc_RNA (1)...(19): siRNA sense strand
ggaggaggccuucgaguuc

SEQ ID NO: 421449 - RNA, 19 nt, Homo sapiens
  misc_RNA (1)...(19): siRNA sense strand
ggacugcccaaaccacuuu

SEQ ID NO: 421450 - RNA, 19 nt, Homo sapiens
  misc_RNA (1)...(19): siRNA sense strand
gcaguucgucuucagcuuu

SEQ ID NO: 421451 - RNA, 19 nt, Homo sapiens
  misc_RNA (1)...(19): siRNA sense strand
gcaucccaguggaagauaa

SEQ ID NO: 421452 - RNA, 19 nt, Homo sapiens
  misc_RNA (1)...(19): siRNA sense strand
caucacggcucuguugaau

SEQ ID NO: 421453 - RNA, 19 nt, Homo sapiens
  misc_RNA (1)...(19): siRNA sense strand
gggcaucacggcucuguug

SEQ ID NO: 421454 - RNA, 19 nt, Homo sapiens
  misc_RNA (1)...(19): siRNA sense strand
uggccuaccugaugaugaa

SEQ ID NO: 421455 - RNA, 19 nt, Homo sapiens
  misc_RNA (1)...(19): siRNA sense strand
ccaccucucccagcuguua

SEQ ID NO: 421456 - RNA, 19 nt, Homo sapiens
  misc_RNA (1)...(19): siRNA sense strand
caucaucucgcccaacuuc

SEQ ID NO: 421457 - RNA, 19 nt, Homo sapiens
  misc_RNA (1)...(19): siRNA sense strand
ugaaggacacuaucaguac

SEQ ID NO: 421458 - RNA, 19 nt, Homo sapiens
  misc_RNA (1)...(19): siRNA sense strand
ccacuuugaaggacacuau

SEQ ID NO: 421459 - RNA, 19 nt, Homo sapiens
  misc_RNA (1)...(19): siRNA sense strand
gcaucacggcucuguugaa

SEQ ID NO: 421460 - RNA, 19 nt, Homo sapiens
  misc_RNA (1)...(19): siRNA sense strand
caucagcuccugguucaug

SEQ ID NO: 421461 - RNA, 19 nt, Homo sapiens
  misc_RNA (1)...(19): siRNA sense strand
uugaaggacacuaucagua

SEQ ID NO: 421462 - RNA, 19 nt, Homo sapiens
  misc_RNA (1)...(19): siRNA sense strand
caagugcaucccaguggaa

SEQ ID NO: 421463 - RNA, 19 nt, Homo sapiens
  misc_RNA (1)...(19): siRNA sense strand
ccuaccugaugaugaagaa

SEQ ID NO: 421464 - RNA, 19 nt, Homo sapiens
  misc_RNA (1)...(19): siRNA sense strand
uggaggaggccuucgaguu

SEQ ID NO: 421465 - RNA, 19 nt, Homo sapiens
  misc_RNA (1)...(19): siRNA sense strand
ugccuggccuaccugauga

SEQ ID NO: 421466 - RNA, 19 nt, Homo sapiens
  misc_RNA (1)...(19): siRNA sense strand
caguucgucuucagcuuuc

SEQ ID NO: 421467 - RNA, 19 nt, Homo sapiens
  misc_RNA (1)...(19): siRNA sense strand
uggaagccauagaguacau

SEQ ID NO: 421468 - RNA, 19 nt, Homo sapiens
  misc_RNA (1)...(19): siRNA sense strand
ucgcccaacuucagcuuca

SEQ ID NO: 421469 - RNA, 19 nt, Homo sapiens
  misc_RNA (1)...(19): siRNA sense strand
gaagcucucuugacuauga

SEQ ID NO: 421470 - RNA, 19 nt, Homo sapiens
  misc_RNA (1)...(19): siRNA sense strand
gaagauaaacccaaagaaa

SEQ ID NO: 421471 - RNA, 19 nt, Homo sapiens
  misc_RNA (1)...(19): siRNA sense strand
uaaagugucugagcaagua

SEQ ID NO: 421472 - RNA, 19 nt, Homo sapiens
  misc_RNA (1)...(19): siRNA sense strand
gaaggacauuaucaaguuu

SEQ ID NO: 421473 - RNA, 19 nt, Homo sapiens
  misc_RNA (1)...(19): siRNA sense strand
gaaguggaauuaguggaua

SEQ ID NO: 421474 - RNA, 19 nt, Homo sapiens
  misc_RNA (1)...(19): siRNA sense strand
agaaggacauuaucaaguu

SEQ ID NO: 421475 - RNA, 19 nt, Homo sapiens
  misc_RNA (1)...(19): siRNA sense strand
ccaaagaaaccaagucuga

SEQ ID NO: 421476 - RNA, 19 nt, Homo sapiens
  misc_RNA (1)...(19): siRNA sense strand
ggaugaagcucucuugacu

SEQ ID NO: 421477 - RNA, 19 nt, Homo sapiens
  misc_RNA (1)...(19): siRNA sense strand
gugagcagcugcccaagaa

SEQ ID NO: 421478 - RNA, 19 nt, Homo sapiens
  misc_RNA (1)...(19): siRNA sense strand
gaaaccaagucugaagaga

SEQ ID NO: 421479 - RNA, 19 nt, Homo sapiens
  misc_RNA (1)...(19): siRNA sense strand
guuguucacugcugguaua

SEQ ID NO: 421480 - RNA, 19 nt, Homo sapiens
  misc_RNA (1)...(19): siRNA sense strand
ucaaacaagugcaaagaag

SEQ ID NO: 421481 - RNA, 19 nt, Homo sapiens
  misc_RNA (1)...(19): siRNA sense strand
agaaugggcuuacggaaag

SEQ ID NO: 421482 - RNA, 19 nt, Homo sapiens
  misc_RNA (1)...(19): siRNA sense strand
ggaauuaguggauauugau

SEQ ID NO: 421483 - RNA, 19 nt, Homo sapiens
  misc_RNA (1)...(19): siRNA sense strand
aaacaagugcaaagaagaa

SEQ ID NO: 421484 - RNA, 19 nt, Homo sapiens
  misc_RNA (1)...(19): siRNA sense strand
ccaagaaggacauuaucaa

SEQ ID NO: 421485 - RNA, 19 nt, Homo sapiens
  misc_RNA (1)...(19): siRNA sense strand
cagaaugggcuuacggaaa

SEQ ID NO: 421486 - RNA, 19 nt, Homo sapiens
  misc_RNA (1)...(19): siRNA sense strand
caaacaagugcaaagaaga

SEQ ID NO: 421487 - RNA, 19 nt, Homo sapiens
  misc_RNA (1)...(19): siRNA sense strand
ucaaguuucugcaggaaca

SEQ ID NO: 421488 - RNA, 19 nt, Homo sapiens
  misc_RNA (1)...(19): siRNA sense strand
uggaauuaguggauauuga

SEQ ID NO: 421489 - RNA, 19 nt, Homo sapiens
  misc_RNA (1)...(19): siRNA sense strand
ccacuugguuacagccuau

SEQ ID NO: 421490 - RNA, 19 nt, Homo sapiens
  misc_RNA (1)...(19): siRNA sense strand
caaagaaaccaagucugaa

SEQ ID NO: 421491 - RNA, 19 nt, Homo sapiens
  misc_RNA (1)...(19): siRNA sense strand
augaagcucucuugacuau

SEQ ID NO: 421492 - RNA, 19 nt, Homo sapiens
  misc_RNA (1)...(19): siRNA sense strand
caagugcaaagaagaagaa

SEQ ID NO: 421493 - RNA, 19 nt, Homo sapiens
  misc_RNA (1)...(19): siRNA sense strand
gccaagccuuuaaguuuua

SEQ ID NO: 421494 - RNA, 19 nt, Homo sapiens
  misc_RNA (1)...(19): siRNA sense strand
cugaagagacccuggauga

SEQ ID NO: 421495 - RNA, 19 nt, Homo sapiens
  misc_RNA (1)...(19): siRNA sense strand
gaugaagcucucuugacua

SEQ ID NO: 421496 - RNA, 19 nt, Homo sapiens
  misc_RNA (1)...(19): siRNA sense strand
caagaaggacauuaucaag

SEQ ID NO: 421497 - RNA, 19 nt, Homo sapiens
  misc_RNA (1)...(19): siRNA sense strand
ggaguaggcaaaguuauca

SEQ ID NO: 421498 - RNA, 19 nt, Homo sapiens
  misc_RNA (1)...(19): siRNA sense strand
ccaagacagcuaacaagga

SEQ ID NO: 421499 - RNA, 19 nt, Homo sapiens
  misc_RNA (1)...(19): siRNA sense strand
gacuaugaguaaaggagaa

SEQ ID NO: 421500 - RNA, 19 nt, Homo sapiens
  misc_RNA (1)...(19): siRNA sense strand
ggucggaguaggcaaaguu

SEQ ID NO: 421501 - RNA, 19 nt, Homo sapiens
  misc_RNA (1)...(19): siRNA sense strand
aaaaccaacuuucccaaaa

SEQ ID NO: 421502 - RNA, 19 nt, Homo sapiens
  misc_RNA (1)...(19): siRNA sense strand
ggagauugaaccagaaugg

SEQ ID NO: 421503 - RNA, 19 nt, Homo sapiens
  misc_RNA (1)...(19): siRNA sense strand
augugaagcuuaaugaaga

SEQ ID NO: 421504 - RNA, 19 nt, Homo sapiens
  misc_RNA (1)...(19): siRNA sense strand
uggagcagcugcgcaguga

SEQ ID NO: 421505 - RNA, 19 nt, Homo sapiens
  misc_RNA (1)...(19): siRNA sense strand
ggaugaggguccaccaaaa

SEQ ID NO: 421506 - RNA, 19 nt, Homo sapiens
  misc_RNA (1)...(19): siRNA sense strand
gaaugggcuuacggaaaga

SEQ ID NO: 421507 - RNA, 19 nt, Homo sapiens
  misc_RNA (1)...(19): siRNA sense strand
aaagggagauguuguucac

SEQ ID NO: 421508 - RNA, 19 nt, Homo sapiens
  misc_RNA (1)...(19): siRNA sense strand
augccaagccuuuaaguuu

SEQ ID NO: 421509 - RNA, 19 nt, Homo sapiens
  misc_RNA (1)...(19): siRNA sense strand
cuacaagaugggacuguuu

SEQ ID NO: 421510 - RNA, 19 nt, Homo sapiens
  misc_RNA (1)...(19): siRNA sense strand
guucacugcugguauacag

SEQ ID NO: 421511 - RNA, 19 nt, Homo sapiens
  misc_RNA (1)...(19): siRNA sense strand
uaucaaguuucugcaggaa

SEQ ID NO: 421512 - RNA, 19 nt, Homo sapiens
  misc_RNA (1)...(19): siRNA sense strand
uaaggucggaguaggcaaa

SEQ ID NO: 421513 - RNA, 19 nt, Homo sapiens
  misc_RNA (1)...(19): siRNA sense strand
guaaagugucugagcaagu

SEQ ID NO: 421514 - RNA, 19 nt, Homo sapiens
  misc_RNA (1)...(19): siRNA sense strand
aggcucgacuggagauuga

SEQ ID NO: 421515 - RNA, 19 nt, Homo sapiens
  misc_RNA (1)...(19): siRNA sense strand
aaagaaaccaagucugaag

SEQ ID NO: 421516 - RNA, 19 nt, Homo sapiens
  misc_RNA (1)...(19): siRNA sense strand
guauaaguaaagugucuga

SEQ ID NO: 421517 - RNA, 19 nt, Homo sapiens
  misc_RNA (1)...(19): siRNA sense strand
acaggaacacuacaagaug

SEQ ID NO: 421518 - RNA, 19 nt, Homo sapiens
  misc_RNA (1)...(19): siRNA sense strand
aagauaaacccaaagaaac

SEQ ID NO: 421519 - RNA, 19 nt, Homo sapiens
  misc_RNA (1)...(19): siRNA sense strand
ucucuugacuaugaguaaa

SEQ ID NO: 421520 - RNA, 19 nt, Homo sapiens
  misc_RNA (1)...(19): siRNA sense strand
uaucagaggaugggaugaa

SEQ ID NO: 421521 - RNA, 19 nt, Homo sapiens
  misc_RNA (1)...(19): siRNA sense strand
guauacaggaacacuacaa

SEQ ID NO: 421522 - RNA, 19 nt, Homo sapiens
  misc_RNA (1)...(19): siRNA sense strand
gguucagauucguuucuug

SEQ ID NO: 421523 - RNA, 19 nt, Homo sapiens
  misc_RNA (1)...(19): siRNA sense strand
ugaaguggaauuaguggau

SEQ ID NO: 421524 - RNA, 19 nt, Homo sapiens
  misc_RNA (1)...(19): siRNA sense strand
gaaccagaaugggcuuacg

SEQ ID NO: 421525 - RNA, 19 nt, Homo sapiens
  misc_RNA (1)...(19): siRNA sense strand
ugaagauaaacccaaagaa

SEQ ID NO: 421526 - RNA, 19 nt, Homo sapiens
  misc_RNA (1)...(19): siRNA sense strand
uacaggaacacuacaagau

SEQ ID NO: 421527 - RNA, 19 nt, Homo sapiens
  misc_RNA (1)...(19): siRNA sense strand
aggacagccugaugccaaa

SEQ ID NO: 421528 - RNA, 19 nt, Homo sapiens
  misc_RNA (1)...(19): siRNA sense strand
acacgguucagauucguuu

SEQ ID NO: 421529 - RNA, 19 nt, Homo sapiens
  misc_RNA (1)...(19): siRNA sense strand
gaggguccaccaaaauaua

SEQ ID NO: 421530 - RNA, 19 nt, Homo sapiens
  misc_RNA (1)...(19): siRNA sense strand
aagaaggacauuaucaagu

SEQ ID NO: 421531 - RNA, 19 nt, Homo sapiens
  misc_RNA (1)...(19): siRNA sense strand
ggagauaaaaccaacuuuc

SEQ ID NO: 421532 - RNA, 19 nt, Homo sapiens
  misc_RNA (1)...(19): siRNA sense strand
ugccaagccuuuaaguuuu

SEQ ID NO: 421533 - RNA, 19 nt, Homo sapiens
  misc_RNA (1)...(19): siRNA sense strand
cagcuaacaaggaccacuu

SEQ ID NO: 421534 - RNA, 19 nt, Homo sapiens
  misc_RNA (1)...(19): siRNA sense strand
aagaaaggacagccugaug

SEQ ID NO: 421535 - RNA, 19 nt, Homo sapiens
  misc_RNA (1)...(19): siRNA sense strand
ggccaagacagcuaacaag

SEQ ID NO: 421536 - RNA, 19 nt, Homo sapiens
  misc_RNA (1)...(19): siRNA sense strand
gucggaguaggcaaaguua

SEQ ID NO: 421537 - RNA, 19 nt, Homo sapiens
  misc_RNA (1)...(19): siRNA sense strand
aagaaaccaagucugaaga

SEQ ID NO: 421538 - RNA, 19 nt, Homo sapiens
  misc_RNA (1)...(19): siRNA sense strand
cggaguaggcaaaguuauc

SEQ ID NO: 421539 - RNA, 19 nt, Homo sapiens
  misc_RNA (1)...(19): siRNA sense strand
gaaaugagcgccaccuuua

SEQ ID NO: 421540 - RNA, 19 nt, Homo sapiens
  misc_RNA (1)...(19): siRNA sense strand
gaaagcaucuugccacaga

SEQ ID NO: 421541 - RNA, 19 nt, Homo sapiens
  misc_RNA (1)...(19): siRNA sense strand
gaauucaacucugccauga

SEQ ID NO: 421542 - RNA, 19 nt, Homo sapiens
  misc_RNA (1)...(19): siRNA sense strand
ggacuuggaaucacuguuu

SEQ ID NO: 421543 - RNA, 19 nt, Homo sapiens
  misc_RNA (1)...(19): siRNA sense strand
cuacagugacucuuacuua

SEQ ID NO: 421544 - RNA, 19 nt, Homo sapiens
  misc_RNA (1)...(19): siRNA sense strand
ucucuaugcucacaucuuu

SEQ ID NO: 421545 - RNA, 19 nt, Homo sapiens
  misc_RNA (1)...(19): siRNA sense strand
gcaaucgagaggcacauua

SEQ ID NO: 421546 - RNA, 19 nt, Homo sapiens
  misc_RNA (1)...(19): siRNA sense strand
gcgacgugcuggccuauga

SEQ ID NO: 421547 - RNA, 19 nt, Homo sapiens
  misc_RNA (1)...(19): siRNA sense strand
gaaccacagugcuucuaca

SEQ ID NO: 421548 - RNA, 19 nt, Homo sapiens
  misc_RNA (1)...(19): siRNA sense strand
guuuguaucuucaucaugu

SEQ ID NO: 421549 - RNA, 19 nt, Homo sapiens
  misc_RNA (1)...(19): siRNA sense strand
gcucacaucuuuggcuaug

SEQ ID NO: 421550 - RNA, 19 nt, Homo sapiens
  misc_RNA (1)...(19): siRNA sense strand
gagaggcacauuacgguuu

SEQ ID NO: 421551 - RNA, 19 nt, Homo sapiens
  misc_RNA (1)...(19): siRNA sense strand
cuacuucuaucucauguuc

SEQ ID NO: 421552 - RNA, 19 nt, Homo sapiens
  misc_RNA (1)...(19): siRNA sense strand
gaaucgggauaccaugaug

SEQ ID NO: 421553 - RNA, 19 nt, Homo sapiens
  misc_RNA (1)...(19): siRNA sense strand
gaaauucuuccuucuccuu

SEQ ID NO: 421554 - RNA, 19 nt, Homo sapiens
  misc_RNA (1)...(19): siRNA sense strand
ugaagacuguggucauugu

SEQ ID NO: 421555 - RNA, 19 nt, Homo sapiens
  misc_RNA (1)...(19): siRNA sense strand
ggacuauggccaucguuau

SEQ ID NO: 421556 - RNA, 19 nt, Homo sapiens
  misc_RNA (1)...(19): siRNA sense strand
gaaugucucggcauaguuc

SEQ ID NO: 421557 - RNA, 19 nt, Homo sapiens
  misc_RNA (1)...(19): siRNA sense strand
uaaccgaaguggaaagcau

SEQ ID NO: 421558 - RNA, 19 nt, Homo sapiens
  misc_RNA (1)...(19): siRNA sense strand
ccagaggacuaugagaaug

SEQ ID NO: 421559 - RNA, 19 nt, Homo sapiens
  misc_RNA (1)...(19): siRNA sense strand
cgaguccauugccuucuuu

SEQ ID NO: 421560 - RNA, 19 nt, Homo sapiens
  misc_RNA (1)...(19): siRNA sense strand
uggaaucacuguuuguauc

SEQ ID NO: 421561 - RNA, 19 nt, Homo sapiens
  misc_RNA (1)...(19): siRNA sense strand
gggauaccaugaugagucu

SEQ ID NO: 421562 - RNA, 19 nt, Homo sapiens
  misc_RNA (1)...(19): siRNA sense strand
gguaauggugguucucuau

SEQ ID NO: 421563 - RNA, 19 nt, Homo sapiens
  misc_RNA (1)...(19): siRNA sense strand
cggcaucuguggccaacuu

SEQ ID NO: 421564 - RNA, 19 nt, Homo sapiens
  misc_RNA (1)...(19): siRNA sense strand
agaaaugagcgccaccuuu

SEQ ID NO: 421565 - RNA, 19 nt, Homo sapiens
  misc_RNA (1)...(19): siRNA sense strand
cugcuggacuccuggauug

SEQ ID NO: 421566 - RNA, 19 nt, Homo sapiens
  misc_RNA (1)...(19): siRNA sense strand
guggucaucuggacuaugg

SEQ ID NO: 421567 - RNA, 19 nt, Homo sapiens
  misc_RNA (1)...(19): siRNA sense strand
gaaucacuguuuguaucuu

SEQ ID NO: 421568 - RNA, 19 nt, Homo sapiens
  misc_RNA (1)...(19): siRNA sense strand
agugugggcuggaacugua

SEQ ID NO: 421569 - RNA, 19 nt, Homo sapiens
  misc_RNA (1)...(19): siRNA sense strand
ugaaugaaccacagugcuu

SEQ ID NO: 421570 - RNA, 19 nt, Homo sapiens
  misc_RNA (1)...(19): siRNA sense strand
ucugaagacuguggucauu

SEQ ID NO: 421571 - RNA, 19 nt, Homo sapiens
  misc_RNA (1)...(19): siRNA sense strand
cuacuuccaucccuguaau

SEQ ID NO: 421572 - RNA, 19 nt, Homo sapiens
  misc_RNA (1)...(19): siRNA sense strand
ggucaugguggcaaucuau

SEQ ID NO: 421573 - RNA, 19 nt, Homo sapiens
  misc_RNA (1)...(19): siRNA sense strand
gacuuggaaucacuguuug

SEQ ID NO: 421574 - RNA, 19 nt, Homo sapiens
  misc_RNA (1)...(19): siRNA sense strand
uacagugacucuuacuuag

SEQ ID NO: 421575 - RNA, 19 nt, Homo sapiens
  misc_RNA (1)...(19): siRNA sense strand
gaugggacuuggaaucacu

SEQ ID NO: 421576 - RNA, 19 nt, Homo sapiens
  misc_RNA (1)...(19): siRNA sense strand
ucaacuuggugaccuuugu

SEQ ID NO: 421577 - RNA, 19 nt, Homo sapiens
  misc_RNA (1)...(19): siRNA sense strand
ggaaucacuguuuguaucu

SEQ ID NO: 421578 - RNA, 19 nt, Homo sapiens
  misc_RNA (1)...(19): siRNA sense strand
cgaaguggaaagcaucuug

SEQ ID NO: 421579 - RNA, 19 nt, Homo sapiens
  misc_RNA (1)...(19): siRNA sense strand
caacacaggacccaauacu

SEQ ID NO: 421580 - RNA, 19 nt, Homo sapiens
  misc_RNA (1)...(19): siRNA sense strand
uuccaucccuguaauuuca

SEQ ID NO: 421581 - RNA, 19 nt, Homo sapiens
  misc_RNA (1)...(19): siRNA sense strand
ggguagugguggucauugu

SEQ ID NO: 421582 - RNA, 19 nt, Homo sapiens
  misc_RNA (1)...(19): siRNA sense strand
caucuuggcuggaguucac

SEQ ID NO: 421583 - RNA, 19 nt, Homo sapiens
  misc_RNA (1)...(19): siRNA sense strand
gacuauggccaucguuaug

SEQ ID NO: 421584 - RNA, 19 nt, Homo sapiens
  misc_RNA (1)...(19): siRNA sense strand
ggaaucgggauaccaugau

SEQ ID NO: 421585 - RNA, 19 nt, Homo sapiens
  misc_RNA (1)...(19): siRNA sense strand
uuggugaccuuugugguaa

SEQ ID NO: 421586 - RNA, 19 nt, Homo sapiens
  misc_RNA (1)...(19): siRNA sense strand
guaauggugguucucuaug

SEQ ID NO: 421587 - RNA, 19 nt, Homo sapiens
  misc_RNA (1)...(19): siRNA sense strand
gccagaggacuaugagaau

SEQ ID NO: 421588 - RNA, 19 nt, Homo sapiens
  misc_RNA (1)...(19): siRNA sense strand
uaauggugguucucuaugc

SEQ ID NO: 421589 - RNA, 19 nt, Homo sapiens
  misc_RNA (1)...(19): siRNA sense strand
ccacagaauggaacacagu

SEQ ID NO: 421590 - RNA, 19 nt, Homo sapiens
  misc_RNA (1)...(19): siRNA sense strand
gggcuggaacuguaucugu

SEQ ID NO: 421591 - RNA, 19 nt, Homo sapiens
  misc_RNA (1)...(19): siRNA sense strand
ccaacuuacuggcuauugc

SEQ ID NO: 421592 - RNA, 19 nt, Homo sapiens
  misc_RNA (1)...(19): siRNA sense strand
aaucacuguuuguaucuuc

SEQ ID NO: 421593 - RNA, 19 nt, Homo sapiens
  misc_RNA (1)...(19): siRNA sense strand
ccauugccuucuuuuauaa

SEQ ID NO: 421594 - RNA, 19 nt, Homo sapiens
  misc_RNA (1)...(19): siRNA sense strand
uccauugccuucuuuuaua

SEQ ID NO: 421595 - RNA, 19 nt, Homo sapiens
  misc_RNA (1)...(19): siRNA sense strand
gcuggccuaugagaaauuc

SEQ ID NO: 421596 - RNA, 19 nt, Homo sapiens
  misc_RNA (1)...(19): siRNA sense strand
gcuggaacuguaucuguga

SEQ ID NO: 421597 - RNA, 19 nt, Homo sapiens
  misc_RNA (1)...(19): siRNA sense strand
uggguuggccuacuucuau

SEQ ID NO: 421598 - RNA, 19 nt, Homo sapiens
  misc_RNA (1)...(19): siRNA sense strand
caacuuacuggcuauugca

SEQ ID NO: 421599 - RNA, 19 nt, Homo sapiens
  misc_RNA (1)...(19): siRNA sense strand
gauaccaugaugagucuuc

SEQ ID NO: 421600 - RNA, 19 nt, Homo sapiens
  misc_RNA (1)...(19): siRNA sense strand
uauguucgccagaggacua

SEQ ID NO: 421601 - RNA, 19 nt, Homo sapiens
  misc_RNA (1)...(19): siRNA sense strand
ggugaccuuugugguaaug

SEQ ID NO: 421602 - RNA, 19 nt, Homo sapiens
  misc_RNA (1)...(19): siRNA sense strand
cgccagaggacuaugagaa

SEQ ID NO: 421603 - RNA, 19 nt, Homo sapiens
  misc_RNA (1)...(19): siRNA sense strand
gugcuggccuaugagaaau

SEQ ID NO: 421604 - RNA, 19 nt, Homo sapiens
  misc_RNA (1)...(19): siRNA sense strand
cgugcuggccuaugagaaa

SEQ ID NO: 421605 - RNA, 19 nt, Homo sapiens
  misc_RNA (1)...(19): siRNA sense strand
ggaacacagucagcaagcu

SEQ ID NO: 421606 - RNA, 19 nt, Homo sapiens
  misc_RNA (1)...(19): siRNA sense strand
cagaggacuaugagaaugu

SEQ ID NO: 421607 - RNA, 19 nt, Homo sapiens
  misc_RNA (1)...(19): siRNA sense strand
ggugaugggacuuggaauc

SEQ ID NO: 421608 - RNA, 19 nt, Homo sapiens
  misc_RNA (1)...(19): siRNA sense strand
guucaacacaggacccaau

SEQ ID NO: 421609 - RNA, 19 nt, Homo sapiens
  misc_RNA (1)...(19): siRNA sense strand
gaagacuguggucauugug

SEQ ID NO: 421610 - RNA, 19 nt, Homo sapiens
  misc_RNA (1)...(19): siRNA sense strand
cggaaucgggauaccauga

SEQ ID NO: 421611 - RNA, 19 nt, Homo sapiens
  misc_RNA (1)...(19): siRNA sense strand
cuuacuggcuauugcaauc

SEQ ID NO: 421612 - RNA, 19 nt, Homo sapiens
  misc_RNA (1)...(19): siRNA sense strand
cccaauacucggagacuga

SEQ ID NO: 421613 - RNA, 19 nt, Homo sapiens
  misc_RNA (1)...(19): siRNA sense strand
uggacuauggccaucguua

SEQ ID NO: 421614 - RNA, 19 nt, Homo sapiens
  misc_RNA (1)...(19): siRNA sense strand
cuuggugaccuuuguggua

SEQ ID NO: 421615 - RNA, 19 nt, Homo sapiens
  misc_RNA (1)...(19): siRNA sense strand
cagcuccacacacggauga

SEQ ID NO: 421616 - RNA, 19 nt, Homo sapiens
  misc_RNA (1)...(19): siRNA sense strand
ccucaaccacaccaucuug

SEQ ID NO: 421617 - RNA, 19 nt, Homo sapiens
  misc_RNA (1)...(19): siRNA sense strand
gcugccaucucuacuucca

SEQ ID NO: 421618 - RNA, 19 nt, Homo sapiens
  misc_RNA (1)...(19): siRNA sense strand
uuagucuucugggccauuu

SEQ ID NO: 421619 - RNA, 19 nt, Homo sapiens
  misc_RNA (1)...(19): siRNA sense strand
ccucuacagugacucuuac

SEQ ID NO: 421620 - RNA, 19 nt, Homo sapiens
  misc_RNA (1)...(19): siRNA sense strand
cacagugcuucuacaacga

SEQ ID NO: 421621 - RNA, 19 nt, Homo sapiens
  misc_RNA (1)...(19): siRNA sense strand
acuucuaucucauguucaa

SEQ ID NO: 421622 - RNA, 19 nt, Homo sapiens
  misc_RNA (1)...(19): siRNA sense strand
ggauugguuuuguuacuuc

SEQ ID NO: 421623 - RNA, 19 nt, Homo sapiens
  misc_RNA (1)...(19): siRNA sense strand
caacuuggugaccuuugug

SEQ ID NO: 421624 - RNA, 19 nt, Homo sapiens
  misc_RNA (1)...(19): siRNA sense strand
gaaaugagcgccaccuuua

SEQ ID NO: 421625 - RNA, 19 nt, Homo sapiens
  misc_RNA (1)...(19): siRNA sense strand
gaaagcaucuugccacaga

SEQ ID NO: 421626 - RNA, 19 nt, Homo sapiens
  misc_RNA (1)...(19): siRNA sense strand
gaauucaacucugccauga

SEQ ID NO: 421627 - RNA, 19 nt, Homo sapiens
  misc_RNA (1)...(19): siRNA sense strand
ggacuuggaaucacuguuu

SEQ ID NO: 421628 - RNA, 19 nt, Homo sapiens
  misc_RNA (1)...(19): siRNA sense strand
cuacagugacucuuacuua

SEQ ID NO: 421629 - RNA, 19 nt, Homo sapiens
  misc_RNA (1)...(19): siRNA sense strand
ucucuaugcucacaucuuu

SEQ ID NO: 421630 - RNA, 19 nt, Homo sapiens
  misc_RNA (1)...(19): siRNA sense strand
gcaaucgagaggcacauua

SEQ ID NO: 421631 - RNA, 19 nt, Homo sapiens
  misc_RNA (1)...(19): siRNA sense strand
gcgacgugcuggccuauga

SEQ ID NO: 421632 - RNA, 19 nt, Homo sapiens
  misc_RNA (1)...(19): siRNA sense strand
gaaccacagugcuucuaca

SEQ ID NO: 421633 - RNA, 19 nt, Homo sapiens
  misc_RNA (1)...(19): siRNA sense strand
guuuguaucuucaucaugu

SEQ ID NO: 421634 - RNA, 19 nt, Homo sapiens
  misc_RNA (1)...(19): siRNA sense strand
gcucacaucuuuggcuaug

SEQ ID NO: 421635 - RNA, 19 nt, Homo sapiens
  misc_RNA (1)...(19): siRNA sense strand
gagaggcacauuacgguuu

SEQ ID NO: 421636 - RNA, 19 nt, Homo sapiens
  misc_RNA (1)...(19): siRNA sense strand
cuacuucuaucucauguuc

SEQ ID NO: 421637 - RNA, 19 nt, Homo sapiens
  misc_RNA (1)...(19): siRNA sense strand
gaaucgggauaccaugaug

SEQ ID NO: 421638 - RNA, 19 nt, Homo sapiens
  misc_RNA (1)...(19): siRNA sense strand
gaaauucuuccuucuccuu

SEQ ID NO: 421639 - RNA, 19 nt, Homo sapiens
  misc_RNA (1)...(19): siRNA sense strand
ugaagacuguggucauugu

SEQ ID NO: 421640 - RNA, 19 nt, Homo sapiens
  misc_RNA (1)...(19): siRNA sense strand
ggacuauggccaucguuau

SEQ ID NO: 421641 - RNA, 19 nt, Homo sapiens
  misc_RNA (1)...(19): siRNA sense strand
gaaugucucggcauaguuc

SEQ ID NO: 421642 - RNA, 19 nt, Homo sapiens
  misc_RNA (1)...(19): siRNA sense strand
uaaccgaaguggaaagcau

SEQ ID NO: 421643 - RNA, 19 nt, Homo sapiens
  misc_RNA (1)...(19): siRNA sense strand
ccagaggacuaugagaaug

SEQ ID NO: 421644 - RNA, 19 nt, Homo sapiens
  misc_RNA (1)...(19): siRNA sense strand
cgaguccauugccuucuuu

SEQ ID NO: 421645 - RNA, 19 nt, Homo sapiens
  misc_RNA (1)...(19): siRNA sense strand
uggaaucacuguuuguauc

SEQ ID NO: 421646 - RNA, 19 nt, Homo sapiens
  misc_RNA (1)...(19): siRNA sense strand
gggauaccaugaugagucu

SEQ ID NO: 421647 - RNA, 19 nt, Homo sapiens
  misc_RNA (1)...(19): siRNA sense strand
gguaauggugguucucuau

SEQ ID NO: 421648 - RNA, 19 nt, Homo sapiens
  misc_RNA (1)...(19): siRNA sense strand
cggcaucuguggccaacuu

SEQ ID NO: 421649 - RNA, 19 nt, Homo sapiens
  misc_RNA (1)...(19): siRNA sense strand
agaaaugagcgccaccuuu

SEQ ID NO: 421650 - RNA, 19 nt, Homo sapiens
  misc_RNA (1)...(19): siRNA sense strand
cugcuggacuccuggauug

SEQ ID NO: 421651 - RNA, 19 nt, Homo sapiens
  misc_RNA (1)...(19): siRNA sense strand
guggucaucuggacuaugg

SEQ ID NO: 421652 - RNA, 19 nt, Homo sapiens
  misc_RNA (1)...(19): siRNA sense strand
gaaucacuguuuguaucuu

SEQ ID NO: 421653 - RNA, 19 nt, Homo sapiens
  misc_RNA (1)...(19): siRNA sense strand
agugugggcuggaacugua

SEQ ID NO: 421654 - RNA, 19 nt, Homo sapiens
  misc_RNA (1)...(19): siRNA sense strand
ugaaugaaccacagugcuu

SEQ ID NO: 421655 - RNA, 19 nt, Homo sapiens
  misc_RNA (1)...(19): siRNA sense strand
ucugaagacuguggucauu

SEQ ID NO: 421656 - RNA, 19 nt, Homo sapiens
  misc_RNA (1)...(19): siRNA sense strand
cuacuuccaucccuguaau

SEQ ID NO: 421657 - RNA, 19 nt, Homo sapiens
  misc_RNA (1)...(19): siRNA sense strand
ggucaugguggcaaucuau

SEQ ID NO: 421658 - RNA, 19 nt, Homo sapiens
  misc_RNA (1)...(19): siRNA sense strand
gacuuggaaucacuguuug

SEQ ID NO: 421659 - RNA, 19 nt, Homo sapiens
  misc_RNA (1)...(19): siRNA sense strand
uacagugacucuuacuuag

SEQ ID NO: 421660 - RNA, 19 nt, Homo sapiens
  misc_RNA (1)...(19): siRNA sense strand
gaugggacuuggaaucacu

SEQ ID NO: 421661 - RNA, 19 nt, Homo sapiens
  misc_RNA (1)...(19): siRNA sense strand
ucaacuuggugaccuuugu

SEQ ID NO: 421662 - RNA, 19 nt, Homo sapiens
  misc_RNA (1)...(19): siRNA sense strand
ggaaucacuguuuguaucu

SEQ ID NO: 421663 - RNA, 19 nt, Homo sapiens
  misc_RNA (1)...(19): siRNA sense strand
cgaaguggaaagcaucuug

SEQ ID NO: 421664 - RNA, 19 nt, Homo sapiens
  misc_RNA (1)...(19): siRNA sense strand
caacacaggacccaauacu

SEQ ID NO: 421665 - RNA, 19 nt, Homo sapiens
  misc_RNA (1)...(19): siRNA sense strand
uuccaucccuguaauuuca

SEQ ID NO: 421666 - RNA, 19 nt, Homo sapiens
  misc_RNA (1)...(19): siRNA sense strand
ggguagugguggucauugu

SEQ ID NO: 421667 - RNA, 19 nt, Homo sapiens
  misc_RNA (1)...(19): siRNA sense strand
caucuuggcuggaguucac

SEQ ID NO: 421668 - RNA, 19 nt, Homo sapiens
  misc_RNA (1)...(19): siRNA sense strand
gacuauggccaucguuaug

SEQ ID NO: 421669 - RNA, 19 nt, Homo sapiens
  misc_RNA (1)...(19): siRNA sense strand
ggaaucgggauaccaugau

SEQ ID NO: 421670 - RNA, 19 nt, Homo sapiens
  misc_RNA (1)...(19): siRNA sense strand
uuggugaccuuugugguaa

SEQ ID NO: 421671 - RNA, 19 nt, Homo sapiens
  misc_RNA (1)...(19): siRNA sense strand
guaauggugguucucuaug

SEQ ID NO: 421672 - RNA, 19 nt, Homo sapiens
  misc_RNA (1)...(19): siRNA sense strand
gccagaggacuaugagaau

SEQ ID NO: 421673 - RNA, 19 nt, Homo sapiens
  misc_RNA (1)...(19): siRNA sense strand
uaauggugguucucuaugc

SEQ ID NO: 421674 - RNA, 19 nt, Homo sapiens
  misc_RNA (1)...(19): siRNA sense strand
ccacagaauggaacacagu

SEQ ID NO: 421675 - RNA, 19 nt, Homo sapiens
  misc_RNA (1)...(19): siRNA sense strand
gggcuggaacuguaucugu

SEQ ID NO: 421676 - RNA, 19 nt, Homo sapiens
  misc_RNA (1)...(19): siRNA sense strand
ccaacuuacuggcuauugc

SEQ ID NO: 421677 - RNA, 19 nt, Homo sapiens
  misc_RNA (1)...(19): siRNA sense strand
aaucacuguuuguaucuuc

SEQ ID NO: 421678 - RNA, 19 nt, Homo sapiens
  misc_RNA (1)...(19): siRNA sense strand
ccauugccuucuuuuauaa

SEQ ID NO: 421679 - RNA, 19 nt, Homo sapiens
  misc_RNA (1)...(19): siRNA sense strand
uccauugccuucuuuuaua

SEQ ID NO: 421680 - RNA, 19 nt, Homo sapiens
  misc_RNA (1)...(19): siRNA sense strand
gcuggccuaugagaaauuc

SEQ ID NO: 421681 - RNA, 19 nt, Homo sapiens
  misc_RNA (1)...(19): siRNA sense strand
gcuggaacuguaucuguga

SEQ ID NO: 421682 - RNA, 19 nt, Homo sapiens
  misc_RNA (1)...(19): siRNA sense strand
uggguuggccuacuucuau

SEQ ID NO: 421683 - RNA, 19 nt, Homo sapiens
  misc_RNA (1)...(19): siRNA sense strand
caacuuacuggcuauugca

SEQ ID NO: 421684 - RNA, 19 nt, Homo sapiens
  misc_RNA (1)...(19): siRNA sense strand
gauaccaugaugagucuuc

SEQ ID NO: 421685 - RNA, 19 nt, Homo sapiens
  misc_RNA (1)...(19): siRNA sense strand
uauguucgccagaggacua

SEQ ID NO: 421686 - RNA, 19 nt, Homo sapiens
  misc_RNA (1)...(19): siRNA sense strand
ggugaccuuugugguaaug

SEQ ID NO: 421687 - RNA, 19 nt, Homo sapiens
  misc_RNA (1)...(19): siRNA sense strand
cgccagaggacuaugagaa

SEQ ID NO: 421688 - RNA, 19 nt, Homo sapiens
  misc_RNA (1)...(19): siRNA sense strand
gugcuggccuaugagaaau

SEQ ID NO: 421689 - RNA, 19 nt, Homo sapiens
  misc_RNA (1)...(19): siRNA sense strand
cgugcuggccuaugagaaa

SEQ ID NO: 421690 - RNA, 19 nt, Homo sapiens
  misc_RNA (1)...(19): siRNA sense strand
ggaacacagucagcaagcu

SEQ ID NO: 421691 - RNA, 19 nt, Homo sapiens
  misc_RNA (1)...(19): siRNA sense strand
cagaggacuaugagaaugu

SEQ ID NO: 421692 - RNA, 19 nt, Homo sapiens
  misc_RNA (1)...(19): siRNA sense strand
ggugaugggacuuggaauc

SEQ ID NO: 421693 - RNA, 19 nt, Homo sapiens
  misc_RNA (1)...(19): siRNA sense strand
guucaacacaggacccaau

SEQ ID NO: 421694 - RNA, 19 nt, Homo sapiens
  misc_RNA (1)...(19): siRNA sense strand
gaagacuguggucauugug

SEQ ID NO: 421695 - RNA, 19 nt, Homo sapiens
  misc_RNA (1)...(19): siRNA sense strand
cggaaucgggauaccauga

SEQ ID NO: 421696 - RNA, 19 nt, Homo sapiens
  misc_RNA (1)...(19): siRNA sense strand
cuuacuggcuauugcaauc

SEQ ID NO: 421697 - RNA, 19 nt, Homo sapiens
  misc_RNA (1)...(19): siRNA sense strand
cccaauacucggagacuga

SEQ ID NO: 421698 - RNA, 19 nt, Homo sapiens
  misc_RNA (1)...(19): siRNA sense strand
uggacuauggccaucguua

SEQ ID NO: 421699 - RNA, 19 nt, Homo sapiens
  misc_RNA (1)...(19): siRNA sense strand
cuuggugaccuuuguggua

SEQ ID NO: 421700 - RNA, 19 nt, Homo sapiens
  misc_RNA (1)...(19): siRNA sense strand
cagcuccacacacggauga

SEQ ID NO: 421701 - RNA, 19 nt, Homo sapiens
  misc_RNA (1)...(19): siRNA sense strand
ccucaaccacaccaucuug

SEQ ID NO: 421702 - RNA, 19 nt, Homo sapiens
  misc_RNA (1)...(19): siRNA sense strand
gcugccaucucuacuucca

SEQ ID NO: 421703 - RNA, 19 nt, Homo sapiens
  misc_RNA (1)...(19): siRNA sense strand
uuagucuucugggccauuu

SEQ ID NO: 421704 - RNA, 19 nt, Homo sapiens
  misc_RNA (1)...(19): siRNA sense strand
ccucuacagugacucuuac

SEQ ID NO: 421705 - RNA, 19 nt, Homo sapiens
  misc_RNA (1)...(19): siRNA sense strand
cacagugcuucuacaacga

SEQ ID NO: 421706 - RNA, 19 nt, Homo sapiens
  misc_RNA (1)...(19): siRNA sense strand
acuucuaucucauguucaa

SEQ ID NO: 421707 - RNA, 19 nt, Homo sapiens
  misc_RNA (1)...(19): siRNA sense strand
ggauugguuuuguuacuuc

SEQ ID NO: 421708 - RNA, 19 nt, Homo sapiens
  misc_RNA (1)...(19): siRNA sense strand
caacuuggugaccuuugug

SEQ ID NO: 421709 - RNA, 19 nt, Homo sapiens
  misc_RNA (1)...(19): siRNA sense strand
cuacaaaggucagcaaauu

SEQ ID NO: 421710 - RNA, 19 nt, Homo sapiens
  misc_RNA (1)...(19): siRNA sense strand
gcaggaagaucaugucauc

SEQ ID NO: 421711 - RNA, 19 nt, Homo sapiens
  misc_RNA (1)...(19): siRNA sense strand
gaaaagagaaaggcaaaua

SEQ ID NO: 421712 - RNA, 19 nt, Homo sapiens
  misc_RNA (1)...(19): siRNA sense strand
gagaaaggcaaauauaaag

SEQ ID NO: 421713 - RNA, 19 nt, Homo sapiens
  misc_RNA (1)...(19): siRNA sense strand
ccgcaaacgucacuucaau

SEQ ID NO: 421714 - RNA, 19 nt, Homo sapiens
  misc_RNA (1)...(19): siRNA sense strand
ucagcaaauuggcaaggua

SEQ ID NO: 421715 - RNA, 19 nt, Homo sapiens
  misc_RNA (1)...(19): siRNA sense strand
gcaaacgucacuucaaugc

SEQ ID NO: 421716 - RNA, 19 nt, Homo sapiens
  misc_RNA (1)...(19): siRNA sense strand
guacagaaagaaauauguc

SEQ ID NO: 421717 - RNA, 19 nt, Homo sapiens
  misc_RNA (1)...(19): siRNA sense strand
caagcaaggugguuaucac

SEQ ID NO: 421718 - RNA, 19 nt, Homo sapiens
  misc_RNA (1)...(19): siRNA sense strand
ccagguguacagaaagaaa

SEQ ID NO: 421719 - RNA, 19 nt, Homo sapiens
  misc_RNA (1)...(19): siRNA sense strand
cagaaagaaauaugucauc

SEQ ID NO: 421720 - RNA, 19 nt, Homo sapiens
  misc_RNA (1)...(19): siRNA sense strand
uacaaaggucagcaaauug

SEQ ID NO: 421721 - RNA, 19 nt, Homo sapiens
  misc_RNA (1)...(19): siRNA sense strand
acaaaggucagcaaauugg

SEQ ID NO: 421722 - RNA, 19 nt, Homo sapiens
  misc_RNA (1)...(19): siRNA sense strand
uugagaaaaugcaggaaua

SEQ ID NO: 421723 - RNA, 19 nt, Homo sapiens
  misc_RNA (1)...(19): siRNA sense strand
ggcuaaaacuggacaagga

SEQ ID NO: 421724 - RNA, 19 nt, Homo sapiens
  misc_RNA (1)...(19): siRNA sense strand
ccucacacgugcgcaggaa

SEQ ID NO: 421725 - RNA, 19 nt, Homo sapiens
  misc_RNA (1)...(19): siRNA sense strand
cgacgagguccagguaguu

SEQ ID NO: 421726 - RNA, 19 nt, Homo sapiens
  misc_RNA (1)...(19): siRNA sense strand
ucacacgugcgcaggaaga

SEQ ID NO: 421727 - RNA, 19 nt, Homo sapiens
  misc_RNA (1)...(19): siRNA sense strand
gcgcaggaagaucauguca

SEQ ID NO: 421728 - RNA, 19 nt, Homo sapiens
  misc_RNA (1)...(19): siRNA sense strand
ccaagcaaggugguuauca

SEQ ID NO: 421729 - RNA, 19 nt, Homo sapiens
  misc_RNA (1)...(19): siRNA sense strand
gaacagagcaccauaguga

SEQ ID NO: 421730 - RNA, 19 nt, Homo sapiens
  misc_RNA (1)...(19): siRNA sense strand
gagaagaucugacggaaga

SEQ ID NO: 421731 - RNA, 19 nt, Homo sapiens
  misc_RNA (1)...(19): siRNA sense strand
guacagagaugcccaugau

SEQ ID NO: 421732 - RNA, 19 nt, Homo sapiens
  misc_RNA (1)...(19): siRNA sense strand
ugucuuggcuggaauauga

SEQ ID NO: 421733 - RNA, 19 nt, Homo sapiens
  misc_RNA (1)...(19): siRNA sense strand
gcuauuagauggcacaaag

SEQ ID NO: 421734 - RNA, 19 nt, Homo sapiens
  misc_RNA (1)...(19): siRNA sense strand
caaaugcugagcugaaaua

SEQ ID NO: 421735 - RNA, 19 nt, Homo sapiens
  misc_RNA (1)...(19): siRNA sense strand
augcugagcugaaauauga

SEQ ID NO: 421736 - RNA, 19 nt, Homo sapiens
  misc_RNA (1)...(19): siRNA sense strand
ggagaugaauucagaagag

SEQ ID NO: 421737 - RNA, 19 nt, Homo sapiens
  misc_RNA (1)...(19): siRNA sense strand
gaagcucuaugccaauaug

SEQ ID NO: 421738 - RNA, 19 nt, Homo sapiens
  misc_RNA (1)...(19): siRNA sense strand
gagcuccgcuuugagauug

SEQ ID NO: 421739 - RNA, 19 nt, Homo sapiens
  misc_RNA (1)...(19): siRNA sense strand
caaggaagguaaauacaag

SEQ ID NO: 421740 - RNA, 19 nt, Homo sapiens
  misc_RNA (1)...(19): siRNA sense strand
gaaccuggaucugccuuau

SEQ ID NO: 421741 - RNA, 19 nt, Homo sapiens
  misc_RNA (1)...(19): siRNA sense strand
gaauuacaccucaagaguu

SEQ ID NO: 421742 - RNA, 19 nt, Homo sapiens
  misc_RNA (1)...(19): siRNA sense strand
uaacaaggcccuagaacug

SEQ ID NO: 421743 - RNA, 19 nt, Homo sapiens
  misc_RNA (1)...(19): siRNA sense strand
ggccaugugucaucugaaa

SEQ ID NO: 421744 - RNA, 19 nt, Homo sapiens
  misc_RNA (1)...(19): siRNA sense strand
gaagagaagcuggaacaga

SEQ ID NO: 421745 - RNA, 19 nt, Homo sapiens
  misc_RNA (1)...(19): siRNA sense strand
aauuacaccucaagaguuu

SEQ ID NO: 421746 - RNA, 19 nt, Homo sapiens
  misc_RNA (1)...(19): siRNA sense strand
gaucgugucuuggcuggaa

SEQ ID NO: 421747 - RNA, 19 nt, Homo sapiens
  misc_RNA (1)...(19): siRNA sense strand
ggaagauggcggaaucauu

SEQ ID NO: 421748 - RNA, 19 nt, Homo sapiens
  misc_RNA (1)...(19): siRNA sense strand
gagaugaauucagaagaga

SEQ ID NO: 421749 - RNA, 19 nt, Homo sapiens
  misc_RNA (1)...(19): siRNA sense strand
gggcacagguacagagaug

SEQ ID NO: 421750 - RNA, 19 nt, Homo sapiens
  misc_RNA (1)...(19): siRNA sense strand
aagaagcucuaugccaaua

SEQ ID NO: 421751 - RNA, 19 nt, Homo sapiens
  misc_RNA (1)...(19): siRNA sense strand
gcucuaugccaauauguuu

SEQ ID NO: 421752 - RNA, 19 nt, Homo sapiens
  misc_RNA (1)...(19): siRNA sense strand
gagaacauuccaucgugua

SEQ ID NO: 421753 - RNA, 19 nt, Homo sapiens
  misc_RNA (1)...(19): siRNA sense strand
ggccuucucugcugccauu

SEQ ID NO: 421754 - RNA, 19 nt, Homo sapiens
  misc_RNA (1)...(19): siRNA sense strand
gcugaaauaugaauuacac

SEQ ID NO: 421755 - RNA, 19 nt, Homo sapiens
  misc_RNA (1)...(19): siRNA sense strand
gaacuggcacgggcugauu

SEQ ID NO: 421756 - RNA, 19 nt, Homo sapiens
  misc_RNA (1)...(19): siRNA sense strand
gcaggcaguccuccaaaga

SEQ ID NO: 421757 - RNA, 19 nt, Homo sapiens
  misc_RNA (1)...(19): siRNA sense strand
gagcugaaauaugaauuac

SEQ ID NO: 421758 - RNA, 19 nt, Homo sapiens
  misc_RNA (1)...(19): siRNA sense strand
uauuugagguggaguuguu

SEQ ID NO: 421759 - RNA, 19 nt, Homo sapiens
  misc_RNA (1)...(19): siRNA sense strand
agaggaagauggcggaauc

SEQ ID NO: 421760 - RNA, 19 nt, Homo sapiens
  misc_RNA (1)...(19): siRNA sense strand
gaagaagcucuaugccaau

SEQ ID NO: 421761 - RNA, 19 nt, Homo sapiens
  misc_RNA (1)...(19): siRNA sense strand
gagguggaguuguuugagu

SEQ ID NO: 421762 - RNA, 19 nt, Homo sapiens
  misc_RNA (1)...(19): siRNA sense strand
ggccgugaaugacuuugaa

SEQ ID NO: 421763 - RNA, 19 nt, Homo sapiens
  misc_RNA (1)...(19): siRNA sense strand
uggaauaugagucuaguuu

SEQ ID NO: 421764 - RNA, 19 nt, Homo sapiens
  misc_RNA (1)...(19): siRNA sense strand
caaugccacgcuuguauuu

SEQ ID NO: 421765 - RNA, 19 nt, Homo sapiens
  misc_RNA (1)...(19): siRNA sense strand
cuugggagaugaauucaga

SEQ ID NO: 421766 - RNA, 19 nt, Homo sapiens
  misc_RNA (1)...(19): siRNA sense strand
uggaguuguuugaguuuaa

SEQ ID NO: 421767 - RNA, 19 nt, Homo sapiens
  misc_RNA (1)...(19): siRNA sense strand
ugaaggucaucaagagaga

SEQ ID NO: 421768 - RNA, 19 nt, Homo sapiens
  misc_RNA (1)...(19): siRNA sense strand
gggcugauuuccagaaggu

SEQ ID NO: 421769 - RNA, 19 nt, Homo sapiens
  misc_RNA (1)...(19): siRNA sense strand
acagagaugcccaugauug

SEQ ID NO: 421770 - RNA, 19 nt, Homo sapiens
  misc_RNA (1)...(19): siRNA sense strand
ucaaggaagguaaauacaa

SEQ ID NO: 421771 - RNA, 19 nt, Homo sapiens
  misc_RNA (1)...(19): siRNA sense strand
gaaacuacaggccuucucu

SEQ ID NO: 421772 - RNA, 19 nt, Homo sapiens
  misc_RNA (1)...(19): siRNA sense strand
guggaguuguuugaguuua

SEQ ID NO: 421773 - RNA, 19 nt, Homo sapiens
  misc_RNA (1)...(19): siRNA sense strand
gcuaugcuaagcccaauga

SEQ ID NO: 421774 - RNA, 19 nt, Homo sapiens
  misc_RNA (1)...(19): siRNA sense strand
ccacaucaccugcaaacca

SEQ ID NO: 421775 - RNA, 19 nt, Homo sapiens
  misc_RNA (1)...(19): siRNA sense strand
ccaaugaggaagcacagaa

SEQ ID NO: 421776 - RNA, 19 nt, Homo sapiens
  misc_RNA (1)...(19): siRNA sense strand
ggacgaaggcgugcugaag

SEQ ID NO: 421777 - RNA, 19 nt, Homo sapiens
  misc_RNA (1)...(19): siRNA sense strand
aggcaguccuccaaagauu

SEQ ID NO: 421778 - RNA, 19 nt, Homo sapiens
  misc_RNA (1)...(19): siRNA sense strand
cuacacuggcuggcuauua

SEQ ID NO: 421779 - RNA, 19 nt, Homo sapiens
  misc_RNA (1)...(19): siRNA sense strand
ggacagcaacaacgagaag

SEQ ID NO: 421780 - RNA, 19 nt, Homo sapiens
  misc_RNA (1)...(19): siRNA sense strand
caaugaggaagcacagaaa

SEQ ID NO: 421781 - RNA, 19 nt, Homo sapiens
  misc_RNA (1)...(19): siRNA sense strand
cagaagagaagcuggaaca

SEQ ID NO: 421782 - RNA, 19 nt, Homo sapiens
  misc_RNA (1)...(19): siRNA sense strand
ggagcuccgcuuugagauu

SEQ ID NO: 421783 - RNA, 19 nt, Homo sapiens
  misc_RNA (1)...(19): siRNA sense strand
ccaaugccacgcuuguauu

SEQ ID NO: 421784 - RNA, 19 nt, Homo sapiens
  misc_RNA (1)...(19): siRNA sense strand
agaagguccugcagcucua

SEQ ID NO: 421785 - RNA, 19 nt, Homo sapiens
  misc_RNA (1)...(19): siRNA sense strand
ugaauuacaccucaagagu

SEQ ID NO: 421786 - RNA, 19 nt, Homo sapiens
  misc_RNA (1)...(19): siRNA sense strand
ggagaaaggagaacauucc

SEQ ID NO: 421787 - RNA, 19 nt, Homo sapiens
  misc_RNA (1)...(19): siRNA sense strand
uacacuggcuggcuauuag

SEQ ID NO: 421788 - RNA, 19 nt, Homo sapiens
  misc_RNA (1)...(19): siRNA sense strand
acagagcaccauagugaaa

SEQ ID NO: 421789 - RNA, 19 nt, Homo sapiens
  misc_RNA (1)...(19): siRNA sense strand
acaaggacaagcucuuuga

SEQ ID NO: 421790 - RNA, 19 nt, Homo sapiens
  misc_RNA (1)...(19): siRNA sense strand
cuacaaggacaagcucuuu

SEQ ID NO: 421791 - RNA, 19 nt, Homo sapiens
  misc_RNA (1)...(19): siRNA sense strand
ggaguuguuugaguuuaag

SEQ ID NO: 421792 - RNA, 19 nt, Homo sapiens
  misc_RNA (1)...(19): siRNA sense strand
augccacgcuuguauuuga

SEQ ID NO: 421793 - RNA, 19 nt, Homo sapiens
  misc_RNA (1)...(19): siRNA sense strand
gaaagcacaggcccuucga

SEQ ID NO: 421794 - RNA, 19 nt, Homo sapiens
  misc_RNA (1)...(19): siRNA sense strand
gaauaugccuacgguucag

SEQ ID NO: 421795 - RNA, 19 nt, Homo sapiens
  misc_RNA (1)...(19): siRNA sense strand
gcacuguguacuucaagga

SEQ ID NO: 421796 - RNA, 19 nt, Homo sapiens
  misc_RNA (1)...(19): siRNA sense strand
gaaaaggggaggucaucaa

SEQ ID NO: 421797 - RNA, 19 nt, Homo sapiens
  misc_RNA (1)...(19): siRNA sense strand
gggagaagaagcucuaugc

SEQ ID NO: 421798 - RNA, 19 nt, Homo sapiens
  misc_RNA (1)...(19): siRNA sense strand
guaacaaggcccuagaacu

SEQ ID NO: 421799 - RNA, 19 nt, Homo sapiens
  misc_RNA (1)...(19): siRNA sense strand
ggaagguaaauacaagcaa

SEQ ID NO: 421800 - RNA, 19 nt, Homo sapiens
  misc_RNA (1)...(19): siRNA sense strand
gcgcauggagaaaggagaa

SEQ ID NO: 421801 - RNA, 19 nt, Homo sapiens
  misc_RNA (1)...(19): siRNA sense strand
cccuagaacuggacagcaa

SEQ ID NO: 421802 - RNA, 19 nt, Homo sapiens
  misc_RNA (1)...(19): siRNA sense strand
ggugaaggcuaugcuaagc

SEQ ID NO: 421803 - RNA, 19 nt, Homo sapiens
  misc_RNA (1)...(19): siRNA sense strand
ggaacagagcaccauagug

SEQ ID NO: 421804 - RNA, 19 nt, Homo sapiens
  misc_RNA (1)...(19): siRNA sense strand
caccaaaugcugagcugaa

SEQ ID NO: 421805 - RNA, 19 nt, Homo sapiens
  misc_RNA (1)...(19): siRNA sense strand
uuccaaaucccaccaaaug

SEQ ID NO: 421806 - RNA, 19 nt, Homo sapiens
  misc_RNA (1)...(19): siRNA sense strand
gaugaauucagaagagaag

SEQ ID NO: 421807 - RNA, 19 nt, Homo sapiens
  misc_RNA (1)...(19): siRNA sense strand
caugugucaucugaaacua

SEQ ID NO: 421808 - RNA, 19 nt, Homo sapiens
  misc_RNA (1)...(19): siRNA sense strand
agaauaugccuacgguuca

SEQ ID NO: 421809 - RNA, 19 nt, Homo sapiens
  misc_RNA (1)...(19): siRNA sense strand
ugaaggaggagcagaagag

SEQ ID NO: 421810 - RNA, 19 nt, Homo sapiens
  misc_RNA (1)...(19): siRNA sense strand
gcuggaauaugagucuagu

SEQ ID NO: 421811 - RNA, 19 nt, Homo sapiens
  misc_RNA (1)...(19): siRNA sense strand
accaaaugcugagcugaaa

SEQ ID NO: 421812 - RNA, 19 nt, Homo sapiens
  misc_RNA (1)...(19): siRNA sense strand
uauuagauggcacaaaguu

SEQ ID NO: 421813 - RNA, 19 nt, Homo sapiens
  misc_RNA (1)...(19): siRNA sense strand
gcacuggaaggguacuaca

SEQ ID NO: 421814 - RNA, 19 nt, Homo sapiens
  misc_RNA (1)...(19): siRNA sense strand
ggaauaugagucuaguuuu

SEQ ID NO: 421815 - RNA, 19 nt, Homo sapiens
  misc_RNA (1)...(19): siRNA sense strand
gcuggaacagagcaccaua

SEQ ID NO: 421816 - RNA, 19 nt, Homo sapiens
  misc_RNA (1)...(19): siRNA sense strand
gugcugaaggucaucaaga

SEQ ID NO: 421817 - RNA, 19 nt, Homo sapiens
  misc_RNA (1)...(19): siRNA sense strand
gggagaugaauucagaaga

SEQ ID NO: 421818 - RNA, 19 nt, Homo sapiens
  misc_RNA (1)...(19): siRNA sense strand
gcugaaggucaucaagaga

SEQ ID NO: 421819 - RNA, 19 nt, Homo sapiens
  misc_RNA (1)...(19): siRNA sense strand
cuucucugcugccauugaa

SEQ ID NO: 421820 - RNA, 19 nt, Homo sapiens
  misc_RNA (1)...(19): siRNA sense strand
ugugucaucugaaacuaca

SEQ ID NO: 421821 - RNA, 19 nt, Homo sapiens
  misc_RNA (1)...(19): siRNA sense strand
agagcaccauagugaaaga

SEQ ID NO: 421822 - RNA, 19 nt, Homo sapiens
  misc_RNA (1)...(19): siRNA sense strand
cguggagguugcacuggaa

SEQ ID NO: 421823 - RNA, 19 nt, Homo sapiens
  misc_RNA (1)...(19): siRNA sense strand
gguggaguuguuugaguuu

SEQ ID NO: 421824 - RNA, 19 nt, Homo sapiens
  misc_RNA (1)...(19): siRNA sense strand
cagcaggcaguccuccaaa

SEQ ID NO: 421825 - RNA, 19 nt, Homo sapiens
  misc_RNA (1)...(19): siRNA sense strand
ggaucgcaaggacaaauuc

SEQ ID NO: 421826 - RNA, 19 nt, Homo sapiens
  misc_RNA (1)...(19): siRNA sense strand
cagagaugcccaugauugg

SEQ ID NO: 421827 - RNA, 19 nt, Homo sapiens
  misc_RNA (1)...(19): siRNA sense strand
gagaaaggagaacauucca

SEQ ID NO: 421828 - RNA, 19 nt, Homo sapiens
  misc_RNA (1)...(19): siRNA sense strand
cgggagcuccgcuuugaga

SEQ ID NO: 421829 - RNA, 19 nt, Homo sapiens
  misc_RNA (1)...(19): siRNA sense strand
ccgacgagcuggugcguuu

SEQ ID NO: 421830 - RNA, 19 nt, Homo sapiens
  misc_RNA (1)...(19): siRNA sense strand
gucaacagcaccuggagaa

SEQ ID NO: 421831 - RNA, 19 nt, Homo sapiens
  misc_RNA (1)...(19): siRNA sense strand
gcuacgaagcggucuccuu

SEQ ID NO: 421832 - RNA, 19 nt, Homo sapiens
  misc_RNA (1)...(19): siRNA sense strand
ccgacgagcuggugcguuu

SEQ ID NO: 421833 - RNA, 19 nt, Homo sapiens
  misc_RNA (1)...(19): siRNA sense strand
gucaacagcaccuggagaa

SEQ ID NO: 421834 - RNA, 19 nt, Homo sapiens
  misc_RNA (1)...(19): siRNA sense strand
gcuacgaagcggucuccuu

SEQ ID NO: 421835 - RNA, 19 nt, Homo sapiens
  misc_RNA (1)...(19): siRNA sense strand
ccgacgagcuggugcguuu

SEQ ID NO: 421836 - RNA, 19 nt, Homo sapiens
  misc_RNA (1)...(19): siRNA sense strand
gucaacagcaccuggagaa

SEQ ID NO: 421837 - RNA, 19 nt, Homo sapiens
  misc_RNA (1)...(19): siRNA sense strand
gcuacgaagcggucuccuu

SEQ ID NO: 421838 - RNA, 19 nt, Homo sapiens
  misc_RNA (1)...(19): siRNA sense strand
ccgacgagcuggugcguuu

SEQ ID NO: 421839 - RNA, 19 nt, Homo sapiens
  misc_RNA (1)...(19): siRNA sense strand
gucaacagcaccuggagaa

SEQ ID NO: 421840 - RNA, 19 nt, Homo sapiens
  misc_RNA (1)...(19): siRNA sense strand
gcuacgaagcggucuccuu

SEQ ID NO: 421841 - RNA, 19 nt, Homo sapiens
  misc_RNA (1)...(19): siRNA sense strand
guagauaccuccacuagaa

SEQ ID NO: 421842 - RNA, 19 nt, Homo sapiens
  misc_RNA (1)...(19): siRNA sense strand
gaucugaaaucgacaaugu

SEQ ID NO: 421843 - RNA, 19 nt, Homo sapiens
  misc_RNA (1)...(19): siRNA sense strand
gaacaaguaugaggaugaa

SEQ ID NO: 421844 - RNA, 19 nt, Homo sapiens
  misc_RNA (1)...(19): siRNA sense strand
ggacaaaugcagagaauga

SEQ ID NO: 421845 - RNA, 19 nt, Homo sapiens
  misc_RNA (1)...(19): siRNA sense strand
ggaagucggagucuuguua

SEQ ID NO: 421846 - RNA, 19 nt, Homo sapiens
  misc_RNA (1)...(19): siRNA sense strand
caaaucaagucacucaaca

SEQ ID NO: 421847 - RNA, 19 nt, Homo sapiens
  misc_RNA (1)...(19): siRNA sense strand
ccacuagaacccauaauuu

SEQ ID NO: 421848 - RNA, 19 nt, Homo sapiens
  misc_RNA (1)...(19): siRNA sense strand
cacuagaacccauaauuua

SEQ ID NO: 421849 - RNA, 19 nt, Homo sapiens
  misc_RNA (1)...(19): siRNA sense strand
caggaugucuggagaaugu

SEQ ID NO: 421850 - RNA, 19 nt, Homo sapiens
  misc_RNA (1)...(19): siRNA sense strand
ggccaaacuugacaacuug

SEQ ID NO: 421851 - RNA, 19 nt, Homo sapiens
  misc_RNA (1)...(19): siRNA sense strand
ggauguggauggugcuuau

SEQ ID NO: 421852 - RNA, 19 nt, Homo sapiens
  misc_RNA (1)...(19): siRNA sense strand
ccaagaacaagcugaauga

SEQ ID NO: 421853 - RNA, 19 nt, Homo sapiens
  misc_RNA (1)...(19): siRNA sense strand
gagcaaaucaagucacuca

SEQ ID NO: 421854 - RNA, 19 nt, Homo sapiens
  misc_RNA (1)...(19): siRNA sense strand
agaagcagaucuccaacuu

SEQ ID NO: 421855 - RNA, 19 nt, Homo sapiens
  misc_RNA (1)...(19): siRNA sense strand
ggaacaaguaugaggauga

SEQ ID NO: 421856 - RNA, 19 nt, Homo sapiens
  misc_RNA (1)...(19): siRNA sense strand
ccaauuugccuccuucauu

SEQ ID NO: 421857 - RNA, 19 nt, Homo sapiens
  misc_RNA (1)...(19): siRNA sense strand
gaagucggagucuuguuaa

SEQ ID NO: 421858 - RNA, 19 nt, Homo sapiens
  misc_RNA (1)...(19): siRNA sense strand
uaauuuagagcccuacuuu

SEQ ID NO: 421859 - RNA, 19 nt, Homo sapiens
  misc_RNA (1)...(19): siRNA sense strand
ggugaagucucgagaaagg

SEQ ID NO: 421860 - RNA, 19 nt, Homo sapiens
  misc_RNA (1)...(19): siRNA sense strand
caaaugcagagaaugaauu

SEQ ID NO: 421861 - RNA, 19 nt, Homo sapiens
  misc_RNA (1)...(19): siRNA sense strand
uacaagaagucacuaucaa

SEQ ID NO: 421862 - RNA, 19 nt, Homo sapiens
  misc_RNA (1)...(19): siRNA sense strand
gugagaaauucaaagauag

SEQ ID NO: 421863 - RNA, 19 nt, Homo sapiens
  misc_RNA (1)...(19): siRNA sense strand
gcagagaaugaauuuguga

SEQ ID NO: 421864 - RNA, 19 nt, Homo sapiens
  misc_RNA (1)...(19): siRNA sense strand
gcggacaaaugcagagaau

SEQ ID NO: 421865 - RNA, 19 nt, Homo sapiens
  misc_RNA (1)...(19): siRNA sense strand
gaaaucaacaagcggacaa

SEQ ID NO: 421866 - RNA, 19 nt, Homo sapiens
  misc_RNA (1)...(19): siRNA sense strand
ucaagucacucaacaacca

SEQ ID NO: 421867 - RNA, 19 nt, Homo sapiens
  misc_RNA (1)...(19): siRNA sense strand
ucaagaagcagaucuccaa

SEQ ID NO: 421868 - RNA, 19 nt, Homo sapiens
  misc_RNA (1)...(19): siRNA sense strand
gggauagugugagaaauuc

SEQ ID NO: 421869 - RNA, 19 nt, Homo sapiens
  misc_RNA (1)...(19): siRNA sense strand
uaaccuugguggcaguaaa

SEQ ID NO: 421870 - RNA, 19 nt, Homo sapiens
  misc_RNA (1)...(19): siRNA sense strand
gaugcagacucaaaucagu

SEQ ID NO: 421871 - RNA, 19 nt, Homo sapiens
  misc_RNA (1)...(19): siRNA sense strand
caagcagaguugucucaga

SEQ ID NO: 421872 - RNA, 19 nt, Homo sapiens
  misc_RNA (1)...(19): siRNA sense strand
gagaaagggagcaaaucaa

SEQ ID NO: 421873 - RNA, 19 nt, Homo sapiens
  misc_RNA (1)...(19): siRNA sense strand
cgugugauccagagacuua

SEQ ID NO: 421874 - RNA, 19 nt, Homo sapiens
  misc_RNA (1)...(19): siRNA sense strand
cugcugggaucaucaacua

SEQ ID NO: 421875 - RNA, 19 nt, Homo sapiens
  misc_RNA (1)...(19): siRNA sense strand
ggugguggcuuuggugguu

SEQ ID NO: 421876 - RNA, 19 nt, Homo sapiens
  misc_RNA (1)...(19): siRNA sense strand
gaggauauagcccagaaga

SEQ ID NO: 421877 - RNA, 19 nt, Homo sapiens
  misc_RNA (1)...(19): siRNA sense strand
gugcuuauaugaccaaggu

SEQ ID NO: 421878 - RNA, 19 nt, Homo sapiens
  misc_RNA (1)...(19): siRNA sense strand
ugaagaacaugcaggacau

SEQ ID NO: 421879 - RNA, 19 nt, Homo sapiens
  misc_RNA (1)...(19): siRNA sense strand
aaggugaagucucgagaaa

SEQ ID NO: 421880 - RNA, 19 nt, Homo sapiens
  misc_RNA (1)...(19): siRNA sense strand
aagcagaguugucucagau

SEQ ID NO: 421881 - RNA, 19 nt, Homo sapiens
  misc_RNA (1)...(19): siRNA sense strand
cgagaaagggagcaaauca

SEQ ID NO: 421882 - RNA, 19 nt, Homo sapiens
  misc_RNA (1)...(19): siRNA sense strand
ucaaggaugccaagaacaa

SEQ ID NO: 421883 - RNA, 19 nt, Homo sapiens
  misc_RNA (1)...(19): siRNA sense strand
gaaagggagcaaaucaagu

SEQ ID NO: 421884 - RNA, 19 nt, Homo sapiens
  misc_RNA (1)...(19): siRNA sense strand
caagaaggauguggauggu

SEQ ID NO: 421885 - RNA, 19 nt, Homo sapiens
  misc_RNA (1)...(19): siRNA sense strand
agacuuagaucugaaaucg

SEQ ID NO: 421886 - RNA, 19 nt, Homo sapiens
  misc_RNA (1)...(19): siRNA sense strand
cuaaugucauccucucuau

SEQ ID NO: 421887 - RNA, 19 nt, Homo sapiens
  misc_RNA (1)...(19): siRNA sense strand
caaaucagugaaacuaaug

SEQ ID NO: 421888 - RNA, 19 nt, Homo sapiens
  misc_RNA (1)...(19): siRNA sense strand
uggaccaacugaagaguga

SEQ ID NO: 421889 - RNA, 19 nt, Homo sapiens
  misc_RNA (1)...(19): siRNA sense strand
ggagaagaaagcaggaugu

SEQ ID NO: 421890 - RNA, 19 nt, Homo sapiens
  misc_RNA (1)...(19): siRNA sense strand
gaagcagaucuccaacuug

SEQ ID NO: 421891 - RNA, 19 nt, Homo sapiens
  misc_RNA (1)...(19): siRNA sense strand
gaauuugugaccaucaaga

SEQ ID NO: 421892 - RNA, 19 nt, Homo sapiens
  misc_RNA (1)...(19): siRNA sense strand
guaugaggaugaaaucaac

SEQ ID NO: 421893 - RNA, 19 nt, Homo sapiens
  misc_RNA (1)...(19): siRNA sense strand
ggagauugacccugagauc

SEQ ID NO: 421894 - RNA, 19 nt, Homo sapiens
  misc_RNA (1)...(19): siRNA sense strand
gcacaagccacaccaccau

SEQ ID NO: 421895 - RNA, 19 nt, Homo sapiens
  misc_RNA (1)...(19): siRNA sense strand
gcgagaaugcccucaagga

SEQ ID NO: 421896 - RNA, 19 nt, Homo sapiens
  misc_RNA (1)...(19): siRNA sense strand
aggauuaccggaacaagua

SEQ ID NO: 421897 - RNA, 19 nt, Homo sapiens
  misc_RNA (1)...(19): siRNA sense strand
aaaagcaucuccauaagug

SEQ ID NO: 421898 - RNA, 19 nt, Homo sapiens
  misc_RNA (1)...(19): siRNA sense strand
caucauugcugaggucaag

SEQ ID NO: 421899 - RNA, 19 nt, Homo sapiens
  misc_RNA (1)...(19): siRNA sense strand
gaccuggacagcaucauug

SEQ ID NO: 421900 - RNA, 19 nt, Homo sapiens
  misc_RNA (1)...(19): siRNA sense strand
cagugaaacuaaugucauc

SEQ ID NO: 421901 - RNA, 19 nt, Homo sapiens
  misc_RNA (1)...(19): siRNA sense strand
caacuugcagcaggaaauu

SEQ ID NO: 421902 - RNA, 19 nt, Homo sapiens
  misc_RNA (1)...(19): siRNA sense strand
aggccaaacuugacaacuu

SEQ ID NO: 421903 - RNA, 19 nt, Homo sapiens
  misc_RNA (1)...(19): siRNA sense strand
gcaaaucaagucacucaac

SEQ ID NO: 421904 - RNA, 19 nt, Homo sapiens
  misc_RNA (1)...(19): siRNA sense strand
cuagaacccauaauuuaga

SEQ ID NO: 421905 - RNA, 19 nt, Homo sapiens
  misc_RNA (1)...(19): siRNA sense strand
aggacaugguggaggauua

SEQ ID NO: 421906 - RNA, 19 nt, Homo sapiens
  misc_RNA (1)...(19): siRNA sense strand
agaaugaauuugugaccau

SEQ ID NO: 421907 - RNA, 19 nt, Homo sapiens
  misc_RNA (1)...(19): siRNA sense strand
gauagugugagaaauucaa

SEQ ID NO: 421908 - RNA, 19 nt, Homo sapiens
  misc_RNA (1)...(19): siRNA sense strand
ccucaaggaugccaagaac

SEQ ID NO: 421909 - RNA, 19 nt, Homo sapiens
  misc_RNA (1)...(19): siRNA sense strand
gauugacccugagauccaa

SEQ ID NO: 421910 - RNA, 19 nt, Homo sapiens
  misc_RNA (1)...(19): siRNA sense strand
ggugguagcuaugguucug

SEQ ID NO: 421911 - RNA, 19 nt, Homo sapiens
  misc_RNA (1)...(19): siRNA sense strand
gccaagaacaagcugaaug

SEQ ID NO: 421912 - RNA, 19 nt, Homo sapiens
  misc_RNA (1)...(19): siRNA sense strand
caacugaagagugaucaau

SEQ ID NO: 421913 - RNA, 19 nt, Homo sapiens
  misc_RNA (1)...(19): siRNA sense strand
ucacucaacaaccaauuug

SEQ ID NO: 421914 - RNA, 19 nt, Homo sapiens
  misc_RNA (1)...(19): siRNA sense strand
gggagcaaaucaagucacu

SEQ ID NO: 421915 - RNA, 19 nt, Homo sapiens
  misc_RNA (1)...(19): siRNA sense strand
guaaaagcaucuccauaag

SEQ ID NO: 421916 - RNA, 19 nt, Homo sapiens
  misc_RNA (1)...(19): siRNA sense strand
gcauacaagaagucacuau

SEQ ID NO: 421917 - RNA, 19 nt, Homo sapiens
  misc_RNA (1)...(19): siRNA sense strand
ggaggugguagcuaugguu

SEQ ID NO: 421918 - RNA, 19 nt, Homo sapiens
  misc_RNA (1)...(19): siRNA sense strand
cgagaaugcccucaaggau

SEQ ID NO: 421919 - RNA, 19 nt, Homo sapiens
  misc_RNA (1)...(19): siRNA sense strand
guggauggugcuuauauga

SEQ ID NO: 421920 - RNA, 19 nt, Homo sapiens
  misc_RNA (1)...(19): siRNA sense strand
ucaacaagcggacaaaugc

SEQ ID NO: 421921 - RNA, 19 nt, Homo sapiens
  misc_RNA (1)...(19): siRNA sense strand
uuagagcccuacuuugagu

SEQ ID NO: 421922 - RNA, 19 nt, Homo sapiens
  misc_RNA (1)...(19): siRNA sense strand
aaagggagcaaaucaaguc

SEQ ID NO: 421923 - RNA, 19 nt, Homo sapiens
  misc_RNA (1)...(19): siRNA sense strand
ggcuacggcucuggaggua

SEQ ID NO: 421924 - RNA, 19 nt, Homo sapiens
  misc_RNA (1)...(19): siRNA sense strand
acucaaaucagugaaacua

SEQ ID NO: 421925 - RNA, 19 nt, Homo sapiens
  misc_RNA (1)...(19): siRNA sense strand
gacaaaugcagagaaugaa

SEQ ID NO: 421926 - RNA, 19 nt, Homo sapiens
  misc_RNA (1)...(19): siRNA sense strand
caaguaugaggaugaaauc

SEQ ID NO: 421927 - RNA, 19 nt, Homo sapiens
  misc_RNA (1)...(19): siRNA sense strand
gaggauuaccggaacaagu

SEQ ID NO: 421928 - RNA, 19 nt, Homo sapiens
  misc_RNA (1)...(19): siRNA sense strand
ggugguggauuuggaaguc

SEQ ID NO: 421929 - RNA, 19 nt, Homo sapiens
  misc_RNA (1)...(19): siRNA sense strand
ucucagaugcagacucaaa

SEQ ID NO: 421930 - RNA, 19 nt, Homo sapiens
  misc_RNA (1)...(19): siRNA sense strand
acaaguaugaggaugaaau

SEQ ID NO: 421931 - RNA, 19 nt, Homo sapiens
  misc_RNA (1)...(19): siRNA sense strand
auucggaacugaagaacau

SEQ ID NO: 421932 - RNA, 19 nt, Homo sapiens
  misc_RNA (1)...(19): siRNA sense strand
ggagguggacgugguagug

SEQ ID NO: 421933 - RNA, 19 nt, Homo sapiens
  misc_RNA (1)...(19): siRNA sense strand
cgaccuggacagcaucauu

SEQ ID NO: 421934 - RNA, 19 nt, Homo sapiens
  misc_RNA (1)...(19): siRNA sense strand
uaccacuuauuccggagua

SEQ ID NO: 421935 - RNA, 19 nt, Homo sapiens
  misc_RNA (1)...(19): siRNA sense strand
auuuagagcccuacuuuga

SEQ ID NO: 421936 - RNA, 19 nt, Homo sapiens
  misc_RNA (1)...(19): siRNA sense strand
gaccuucaggccaaacuug

SEQ ID NO: 421937 - RNA, 19 nt, Homo sapiens
  misc_RNA (1)...(19): siRNA sense strand
aguaaaagcaucuccauaa

SEQ ID NO: 421938 - RNA, 19 nt, Homo sapiens
  misc_RNA (1)...(19): siRNA sense strand
auacaagaagucacuauca

SEQ ID NO: 421939 - RNA, 19 nt, Homo sapiens
  misc_RNA (1)...(19): siRNA sense strand
cuccggaggugguagcuau

SEQ ID NO: 421940 - RNA, 19 nt, Homo sapiens
  misc_RNA (1)...(19): siRNA sense strand
acgaggauauagcccagaa

SEQ ID NO: 421941 - RNA, 19 nt, Homo sapiens
  misc_RNA (1)...(19): siRNA sense strand
caaagaagcuugugagaaa

SEQ ID NO: 421942 - RNA, 19 nt, Homo sapiens
  misc_RNA (1)...(19): siRNA sense strand
gaagagcaguuccauguua

SEQ ID NO: 421943 - RNA, 19 nt, Homo sapiens
  misc_RNA (1)...(19): siRNA sense strand
ggauggagcuaucuaaaua

SEQ ID NO: 421944 - RNA, 19 nt, Homo sapiens
  misc_RNA (1)...(19): siRNA sense strand
gaaagaagauaccauugaa

SEQ ID NO: 421945 - RNA, 19 nt, Homo sapiens
  misc_RNA (1)...(19): siRNA sense strand
gaaagaguuugaugugaaa

SEQ ID NO: 421946 - RNA, 19 nt, Homo sapiens
  misc_RNA (1)...(19): siRNA sense strand
gaacacaguugagucauau

SEQ ID NO: 421947 - RNA, 19 nt, Homo sapiens
  misc_RNA (1)...(19): siRNA sense strand
gaugauggcugaugacaau

SEQ ID NO: 421948 - RNA, 19 nt, Homo sapiens
  misc_RNA (1)...(19): siRNA sense strand
ggaauuacguagccaguau

SEQ ID NO: 421949 - RNA, 19 nt, Homo sapiens
  misc_RNA (1)...(19): siRNA sense strand
gcagcaacauaaucugaua

SEQ ID NO: 421950 - RNA, 19 nt, Homo sapiens
  misc_RNA (1)...(19): siRNA sense strand
gaaagguacuacuacuauu

SEQ ID NO: 421951 - RNA, 19 nt, Homo sapiens
  misc_RNA (1)...(19): siRNA sense strand
gaagauaccauugaaaguu

SEQ ID NO: 421952 - RNA, 19 nt, Homo sapiens
  misc_RNA (1)...(19): siRNA sense strand
gaagauccaugaugcaaag

SEQ ID NO: 421953 - RNA, 19 nt, Homo sapiens
  misc_RNA (1)...(19): siRNA sense strand
ugaauacaguggaauguuu

SEQ ID NO: 421954 - RNA, 19 nt, Homo sapiens
  misc_RNA (1)...(19): siRNA sense strand
ggacauacuuauuugaaca

SEQ ID NO: 421955 - RNA, 19 nt, Homo sapiens
  misc_RNA (1)...(19): siRNA sense strand
gcacacaaauacacuaugg

SEQ ID NO: 421956 - RNA, 19 nt, Homo sapiens
  misc_RNA (1)...(19): siRNA sense strand
cacauacaauggauucuua

SEQ ID NO: 421957 - RNA, 19 nt, Homo sapiens
  misc_RNA (1)...(19): siRNA sense strand
gagaaacgcgcacaagauu

SEQ ID NO: 421958 - RNA, 19 nt, Homo sapiens
  misc_RNA (1)...(19): siRNA sense strand
gauggaagcuaugaaguau

SEQ ID NO: 421959 - RNA, 19 nt, Homo sapiens
  misc_RNA (1)...(19): siRNA sense strand
gaaacgcgcacaagauuug

SEQ ID NO: 421960 - RNA, 19 nt, Homo sapiens
  misc_RNA (1)...(19): siRNA sense strand
ggagcuaucuaaauacugu

SEQ ID NO: 421961 - RNA, 19 nt, Homo sapiens
  misc_RNA (1)...(19): siRNA sense strand
gaacguggcacacaaauac

SEQ ID NO: 421962 - RNA, 19 nt, Homo sapiens
  misc_RNA (1)...(19): siRNA sense strand
caaaugcacuaaauuccuu

SEQ ID NO: 421963 - RNA, 19 nt, Homo sapiens
  misc_RNA (1)...(19): siRNA sense strand
gcacaagauuuggagauga

SEQ ID NO: 421964 - RNA, 19 nt, Homo sapiens
  misc_RNA (1)...(19): siRNA sense strand
agagagccguucagaauuu

SEQ ID NO: 421965 - RNA, 19 nt, Homo sapiens
  misc_RNA (1)...(19): siRNA sense strand
uaaauuccuuggugcagua

SEQ ID NO: 421966 - RNA, 19 nt, Homo sapiens
  misc_RNA (1)...(19): siRNA sense strand
gagaacuacuugaaagaga

SEQ ID NO: 421967 - RNA, 19 nt, Homo sapiens
  misc_RNA (1)...(19): siRNA sense strand
agaaagaguuugaugugaa

SEQ ID NO: 421968 - RNA, 19 nt, Homo sapiens
  misc_RNA (1)...(19): siRNA sense strand
caaaugaagauacuccuaa

SEQ ID NO: 421969 - RNA, 19 nt, Homo sapiens
  misc_RNA (1)...(19): siRNA sense strand
acagagaaaugaauggaaa

SEQ ID NO: 421970 - RNA, 19 nt, Homo sapiens
  misc_RNA (1)...(19): siRNA sense strand
gaaagagaaacaacuaugu

SEQ ID NO: 421971 - RNA, 19 nt, Homo sapiens
  misc_RNA (1)...(19): siRNA sense strand
ugaagauacuccuaaauca

SEQ ID NO: 421972 - RNA, 19 nt, Homo sapiens
  misc_RNA (1)...(19): siRNA sense strand
ugaacacaguugagucaua

SEQ ID NO: 421973 - RNA, 19 nt, Homo sapiens
  misc_RNA (1)...(19): siRNA sense strand
gauggcugaugacaauaua

SEQ ID NO: 421974 - RNA, 19 nt, Homo sapiens
  misc_RNA (1)...(19): siRNA sense strand
gcaacauaaucugauagua

SEQ ID NO: 421975 - RNA, 19 nt, Homo sapiens
  misc_RNA (1)...(19): siRNA sense strand
ugacggacauacuuauuug

SEQ ID NO: 421976 - RNA, 19 nt, Homo sapiens
  misc_RNA (1)...(19): siRNA sense strand
cuaaaucaguuccagagaa

SEQ ID NO: 421977 - RNA, 19 nt, Homo sapiens
  misc_RNA (1)...(19): siRNA sense strand
gcaaagcccucggacaaag

SEQ ID NO: 421978 - RNA, 19 nt, Homo sapiens
  misc_RNA (1)...(19): siRNA sense strand
gcaguuccauguuauaaac

SEQ ID NO: 421979 - RNA, 19 nt, Homo sapiens
  misc_RNA (1)...(19): siRNA sense strand
ggacagaaacggacugaag

SEQ ID NO: 421980 - RNA, 19 nt, Homo sapiens
  misc_RNA (1)...(19): siRNA sense strand
gccaguaugucaacuccua

SEQ ID NO: 421981 - RNA, 19 nt, Homo sapiens
  misc_RNA (1)...(19): siRNA sense strand
gcugcaauguuuacuaaug

SEQ ID NO: 421982 - RNA, 19 nt, Homo sapiens
  misc_RNA (1)...(19): siRNA sense strand
ucagagagccguucagaau

SEQ ID NO: 421983 - RNA, 19 nt, Homo sapiens
  misc_RNA (1)...(19): siRNA sense strand
gcaagaaagaguuugaugu

SEQ ID NO: 421984 - RNA, 19 nt, Homo sapiens
  misc_RNA (1)...(19): siRNA sense strand
ggcaugaugugcagaauag

SEQ ID NO: 421985 - RNA, 19 nt, Homo sapiens
  misc_RNA (1)...(19): siRNA sense strand
gagaaacaacuaugugaug

SEQ ID NO: 421986 - RNA, 19 nt, Homo sapiens
  misc_RNA (1)...(19): siRNA sense strand
ugaaagaagauaccauuga

SEQ ID NO: 421987 - RNA, 19 nt, Homo sapiens
  misc_RNA (1)...(19): siRNA sense strand
caagaaagaguuugaugug

SEQ ID NO: 421988 - RNA, 19 nt, Homo sapiens
  misc_RNA (1)...(19): siRNA sense strand
aaacuucugugcagugaug

SEQ ID NO: 421989 - RNA, 19 nt, Homo sapiens
  misc_RNA (1)...(19): siRNA sense strand
caacauaaucugauaguac

SEQ ID NO: 421990 - RNA, 19 nt, Homo sapiens
  misc_RNA (1)...(19): siRNA sense strand
gcuuccagcuaaugaaauu

SEQ ID NO: 421991 - RNA, 19 nt, Homo sapiens
  misc_RNA (1)...(19): siRNA sense strand
acaacuaugugaugugcua

SEQ ID NO: 421992 - RNA, 19 nt, Homo sapiens
  misc_RNA (1)...(19): siRNA sense strand
uaaaucaguuccagagaag

SEQ ID NO: 421993 - RNA, 19 nt, Homo sapiens
  misc_RNA (1)...(19): siRNA sense strand
gcaaaugaagauacuccua

SEQ ID NO: 421994 - RNA, 19 nt, Homo sapiens
  misc_RNA (1)...(19): siRNA sense strand
gcuaugaaagguacuacua

SEQ ID NO: 421995 - RNA, 19 nt, Homo sapiens
  misc_RNA (1)...(19): siRNA sense strand
acacuucauugagguaaua

SEQ ID NO: 421996 - RNA, 19 nt, Homo sapiens
  misc_RNA (1)...(19): siRNA sense strand
ggaaggaguagauccaaau

SEQ ID NO: 421997 - RNA, 19 nt, Homo sapiens
  misc_RNA (1)...(19): siRNA sense strand
gcgcagugucugauuauuu

SEQ ID NO: 421998 - RNA, 19 nt, Homo sapiens
  misc_RNA (1)...(19): siRNA sense strand
gcccauagguugguucuca

SEQ ID NO: 421999 - RNA, 19 nt, Homo sapiens
  misc_RNA (1)...(19): siRNA sense strand
gagcaguuccauguuauaa

SEQ ID NO: 422000 - RNA, 19 nt, Homo sapiens
  misc_RNA (1)...(19): siRNA sense strand
gucagugucuggcaagaaa

SEQ ID NO: 422001 - RNA, 19 nt, Homo sapiens
  misc_RNA (1)...(19): siRNA sense strand
ggcaaaaucuggacuguga

SEQ ID NO: 422002 - RNA, 19 nt, Homo sapiens
  misc_RNA (1)...(19): siRNA sense strand
ugaaagguacuacuacuau

SEQ ID NO: 422003 - RNA, 19 nt, Homo sapiens
  misc_RNA (1)...(19): siRNA sense strand
uggaagcuaugaaguauca

SEQ ID NO: 422004 - RNA, 19 nt, Homo sapiens
  misc_RNA (1)...(19): siRNA sense strand
gaaacggacugaagaaaag

SEQ ID NO: 422005 - RNA, 19 nt, Homo sapiens
  misc_RNA (1)...(19): siRNA sense strand
gggaggaagagacgguuua

SEQ ID NO: 422006 - RNA, 19 nt, Homo sapiens
  misc_RNA (1)...(19): siRNA sense strand
gaacuacuugaaagagaaa

SEQ ID NO: 422007 - RNA, 19 nt, Homo sapiens
  misc_RNA (1)...(19): siRNA sense strand
gcccaaggcuguacagaac

SEQ ID NO: 422008 - RNA, 19 nt, Homo sapiens
  misc_RNA (1)...(19): siRNA sense strand
cuacgugguuggaggauau

SEQ ID NO: 422009 - RNA, 19 nt, Homo sapiens
  misc_RNA (1)...(19): siRNA sense strand
gaugugaaacagauccuaa

SEQ ID NO: 422010 - RNA, 19 nt, Homo sapiens
  misc_RNA (1)...(19): siRNA sense strand
ggacaaagccuagaaaauc

SEQ ID NO: 422011 - RNA, 19 nt, Homo sapiens
  misc_RNA (1)...(19): siRNA sense strand
gugcagugaugacauuaau

SEQ ID NO: 422012 - RNA, 19 nt, Homo sapiens
  misc_RNA (1)...(19): siRNA sense strand
gaacacuucauugagguaa

SEQ ID NO: 422013 - RNA, 19 nt, Homo sapiens
  misc_RNA (1)...(19): siRNA sense strand
acaacacucugaagacaug

SEQ ID NO: 422014 - RNA, 19 nt, Homo sapiens
  misc_RNA (1)...(19): siRNA sense strand
gcuuagggauucgaucauu

SEQ ID NO: 422015 - RNA, 19 nt, Homo sapiens
  misc_RNA (1)...(19): siRNA sense strand
gacagaaacggacugaaga

SEQ ID NO: 422016 - RNA, 19 nt, Homo sapiens
  misc_RNA (1)...(19): siRNA sense strand
aaccauugcuccaggcuuu

SEQ ID NO: 422017 - RNA, 19 nt, Homo sapiens
  misc_RNA (1)...(19): siRNA sense strand
ggaguugccacauacaaug

SEQ ID NO: 422018 - RNA, 19 nt, Homo sapiens
  misc_RNA (1)...(19): siRNA sense strand
ggagucgcaguuauugaua

SEQ ID NO: 422019 - RNA, 19 nt, Homo sapiens
  misc_RNA (1)...(19): siRNA sense strand
ggccguaggcuucaauuug

SEQ ID NO: 422020 - RNA, 19 nt, Homo sapiens
  misc_RNA (1)...(19): siRNA sense strand
gauccaaaugcacuaaauu

SEQ ID NO: 422021 - RNA, 19 nt, Homo sapiens
  misc_RNA (1)...(19): siRNA sense strand
cugcaauguuuacuaauga

SEQ ID NO: 422022 - RNA, 19 nt, Homo sapiens
  misc_RNA (1)...(19): siRNA sense strand
ccaaggcuguacagaacuu

SEQ ID NO: 422023 - RNA, 19 nt, Homo sapiens
  misc_RNA (1)...(19): siRNA sense strand
ugauggaagcuaugaagua

SEQ ID NO: 422024 - RNA, 19 nt, Homo sapiens
  misc_RNA (1)...(19): siRNA sense strand
agaacuacuugaaagagaa

SEQ ID NO: 422025 - RNA, 19 nt, Homo sapiens
  misc_RNA (1)...(19): siRNA sense strand
ggaccaauguaugcuguag

SEQ ID NO: 422026 - RNA, 19 nt, Homo sapiens
  misc_RNA (1)...(19): siRNA sense strand
aagaaagaguuugauguga

SEQ ID NO: 422027 - RNA, 19 nt, Homo sapiens
  misc_RNA (1)...(19): siRNA sense strand
ggaggaagagacgguuuaa

SEQ ID NO: 422028 - RNA, 19 nt, Homo sapiens
  misc_RNA (1)...(19): siRNA sense strand
gagaagauccaugaugcaa

SEQ ID NO: 422029 - RNA, 19 nt, Homo sapiens
  misc_RNA (1)...(19): siRNA sense strand
ucaaacugcuuagggauuc

SEQ ID NO: 422030 - RNA, 19 nt, Homo sapiens
  misc_RNA (1)...(19): siRNA sense strand
agaaacaacuaugugaugu

SEQ ID NO: 422031 - RNA, 19 nt, Homo sapiens
  misc_RNA (1)...(19): siRNA sense strand
gaagauacuccuaaaucag

SEQ ID NO: 422032 - RNA, 19 nt, Homo sapiens
  misc_RNA (1)...(19): siRNA sense strand
gcacagagaaaugaaugga

SEQ ID NO: 422033 - RNA, 19 nt, Homo sapiens
  misc_RNA (1)...(19): siRNA sense strand
gaguuugugugcuccaaug

SEQ ID NO: 422034 - RNA, 19 nt, Homo sapiens
  misc_RNA (1)...(19): siRNA sense strand
aagcacaguugguguuguu

SEQ ID NO: 422035 - RNA, 19 nt, Homo sapiens
  misc_RNA (1)...(19): siRNA sense strand
ggaugcugcuuucuuacau

SEQ ID NO: 422036 - RNA, 19 nt, Homo sapiens
  misc_RNA (1)...(19): siRNA sense strand
uaaugugccugaugaagag

SEQ ID NO: 422037 - RNA, 19 nt, Homo sapiens
  misc_RNA (1)...(19): siRNA sense strand
acaaauacacuauggaaca

SEQ ID NO: 422038 - RNA, 19 nt, Homo sapiens
  misc_RNA (1)...(19): siRNA sense strand
gagagccguucagaauuug

SEQ ID NO: 422039 - RNA, 19 nt, Homo sapiens
  misc_RNA (1)...(19): siRNA sense strand
gaaggaguagauccaaaug

SEQ ID NO: 422040 - RNA, 19 nt, Homo sapiens
  misc_RNA (1)...(19): siRNA sense strand
acacaacacucugaagaca

SEQ ID NO: 422041 - RNA, 19 nt, Homo sapiens
  misc_RNA (1)...(19): siRNA sense strand
caaagaagcuugugagaaa

SEQ ID NO: 422042 - RNA, 19 nt, Homo sapiens
  misc_RNA (1)...(19): siRNA sense strand
gaagagcaguuccauguua

SEQ ID NO: 422043 - RNA, 19 nt, Homo sapiens
  misc_RNA (1)...(19): siRNA sense strand
ggauggagcuaucuaaaua

SEQ ID NO: 422044 - RNA, 19 nt, Homo sapiens
  misc_RNA (1)...(19): siRNA sense strand
gaaagaagauaccauugaa

SEQ ID NO: 422045 - RNA, 19 nt, Homo sapiens
  misc_RNA (1)...(19): siRNA sense strand
gaaagaguuugaugugaaa

SEQ ID NO: 422046 - RNA, 19 nt, Homo sapiens
  misc_RNA (1)...(19): siRNA sense strand
gaacacaguugagucauau

SEQ ID NO: 422047 - RNA, 19 nt, Homo sapiens
  misc_RNA (1)...(19): siRNA sense strand
gaugauggcugaugacaau

SEQ ID NO: 422048 - RNA, 19 nt, Homo sapiens
  misc_RNA (1)...(19): siRNA sense strand
ggaauuacguagccaguau

SEQ ID NO: 422049 - RNA, 19 nt, Homo sapiens
  misc_RNA (1)...(19): siRNA sense strand
gcagcaacauaaucugaua

SEQ ID NO: 422050 - RNA, 19 nt, Homo sapiens
  misc_RNA (1)...(19): siRNA sense strand
gaaagguacuacuacuauu

SEQ ID NO: 422051 - RNA, 19 nt, Homo sapiens
  misc_RNA (1)...(19): siRNA sense strand
gaagauaccauugaaaguu

SEQ ID NO: 422052 - RNA, 19 nt, Homo sapiens
  misc_RNA (1)...(19): siRNA sense strand
gaagauccaugaugcaaag

SEQ ID NO: 422053 - RNA, 19 nt, Homo sapiens
  misc_RNA (1)...(19): siRNA sense strand
ugaauacaguggaauguuu

SEQ ID NO: 422054 - RNA, 19 nt, Homo sapiens
  misc_RNA (1)...(19): siRNA sense strand
ggacauacuuauuugaaca

SEQ ID NO: 422055 - RNA, 19 nt, Homo sapiens
  misc_RNA (1)...(19): siRNA sense strand
gcacacaaauacacuaugg

SEQ ID NO: 422056 - RNA, 19 nt, Homo sapiens
  misc_RNA (1)...(19): siRNA sense strand
cacauacaauggauucuua

SEQ ID NO: 422057 - RNA, 19 nt, Homo sapiens
  misc_RNA (1)...(19): siRNA sense strand
gagaaacgcgcacaagauu

SEQ ID NO: 422058 - RNA, 19 nt, Homo sapiens
  misc_RNA (1)...(19): siRNA sense strand
gauggaagcuaugaaguau

SEQ ID NO: 422059 - RNA, 19 nt, Homo sapiens
  misc_RNA (1)...(19): siRNA sense strand
gaaacgcgcacaagauuug

SEQ ID NO: 422060 - RNA, 19 nt, Homo sapiens
  misc_RNA (1)...(19): siRNA sense strand
ggagcuaucuaaauacugu

SEQ ID NO: 422061 - RNA, 19 nt, Homo sapiens
  misc_RNA (1)...(19): siRNA sense strand
gaacguggcacacaaauac

SEQ ID NO: 422062 - RNA, 19 nt, Homo sapiens
  misc_RNA (1)...(19): siRNA sense strand
caaaugcacuaaauuccuu

SEQ ID NO: 422063 - RNA, 19 nt, Homo sapiens
  misc_RNA (1)...(19): siRNA sense strand
gcacaagauuuggagauga

SEQ ID NO: 422064 - RNA, 19 nt, Homo sapiens
  misc_RNA (1)...(19): siRNA sense strand
agagagccguucagaauuu

SEQ ID NO: 422065 - RNA, 19 nt, Homo sapiens
  misc_RNA (1)...(19): siRNA sense strand
uaaauuccuuggugcagua

SEQ ID NO: 422066 - RNA, 19 nt, Homo sapiens
  misc_RNA (1)...(19): siRNA sense strand
gagaacuacuugaaagaga

SEQ ID NO: 422067 - RNA, 19 nt, Homo sapiens
  misc_RNA (1)...(19): siRNA sense strand
agaaagaguuugaugugaa

SEQ ID NO: 422068 - RNA, 19 nt, Homo sapiens
  misc_RNA (1)...(19): siRNA sense strand
caaaugaagauacuccuaa

SEQ ID NO: 422069 - RNA, 19 nt, Homo sapiens
  misc_RNA (1)...(19): siRNA sense strand
acagagaaaugaauggaaa

SEQ ID NO: 422070 - RNA, 19 nt, Homo sapiens
  misc_RNA (1)...(19): siRNA sense strand
gaaagagaaacaacuaugu

SEQ ID NO: 422071 - RNA, 19 nt, Homo sapiens
  misc_RNA (1)...(19): siRNA sense strand
ugaagauacuccuaaauca

SEQ ID NO: 422072 - RNA, 19 nt, Homo sapiens
  misc_RNA (1)...(19): siRNA sense strand
ugaacacaguugagucaua

SEQ ID NO: 422073 - RNA, 19 nt, Homo sapiens
  misc_RNA (1)...(19): siRNA sense strand
gauggcugaugacaauaua

SEQ ID NO: 422074 - RNA, 19 nt, Homo sapiens
  misc_RNA (1)...(19): siRNA sense strand
gcaacauaaucugauagua

SEQ ID NO: 422075 - RNA, 19 nt, Homo sapiens
  misc_RNA (1)...(19): siRNA sense strand
ugacggacauacuuauuug

SEQ ID NO: 422076 - RNA, 19 nt, Homo sapiens
  misc_RNA (1)...(19): siRNA sense strand
cuaaaucaguuccagagaa

SEQ ID NO: 422077 - RNA, 19 nt, Homo sapiens
  misc_RNA (1)...(19): siRNA sense strand
gcaaagcccucggacaaag

SEQ ID NO: 422078 - RNA, 19 nt, Homo sapiens
  misc_RNA (1)...(19): siRNA sense strand
gcaguuccauguuauaaac

SEQ ID NO: 422079 - RNA, 19 nt, Homo sapiens
  misc_RNA (1)...(19): siRNA sense strand
ggacagaaacggacugaag

SEQ ID NO: 422080 - RNA, 19 nt, Homo sapiens
  misc_RNA (1)...(19): siRNA sense strand
gccaguaugucaacuccua

SEQ ID NO: 422081 - RNA, 19 nt, Homo sapiens
  misc_RNA (1)...(19): siRNA sense strand
gcugcaauguuuacuaaug

SEQ ID NO: 422082 - RNA, 19 nt, Homo sapiens
  misc_RNA (1)...(19): siRNA sense strand
ucagagagccguucagaau

SEQ ID NO: 422083 - RNA, 19 nt, Homo sapiens
  misc_RNA (1)...(19): siRNA sense strand
gcaagaaagaguuugaugu

SEQ ID NO: 422084 - RNA, 19 nt, Homo sapiens
  misc_RNA (1)...(19): siRNA sense strand
ggcaugaugugcagaauag

SEQ ID NO: 422085 - RNA, 19 nt, Homo sapiens
  misc_RNA (1)...(19): siRNA sense strand
gagaaacaacuaugugaug

SEQ ID NO: 422086 - RNA, 19 nt, Homo sapiens
  misc_RNA (1)...(19): siRNA sense strand
ugaaagaagauaccauuga

SEQ ID NO: 422087 - RNA, 19 nt, Homo sapiens
  misc_RNA (1)...(19): siRNA sense strand
caagaaagaguuugaugug

SEQ ID NO: 422088 - RNA, 19 nt, Homo sapiens
  misc_RNA (1)...(19): siRNA sense strand
aaacuucugugcagugaug

SEQ ID NO: 422089 - RNA, 19 nt, Homo sapiens
  misc_RNA (1)...(19): siRNA sense strand
caacauaaucugauaguac

SEQ ID NO: 422090 - RNA, 19 nt, Homo sapiens
  misc_RNA (1)...(19): siRNA sense strand
gcuuccagcuaaugaaauu

SEQ ID NO: 422091 - RNA, 19 nt, Homo sapiens
  misc_RNA (1)...(19): siRNA sense strand
acaacuaugugaugugcua

SEQ ID NO: 422092 - RNA, 19 nt, Homo sapiens
  misc_RNA (1)...(19): siRNA sense strand
uaaaucaguuccagagaag

SEQ ID NO: 422093 - RNA, 19 nt, Homo sapiens
  misc_RNA (1)...(19): siRNA sense strand
gcaaaugaagauacuccua

SEQ ID NO: 422094 - RNA, 19 nt, Homo sapiens
  misc_RNA (1)...(19): siRNA sense strand
ccacacagaagcugaaaga

SEQ ID NO: 422095 - RNA, 19 nt, Homo sapiens
  misc_RNA (1)...(19): siRNA sense strand
gcuaugaaagguacuacua

SEQ ID NO: 422096 - RNA, 19 nt, Homo sapiens
  misc_RNA (1)...(19): siRNA sense strand
acacuucauugagguaaua

SEQ ID NO: 422097 - RNA, 19 nt, Homo sapiens
  misc_RNA (1)...(19): siRNA sense strand
ggaaggaguagauccaaau

SEQ ID NO: 422098 - RNA, 19 nt, Homo sapiens
  misc_RNA (1)...(19): siRNA sense strand
gcgcagugucugauuauuu

SEQ ID NO: 422099 - RNA, 19 nt, Homo sapiens
  misc_RNA (1)...(19): siRNA sense strand
gcccauagguugguucuca

SEQ ID NO: 422100 - RNA, 19 nt, Homo sapiens
  misc_RNA (1)...(19): siRNA sense strand
gagcaguuccauguuauaa

SEQ ID NO: 422101 - RNA, 19 nt, Homo sapiens
  misc_RNA (1)...(19): siRNA sense strand
gucagugucuggcaagaaa

SEQ ID NO: 422102 - RNA, 19 nt, Homo sapiens
  misc_RNA (1)...(19): siRNA sense strand
ggcaaaaucuggacuguga

SEQ ID NO: 422103 - RNA, 19 nt, Homo sapiens
  misc_RNA (1)...(19): siRNA sense strand
ugaaagguacuacuacuau

SEQ ID NO: 422104 - RNA, 19 nt, Homo sapiens
  misc_RNA (1)...(19): siRNA sense strand
uggaagcuaugaaguauca

SEQ ID NO: 422105 - RNA, 19 nt, Homo sapiens
  misc_RNA (1)...(19): siRNA sense strand
gaacuacuugaaagagaaa

SEQ ID NO: 422106 - RNA, 19 nt, Homo sapiens
  misc_RNA (1)...(19): siRNA sense strand
gggaggaagagacgguuua

SEQ ID NO: 422107 - RNA, 19 nt, Homo sapiens
  misc_RNA (1)...(19): siRNA sense strand
gaaacggacugaagaaaag

SEQ ID NO: 422108 - RNA, 19 nt, Homo sapiens
  misc_RNA (1)...(19): siRNA sense strand
gcccaaggcuguacagaac

SEQ ID NO: 422109 - RNA, 19 nt, Homo sapiens
  misc_RNA (1)...(19): siRNA sense strand
cuacgugguuggaggauau

SEQ ID NO: 422110 - RNA, 19 nt, Homo sapiens
  misc_RNA (1)...(19): siRNA sense strand
gaugugaaacagauccuaa

SEQ ID NO: 422111 - RNA, 19 nt, Homo sapiens
  misc_RNA (1)...(19): siRNA sense strand
ggacaaagccuagaaaauc

SEQ ID NO: 422112 - RNA, 19 nt, Homo sapiens
  misc_RNA (1)...(19): siRNA sense strand
gugcagugaugacauuaau

SEQ ID NO: 422113 - RNA, 19 nt, Homo sapiens
  misc_RNA (1)...(19): siRNA sense strand
gaacacuucauugagguaa

SEQ ID NO: 422114 - RNA, 19 nt, Homo sapiens
  misc_RNA (1)...(19): siRNA sense strand
acaacacucugaagacaug

SEQ ID NO: 422115 - RNA, 19 nt, Homo sapiens
  misc_RNA (1)...(19): siRNA sense strand
gcuuagggauucgaucauu

SEQ ID NO: 422116 - RNA, 19 nt, Homo sapiens
  misc_RNA (1)...(19): siRNA sense strand
gacagaaacggacugaaga

SEQ ID NO: 422117 - RNA, 19 nt, Homo sapiens
  misc_RNA (1)...(19): siRNA sense strand
acacagaagcugaaagaga

SEQ ID NO: 422118 - RNA, 19 nt, Homo sapiens
  misc_RNA (1)...(19): siRNA sense strand
aaccauugcuccaggcuuu

SEQ ID NO: 422119 - RNA, 19 nt, Homo sapiens
  misc_RNA (1)...(19): siRNA sense strand
ggaguugccacauacaaug

SEQ ID NO: 422120 - RNA, 19 nt, Homo sapiens
  misc_RNA (1)...(19): siRNA sense strand
ggagucgcaguuauugaua

SEQ ID NO: 422121 - RNA, 19 nt, Homo sapiens
  misc_RNA (1)...(19): siRNA sense strand
ggccguaggcuucaauuug

SEQ ID NO: 422122 - RNA, 19 nt, Homo sapiens
  misc_RNA (1)...(19): siRNA sense strand
gauccaaaugcacuaaauu

SEQ ID NO: 422123 - RNA, 19 nt, Homo sapiens
  misc_RNA (1)...(19): siRNA sense strand
cugcaauguuuacuaauga

SEQ ID NO: 422124 - RNA, 19 nt, Homo sapiens
  misc_RNA (1)...(19): siRNA sense strand
ccaaggcuguacagaacuu

SEQ ID NO: 422125 - RNA, 19 nt, Homo sapiens
  misc_RNA (1)...(19): siRNA sense strand
ugauggaagcuaugaagua

SEQ ID NO: 422126 - RNA, 19 nt, Homo sapiens
  misc_RNA (1)...(19): siRNA sense strand
agaacuacuugaaagagaa

SEQ ID NO: 422127 - RNA, 19 nt, Homo sapiens
  misc_RNA (1)...(19): siRNA sense strand
ggaccaauguaugcuguag

SEQ ID NO: 422128 - RNA, 19 nt, Homo sapiens
  misc_RNA (1)...(19): siRNA sense strand
aagaaagaguuugauguga

SEQ ID NO: 422129 - RNA, 19 nt, Homo sapiens
  misc_RNA (1)...(19): siRNA sense strand
ggaggaagagacgguuuaa

SEQ ID NO: 422130 - RNA, 19 nt, Homo sapiens
  misc_RNA (1)...(19): siRNA sense strand
gagaagauccaugaugcaa

SEQ ID NO: 422131 - RNA, 19 nt, Homo sapiens
  misc_RNA (1)...(19): siRNA sense strand
ucaaacugcuuagggauuc

SEQ ID NO: 422132 - RNA, 19 nt, Homo sapiens
  misc_RNA (1)...(19): siRNA sense strand
agaaacaacuaugugaugu

SEQ ID NO: 422133 - RNA, 19 nt, Homo sapiens
  misc_RNA (1)...(19): siRNA sense strand
gaaggaguagauccaaaug

SEQ ID NO: 422134 - RNA, 19 nt, Homo sapiens
  misc_RNA (1)...(19): siRNA sense strand
gcacagagaaaugaaugga

SEQ ID NO: 422135 - RNA, 19 nt, Homo sapiens
  misc_RNA (1)...(19): siRNA sense strand
gaguuugugugcuccaaug

SEQ ID NO: 422136 - RNA, 19 nt, Homo sapiens
  misc_RNA (1)...(19): siRNA sense strand
aagcacaguugguguuguu

SEQ ID NO: 422137 - RNA, 19 nt, Homo sapiens
  misc_RNA (1)...(19): siRNA sense strand
ggaugcugcuuucuuacau

SEQ ID NO: 422138 - RNA, 19 nt, Homo sapiens
  misc_RNA (1)...(19): siRNA sense strand
gagagccguucagaauuug

SEQ ID NO: 422139 - RNA, 19 nt, Homo sapiens
  misc_RNA (1)...(19): siRNA sense strand
uaaugugccugaugaagag

SEQ ID NO: 422140 - RNA, 19 nt, Homo sapiens
  misc_RNA (1)...(19): siRNA sense strand
acaaauacacuauggaaca

SEQ ID NO: 422141 - RNA, 19 nt, Homo sapiens
  misc_RNA (1)...(19): siRNA sense strand
caaagaagcuugugagaaa

SEQ ID NO: 422142 - RNA, 19 nt, Homo sapiens
  misc_RNA (1)...(19): siRNA sense strand
gaagagcaguuccauguua

SEQ ID NO: 422143 - RNA, 19 nt, Homo sapiens
  misc_RNA (1)...(19): siRNA sense strand
ggauggagcuaucuaaaua

SEQ ID NO: 422144 - RNA, 19 nt, Homo sapiens
  misc_RNA (1)...(19): siRNA sense strand
gaaagaagauaccauugaa

SEQ ID NO: 422145 - RNA, 19 nt, Homo sapiens
  misc_RNA (1)...(19): siRNA sense strand
gaaagaguuugaugugaaa

SEQ ID NO: 422146 - RNA, 19 nt, Homo sapiens
  misc_RNA (1)...(19): siRNA sense strand
gaacacaguugagucauau

SEQ ID NO: 422147 - RNA, 19 nt, Homo sapiens
  misc_RNA (1)...(19): siRNA sense strand
gaugauggcugaugacaau

SEQ ID NO: 422148 - RNA, 19 nt, Homo sapiens
  misc_RNA (1)...(19): siRNA sense strand
ggaauuacguagccaguau

SEQ ID NO: 422149 - RNA, 19 nt, Homo sapiens
  misc_RNA (1)...(19): siRNA sense strand
gcagcaacauaaucugaua

SEQ ID NO: 422150 - RNA, 19 nt, Homo sapiens
  misc_RNA (1)...(19): siRNA sense strand
gaaagguacuacuacuauu

SEQ ID NO: 422151 - RNA, 19 nt, Homo sapiens
  misc_RNA (1)...(19): siRNA sense strand
gaagauaccauugaaaguu

SEQ ID NO: 422152 - RNA, 19 nt, Homo sapiens
  misc_RNA (1)...(19): siRNA sense strand
gaagauccaugaugcaaag

SEQ ID NO: 422153 - RNA, 19 nt, Homo sapiens
  misc_RNA (1)...(19): siRNA sense strand
ugaauacaguggaauguuu

SEQ ID NO: 422154 - RNA, 19 nt, Homo sapiens
  misc_RNA (1)...(19): siRNA sense strand
ggacauacuuauuugaaca

SEQ ID NO: 422155 - RNA, 19 nt, Homo sapiens
  misc_RNA (1)...(19): siRNA sense strand
gcacacaaauacacuaugg

SEQ ID NO: 422156 - RNA, 19 nt, Homo sapiens
  misc_RNA (1)...(19): siRNA sense strand
cacauacaauggauucuua

SEQ ID NO: 422157 - RNA, 19 nt, Homo sapiens
  misc_RNA (1)...(19): siRNA sense strand
gagaaacgcgcacaagauu

SEQ ID NO: 422158 - RNA, 19 nt, Homo sapiens
  misc_RNA (1)...(19): siRNA sense strand
gauggaagcuaugaaguau

SEQ ID NO: 422159 - RNA, 19 nt, Homo sapiens
  misc_RNA (1)...(19): siRNA sense strand
gaaacgcgcacaagauuug

SEQ ID NO: 422160 - RNA, 19 nt, Homo sapiens
  misc_RNA (1)...(19): siRNA sense strand
ggagcuaucuaaauacugu

SEQ ID NO: 422161 - RNA, 19 nt, Homo sapiens
  misc_RNA (1)...(19): siRNA sense strand
gaacguggcacacaaauac

SEQ ID NO: 422162 - RNA, 19 nt, Homo sapiens
  misc_RNA (1)...(19): siRNA sense strand
caaaugcacuaaauuccuu

SEQ ID NO: 422163 - RNA, 19 nt, Homo sapiens
  misc_RNA (1)...(19): siRNA sense strand
gcacaagauuuggagauga

SEQ ID NO: 422164 - RNA, 19 nt, Homo sapiens
  misc_RNA (1)...(19): siRNA sense strand
agagagccguucagaauuu

SEQ ID NO: 422165 - RNA, 19 nt, Homo sapiens
  misc_RNA (1)...(19): siRNA sense strand
uaaauuccuuggugcagua

SEQ ID NO: 422166 - RNA, 19 nt, Homo sapiens
  misc_RNA (1)...(19): siRNA sense strand
gagaacuacuugaaagaga

SEQ ID NO: 422167 - RNA, 19 nt, Homo sapiens
  misc_RNA (1)...(19): siRNA sense strand
agaaagaguuugaugugaa

SEQ ID NO: 422168 - RNA, 19 nt, Homo sapiens
  misc_RNA (1)...(19): siRNA sense strand
caaaugaagauacuccuaa

SEQ ID NO: 422169 - RNA, 19 nt, Homo sapiens
  misc_RNA (1)...(19): siRNA sense strand
acagagaaaugaauggaaa

SEQ ID NO: 422170 - RNA, 19 nt, Homo sapiens
  misc_RNA (1)...(19): siRNA sense strand
gaaagagaaacaacuaugu

SEQ ID NO: 422171 - RNA, 19 nt, Homo sapiens
  misc_RNA (1)...(19): siRNA sense strand
ugaagauacuccuaaauca

SEQ ID NO: 422172 - RNA, 19 nt, Homo sapiens
  misc_RNA (1)...(19): siRNA sense strand
ugaacacaguugagucaua

SEQ ID NO: 422173 - RNA, 19 nt, Homo sapiens
  misc_RNA (1)...(19): siRNA sense strand
gauggcugaugacaauaua

SEQ ID NO: 422174 - RNA, 19 nt, Homo sapiens
  misc_RNA (1)...(19): siRNA sense strand
gcaacauaaucugauagua

SEQ ID NO: 422175 - RNA, 19 nt, Homo sapiens
  misc_RNA (1)...(19): siRNA sense strand
ugacggacauacuuauuug

SEQ ID NO: 422176 - RNA, 19 nt, Homo sapiens
  misc_RNA (1)...(19): siRNA sense strand
cuaaaucaguuccagagaa

SEQ ID NO: 422177 - RNA, 19 nt, Homo sapiens
  misc_RNA (1)...(19): siRNA sense strand
gcaaagcccucggacaaag

SEQ ID NO: 422178 - RNA, 19 nt, Homo sapiens
  misc_RNA (1)...(19): siRNA sense strand
gcaguuccauguuauaaac

SEQ ID NO: 422179 - RNA, 19 nt, Homo sapiens
  misc_RNA (1)...(19): siRNA sense strand
ggacagaaacggacugaag

SEQ ID NO: 422180 - RNA, 19 nt, Homo sapiens
  misc_RNA (1)...(19): siRNA sense strand
gccaguaugucaacuccua

SEQ ID NO: 422181 - RNA, 19 nt, Homo sapiens
  misc_RNA (1)...(19): siRNA sense strand
gcugcaauguuuacuaaug

SEQ ID NO: 422182 - RNA, 19 nt, Homo sapiens
  misc_RNA (1)...(19): siRNA sense strand
ucagagagccguucagaau

SEQ ID NO: 422183 - RNA, 19 nt, Homo sapiens
  misc_RNA (1)...(19): siRNA sense strand
gcaagaaagaguuugaugu

SEQ ID NO: 422184 - RNA, 19 nt, Homo sapiens
  misc_RNA (1)...(19): siRNA sense strand
ggcaugaugugcagaauag

SEQ ID NO: 422185 - RNA, 19 nt, Homo sapiens
  misc_RNA (1)...(19): siRNA sense strand
gagaaacaacuaugugaug

SEQ ID NO: 422186 - RNA, 19 nt, Homo sapiens
  misc_RNA (1)...(19): siRNA sense strand
ugaaagaagauaccauuga

SEQ ID NO: 422187 - RNA, 19 nt, Homo sapiens
  misc_RNA (1)...(19): siRNA sense strand
caagaaagaguuugaugug

SEQ ID NO: 422188 - RNA, 19 nt, Homo sapiens
  misc_RNA (1)...(19): siRNA sense strand
aaacuucugugcagugaug

SEQ ID NO: 422189 - RNA, 19 nt, Homo sapiens
  misc_RNA (1)...(19): siRNA sense strand
caacauaaucugauaguac

SEQ ID NO: 422190 - RNA, 19 nt, Homo sapiens
  misc_RNA (1)...(19): siRNA sense strand
gcuuccagcuaaugaaauu

SEQ ID NO: 422191 - RNA, 19 nt, Homo sapiens
  misc_RNA (1)...(19): siRNA sense strand
acaacuaugugaugugcua

SEQ ID NO: 422192 - RNA, 19 nt, Homo sapiens
  misc_RNA (1)...(19): siRNA sense strand
uaaaucaguuccagagaag

SEQ ID NO: 422193 - RNA, 19 nt, Homo sapiens
  misc_RNA (1)...(19): siRNA sense strand
gcaaaugaagauacuccua

SEQ ID NO: 422194 - RNA, 19 nt, Homo sapiens
  misc_RNA (1)...(19): siRNA sense strand
gcuaugaaagguacuacua

SEQ ID NO: 422195 - RNA, 19 nt, Homo sapiens
  misc_RNA (1)...(19): siRNA sense strand
acacuucauugagguaaua

SEQ ID NO: 422196 - RNA, 19 nt, Homo sapiens
  misc_RNA (1)...(19): siRNA sense strand
ggaaggaguagauccaaau

SEQ ID NO: 422197 - RNA, 19 nt, Homo sapiens
  misc_RNA (1)...(19): siRNA sense strand
gcgcagugucugauuauuu

SEQ ID NO: 422198 - RNA, 19 nt, Homo sapiens
  misc_RNA (1)...(19): siRNA sense strand
gcccauagguugguucuca

SEQ ID NO: 422199 - RNA, 19 nt, Homo sapiens
  misc_RNA (1)...(19): siRNA sense strand
gagcaguuccauguuauaa

SEQ ID NO: 422200 - RNA, 19 nt, Homo sapiens
  misc_RNA (1)...(19): siRNA sense strand
gucagugucuggcaagaaa

SEQ ID NO: 422201 - RNA, 19 nt, Homo sapiens
  misc_RNA (1)...(19): siRNA sense strand
ggcaaaaucuggacuguga

SEQ ID NO: 422202 - RNA, 19 nt, Homo sapiens
  misc_RNA (1)...(19): siRNA sense strand
ugaaagguacuacuacuau

SEQ ID NO: 422203 - RNA, 19 nt, Homo sapiens
  misc_RNA (1)...(19): siRNA sense strand
uggaagcuaugaaguauca

SEQ ID NO: 422204 - RNA, 19 nt, Homo sapiens
  misc_RNA (1)...(19): siRNA sense strand
gaaacggacugaagaaaag

SEQ ID NO: 422205 - RNA, 19 nt, Homo sapiens
  misc_RNA (1)...(19): siRNA sense strand
gggaggaagagacgguuua

SEQ ID NO: 422206 - RNA, 19 nt, Homo sapiens
  misc_RNA (1)...(19): siRNA sense strand
gaacuacuugaaagagaaa

SEQ ID NO: 422207 - RNA, 19 nt, Homo sapiens
  misc_RNA (1)...(19): siRNA sense strand
gcccaaggcuguacagaac

SEQ ID NO: 422208 - RNA, 19 nt, Homo sapiens
  misc_RNA (1)...(19): siRNA sense strand
cuacgugguuggaggauau

SEQ ID NO: 422209 - RNA, 19 nt, Homo sapiens
  misc_RNA (1)...(19): siRNA sense strand
gaugugaaacagauccuaa

SEQ ID NO: 422210 - RNA, 19 nt, Homo sapiens
  misc_RNA (1)...(19): siRNA sense strand
ggacaaagccuagaaaauc

SEQ ID NO: 422211 - RNA, 19 nt, Homo sapiens
  misc_RNA (1)...(19): siRNA sense strand
gugcagugaugacauuaau

SEQ ID NO: 422212 - RNA, 19 nt, Homo sapiens
  misc_RNA (1)...(19): siRNA sense strand
gaacacuucauugagguaa

SEQ ID NO: 422213 - RNA, 19 nt, Homo sapiens
  misc_RNA (1)...(19): siRNA sense strand
acaacacucugaagacaug

SEQ ID NO: 422214 - RNA, 19 nt, Homo sapiens
  misc_RNA (1)...(19): siRNA sense strand
gcuuagggauucgaucauu

SEQ ID NO: 422215 - RNA, 19 nt, Homo sapiens
  misc_RNA (1)...(19): siRNA sense strand
gacagaaacggacugaaga

SEQ ID NO: 422216 - RNA, 19 nt, Homo sapiens
  misc_RNA (1)...(19): siRNA sense strand
aaccauugcuccaggcuuu

SEQ ID NO: 422217 - RNA, 19 nt, Homo sapiens
  misc_RNA (1)...(19): siRNA sense strand
ggaguugccacauacaaug

SEQ ID NO: 422218 - RNA, 19 nt, Homo sapiens
  misc_RNA (1)...(19): siRNA sense strand
ggagucgcaguuauugaua

SEQ ID NO: 422219 - RNA, 19 nt, Homo sapiens
  misc_RNA (1)...(19): siRNA sense strand
ggccguaggcuucaauuug

SEQ ID NO: 422220 - RNA, 19 nt, Homo sapiens
  misc_RNA (1)...(19): siRNA sense strand
gauccaaaugcacuaaauu

SEQ ID NO: 422221 - RNA, 19 nt, Homo sapiens
  misc_RNA (1)...(19): siRNA sense strand
cugcaauguuuacuaauga

SEQ ID NO: 422222 - RNA, 19 nt, Homo sapiens
  misc_RNA (1)...(19): siRNA sense strand
ccaaggcuguacagaacuu

SEQ ID NO: 422223 - RNA, 19 nt, Homo sapiens
  misc_RNA (1)...(19): siRNA sense strand
ugauggaagcuaugaagua

SEQ ID NO: 422224 - RNA, 19 nt, Homo sapiens
  misc_RNA (1)...(19): siRNA sense strand
agaacuacuugaaagagaa

SEQ ID NO: 422225 - RNA, 19 nt, Homo sapiens
  misc_RNA (1)...(19): siRNA sense strand
ggaccaauguaugcuguag

SEQ ID NO: 422226 - RNA, 19 nt, Homo sapiens
  misc_RNA (1)...(19): siRNA sense strand
aagaaagaguuugauguga

SEQ ID NO: 422227 - RNA, 19 nt, Homo sapiens
  misc_RNA (1)...(19): siRNA sense strand
ggaggaagagacgguuuaa

SEQ ID NO: 422228 - RNA, 19 nt, Homo sapiens
  misc_RNA (1)...(19): siRNA sense strand
gagaagauccaugaugcaa

SEQ ID NO: 422229 - RNA, 19 nt, Homo sapiens
  misc_RNA (1)...(19): siRNA sense strand
ucaaacugcuuagggauuc

SEQ ID NO: 422230 - RNA, 19 nt, Homo sapiens
  misc_RNA (1)...(19): siRNA sense strand
agaaacaacuaugugaugu

SEQ ID NO: 422231 - RNA, 19 nt, Homo sapiens
  misc_RNA (1)...(19): siRNA sense strand
gaagauacuccuaaaucag

SEQ ID NO: 422232 - RNA, 19 nt, Homo sapiens
  misc_RNA (1)...(19): siRNA sense strand
gcacagagaaaugaaugga

SEQ ID NO: 422233 - RNA, 19 nt, Homo sapiens
  misc_RNA (1)...(19): siRNA sense strand
gaguuugugugcuccaaug

SEQ ID NO: 422234 - RNA, 19 nt, Homo sapiens
  misc_RNA (1)...(19): siRNA sense strand
aagcacaguugguguuguu

SEQ ID NO: 422235 - RNA, 19 nt, Homo sapiens
  misc_RNA (1)...(19): siRNA sense strand
ggaugcugcuuucuuacau

SEQ ID NO: 422236 - RNA, 19 nt, Homo sapiens
  misc_RNA (1)...(19): siRNA sense strand
uaaugugccugaugaagag

SEQ ID NO: 422237 - RNA, 19 nt, Homo sapiens
  misc_RNA (1)...(19): siRNA sense strand
acaaauacacuauggaaca

SEQ ID NO: 422238 - RNA, 19 nt, Homo sapiens
  misc_RNA (1)...(19): siRNA sense strand
gagagccguucagaauuug

SEQ ID NO: 422239 - RNA, 19 nt, Homo sapiens
  misc_RNA (1)...(19): siRNA sense strand
gaaggaguagauccaaaug

SEQ ID NO: 422240 - RNA, 19 nt, Homo sapiens
  misc_RNA (1)...(19): siRNA sense strand
acacaacacucugaagaca

SEQ ID NO: 422241 - RNA, 19 nt, Homo sapiens
  misc_RNA (1)...(19): siRNA sense strand
caaagaagcuugugagaaa

SEQ ID NO: 422242 - RNA, 19 nt, Homo sapiens
  misc_RNA (1)...(19): siRNA sense strand
gaagagcaguuccauguua

SEQ ID NO: 422243 - RNA, 19 nt, Homo sapiens
  misc_RNA (1)...(19): siRNA sense strand
ggauggagcuaucuaaaua

SEQ ID NO: 422244 - RNA, 19 nt, Homo sapiens
  misc_RNA (1)...(19): siRNA sense strand
gaaagaagauaccauugaa

SEQ ID NO: 422245 - RNA, 19 nt, Homo sapiens
  misc_RNA (1)...(19): siRNA sense strand
gaaagaguuugaugugaaa

SEQ ID NO: 422246 - RNA, 19 nt, Homo sapiens
  misc_RNA (1)...(19): siRNA sense strand
gaacacaguugagucauau

SEQ ID NO: 422247 - RNA, 19 nt, Homo sapiens
  misc_RNA (1)...(19): siRNA sense strand
gaugauggcugaugacaau

SEQ ID NO: 422248 - RNA, 19 nt, Homo sapiens
  misc_RNA (1)...(19): siRNA sense strand
ggaauuacguagccaguau

SEQ ID NO: 422249 - RNA, 19 nt, Homo sapiens
  misc_RNA (1)...(19): siRNA sense strand
gcagcaacauaaucugaua

SEQ ID NO: 422250 - RNA, 19 nt, Homo sapiens
  misc_RNA (1)...(19): siRNA sense strand
gaaagguacuacuacuauu

SEQ ID NO: 422251 - RNA, 19 nt, Homo sapiens
  misc_RNA (1)...(19): siRNA sense strand
gaagauaccauugaaaguu

SEQ ID NO: 422252 - RNA, 19 nt, Homo sapiens
  misc_RNA (1)...(19): siRNA sense strand
gaagauccaugaugcaaag

SEQ ID NO: 422253 - RNA, 19 nt, Homo sapiens
  misc_RNA (1)...(19): siRNA sense strand
ugaauacaguggaauguuu

SEQ ID NO: 422254 - RNA, 19 nt, Homo sapiens
  misc_RNA (1)...(19): siRNA sense strand
ggacauacuuauuugaaca

SEQ ID NO: 422255 - RNA, 19 nt, Homo sapiens
  misc_RNA (1)...(19): siRNA sense strand
gcacacaaauacacuaugg

SEQ ID NO: 422256 - RNA, 19 nt, Homo sapiens
  misc_RNA (1)...(19): siRNA sense strand
cacauacaauggauucuua

SEQ ID NO: 422257 - RNA, 19 nt, Homo sapiens
  misc_RNA (1)...(19): siRNA sense strand
gagaaacgcgcacaagauu

SEQ ID NO: 422258 - RNA, 19 nt, Homo sapiens
  misc_RNA (1)...(19): siRNA sense strand
gauggaagcuaugaaguau

SEQ ID NO: 422259 - RNA, 19 nt, Homo sapiens
  misc_RNA (1)...(19): siRNA sense strand
gaaacgcgcacaagauuug

SEQ ID NO: 422260 - RNA, 19 nt, Homo sapiens
  misc_RNA (1)...(19): siRNA sense strand
ggagcuaucuaaauacugu

SEQ ID NO: 422261 - RNA, 19 nt, Homo sapiens
  misc_RNA (1)...(19): siRNA sense strand
gaacguggcacacaaauac

SEQ ID NO: 422262 - RNA, 19 nt, Homo sapiens
  misc_RNA (1)...(19): siRNA sense strand
caaaugcacuaaauuccuu

SEQ ID NO: 422263 - RNA, 19 nt, Homo sapiens
  misc_RNA (1)...(19): siRNA sense strand
gcacaagauuuggagauga

SEQ ID NO: 422264 - RNA, 19 nt, Homo sapiens
  misc_RNA (1)...(19): siRNA sense strand
agagagccguucagaauuu

SEQ ID NO: 422265 - RNA, 19 nt, Homo sapiens
  misc_RNA (1)...(19): siRNA sense strand
uaaauuccuuggugcagua

SEQ ID NO: 422266 - RNA, 19 nt, Homo sapiens
  misc_RNA (1)...(19): siRNA sense strand
gagaacuacuugaaagaga

SEQ ID NO: 422267 - RNA, 19 nt, Homo sapiens
  misc_RNA (1)...(19): siRNA sense strand
agaaagaguuugaugugaa

SEQ ID NO: 422268 - RNA, 19 nt, Homo sapiens
  misc_RNA (1)...(19): siRNA sense strand
caaaugaagauacuccuaa

SEQ ID NO: 422269 - RNA, 19 nt, Homo sapiens
  misc_RNA (1)...(19): siRNA sense strand
acagagaaaugaauggaaa

SEQ ID NO: 422270 - RNA, 19 nt, Homo sapiens
  misc_RNA (1)...(19): siRNA sense strand
gaaagagaaacaacuaugu

SEQ ID NO: 422271 - RNA, 19 nt, Homo sapiens
  misc_RNA (1)...(19): siRNA sense strand
ugaagauacuccuaaauca

SEQ ID NO: 422272 - RNA, 19 nt, Homo sapiens
  misc_RNA (1)...(19): siRNA sense strand
ugaacacaguugagucaua

SEQ ID NO: 422273 - RNA, 19 nt, Homo sapiens
  misc_RNA (1)...(19): siRNA sense strand
gauggcugaugacaauaua

SEQ ID NO: 422274 - RNA, 19 nt, Homo sapiens
  misc_RNA (1)...(19): siRNA sense strand
gcaacauaaucugauagua

SEQ ID NO: 422275 - RNA, 19 nt, Homo sapiens
  misc_RNA (1)...(19): siRNA sense strand
ugacggacauacuuauuug

SEQ ID NO: 422276 - RNA, 19 nt, Homo sapiens
  misc_RNA (1)...(19): siRNA sense strand
cuaaaucaguuccagagaa

SEQ ID NO: 422277 - RNA, 19 nt, Homo sapiens
  misc_RNA (1)...(19): siRNA sense strand
gcaaagcccucggacaaag

SEQ ID NO: 422278 - RNA, 19 nt, Homo sapiens
  misc_RNA (1)...(19): siRNA sense strand
gcaguuccauguuauaaac

SEQ ID NO: 422279 - RNA, 19 nt, Homo sapiens
  misc_RNA (1)...(19): siRNA sense strand
ggacagaaacggacugaag

SEQ ID NO: 422280 - RNA, 19 nt, Homo sapiens
  misc_RNA (1)...(19): siRNA sense strand
gccaguaugucaacuccua

SEQ ID NO: 422281 - RNA, 19 nt, Homo sapiens
  misc_RNA (1)...(19): siRNA sense strand
gcugcaauguuuacuaaug

SEQ ID NO: 422282 - RNA, 19 nt, Homo sapiens
  misc_RNA (1)...(19): siRNA sense strand
ucagagagccguucagaau

SEQ ID NO: 422283 - RNA, 19 nt, Homo sapiens
  misc_RNA (1)...(19): siRNA sense strand
gcaagaaagaguuugaugu

SEQ ID NO: 422284 - RNA, 19 nt, Homo sapiens
  misc_RNA (1)...(19): siRNA sense strand
ggcaugaugugcagaauag

SEQ ID NO: 422285 - RNA, 19 nt, Homo sapiens
  misc_RNA (1)...(19): siRNA sense strand
gagaaacaacuaugugaug

SEQ ID NO: 422286 - RNA, 19 nt, Homo sapiens
  misc_RNA (1)...(19): siRNA sense strand
ugaaagaagauaccauuga

SEQ ID NO: 422287 - RNA, 19 nt, Homo sapiens
  misc_RNA (1)...(19): siRNA sense strand
caagaaagaguuugaugug

SEQ ID NO: 422288 - RNA, 19 nt, Homo sapiens
  misc_RNA (1)...(19): siRNA sense strand
aaacuucugugcagugaug

SEQ ID NO: 422289 - RNA, 19 nt, Homo sapiens
  misc_RNA (1)...(19): siRNA sense strand
caacauaaucugauaguac

SEQ ID NO: 422290 - RNA, 19 nt, Homo sapiens
  misc_RNA (1)...(19): siRNA sense strand
gcuuccagcuaaugaaauu

SEQ ID NO: 422291 - RNA, 19 nt, Homo sapiens
  misc_RNA (1)...(19): siRNA sense strand
acaacuaugugaugugcua

SEQ ID NO: 422292 - RNA, 19 nt, Homo sapiens
  misc_RNA (1)...(19): siRNA sense strand
uaaaucaguuccagagaag

SEQ ID NO: 422293 - RNA, 19 nt, Homo sapiens
  misc_RNA (1)...(19): siRNA sense strand
gcaaaugaagauacuccua

SEQ ID NO: 422294 - RNA, 19 nt, Homo sapiens
  misc_RNA (1)...(19): siRNA sense strand
ccacacagaagcugaaaga

SEQ ID NO: 422295 - RNA, 19 nt, Homo sapiens
  misc_RNA (1)...(19): siRNA sense strand
gcuaugaaagguacuacua

SEQ ID NO: 422296 - RNA, 19 nt, Homo sapiens
  misc_RNA (1)...(19): siRNA sense strand
acacuucauugagguaaua

SEQ ID NO: 422297 - RNA, 19 nt, Homo sapiens
  misc_RNA (1)...(19): siRNA sense strand
ggaaggaguagauccaaau

SEQ ID NO: 422298 - RNA, 19 nt, Homo sapiens
  misc_RNA (1)...(19): siRNA sense strand
gcgcagugucugauuauuu

SEQ ID NO: 422299 - RNA, 19 nt, Homo sapiens
  misc_RNA (1)...(19): siRNA sense strand
gcccauagguugguucuca

SEQ ID NO: 422300 - RNA, 19 nt, Homo sapiens
  misc_RNA (1)...(19): siRNA sense strand
gagcaguuccauguuauaa

SEQ ID NO: 422301 - RNA, 19 nt, Homo sapiens
  misc_RNA (1)...(19): siRNA sense strand
gucagugucuggcaagaaa

SEQ ID NO: 422302 - RNA, 19 nt, Homo sapiens
  misc_RNA (1)...(19): siRNA sense strand
ggcaaaaucuggacuguga

SEQ ID NO: 422303 - RNA, 19 nt, Homo sapiens
  misc_RNA (1)...(19): siRNA sense strand
ugaaagguacuacuacuau

SEQ ID NO: 422304 - RNA, 19 nt, Homo sapiens
  misc_RNA (1)...(19): siRNA sense strand
uggaagcuaugaaguauca

SEQ ID NO: 422305 - RNA, 19 nt, Homo sapiens
  misc_RNA (1)...(19): siRNA sense strand
gaacuacuugaaagagaaa

SEQ ID NO: 422306 - RNA, 19 nt, Homo sapiens
  misc_RNA (1)...(19): siRNA sense strand
gggaggaagagacgguuua

SEQ ID NO: 422307 - RNA, 19 nt, Homo sapiens
  misc_RNA (1)...(19): siRNA sense strand
gaaacggacugaagaaaag

SEQ ID NO: 422308 - RNA, 19 nt, Homo sapiens
  misc_RNA (1)...(19): siRNA sense strand
gcccaaggcuguacagaac

SEQ ID NO: 422309 - RNA, 19 nt, Homo sapiens
  misc_RNA (1)...(19): siRNA sense strand
cuacgugguuggaggauau

SEQ ID NO: 422310 - RNA, 19 nt, Homo sapiens
  misc_RNA (1)...(19): siRNA sense strand
gaugugaaacagauccuaa

SEQ ID NO: 422311 - RNA, 19 nt, Homo sapiens
  misc_RNA (1)...(19): siRNA sense strand
ggacaaagccuagaaaauc

SEQ ID NO: 422312 - RNA, 19 nt, Homo sapiens
  misc_RNA (1)...(19): siRNA sense strand
gugcagugaugacauuaau

SEQ ID NO: 422313 - RNA, 19 nt, Homo sapiens
  misc_RNA (1)...(19): siRNA sense strand
gaacacuucauugagguaa

SEQ ID NO: 422314 - RNA, 19 nt, Homo sapiens
  misc_RNA (1)...(19): siRNA sense strand
acaacacucugaagacaug

SEQ ID NO: 422315 - RNA, 19 nt, Homo sapiens
  misc_RNA (1)...(19): siRNA sense strand
gcuuagggauucgaucauu

SEQ ID NO: 422316 - RNA, 19 nt, Homo sapiens
  misc_RNA (1)...(19): siRNA sense strand
gacagaaacggacugaaga

SEQ ID NO: 422317 - RNA, 19 nt, Homo sapiens
  misc_RNA (1)...(19): siRNA sense strand
acacagaagcugaaagaga

SEQ ID NO: 422318 - RNA, 19 nt, Homo sapiens
  misc_RNA (1)...(19): siRNA sense strand
aaccauugcuccaggcuuu

SEQ ID NO: 422319 - RNA, 19 nt, Homo sapiens
  misc_RNA (1)...(19): siRNA sense strand
ggaguugccacauacaaug

SEQ ID NO: 422320 - RNA, 19 nt, Homo sapiens
  misc_RNA (1)...(19): siRNA sense strand
ggagucgcaguuauugaua

SEQ ID NO: 422321 - RNA, 19 nt, Homo sapiens
  misc_RNA (1)...(19): siRNA sense strand
ggccguaggcuucaauuug

SEQ ID NO: 422322 - RNA, 19 nt, Homo sapiens
  misc_RNA (1)...(19): siRNA sense strand
gauccaaaugcacuaaauu

SEQ ID NO: 422323 - RNA, 19 nt, Homo sapiens
  misc_RNA (1)...(19): siRNA sense strand
cugcaauguuuacuaauga

SEQ ID NO: 422324 - RNA, 19 nt, Homo sapiens
  misc_RNA (1)...(19): siRNA sense strand
ccaaggcuguacagaacuu

SEQ ID NO: 422325 - RNA, 19 nt, Homo sapiens
  misc_RNA (1)...(19): siRNA sense strand
ugauggaagcuaugaagua

SEQ ID NO: 422326 - RNA, 19 nt, Homo sapiens
  misc_RNA (1)...(19): siRNA sense strand
agaacuacuugaaagagaa

SEQ ID NO: 422327 - RNA, 19 nt, Homo sapiens
  misc_RNA (1)...(19): siRNA sense strand
ggaccaauguaugcuguag

SEQ ID NO: 422328 - RNA, 19 nt, Homo sapiens
  misc_RNA (1)...(19): siRNA sense strand
aagaaagaguuugauguga

SEQ ID NO: 422329 - RNA, 19 nt, Homo sapiens
  misc_RNA (1)...(19): siRNA sense strand
ggaggaagagacgguuuaa

SEQ ID NO: 422330 - RNA, 19 nt, Homo sapiens
  misc_RNA (1)...(19): siRNA sense strand
gagaagauccaugaugcaa

SEQ ID NO: 422331 - RNA, 19 nt, Homo sapiens
  misc_RNA (1)...(19): siRNA sense strand
ucaaacugcuuagggauuc

SEQ ID NO: 422332 - RNA, 19 nt, Homo sapiens
  misc_RNA (1)...(19): siRNA sense strand
agaaacaacuaugugaugu

SEQ ID NO: 422333 - RNA, 19 nt, Homo sapiens
  misc_RNA (1)...(19): siRNA sense strand
gaaggaguagauccaaaug

SEQ ID NO: 422334 - RNA, 19 nt, Homo sapiens
  misc_RNA (1)...(19): siRNA sense strand
gcacagagaaaugaaugga

SEQ ID NO: 422335 - RNA, 19 nt, Homo sapiens
  misc_RNA (1)...(19): siRNA sense strand
gaguuugugugcuccaaug

SEQ ID NO: 422336 - RNA, 19 nt, Homo sapiens
  misc_RNA (1)...(19): siRNA sense strand
aagcacaguugguguuguu

SEQ ID NO: 422337 - RNA, 19 nt, Homo sapiens
  misc_RNA (1)...(19): siRNA sense strand
ggaugcugcuuucuuacau

SEQ ID NO: 422338 - RNA, 19 nt, Homo sapiens
  misc_RNA (1)...(19): siRNA sense strand
gagagccguucagaauuug

SEQ ID NO: 422339 - RNA, 19 nt, Homo sapiens
  misc_RNA (1)...(19): siRNA sense strand
uaaugugccugaugaagag

SEQ ID NO: 422340 - RNA, 19 nt, Homo sapiens
  misc_RNA (1)...(19): siRNA sense strand
acaaauacacuauggaaca

SEQ ID NO: 422341 - RNA, 19 nt, Homo sapiens
  misc_RNA (1)...(19): siRNA sense strand
cgacauggcuuucaucuua

SEQ ID NO: 422342 - RNA, 19 nt, Homo sapiens
  misc_RNA (1)...(19): siRNA sense strand
caaagaaccuugugaaguu

SEQ ID NO: 422343 - RNA, 19 nt, Homo sapiens
  misc_RNA (1)...(19): siRNA sense strand
ggacuuggauuaugaacua

SEQ ID NO: 422344 - RNA, 19 nt, Homo sapiens
  misc_RNA (1)...(19): siRNA sense strand
ucaaugagaugaagaagua

SEQ ID NO: 422345 - RNA, 19 nt, Homo sapiens
  misc_RNA (1)...(19): siRNA sense strand
caacaaagccugugacuau

SEQ ID NO: 422346 - RNA, 19 nt, Homo sapiens
  misc_RNA (1)...(19): siRNA sense strand
ggagagaccucacagacuu

SEQ ID NO: 422347 - RNA, 19 nt, Homo sapiens
  misc_RNA (1)...(19): siRNA sense strand
ggacacaguuuaugaagau

SEQ ID NO: 422348 - RNA, 19 nt, Homo sapiens
  misc_RNA (1)...(19): siRNA sense strand
ggaggagguuggaaagaua

SEQ ID NO: 422349 - RNA, 19 nt, Homo sapiens
  misc_RNA (1)...(19): siRNA sense strand
gauguggucuugaguauug

SEQ ID NO: 422350 - RNA, 19 nt, Homo sapiens
  misc_RNA (1)...(19): siRNA sense strand
gaaagggaauccuggaaga

SEQ ID NO: 422351 - RNA, 19 nt, Homo sapiens
  misc_RNA (1)...(19): siRNA sense strand
gaacggcacucaagguuuc

SEQ ID NO: 422352 - RNA, 19 nt, Homo sapiens
  misc_RNA (1)...(19): siRNA sense strand
gcagggauuucauauuaaa

SEQ ID NO: 422353 - RNA, 19 nt, Homo sapiens
  misc_RNA (1)...(19): siRNA sense strand
gaauugcgguggcucagua

SEQ ID NO: 422354 - RNA, 19 nt, Homo sapiens
  misc_RNA (1)...(19): siRNA sense strand
gaagaaagcagacauugug

SEQ ID NO: 422355 - RNA, 19 nt, Homo sapiens
  misc_RNA (1)...(19): siRNA sense strand
uugcagggauuucauauua

SEQ ID NO: 422356 - RNA, 19 nt, Homo sapiens
  misc_RNA (1)...(19): siRNA sense strand
gaacuagccuuugcuuuag

SEQ ID NO: 422357 - RNA, 19 nt, Homo sapiens
  misc_RNA (1)...(19): siRNA sense strand
gcaggaaggugaacaucaa

SEQ ID NO: 422358 - RNA, 19 nt, Homo sapiens
  misc_RNA (1)...(19): siRNA sense strand
gaaagaguuuguccagaga

SEQ ID NO: 422359 - RNA, 19 nt, Homo sapiens
  misc_RNA (1)...(19): siRNA sense strand
gaagacacgccaacacuaa

SEQ ID NO: 422360 - RNA, 19 nt, Homo sapiens
  misc_RNA (1)...(19): siRNA sense strand
gaaggaacuugcagggauu

SEQ ID NO: 422361 - RNA, 19 nt, Homo sapiens
  misc_RNA (1)...(19): siRNA sense strand
gaagagaagcagcauaaug

SEQ ID NO: 422362 - RNA, 19 nt, Homo sapiens
  misc_RNA (1)...(19): siRNA sense strand
ucagagagcuucccaacau

SEQ ID NO: 422363 - RNA, 19 nt, Homo sapiens
  misc_RNA (1)...(19): siRNA sense strand
gaaagaaugugaaaagguu

SEQ ID NO: 422364 - RNA, 19 nt, Homo sapiens
  misc_RNA (1)...(19): siRNA sense strand
caacaaaguggucuacaaa

SEQ ID NO: 422365 - RNA, 19 nt, Homo sapiens
  misc_RNA (1)...(19): siRNA sense strand
gacuuucucuacaagauua

SEQ ID NO: 422366 - RNA, 19 nt, Homo sapiens
  misc_RNA (1)...(19): siRNA sense strand
agaacuagccuuugcuuua

SEQ ID NO: 422367 - RNA, 19 nt, Homo sapiens
  misc_RNA (1)...(19): siRNA sense strand
guacagcgaugaugucaag

SEQ ID NO: 422368 - RNA, 19 nt, Homo sapiens
  misc_RNA (1)...(19): siRNA sense strand
gaacaagggugccgaucag

SEQ ID NO: 422369 - RNA, 19 nt, Homo sapiens
  misc_RNA (1)...(19): siRNA sense strand
caacagaacuagccuuugc

SEQ ID NO: 422370 - RNA, 19 nt, Homo sapiens
  misc_RNA (1)...(19): siRNA sense strand
caacauagaagaaagaauc

SEQ ID NO: 422371 - RNA, 19 nt, Homo sapiens
  misc_RNA (1)...(19): siRNA sense strand
gcucuagacuuuguucgua

SEQ ID NO: 422372 - RNA, 19 nt, Homo sapiens
  misc_RNA (1)...(19): siRNA sense strand
cgacgucuucuucaaauua

SEQ ID NO: 422373 - RNA, 19 nt, Homo sapiens
  misc_RNA (1)...(19): siRNA sense strand
gagauguggucuugaguau

SEQ ID NO: 422374 - RNA, 19 nt, Homo sapiens
  misc_RNA (1)...(19): siRNA sense strand
guaagucccuagaugaaau

SEQ ID NO: 422375 - RNA, 19 nt, Homo sapiens
  misc_RNA (1)...(19): siRNA sense strand
gcuaaugcaucuggaguuu

SEQ ID NO: 422376 - RNA, 19 nt, Homo sapiens
  misc_RNA (1)...(19): siRNA sense strand
gaagaagaaagcagacauu

SEQ ID NO: 422377 - RNA, 19 nt, Homo sapiens
  misc_RNA (1)...(19): siRNA sense strand
uagagaggcugguugacua

SEQ ID NO: 422378 - RNA, 19 nt, Homo sapiens
  misc_RNA (1)...(19): siRNA sense strand
gaaaucggacaggaucuua

SEQ ID NO: 422379 - RNA, 19 nt, Homo sapiens
  misc_RNA (1)...(19): siRNA sense strand
caaagccugugacuauuau

SEQ ID NO: 422380 - RNA, 19 nt, Homo sapiens
  misc_RNA (1)...(19): siRNA sense strand
cgaauaacguuacuucaag

SEQ ID NO: 422381 - RNA, 19 nt, Homo sapiens
  misc_RNA (1)...(19): siRNA sense strand
gaaagcagacauuguguuc

SEQ ID NO: 422382 - RNA, 19 nt, Homo sapiens
  misc_RNA (1)...(19): siRNA sense strand
gggcucugcucuagacuuu

SEQ ID NO: 422383 - RNA, 19 nt, Homo sapiens
  misc_RNA (1)...(19): siRNA sense strand
gaggaaacaucggcacuug

SEQ ID NO: 422384 - RNA, 19 nt, Homo sapiens
  misc_RNA (1)...(19): siRNA sense strand
gaaauaguggacacaguuu

SEQ ID NO: 422385 - RNA, 19 nt, Homo sapiens
  misc_RNA (1)...(19): siRNA sense strand
gaucgaggauggagugcuu

SEQ ID NO: 422386 - RNA, 19 nt, Homo sapiens
  misc_RNA (1)...(19): siRNA sense strand
caaacgacgucuucuucaa

SEQ ID NO: 422387 - RNA, 19 nt, Homo sapiens
  misc_RNA (1)...(19): siRNA sense strand
gaaccugggcuaaauggaa

SEQ ID NO: 422388 - RNA, 19 nt, Homo sapiens
  misc_RNA (1)...(19): siRNA sense strand
cagagaugcucgagaaguu

SEQ ID NO: 422389 - RNA, 19 nt, Homo sapiens
  misc_RNA (1)...(19): siRNA sense strand
gaagaaagaaucaugaacu

SEQ ID NO: 422390 - RNA, 19 nt, Homo sapiens
  misc_RNA (1)...(19): siRNA sense strand
cagagucgcuucccaagau

SEQ ID NO: 422391 - RNA, 19 nt, Homo sapiens
  misc_RNA (1)...(19): siRNA sense strand
caacgaagccggugacuac

SEQ ID NO: 422392 - RNA, 19 nt, Homo sapiens
  misc_RNA (1)...(19): siRNA sense strand
ucacagacuuccuggagaa

SEQ ID NO: 422393 - RNA, 19 nt, Homo sapiens
  misc_RNA (1)...(19): siRNA sense strand
acggagaucuggcugauuu

SEQ ID NO: 422394 - RNA, 19 nt, Homo sapiens
  misc_RNA (1)...(19): siRNA sense strand
gaacagaaucagccagaug

SEQ ID NO: 422395 - RNA, 19 nt, Homo sapiens
  misc_RNA (1)...(19): siRNA sense strand
gcaaugcccuggaguacgu

SEQ ID NO: 422396 - RNA, 19 nt, Homo sapiens
  misc_RNA (1)...(19): siRNA sense strand
ucacagagaugcagaccau

SEQ ID NO: 422397 - RNA, 19 nt, Homo sapiens
  misc_RNA (1)...(19): siRNA sense strand
ucgaugagcucaaugugaa

SEQ ID NO: 422398 - RNA, 19 nt, Homo sapiens
  misc_RNA (1)...(19): siRNA sense strand
acaaagacggccacuguua

SEQ ID NO: 422399 - RNA, 19 nt, Homo sapiens
  misc_RNA (1)...(19): siRNA sense strand
ugacaacauugccgagaaa

SEQ ID NO: 422400 - RNA, 19 nt, Homo sapiens
  misc_RNA (1)...(19): siRNA sense strand
ccaagaggcagauuauuga

SEQ ID NO: 422401 - RNA, 19 nt, Homo sapiens
  misc_RNA (1)...(19): siRNA sense strand
ucuacaagauuaucgauga

SEQ ID NO: 422402 - RNA, 19 nt, Homo sapiens
  misc_RNA (1)...(19): siRNA sense strand
ggagagaggacccaaagga

SEQ ID NO: 422403 - RNA, 19 nt, Homo sapiens
  misc_RNA (1)...(19): siRNA sense strand
ggcgaggguuuauguauga

SEQ ID NO: 422404 - RNA, 19 nt, Homo sapiens
  misc_RNA (1)...(19): siRNA sense strand
ggaccaggcccgaguucua

SEQ ID NO: 422405 - RNA, 19 nt, Homo sapiens
  misc_RNA (1)...(19): siRNA sense strand
caaguaaauguuccgaaua

SEQ ID NO: 422406 - RNA, 19 nt, Homo sapiens
  misc_RNA (1)...(19): siRNA sense strand
cagagaggcugugcucaaa

SEQ ID NO: 422407 - RNA, 19 nt, Homo sapiens
  misc_RNA (1)...(19): siRNA sense strand
ggagaaagaggagauguug

SEQ ID NO: 422408 - RNA, 19 nt, Homo sapiens
  misc_RNA (1)...(19): siRNA sense strand
gguggaggccuuugacuuu

SEQ ID NO: 422409 - RNA, 19 nt, Homo sapiens
  misc_RNA (1)...(19): siRNA sense strand
ggaagacacgccaacacua

SEQ ID NO: 422410 - RNA, 19 nt, Homo sapiens
  misc_RNA (1)...(19): siRNA sense strand
ucaacaaaguggucuacaa

SEQ ID NO: 422411 - RNA, 19 nt, Homo sapiens
  misc_RNA (1)...(19): siRNA sense strand
ggaaguuucaguacaaaga

SEQ ID NO: 422412 - RNA, 19 nt, Homo sapiens
  misc_RNA (1)...(19): siRNA sense strand
ccacaaagacggccacugu

SEQ ID NO: 422413 - RNA, 19 nt, Homo sapiens
  misc_RNA (1)...(19): siRNA sense strand
ggaaacagugugauugguu

SEQ ID NO: 422414 - RNA, 19 nt, Homo sapiens
  misc_RNA (1)...(19): siRNA sense strand
cauagagaaugucuuugaa

SEQ ID NO: 422415 - RNA, 19 nt, Homo sapiens
  misc_RNA (1)...(19): siRNA sense strand
gauaggagaacaaggcauu

SEQ ID NO: 422416 - RNA, 19 nt, Homo sapiens
  misc_RNA (1)...(19): siRNA sense strand
aagaggagauguugggauu

SEQ ID NO: 422417 - RNA, 19 nt, Homo sapiens
  misc_RNA (1)...(19): siRNA sense strand
gacauucuguuccucuuug

SEQ ID NO: 422418 - RNA, 19 nt, Homo sapiens
  misc_RNA (1)...(19): siRNA sense strand
uaaaugcccuugcuguuac

SEQ ID NO: 422419 - RNA, 19 nt, Homo sapiens
  misc_RNA (1)...(19): siRNA sense strand
gauaaaugcccuugcuguu

SEQ ID NO: 422420 - RNA, 19 nt, Homo sapiens
  misc_RNA (1)...(19): siRNA sense strand
ggaaagauagcguccaaca

SEQ ID NO: 422421 - RNA, 19 nt, Homo sapiens
  misc_RNA (1)...(19): siRNA sense strand
cagagagcuucccaacaua

SEQ ID NO: 422422 - RNA, 19 nt, Homo sapiens
  misc_RNA (1)...(19): siRNA sense strand
gaagagggcgucccacagu

SEQ ID NO: 422423 - RNA, 19 nt, Homo sapiens
  misc_RNA (1)...(19): siRNA sense strand
caucaacgcuuugcagauc

SEQ ID NO: 422424 - RNA, 19 nt, Homo sapiens
  misc_RNA (1)...(19): siRNA sense strand
gaaaggagaaagaggagau

SEQ ID NO: 422425 - RNA, 19 nt, Homo sapiens
  misc_RNA (1)...(19): siRNA sense strand
ggugguaagucccuagaug

SEQ ID NO: 422426 - RNA, 19 nt, Homo sapiens
  misc_RNA (1)...(19): siRNA sense strand
acaaguaaauguuccgaau

SEQ ID NO: 422427 - RNA, 19 nt, Homo sapiens
  misc_RNA (1)...(19): siRNA sense strand
gaugcgagauguggucuug

SEQ ID NO: 422428 - RNA, 19 nt, Homo sapiens
  misc_RNA (1)...(19): siRNA sense strand
uccaaagcaucaaagauaa

SEQ ID NO: 422429 - RNA, 19 nt, Homo sapiens
  misc_RNA (1)...(19): siRNA sense strand
gggcgaggguuuauguaug

SEQ ID NO: 422430 - RNA, 19 nt, Homo sapiens
  misc_RNA (1)...(19): siRNA sense strand
ugaagagaaugaagaucaa

SEQ ID NO: 422431 - RNA, 19 nt, Homo sapiens
  misc_RNA (1)...(19): siRNA sense strand
ccacggaaguuucaguaca

SEQ ID NO: 422432 - RNA, 19 nt, Homo sapiens
  misc_RNA (1)...(19): siRNA sense strand
acaaagccugugacuauua

SEQ ID NO: 422433 - RNA, 19 nt, Homo sapiens
  misc_RNA (1)...(19): siRNA sense strand
ccaccacccuguuccaguu

SEQ ID NO: 422434 - RNA, 19 nt, Homo sapiens
  misc_RNA (1)...(19): siRNA sense strand
gagaggacccaaaggagaa

SEQ ID NO: 422435 - RNA, 19 nt, Homo sapiens
  misc_RNA (1)...(19): siRNA sense strand
gguggaagaugcacaggau

SEQ ID NO: 422436 - RNA, 19 nt, Homo sapiens
  misc_RNA (1)...(19): siRNA sense strand
gaagggcgaaguaggagaa

SEQ ID NO: 422437 - RNA, 19 nt, Homo sapiens
  misc_RNA (1)...(19): siRNA sense strand
aaagaaccuugugaaguuu

SEQ ID NO: 422438 - RNA, 19 nt, Homo sapiens
  misc_RNA (1)...(19): siRNA sense strand
gcucugcucuagacuuugu

SEQ ID NO: 422439 - RNA, 19 nt, Homo sapiens
  misc_RNA (1)...(19): siRNA sense strand
ccauagagaaugucuuuga

SEQ ID NO: 422440 - RNA, 19 nt, Homo sapiens
  misc_RNA (1)...(19): siRNA sense strand
gcagggaaccagggccuua

SEQ ID NO: 422441 - RNA, 19 nt, Homo sapiens
  misc_RNA (1)...(19): siRNA sense strand
cgacauggcuuucaucuua

SEQ ID NO: 422442 - RNA, 19 nt, Homo sapiens
  misc_RNA (1)...(19): siRNA sense strand
caaagaaccuugugaaguu

SEQ ID NO: 422443 - RNA, 19 nt, Homo sapiens
  misc_RNA (1)...(19): siRNA sense strand
ggacuuggauuaugaacua

SEQ ID NO: 422444 - RNA, 19 nt, Homo sapiens
  misc_RNA (1)...(19): siRNA sense strand
ucaaugagaugaagaagua

SEQ ID NO: 422445 - RNA, 19 nt, Homo sapiens
  misc_RNA (1)...(19): siRNA sense strand
caacaaagccugugacuau

SEQ ID NO: 422446 - RNA, 19 nt, Homo sapiens
  misc_RNA (1)...(19): siRNA sense strand
ggagagaccucacagacuu

SEQ ID NO: 422447 - RNA, 19 nt, Homo sapiens
  misc_RNA (1)...(19): siRNA sense strand
ggacacaguuuaugaagau

SEQ ID NO: 422448 - RNA, 19 nt, Homo sapiens
  misc_RNA (1)...(19): siRNA sense strand
ggaggagguuggaaagaua

SEQ ID NO: 422449 - RNA, 19 nt, Homo sapiens
  misc_RNA (1)...(19): siRNA sense strand
gauguggucuugaguauug

SEQ ID NO: 422450 - RNA, 19 nt, Homo sapiens
  misc_RNA (1)...(19): siRNA sense strand
gaaagggaauccuggaaga

SEQ ID NO: 422451 - RNA, 19 nt, Homo sapiens
  misc_RNA (1)...(19): siRNA sense strand
gaacggcacucaagguuuc

SEQ ID NO: 422452 - RNA, 19 nt, Homo sapiens
  misc_RNA (1)...(19): siRNA sense strand
gcagggauuucauauuaaa

SEQ ID NO: 422453 - RNA, 19 nt, Homo sapiens
  misc_RNA (1)...(19): siRNA sense strand
gaauugcgguggcucagua

SEQ ID NO: 422454 - RNA, 19 nt, Homo sapiens
  misc_RNA (1)...(19): siRNA sense strand
gaagaaagcagacauugug

SEQ ID NO: 422455 - RNA, 19 nt, Homo sapiens
  misc_RNA (1)...(19): siRNA sense strand
uugcagggauuucauauua

SEQ ID NO: 422456 - RNA, 19 nt, Homo sapiens
  misc_RNA (1)...(19): siRNA sense strand
gaacuagccuuugcuuuag

SEQ ID NO: 422457 - RNA, 19 nt, Homo sapiens
  misc_RNA (1)...(19): siRNA sense strand
gcaggaaggugaacaucaa

SEQ ID NO: 422458 - RNA, 19 nt, Homo sapiens
  misc_RNA (1)...(19): siRNA sense strand
gaaagaguuuguccagaga

SEQ ID NO: 422459 - RNA, 19 nt, Homo sapiens
  misc_RNA (1)...(19): siRNA sense strand
gaagacacgccaacacuaa

SEQ ID NO: 422460 - RNA, 19 nt, Homo sapiens
  misc_RNA (1)...(19): siRNA sense strand
gaaggaacuugcagggauu

SEQ ID NO: 422461 - RNA, 19 nt, Homo sapiens
  misc_RNA (1)...(19): siRNA sense strand
gaagagaagcagcauaaug

SEQ ID NO: 422462 - RNA, 19 nt, Homo sapiens
  misc_RNA (1)...(19): siRNA sense strand
ucagagagcuucccaacau

SEQ ID NO: 422463 - RNA, 19 nt, Homo sapiens
  misc_RNA (1)...(19): siRNA sense strand
gaaagaaugugaaaagguu

SEQ ID NO: 422464 - RNA, 19 nt, Homo sapiens
  misc_RNA (1)...(19): siRNA sense strand
caacaaaguggucuacaaa

SEQ ID NO: 422465 - RNA, 19 nt, Homo sapiens
  misc_RNA (1)...(19): siRNA sense strand
gacuuucucuacaagauua

SEQ ID NO: 422466 - RNA, 19 nt, Homo sapiens
  misc_RNA (1)...(19): siRNA sense strand
agaacuagccuuugcuuua

SEQ ID NO: 422467 - RNA, 19 nt, Homo sapiens
  misc_RNA (1)...(19): siRNA sense strand
guacagcgaugaugucaag

SEQ ID NO: 422468 - RNA, 19 nt, Homo sapiens
  misc_RNA (1)...(19): siRNA sense strand
gaacaagggugccgaucag

SEQ ID NO: 422469 - RNA, 19 nt, Homo sapiens
  misc_RNA (1)...(19): siRNA sense strand
caacagaacuagccuuugc

SEQ ID NO: 422470 - RNA, 19 nt, Homo sapiens
  misc_RNA (1)...(19): siRNA sense strand
caacauagaagaaagaauc

SEQ ID NO: 422471 - RNA, 19 nt, Homo sapiens
  misc_RNA (1)...(19): siRNA sense strand
gcucuagacuuuguucgua

SEQ ID NO: 422472 - RNA, 19 nt, Homo sapiens
  misc_RNA (1)...(19): siRNA sense strand
cgacgucuucuucaaauua

SEQ ID NO: 422473 - RNA, 19 nt, Homo sapiens
  misc_RNA (1)...(19): siRNA sense strand
gagauguggucuugaguau

SEQ ID NO: 422474 - RNA, 19 nt, Homo sapiens
  misc_RNA (1)...(19): siRNA sense strand
guaagucccuagaugaaau

SEQ ID NO: 422475 - RNA, 19 nt, Homo sapiens
  misc_RNA (1)...(19): siRNA sense strand
gcuaaugcaucuggaguuu

SEQ ID NO: 422476 - RNA, 19 nt, Homo sapiens
  misc_RNA (1)...(19): siRNA sense strand
gaagaagaaagcagacauu

SEQ ID NO: 422477 - RNA, 19 nt, Homo sapiens
  misc_RNA (1)...(19): siRNA sense strand
uagagaggcugguugacua

SEQ ID NO: 422478 - RNA, 19 nt, Homo sapiens
  misc_RNA (1)...(19): siRNA sense strand
gaaaucggacaggaucuua

SEQ ID NO: 422479 - RNA, 19 nt, Homo sapiens
  misc_RNA (1)...(19): siRNA sense strand
caaagccugugacuauuau

SEQ ID NO: 422480 - RNA, 19 nt, Homo sapiens
  misc_RNA (1)...(19): siRNA sense strand
cgaauaacguuacuucaag

SEQ ID NO: 422481 - RNA, 19 nt, Homo sapiens
  misc_RNA (1)...(19): siRNA sense strand
gaaagcagacauuguguuc

SEQ ID NO: 422482 - RNA, 19 nt, Homo sapiens
  misc_RNA (1)...(19): siRNA sense strand
gggcucugcucuagacuuu

SEQ ID NO: 422483 - RNA, 19 nt, Homo sapiens
  misc_RNA (1)...(19): siRNA sense strand
gaggaaacaucggcacuug

SEQ ID NO: 422484 - RNA, 19 nt, Homo sapiens
  misc_RNA (1)...(19): siRNA sense strand
gaaauaguggacacaguuu

SEQ ID NO: 422485 - RNA, 19 nt, Homo sapiens
  misc_RNA (1)...(19): siRNA sense strand
gaucgaggauggagugcuu

SEQ ID NO: 422486 - RNA, 19 nt, Homo sapiens
  misc_RNA (1)...(19): siRNA sense strand
caaacgacgucuucuucaa

SEQ ID NO: 422487 - RNA, 19 nt, Homo sapiens
  misc_RNA (1)...(19): siRNA sense strand
gaaccugggcuaaauggaa

SEQ ID NO: 422488 - RNA, 19 nt, Homo sapiens
  misc_RNA (1)...(19): siRNA sense strand
cagagaugcucgagaaguu

SEQ ID NO: 422489 - RNA, 19 nt, Homo sapiens
  misc_RNA (1)...(19): siRNA sense strand
gaagaaagaaucaugaacu

SEQ ID NO: 422490 - RNA, 19 nt, Homo sapiens
  misc_RNA (1)...(19): siRNA sense strand
cagagucgcuucccaagau

SEQ ID NO: 422491 - RNA, 19 nt, Homo sapiens
  misc_RNA (1)...(19): siRNA sense strand
caacgaagccggugacuac

SEQ ID NO: 422492 - RNA, 19 nt, Homo sapiens
  misc_RNA (1)...(19): siRNA sense strand
ucacagacuuccuggagaa

SEQ ID NO: 422493 - RNA, 19 nt, Homo sapiens
  misc_RNA (1)...(19): siRNA sense strand
acggagaucuggcugauuu

SEQ ID NO: 422494 - RNA, 19 nt, Homo sapiens
  misc_RNA (1)...(19): siRNA sense strand
gaacagaaucagccagaug

SEQ ID NO: 422495 - RNA, 19 nt, Homo sapiens
  misc_RNA (1)...(19): siRNA sense strand
gcaaugcccuggaguacgu

SEQ ID NO: 422496 - RNA, 19 nt, Homo sapiens
  misc_RNA (1)...(19): siRNA sense strand
ucacagagaugcagaccau

SEQ ID NO: 422497 - RNA, 19 nt, Homo sapiens
  misc_RNA (1)...(19): siRNA sense strand
ucgaugagcucaaugugaa

SEQ ID NO: 422498 - RNA, 19 nt, Homo sapiens
  misc_RNA (1)...(19): siRNA sense strand
acaaagacggccacuguua

SEQ ID NO: 422499 - RNA, 19 nt, Homo sapiens
  misc_RNA (1)...(19): siRNA sense strand
ugacaacauugccgagaaa

SEQ ID NO: 422500 - RNA, 19 nt, Homo sapiens
  misc_RNA (1)...(19): siRNA sense strand
ccaagaggcagauuauuga

SEQ ID NO: 422501 - RNA, 19 nt, Homo sapiens
  misc_RNA (1)...(19): siRNA sense strand
ucuacaagauuaucgauga

SEQ ID NO: 422502 - RNA, 19 nt, Homo sapiens
  misc_RNA (1)...(19): siRNA sense strand
ggagagaggacccaaagga

SEQ ID NO: 422503 - RNA, 19 nt, Homo sapiens
  misc_RNA (1)...(19): siRNA sense strand
ggcgaggguuuauguauga

SEQ ID NO: 422504 - RNA, 19 nt, Homo sapiens
  misc_RNA (1)...(19): siRNA sense strand
ggaccaggcccgaguucua

SEQ ID NO: 422505 - RNA, 19 nt, Homo sapiens
  misc_RNA (1)...(19): siRNA sense strand
caaguaaauguuccgaaua

SEQ ID NO: 422506 - RNA, 19 nt, Homo sapiens
  misc_RNA (1)...(19): siRNA sense strand
cagagaggcugugcucaaa

SEQ ID NO: 422507 - RNA, 19 nt, Homo sapiens
  misc_RNA (1)...(19): siRNA sense strand
ggagaaagaggagauguug

SEQ ID NO: 422508 - RNA, 19 nt, Homo sapiens
  misc_RNA (1)...(19): siRNA sense strand
gguggaggccuuugacuuu

SEQ ID NO: 422509 - RNA, 19 nt, Homo sapiens
  misc_RNA (1)...(19): siRNA sense strand
ggaagacacgccaacacua

SEQ ID NO: 422510 - RNA, 19 nt, Homo sapiens
  misc_RNA (1)...(19): siRNA sense strand
ucaacaaaguggucuacaa

SEQ ID NO: 422511 - RNA, 19 nt, Homo sapiens
  misc_RNA (1)...(19): siRNA sense strand
ggaaguuucaguacaaaga

SEQ ID NO: 422512 - RNA, 19 nt, Homo sapiens
  misc_RNA (1)...(19): siRNA sense strand
ccacaaagacggccacugu

SEQ ID NO: 422513 - RNA, 19 nt, Homo sapiens
  misc_RNA (1)...(19): siRNA sense strand
ggaaacagugugauugguu

SEQ ID NO: 422514 - RNA, 19 nt, Homo sapiens
  misc_RNA (1)...(19): siRNA sense strand
cauagagaaugucuuugaa

SEQ ID NO: 422515 - RNA, 19 nt, Homo sapiens
  misc_RNA (1)...(19): siRNA sense strand
gauaggagaacaaggcauu

SEQ ID NO: 422516 - RNA, 19 nt, Homo sapiens
  misc_RNA (1)...(19): siRNA sense strand
aagaggagauguugggauu

SEQ ID NO: 422517 - RNA, 19 nt, Homo sapiens
  misc_RNA (1)...(19): siRNA sense strand
gacauucuguuccucuuug

SEQ ID NO: 422518 - RNA, 19 nt, Homo sapiens
  misc_RNA (1)...(19): siRNA sense strand
uaaaugcccuugcuguuac

SEQ ID NO: 422519 - RNA, 19 nt, Homo sapiens
  misc_RNA (1)...(19): siRNA sense strand
gauaaaugcccuugcuguu

SEQ ID NO: 422520 - RNA, 19 nt, Homo sapiens
  misc_RNA (1)...(19): siRNA sense strand
ggaaagauagcguccaaca

SEQ ID NO: 422521 - RNA, 19 nt, Homo sapiens
  misc_RNA (1)...(19): siRNA sense strand
cagagagcuucccaacaua

SEQ ID NO: 422522 - RNA, 19 nt, Homo sapiens
  misc_RNA (1)...(19): siRNA sense strand
gaagagggcgucccacagu

SEQ ID NO: 422523 - RNA, 19 nt, Homo sapiens
  misc_RNA (1)...(19): siRNA sense strand
caucaacgcuuugcagauc

SEQ ID NO: 422524 - RNA, 19 nt, Homo sapiens
  misc_RNA (1)...(19): siRNA sense strand
gaaaggagaaagaggagau

SEQ ID NO: 422525 - RNA, 19 nt, Homo sapiens
  misc_RNA (1)...(19): siRNA sense strand
ggugguaagucccuagaug

SEQ ID NO: 422526 - RNA, 19 nt, Homo sapiens
  misc_RNA (1)...(19): siRNA sense strand
acaaguaaauguuccgaau

SEQ ID NO: 422527 - RNA, 19 nt, Homo sapiens
  misc_RNA (1)...(19): siRNA sense strand
gaugcgagauguggucuug

SEQ ID NO: 422528 - RNA, 19 nt, Homo sapiens
  misc_RNA (1)...(19): siRNA sense strand
uccaaagcaucaaagauaa

SEQ ID NO: 422529 - RNA, 19 nt, Homo sapiens
  misc_RNA (1)...(19): siRNA sense strand
gggcgaggguuuauguaug

SEQ ID NO: 422530 - RNA, 19 nt, Homo sapiens
  misc_RNA (1)...(19): siRNA sense strand
ugaagagaaugaagaucaa

SEQ ID NO: 422531 - RNA, 19 nt, Homo sapiens
  misc_RNA (1)...(19): siRNA sense strand
ccacggaaguuucaguaca

SEQ ID NO: 422532 - RNA, 19 nt, Homo sapiens
  misc_RNA (1)...(19): siRNA sense strand
acaaagccugugacuauua

SEQ ID NO: 422533 - RNA, 19 nt, Homo sapiens
  misc_RNA (1)...(19): siRNA sense strand
ccaccacccuguuccaguu

SEQ ID NO: 422534 - RNA, 19 nt, Homo sapiens
  misc_RNA (1)...(19): siRNA sense strand
gagaggacccaaaggagaa

SEQ ID NO: 422535 - RNA, 19 nt, Homo sapiens
  misc_RNA (1)...(19): siRNA sense strand
gguggaagaugcacaggau

SEQ ID NO: 422536 - RNA, 19 nt, Homo sapiens
  misc_RNA (1)...(19): siRNA sense strand
gaagggcgaaguaggagaa

SEQ ID NO: 422537 - RNA, 19 nt, Homo sapiens
  misc_RNA (1)...(19): siRNA sense strand
aaagaaccuugugaaguuu

SEQ ID NO: 422538 - RNA, 19 nt, Homo sapiens
  misc_RNA (1)...(19): siRNA sense strand
gcucugcucuagacuuugu

SEQ ID NO: 422539 - RNA, 19 nt, Homo sapiens
  misc_RNA (1)...(19): siRNA sense strand
ccauagagaaugucuuuga

SEQ ID NO: 422540 - RNA, 19 nt, Homo sapiens
  misc_RNA (1)...(19): siRNA sense strand
gcagggaaccagggccuua

SEQ ID NO: 422541 - RNA, 19 nt, Homo sapiens
  misc_RNA (1)...(19): siRNA sense strand
cgacauggcuuucaucuua

SEQ ID NO: 422542 - RNA, 19 nt, Homo sapiens
  misc_RNA (1)...(19): siRNA sense strand
caaagaaccuugugaaguu

SEQ ID NO: 422543 - RNA, 19 nt, Homo sapiens
  misc_RNA (1)...(19): siRNA sense strand
ggacuuggauuaugaacua

SEQ ID NO: 422544 - RNA, 19 nt, Homo sapiens
  misc_RNA (1)...(19): siRNA sense strand
ucaaugagaugaagaagua

SEQ ID NO: 422545 - RNA, 19 nt, Homo sapiens
  misc_RNA (1)...(19): siRNA sense strand
caacaaagccugugacuau

SEQ ID NO: 422546 - RNA, 19 nt, Homo sapiens
  misc_RNA (1)...(19): siRNA sense strand
ggagagaccucacagacuu

SEQ ID NO: 422547 - RNA, 19 nt, Homo sapiens
  misc_RNA (1)...(19): siRNA sense strand
ggacacaguuuaugaagau

SEQ ID NO: 422548 - RNA, 19 nt, Homo sapiens
  misc_RNA (1)...(19): siRNA sense strand
ggaggagguuggaaagaua

SEQ ID NO: 422549 - RNA, 19 nt, Homo sapiens
  misc_RNA (1)...(19): siRNA sense strand
gauguggucuugaguauug

SEQ ID NO: 422550 - RNA, 19 nt, Homo sapiens
  misc_RNA (1)...(19): siRNA sense strand
gaaagggaauccuggaaga

SEQ ID NO: 422551 - RNA, 19 nt, Homo sapiens
  misc_RNA (1)...(19): siRNA sense strand
gaacggcacucaagguuuc

SEQ ID NO: 422552 - RNA, 19 nt, Homo sapiens
  misc_RNA (1)...(19): siRNA sense strand
gcagggauuucauauuaaa

SEQ ID NO: 422553 - RNA, 19 nt, Homo sapiens
  misc_RNA (1)...(19): siRNA sense strand
gaauugcgguggcucagua

SEQ ID NO: 422554 - RNA, 19 nt, Homo sapiens
  misc_RNA (1)...(19): siRNA sense strand
gaagaaagcagacauugug

SEQ ID NO: 422555 - RNA, 19 nt, Homo sapiens
  misc_RNA (1)...(19): siRNA sense strand
uugcagggauuucauauua

SEQ ID NO: 422556 - RNA, 19 nt, Homo sapiens
  misc_RNA (1)...(19): siRNA sense strand
gaacuagccuuugcuuuag

SEQ ID NO: 422557 - RNA, 19 nt, Homo sapiens
  misc_RNA (1)...(19): siRNA sense strand
gcaggaaggugaacaucaa

SEQ ID NO: 422558 - RNA, 19 nt, Homo sapiens
  misc_RNA (1)...(19): siRNA sense strand
gaaagaguuuguccagaga

SEQ ID NO: 422559 - RNA, 19 nt, Homo sapiens
  misc_RNA (1)...(19): siRNA sense strand
gaagacacgccaacacuaa

SEQ ID NO: 422560 - RNA, 19 nt, Homo sapiens
  misc_RNA (1)...(19): siRNA sense strand
gaaggaacuugcagggauu

SEQ ID NO: 422561 - RNA, 19 nt, Homo sapiens
  misc_RNA (1)...(19): siRNA sense strand
gaagagaagcagcauaaug

SEQ ID NO: 422562 - RNA, 19 nt, Homo sapiens
  misc_RNA (1)...(19): siRNA sense strand
ucagagagcuucccaacau

SEQ ID NO: 422563 - RNA, 19 nt, Homo sapiens
  misc_RNA (1)...(19): siRNA sense strand
gaaagaaugugaaaagguu

SEQ ID NO: 422564 - RNA, 19 nt, Homo sapiens
  misc_RNA (1)...(19): siRNA sense strand
caacaaaguggucuacaaa

SEQ ID NO: 422565 - RNA, 19 nt, Homo sapiens
  misc_RNA (1)...(19): siRNA sense strand
gacuuucucuacaagauua

SEQ ID NO: 422566 - RNA, 19 nt, Homo sapiens
  misc_RNA (1)...(19): siRNA sense strand
agaacuagccuuugcuuua

SEQ ID NO: 422567 - RNA, 19 nt, Homo sapiens
  misc_RNA (1)...(19): siRNA sense strand
guacagcgaugaugucaag

SEQ ID NO: 422568 - RNA, 19 nt, Homo sapiens
  misc_RNA (1)...(19): siRNA sense strand
gaacaagggugccgaucag

SEQ ID NO: 422569 - RNA, 19 nt, Homo sapiens
  misc_RNA (1)...(19): siRNA sense strand
caacagaacuagccuuugc

SEQ ID NO: 422570 - RNA, 19 nt, Homo sapiens
  misc_RNA (1)...(19): siRNA sense strand
caacauagaagaaagaauc

SEQ ID NO: 422571 - RNA, 19 nt, Homo sapiens
  misc_RNA (1)...(19): siRNA sense strand
gcucuagacuuuguucgua

SEQ ID NO: 422572 - RNA, 19 nt, Homo sapiens
  misc_RNA (1)...(19): siRNA sense strand
cgacgucuucuucaaauua

SEQ ID NO: 422573 - RNA, 19 nt, Homo sapiens
  misc_RNA (1)...(19): siRNA sense strand
gagauguggucuugaguau

SEQ ID NO: 422574 - RNA, 19 nt, Homo sapiens
  misc_RNA (1)...(19): siRNA sense strand
guaagucccuagaugaaau

SEQ ID NO: 422575 - RNA, 19 nt, Homo sapiens
  misc_RNA (1)...(19): siRNA sense strand
gcuaaugcaucuggaguuu

SEQ ID NO: 422576 - RNA, 19 nt, Homo sapiens
  misc_RNA (1)...(19): siRNA sense strand
gaagaagaaagcagacauu

SEQ ID NO: 422577 - RNA, 19 nt, Homo sapiens
  misc_RNA (1)...(19): siRNA sense strand
uagagaggcugguugacua

SEQ ID NO: 422578 - RNA, 19 nt, Homo sapiens
  misc_RNA (1)...(19): siRNA sense strand
gaaaucggacaggaucuua

SEQ ID NO: 422579 - RNA, 19 nt, Homo sapiens
  misc_RNA (1)...(19): siRNA sense strand
caaagccugugacuauuau

SEQ ID NO: 422580 - RNA, 19 nt, Homo sapiens
  misc_RNA (1)...(19): siRNA sense strand
cgaauaacguuacuucaag

SEQ ID NO: 422581 - RNA, 19 nt, Homo sapiens
  misc_RNA (1)...(19): siRNA sense strand
gaaagcagacauuguguuc

SEQ ID NO: 422582 - RNA, 19 nt, Homo sapiens
  misc_RNA (1)...(19): siRNA sense strand
gggcucugcucuagacuuu

SEQ ID NO: 422583 - RNA, 19 nt, Homo sapiens
  misc_RNA (1)...(19): siRNA sense strand
gaggaaacaucggcacuug

SEQ ID NO: 422584 - RNA, 19 nt, Homo sapiens
  misc_RNA (1)...(19): siRNA sense strand
gaaauaguggacacaguuu

SEQ ID NO: 422585 - RNA, 19 nt, Homo sapiens
  misc_RNA (1)...(19): siRNA sense strand
gaucgaggauggagugcuu

SEQ ID NO: 422586 - RNA, 19 nt, Homo sapiens
  misc_RNA (1)...(19): siRNA sense strand
caaacgacgucuucuucaa

SEQ ID NO: 422587 - RNA, 19 nt, Homo sapiens
  misc_RNA (1)...(19): siRNA sense strand
gaaccugggcuaaauggaa

SEQ ID NO: 422588 - RNA, 19 nt, Homo sapiens
  misc_RNA (1)...(19): siRNA sense strand
cagagaugcucgagaaguu

SEQ ID NO: 422589 - RNA, 19 nt, Homo sapiens
  misc_RNA (1)...(19): siRNA sense strand
gaagaaagaaucaugaacu

SEQ ID NO: 422590 - RNA, 19 nt, Homo sapiens
  misc_RNA (1)...(19): siRNA sense strand
cagagucgcuucccaagau

SEQ ID NO: 422591 - RNA, 19 nt, Homo sapiens
  misc_RNA (1)...(19): siRNA sense strand
caacgaagccggugacuac

SEQ ID NO: 422592 - RNA, 19 nt, Homo sapiens
  misc_RNA (1)...(19): siRNA sense strand
ucacagacuuccuggagaa

SEQ ID NO: 422593 - RNA, 19 nt, Homo sapiens
  misc_RNA (1)...(19): siRNA sense strand
acggagaucuggcugauuu

SEQ ID NO: 422594 - RNA, 19 nt, Homo sapiens
  misc_RNA (1)...(19): siRNA sense strand
gaacagaaucagccagaug

SEQ ID NO: 422595 - RNA, 19 nt, Homo sapiens
  misc_RNA (1)...(19): siRNA sense strand
gcaaugcccuggaguacgu

SEQ ID NO: 422596 - RNA, 19 nt, Homo sapiens
  misc_RNA (1)...(19): siRNA sense strand
ucacagagaugcagaccau

SEQ ID NO: 422597 - RNA, 19 nt, Homo sapiens
  misc_RNA (1)...(19): siRNA sense strand
ucgaugagcucaaugugaa

SEQ ID NO: 422598 - RNA, 19 nt, Homo sapiens
  misc_RNA (1)...(19): siRNA sense strand
acaaagacggccacuguua

SEQ ID NO: 422599 - RNA, 19 nt, Homo sapiens
  misc_RNA (1)...(19): siRNA sense strand
ugacaacauugccgagaaa

SEQ ID NO: 422600 - RNA, 19 nt, Homo sapiens
  misc_RNA (1)...(19): siRNA sense strand
ccaagaggcagauuauuga

SEQ ID NO: 422601 - RNA, 19 nt, Homo sapiens
  misc_RNA (1)...(19): siRNA sense strand
ucuacaagauuaucgauga

SEQ ID NO: 422602 - RNA, 19 nt, Homo sapiens
  misc_RNA (1)...(19): siRNA sense strand
ggagagaggacccaaagga

SEQ ID NO: 422603 - RNA, 19 nt, Homo sapiens
  misc_RNA (1)...(19): siRNA sense strand
ggcgaggguuuauguauga

SEQ ID NO: 422604 - RNA, 19 nt, Homo sapiens
  misc_RNA (1)...(19): siRNA sense strand
ggaccaggcccgaguucua

SEQ ID NO: 422605 - RNA, 19 nt, Homo sapiens
  misc_RNA (1)...(19): siRNA sense strand
caaguaaauguuccgaaua

SEQ ID NO: 422606 - RNA, 19 nt, Homo sapiens
  misc_RNA (1)...(19): siRNA sense strand
cagagaggcugugcucaaa

SEQ ID NO: 422607 - RNA, 19 nt, Homo sapiens
  misc_RNA (1)...(19): siRNA sense strand
ggagaaagaggagauguug

SEQ ID NO: 422608 - RNA, 19 nt, Homo sapiens
  misc_RNA (1)...(19): siRNA sense strand
gguggaggccuuugacuuu

SEQ ID NO: 422609 - RNA, 19 nt, Homo sapiens
  misc_RNA (1)...(19): siRNA sense strand
ggaagacacgccaacacua

SEQ ID NO: 422610 - RNA, 19 nt, Homo sapiens
  misc_RNA (1)...(19): siRNA sense strand
ucaacaaaguggucuacaa

SEQ ID NO: 422611 - RNA, 19 nt, Homo sapiens
  misc_RNA (1)...(19): siRNA sense strand
ggaaguuucaguacaaaga

SEQ ID NO: 422612 - RNA, 19 nt, Homo sapiens
  misc_RNA (1)...(19): siRNA sense strand
ccacaaagacggccacugu

SEQ ID NO: 422613 - RNA, 19 nt, Homo sapiens
  misc_RNA (1)...(19): siRNA sense strand
ggaaacagugugauugguu

SEQ ID NO: 422614 - RNA, 19 nt, Homo sapiens
  misc_RNA (1)...(19): siRNA sense strand
cauagagaaugucuuugaa

SEQ ID NO: 422615 - RNA, 19 nt, Homo sapiens
  misc_RNA (1)...(19): siRNA sense strand
gauaggagaacaaggcauu

SEQ ID NO: 422616 - RNA, 19 nt, Homo sapiens
  misc_RNA (1)...(19): siRNA sense strand
aagaggagauguugggauu

SEQ ID NO: 422617 - RNA, 19 nt, Homo sapiens
  misc_RNA (1)...(19): siRNA sense strand
gacauucuguuccucuuug

SEQ ID NO: 422618 - RNA, 19 nt, Homo sapiens
  misc_RNA (1)...(19): siRNA sense strand
uaaaugcccuugcuguuac

SEQ ID NO: 422619 - RNA, 19 nt, Homo sapiens
  misc_RNA (1)...(19): siRNA sense strand
gauaaaugcccuugcuguu

SEQ ID NO: 422620 - RNA, 19 nt, Homo sapiens
  misc_RNA (1)...(19): siRNA sense strand
ggaaagauagcguccaaca

SEQ ID NO: 422621 - RNA, 19 nt, Homo sapiens
  misc_RNA (1)...(19): siRNA sense strand
cagagagcuucccaacaua

SEQ ID NO: 422622 - RNA, 19 nt, Homo sapiens
  misc_RNA (1)...(19): siRNA sense strand
gaagagggcgucccacagu

SEQ ID NO: 422623 - RNA, 19 nt, Homo sapiens
  misc_RNA (1)...(19): siRNA sense strand
caucaacgcuuugcagauc

SEQ ID NO: 422624 - RNA, 19 nt, Homo sapiens
  misc_RNA (1)...(19): siRNA sense strand
gaaaggagaaagaggagau

SEQ ID NO: 422625 - RNA, 19 nt, Homo sapiens
  misc_RNA (1)...(19): siRNA sense strand
ggugguaagucccuagaug

SEQ ID NO: 422626 - RNA, 19 nt, Homo sapiens
  misc_RNA (1)...(19): siRNA sense strand
acaaguaaauguuccgaau

SEQ ID NO: 422627 - RNA, 19 nt, Homo sapiens
  misc_RNA (1)...(19): siRNA sense strand
gaugcgagauguggucuug

SEQ ID NO: 422628 - RNA, 19 nt, Homo sapiens
  misc_RNA (1)...(19): siRNA sense strand
uccaaagcaucaaagauaa

SEQ ID NO: 422629 - RNA, 19 nt, Homo sapiens
  misc_RNA (1)...(19): siRNA sense strand
gggcgaggguuuauguaug

SEQ ID NO: 422630 - RNA, 19 nt, Homo sapiens
  misc_RNA (1)...(19): siRNA sense strand
ugaagagaaugaagaucaa

SEQ ID NO: 422631 - RNA, 19 nt, Homo sapiens
  misc_RNA (1)...(19): siRNA sense strand
ccacggaaguuucaguaca

SEQ ID NO: 422632 - RNA, 19 nt, Homo sapiens
  misc_RNA (1)...(19): siRNA sense strand
acaaagccugugacuauua

SEQ ID NO: 422633 - RNA, 19 nt, Homo sapiens
  misc_RNA (1)...(19): siRNA sense strand
ccaccacccuguuccaguu

SEQ ID NO: 422634 - RNA, 19 nt, Homo sapiens
  misc_RNA (1)...(19): siRNA sense strand
gagaggacccaaaggagaa

SEQ ID NO: 422635 - RNA, 19 nt, Homo sapiens
  misc_RNA (1)...(19): siRNA sense strand
gguggaagaugcacaggau

SEQ ID NO: 422636 - RNA, 19 nt, Homo sapiens
  misc_RNA (1)...(19): siRNA sense strand
gaagggcgaaguaggagaa

SEQ ID NO: 422637 - RNA, 19 nt, Homo sapiens
  misc_RNA (1)...(19): siRNA sense strand
aaagaaccuugugaaguuu

SEQ ID NO: 422638 - RNA, 19 nt, Homo sapiens
  misc_RNA (1)...(19): siRNA sense strand
gcucugcucuagacuuugu

SEQ ID NO: 422639 - RNA, 19 nt, Homo sapiens
  misc_RNA (1)...(19): siRNA sense strand
ccauagagaaugucuuuga

SEQ ID NO: 422640 - RNA, 19 nt, Homo sapiens
  misc_RNA (1)...(19): siRNA sense strand
gcagggaaccagggccuua

SEQ ID NO: 422641 - RNA, 19 nt, Homo sapiens
  misc_RNA (1)...(19): siRNA sense strand
cgacauggcuuucaucuua

SEQ ID NO: 422642 - RNA, 19 nt, Homo sapiens
  misc_RNA (1)...(19): siRNA sense strand
caaagaaccuugugaaguu

SEQ ID NO: 422643 - RNA, 19 nt, Homo sapiens
  misc_RNA (1)...(19): siRNA sense strand
ggacuuggauuaugaacua

SEQ ID NO: 422644 - RNA, 19 nt, Homo sapiens
  misc_RNA (1)...(19): siRNA sense strand
ucaaugagaugaagaagua

SEQ ID NO: 422645 - RNA, 19 nt, Homo sapiens
  misc_RNA (1)...(19): siRNA sense strand
caacaaagccugugacuau

SEQ ID NO: 422646 - RNA, 19 nt, Homo sapiens
  misc_RNA (1)...(19): siRNA sense strand
ggagagaccucacagacuu

SEQ ID NO: 422647 - RNA, 19 nt, Homo sapiens
  misc_RNA (1)...(19): siRNA sense strand
ggacacaguuuaugaagau

SEQ ID NO: 422648 - RNA, 19 nt, Homo sapiens
  misc_RNA (1)...(19): siRNA sense strand
ggaggagguuggaaagaua

SEQ ID NO: 422649 - RNA, 19 nt, Homo sapiens
  misc_RNA (1)...(19): siRNA sense strand
gauguggucuugaguauug

SEQ ID NO: 422650 - RNA, 19 nt, Homo sapiens
  misc_RNA (1)...(19): siRNA sense strand
gaaagggaauccuggaaga

SEQ ID NO: 422651 - RNA, 19 nt, Homo sapiens
  misc_RNA (1)...(19): siRNA sense strand
gaacggcacucaagguuuc

SEQ ID NO: 422652 - RNA, 19 nt, Homo sapiens
  misc_RNA (1)...(19): siRNA sense strand
gcagggauuucauauuaaa

SEQ ID NO: 422653 - RNA, 19 nt, Homo sapiens
  misc_RNA (1)...(19): siRNA sense strand
gaauugcgguggcucagua

SEQ ID NO: 422654 - RNA, 19 nt, Homo sapiens
  misc_RNA (1)...(19): siRNA sense strand
gaagaaagcagacauugug

SEQ ID NO: 422655 - RNA, 19 nt, Homo sapiens
  misc_RNA (1)...(19): siRNA sense strand
uugcagggauuucauauua

SEQ ID NO: 422656 - RNA, 19 nt, Homo sapiens
  misc_RNA (1)...(19): siRNA sense strand
gaacuagccuuugcuuuag

SEQ ID NO: 422657 - RNA, 19 nt, Homo sapiens
  misc_RNA (1)...(19): siRNA sense strand
gcaggaaggugaacaucaa

SEQ ID NO: 422658 - RNA, 19 nt, Homo sapiens
  misc_RNA (1)...(19): siRNA sense strand
gaaagaguuuguccagaga

SEQ ID NO: 422659 - RNA, 19 nt, Homo sapiens
  misc_RNA (1)...(19): siRNA sense strand
gaagacacgccaacacuaa

SEQ ID NO: 422660 - RNA, 19 nt, Homo sapiens
  misc_RNA (1)...(19): siRNA sense strand
gaaggaacuugcagggauu

SEQ ID NO: 422661 - RNA, 19 nt, Homo sapiens
  misc_RNA (1)...(19): siRNA sense strand
gaagagaagcagcauaaug

SEQ ID NO: 422662 - RNA, 19 nt, Homo sapiens
  misc_RNA (1)...(19): siRNA sense strand
ucagagagcuucccaacau

SEQ ID NO: 422663 - RNA, 19 nt, Homo sapiens
  misc_RNA (1)...(19): siRNA sense strand
gaaagaaugugaaaagguu

SEQ ID NO: 422664 - RNA, 19 nt, Homo sapiens
  misc_RNA (1)...(19): siRNA sense strand
caacaaaguggucuacaaa

SEQ ID NO: 422665 - RNA, 19 nt, Homo sapiens
  misc_RNA (1)...(19): siRNA sense strand
gacuuucucuacaagauua

SEQ ID NO: 422666 - RNA, 19 nt, Homo sapiens
  misc_RNA (1)...(19): siRNA sense strand
agaacuagccuuugcuuua

SEQ ID NO: 422667 - RNA, 19 nt, Homo sapiens
  misc_RNA (1)...(19): siRNA sense strand
guacagcgaugaugucaag

SEQ ID NO: 422668 - RNA, 19 nt, Homo sapiens
  misc_RNA (1)...(19): siRNA sense strand
gaacaagggugccgaucag

SEQ ID NO: 422669 - RNA, 19 nt, Homo sapiens
  misc_RNA (1)...(19): siRNA sense strand
caacagaacuagccuuugc

SEQ ID NO: 422670 - RNA, 19 nt, Homo sapiens
  misc_RNA (1)...(19): siRNA sense strand
caacauagaagaaagaauc

SEQ ID NO: 422671 - RNA, 19 nt, Homo sapiens
  misc_RNA (1)...(19): siRNA sense strand
gcucuagacuuuguucgua

SEQ ID NO: 422672 - RNA, 19 nt, Homo sapiens
  misc_RNA (1)...(19): siRNA sense strand
cgacgucuucuucaaauua

SEQ ID NO: 422673 - RNA, 19 nt, Homo sapiens
  misc_RNA (1)...(19): siRNA sense strand
gagauguggucuugaguau

SEQ ID NO: 422674 - RNA, 19 nt, Homo sapiens
  misc_RNA (1)...(19): siRNA sense strand
guaagucccuagaugaaau

SEQ ID NO: 422675 - RNA, 19 nt, Homo sapiens
  misc_RNA (1)...(19): siRNA sense strand
gcuaaugcaucuggaguuu

SEQ ID NO: 422676 - RNA, 19 nt, Homo sapiens
  misc_RNA (1)...(19): siRNA sense strand
gaagaagaaagcagacauu

SEQ ID NO: 422677 - RNA, 19 nt, Homo sapiens
  misc_RNA (1)...(19): siRNA sense strand
uagagaggcugguugacua

SEQ ID NO: 422678 - RNA, 19 nt, Homo sapiens
  misc_RNA (1)...(19): siRNA sense strand
gaaaucggacaggaucuua

SEQ ID NO: 422679 - RNA, 19 nt, Homo sapiens
  misc_RNA (1)...(19): siRNA sense strand
caaagccugugacuauuau

SEQ ID NO: 422680 - RNA, 19 nt, Homo sapiens
  misc_RNA (1)...(19): siRNA sense strand
cgaauaacguuacuucaag

SEQ ID NO: 422681 - RNA, 19 nt, Homo sapiens
  misc_RNA (1)...(19): siRNA sense strand
gaaagcagacauuguguuc

SEQ ID NO: 422682 - RNA, 19 nt, Homo sapiens
  misc_RNA (1)...(19): siRNA sense strand
gggcucugcucuagacuuu

SEQ ID NO: 422683 - RNA, 19 nt, Homo sapiens
  misc_RNA (1)...(19): siRNA sense strand
gaggaaacaucggcacuug

SEQ ID NO: 422684 - RNA, 19 nt, Homo sapiens
  misc_RNA (1)...(19): siRNA sense strand
gaaauaguggacacaguuu

SEQ ID NO: 422685 - RNA, 19 nt, Homo sapiens
  misc_RNA (1)...(19): siRNA sense strand
gaucgaggauggagugcuu

SEQ ID NO: 422686 - RNA, 19 nt, Homo sapiens
  misc_RNA (1)...(19): siRNA sense strand
caaacgacgucuucuucaa

SEQ ID NO: 422687 - RNA, 19 nt, Homo sapiens
  misc_RNA (1)...(19): siRNA sense strand
gaaccugggcuaaauggaa

SEQ ID NO: 422688 - RNA, 19 nt, Homo sapiens
  misc_RNA (1)...(19): siRNA sense strand
cagagaugcucgagaaguu

SEQ ID NO: 422689 - RNA, 19 nt, Homo sapiens
  misc_RNA (1)...(19): siRNA sense strand
gaagaaagaaucaugaacu

SEQ ID NO: 422690 - RNA, 19 nt, Homo sapiens
  misc_RNA (1)...(19): siRNA sense strand
cagagucgcuucccaagau

SEQ ID NO: 422691 - RNA, 19 nt, Homo sapiens
  misc_RNA (1)...(19): siRNA sense strand
caacgaagccggugacuac

SEQ ID NO: 422692 - RNA, 19 nt, Homo sapiens
  misc_RNA (1)...(19): siRNA sense strand
ucacagacuuccuggagaa

SEQ ID NO: 422693 - RNA, 19 nt, Homo sapiens
  misc_RNA (1)...(19): siRNA sense strand
acggagaucuggcugauuu

SEQ ID NO: 422694 - RNA, 19 nt, Homo sapiens
  misc_RNA (1)...(19): siRNA sense strand
gaacagaaucagccagaug

SEQ ID NO: 422695 - RNA, 19 nt, Homo sapiens
  misc_RNA (1)...(19): siRNA sense strand
gcaaugcccuggaguacgu

SEQ ID NO: 422696 - RNA, 19 nt, Homo sapiens
  misc_RNA (1)...(19): siRNA sense strand
ucacagagaugcagaccau

SEQ ID NO: 422697 - RNA, 19 nt, Homo sapiens
  misc_RNA (1)...(19): siRNA sense strand
ucgaugagcucaaugugaa

SEQ ID NO: 422698 - RNA, 19 nt, Homo sapiens
  misc_RNA (1)...(19): siRNA sense strand
acaaagacggccacuguua

SEQ ID NO: 422699 - RNA, 19 nt, Homo sapiens
  misc_RNA (1)...(19): siRNA sense strand
ugacaacauugccgagaaa

SEQ ID NO: 422700 - RNA, 19 nt, Homo sapiens
  misc_RNA (1)...(19): siRNA sense strand
ccaagaggcagauuauuga

SEQ ID NO: 422701 - RNA, 19 nt, Homo sapiens
  misc_RNA (1)...(19): siRNA sense strand
ucuacaagauuaucgauga

SEQ ID NO: 422702 - RNA, 19 nt, Homo sapiens
  misc_RNA (1)...(19): siRNA sense strand
ggagagaggacccaaagga

SEQ ID NO: 422703 - RNA, 19 nt, Homo sapiens
  misc_RNA (1)...(19): siRNA sense strand
ggcgaggguuuauguauga

SEQ ID NO: 422704 - RNA, 19 nt, Homo sapiens
  misc_RNA (1)...(19): siRNA sense strand
ggaccaggcccgaguucua

SEQ ID NO: 422705 - RNA, 19 nt, Homo sapiens
  misc_RNA (1)...(19): siRNA sense strand
caaguaaauguuccgaaua

SEQ ID NO: 422706 - RNA, 19 nt, Homo sapiens
  misc_RNA (1)...(19): siRNA sense strand
cagagaggcugugcucaaa

SEQ ID NO: 422707 - RNA, 19 nt, Homo sapiens
  misc_RNA (1)...(19): siRNA sense strand
ggagaaagaggagauguug

SEQ ID NO: 422708 - RNA, 19 nt, Homo sapiens
  misc_RNA (1)...(19): siRNA sense strand
gguggaggccuuugacuuu

SEQ ID NO: 422709 - RNA, 19 nt, Homo sapiens
  misc_RNA (1)...(19): siRNA sense strand
ggaagacacgccaacacua

SEQ ID NO: 422710 - RNA, 19 nt, Homo sapiens
  misc_RNA (1)...(19): siRNA sense strand
ucaacaaaguggucuacaa

SEQ ID NO: 422711 - RNA, 19 nt, Homo sapiens
  misc_RNA (1)...(19): siRNA sense strand
ggaaguuucaguacaaaga

SEQ ID NO: 422712 - RNA, 19 nt, Homo sapiens
  misc_RNA (1)...(19): siRNA sense strand
ccacaaagacggccacugu

SEQ ID NO: 422713 - RNA, 19 nt, Homo sapiens
  misc_RNA (1)...(19): siRNA sense strand
ggaaacagugugauugguu

SEQ ID NO: 422714 - RNA, 19 nt, Homo sapiens
  misc_RNA (1)...(19): siRNA sense strand
cauagagaaugucuuugaa

SEQ ID NO: 422715 - RNA, 19 nt, Homo sapiens
  misc_RNA (1)...(19): siRNA sense strand
gauaggagaacaaggcauu

SEQ ID NO: 422716 - RNA, 19 nt, Homo sapiens
  misc_RNA (1)...(19): siRNA sense strand
aagaggagauguugggauu

SEQ ID NO: 422717 - RNA, 19 nt, Homo sapiens
  misc_RNA (1)...(19): siRNA sense strand
gacauucuguuccucuuug

SEQ ID NO: 422718 - RNA, 19 nt, Homo sapiens
  misc_RNA (1)...(19): siRNA sense strand
uaaaugcccuugcuguuac

SEQ ID NO: 422719 - RNA, 19 nt, Homo sapiens
  misc_RNA (1)...(19): siRNA sense strand
gauaaaugcccuugcuguu

SEQ ID NO: 422720 - RNA, 19 nt, Homo sapiens
  misc_RNA (1)...(19): siRNA sense strand
ggaaagauagcguccaaca

SEQ ID NO: 422721 - RNA, 19 nt, Homo sapiens
  misc_RNA (1)...(19): siRNA sense strand
cagagagcuucccaacaua

SEQ ID NO: 422722 - RNA, 19 nt, Homo sapiens
  misc_RNA (1)...(19): siRNA sense strand
gaagagggcgucccacagu

SEQ ID NO: 422723 - RNA, 19 nt, Homo sapiens
  misc_RNA (1)...(19): siRNA sense strand
caucaacgcuuugcagauc

SEQ ID NO: 422724 - RNA, 19 nt, Homo sapiens
  misc_RNA (1)...(19): siRNA sense strand
gaaaggagaaagaggagau

SEQ ID NO: 422725 - RNA, 19 nt, Homo sapiens
  misc_RNA (1)...(19): siRNA sense strand
ggugguaagucccuagaug

SEQ ID NO: 422726 - RNA, 19 nt, Homo sapiens
  misc_RNA (1)...(19): siRNA sense strand
acaaguaaauguuccgaau

SEQ ID NO: 422727 - RNA, 19 nt, Homo sapiens
  misc_RNA (1)...(19): siRNA sense strand
gaugcgagauguggucuug

SEQ ID NO: 422728 - RNA, 19 nt, Homo sapiens
  misc_RNA (1)...(19): siRNA sense strand
uccaaagcaucaaagauaa

SEQ ID NO: 422729 - RNA, 19 nt, Homo sapiens
  misc_RNA (1)...(19): siRNA sense strand
gggcgaggguuuauguaug

SEQ ID NO: 422730 - RNA, 19 nt, Homo sapiens
  misc_RNA (1)...(19): siRNA sense strand
ugaagagaaugaagaucaa

SEQ ID NO: 422731 - RNA, 19 nt, Homo sapiens
  misc_RNA (1)...(19): siRNA sense strand
ccacggaaguuucaguaca

SEQ ID NO: 422732 - RNA, 19 nt, Homo sapiens
  misc_RNA (1)...(19): siRNA sense strand
acaaagccugugacuauua

SEQ ID NO: 422733 - RNA, 19 nt, Homo sapiens
  misc_RNA (1)...(19): siRNA sense strand
ccaccacccuguuccaguu

SEQ ID NO: 422734 - RNA, 19 nt, Homo sapiens
  misc_RNA (1)...(19): siRNA sense strand
gagaggacccaaaggagaa

SEQ ID NO: 422735 - RNA, 19 nt, Homo sapiens
  misc_RNA (1)...(19): siRNA sense strand
gguggaagaugcacaggau

SEQ ID NO: 422736 - RNA, 19 nt, Homo sapiens
  misc_RNA (1)...(19): siRNA sense strand
gaagggcgaaguaggagaa

SEQ ID NO: 422737 - RNA, 19 nt, Homo sapiens
  misc_RNA (1)...(19): siRNA sense strand
aaagaaccuugugaaguuu

SEQ ID NO: 422738 - RNA, 19 nt, Homo sapiens
  misc_RNA (1)...(19): siRNA sense strand
gcucugcucuagacuuugu

SEQ ID NO: 422739 - RNA, 19 nt, Homo sapiens
  misc_RNA (1)...(19): siRNA sense strand
ccauagagaaugucuuuga

SEQ ID NO: 422740 - RNA, 19 nt, Homo sapiens
  misc_RNA (1)...(19): siRNA sense strand
gcagggaaccagggccuua

SEQ ID NO: 422741 - RNA, 19 nt, Homo sapiens
  misc_RNA (1)...(19): siRNA sense strand
cgacauggcuuucaucuua

SEQ ID NO: 422742 - RNA, 19 nt, Homo sapiens
  misc_RNA (1)...(19): siRNA sense strand
caaagaaccuugugaaguu

SEQ ID NO: 422743 - RNA, 19 nt, Homo sapiens
  misc_RNA (1)...(19): siRNA sense strand
ggacuuggauuaugaacua

SEQ ID NO: 422744 - RNA, 19 nt, Homo sapiens
  misc_RNA (1)...(19): siRNA sense strand
ucaaugagaugaagaagua

SEQ ID NO: 422745 - RNA, 19 nt, Homo sapiens
  misc_RNA (1)...(19): siRNA sense strand
caacaaagccugugacuau

SEQ ID NO: 422746 - RNA, 19 nt, Homo sapiens
  misc_RNA (1)...(19): siRNA sense strand
ggagagaccucacagacuu

SEQ ID NO: 422747 - RNA, 19 nt, Homo sapiens
  misc_RNA (1)...(19): siRNA sense strand
ggacacaguuuaugaagau

SEQ ID NO: 422748 - RNA, 19 nt, Homo sapiens
  misc_RNA (1)...(19): siRNA sense strand
ggaggagguuggaaagaua

SEQ ID NO: 422749 - RNA, 19 nt, Homo sapiens
  misc_RNA (1)...(19): siRNA sense strand
gauguggucuugaguauug

SEQ ID NO: 422750 - RNA, 19 nt, Homo sapiens
  misc_RNA (1)...(19): siRNA sense strand
gaaagggaauccuggaaga

SEQ ID NO: 422751 - RNA, 19 nt, Homo sapiens
  misc_RNA (1)...(19): siRNA sense strand
gaacggcacucaagguuuc

SEQ ID NO: 422752 - RNA, 19 nt, Homo sapiens
  misc_RNA (1)...(19): siRNA sense strand
gcagggauuucauauuaaa

SEQ ID NO: 422753 - RNA, 19 nt, Homo sapiens
  misc_RNA (1)...(19): siRNA sense strand
gaauugcgguggcucagua

SEQ ID NO: 422754 - RNA, 19 nt, Homo sapiens
  misc_RNA (1)...(19): siRNA sense strand
gaagaaagcagacauugug

SEQ ID NO: 422755 - RNA, 19 nt, Homo sapiens
  misc_RNA (1)...(19): siRNA sense strand
uugcagggauuucauauua

SEQ ID NO: 422756 - RNA, 19 nt, Homo sapiens
  misc_RNA (1)...(19): siRNA sense strand
gaacuagccuuugcuuuag

SEQ ID NO: 422757 - RNA, 19 nt, Homo sapiens
  misc_RNA (1)...(19): siRNA sense strand
gcaggaaggugaacaucaa

SEQ ID NO: 422758 - RNA, 19 nt, Homo sapiens
  misc_RNA (1)...(19): siRNA sense strand
gaaagaguuuguccagaga

SEQ ID NO: 422759 - RNA, 19 nt, Homo sapiens
  misc_RNA (1)...(19): siRNA sense strand
gaagacacgccaacacuaa

SEQ ID NO: 422760 - RNA, 19 nt, Homo sapiens
  misc_RNA (1)...(19): siRNA sense strand
gaaggaacuugcagggauu

SEQ ID NO: 422761 - RNA, 19 nt, Homo sapiens
  misc_RNA (1)...(19): siRNA sense strand
gaagagaagcagcauaaug

SEQ ID NO: 422762 - RNA, 19 nt, Homo sapiens
  misc_RNA (1)...(19): siRNA sense strand
ucagagagcuucccaacau

SEQ ID NO: 422763 - RNA, 19 nt, Homo sapiens
  misc_RNA (1)...(19): siRNA sense strand
gaaagaaugugaaaagguu

SEQ ID NO: 422764 - RNA, 19 nt, Homo sapiens
  misc_RNA (1)...(19): siRNA sense strand
caacaaaguggucuacaaa

SEQ ID NO: 422765 - RNA, 19 nt, Homo sapiens
  misc_RNA (1)...(19): siRNA sense strand
gacuuucucuacaagauua

SEQ ID NO: 422766 - RNA, 19 nt, Homo sapiens
  misc_RNA (1)...(19): siRNA sense strand
agaacuagccuuugcuuua

SEQ ID NO: 422767 - RNA, 19 nt, Homo sapiens
  misc_RNA (1)...(19): siRNA sense strand
guacagcgaugaugucaag

SEQ ID NO: 422768 - RNA, 19 nt, Homo sapiens
  misc_RNA (1)...(19): siRNA sense strand
gaacaagggugccgaucag

SEQ ID NO: 422769 - RNA, 19 nt, Homo sapiens
  misc_RNA (1)...(19): siRNA sense strand
caacagaacuagccuuugc

SEQ ID NO: 422770 - RNA, 19 nt, Homo sapiens
  misc_RNA (1)...(19): siRNA sense strand
caacauagaagaaagaauc

SEQ ID NO: 422771 - RNA, 19 nt, Homo sapiens
  misc_RNA (1)...(19): siRNA sense strand
gcucuagacuuuguucgua

SEQ ID NO: 422772 - RNA, 19 nt, Homo sapiens
  misc_RNA (1)...(19): siRNA sense strand
cgacgucuucuucaaauua

SEQ ID NO: 422773 - RNA, 19 nt, Homo sapiens
  misc_RNA (1)...(19): siRNA sense strand
gagauguggucuugaguau

SEQ ID NO: 422774 - RNA, 19 nt, Homo sapiens
  misc_RNA (1)...(19): siRNA sense strand
guaagucccuagaugaaau

SEQ ID NO: 422775 - RNA, 19 nt, Homo sapiens
  misc_RNA (1)...(19): siRNA sense strand
gcuaaugcaucuggaguuu

SEQ ID NO: 422776 - RNA, 19 nt, Homo sapiens
  misc_RNA (1)...(19): siRNA sense strand
gaagaagaaagcagacauu

SEQ ID NO: 422777 - RNA, 19 nt, Homo sapiens
  misc_RNA (1)...(19): siRNA sense strand
uagagaggcugguugacua

SEQ ID NO: 422778 - RNA, 19 nt, Homo sapiens
  misc_RNA (1)...(19): siRNA sense strand
gaaaucggacaggaucuua

SEQ ID NO: 422779 - RNA, 19 nt, Homo sapiens
  misc_RNA (1)...(19): siRNA sense strand
caaagccugugacuauuau

SEQ ID NO: 422780 - RNA, 19 nt, Homo sapiens
  misc_RNA (1)...(19): siRNA sense strand
cgaauaacguuacuucaag

SEQ ID NO: 422781 - RNA, 19 nt, Homo sapiens
  misc_RNA (1)...(19): siRNA sense strand
gaaagcagacauuguguuc

SEQ ID NO: 422782 - RNA, 19 nt, Homo sapiens
  misc_RNA (1)...(19): siRNA sense strand
gggcucugcucuagacuuu

SEQ ID NO: 422783 - RNA, 19 nt, Homo sapiens
  misc_RNA (1)...(19): siRNA sense strand
gaggaaacaucggcacuug

SEQ ID NO: 422784 - RNA, 19 nt, Homo sapiens
  misc_RNA (1)...(19): siRNA sense strand
gaaauaguggacacaguuu

SEQ ID NO: 422785 - RNA, 19 nt, Homo sapiens
  misc_RNA (1)...(19): siRNA sense strand
gaucgaggauggagugcuu

SEQ ID NO: 422786 - RNA, 19 nt, Homo sapiens
  misc_RNA (1)...(19): siRNA sense strand
caaacgacgucuucuucaa

SEQ ID NO: 422787 - RNA, 19 nt, Homo sapiens
  misc_RNA (1)...(19): siRNA sense strand
gaaccugggcuaaauggaa

SEQ ID NO: 422788 - RNA, 19 nt, Homo sapiens
  misc_RNA (1)...(19): siRNA sense strand
cagagaugcucgagaaguu

SEQ ID NO: 422789 - RNA, 19 nt, Homo sapiens
  misc_RNA (1)...(19): siRNA sense strand
gaagaaagaaucaugaacu

SEQ ID NO: 422790 - RNA, 19 nt, Homo sapiens
  misc_RNA (1)...(19): siRNA sense strand
cagagucgcuucccaagau

SEQ ID NO: 422791 - RNA, 19 nt, Homo sapiens
  misc_RNA (1)...(19): siRNA sense strand
caacgaagccggugacuac

SEQ ID NO: 422792 - RNA, 19 nt, Homo sapiens
  misc_RNA (1)...(19): siRNA sense strand
ucacagacuuccuggagaa

SEQ ID NO: 422793 - RNA, 19 nt, Homo sapiens
  misc_RNA (1)...(19): siRNA sense strand
acggagaucuggcugauuu

SEQ ID NO: 422794 - RNA, 19 nt, Homo sapiens
  misc_RNA (1)...(19): siRNA sense strand
gaacagaaucagccagaug

SEQ ID NO: 422795 - RNA, 19 nt, Homo sapiens
  misc_RNA (1)...(19): siRNA sense strand
gcaaugcccuggaguacgu

SEQ ID NO: 422796 - RNA, 19 nt, Homo sapiens
  misc_RNA (1)...(19): siRNA sense strand
ucacagagaugcagaccau

SEQ ID NO: 422797 - RNA, 19 nt, Homo sapiens
  misc_RNA (1)...(19): siRNA sense strand
ucgaugagcucaaugugaa

SEQ ID NO: 422798 - RNA, 19 nt, Homo sapiens
  misc_RNA (1)...(19): siRNA sense strand
acaaagacggccacuguua

SEQ ID NO: 422799 - RNA, 19 nt, Homo sapiens
  misc_RNA (1)...(19): siRNA sense strand
ugacaacauugccgagaaa

SEQ ID NO: 422800 - RNA, 19 nt, Homo sapiens
  misc_RNA (1)...(19): siRNA sense strand
ccaagaggcagauuauuga

SEQ ID NO: 422801 - RNA, 19 nt, Homo sapiens
  misc_RNA (1)...(19): siRNA sense strand
ucuacaagauuaucgauga

SEQ ID NO: 422802 - RNA, 19 nt, Homo sapiens
  misc_RNA (1)...(19): siRNA sense strand
ggagagaggacccaaagga

SEQ ID NO: 422803 - RNA, 19 nt, Homo sapiens
  misc_RNA (1)...(19): siRNA sense strand
ggcgaggguuuauguauga

SEQ ID NO: 422804 - RNA, 19 nt, Homo sapiens
  misc_RNA (1)...(19): siRNA sense strand
ggaccaggcccgaguucua

SEQ ID NO: 422805 - RNA, 19 nt, Homo sapiens
  misc_RNA (1)...(19): siRNA sense strand
caaguaaauguuccgaaua

SEQ ID NO: 422806 - RNA, 19 nt, Homo sapiens
  misc_RNA (1)...(19): siRNA sense strand
cagagaggcugugcucaaa

SEQ ID NO: 422807 - RNA, 19 nt, Homo sapiens
  misc_RNA (1)...(19): siRNA sense strand
ggagaaagaggagauguug

SEQ ID NO: 422808 - RNA, 19 nt, Homo sapiens
  misc_RNA (1)...(19): siRNA sense strand
gguggaggccuuugacuuu

SEQ ID NO: 422809 - RNA, 19 nt, Homo sapiens
  misc_RNA (1)...(19): siRNA sense strand
ggaagacacgccaacacua

SEQ ID NO: 422810 - RNA, 19 nt, Homo sapiens
  misc_RNA (1)...(19): siRNA sense strand
ucaacaaaguggucuacaa

SEQ ID NO: 422811 - RNA, 19 nt, Homo sapiens
  misc_RNA (1)...(19): siRNA sense strand
ggaaguuucaguacaaaga

SEQ ID NO: 422812 - RNA, 19 nt, Homo sapiens
  misc_RNA (1)...(19): siRNA sense strand
ccacaaagacggccacugu

SEQ ID NO: 422813 - RNA, 19 nt, Homo sapiens
  misc_RNA (1)...(19): siRNA sense strand
ggaaacagugugauugguu

SEQ ID NO: 422814 - RNA, 19 nt, Homo sapiens
  misc_RNA (1)...(19): siRNA sense strand
cauagagaaugucuuugaa

SEQ ID NO: 422815 - RNA, 19 nt, Homo sapiens
  misc_RNA (1)...(19): siRNA sense strand
gauaggagaacaaggcauu

SEQ ID NO: 422816 - RNA, 19 nt, Homo sapiens
  misc_RNA (1)...(19): siRNA sense strand
aagaggagauguugggauu

SEQ ID NO: 422817 - RNA, 19 nt, Homo sapiens
  misc_RNA (1)...(19): siRNA sense strand
gacauucuguuccucuuug

SEQ ID NO: 422818 - RNA, 19 nt, Homo sapiens
  misc_RNA (1)...(19): siRNA sense strand
uaaaugcccuugcuguuac

SEQ ID NO: 422819 - RNA, 19 nt, Homo sapiens
  misc_RNA (1)...(19): siRNA sense strand
gauaaaugcccuugcuguu

SEQ ID NO: 422820 - RNA, 19 nt, Homo sapiens
  misc_RNA (1)...(19): siRNA sense strand
ggaaagauagcguccaaca

SEQ ID NO: 422821 - RNA, 19 nt, Homo sapiens
  misc_RNA (1)...(19): siRNA sense strand
cagagagcuucccaacaua

SEQ ID NO: 422822 - RNA, 19 nt, Homo sapiens
  misc_RNA (1)...(19): siRNA sense strand
gaagagggcgucccacagu

SEQ ID NO: 422823 - RNA, 19 nt, Homo sapiens
  misc_RNA (1)...(19): siRNA sense strand
caucaacgcuuugcagauc

SEQ ID NO: 422824 - RNA, 19 nt, Homo sapiens
  misc_RNA (1)...(19): siRNA sense strand
gaaaggagaaagaggagau

SEQ ID NO: 422825 - RNA, 19 nt, Homo sapiens
  misc_RNA (1)...(19): siRNA sense strand
ggugguaagucccuagaug

SEQ ID NO: 422826 - RNA, 19 nt, Homo sapiens
  misc_RNA (1)...(19): siRNA sense strand
acaaguaaauguuccgaau

SEQ ID NO: 422827 - RNA, 19 nt, Homo sapiens
  misc_RNA (1)...(19): siRNA sense strand
gaugcgagauguggucuug

SEQ ID NO: 422828 - RNA, 19 nt, Homo sapiens
  misc_RNA (1)...(19): siRNA sense strand
uccaaagcaucaaagauaa

SEQ ID NO: 422829 - RNA, 19 nt, Homo sapiens
  misc_RNA (1)...(19): siRNA sense strand
gggcgaggguuuauguaug

SEQ ID NO: 422830 - RNA, 19 nt, Homo sapiens
  misc_RNA (1)...(19): siRNA sense strand
ugaagagaaugaagaucaa

SEQ ID NO: 422831 - RNA, 19 nt, Homo sapiens
  misc_RNA (1)...(19): siRNA sense strand
ccacggaaguuucaguaca

SEQ ID NO: 422832 - RNA, 19 nt, Homo sapiens
  misc_RNA (1)...(19): siRNA sense strand
acaaagccugugacuauua

SEQ ID NO: 422833 - RNA, 19 nt, Homo sapiens
  misc_RNA (1)...(19): siRNA sense strand
ccaccacccuguuccaguu

SEQ ID NO: 422834 - RNA, 19 nt, Homo sapiens
  misc_RNA (1)...(19): siRNA sense strand
gagaggacccaaaggagaa

SEQ ID NO: 422835 - RNA, 19 nt, Homo sapiens
  misc_RNA (1)...(19): siRNA sense strand
gguggaagaugcacaggau

SEQ ID NO: 422836 - RNA, 19 nt, Homo sapiens
  misc_RNA (1)...(19): siRNA sense strand
gaagggcgaaguaggagaa

SEQ ID NO: 422837 - RNA, 19 nt, Homo sapiens
  misc_RNA (1)...(19): siRNA sense strand
aaagaaccuugugaaguuu

SEQ ID NO: 422838 - RNA, 19 nt, Homo sapiens
  misc_RNA (1)...(19): siRNA sense strand
gcucugcucuagacuuugu

SEQ ID NO: 422839 - RNA, 19 nt, Homo sapiens
  misc_RNA (1)...(19): siRNA sense strand
ccauagagaaugucuuuga

SEQ ID NO: 422840 - RNA, 19 nt, Homo sapiens
  misc_RNA (1)...(19): siRNA sense strand
gcagggaaccagggccuua

SEQ ID NO: 422841 - RNA, 19 nt, Homo sapiens
  misc_RNA (1)...(19): siRNA sense strand
gcaaugacaacuucuauua

SEQ ID NO: 422842 - RNA, 19 nt, Homo sapiens
  misc_RNA (1)...(19): siRNA sense strand
gaagauggaagcauaguua

SEQ ID NO: 422843 - RNA, 19 nt, Homo sapiens
  misc_RNA (1)...(19): siRNA sense strand
ggacguggguucacuguuu

SEQ ID NO: 422844 - RNA, 19 nt, Homo sapiens
  misc_RNA (1)...(19): siRNA sense strand
guacauagaccacgucaua

SEQ ID NO: 422845 - RNA, 19 nt, Homo sapiens
  misc_RNA (1)...(19): siRNA sense strand
gcacauggacgacuuguuu

SEQ ID NO: 422846 - RNA, 19 nt, Homo sapiens
  misc_RNA (1)...(19): siRNA sense strand
gaagcaagcuaccgcuauu

SEQ ID NO: 422847 - RNA, 19 nt, Homo sapiens
  misc_RNA (1)...(19): siRNA sense strand
ggaagaaagugauccugaa

SEQ ID NO: 422848 - RNA, 19 nt, Homo sapiens
  misc_RNA (1)...(19): siRNA sense strand
gaauaucgguccagcaaau

SEQ ID NO: 422849 - RNA, 19 nt, Homo sapiens
  misc_RNA (1)...(19): siRNA sense strand
gcaagaggcauuugauaaa

SEQ ID NO: 422850 - RNA, 19 nt, Homo sapiens
  misc_RNA (1)...(19): siRNA sense strand
cagcaucaaucacuuguuu

SEQ ID NO: 422851 - RNA, 19 nt, Homo sapiens
  misc_RNA (1)...(19): siRNA sense strand
gaacagccauugaucugau

SEQ ID NO: 422852 - RNA, 19 nt, Homo sapiens
  misc_RNA (1)...(19): siRNA sense strand
gauaacagcaguugagauu

SEQ ID NO: 422853 - RNA, 19 nt, Homo sapiens
  misc_RNA (1)...(19): siRNA sense strand
gaaggcaguugaaaauuua

SEQ ID NO: 422854 - RNA, 19 nt, Homo sapiens
  misc_RNA (1)...(19): siRNA sense strand
cugaaggucuggauuguua

SEQ ID NO: 422855 - RNA, 19 nt, Homo sapiens
  misc_RNA (1)...(19): siRNA sense strand
cagauaaagucaucauuug

SEQ ID NO: 422856 - RNA, 19 nt, Homo sapiens
  misc_RNA (1)...(19): siRNA sense strand
ucuggaagguugaauauuu

SEQ ID NO: 422857 - RNA, 19 nt, Homo sapiens
  misc_RNA (1)...(19): siRNA sense strand
ggaagagcaugaccuuguu

SEQ ID NO: 422858 - RNA, 19 nt, Homo sapiens
  misc_RNA (1)...(19): siRNA sense strand
gcaauaaagacaaaccuaa

SEQ ID NO: 422859 - RNA, 19 nt, Homo sapiens
  misc_RNA (1)...(19): siRNA sense strand
gcagauguauugaauuuac

SEQ ID NO: 422860 - RNA, 19 nt, Homo sapiens
  misc_RNA (1)...(19): siRNA sense strand
cuugaaggaucuuuaguua

SEQ ID NO: 422861 - RNA, 19 nt, Homo sapiens
  misc_RNA (1)...(19): siRNA sense strand
uacaaacccuugcaacuaa

SEQ ID NO: 422862 - RNA, 19 nt, Homo sapiens
  misc_RNA (1)...(19): siRNA sense strand
uggcagauguauugaauuu

SEQ ID NO: 422863 - RNA, 19 nt, Homo sapiens
  misc_RNA (1)...(19): siRNA sense strand
guaaugaaccucuuaaagu

SEQ ID NO: 422864 - RNA, 19 nt, Homo sapiens
  misc_RNA (1)...(19): siRNA sense strand
gcagagaauauuuccauaa

SEQ ID NO: 422865 - RNA, 19 nt, Homo sapiens
  misc_RNA (1)...(19): siRNA sense strand
gacuuugucucaucagaua

SEQ ID NO: 422866 - RNA, 19 nt, Homo sapiens
  misc_RNA (1)...(19): siRNA sense strand
ggaaggcaguugaaaauuu

SEQ ID NO: 422867 - RNA, 19 nt, Homo sapiens
  misc_RNA (1)...(19): siRNA sense strand
gaaacaacuugccaacauc

SEQ ID NO: 422868 - RNA, 19 nt, Homo sapiens
  misc_RNA (1)...(19): siRNA sense strand
gcaaggcacugacguuucu

SEQ ID NO: 422869 - RNA, 19 nt, Homo sapiens
  misc_RNA (1)...(19): siRNA sense strand
ccucgaagcucuagccaaa

SEQ ID NO: 422870 - RNA, 19 nt, Homo sapiens
  misc_RNA (1)...(19): siRNA sense strand
agaaagugauccugaauau

SEQ ID NO: 422871 - RNA, 19 nt, Homo sapiens
  misc_RNA (1)...(19): siRNA sense strand
gaagaagggcuggcaauga

SEQ ID NO: 422872 - RNA, 19 nt, Homo sapiens
  misc_RNA (1)...(19): siRNA sense strand
gcacuguuguuuggucaua

SEQ ID NO: 422873 - RNA, 19 nt, Homo sapiens
  misc_RNA (1)...(19): siRNA sense strand
ccaaagagguacacagaca

SEQ ID NO: 422874 - RNA, 19 nt, Homo sapiens
  misc_RNA (1)...(19): siRNA sense strand
ucuaaacgcuugugaugaa

SEQ ID NO: 422875 - RNA, 19 nt, Homo sapiens
  misc_RNA (1)...(19): siRNA sense strand
gcaggauacugagccaaua

SEQ ID NO: 422876 - RNA, 19 nt, Homo sapiens
  misc_RNA (1)...(19): siRNA sense strand
gauggcagauguauugaau

SEQ ID NO: 422877 - RNA, 19 nt, Homo sapiens
  misc_RNA (1)...(19): siRNA sense strand
ugaaagaaacgaucaaaga

SEQ ID NO: 422878 - RNA, 19 nt, Homo sapiens
  misc_RNA (1)...(19): siRNA sense strand
gcaguucucuuccaacaag

SEQ ID NO: 422879 - RNA, 19 nt, Homo sapiens
  misc_RNA (1)...(19): siRNA sense strand
ggaggaauccaaaccaauu

SEQ ID NO: 422880 - RNA, 19 nt, Homo sapiens
  misc_RNA (1)...(19): siRNA sense strand
uaccagccuugaaguauua

SEQ ID NO: 422881 - RNA, 19 nt, Homo sapiens
  misc_RNA (1)...(19): siRNA sense strand
gcauacaguucuaccaguu

SEQ ID NO: 422882 - RNA, 19 nt, Homo sapiens
  misc_RNA (1)...(19): siRNA sense strand
ugaaacauaucuucugugu

SEQ ID NO: 422883 - RNA, 19 nt, Homo sapiens
  misc_RNA (1)...(19): siRNA sense strand
ugaaugaaguacuggauga

SEQ ID NO: 422884 - RNA, 19 nt, Homo sapiens
  misc_RNA (1)...(19): siRNA sense strand
gaaaaugggcaaaguuaua

SEQ ID NO: 422885 - RNA, 19 nt, Homo sapiens
  misc_RNA (1)...(19): siRNA sense strand
ugccugggcuccuuacuua

SEQ ID NO: 422886 - RNA, 19 nt, Homo sapiens
  misc_RNA (1)...(19): siRNA sense strand
gaaaagcgcccacacauug

SEQ ID NO: 422887 - RNA, 19 nt, Homo sapiens
  misc_RNA (1)...(19): siRNA sense strand
gggcaaaguuauauuuaca

SEQ ID NO: 422888 - RNA, 19 nt, Homo sapiens
  misc_RNA (1)...(19): siRNA sense strand
gauggaagcauaguuauug

SEQ ID NO: 422889 - RNA, 19 nt, Homo sapiens
  misc_RNA (1)...(19): siRNA sense strand
aagaaacgaucaaagagaa

SEQ ID NO: 422890 - RNA, 19 nt, Homo sapiens
  misc_RNA (1)...(19): siRNA sense strand
gaaagaaacgaucaaagag

SEQ ID NO: 422891 - RNA, 19 nt, Homo sapiens
  misc_RNA (1)...(19): siRNA sense strand
gaacacaugcucagaagag

SEQ ID NO: 422892 - RNA, 19 nt, Homo sapiens
  misc_RNA (1)...(19): siRNA sense strand
ucaagugucccacaaauga

SEQ ID NO: 422893 - RNA, 19 nt, Homo sapiens
  misc_RNA (1)...(19): siRNA sense strand
uaacagacccggacauaca

SEQ ID NO: 422894 - RNA, 19 nt, Homo sapiens
  misc_RNA (1)...(19): siRNA sense strand
ccugaugguucaagcaaua

SEQ ID NO: 422895 - RNA, 19 nt, Homo sapiens
  misc_RNA (1)...(19): siRNA sense strand
uaacagcaguugagauucu

SEQ ID NO: 422896 - RNA, 19 nt, Homo sapiens
  misc_RNA (1)...(19): siRNA sense strand
ccacggacauuacccugaa

SEQ ID NO: 422897 - RNA, 19 nt, Homo sapiens
  misc_RNA (1)...(19): siRNA sense strand
agaaacaacuugccaacau

SEQ ID NO: 422898 - RNA, 19 nt, Homo sapiens
  misc_RNA (1)...(19): siRNA sense strand
agacacagcugauaaacag

SEQ ID NO: 422899 - RNA, 19 nt, Homo sapiens
  misc_RNA (1)...(19): siRNA sense strand
aaacuguagugcaagagua

SEQ ID NO: 422900 - RNA, 19 nt, Homo sapiens
  misc_RNA (1)...(19): siRNA sense strand
gagguuauggacaucauua

SEQ ID NO: 422901 - RNA, 19 nt, Homo sapiens
  misc_RNA (1)...(19): siRNA sense strand
caccauagccaaagaggua

SEQ ID NO: 422902 - RNA, 19 nt, Homo sapiens
  misc_RNA (1)...(19): siRNA sense strand
caagcuaccgcuauuguuu

SEQ ID NO: 422903 - RNA, 19 nt, Homo sapiens
  misc_RNA (1)...(19): siRNA sense strand
gaggaggaauccaaaccaa

SEQ ID NO: 422904 - RNA, 19 nt, Homo sapiens
  misc_RNA (1)...(19): siRNA sense strand
ucgaagcucuagccaaauu

SEQ ID NO: 422905 - RNA, 19 nt, Homo sapiens
  misc_RNA (1)...(19): siRNA sense strand
aauugaaccuccuaaacua

SEQ ID NO: 422906 - RNA, 19 nt, Homo sapiens
  misc_RNA (1)...(19): siRNA sense strand
gaaauugaaccuccuaaac

SEQ ID NO: 422907 - RNA, 19 nt, Homo sapiens
  misc_RNA (1)...(19): siRNA sense strand
ccuccaacuuccaguaaua

SEQ ID NO: 422908 - RNA, 19 nt, Homo sapiens
  misc_RNA (1)...(19): siRNA sense strand
caucuccugucuaucauuu

SEQ ID NO: 422909 - RNA, 19 nt, Homo sapiens
  misc_RNA (1)...(19): siRNA sense strand
gaacaccuccuugaugaug

SEQ ID NO: 422910 - RNA, 19 nt, Homo sapiens
  misc_RNA (1)...(19): siRNA sense strand
ucaaagagaacaucaagga

SEQ ID NO: 422911 - RNA, 19 nt, Homo sapiens
  misc_RNA (1)...(19): siRNA sense strand
guacauaccagcacaugga

SEQ ID NO: 422912 - RNA, 19 nt, Homo sapiens
  misc_RNA (1)...(19): siRNA sense strand
gauaaagucaucauuugga

SEQ ID NO: 422913 - RNA, 19 nt, Homo sapiens
  misc_RNA (1)...(19): siRNA sense strand
ucaaagauaucaccagacu

SEQ ID NO: 422914 - RNA, 19 nt, Homo sapiens
  misc_RNA (1)...(19): siRNA sense strand
ggacacaagggaccaauca

SEQ ID NO: 422915 - RNA, 19 nt, Homo sapiens
  misc_RNA (1)...(19): siRNA sense strand
ucucugggaucuuucagua

SEQ ID NO: 422916 - RNA, 19 nt, Homo sapiens
  misc_RNA (1)...(19): siRNA sense strand
gaaagacggaagcaagcua

SEQ ID NO: 422917 - RNA, 19 nt, Homo sapiens
  misc_RNA (1)...(19): siRNA sense strand
cugcaaagcuguuuauguc

SEQ ID NO: 422918 - RNA, 19 nt, Homo sapiens
  misc_RNA (1)...(19): siRNA sense strand
gaagaaagugauccugaau

SEQ ID NO: 422919 - RNA, 19 nt, Homo sapiens
  misc_RNA (1)...(19): siRNA sense strand
cuacaaacccuugcaacua

SEQ ID NO: 422920 - RNA, 19 nt, Homo sapiens
  misc_RNA (1)...(19): siRNA sense strand
gauguggaagcguugauua

SEQ ID NO: 422921 - RNA, 19 nt, Homo sapiens
  misc_RNA (1)...(19): siRNA sense strand
gagagucauugaaauucuu

SEQ ID NO: 422922 - RNA, 19 nt, Homo sapiens
  misc_RNA (1)...(19): siRNA sense strand
acacagcacuauccgaaga

SEQ ID NO: 422923 - RNA, 19 nt, Homo sapiens
  misc_RNA (1)...(19): siRNA sense strand
auaaucagccugcuuguaa

SEQ ID NO: 422924 - RNA, 19 nt, Homo sapiens
  misc_RNA (1)...(19): siRNA sense strand
ggaugaaguuugccuggau

SEQ ID NO: 422925 - RNA, 19 nt, Homo sapiens
  misc_RNA (1)...(19): siRNA sense strand
uaagugacaugcaggauac

SEQ ID NO: 422926 - RNA, 19 nt, Homo sapiens
  misc_RNA (1)...(19): siRNA sense strand
aauaggagcugaauuuggu

SEQ ID NO: 422927 - RNA, 19 nt, Homo sapiens
  misc_RNA (1)...(19): siRNA sense strand
aguaauaggagcugaauuu

SEQ ID NO: 422928 - RNA, 19 nt, Homo sapiens
  misc_RNA (1)...(19): siRNA sense strand
aaacagaaguaggaaggaa

SEQ ID NO: 422929 - RNA, 19 nt, Homo sapiens
  misc_RNA (1)...(19): siRNA sense strand
ccacugcaccguaucguuu

SEQ ID NO: 422930 - RNA, 19 nt, Homo sapiens
  misc_RNA (1)...(19): siRNA sense strand
ggucauacagcaucaauca

SEQ ID NO: 422931 - RNA, 19 nt, Homo sapiens
  misc_RNA (1)...(19): siRNA sense strand
gcuauucuuugauguggaa

SEQ ID NO: 422932 - RNA, 19 nt, Homo sapiens
  misc_RNA (1)...(19): siRNA sense strand
ugagcggaaucacagaaua

SEQ ID NO: 422933 - RNA, 19 nt, Homo sapiens
  misc_RNA (1)...(19): siRNA sense strand
gaagaacagccauugaucu

SEQ ID NO: 422934 - RNA, 19 nt, Homo sapiens
  misc_RNA (1)...(19): siRNA sense strand
cagcaucuccugucuauca

SEQ ID NO: 422935 - RNA, 19 nt, Homo sapiens
  misc_RNA (1)...(19): siRNA sense strand
guggaagcguugauuauuc

SEQ ID NO: 422936 - RNA, 19 nt, Homo sapiens
  misc_RNA (1)...(19): siRNA sense strand
aaauuagcuugcacacaua

SEQ ID NO: 422937 - RNA, 19 nt, Homo sapiens
  misc_RNA (1)...(19): siRNA sense strand
gcaaggacagauuaaacaa

SEQ ID NO: 422938 - RNA, 19 nt, Homo sapiens
  misc_RNA (1)...(19): siRNA sense strand
gcagagaagggaagaaagu

SEQ ID NO: 422939 - RNA, 19 nt, Homo sapiens
  misc_RNA (1)...(19): siRNA sense strand
gaagguugaauauuuggaa

SEQ ID NO: 422940 - RNA, 19 nt, Homo sapiens
  misc_RNA (1)...(19): siRNA sense strand
gguuguguguuccaaauau

SEQ ID NO: 422941 - RNA, 19 nt, Homo sapiens
  misc_RNA (1)...(19): siRNA sense strand
gcaaugacaacuucuauua

SEQ ID NO: 422942 - RNA, 19 nt, Homo sapiens
  misc_RNA (1)...(19): siRNA sense strand
gaagauggaagcauaguua

SEQ ID NO: 422943 - RNA, 19 nt, Homo sapiens
  misc_RNA (1)...(19): siRNA sense strand
ggacguggguucacuguuu

SEQ ID NO: 422944 - RNA, 19 nt, Homo sapiens
  misc_RNA (1)...(19): siRNA sense strand
guacauagaccacgucaua

SEQ ID NO: 422945 - RNA, 19 nt, Homo sapiens
  misc_RNA (1)...(19): siRNA sense strand
gcacauggacgacuuguuu

SEQ ID NO: 422946 - RNA, 19 nt, Homo sapiens
  misc_RNA (1)...(19): siRNA sense strand
gaagcaagcuaccgcuauu

SEQ ID NO: 422947 - RNA, 19 nt, Homo sapiens
  misc_RNA (1)...(19): siRNA sense strand
ggaagaaagugauccugaa

SEQ ID NO: 422948 - RNA, 19 nt, Homo sapiens
  misc_RNA (1)...(19): siRNA sense strand
gaauaucgguccagcaaau

SEQ ID NO: 422949 - RNA, 19 nt, Homo sapiens
  misc_RNA (1)...(19): siRNA sense strand
gcaagaggcauuugauaaa

SEQ ID NO: 422950 - RNA, 19 nt, Homo sapiens
  misc_RNA (1)...(19): siRNA sense strand
cagcaucaaucacuuguuu

SEQ ID NO: 422951 - RNA, 19 nt, Homo sapiens
  misc_RNA (1)...(19): siRNA sense strand
gaacagccauugaucugau

SEQ ID NO: 422952 - RNA, 19 nt, Homo sapiens
  misc_RNA (1)...(19): siRNA sense strand
gauaacagcaguugagauu

SEQ ID NO: 422953 - RNA, 19 nt, Homo sapiens
  misc_RNA (1)...(19): siRNA sense strand
gaaggcaguugaaaauuua

SEQ ID NO: 422954 - RNA, 19 nt, Homo sapiens
  misc_RNA (1)...(19): siRNA sense strand
cugaaggucuggauuguua

SEQ ID NO: 422955 - RNA, 19 nt, Homo sapiens
  misc_RNA (1)...(19): siRNA sense strand
cagauaaagucaucauuug

SEQ ID NO: 422956 - RNA, 19 nt, Homo sapiens
  misc_RNA (1)...(19): siRNA sense strand
ucuggaagguugaauauuu

SEQ ID NO: 422957 - RNA, 19 nt, Homo sapiens
  misc_RNA (1)...(19): siRNA sense strand
ggaagagcaugaccuuguu

SEQ ID NO: 422958 - RNA, 19 nt, Homo sapiens
  misc_RNA (1)...(19): siRNA sense strand
gcaauaaagacaaaccuaa

SEQ ID NO: 422959 - RNA, 19 nt, Homo sapiens
  misc_RNA (1)...(19): siRNA sense strand
gcagauguauugaauuuac

SEQ ID NO: 422960 - RNA, 19 nt, Homo sapiens
  misc_RNA (1)...(19): siRNA sense strand
cuugaaggaucuuuaguua

SEQ ID NO: 422961 - RNA, 19 nt, Homo sapiens
  misc_RNA (1)...(19): siRNA sense strand
uacaaacccuugcaacuaa

SEQ ID NO: 422962 - RNA, 19 nt, Homo sapiens
  misc_RNA (1)...(19): siRNA sense strand
uggcagauguauugaauuu

SEQ ID NO: 422963 - RNA, 19 nt, Homo sapiens
  misc_RNA (1)...(19): siRNA sense strand
guaaugaaccucuuaaagu

SEQ ID NO: 422964 - RNA, 19 nt, Homo sapiens
  misc_RNA (1)...(19): siRNA sense strand
gcagagaauauuuccauaa

SEQ ID NO: 422965 - RNA, 19 nt, Homo sapiens
  misc_RNA (1)...(19): siRNA sense strand
gacuuugucucaucagaua

SEQ ID NO: 422966 - RNA, 19 nt, Homo sapiens
  misc_RNA (1)...(19): siRNA sense strand
ggaaggcaguugaaaauuu

SEQ ID NO: 422967 - RNA, 19 nt, Homo sapiens
  misc_RNA (1)...(19): siRNA sense strand
gaaacaacuugccaacauc

SEQ ID NO: 422968 - RNA, 19 nt, Homo sapiens
  misc_RNA (1)...(19): siRNA sense strand
gcaaggcacugacguuucu

SEQ ID NO: 422969 - RNA, 19 nt, Homo sapiens
  misc_RNA (1)...(19): siRNA sense strand
ccucgaagcucuagccaaa

SEQ ID NO: 422970 - RNA, 19 nt, Homo sapiens
  misc_RNA (1)...(19): siRNA sense strand
agaaagugauccugaauau

SEQ ID NO: 422971 - RNA, 19 nt, Homo sapiens
  misc_RNA (1)...(19): siRNA sense strand
gaagaagggcuggcaauga

SEQ ID NO: 422972 - RNA, 19 nt, Homo sapiens
  misc_RNA (1)...(19): siRNA sense strand
gcacuguuguuuggucaua

SEQ ID NO: 422973 - RNA, 19 nt, Homo sapiens
  misc_RNA (1)...(19): siRNA sense strand
ccaaagagguacacagaca

SEQ ID NO: 422974 - RNA, 19 nt, Homo sapiens
  misc_RNA (1)...(19): siRNA sense strand
ucuaaacgcuugugaugaa

SEQ ID NO: 422975 - RNA, 19 nt, Homo sapiens
  misc_RNA (1)...(19): siRNA sense strand
gcaggauacugagccaaua

SEQ ID NO: 422976 - RNA, 19 nt, Homo sapiens
  misc_RNA (1)...(19): siRNA sense strand
gauggcagauguauugaau

SEQ ID NO: 422977 - RNA, 19 nt, Homo sapiens
  misc_RNA (1)...(19): siRNA sense strand
ugaaagaaacgaucaaaga

SEQ ID NO: 422978 - RNA, 19 nt, Homo sapiens
  misc_RNA (1)...(19): siRNA sense strand
gcaguucucuuccaacaag

SEQ ID NO: 422979 - RNA, 19 nt, Homo sapiens
  misc_RNA (1)...(19): siRNA sense strand
ggaggaauccaaaccaauu

SEQ ID NO: 422980 - RNA, 19 nt, Homo sapiens
  misc_RNA (1)...(19): siRNA sense strand
uaccagccuugaaguauua

SEQ ID NO: 422981 - RNA, 19 nt, Homo sapiens
  misc_RNA (1)...(19): siRNA sense strand
gcauacaguucuaccaguu

SEQ ID NO: 422982 - RNA, 19 nt, Homo sapiens
  misc_RNA (1)...(19): siRNA sense strand
ugaaacauaucuucugugu

SEQ ID NO: 422983 - RNA, 19 nt, Homo sapiens
  misc_RNA (1)...(19): siRNA sense strand
ugaaugaaguacuggauga

SEQ ID NO: 422984 - RNA, 19 nt, Homo sapiens
  misc_RNA (1)...(19): siRNA sense strand
gaaaaugggcaaaguuaua

SEQ ID NO: 422985 - RNA, 19 nt, Homo sapiens
  misc_RNA (1)...(19): siRNA sense strand
ugccugggcuccuuacuua

SEQ ID NO: 422986 - RNA, 19 nt, Homo sapiens
  misc_RNA (1)...(19): siRNA sense strand
gaaaagcgcccacacauug

SEQ ID NO: 422987 - RNA, 19 nt, Homo sapiens
  misc_RNA (1)...(19): siRNA sense strand
gggcaaaguuauauuuaca

SEQ ID NO: 422988 - RNA, 19 nt, Homo sapiens
  misc_RNA (1)...(19): siRNA sense strand
gauggaagcauaguuauug

SEQ ID NO: 422989 - RNA, 19 nt, Homo sapiens
  misc_RNA (1)...(19): siRNA sense strand
aagaaacgaucaaagagaa

SEQ ID NO: 422990 - RNA, 19 nt, Homo sapiens
  misc_RNA (1)...(19): siRNA sense strand
gaaagaaacgaucaaagag

SEQ ID NO: 422991 - RNA, 19 nt, Homo sapiens
  misc_RNA (1)...(19): siRNA sense strand
gaacacaugcucagaagag

SEQ ID NO: 422992 - RNA, 19 nt, Homo sapiens
  misc_RNA (1)...(19): siRNA sense strand
ucaagugucccacaaauga

SEQ ID NO: 422993 - RNA, 19 nt, Homo sapiens
  misc_RNA (1)...(19): siRNA sense strand
uaacagacccggacauaca

SEQ ID NO: 422994 - RNA, 19 nt, Homo sapiens
  misc_RNA (1)...(19): siRNA sense strand
ccugaugguucaagcaaua

SEQ ID NO: 422995 - RNA, 19 nt, Homo sapiens
  misc_RNA (1)...(19): siRNA sense strand
uaacagcaguugagauucu

SEQ ID NO: 422996 - RNA, 19 nt, Homo sapiens
  misc_RNA (1)...(19): siRNA sense strand
ccacggacauuacccugaa

SEQ ID NO: 422997 - RNA, 19 nt, Homo sapiens
  misc_RNA (1)...(19): siRNA sense strand
agaaacaacuugccaacau

SEQ ID NO: 422998 - RNA, 19 nt, Homo sapiens
  misc_RNA (1)...(19): siRNA sense strand
agacacagcugauaaacag

SEQ ID NO: 422999 - RNA, 19 nt, Homo sapiens
  misc_RNA (1)...(19): siRNA sense strand
aaacuguagugcaagagua

SEQ ID NO: 423000 - RNA, 19 nt, Homo sapiens
  misc_RNA (1)...(19): siRNA sense strand
gagguuauggacaucauua

SEQ ID NO: 423001 - RNA, 19 nt, Homo sapiens
  misc_RNA (1)...(19): siRNA sense strand
caccauagccaaagaggua

SEQ ID NO: 423002 - RNA, 19 nt, Homo sapiens
  misc_RNA (1)...(19): siRNA sense strand
caagcuaccgcuauuguuu

SEQ ID NO: 423003 - RNA, 19 nt, Homo sapiens
  misc_RNA (1)...(19): siRNA sense strand
gaggaggaauccaaaccaa

SEQ ID NO: 423004 - RNA, 19 nt, Homo sapiens
  misc_RNA (1)...(19): siRNA sense strand
ucgaagcucuagccaaauu

SEQ ID NO: 423005 - RNA, 19 nt, Homo sapiens
  misc_RNA (1)...(19): siRNA sense strand
aauugaaccuccuaaacua

SEQ ID NO: 423006 - RNA, 19 nt, Homo sapiens
  misc_RNA (1)...(19): siRNA sense strand
gaaauugaaccuccuaaac

SEQ ID NO: 423007 - RNA, 19 nt, Homo sapiens
  misc_RNA (1)...(19): siRNA sense strand
ccuccaacuuccaguaaua

SEQ ID NO: 423008 - RNA, 19 nt, Homo sapiens
  misc_RNA (1)...(19): siRNA sense strand
caucuccugucuaucauuu

SEQ ID NO: 423009 - RNA, 19 nt, Homo sapiens
  misc_RNA (1)...(19): siRNA sense strand
gaacaccuccuugaugaug

SEQ ID NO: 423010 - RNA, 19 nt, Homo sapiens
  misc_RNA (1)...(19): siRNA sense strand
ucaaagagaacaucaagga

SEQ ID NO: 423011 - RNA, 19 nt, Homo sapiens
  misc_RNA (1)...(19): siRNA sense strand
guacauaccagcacaugga

SEQ ID NO: 423012 - RNA, 19 nt, Homo sapiens
  misc_RNA (1)...(19): siRNA sense strand
gauaaagucaucauuugga

SEQ ID NO: 423013 - RNA, 19 nt, Homo sapiens
  misc_RNA (1)...(19): siRNA sense strand
ucaaagauaucaccagacu

SEQ ID NO: 423014 - RNA, 19 nt, Homo sapiens
  misc_RNA (1)...(19): siRNA sense strand
ggacacaagggaccaauca

SEQ ID NO: 423015 - RNA, 19 nt, Homo sapiens
  misc_RNA (1)...(19): siRNA sense strand
ucucugggaucuuucagua

SEQ ID NO: 423016 - RNA, 19 nt, Homo sapiens
  misc_RNA (1)...(19): siRNA sense strand
gaaagacggaagcaagcua

SEQ ID NO: 423017 - RNA, 19 nt, Homo sapiens
  misc_RNA (1)...(19): siRNA sense strand
cugcaaagcuguuuauguc

SEQ ID NO: 423018 - RNA, 19 nt, Homo sapiens
  misc_RNA (1)...(19): siRNA sense strand
gaagaaagugauccugaau

SEQ ID NO: 423019 - RNA, 19 nt, Homo sapiens
  misc_RNA (1)...(19): siRNA sense strand
cuacaaacccuugcaacua

SEQ ID NO: 423020 - RNA, 19 nt, Homo sapiens
  misc_RNA (1)...(19): siRNA sense strand
gauguggaagcguugauua

SEQ ID NO: 423021 - RNA, 19 nt, Homo sapiens
  misc_RNA (1)...(19): siRNA sense strand
gagagucauugaaauucuu

SEQ ID NO: 423022 - RNA, 19 nt, Homo sapiens
  misc_RNA (1)...(19): siRNA sense strand
acacagcacuauccgaaga

SEQ ID NO: 423023 - RNA, 19 nt, Homo sapiens
  misc_RNA (1)...(19): siRNA sense strand
auaaucagccugcuuguaa

SEQ ID NO: 423024 - RNA, 19 nt, Homo sapiens
  misc_RNA (1)...(19): siRNA sense strand
ggaugaaguuugccuggau

SEQ ID NO: 423025 - RNA, 19 nt, Homo sapiens
  misc_RNA (1)...(19): siRNA sense strand
uaagugacaugcaggauac

SEQ ID NO: 423026 - RNA, 19 nt, Homo sapiens
  misc_RNA (1)...(19): siRNA sense strand
aauaggagcugaauuuggu

SEQ ID NO: 423027 - RNA, 19 nt, Homo sapiens
  misc_RNA (1)...(19): siRNA sense strand
aguaauaggagcugaauuu

SEQ ID NO: 423028 - RNA, 19 nt, Homo sapiens
  misc_RNA (1)...(19): siRNA sense strand
aaacagaaguaggaaggaa

SEQ ID NO: 423029 - RNA, 19 nt, Homo sapiens
  misc_RNA (1)...(19): siRNA sense strand
ccacugcaccguaucguuu

SEQ ID NO: 423030 - RNA, 19 nt, Homo sapiens
  misc_RNA (1)...(19): siRNA sense strand
ggucauacagcaucaauca

SEQ ID NO: 423031 - RNA, 19 nt, Homo sapiens
  misc_RNA (1)...(19): siRNA sense strand
gcuauucuuugauguggaa

SEQ ID NO: 423032 - RNA, 19 nt, Homo sapiens
  misc_RNA (1)...(19): siRNA sense strand
ugagcggaaucacagaaua

SEQ ID NO: 423033 - RNA, 19 nt, Homo sapiens
  misc_RNA (1)...(19): siRNA sense strand
gaagaacagccauugaucu

SEQ ID NO: 423034 - RNA, 19 nt, Homo sapiens
  misc_RNA (1)...(19): siRNA sense strand
cagcaucuccugucuauca

SEQ ID NO: 423035 - RNA, 19 nt, Homo sapiens
  misc_RNA (1)...(19): siRNA sense strand
guggaagcguugauuauuc

SEQ ID NO: 423036 - RNA, 19 nt, Homo sapiens
  misc_RNA (1)...(19): siRNA sense strand
aaauuagcuugcacacaua

SEQ ID NO: 423037 - RNA, 19 nt, Homo sapiens
  misc_RNA (1)...(19): siRNA sense strand
gcaaggacagauuaaacaa

SEQ ID NO: 423038 - RNA, 19 nt, Homo sapiens
  misc_RNA (1)...(19): siRNA sense strand
gcagagaagggaagaaagu

SEQ ID NO: 423039 - RNA, 19 nt, Homo sapiens
  misc_RNA (1)...(19): siRNA sense strand
gaagguugaauauuuggaa

SEQ ID NO: 423040 - RNA, 19 nt, Homo sapiens
  misc_RNA (1)...(19): siRNA sense strand
gguuguguguuccaaauau

SEQ ID NO: 423041 - RNA, 19 nt, Homo sapiens
  misc_RNA (1)...(19): siRNA sense strand
gaacaaagccagaagagaa

SEQ ID NO: 423042 - RNA, 19 nt, Homo sapiens
  misc_RNA (1)...(19): siRNA sense strand
gaaagaaacagaccagaaa

SEQ ID NO: 423043 - RNA, 19 nt, Homo sapiens
  misc_RNA (1)...(19): siRNA sense strand
ggaggaagguuauggagaa

SEQ ID NO: 423044 - RNA, 19 nt, Homo sapiens
  misc_RNA (1)...(19): siRNA sense strand
ggacugagcgaaugucaua

SEQ ID NO: 423045 - RNA, 19 nt, Homo sapiens
  misc_RNA (1)...(19): siRNA sense strand
gcucggcacuguauucuaa

SEQ ID NO: 423046 - RNA, 19 nt, Homo sapiens
  misc_RNA (1)...(19): siRNA sense strand
gcaaggauauuaaggaagu

SEQ ID NO: 423047 - RNA, 19 nt, Homo sapiens
  misc_RNA (1)...(19): siRNA sense strand
gggaagaauugacaaaguu

SEQ ID NO: 423048 - RNA, 19 nt, Homo sapiens
  misc_RNA (1)...(19): siRNA sense strand
gaaaguugcccuccucuau

SEQ ID NO: 423049 - RNA, 19 nt, Homo sapiens
  misc_RNA (1)...(19): siRNA sense strand
gcaaggcgauuccaugaca

SEQ ID NO: 423050 - RNA, 19 nt, Homo sapiens
  misc_RNA (1)...(19): siRNA sense strand
gagcaggccauguuugaua

SEQ ID NO: 423051 - RNA, 19 nt, Homo sapiens
  misc_RNA (1)...(19): siRNA sense strand
ggaagaauugacaaaguua

SEQ ID NO: 423052 - RNA, 19 nt, Homo sapiens
  misc_RNA (1)...(19): siRNA sense strand
gagcaaaggucgucaacgu

SEQ ID NO: 423053 - RNA, 19 nt, Homo sapiens
  misc_RNA (1)...(19): siRNA sense strand
ugacaaaguuagauaagga

SEQ ID NO: 423054 - RNA, 19 nt, Homo sapiens
  misc_RNA (1)...(19): siRNA sense strand
gaaagcacacggucaaaug

SEQ ID NO: 423055 - RNA, 19 nt, Homo sapiens
  misc_RNA (1)...(19): siRNA sense strand
gcaaggagcaggccauguu

SEQ ID NO: 423056 - RNA, 19 nt, Homo sapiens
  misc_RNA (1)...(19): siRNA sense strand
gcaaagaugaggccaguga

SEQ ID NO: 423057 - RNA, 19 nt, Homo sapiens
  misc_RNA (1)...(19): siRNA sense strand
agaaaguaauccagagaua

SEQ ID NO: 423058 - RNA, 19 nt, Homo sapiens
  misc_RNA (1)...(19): siRNA sense strand
gaagucaacgucucacaaa

SEQ ID NO: 423059 - RNA, 19 nt, Homo sapiens
  misc_RNA (1)...(19): siRNA sense strand
gaaacaaauccuaucacua

SEQ ID NO: 423060 - RNA, 19 nt, Homo sapiens
  misc_RNA (1)...(19): siRNA sense strand
gagcgaaugucauaugaag

SEQ ID NO: 423061 - RNA, 19 nt, Homo sapiens
  misc_RNA (1)...(19): siRNA sense strand
uggaggagcccgugaguua

SEQ ID NO: 423062 - RNA, 19 nt, Homo sapiens
  misc_RNA (1)...(19): siRNA sense strand
gaagcgagacagagagaaa

SEQ ID NO: 423063 - RNA, 19 nt, Homo sapiens
  misc_RNA (1)...(19): siRNA sense strand
ggucggugauuucagauga

SEQ ID NO: 423064 - RNA, 19 nt, Homo sapiens
  misc_RNA (1)...(19): siRNA sense strand
gaaaacaucguuaccagua

SEQ ID NO: 423065 - RNA, 19 nt, Homo sapiens
  misc_RNA (1)...(19): siRNA sense strand
gaggaggaauccaccauca

SEQ ID NO: 423066 - RNA, 19 nt, Homo sapiens
  misc_RNA (1)...(19): siRNA sense strand
aaaccaacgucagaacuuu

SEQ ID NO: 423067 - RNA, 19 nt, Homo sapiens
  misc_RNA (1)...(19): siRNA sense strand
aaaggucggugauuucaga

SEQ ID NO: 423068 - RNA, 19 nt, Homo sapiens
  misc_RNA (1)...(19): siRNA sense strand
gagagagaggugccgauua

SEQ ID NO: 423069 - RNA, 19 nt, Homo sapiens
  misc_RNA (1)...(19): siRNA sense strand
ggaaagaacaagcuagaag

SEQ ID NO: 423070 - RNA, 19 nt, Homo sapiens
  misc_RNA (1)...(19): siRNA sense strand
agagagaggugccgauuag

SEQ ID NO: 423071 - RNA, 19 nt, Homo sapiens
  misc_RNA (1)...(19): siRNA sense strand
ggagaaggcuaaggagaag

SEQ ID NO: 423072 - RNA, 19 nt, Homo sapiens
  misc_RNA (1)...(19): siRNA sense strand
gacagaaaccguagcagaa

SEQ ID NO: 423073 - RNA, 19 nt, Homo sapiens
  misc_RNA (1)...(19): siRNA sense strand
gaagaccggccucaguuug

SEQ ID NO: 423074 - RNA, 19 nt, Homo sapiens
  misc_RNA (1)...(19): siRNA sense strand
gcaguuggugugagcuuua

SEQ ID NO: 423075 - RNA, 19 nt, Homo sapiens
  misc_RNA (1)...(19): siRNA sense strand
aaacaugccgucagaauuc

SEQ ID NO: 423076 - RNA, 19 nt, Homo sapiens
  misc_RNA (1)...(19): siRNA sense strand
gaacccacagucauugaaa

SEQ ID NO: 423077 - RNA, 19 nt, Homo sapiens
  misc_RNA (1)...(19): siRNA sense strand
gagaaagccagcagaugaa

SEQ ID NO: 423078 - RNA, 19 nt, Homo sapiens
  misc_RNA (1)...(19): siRNA sense strand
agagaaagccagcagauga

SEQ ID NO: 423079 - RNA, 19 nt, Homo sapiens
  misc_RNA (1)...(19): siRNA sense strand
gccgauuagucuagaagua

SEQ ID NO: 423080 - RNA, 19 nt, Homo sapiens
  misc_RNA (1)...(19): siRNA sense strand
gaaaguaauccagagauag

SEQ ID NO: 423081 - RNA, 19 nt, Homo sapiens
  misc_RNA (1)...(19): siRNA sense strand
ggagagacgcggacaguag

SEQ ID NO: 423082 - RNA, 19 nt, Homo sapiens
  misc_RNA (1)...(19): siRNA sense strand
uuaaggaggaggaagguua

SEQ ID NO: 423083 - RNA, 19 nt, Homo sapiens
  misc_RNA (1)...(19): siRNA sense strand
aagcaaggauauuaaggaa

SEQ ID NO: 423084 - RNA, 19 nt, Homo sapiens
  misc_RNA (1)...(19): siRNA sense strand
gccagcagaugaaggagaa

SEQ ID NO: 423085 - RNA, 19 nt, Homo sapiens
  misc_RNA (1)...(19): siRNA sense strand
cagaaaccauccgaacaaa

SEQ ID NO: 423086 - RNA, 19 nt, Homo sapiens
  misc_RNA (1)...(19): siRNA sense strand
ccagaaaccauccgaacaa

SEQ ID NO: 423087 - RNA, 19 nt, Homo sapiens
  misc_RNA (1)...(19): siRNA sense strand
uaaaauaccccacgaauuc

SEQ ID NO: 423088 - RNA, 19 nt, Homo sapiens
  misc_RNA (1)...(19): siRNA sense strand
gaaggaggacacagaagga

SEQ ID NO: 423089 - RNA, 19 nt, Homo sapiens
  misc_RNA (1)...(19): siRNA sense strand
uaaacugacugaggauguu

SEQ ID NO: 423090 - RNA, 19 nt, Homo sapiens
  misc_RNA (1)...(19): siRNA sense strand
gcgaaugucauaugaagga

SEQ ID NO: 423091 - RNA, 19 nt, Homo sapiens
  misc_RNA (1)...(19): siRNA sense strand
ggaccgucauucugggaaa

SEQ ID NO: 423092 - RNA, 19 nt, Homo sapiens
  misc_RNA (1)...(19): siRNA sense strand
ggagaaaguaauccagaga

SEQ ID NO: 423093 - RNA, 19 nt, Homo sapiens
  misc_RNA (1)...(19): siRNA sense strand
gaggaagguuauggagaaa

SEQ ID NO: 423094 - RNA, 19 nt, Homo sapiens
  misc_RNA (1)...(19): siRNA sense strand
ccaguauccugaagcaguu

SEQ ID NO: 423095 - RNA, 19 nt, Homo sapiens
  misc_RNA (1)...(19): siRNA sense strand
cgagggagcaagaaagaaa

SEQ ID NO: 423096 - RNA, 19 nt, Homo sapiens
  misc_RNA (1)...(19): siRNA sense strand
gaacuuucucuccaaccua

SEQ ID NO: 423097 - RNA, 19 nt, Homo sapiens
  misc_RNA (1)...(19): siRNA sense strand
ggaaaacucauacggaaaa

SEQ ID NO: 423098 - RNA, 19 nt, Homo sapiens
  misc_RNA (1)...(19): siRNA sense strand
ccuaagaugggaagaauug

SEQ ID NO: 423099 - RNA, 19 nt, Homo sapiens
  misc_RNA (1)...(19): siRNA sense strand
ggaaagcacacggucaaau

SEQ ID NO: 423100 - RNA, 19 nt, Homo sapiens
  misc_RNA (1)...(19): siRNA sense strand
uggaggaggucgaagaugu

SEQ ID NO: 423101 - RNA, 19 nt, Homo sapiens
  misc_RNA (1)...(19): siRNA sense strand
gacugaggauguugauguu

SEQ ID NO: 423102 - RNA, 19 nt, Homo sapiens
  misc_RNA (1)...(19): siRNA sense strand
gaaaccauccgaacaaagc

SEQ ID NO: 423103 - RNA, 19 nt, Homo sapiens
  misc_RNA (1)...(19): siRNA sense strand
gauaaggaagcgagacaga

SEQ ID NO: 423104 - RNA, 19 nt, Homo sapiens
  misc_RNA (1)...(19): siRNA sense strand
cgacucacguggaagaagu

SEQ ID NO: 423105 - RNA, 19 nt, Homo sapiens
  misc_RNA (1)...(19): siRNA sense strand
caagagagcuacgguucag

SEQ ID NO: 423106 - RNA, 19 nt, Homo sapiens
  misc_RNA (1)...(19): siRNA sense strand
uaaggaagcgagacagaga

SEQ ID NO: 423107 - RNA, 19 nt, Homo sapiens
  misc_RNA (1)...(19): siRNA sense strand
gcagacgccugugaaggau

SEQ ID NO: 423108 - RNA, 19 nt, Homo sapiens
  misc_RNA (1)...(19): siRNA sense strand
gaauuccacaccuccauga

SEQ ID NO: 423109 - RNA, 19 nt, Homo sapiens
  misc_RNA (1)...(19): siRNA sense strand
gagaugacggcucggugua

SEQ ID NO: 423110 - RNA, 19 nt, Homo sapiens
  misc_RNA (1)...(19): siRNA sense strand
gagcagaguuauuuugugu

SEQ ID NO: 423111 - RNA, 19 nt, Homo sapiens
  misc_RNA (1)...(19): siRNA sense strand
ggaagguuauggagaaagc

SEQ ID NO: 423112 - RNA, 19 nt, Homo sapiens
  misc_RNA (1)...(19): siRNA sense strand
aaauacuuguggagucuaa

SEQ ID NO: 423113 - RNA, 19 nt, Homo sapiens
  misc_RNA (1)...(19): siRNA sense strand
gaggagagaaaccuaagau

SEQ ID NO: 423114 - RNA, 19 nt, Homo sapiens
  misc_RNA (1)...(19): siRNA sense strand
gcugcuggcauucgcuuua

SEQ ID NO: 423115 - RNA, 19 nt, Homo sapiens
  misc_RNA (1)...(19): siRNA sense strand
gcuagaagcggugaauuuc

SEQ ID NO: 423116 - RNA, 19 nt, Homo sapiens
  misc_RNA (1)...(19): siRNA sense strand
aaacaucguuaccaguauc

SEQ ID NO: 423117 - RNA, 19 nt, Homo sapiens
  misc_RNA (1)...(19): siRNA sense strand
agaaacaaauccuaucacu

SEQ ID NO: 423118 - RNA, 19 nt, Homo sapiens
  misc_RNA (1)...(19): siRNA sense strand
gcaagagagcuacgguuca

SEQ ID NO: 423119 - RNA, 19 nt, Homo sapiens
  misc_RNA (1)...(19): siRNA sense strand
ugaaggagaaggcuaagga

SEQ ID NO: 423120 - RNA, 19 nt, Homo sapiens
  misc_RNA (1)...(19): siRNA sense strand
caaaccaacgucagaacuu

SEQ ID NO: 423121 - RNA, 19 nt, Homo sapiens
  misc_RNA (1)...(19): siRNA sense strand
uggaggaggugagcaaaga

SEQ ID NO: 423122 - RNA, 19 nt, Homo sapiens
  misc_RNA (1)...(19): siRNA sense strand
ugaagggcaucuccuccaa

SEQ ID NO: 423123 - RNA, 19 nt, Homo sapiens
  misc_RNA (1)...(19): siRNA sense strand
uaagcaaggauauuaagga

SEQ ID NO: 423124 - RNA, 19 nt, Homo sapiens
  misc_RNA (1)...(19): siRNA sense strand
ugacugaggauguugaugu

SEQ ID NO: 423125 - RNA, 19 nt, Homo sapiens
  misc_RNA (1)...(19): siRNA sense strand
gaagagaaaauguucgauu

SEQ ID NO: 423126 - RNA, 19 nt, Homo sapiens
  misc_RNA (1)...(19): siRNA sense strand
gaaaagccgucagcaguca

SEQ ID NO: 423127 - RNA, 19 nt, Homo sapiens
  misc_RNA (1)...(19): siRNA sense strand
gaaggugcagcuccagaga

SEQ ID NO: 423128 - RNA, 19 nt, Homo sapiens
  misc_RNA (1)...(19): siRNA sense strand
caaggagcaggccauguuu

SEQ ID NO: 423129 - RNA, 19 nt, Homo sapiens
  misc_RNA (1)...(19): siRNA sense strand
ugaaggacccacugcagaa

SEQ ID NO: 423130 - RNA, 19 nt, Homo sapiens
  misc_RNA (1)...(19): siRNA sense strand
cgucagaauucagaaacaa

SEQ ID NO: 423131 - RNA, 19 nt, Homo sapiens
  misc_RNA (1)...(19): siRNA sense strand
agaaagaaacagaccagaa

SEQ ID NO: 423132 - RNA, 19 nt, Homo sapiens
  misc_RNA (1)...(19): siRNA sense strand
ggagguccccguuuacaua

SEQ ID NO: 423133 - RNA, 19 nt, Homo sapiens
  misc_RNA (1)...(19): siRNA sense strand
ggagcaagaaagaaacaga

SEQ ID NO: 423134 - RNA, 19 nt, Homo sapiens
  misc_RNA (1)...(19): siRNA sense strand
gacagaggcaggugauuca

SEQ ID NO: 423135 - RNA, 19 nt, Homo sapiens
  misc_RNA (1)...(19): siRNA sense strand
gaggagcccgugaguuaug

SEQ ID NO: 423136 - RNA, 19 nt, Homo sapiens
  misc_RNA (1)...(19): siRNA sense strand
ugaaauacuuguggagucu

SEQ ID NO: 423137 - RNA, 19 nt, Homo sapiens
  misc_RNA (1)...(19): siRNA sense strand
gugaagaccggccucaguu

SEQ ID NO: 423138 - RNA, 19 nt, Homo sapiens
  misc_RNA (1)...(19): siRNA sense strand
aagcaccuuuggcaaguuu

SEQ ID NO: 423139 - RNA, 19 nt, Homo sapiens
  misc_RNA (1)...(19): siRNA sense strand
gaagaauugacaaaguuag

SEQ ID NO: 423140 - RNA, 19 nt, Homo sapiens
  misc_RNA (1)...(19): siRNA sense strand
gaugggaagaauugacaaa

SEQ ID NO: 423141 - RNA, 19 nt, Homo sapiens
  misc_RNA (1)...(19): siRNA sense strand
gaacaaagccagaagagaa

SEQ ID NO: 423142 - RNA, 19 nt, Homo sapiens
  misc_RNA (1)...(19): siRNA sense strand
gaaagaaacagaccagaaa

SEQ ID NO: 423143 - RNA, 19 nt, Homo sapiens
  misc_RNA (1)...(19): siRNA sense strand
ggaggaagguuauggagaa

SEQ ID NO: 423144 - RNA, 19 nt, Homo sapiens
  misc_RNA (1)...(19): siRNA sense strand
ggacugagcgaaugucaua

SEQ ID NO: 423145 - RNA, 19 nt, Homo sapiens
  misc_RNA (1)...(19): siRNA sense strand
gcucggcacuguauucuaa

SEQ ID NO: 423146 - RNA, 19 nt, Homo sapiens
  misc_RNA (1)...(19): siRNA sense strand
gcaaggauauuaaggaagu

SEQ ID NO: 423147 - RNA, 19 nt, Homo sapiens
  misc_RNA (1)...(19): siRNA sense strand
gggaagaauugacaaaguu

SEQ ID NO: 423148 - RNA, 19 nt, Homo sapiens
  misc_RNA (1)...(19): siRNA sense strand
gaaaguugcccuccucuau

SEQ ID NO: 423149 - RNA, 19 nt, Homo sapiens
  misc_RNA (1)...(19): siRNA sense strand
gcaaggcgauuccaugaca

SEQ ID NO: 423150 - RNA, 19 nt, Homo sapiens
  misc_RNA (1)...(19): siRNA sense strand
gagcaggccauguuugaua

SEQ ID NO: 423151 - RNA, 19 nt, Homo sapiens
  misc_RNA (1)...(19): siRNA sense strand
ggaagaauugacaaaguua

SEQ ID NO: 423152 - RNA, 19 nt, Homo sapiens
  misc_RNA (1)...(19): siRNA sense strand
gagcaaaggucgucaacgu

SEQ ID NO: 423153 - RNA, 19 nt, Homo sapiens
  misc_RNA (1)...(19): siRNA sense strand
ugacaaaguuagauaagga

SEQ ID NO: 423154 - RNA, 19 nt, Homo sapiens
  misc_RNA (1)...(19): siRNA sense strand
gaaagcacacggucaaaug

SEQ ID NO: 423155 - RNA, 19 nt, Homo sapiens
  misc_RNA (1)...(19): siRNA sense strand
gcaaggagcaggccauguu

SEQ ID NO: 423156 - RNA, 19 nt, Homo sapiens
  misc_RNA (1)...(19): siRNA sense strand
gcaaagaugaggccaguga

SEQ ID NO: 423157 - RNA, 19 nt, Homo sapiens
  misc_RNA (1)...(19): siRNA sense strand
agaaaguaauccagagaua

SEQ ID NO: 423158 - RNA, 19 nt, Homo sapiens
  misc_RNA (1)...(19): siRNA sense strand
gaagucaacgucucacaaa

SEQ ID NO: 423159 - RNA, 19 nt, Homo sapiens
  misc_RNA (1)...(19): siRNA sense strand
gaaacaaauccuaucacua

SEQ ID NO: 423160 - RNA, 19 nt, Homo sapiens
  misc_RNA (1)...(19): siRNA sense strand
gagcgaaugucauaugaag

SEQ ID NO: 423161 - RNA, 19 nt, Homo sapiens
  misc_RNA (1)...(19): siRNA sense strand
uggaggagcccgugaguua

SEQ ID NO: 423162 - RNA, 19 nt, Homo sapiens
  misc_RNA (1)...(19): siRNA sense strand
gaagcgagacagagagaaa

SEQ ID NO: 423163 - RNA, 19 nt, Homo sapiens
  misc_RNA (1)...(19): siRNA sense strand
ggucggugauuucagauga

SEQ ID NO: 423164 - RNA, 19 nt, Homo sapiens
  misc_RNA (1)...(19): siRNA sense strand
gaaaacaucguuaccagua

SEQ ID NO: 423165 - RNA, 19 nt, Homo sapiens
  misc_RNA (1)...(19): siRNA sense strand
gaggaggaauccaccauca

SEQ ID NO: 423166 - RNA, 19 nt, Homo sapiens
  misc_RNA (1)...(19): siRNA sense strand
aaaccaacgucagaacuuu

SEQ ID NO: 423167 - RNA, 19 nt, Homo sapiens
  misc_RNA (1)...(19): siRNA sense strand
aaaggucggugauuucaga

SEQ ID NO: 423168 - RNA, 19 nt, Homo sapiens
  misc_RNA (1)...(19): siRNA sense strand
gagagagaggugccgauua

SEQ ID NO: 423169 - RNA, 19 nt, Homo sapiens
  misc_RNA (1)...(19): siRNA sense strand
ggaaagaacaagcuagaag

SEQ ID NO: 423170 - RNA, 19 nt, Homo sapiens
  misc_RNA (1)...(19): siRNA sense strand
agagagaggugccgauuag

SEQ ID NO: 423171 - RNA, 19 nt, Homo sapiens
  misc_RNA (1)...(19): siRNA sense strand
ggagaaggcuaaggagaag

SEQ ID NO: 423172 - RNA, 19 nt, Homo sapiens
  misc_RNA (1)...(19): siRNA sense strand
gacagaaaccguagcagaa

SEQ ID NO: 423173 - RNA, 19 nt, Homo sapiens
  misc_RNA (1)...(19): siRNA sense strand
gaagaccggccucaguuug

SEQ ID NO: 423174 - RNA, 19 nt, Homo sapiens
  misc_RNA (1)...(19): siRNA sense strand
gcaguuggugugagcuuua

SEQ ID NO: 423175 - RNA, 19 nt, Homo sapiens
  misc_RNA (1)...(19): siRNA sense strand
aaacaugccgucagaauuc

SEQ ID NO: 423176 - RNA, 19 nt, Homo sapiens
  misc_RNA (1)...(19): siRNA sense strand
gaacccacagucauugaaa

SEQ ID NO: 423177 - RNA, 19 nt, Homo sapiens
  misc_RNA (1)...(19): siRNA sense strand
gagaaagccagcagaugaa

SEQ ID NO: 423178 - RNA, 19 nt, Homo sapiens
  misc_RNA (1)...(19): siRNA sense strand
agagaaagccagcagauga

SEQ ID NO: 423179 - RNA, 19 nt, Homo sapiens
  misc_RNA (1)...(19): siRNA sense strand
gccgauuagucuagaagua

SEQ ID NO: 423180 - RNA, 19 nt, Homo sapiens
  misc_RNA (1)...(19): siRNA sense strand
gaaaguaauccagagauag

SEQ ID NO: 423181 - RNA, 19 nt, Homo sapiens
  misc_RNA (1)...(19): siRNA sense strand
ggagagacgcggacaguag

SEQ ID NO: 423182 - RNA, 19 nt, Homo sapiens
  misc_RNA (1)...(19): siRNA sense strand
uuaaggaggaggaagguua

SEQ ID NO: 423183 - RNA, 19 nt, Homo sapiens
  misc_RNA (1)...(19): siRNA sense strand
aagcaaggauauuaaggaa

SEQ ID NO: 423184 - RNA, 19 nt, Homo sapiens
  misc_RNA (1)...(19): siRNA sense strand
gccagcagaugaaggagaa

SEQ ID NO: 423185 - RNA, 19 nt, Homo sapiens
  misc_RNA (1)...(19): siRNA sense strand
cagaaaccauccgaacaaa

SEQ ID NO: 423186 - RNA, 19 nt, Homo sapiens
  misc_RNA (1)...(19): siRNA sense strand
ccagaaaccauccgaacaa

SEQ ID NO: 423187 - RNA, 19 nt, Homo sapiens
  misc_RNA (1)...(19): siRNA sense strand
uaaaauaccccacgaauuc

SEQ ID NO: 423188 - RNA, 19 nt, Homo sapiens
  misc_RNA (1)...(19): siRNA sense strand
gaaggaggacacagaagga

SEQ ID NO: 423189 - RNA, 19 nt, Homo sapiens
  misc_RNA (1)...(19): siRNA sense strand
uaaacugacugaggauguu

SEQ ID NO: 423190 - RNA, 19 nt, Homo sapiens
  misc_RNA (1)...(19): siRNA sense strand
gcgaaugucauaugaagga

SEQ ID NO: 423191 - RNA, 19 nt, Homo sapiens
  misc_RNA (1)...(19): siRNA sense strand
ggaccgucauucugggaaa

SEQ ID NO: 423192 - RNA, 19 nt, Homo sapiens
  misc_RNA (1)...(19): siRNA sense strand
ggagaaaguaauccagaga

SEQ ID NO: 423193 - RNA, 19 nt, Homo sapiens
  misc_RNA (1)...(19): siRNA sense strand
gaggaagguuauggagaaa

SEQ ID NO: 423194 - RNA, 19 nt, Homo sapiens
  misc_RNA (1)...(19): siRNA sense strand
ccaguauccugaagcaguu

SEQ ID NO: 423195 - RNA, 19 nt, Homo sapiens
  misc_RNA (1)...(19): siRNA sense strand
cgagggagcaagaaagaaa

SEQ ID NO: 423196 - RNA, 19 nt, Homo sapiens
  misc_RNA (1)...(19): siRNA sense strand
gaacuuucucuccaaccua

SEQ ID NO: 423197 - RNA, 19 nt, Homo sapiens
  misc_RNA (1)...(19): siRNA sense strand
ggaaaacucauacggaaaa

SEQ ID NO: 423198 - RNA, 19 nt, Homo sapiens
  misc_RNA (1)...(19): siRNA sense strand
ccuaagaugggaagaauug

SEQ ID NO: 423199 - RNA, 19 nt, Homo sapiens
  misc_RNA (1)...(19): siRNA sense strand
ggaaagcacacggucaaau

SEQ ID NO: 423200 - RNA, 19 nt, Homo sapiens
  misc_RNA (1)...(19): siRNA sense strand
uggaggaggucgaagaugu

SEQ ID NO: 423201 - RNA, 19 nt, Homo sapiens
  misc_RNA (1)...(19): siRNA sense strand
gacugaggauguugauguu

SEQ ID NO: 423202 - RNA, 19 nt, Homo sapiens
  misc_RNA (1)...(19): siRNA sense strand
gaaaccauccgaacaaagc

SEQ ID NO: 423203 - RNA, 19 nt, Homo sapiens
  misc_RNA (1)...(19): siRNA sense strand
gauaaggaagcgagacaga

SEQ ID NO: 423204 - RNA, 19 nt, Homo sapiens
  misc_RNA (1)...(19): siRNA sense strand
cgacucacguggaagaagu

SEQ ID NO: 423205 - RNA, 19 nt, Homo sapiens
  misc_RNA (1)...(19): siRNA sense strand
caagagagcuacgguucag

SEQ ID NO: 423206 - RNA, 19 nt, Homo sapiens
  misc_RNA (1)...(19): siRNA sense strand
uaaggaagcgagacagaga

SEQ ID NO: 423207 - RNA, 19 nt, Homo sapiens
  misc_RNA (1)...(19): siRNA sense strand
gcagacgccugugaaggau

SEQ ID NO: 423208 - RNA, 19 nt, Homo sapiens
  misc_RNA (1)...(19): siRNA sense strand
gaauuccacaccuccauga

SEQ ID NO: 423209 - RNA, 19 nt, Homo sapiens
  misc_RNA (1)...(19): siRNA sense strand
gagaugacggcucggugua

SEQ ID NO: 423210 - RNA, 19 nt, Homo sapiens
  misc_RNA (1)...(19): siRNA sense strand
gagcagaguuauuuugugu

SEQ ID NO: 423211 - RNA, 19 nt, Homo sapiens
  misc_RNA (1)...(19): siRNA sense strand
ggaagguuauggagaaagc

SEQ ID NO: 423212 - RNA, 19 nt, Homo sapiens
  misc_RNA (1)...(19): siRNA sense strand
aaauacuuguggagucuaa

SEQ ID NO: 423213 - RNA, 19 nt, Homo sapiens
  misc_RNA (1)...(19): siRNA sense strand
gaggagagaaaccuaagau

SEQ ID NO: 423214 - RNA, 19 nt, Homo sapiens
  misc_RNA (1)...(19): siRNA sense strand
gcugcuggcauucgcuuua

SEQ ID NO: 423215 - RNA, 19 nt, Homo sapiens
  misc_RNA (1)...(19): siRNA sense strand
gcuagaagcggugaauuuc

SEQ ID NO: 423216 - RNA, 19 nt, Homo sapiens
  misc_RNA (1)...(19): siRNA sense strand
aaacaucguuaccaguauc

SEQ ID NO: 423217 - RNA, 19 nt, Homo sapiens
  misc_RNA (1)...(19): siRNA sense strand
agaaacaaauccuaucacu

SEQ ID NO: 423218 - RNA, 19 nt, Homo sapiens
  misc_RNA (1)...(19): siRNA sense strand
gcaagagagcuacgguuca

SEQ ID NO: 423219 - RNA, 19 nt, Homo sapiens
  misc_RNA (1)...(19): siRNA sense strand
ugaaggagaaggcuaagga

SEQ ID NO: 423220 - RNA, 19 nt, Homo sapiens
  misc_RNA (1)...(19): siRNA sense strand
caaaccaacgucagaacuu

SEQ ID NO: 423221 - RNA, 19 nt, Homo sapiens
  misc_RNA (1)...(19): siRNA sense strand
uggaggaggugagcaaaga

SEQ ID NO: 423222 - RNA, 19 nt, Homo sapiens
  misc_RNA (1)...(19): siRNA sense strand
ugaagggcaucuccuccaa

SEQ ID NO: 423223 - RNA, 19 nt, Homo sapiens
  misc_RNA (1)...(19): siRNA sense strand
uaagcaaggauauuaagga

SEQ ID NO: 423224 - RNA, 19 nt, Homo sapiens
  misc_RNA (1)...(19): siRNA sense strand
ugacugaggauguugaugu

SEQ ID NO: 423225 - RNA, 19 nt, Homo sapiens
  misc_RNA (1)...(19): siRNA sense strand
gaagagaaaauguucgauu

SEQ ID NO: 423226 - RNA, 19 nt, Homo sapiens
  misc_RNA (1)...(19): siRNA sense strand
gaaaagccgucagcaguca

SEQ ID NO: 423227 - RNA, 19 nt, Homo sapiens
  misc_RNA (1)...(19): siRNA sense strand
gaaggugcagcuccagaga

SEQ ID NO: 423228 - RNA, 19 nt, Homo sapiens
  misc_RNA (1)...(19): siRNA sense strand
caaggagcaggccauguuu

SEQ ID NO: 423229 - RNA, 19 nt, Homo sapiens
  misc_RNA (1)...(19): siRNA sense strand
ugaaggacccacugcagaa

SEQ ID NO: 423230 - RNA, 19 nt, Homo sapiens
  misc_RNA (1)...(19): siRNA sense strand
cgucagaauucagaaacaa

SEQ ID NO: 423231 - RNA, 19 nt, Homo sapiens
  misc_RNA (1)...(19): siRNA sense strand
agaaagaaacagaccagaa

SEQ ID NO: 423232 - RNA, 19 nt, Homo sapiens
  misc_RNA (1)...(19): siRNA sense strand
ggagguccccguuuacaua

SEQ ID NO: 423233 - RNA, 19 nt, Homo sapiens
  misc_RNA (1)...(19): siRNA sense strand
ggagcaagaaagaaacaga

SEQ ID NO: 423234 - RNA, 19 nt, Homo sapiens
  misc_RNA (1)...(19): siRNA sense strand
gacagaggcaggugauuca

SEQ ID NO: 423235 - RNA, 19 nt, Homo sapiens
  misc_RNA (1)...(19): siRNA sense strand
gaggagcccgugaguuaug

SEQ ID NO: 423236 - RNA, 19 nt, Homo sapiens
  misc_RNA (1)...(19): siRNA sense strand
ugaaauacuuguggagucu

SEQ ID NO: 423237 - RNA, 19 nt, Homo sapiens
  misc_RNA (1)...(19): siRNA sense strand
gugaagaccggccucaguu

SEQ ID NO: 423238 - RNA, 19 nt, Homo sapiens
  misc_RNA (1)...(19): siRNA sense strand
aagcaccuuuggcaaguuu

SEQ ID NO: 423239 - RNA, 19 nt, Homo sapiens
  misc_RNA (1)...(19): siRNA sense strand
gaagaauugacaaaguuag

SEQ ID NO: 423240 - RNA, 19 nt, Homo sapiens
  misc_RNA (1)...(19): siRNA sense strand
gaugggaagaauugacaaa

SEQ ID NO: 423241 - RNA, 19 nt, Homo sapiens
  misc_RNA (1)...(19): siRNA sense strand
gaugaagauugcugacuuu

SEQ ID NO: 423242 - RNA, 19 nt, Homo sapiens
  misc_RNA (1)...(19): siRNA sense strand
gcacuggagucucgugaug

SEQ ID NO: 423243 - RNA, 19 nt, Homo sapiens
  misc_RNA (1)...(19): siRNA sense strand
gaaccgcauuggaggcauu

SEQ ID NO: 423244 - RNA, 19 nt, Homo sapiens
  misc_RNA (1)...(19): siRNA sense strand
ucaagaugcucaaagacaa

SEQ ID NO: 423245 - RNA, 19 nt, Homo sapiens
  misc_RNA (1)...(19): siRNA sense strand
cauagggaccucucgaaua

SEQ ID NO: 423246 - RNA, 19 nt, Homo sapiens
  misc_RNA (1)...(19): siRNA sense strand
cacauugacuacuauaaga

SEQ ID NO: 423247 - RNA, 19 nt, Homo sapiens
  misc_RNA (1)...(19): siRNA sense strand
ccuaaagacugcagacauc

SEQ ID NO: 423248 - RNA, 19 nt, Homo sapiens
  misc_RNA (1)...(19): siRNA sense strand
ugaugaagauugcugacuu

SEQ ID NO: 423249 - RNA, 19 nt, Homo sapiens
  misc_RNA (1)...(19): siRNA sense strand
auagggaccucucgaauag

SEQ ID NO: 423250 - RNA, 19 nt, Homo sapiens
  misc_RNA (1)...(19): siRNA sense strand
ucaaagacaacgccucuga

SEQ ID NO: 423251 - RNA, 19 nt, Homo sapiens
  misc_RNA (1)...(19): siRNA sense strand
auaacuaccugcuagaugu

SEQ ID NO: 423252 - RNA, 19 nt, Homo sapiens
  misc_RNA (1)...(19): siRNA sense strand
gggcugcuuuggccaggua

SEQ ID NO: 423253 - RNA, 19 nt, Homo sapiens
  misc_RNA (1)...(19): siRNA sense strand
ugaagcacaucgucaucaa

SEQ ID NO: 423254 - RNA, 19 nt, Homo sapiens
  misc_RNA (1)...(19): siRNA sense strand
gaacaucaucaaccugcuu

SEQ ID NO: 423255 - RNA, 19 nt, Homo sapiens
  misc_RNA (1)...(19): siRNA sense strand
agagugacguguggucuuu

SEQ ID NO: 423256 - RNA, 19 nt, Homo sapiens
  misc_RNA (1)...(19): siRNA sense strand
ccaccacauugacuacuau

SEQ ID NO: 423257 - RNA, 19 nt, Homo sapiens
  misc_RNA (1)...(19): siRNA sense strand
acaccugccugguagagaa

SEQ ID NO: 423258 - RNA, 19 nt, Homo sapiens
  misc_RNA (1)...(19): siRNA sense strand
gccuagagauugccagcuu

SEQ ID NO: 423259 - RNA, 19 nt, Homo sapiens
  misc_RNA (1)...(19): siRNA sense strand
gagcaggagcugacaguag

SEQ ID NO: 423260 - RNA, 19 nt, Homo sapiens
  misc_RNA (1)...(19): siRNA sense strand
ccagaggccuaccuucaag

SEQ ID NO: 423261 - RNA, 19 nt, Homo sapiens
  misc_RNA (1)...(19): siRNA sense strand
ccucgugagucuagaucua

SEQ ID NO: 423262 - RNA, 19 nt, Homo sapiens
  misc_RNA (1)...(19): siRNA sense strand
ucucgaauaggcacaguua

SEQ ID NO: 423263 - RNA, 19 nt, Homo sapiens
  misc_RNA (1)...(19): siRNA sense strand
gcauucggcugcgccauca

SEQ ID NO: 423264 - RNA, 19 nt, Homo sapiens
  misc_RNA (1)...(19): siRNA sense strand
agacaacgccucugacaag

SEQ ID NO: 423265 - RNA, 19 nt, Homo sapiens
  misc_RNA (1)...(19): siRNA sense strand
gcacuguggccgucaagau

SEQ ID NO: 423266 - RNA, 19 nt, Homo sapiens
  misc_RNA (1)...(19): siRNA sense strand
ccacauugacuacuauaag

SEQ ID NO: 423267 - RNA, 19 nt, Homo sapiens
  misc_RNA (1)...(19): siRNA sense strand
cacauacaccugccuggua

SEQ ID NO: 423268 - RNA, 19 nt, Homo sapiens
  misc_RNA (1)...(19): siRNA sense strand
ccgucaagaugcucaaaga

SEQ ID NO: 423269 - RNA, 19 nt, Homo sapiens
  misc_RNA (1)...(19): siRNA sense strand
cugaggaaguggagcuuga

SEQ ID NO: 423270 - RNA, 19 nt, Homo sapiens
  misc_RNA (1)...(19): siRNA sense strand
gcuggugacugaggacaau

SEQ ID NO: 423271 - RNA, 19 nt, Homo sapiens
  misc_RNA (1)...(19): siRNA sense strand
ugcagaaucucaccuugau

SEQ ID NO: 423272 - RNA, 19 nt, Homo sapiens
  misc_RNA (1)...(19): siRNA sense strand
acaagaacaucaucaaccu

SEQ ID NO: 423273 - RNA, 19 nt, Homo sapiens
  misc_RNA (1)...(19): siRNA sense strand
guacgaggcgugcgucucu

SEQ ID NO: 423274 - RNA, 19 nt, Homo sapiens
  misc_RNA (1)...(19): siRNA sense strand
uggaggcgcuggacaaggu

SEQ ID NO: 423275 - RNA, 19 nt, Homo sapiens
  misc_RNA (1)...(19): siRNA sense strand
gucaagcucaucccuggua

SEQ ID NO: 423276 - RNA, 19 nt, Homo sapiens
  misc_RNA (1)...(19): siRNA sense strand
cuccagcgauucugucuuc

SEQ ID NO: 423277 - RNA, 19 nt, Homo sapiens
  misc_RNA (1)...(19): siRNA sense strand
gacacaagaacaucaucaa

SEQ ID NO: 423278 - RNA, 19 nt, Homo sapiens
  misc_RNA (1)...(19): siRNA sense strand
gaggacaaugugaugaaga

SEQ ID NO: 423279 - RNA, 19 nt, Homo sapiens
  misc_RNA (1)...(19): siRNA sense strand
cgacacaagaacaucauca

SEQ ID NO: 423280 - RNA, 19 nt, Homo sapiens
  misc_RNA (1)...(19): siRNA sense strand
ggacaaugugaugaagauu

SEQ ID NO: 423281 - RNA, 19 nt, Homo sapiens
  misc_RNA (1)...(19): siRNA sense strand
uaaagacugcagacaucaa

SEQ ID NO: 423282 - RNA, 19 nt, Homo sapiens
  misc_RNA (1)...(19): siRNA sense strand
aggacaaugugaugaagau

SEQ ID NO: 423283 - RNA, 19 nt, Homo sapiens
  misc_RNA (1)...(19): siRNA sense strand
aaagacaacgccucugaca

SEQ ID NO: 423284 - RNA, 19 nt, Homo sapiens
  misc_RNA (1)...(19): siRNA sense strand
agagauugccagcuuccua

SEQ ID NO: 423285 - RNA, 19 nt, Homo sapiens
  misc_RNA (1)...(19): siRNA sense strand
ugacugaggacaaugugau

SEQ ID NO: 423286 - RNA, 19 nt, Homo sapiens
  misc_RNA (1)...(19): siRNA sense strand
uaucuggagucccggaagu

SEQ ID NO: 423287 - RNA, 19 nt, Homo sapiens
  misc_RNA (1)...(19): siRNA sense strand
agggaaaccugcgggaguu

SEQ ID NO: 423288 - RNA, 19 nt, Homo sapiens
  misc_RNA (1)...(19): siRNA sense strand
ggagauggaggugaugaag

SEQ ID NO: 423289 - RNA, 19 nt, Homo sapiens
  misc_RNA (1)...(19): siRNA sense strand
gucaagaugcucaaagaca

SEQ ID NO: 423290 - RNA, 19 nt, Homo sapiens
  misc_RNA (1)...(19): siRNA sense strand
acguggagcugcugugcaa

SEQ ID NO: 423291 - RNA, 19 nt, Homo sapiens
  misc_RNA (1)...(19): siRNA sense strand
agauggaggugaugaagcu

SEQ ID NO: 423292 - RNA, 19 nt, Homo sapiens
  misc_RNA (1)...(19): siRNA sense strand
ccaugaucguccugcagaa

SEQ ID NO: 423293 - RNA, 19 nt, Homo sapiens
  misc_RNA (1)...(19): siRNA sense strand
uccaccacauugacuacua

SEQ ID NO: 423294 - RNA, 19 nt, Homo sapiens
  misc_RNA (1)...(19): siRNA sense strand
gcugaucggccgacacaag

SEQ ID NO: 423295 - RNA, 19 nt, Homo sapiens
  misc_RNA (1)...(19): siRNA sense strand
gauggacaggccuuucaug

SEQ ID NO: 423296 - RNA, 19 nt, Homo sapiens
  misc_RNA (1)...(19): siRNA sense strand
aaagacugcagacaucaau

SEQ ID NO: 423297 - RNA, 19 nt, Homo sapiens
  misc_RNA (1)...(19): siRNA sense strand
ccauagggaccucucgaau

SEQ ID NO: 423298 - RNA, 19 nt, Homo sapiens
  misc_RNA (1)...(19): siRNA sense strand
uauaacuaccugcuagaug

SEQ ID NO: 423299 - RNA, 19 nt, Homo sapiens
  misc_RNA (1)...(19): siRNA sense strand
uccaguggcugaagcacau

SEQ ID NO: 423300 - RNA, 19 nt, Homo sapiens
  misc_RNA (1)...(19): siRNA sense strand
ggccgucucugaggaguac

SEQ ID NO: 423301 - RNA, 19 nt, Homo sapiens
  misc_RNA (1)...(19): siRNA sense strand
agacugcagacaucaauag

SEQ ID NO: 423302 - RNA, 19 nt, Homo sapiens
  misc_RNA (1)...(19): siRNA sense strand
ugaggacaaugugaugaag

SEQ ID NO: 423303 - RNA, 19 nt, Homo sapiens
  misc_RNA (1)...(19): siRNA sense strand
gaugaagauugcugacuuu

SEQ ID NO: 423304 - RNA, 19 nt, Homo sapiens
  misc_RNA (1)...(19): siRNA sense strand
gcacuggagucucgugaug

SEQ ID NO: 423305 - RNA, 19 nt, Homo sapiens
  misc_RNA (1)...(19): siRNA sense strand
gaaccgcauuggaggcauu

SEQ ID NO: 423306 - RNA, 19 nt, Homo sapiens
  misc_RNA (1)...(19): siRNA sense strand
ucaagaugcucaaagacaa

SEQ ID NO: 423307 - RNA, 19 nt, Homo sapiens
  misc_RNA (1)...(19): siRNA sense strand
cauagggaccucucgaaua

SEQ ID NO: 423308 - RNA, 19 nt, Homo sapiens
  misc_RNA (1)...(19): siRNA sense strand
cacauugacuacuauaaga

SEQ ID NO: 423309 - RNA, 19 nt, Homo sapiens
  misc_RNA (1)...(19): siRNA sense strand
ccuaaagacugcagacauc

SEQ ID NO: 423310 - RNA, 19 nt, Homo sapiens
  misc_RNA (1)...(19): siRNA sense strand
ugaugaagauugcugacuu

SEQ ID NO: 423311 - RNA, 19 nt, Homo sapiens
  misc_RNA (1)...(19): siRNA sense strand
auagggaccucucgaauag

SEQ ID NO: 423312 - RNA, 19 nt, Homo sapiens
  misc_RNA (1)...(19): siRNA sense strand
ucaaagacaacgccucuga

SEQ ID NO: 423313 - RNA, 19 nt, Homo sapiens
  misc_RNA (1)...(19): siRNA sense strand
auaacuaccugcuagaugu

SEQ ID NO: 423314 - RNA, 19 nt, Homo sapiens
  misc_RNA (1)...(19): siRNA sense strand
gggcugcuuuggccaggua

SEQ ID NO: 423315 - RNA, 19 nt, Homo sapiens
  misc_RNA (1)...(19): siRNA sense strand
ugaagcacaucgucaucaa

SEQ ID NO: 423316 - RNA, 19 nt, Homo sapiens
  misc_RNA (1)...(19): siRNA sense strand
gaacaucaucaaccugcuu

SEQ ID NO: 423317 - RNA, 19 nt, Homo sapiens
  misc_RNA (1)...(19): siRNA sense strand
agagugacguguggucuuu

SEQ ID NO: 423318 - RNA, 19 nt, Homo sapiens
  misc_RNA (1)...(19): siRNA sense strand
ccaccacauugacuacuau

SEQ ID NO: 423319 - RNA, 19 nt, Homo sapiens
  misc_RNA (1)...(19): siRNA sense strand
acaccugccugguagagaa

SEQ ID NO: 423320 - RNA, 19 nt, Homo sapiens
  misc_RNA (1)...(19): siRNA sense strand
gccuagagauugccagcuu

SEQ ID NO: 423321 - RNA, 19 nt, Homo sapiens
  misc_RNA (1)...(19): siRNA sense strand
gagcaggagcugacaguag

SEQ ID NO: 423322 - RNA, 19 nt, Homo sapiens
  misc_RNA (1)...(19): siRNA sense strand
ccagaggccuaccuucaag

SEQ ID NO: 423323 - RNA, 19 nt, Homo sapiens
  misc_RNA (1)...(19): siRNA sense strand
ccucgugagucuagaucua

SEQ ID NO: 423324 - RNA, 19 nt, Homo sapiens
  misc_RNA (1)...(19): siRNA sense strand
ucucgaauaggcacaguua

SEQ ID NO: 423325 - RNA, 19 nt, Homo sapiens
  misc_RNA (1)...(19): siRNA sense strand
gcauucggcugcgccauca

SEQ ID NO: 423326 - RNA, 19 nt, Homo sapiens
  misc_RNA (1)...(19): siRNA sense strand
agacaacgccucugacaag

SEQ ID NO: 423327 - RNA, 19 nt, Homo sapiens
  misc_RNA (1)...(19): siRNA sense strand
gcacuguggccgucaagau

SEQ ID NO: 423328 - RNA, 19 nt, Homo sapiens
  misc_RNA (1)...(19): siRNA sense strand
ccacauugacuacuauaag

SEQ ID NO: 423329 - RNA, 19 nt, Homo sapiens
  misc_RNA (1)...(19): siRNA sense strand
cacauacaccugccuggua

SEQ ID NO: 423330 - RNA, 19 nt, Homo sapiens
  misc_RNA (1)...(19): siRNA sense strand
ccgucaagaugcucaaaga

SEQ ID NO: 423331 - RNA, 19 nt, Homo sapiens
  misc_RNA (1)...(19): siRNA sense strand
cugaggaaguggagcuuga

SEQ ID NO: 423332 - RNA, 19 nt, Homo sapiens
  misc_RNA (1)...(19): siRNA sense strand
gcuggugacugaggacaau

SEQ ID NO: 423333 - RNA, 19 nt, Homo sapiens
  misc_RNA (1)...(19): siRNA sense strand
ugcagaaucucaccuugau

SEQ ID NO: 423334 - RNA, 19 nt, Homo sapiens
  misc_RNA (1)...(19): siRNA sense strand
acaagaacaucaucaaccu

SEQ ID NO: 423335 - RNA, 19 nt, Homo sapiens
  misc_RNA (1)...(19): siRNA sense strand
guacgaggcgugcgucucu

SEQ ID NO: 423336 - RNA, 19 nt, Homo sapiens
  misc_RNA (1)...(19): siRNA sense strand
uggaggcgcuggacaaggu

SEQ ID NO: 423337 - RNA, 19 nt, Homo sapiens
  misc_RNA (1)...(19): siRNA sense strand
gucaagcucaucccuggua

SEQ ID NO: 423338 - RNA, 19 nt, Homo sapiens
  misc_RNA (1)...(19): siRNA sense strand
cuccagcgauucugucuuc

SEQ ID NO: 423339 - RNA, 19 nt, Homo sapiens
  misc_RNA (1)...(19): siRNA sense strand
gacacaagaacaucaucaa

SEQ ID NO: 423340 - RNA, 19 nt, Homo sapiens
  misc_RNA (1)...(19): siRNA sense strand
gaggacaaugugaugaaga

SEQ ID NO: 423341 - RNA, 19 nt, Homo sapiens
  misc_RNA (1)...(19): siRNA sense strand
cgacacaagaacaucauca

SEQ ID NO: 423342 - RNA, 19 nt, Homo sapiens
  misc_RNA (1)...(19): siRNA sense strand
ggacaaugugaugaagauu

SEQ ID NO: 423343 - RNA, 19 nt, Homo sapiens
  misc_RNA (1)...(19): siRNA sense strand
uaaagacugcagacaucaa

SEQ ID NO: 423344 - RNA, 19 nt, Homo sapiens
  misc_RNA (1)...(19): siRNA sense strand
aggacaaugugaugaagau

SEQ ID NO: 423345 - RNA, 19 nt, Homo sapiens
  misc_RNA (1)...(19): siRNA sense strand
aaagacaacgccucugaca

SEQ ID NO: 423346 - RNA, 19 nt, Homo sapiens
  misc_RNA (1)...(19): siRNA sense strand
agagauugccagcuuccua

SEQ ID NO: 423347 - RNA, 19 nt, Homo sapiens
  misc_RNA (1)...(19): siRNA sense strand
ugacugaggacaaugugau

SEQ ID NO: 423348 - RNA, 19 nt, Homo sapiens
  misc_RNA (1)...(19): siRNA sense strand
uaucuggagucccggaagu

SEQ ID NO: 423349 - RNA, 19 nt, Homo sapiens
  misc_RNA (1)...(19): siRNA sense strand
agggaaaccugcgggaguu

SEQ ID NO: 423350 - RNA, 19 nt, Homo sapiens
  misc_RNA (1)...(19): siRNA sense strand
ggagauggaggugaugaag

SEQ ID NO: 423351 - RNA, 19 nt, Homo sapiens
  misc_RNA (1)...(19): siRNA sense strand
gucaagaugcucaaagaca

SEQ ID NO: 423352 - RNA, 19 nt, Homo sapiens
  misc_RNA (1)...(19): siRNA sense strand
acguggagcugcugugcaa

SEQ ID NO: 423353 - RNA, 19 nt, Homo sapiens
  misc_RNA (1)...(19): siRNA sense strand
agauggaggugaugaagcu

SEQ ID NO: 423354 - RNA, 19 nt, Homo sapiens
  misc_RNA (1)...(19): siRNA sense strand
ccaugaucguccugcagaa

SEQ ID NO: 423355 - RNA, 19 nt, Homo sapiens
  misc_RNA (1)...(19): siRNA sense strand
uccaccacauugacuacua

SEQ ID NO: 423356 - RNA, 19 nt, Homo sapiens
  misc_RNA (1)...(19): siRNA sense strand
gcugaucggccgacacaag

SEQ ID NO: 423357 - RNA, 19 nt, Homo sapiens
  misc_RNA (1)...(19): siRNA sense strand
gauggacaggccuuucaug

SEQ ID NO: 423358 - RNA, 19 nt, Homo sapiens
  misc_RNA (1)...(19): siRNA sense strand
aaagacugcagacaucaau

SEQ ID NO: 423359 - RNA, 19 nt, Homo sapiens
  misc_RNA (1)...(19): siRNA sense strand
ccauagggaccucucgaau

SEQ ID NO: 423360 - RNA, 19 nt, Homo sapiens
  misc_RNA (1)...(19): siRNA sense strand
uauaacuaccugcuagaug

SEQ ID NO: 423361 - RNA, 19 nt, Homo sapiens
  misc_RNA (1)...(19): siRNA sense strand
uccaguggcugaagcacau

SEQ ID NO: 423362 - RNA, 19 nt, Homo sapiens
  misc_RNA (1)...(19): siRNA sense strand
ggccgucucugaggaguac

SEQ ID NO: 423363 - RNA, 19 nt, Homo sapiens
  misc_RNA (1)...(19): siRNA sense strand
agacugcagacaucaauag

SEQ ID NO: 423364 - RNA, 19 nt, Homo sapiens
  misc_RNA (1)...(19): siRNA sense strand
ugaggacaaugugaugaag

SEQ ID NO: 423365 - RNA, 19 nt, Homo sapiens
  misc_RNA (1)...(19): siRNA sense strand
ggacgaggcugaggacaca

SEQ ID NO: 423366 - RNA, 19 nt, Homo sapiens
  misc_RNA (1)...(19): siRNA sense strand
ugucggaccuggugucuga

SEQ ID NO: 423367 - RNA, 19 nt, Homo sapiens
  misc_RNA (1)...(19): siRNA sense strand
gcaucaagcugcggcauca

SEQ ID NO: 423368 - RNA, 19 nt, Homo sapiens
  misc_RNA (1)...(19): siRNA sense strand
ugaaagacgaugccacuga

SEQ ID NO: 423369 - RNA, 19 nt, Homo sapiens
  misc_RNA (1)...(19): siRNA sense strand
ccgugaagaugcugaaaga

SEQ ID NO: 423370 - RNA, 19 nt, Homo sapiens
  misc_RNA (1)...(19): siRNA sense strand
ugaugaagaucgcagacuu

SEQ ID NO: 423371 - RNA, 19 nt, Homo sapiens
  misc_RNA (1)...(19): siRNA sense strand
gaggacaacgugaugaaga

SEQ ID NO: 423372 - RNA, 19 nt, Homo sapiens
  misc_RNA (1)...(19): siRNA sense strand
agauggagaugaugaagau

SEQ ID NO: 423373 - RNA, 19 nt, Homo sapiens
  misc_RNA (1)...(19): siRNA sense strand
ggacggcacacccuacguu

SEQ ID NO: 423374 - RNA, 19 nt, Homo sapiens
  misc_RNA (1)...(19): siRNA sense strand
guacuuggccucccagaag

SEQ ID NO: 423375 - RNA, 19 nt, Homo sapiens
  misc_RNA (1)...(19): siRNA sense strand
gaugaucgggaaacacaaa

SEQ ID NO: 423376 - RNA, 19 nt, Homo sapiens
  misc_RNA (1)...(19): siRNA sense strand
ugucugagauggagaugau

SEQ ID NO: 423377 - RNA, 19 nt, Homo sapiens
  misc_RNA (1)...(19): siRNA sense strand
ugcacaaccucgacuacua

SEQ ID NO: 423378 - RNA, 19 nt, Homo sapiens
  misc_RNA (1)...(19): siRNA sense strand
acacacgaccuguacauga

SEQ ID NO: 423379 - RNA, 19 nt, Homo sapiens
  misc_RNA (1)...(19): siRNA sense strand
ucaagcacguggaggugaa

SEQ ID NO: 423380 - RNA, 19 nt, Homo sapiens
  misc_RNA (1)...(19): siRNA sense strand
ccgagcggauggacaagaa

SEQ ID NO: 423381 - RNA, 19 nt, Homo sapiens
  misc_RNA (1)...(19): siRNA sense strand
gcacaaccucgacuacuac

SEQ ID NO: 423382 - RNA, 19 nt, Homo sapiens
  misc_RNA (1)...(19): siRNA sense strand
gagauggagaugaugaaga

SEQ ID NO: 423383 - RNA, 19 nt, Homo sapiens
  misc_RNA (1)...(19): siRNA sense strand
gcacacacgaccuguacau

SEQ ID NO: 423384 - RNA, 19 nt, Homo sapiens
  misc_RNA (1)...(19): siRNA sense strand
uguacgugcugguggagua

SEQ ID NO: 423385 - RNA, 19 nt, Homo sapiens
  misc_RNA (1)...(19): siRNA sense strand
gacggcacacccuacguua

SEQ ID NO: 423386 - RNA, 19 nt, Homo sapiens
  misc_RNA (1)...(19): siRNA sense strand
cacacgaccuguacaugau

SEQ ID NO: 423387 - RNA, 19 nt, Homo sapiens
  misc_RNA (1)...(19): siRNA sense strand
caaccucgacuacuacaag

SEQ ID NO: 423388 - RNA, 19 nt, Homo sapiens
  misc_RNA (1)...(19): siRNA sense strand
ugaagaugaucgggaaaca

SEQ ID NO: 423389 - RNA, 19 nt, Homo sapiens
  misc_RNA (1)...(19): siRNA sense strand
acaccugcgucguggagaa

SEQ ID NO: 423390 - RNA, 19 nt, Homo sapiens
  misc_RNA (1)...(19): siRNA sense strand
ggaccuggugucugagaug

SEQ ID NO: 423391 - RNA, 19 nt, Homo sapiens
  misc_RNA (1)...(19): siRNA sense strand
gcagcauccggcagacgua

SEQ ID NO: 423392 - RNA, 19 nt, Homo sapiens
  misc_RNA (1)...(19): siRNA sense strand
caccguagccgugaagaug

SEQ ID NO: 423393 - RNA, 19 nt, Homo sapiens
  misc_RNA (1)...(19): siRNA sense strand
ccaucggcauugacaagga

SEQ ID NO: 423394 - RNA, 19 nt, Homo sapiens
  misc_RNA (1)...(19): siRNA sense strand
gaagaugcugaaagacgau

SEQ ID NO: 423395 - RNA, 19 nt, Homo sapiens
  misc_RNA (1)...(19): siRNA sense strand
gaccgaggacaacgugaug

SEQ ID NO: 423396 - RNA, 19 nt, Homo sapiens
  misc_RNA (1)...(19): siRNA sense strand
ggagccuggucauggaaag

SEQ ID NO: 423397 - RNA, 19 nt, Homo sapiens
  misc_RNA (1)...(19): siRNA sense strand
aggacaacgugaugaagau

SEQ ID NO: 423398 - RNA, 19 nt, Homo sapiens
  misc_RNA (1)...(19): siRNA sense strand
cgucguggagaacaaguuu

SEQ ID NO: 423399 - RNA, 19 nt, Homo sapiens
  misc_RNA (1)...(19): siRNA sense strand
agugacgucugguccuuug

SEQ ID NO: 423400 - RNA, 19 nt, Homo sapiens
  misc_RNA (1)...(19): siRNA sense strand
uggagaugaugaagaugau

SEQ ID NO: 423401 - RNA, 19 nt, Homo sapiens
  misc_RNA (1)...(19): siRNA sense strand
cggaggccaucggcauuga

SEQ ID NO: 423402 - RNA, 19 nt, Homo sapiens
  misc_RNA (1)...(19): siRNA sense strand
aagaugaucgggaaacaca

SEQ ID NO: 423403 - RNA, 19 nt, Homo sapiens
  misc_RNA (1)...(19): siRNA sense strand
gcaguggagccuggucaug

SEQ ID NO: 423404 - RNA, 19 nt, Homo sapiens
  misc_RNA (1)...(19): siRNA sense strand
agagugacgucugguccuu

SEQ ID NO: 423405 - RNA, 19 nt, Homo sapiens
  misc_RNA (1)...(19): siRNA sense strand
ggacaacgugaugaagauc

SEQ ID NO: 423406 - RNA, 19 nt, Homo sapiens
  misc_RNA (1)...(19): siRNA sense strand
ggacgaggcugaggacaca

SEQ ID NO: 423407 - RNA, 19 nt, Homo sapiens
  misc_RNA (1)...(19): siRNA sense strand
ugucggaccuggugucuga

SEQ ID NO: 423408 - RNA, 19 nt, Homo sapiens
  misc_RNA (1)...(19): siRNA sense strand
gcaucaagcugcggcauca

SEQ ID NO: 423409 - RNA, 19 nt, Homo sapiens
  misc_RNA (1)...(19): siRNA sense strand
ugaaagacgaugccacuga

SEQ ID NO: 423410 - RNA, 19 nt, Homo sapiens
  misc_RNA (1)...(19): siRNA sense strand
ccgugaagaugcugaaaga

SEQ ID NO: 423411 - RNA, 19 nt, Homo sapiens
  misc_RNA (1)...(19): siRNA sense strand
ugaugaagaucgcagacuu

SEQ ID NO: 423412 - RNA, 19 nt, Homo sapiens
  misc_RNA (1)...(19): siRNA sense strand
gaggacaacgugaugaaga

SEQ ID NO: 423413 - RNA, 19 nt, Homo sapiens
  misc_RNA (1)...(19): siRNA sense strand
agauggagaugaugaagau

SEQ ID NO: 423414 - RNA, 19 nt, Homo sapiens
  misc_RNA (1)...(19): siRNA sense strand
ggacggcacacccuacguu

SEQ ID NO: 423415 - RNA, 19 nt, Homo sapiens
  misc_RNA (1)...(19): siRNA sense strand
guacuuggccucccagaag

SEQ ID NO: 423416 - RNA, 19 nt, Homo sapiens
  misc_RNA (1)...(19): siRNA sense strand
gaugaucgggaaacacaaa

SEQ ID NO: 423417 - RNA, 19 nt, Homo sapiens
  misc_RNA (1)...(19): siRNA sense strand
ugucugagauggagaugau

SEQ ID NO: 423418 - RNA, 19 nt, Homo sapiens
  misc_RNA (1)...(19): siRNA sense strand
ugcacaaccucgacuacua

SEQ ID NO: 423419 - RNA, 19 nt, Homo sapiens
  misc_RNA (1)...(19): siRNA sense strand
acacacgaccuguacauga

SEQ ID NO: 423420 - RNA, 19 nt, Homo sapiens
  misc_RNA (1)...(19): siRNA sense strand
ucaagcacguggaggugaa

SEQ ID NO: 423421 - RNA, 19 nt, Homo sapiens
  misc_RNA (1)...(19): siRNA sense strand
ccgagcggauggacaagaa

SEQ ID NO: 423422 - RNA, 19 nt, Homo sapiens
  misc_RNA (1)...(19): siRNA sense strand
gcacaaccucgacuacuac

SEQ ID NO: 423423 - RNA, 19 nt, Homo sapiens
  misc_RNA (1)...(19): siRNA sense strand
gagauggagaugaugaaga

SEQ ID NO: 423424 - RNA, 19 nt, Homo sapiens
  misc_RNA (1)...(19): siRNA sense strand
gcacacacgaccuguacau

SEQ ID NO: 423425 - RNA, 19 nt, Homo sapiens
  misc_RNA (1)...(19): siRNA sense strand
uguacgugcugguggagua

SEQ ID NO: 423426 - RNA, 19 nt, Homo sapiens
  misc_RNA (1)...(19): siRNA sense strand
gacggcacacccuacguua

SEQ ID NO: 423427 - RNA, 19 nt, Homo sapiens
  misc_RNA (1)...(19): siRNA sense strand
cacacgaccuguacaugau

SEQ ID NO: 423428 - RNA, 19 nt, Homo sapiens
  misc_RNA (1)...(19): siRNA sense strand
caaccucgacuacuacaag

SEQ ID NO: 423429 - RNA, 19 nt, Homo sapiens
  misc_RNA (1)...(19): siRNA sense strand
ugaagaugaucgggaaaca

SEQ ID NO: 423430 - RNA, 19 nt, Homo sapiens
  misc_RNA (1)...(19): siRNA sense strand
acaccugcgucguggagaa

SEQ ID NO: 423431 - RNA, 19 nt, Homo sapiens
  misc_RNA (1)...(19): siRNA sense strand
ggaccuggugucugagaug

SEQ ID NO: 423432 - RNA, 19 nt, Homo sapiens
  misc_RNA (1)...(19): siRNA sense strand
gcagcauccggcagacgua

SEQ ID NO: 423433 - RNA, 19 nt, Homo sapiens
  misc_RNA (1)...(19): siRNA sense strand
caccguagccgugaagaug

SEQ ID NO: 423434 - RNA, 19 nt, Homo sapiens
  misc_RNA (1)...(19): siRNA sense strand
ccaucggcauugacaagga

SEQ ID NO: 423435 - RNA, 19 nt, Homo sapiens
  misc_RNA (1)...(19): siRNA sense strand
gaagaugcugaaagacgau

SEQ ID NO: 423436 - RNA, 19 nt, Homo sapiens
  misc_RNA (1)...(19): siRNA sense strand
gaccgaggacaacgugaug

SEQ ID NO: 423437 - RNA, 19 nt, Homo sapiens
  misc_RNA (1)...(19): siRNA sense strand
ggagccuggucauggaaag

SEQ ID NO: 423438 - RNA, 19 nt, Homo sapiens
  misc_RNA (1)...(19): siRNA sense strand
aggacaacgugaugaagau

SEQ ID NO: 423439 - RNA, 19 nt, Homo sapiens
  misc_RNA (1)...(19): siRNA sense strand
cgucguggagaacaaguuu

SEQ ID NO: 423440 - RNA, 19 nt, Homo sapiens
  misc_RNA (1)...(19): siRNA sense strand
agugacgucugguccuuug

SEQ ID NO: 423441 - RNA, 19 nt, Homo sapiens
  misc_RNA (1)...(19): siRNA sense strand
uggagaugaugaagaugau

SEQ ID NO: 423442 - RNA, 19 nt, Homo sapiens
  misc_RNA (1)...(19): siRNA sense strand
cggaggccaucggcauuga

SEQ ID NO: 423443 - RNA, 19 nt, Homo sapiens
  misc_RNA (1)...(19): siRNA sense strand
aagaugaucgggaaacaca

SEQ ID NO: 423444 - RNA, 19 nt, Homo sapiens
  misc_RNA (1)...(19): siRNA sense strand
gcaguggagccuggucaug

SEQ ID NO: 423445 - RNA, 19 nt, Homo sapiens
  misc_RNA (1)...(19): siRNA sense strand
agagugacgucugguccuu

SEQ ID NO: 423446 - RNA, 19 nt, Homo sapiens
  misc_RNA (1)...(19): siRNA sense strand
ggacaacgugaugaagauc

SEQ ID NO: 423447 - RNA, 19 nt, Homo sapiens
  misc_RNA (1)...(19): siRNA sense strand
ggccaacacugucaaguuu

SEQ ID NO: 423448 - RNA, 19 nt, Homo sapiens
  misc_RNA (1)...(19): siRNA sense strand
gaauacggguccaucaauc

SEQ ID NO: 423449 - RNA, 19 nt, Homo sapiens
  misc_RNA (1)...(19): siRNA sense strand
gcaggagcaucgcauugga

SEQ ID NO: 423450 - RNA, 19 nt, Homo sapiens
  misc_RNA (1)...(19): siRNA sense strand
caucugacaagggaaauua

SEQ ID NO: 423451 - RNA, 19 nt, Homo sapiens
  misc_RNA (1)...(19): siRNA sense strand
gcaccauacuggaccaaca

SEQ ID NO: 423452 - RNA, 19 nt, Homo sapiens
  misc_RNA (1)...(19): siRNA sense strand
gcacuggagccucauuaug

SEQ ID NO: 423453 - RNA, 19 nt, Homo sapiens
  misc_RNA (1)...(19): siRNA sense strand
aaaguguggucccaucuga

SEQ ID NO: 423454 - RNA, 19 nt, Homo sapiens
  misc_RNA (1)...(19): siRNA sense strand
cauuggaggcuacaaggua

SEQ ID NO: 423455 - RNA, 19 nt, Homo sapiens
  misc_RNA (1)...(19): siRNA sense strand
aguugaggauaccacauua

SEQ ID NO: 423456 - RNA, 19 nt, Homo sapiens
  misc_RNA (1)...(19): siRNA sense strand
gaaaguguggucccaucug

SEQ ID NO: 423457 - RNA, 19 nt, Homo sapiens
  misc_RNA (1)...(19): siRNA sense strand
cagcacuggagccucauua

SEQ ID NO: 423458 - RNA, 19 nt, Homo sapiens
  misc_RNA (1)...(19): siRNA sense strand
ggaacccaaugccaaccau

SEQ ID NO: 423459 - RNA, 19 nt, Homo sapiens
  misc_RNA (1)...(19): siRNA sense strand
ugaauacggguccaucaau

SEQ ID NO: 423460 - RNA, 19 nt, Homo sapiens
  misc_RNA (1)...(19): siRNA sense strand
acacguaccaccuggaugu

SEQ ID NO: 423461 - RNA, 19 nt, Homo sapiens
  misc_RNA (1)...(19): siRNA sense strand
ucugacaagggaaauuaua

SEQ ID NO: 423462 - RNA, 19 nt, Homo sapiens
  misc_RNA (1)...(19): siRNA sense strand
cauacuggaccaacacaga

SEQ ID NO: 423463 - RNA, 19 nt, Homo sapiens
  misc_RNA (1)...(19): siRNA sense strand
ccaacacugucaaguuucg

SEQ ID NO: 423464 - RNA, 19 nt, Homo sapiens
  misc_RNA (1)...(19): siRNA sense strand
gaggcuacaagguacgaaa

SEQ ID NO: 423465 - RNA, 19 nt, Homo sapiens
  misc_RNA (1)...(19): siRNA sense strand
cguaccaccuggauguugu

SEQ ID NO: 423466 - RNA, 19 nt, Homo sapiens
  misc_RNA (1)...(19): siRNA sense strand
ucaguuuaguugaggauac

SEQ ID NO: 423467 - RNA, 19 nt, Homo sapiens
  misc_RNA (1)...(19): siRNA sense strand
ggaaaguguggucccaucu

SEQ ID NO: 423468 - RNA, 19 nt, Homo sapiens
  misc_RNA (1)...(19): siRNA sense strand
uaguugaggauaccacauu

SEQ ID NO: 423469 - RNA, 19 nt, Homo sapiens
  misc_RNA (1)...(19): siRNA sense strand
gcuacaagguacgaaacca

SEQ ID NO: 423470 - RNA, 19 nt, Homo sapiens
  misc_RNA (1)...(19): siRNA sense strand
cacuggagccucauuaugg

SEQ ID NO: 423471 - RNA, 19 nt, Homo sapiens
  misc_RNA (1)...(19): siRNA sense strand
cggccaacacugucaaguu

SEQ ID NO: 423472 - RNA, 19 nt, Homo sapiens
  misc_RNA (1)...(19): siRNA sense strand
acuggagccucauuaugga

SEQ ID NO: 423473 - RNA, 19 nt, Homo sapiens
  misc_RNA (1)...(19): siRNA sense strand
uaagcaggagcaucgcauu

SEQ ID NO: 423474 - RNA, 19 nt, Homo sapiens
  misc_RNA (1)...(19): siRNA sense strand
ggagccucauuauggaaag

SEQ ID NO: 423475 - RNA, 19 nt, Homo sapiens
  misc_RNA (1)...(19): siRNA sense strand
ggccaacacugucaaguuu

SEQ ID NO: 423476 - RNA, 19 nt, Homo sapiens
  misc_RNA (1)...(19): siRNA sense strand
gaauacggguccaucaauc

SEQ ID NO: 423477 - RNA, 19 nt, Homo sapiens
  misc_RNA (1)...(19): siRNA sense strand
gcaggagcaucgcauugga

SEQ ID NO: 423478 - RNA, 19 nt, Homo sapiens
  misc_RNA (1)...(19): siRNA sense strand
caucugacaagggaaauua

SEQ ID NO: 423479 - RNA, 19 nt, Homo sapiens
  misc_RNA (1)...(19): siRNA sense strand
gcaccauacuggaccaaca

SEQ ID NO: 423480 - RNA, 19 nt, Homo sapiens
  misc_RNA (1)...(19): siRNA sense strand
gcacuggagccucauuaug

SEQ ID NO: 423481 - RNA, 19 nt, Homo sapiens
  misc_RNA (1)...(19): siRNA sense strand
aaaguguggucccaucuga

SEQ ID NO: 423482 - RNA, 19 nt, Homo sapiens
  misc_RNA (1)...(19): siRNA sense strand
cauuggaggcuacaaggua

SEQ ID NO: 423483 - RNA, 19 nt, Homo sapiens
  misc_RNA (1)...(19): siRNA sense strand
aguugaggauaccacauua

SEQ ID NO: 423484 - RNA, 19 nt, Homo sapiens
  misc_RNA (1)...(19): siRNA sense strand
gaaaguguggucccaucug

SEQ ID NO: 423485 - RNA, 19 nt, Homo sapiens
  misc_RNA (1)...(19): siRNA sense strand
cagcacuggagccucauua

SEQ ID NO: 423486 - RNA, 19 nt, Homo sapiens
  misc_RNA (1)...(19): siRNA sense strand
ggaacccaaugccaaccau

SEQ ID NO: 423487 - RNA, 19 nt, Homo sapiens
  misc_RNA (1)...(19): siRNA sense strand
ugaauacggguccaucaau

SEQ ID NO: 423488 - RNA, 19 nt, Homo sapiens
  misc_RNA (1)...(19): siRNA sense strand
acacguaccaccuggaugu

SEQ ID NO: 423489 - RNA, 19 nt, Homo sapiens
  misc_RNA (1)...(19): siRNA sense strand
ucugacaagggaaauuaua

SEQ ID NO: 423490 - RNA, 19 nt, Homo sapiens
  misc_RNA (1)...(19): siRNA sense strand
cauacuggaccaacacaga

SEQ ID NO: 423491 - RNA, 19 nt, Homo sapiens
  misc_RNA (1)...(19): siRNA sense strand
ccaacacugucaaguuucg

SEQ ID NO: 423492 - RNA, 19 nt, Homo sapiens
  misc_RNA (1)...(19): siRNA sense strand
gaggcuacaagguacgaaa

SEQ ID NO: 423493 - RNA, 19 nt, Homo sapiens
  misc_RNA (1)...(19): siRNA sense strand
cguaccaccuggauguugu

SEQ ID NO: 423494 - RNA, 19 nt, Homo sapiens
  misc_RNA (1)...(19): siRNA sense strand
ucaguuuaguugaggauac

SEQ ID NO: 423495 - RNA, 19 nt, Homo sapiens
  misc_RNA (1)...(19): siRNA sense strand
ggaaaguguggucccaucu

SEQ ID NO: 423496 - RNA, 19 nt, Homo sapiens
  misc_RNA (1)...(19): siRNA sense strand
uaguugaggauaccacauu

SEQ ID NO: 423497 - RNA, 19 nt, Homo sapiens
  misc_RNA (1)...(19): siRNA sense strand
gcuacaagguacgaaacca

SEQ ID NO: 423498 - RNA, 19 nt, Homo sapiens
  misc_RNA (1)...(19): siRNA sense strand
cacuggagccucauuaugg

SEQ ID NO: 423499 - RNA, 19 nt, Homo sapiens
  misc_RNA (1)...(19): siRNA sense strand
cggccaacacugucaaguu

SEQ ID NO: 423500 - RNA, 19 nt, Homo sapiens
  misc_RNA (1)...(19): siRNA sense strand
acuggagccucauuaugga

SEQ ID NO: 423501 - RNA, 19 nt, Homo sapiens
  misc_RNA (1)...(19): siRNA sense strand
uaagcaggagcaucgcauu

SEQ ID NO: 423502 - RNA, 19 nt, Homo sapiens
  misc_RNA (1)...(19): siRNA sense strand
ggagccucauuauggaaag

SEQ ID NO: 423503 - RNA, 19 nt, Homo sapiens
  misc_RNA (1)...(19): siRNA sense strand
ggccaacacugucaaguuu

SEQ ID NO: 423504 - RNA, 19 nt, Homo sapiens
  misc_RNA (1)...(19): siRNA sense strand
gaauacggguccaucaauc

SEQ ID NO: 423505 - RNA, 19 nt, Homo sapiens
  misc_RNA (1)...(19): siRNA sense strand
gcaggagcaucgcauugga

SEQ ID NO: 423506 - RNA, 19 nt, Homo sapiens
  misc_RNA (1)...(19): siRNA sense strand
caucugacaagggaaauua

SEQ ID NO: 423507 - RNA, 19 nt, Homo sapiens
  misc_RNA (1)...(19): siRNA sense strand
gcaccauacuggaccaaca

SEQ ID NO: 423508 - RNA, 19 nt, Homo sapiens
  misc_RNA (1)...(19): siRNA sense strand
gcacuggagccucauuaug

SEQ ID NO: 423509 - RNA, 19 nt, Homo sapiens
  misc_RNA (1)...(19): siRNA sense strand
aaaguguggucccaucuga

SEQ ID NO: 423510 - RNA, 19 nt, Homo sapiens
  misc_RNA (1)...(19): siRNA sense strand
cauuggaggcuacaaggua

SEQ ID NO: 423511 - RNA, 19 nt, Homo sapiens
  misc_RNA (1)...(19): siRNA sense strand
aguugaggauaccacauua

SEQ ID NO: 423512 - RNA, 19 nt, Homo sapiens
  misc_RNA (1)...(19): siRNA sense strand
gaaaguguggucccaucug

SEQ ID NO: 423513 - RNA, 19 nt, Homo sapiens
  misc_RNA (1)...(19): siRNA sense strand
cagcacuggagccucauua

SEQ ID NO: 423514 - RNA, 19 nt, Homo sapiens
  misc_RNA (1)...(19): siRNA sense strand
ggaacccaaugccaaccau

SEQ ID NO: 423515 - RNA, 19 nt, Homo sapiens
  misc_RNA (1)...(19): siRNA sense strand
ugaauacggguccaucaau

SEQ ID NO: 423516 - RNA, 19 nt, Homo sapiens
  misc_RNA (1)...(19): siRNA sense strand
acacguaccaccuggaugu

SEQ ID NO: 423517 - RNA, 19 nt, Homo sapiens
  misc_RNA (1)...(19): siRNA sense strand
ucugacaagggaaauuaua

SEQ ID NO: 423518 - RNA, 19 nt, Homo sapiens
  misc_RNA (1)...(19): siRNA sense strand
cauacuggaccaacacaga

SEQ ID NO: 423519 - RNA, 19 nt, Homo sapiens
  misc_RNA (1)...(19): siRNA sense strand
ccaacacugucaaguuucg

SEQ ID NO: 423520 - RNA, 19 nt, Homo sapiens
  misc_RNA (1)...(19): siRNA sense strand
gaggcuacaagguacgaaa

SEQ ID NO: 423521 - RNA, 19 nt, Homo sapiens
  misc_RNA (1)...(19): siRNA sense strand
cguaccaccuggauguugu

SEQ ID NO: 423522 - RNA, 19 nt, Homo sapiens
  misc_RNA (1)...(19): siRNA sense strand
ucaguuuaguugaggauac

SEQ ID NO: 423523 - RNA, 19 nt, Homo sapiens
  misc_RNA (1)...(19): siRNA sense strand
ggaaaguguggucccaucu

SEQ ID NO: 423524 - RNA, 19 nt, Homo sapiens
  misc_RNA (1)...(19): siRNA sense strand
uaguugaggauaccacauu

SEQ ID NO: 423525 - RNA, 19 nt, Homo sapiens
  misc_RNA (1)...(19): siRNA sense strand
gcuacaagguacgaaacca

SEQ ID NO: 423526 - RNA, 19 nt, Homo sapiens
  misc_RNA (1)...(19): siRNA sense strand
cacuggagccucauuaugg

SEQ ID NO: 423527 - RNA, 19 nt, Homo sapiens
  misc_RNA (1)...(19): siRNA sense strand
cggccaacacugucaaguu

SEQ ID NO: 423528 - RNA, 19 nt, Homo sapiens
  misc_RNA (1)...(19): siRNA sense strand
acuggagccucauuaugga

SEQ ID NO: 423529 - RNA, 19 nt, Homo sapiens
  misc_RNA (1)...(19): siRNA sense strand
uaagcaggagcaucgcauu

SEQ ID NO: 423530 - RNA, 19 nt, Homo sapiens
  misc_RNA (1)...(19): siRNA sense strand
ggagccucauuauggaaag

SEQ ID NO: 423531 - RNA, 19 nt, Homo sapiens
  misc_RNA (1)...(19): siRNA sense strand
ggccaacacugucaaguuu

SEQ ID NO: 423532 - RNA, 19 nt, Homo sapiens
  misc_RNA (1)...(19): siRNA sense strand
gaauacggguccaucaauc

SEQ ID NO: 423533 - RNA, 19 nt, Homo sapiens
  misc_RNA (1)...(19): siRNA sense strand
gcaggagcaucgcauugga

SEQ ID NO: 423534 - RNA, 19 nt, Homo sapiens
  misc_RNA (1)...(19): siRNA sense strand
caucugacaagggaaauua

SEQ ID NO: 423535 - RNA, 19 nt, Homo sapiens
  misc_RNA (1)...(19): siRNA sense strand
gcaccauacuggaccaaca

SEQ ID NO: 423536 - RNA, 19 nt, Homo sapiens
  misc_RNA (1)...(19): siRNA sense strand
gcacuggagccucauuaug

SEQ ID NO: 423537 - RNA, 19 nt, Homo sapiens
  misc_RNA (1)...(19): siRNA sense strand
aaaguguggucccaucuga

SEQ ID NO: 423538 - RNA, 19 nt, Homo sapiens
  misc_RNA (1)...(19): siRNA sense strand
cauuggaggcuacaaggua

SEQ ID NO: 423539 - RNA, 19 nt, Homo sapiens
  misc_RNA (1)...(19): siRNA sense strand
aguugaggauaccacauua

SEQ ID NO: 423540 - RNA, 19 nt, Homo sapiens
  misc_RNA (1)...(19): siRNA sense strand
gaaaguguggucccaucug

SEQ ID NO: 423541 - RNA, 19 nt, Homo sapiens
  misc_RNA (1)...(19): siRNA sense strand
cagcacuggagccucauua

SEQ ID NO: 423542 - RNA, 19 nt, Homo sapiens
  misc_RNA (1)...(19): siRNA sense strand
ggaacccaaugccaaccau

SEQ ID NO: 423543 - RNA, 19 nt, Homo sapiens
  misc_RNA (1)...(19): siRNA sense strand
ugaauacggguccaucaau

SEQ ID NO: 423544 - RNA, 19 nt, Homo sapiens
  misc_RNA (1)...(19): siRNA sense strand
acacguaccaccuggaugu

SEQ ID NO: 423545 - RNA, 19 nt, Homo sapiens
  misc_RNA (1)...(19): siRNA sense strand
ucugacaagggaaauuaua

SEQ ID NO: 423546 - RNA, 19 nt, Homo sapiens
  misc_RNA (1)...(19): siRNA sense strand
cauacuggaccaacacaga

SEQ ID NO: 423547 - RNA, 19 nt, Homo sapiens
  misc_RNA (1)...(19): siRNA sense strand
ccaacacugucaaguuucg

SEQ ID NO: 423548 - RNA, 19 nt, Homo sapiens
  misc_RNA (1)...(19): siRNA sense strand
gaggcuacaagguacgaaa

SEQ ID NO: 423549 - RNA, 19 nt, Homo sapiens
  misc_RNA (1)...(19): siRNA sense strand
cguaccaccuggauguugu

SEQ ID NO: 423550 - RNA, 19 nt, Homo sapiens
  misc_RNA (1)...(19): siRNA sense strand
ucaguuuaguugaggauac

SEQ ID NO: 423551 - RNA, 19 nt, Homo sapiens
  misc_RNA (1)...(19): siRNA sense strand
ggaaaguguggucccaucu

SEQ ID NO: 423552 - RNA, 19 nt, Homo sapiens
  misc_RNA (1)...(19): siRNA sense strand
uaguugaggauaccacauu

SEQ ID NO: 423553 - RNA, 19 nt, Homo sapiens
  misc_RNA (1)...(19): siRNA sense strand
gcuacaagguacgaaacca

SEQ ID NO: 423554 - RNA, 19 nt, Homo sapiens
  misc_RNA (1)...(19): siRNA sense strand
cacuggagccucauuaugg

SEQ ID NO: 423555 - RNA, 19 nt, Homo sapiens
  misc_RNA (1)...(19): siRNA sense strand
cggccaacacugucaaguu

SEQ ID NO: 423556 - RNA, 19 nt, Homo sapiens
  misc_RNA (1)...(19): siRNA sense strand
acuggagccucauuaugga

SEQ ID NO: 423557 - RNA, 19 nt, Homo sapiens
  misc_RNA (1)...(19): siRNA sense strand
uaagcaggagcaucgcauu

SEQ ID NO: 423558 - RNA, 19 nt, Homo sapiens
  misc_RNA (1)...(19): siRNA sense strand
ggagccucauuauggaaag

SEQ ID NO: 423559 - RNA, 19 nt, Homo sapiens
  misc_RNA (1)...(19): siRNA sense strand
ggccaacacugucaaguuu

SEQ ID NO: 423560 - RNA, 19 nt, Homo sapiens
  misc_RNA (1)...(19): siRNA sense strand
gaauacggguccaucaauc

SEQ ID NO: 423561 - RNA, 19 nt, Homo sapiens
  misc_RNA (1)...(19): siRNA sense strand
gcaggagcaucgcauugga

SEQ ID NO: 423562 - RNA, 19 nt, Homo sapiens
  misc_RNA (1)...(19): siRNA sense strand
caucugacaagggaaauua

SEQ ID NO: 423563 - RNA, 19 nt, Homo sapiens
  misc_RNA (1)...(19): siRNA sense strand
gcaccauacuggaccaaca

SEQ ID NO: 423564 - RNA, 19 nt, Homo sapiens
  misc_RNA (1)...(19): siRNA sense strand
gcacuggagccucauuaug

SEQ ID NO: 423565 - RNA, 19 nt, Homo sapiens
  misc_RNA (1)...(19): siRNA sense strand
aaaguguggucccaucuga

SEQ ID NO: 423566 - RNA, 19 nt, Homo sapiens
  misc_RNA (1)...(19): siRNA sense strand
cauuggaggcuacaaggua

SEQ ID NO: 423567 - RNA, 19 nt, Homo sapiens
  misc_RNA (1)...(19): siRNA sense strand
aguugaggauaccacauua

SEQ ID NO: 423568 - RNA, 19 nt, Homo sapiens
  misc_RNA (1)...(19): siRNA sense strand
gaaaguguggucccaucug

SEQ ID NO: 423569 - RNA, 19 nt, Homo sapiens
  misc_RNA (1)...(19): siRNA sense strand
cagcacuggagccucauua

SEQ ID NO: 423570 - RNA, 19 nt, Homo sapiens
  misc_RNA (1)...(19): siRNA sense strand
ggaacccaaugccaaccau

SEQ ID NO: 423571 - RNA, 19 nt, Homo sapiens
  misc_RNA (1)...(19): siRNA sense strand
ugaauacggguccaucaau

SEQ ID NO: 423572 - RNA, 19 nt, Homo sapiens
  misc_RNA (1)...(19): siRNA sense strand
acacguaccaccuggaugu

SEQ ID NO: 423573 - RNA, 19 nt, Homo sapiens
  misc_RNA (1)...(19): siRNA sense strand
ucugacaagggaaauuaua

SEQ ID NO: 423574 - RNA, 19 nt, Homo sapiens
  misc_RNA (1)...(19): siRNA sense strand
cauacuggaccaacacaga

SEQ ID NO: 423575 - RNA, 19 nt, Homo sapiens
  misc_RNA (1)...(19): siRNA sense strand
ccaacacugucaaguuucg

SEQ ID NO: 423576 - RNA, 19 nt, Homo sapiens
  misc_RNA (1)...(19): siRNA sense strand
gaggcuacaagguacgaaa

SEQ ID NO: 423577 - RNA, 19 nt, Homo sapiens
  misc_RNA (1)...(19): siRNA sense strand
cguaccaccuggauguugu

SEQ ID NO: 423578 - RNA, 19 nt, Homo sapiens
  misc_RNA (1)...(19): siRNA sense strand
ucaguuuaguugaggauac

SEQ ID NO: 423579 - RNA, 19 nt, Homo sapiens
  misc_RNA (1)...(19): siRNA sense strand
ggaaaguguggucccaucu

SEQ ID NO: 423580 - RNA, 19 nt, Homo sapiens
  misc_RNA (1)...(19): siRNA sense strand
uaguugaggauaccacauu

SEQ ID NO: 423581 - RNA, 19 nt, Homo sapiens
  misc_RNA (1)...(19): siRNA sense strand
gcuacaagguacgaaacca

SEQ ID NO: 423582 - RNA, 19 nt, Homo sapiens
  misc_RNA (1)...(19): siRNA sense strand
cacuggagccucauuaugg

SEQ ID NO: 423583 - RNA, 19 nt, Homo sapiens
  misc_RNA (1)...(19): siRNA sense strand
cggccaacacugucaaguu

SEQ ID NO: 423584 - RNA, 19 nt, Homo sapiens
  misc_RNA (1)...(19): siRNA sense strand
acuggagccucauuaugga

SEQ ID NO: 423585 - RNA, 19 nt, Homo sapiens
  misc_RNA (1)...(19): siRNA sense strand
uaagcaggagcaucgcauu

SEQ ID NO: 423586 - RNA, 19 nt, Homo sapiens
  misc_RNA (1)...(19): siRNA sense strand
ggagccucauuauggaaag

SEQ ID NO: 423587 - RNA, 19 nt, Homo sapiens
  misc_RNA (1)...(19): siRNA sense strand
ggccaacacugucaaguuu

SEQ ID NO: 423588 - RNA, 19 nt, Homo sapiens
  misc_RNA (1)...(19): siRNA sense strand
gaauacggguccaucaauc

SEQ ID NO: 423589 - RNA, 19 nt, Homo sapiens
  misc_RNA (1)...(19): siRNA sense strand
gcaggagcaucgcauugga

SEQ ID NO: 423590 - RNA, 19 nt, Homo sapiens
  misc_RNA (1)...(19): siRNA sense strand
caucugacaagggaaauua

SEQ ID NO: 423591 - RNA, 19 nt, Homo sapiens
  misc_RNA (1)...(19): siRNA sense strand
gcaccauacuggaccaaca

SEQ ID NO: 423592 - RNA, 19 nt, Homo sapiens
  misc_RNA (1)...(19): siRNA sense strand
gcacuggagccucauuaug

SEQ ID NO: 423593 - RNA, 19 nt, Homo sapiens
  misc_RNA (1)...(19): siRNA sense strand
aaaguguggucccaucuga

SEQ ID NO: 423594 - RNA, 19 nt, Homo sapiens
  misc_RNA (1)...(19): siRNA sense strand
cauuggaggcuacaaggua

SEQ ID NO: 423595 - RNA, 19 nt, Homo sapiens
  misc_RNA (1)...(19): siRNA sense strand
aguugaggauaccacauua

SEQ ID NO: 423596 - RNA, 19 nt, Homo sapiens
  misc_RNA (1)...(19): siRNA sense strand
gaaaguguggucccaucug

SEQ ID NO: 423597 - RNA, 19 nt, Homo sapiens
  misc_RNA (1)...(19): siRNA sense strand
cagcacuggagccucauua

SEQ ID NO: 423598 - RNA, 19 nt, Homo sapiens
  misc_RNA (1)...(19): siRNA sense strand
ggaacccaaugccaaccau

SEQ ID NO: 423599 - RNA, 19 nt, Homo sapiens
  misc_RNA (1)...(19): siRNA sense strand
ugaauacggguccaucaau

SEQ ID NO: 423600 - RNA, 19 nt, Homo sapiens
  misc_RNA (1)...(19): siRNA sense strand
acacguaccaccuggaugu

SEQ ID NO: 423601 - RNA, 19 nt, Homo sapiens
  misc_RNA (1)...(19): siRNA sense strand
ucugacaagggaaauuaua

SEQ ID NO: 423602 - RNA, 19 nt, Homo sapiens
  misc_RNA (1)...(19): siRNA sense strand
cauacuggaccaacacaga

SEQ ID NO: 423603 - RNA, 19 nt, Homo sapiens
  misc_RNA (1)...(19): siRNA sense strand
ccaacacugucaaguuucg

SEQ ID NO: 423604 - RNA, 19 nt, Homo sapiens
  misc_RNA (1)...(19): siRNA sense strand
gaggcuacaagguacgaaa

SEQ ID NO: 423605 - RNA, 19 nt, Homo sapiens
  misc_RNA (1)...(19): siRNA sense strand
cguaccaccuggauguugu

SEQ ID NO: 423606 - RNA, 19 nt, Homo sapiens
  misc_RNA (1)...(19): siRNA sense strand
ucaguuuaguugaggauac

SEQ ID NO: 423607 - RNA, 19 nt, Homo sapiens
  misc_RNA (1)...(19): siRNA sense strand
ggaaaguguggucccaucu

SEQ ID NO: 423608 - RNA, 19 nt, Homo sapiens
  misc_RNA (1)...(19): siRNA sense strand
uaguugaggauaccacauu

SEQ ID NO: 423609 - RNA, 19 nt, Homo sapiens
  misc_RNA (1)...(19): siRNA sense strand
gcuacaagguacgaaacca

SEQ ID NO: 423610 - RNA, 19 nt, Homo sapiens
  misc_RNA (1)...(19): siRNA sense strand
cacuggagccucauuaugg

SEQ ID NO: 423611 - RNA, 19 nt, Homo sapiens
  misc_RNA (1)...(19): siRNA sense strand
cggccaacacugucaaguu

SEQ ID NO: 423612 - RNA, 19 nt, Homo sapiens
  misc_RNA (1)...(19): siRNA sense strand
acuggagccucauuaugga

SEQ ID NO: 423613 - RNA, 19 nt, Homo sapiens
  misc_RNA (1)...(19): siRNA sense strand
uaagcaggagcaucgcauu

SEQ ID NO: 423614 - RNA, 19 nt, Homo sapiens
  misc_RNA (1)...(19): siRNA sense strand
ggagccucauuauggaaag

SEQ ID NO: 423615 - RNA, 19 nt, Homo sapiens
  misc_RNA (1)...(19): siRNA sense strand
ggccaacacugucaaguuu

SEQ ID NO: 423616 - RNA, 19 nt, Homo sapiens
  misc_RNA (1)...(19): siRNA sense strand
gaauacggguccaucaauc

SEQ ID NO: 423617 - RNA, 19 nt, Homo sapiens
  misc_RNA (1)...(19): siRNA sense strand
gcaggagcaucgcauugga

SEQ ID NO: 423618 - RNA, 19 nt, Homo sapiens
  misc_RNA (1)...(19): siRNA sense strand
caucugacaagggaaauua

SEQ ID NO: 423619 - RNA, 19 nt, Homo sapiens
  misc_RNA (1)...(19): siRNA sense strand
gcaccauacuggaccaaca

SEQ ID NO: 423620 - RNA, 19 nt, Homo sapiens
  misc_RNA (1)...(19): siRNA sense strand
gcacuggagccucauuaug

SEQ ID NO: 423621 - RNA, 19 nt, Homo sapiens
  misc_RNA (1)...(19): siRNA sense strand
aaaguguggucccaucuga

SEQ ID NO: 423622 - RNA, 19 nt, Homo sapiens
  misc_RNA (1)...(19): siRNA sense strand
cauuggaggcuacaaggua

SEQ ID NO: 423623 - RNA, 19 nt, Homo sapiens
  misc_RNA (1)...(19): siRNA sense strand
aguugaggauaccacauua

SEQ ID NO: 423624 - RNA, 19 nt, Homo sapiens
  misc_RNA (1)...(19): siRNA sense strand
gaaaguguggucccaucug

SEQ ID NO: 423625 - RNA, 19 nt, Homo sapiens
  misc_RNA (1)...(19): siRNA sense strand
cagcacuggagccucauua

SEQ ID NO: 423626 - RNA, 19 nt, Homo sapiens
  misc_RNA (1)...(19): siRNA sense strand
ggaacccaaugccaaccau

SEQ ID NO: 423627 - RNA, 19 nt, Homo sapiens
  misc_RNA (1)...(19): siRNA sense strand
ugaauacggguccaucaau

SEQ ID NO: 423628 - RNA, 19 nt, Homo sapiens
  misc_RNA (1)...(19): siRNA sense strand
acacguaccaccuggaugu

SEQ ID NO: 423629 - RNA, 19 nt, Homo sapiens
  misc_RNA (1)...(19): siRNA sense strand
ucugacaagggaaauuaua

SEQ ID NO: 423630 - RNA, 19 nt, Homo sapiens
  misc_RNA (1)...(19): siRNA sense strand
cauacuggaccaacacaga

SEQ ID NO: 423631 - RNA, 19 nt, Homo sapiens
  misc_RNA (1)...(19): siRNA sense strand
ccaacacugucaaguuucg

SEQ ID NO: 423632 - RNA, 19 nt, Homo sapiens
  misc_RNA (1)...(19): siRNA sense strand
gaggcuacaagguacgaaa

SEQ ID NO: 423633 - RNA, 19 nt, Homo sapiens
  misc_RNA (1)...(19): siRNA sense strand
cguaccaccuggauguugu

SEQ ID NO: 423634 - RNA, 19 nt, Homo sapiens
  misc_RNA (1)...(19): siRNA sense strand
ucaguuuaguugaggauac

SEQ ID NO: 423635 - RNA, 19 nt, Homo sapiens
  misc_RNA (1)...(19): siRNA sense strand
ggaaaguguggucccaucu

SEQ ID NO: 423636 - RNA, 19 nt, Homo sapiens
  misc_RNA (1)...(19): siRNA sense strand
uaguugaggauaccacauu

SEQ ID NO: 423637 - RNA, 19 nt, Homo sapiens
  misc_RNA (1)...(19): siRNA sense strand
gcuacaagguacgaaacca

SEQ ID NO: 423638 - RNA, 19 nt, Homo sapiens
  misc_RNA (1)...(19): siRNA sense strand
cacuggagccucauuaugg

SEQ ID NO: 423639 - RNA, 19 nt, Homo sapiens
  misc_RNA (1)...(19): siRNA sense strand
cggccaacacugucaaguu

SEQ ID NO: 423640 - RNA, 19 nt, Homo sapiens
  misc_RNA (1)...(19): siRNA sense strand
acuggagccucauuaugga

SEQ ID NO: 423641 - RNA, 19 nt, Homo sapiens
  misc_RNA (1)...(19): siRNA sense strand
uaagcaggagcaucgcauu

SEQ ID NO: 423642 - RNA, 19 nt, Homo sapiens
  misc_RNA (1)...(19): siRNA sense strand
ggagccucauuauggaaag

SEQ ID NO: 423643 - RNA, 19 nt, Homo sapiens
  misc_RNA (1)...(19): siRNA sense strand
ggccaacacugucaaguuu

SEQ ID NO: 423644 - RNA, 19 nt, Homo sapiens
  misc_RNA (1)...(19): siRNA sense strand
gaauacggguccaucaauc

SEQ ID NO: 423645 - RNA, 19 nt, Homo sapiens
  misc_RNA (1)...(19): siRNA sense strand
gcaggagcaucgcauugga

SEQ ID NO: 423646 - RNA, 19 nt, Homo sapiens
  misc_RNA (1)...(19): siRNA sense strand
caucugacaagggaaauua

SEQ ID NO: 423647 - RNA, 19 nt, Homo sapiens
  misc_RNA (1)...(19): siRNA sense strand
gcaccauacuggaccaaca

SEQ ID NO: 423648 - RNA, 19 nt, Homo sapiens
  misc_RNA (1)...(19): siRNA sense strand
gcacuggagccucauuaug

SEQ ID NO: 423649 - RNA, 19 nt, Homo sapiens
  misc_RNA (1)...(19): siRNA sense strand
aaaguguggucccaucuga

SEQ ID NO: 423650 - RNA, 19 nt, Homo sapiens
  misc_RNA (1)...(19): siRNA sense strand
cauuggaggcuacaaggua

SEQ ID NO: 423651 - RNA, 19 nt, Homo sapiens
  misc_RNA (1)...(19): siRNA sense strand
aguugaggauaccacauua

SEQ ID NO: 423652 - RNA, 19 nt, Homo sapiens
  misc_RNA (1)...(19): siRNA sense strand
gaaaguguggucccaucug

SEQ ID NO: 423653 - RNA, 19 nt, Homo sapiens
  misc_RNA (1)...(19): siRNA sense strand
cagcacuggagccucauua

SEQ ID NO: 423654 - RNA, 19 nt, Homo sapiens
  misc_RNA (1)...(19): siRNA sense strand
ggaacccaaugccaaccau

SEQ ID NO: 423655 - RNA, 19 nt, Homo sapiens
  misc_RNA (1)...(19): siRNA sense strand
ugaauacggguccaucaau

SEQ ID NO: 423656 - RNA, 19 nt, Homo sapiens
  misc_RNA (1)...(19): siRNA sense strand
acacguaccaccuggaugu

SEQ ID NO: 423657 - RNA, 19 nt, Homo sapiens
  misc_RNA (1)...(19): siRNA sense strand
ucugacaagggaaauuaua

SEQ ID NO: 423658 - RNA, 19 nt, Homo sapiens
  misc_RNA (1)...(19): siRNA sense strand
cauacuggaccaacacaga

SEQ ID NO: 423659 - RNA, 19 nt, Homo sapiens
  misc_RNA (1)...(19): siRNA sense strand
ccaacacugucaaguuucg

SEQ ID NO: 423660 - RNA, 19 nt, Homo sapiens
  misc_RNA (1)...(19): siRNA sense strand
gaggcuacaagguacgaaa

SEQ ID NO: 423661 - RNA, 19 nt, Homo sapiens
  misc_RNA (1)...(19): siRNA sense strand
cguaccaccuggauguugu

SEQ ID NO: 423662 - RNA, 19 nt, Homo sapiens
  misc_RNA (1)...(19): siRNA sense strand
ucaguuuaguugaggauac

SEQ ID NO: 423663 - RNA, 19 nt, Homo sapiens
  misc_RNA (1)...(19): siRNA sense strand
ggaaaguguggucccaucu

SEQ ID NO: 423664 - RNA, 19 nt, Homo sapiens
  misc_RNA (1)...(19): siRNA sense strand
uaguugaggauaccacauu

SEQ ID NO: 423665 - RNA, 19 nt, Homo sapiens
  misc_RNA (1)...(19): siRNA sense strand
gcuacaagguacgaaacca

SEQ ID NO: 423666 - RNA, 19 nt, Homo sapiens
  misc_RNA (1)...(19): siRNA sense strand
cacuggagccucauuaugg

SEQ ID NO: 423667 - RNA, 19 nt, Homo sapiens
  misc_RNA (1)...(19): siRNA sense strand
cggccaacacugucaaguu

SEQ ID NO: 423668 - RNA, 19 nt, Homo sapiens
  misc_RNA (1)...(19): siRNA sense strand
acuggagccucauuaugga

SEQ ID NO: 423669 - RNA, 19 nt, Homo sapiens
  misc_RNA (1)...(19): siRNA sense strand
uaagcaggagcaucgcauu

SEQ ID NO: 423670 - RNA, 19 nt, Homo sapiens
  misc_RNA (1)...(19): siRNA sense strand
ggagccucauuauggaaag

SEQ ID NO: 423671 - RNA, 19 nt, Homo sapiens
  misc_RNA (1)...(19): siRNA sense strand
ggccaacacugucaaguuu

SEQ ID NO: 423672 - RNA, 19 nt, Homo sapiens
  misc_RNA (1)...(19): siRNA sense strand
gaauacggguccaucaauc

SEQ ID NO: 423673 - RNA, 19 nt, Homo sapiens
  misc_RNA (1)...(19): siRNA sense strand
gcaggagcaucgcauugga

SEQ ID NO: 423674 - RNA, 19 nt, Homo sapiens
  misc_RNA (1)...(19): siRNA sense strand
caucugacaagggaaauua

SEQ ID NO: 423675 - RNA, 19 nt, Homo sapiens
  misc_RNA (1)...(19): siRNA sense strand
gcaccauacuggaccaaca

SEQ ID NO: 423676 - RNA, 19 nt, Homo sapiens
  misc_RNA (1)...(19): siRNA sense strand
gcacuggagccucauuaug

SEQ ID NO: 423677 - RNA, 19 nt, Homo sapiens
  misc_RNA (1)...(19): siRNA sense strand
aaaguguggucccaucuga

SEQ ID NO: 423678 - RNA, 19 nt, Homo sapiens
  misc_RNA (1)...(19): siRNA sense strand
cauuggaggcuacaaggua

SEQ ID NO: 423679 - RNA, 19 nt, Homo sapiens
  misc_RNA (1)...(19): siRNA sense strand
aguugaggauaccacauua

SEQ ID NO: 423680 - RNA, 19 nt, Homo sapiens
  misc_RNA (1)...(19): siRNA sense strand
gaaaguguggucccaucug

SEQ ID NO: 423681 - RNA, 19 nt, Homo sapiens
  misc_RNA (1)...(19): siRNA sense strand
cagcacuggagccucauua

SEQ ID NO: 423682 - RNA, 19 nt, Homo sapiens
  misc_RNA (1)...(19): siRNA sense strand
ggaacccaaugccaaccau

SEQ ID NO: 423683 - RNA, 19 nt, Homo sapiens
  misc_RNA (1)...(19): siRNA sense strand
ugaauacggguccaucaau

SEQ ID NO: 423684 - RNA, 19 nt, Homo sapiens
  misc_RNA (1)...(19): siRNA sense strand
acacguaccaccuggaugu

SEQ ID NO: 423685 - RNA, 19 nt, Homo sapiens
  misc_RNA (1)...(19): siRNA sense strand
ucugacaagggaaauuaua

SEQ ID NO: 423686 - RNA, 19 nt, Homo sapiens
  misc_RNA (1)...(19): siRNA sense strand
cauacuggaccaacacaga

SEQ ID NO: 423687 - RNA, 19 nt, Homo sapiens
  misc_RNA (1)...(19): siRNA sense strand
ccaacacugucaaguuucg

SEQ ID NO: 423688 - RNA, 19 nt, Homo sapiens
  misc_RNA (1)...(19): siRNA sense strand
gaggcuacaagguacgaaa

SEQ ID NO: 423689 - RNA, 19 nt, Homo sapiens
  misc_RNA (1)...(19): siRNA sense strand
cguaccaccuggauguugu

SEQ ID NO: 423690 - RNA, 19 nt, Homo sapiens
  misc_RNA (1)...(19): siRNA sense strand
ucaguuuaguugaggauac

SEQ ID NO: 423691 - RNA, 19 nt, Homo sapiens
  misc_RNA (1)...(19): siRNA sense strand
ggaaaguguggucccaucu

SEQ ID NO: 423692 - RNA, 19 nt, Homo sapiens
  misc_RNA (1)...(19): siRNA sense strand
uaguugaggauaccacauu

SEQ ID NO: 423693 - RNA, 19 nt, Homo sapiens
  misc_RNA (1)...(19): siRNA sense strand
gcuacaagguacgaaacca

SEQ ID NO: 423694 - RNA, 19 nt, Homo sapiens
  misc_RNA (1)...(19): siRNA sense strand
cacuggagccucauuaugg

SEQ ID NO: 423695 - RNA, 19 nt, Homo sapiens
  misc_RNA (1)...(19): siRNA sense strand
cggccaacacugucaaguu

SEQ ID NO: 423696 - RNA, 19 nt, Homo sapiens
  misc_RNA (1)...(19): siRNA sense strand
acuggagccucauuaugga

SEQ ID NO: 423697 - RNA, 19 nt, Homo sapiens
  misc_RNA (1)...(19): siRNA sense strand
uaagcaggagcaucgcauu

SEQ ID NO: 423698 - RNA, 19 nt, Homo sapiens
  misc_RNA (1)...(19): siRNA sense strand
ggagccucauuauggaaag

SEQ ID NO: 423699 - RNA, 19 nt, Homo sapiens
  misc_RNA (1)...(19): siRNA sense strand
ggccaacacugucaaguuu

SEQ ID NO: 423700 - RNA, 19 nt, Homo sapiens
  misc_RNA (1)...(19): siRNA sense strand
gaauacggguccaucaauc

SEQ ID NO: 423701 - RNA, 19 nt, Homo sapiens
  misc_RNA (1)...(19): siRNA sense strand
gcaggagcaucgcauugga

SEQ ID NO: 423702 - RNA, 19 nt, Homo sapiens
  misc_RNA (1)...(19): siRNA sense strand
caucugacaagggaaauua

SEQ ID NO: 423703 - RNA, 19 nt, Homo sapiens
  misc_RNA (1)...(19): siRNA sense strand
gcaccauacuggaccaaca

SEQ ID NO: 423704 - RNA, 19 nt, Homo sapiens
  misc_RNA (1)...(19): siRNA sense strand
gcacuggagccucauuaug

SEQ ID NO: 423705 - RNA, 19 nt, Homo sapiens
  misc_RNA (1)...(19): siRNA sense strand
aaaguguggucccaucuga

SEQ ID NO: 423706 - RNA, 19 nt, Homo sapiens
  misc_RNA (1)...(19): siRNA sense strand
cauuggaggcuacaaggua

SEQ ID NO: 423707 - RNA, 19 nt, Homo sapiens
  misc_RNA (1)...(19): siRNA sense strand
aguugaggauaccacauua

SEQ ID NO: 423708 - RNA, 19 nt, Homo sapiens
  misc_RNA (1)...(19): siRNA sense strand
gaaaguguggucccaucug

SEQ ID NO: 423709 - RNA, 19 nt, Homo sapiens
  misc_RNA (1)...(19): siRNA sense strand
cagcacuggagccucauua

SEQ ID NO: 423710 - RNA, 19 nt, Homo sapiens
  misc_RNA (1)...(19): siRNA sense strand
ggaacccaaugccaaccau

SEQ ID NO: 423711 - RNA, 19 nt, Homo sapiens
  misc_RNA (1)...(19): siRNA sense strand
ugaauacggguccaucaau

SEQ ID NO: 423712 - RNA, 19 nt, Homo sapiens
  misc_RNA (1)...(19): siRNA sense strand
acacguaccaccuggaugu

SEQ ID NO: 423713 - RNA, 19 nt, Homo sapiens
  misc_RNA (1)...(19): siRNA sense strand
ucugacaagggaaauuaua

SEQ ID NO: 423714 - RNA, 19 nt, Homo sapiens
  misc_RNA (1)...(19): siRNA sense strand
cauacuggaccaacacaga

SEQ ID NO: 423715 - RNA, 19 nt, Homo sapiens
  misc_RNA (1)...(19): siRNA sense strand
ccaacacugucaaguuucg

SEQ ID NO: 423716 - RNA, 19 nt, Homo sapiens
  misc_RNA (1)...(19): siRNA sense strand
gaggcuacaagguacgaaa

SEQ ID NO: 423717 - RNA, 19 nt, Homo sapiens
  misc_RNA (1)...(19): siRNA sense strand
cguaccaccuggauguugu

SEQ ID NO: 423718 - RNA, 19 nt, Homo sapiens
  misc_RNA (1)...(19): siRNA sense strand
ucaguuuaguugaggauac

SEQ ID NO: 423719 - RNA, 19 nt, Homo sapiens
  misc_RNA (1)...(19): siRNA sense strand
ggaaaguguggucccaucu

SEQ ID NO: 423720 - RNA, 19 nt, Homo sapiens
  misc_RNA (1)...(19): siRNA sense strand
uaguugaggauaccacauu

SEQ ID NO: 423721 - RNA, 19 nt, Homo sapiens
  misc_RNA (1)...(19): siRNA sense strand
gcuacaagguacgaaacca

SEQ ID NO: 423722 - RNA, 19 nt, Homo sapiens
  misc_RNA (1)...(19): siRNA sense strand
cacuggagccucauuaugg

SEQ ID NO: 423723 - RNA, 19 nt, Homo sapiens
  misc_RNA (1)...(19): siRNA sense strand
cggccaacacugucaaguu

SEQ ID NO: 423724 - RNA, 19 nt, Homo sapiens
  misc_RNA (1)...(19): siRNA sense strand
acuggagccucauuaugga

SEQ ID NO: 423725 - RNA, 19 nt, Homo sapiens
  misc_RNA (1)...(19): siRNA sense strand
uaagcaggagcaucgcauu

SEQ ID NO: 423726 - RNA, 19 nt, Homo sapiens
  misc_RNA (1)...(19): siRNA sense strand
ggagccucauuauggaaag

SEQ ID NO: 423727 - RNA, 19 nt, Homo sapiens
  misc_RNA (1)...(19): siRNA sense strand
ggccaacacugucaaguuu

SEQ ID NO: 423728 - RNA, 19 nt, Homo sapiens
  misc_RNA (1)...(19): siRNA sense strand
gaauacggguccaucaauc

SEQ ID NO: 423729 - RNA, 19 nt, Homo sapiens
  misc_RNA (1)...(19): siRNA sense strand
gcaggagcaucgcauugga

SEQ ID NO: 423730 - RNA, 19 nt, Homo sapiens
  misc_RNA (1)...(19): siRNA sense strand
caucugacaagggaaauua

SEQ ID NO: 423731 - RNA, 19 nt, Homo sapiens
  misc_RNA (1)...(19): siRNA sense strand
gcaccauacuggaccaaca

SEQ ID NO: 423732 - RNA, 19 nt, Homo sapiens
  misc_RNA (1)...(19): siRNA sense strand
gcacuggagccucauuaug

SEQ ID NO: 423733 - RNA, 19 nt, Homo sapiens
  misc_RNA (1)...(19): siRNA sense strand
aaaguguggucccaucuga

SEQ ID NO: 423734 - RNA, 19 nt, Homo sapiens
  misc_RNA (1)...(19): siRNA sense strand
cauuggaggcuacaaggua

SEQ ID NO: 423735 - RNA, 19 nt, Homo sapiens
  misc_RNA (1)...(19): siRNA sense strand
aguugaggauaccacauua

SEQ ID NO: 423736 - RNA, 19 nt, Homo sapiens
  misc_RNA (1)...(19): siRNA sense strand
gaaaguguggucccaucug

SEQ ID NO: 423737 - RNA, 19 nt, Homo sapiens
  misc_RNA (1)...(19): siRNA sense strand
cagcacuggagccucauua

SEQ ID NO: 423738 - RNA, 19 nt, Homo sapiens
  misc_RNA (1)...(19): siRNA sense strand
ggaacccaaugccaaccau

SEQ ID NO: 423739 - RNA, 19 nt, Homo sapiens
  misc_RNA (1)...(19): siRNA sense strand
ugaauacggguccaucaau

SEQ ID NO: 423740 - RNA, 19 nt, Homo sapiens
  misc_RNA (1)...(19): siRNA sense strand
acacguaccaccuggaugu

SEQ ID NO: 423741 - RNA, 19 nt, Homo sapiens
  misc_RNA (1)...(19): siRNA sense strand
ucugacaagggaaauuaua

SEQ ID NO: 423742 - RNA, 19 nt, Homo sapiens
  misc_RNA (1)...(19): siRNA sense strand
cauacuggaccaacacaga

SEQ ID NO: 423743 - RNA, 19 nt, Homo sapiens
  misc_RNA (1)...(19): siRNA sense strand
ccaacacugucaaguuucg

SEQ ID NO: 423744 - RNA, 19 nt, Homo sapiens
  misc_RNA (1)...(19): siRNA sense strand
gaggcuacaagguacgaaa

SEQ ID NO: 423745 - RNA, 19 nt, Homo sapiens
  misc_RNA (1)...(19): siRNA sense strand
cguaccaccuggauguugu

SEQ ID NO: 423746 - RNA, 19 nt, Homo sapiens
  misc_RNA (1)...(19): siRNA sense strand
ucaguuuaguugaggauac

SEQ ID NO: 423747 - RNA, 19 nt, Homo sapiens
  misc_RNA (1)...(19): siRNA sense strand
ggaaaguguggucccaucu

SEQ ID NO: 423748 - RNA, 19 nt, Homo sapiens
  misc_RNA (1)...(19): siRNA sense strand
uaguugaggauaccacauu

SEQ ID NO: 423749 - RNA, 19 nt, Homo sapiens
  misc_RNA (1)...(19): siRNA sense strand
gcuacaagguacgaaacca

SEQ ID NO: 423750 - RNA, 19 nt, Homo sapiens
  misc_RNA (1)...(19): siRNA sense strand
cacuggagccucauuaugg

SEQ ID NO: 423751 - RNA, 19 nt, Homo sapiens
  misc_RNA (1)...(19): siRNA sense strand
cggccaacacugucaaguu

SEQ ID NO: 423752 - RNA, 19 nt, Homo sapiens
  misc_RNA (1)...(19): siRNA sense strand
acuggagccucauuaugga

SEQ ID NO: 423753 - RNA, 19 nt, Homo sapiens
  misc_RNA (1)...(19): siRNA sense strand
uaagcaggagcaucgcauu

SEQ ID NO: 423754 - RNA, 19 nt, Homo sapiens
  misc_RNA (1)...(19): siRNA sense strand
ggagccucauuauggaaag

SEQ ID NO: 423755 - RNA, 19 nt, Homo sapiens
  misc_RNA (1)...(19): siRNA sense strand
ggccaacacugucaaguuu

SEQ ID NO: 423756 - RNA, 19 nt, Homo sapiens
  misc_RNA (1)...(19): siRNA sense strand
gaauacggguccaucaauc

SEQ ID NO: 423757 - RNA, 19 nt, Homo sapiens
  misc_RNA (1)...(19): siRNA sense strand
gcaggagcaucgcauugga

SEQ ID NO: 423758 - RNA, 19 nt, Homo sapiens
  misc_RNA (1)...(19): siRNA sense strand
caucugacaagggaaauua

SEQ ID NO: 423759 - RNA, 19 nt, Homo sapiens
  misc_RNA (1)...(19): siRNA sense strand
gcaccauacuggaccaaca

SEQ ID NO: 423760 - RNA, 19 nt, Homo sapiens
  misc_RNA (1)...(19): siRNA sense strand
gcacuggagccucauuaug

SEQ ID NO: 423761 - RNA, 19 nt, Homo sapiens
  misc_RNA (1)...(19): siRNA sense strand
aaaguguggucccaucuga

SEQ ID NO: 423762 - RNA, 19 nt, Homo sapiens
  misc_RNA (1)...(19): siRNA sense strand
cauuggaggcuacaaggua

SEQ ID NO: 423763 - RNA, 19 nt, Homo sapiens
  misc_RNA (1)...(19): siRNA sense strand
aguugaggauaccacauua

SEQ ID NO: 423764 - RNA, 19 nt, Homo sapiens
  misc_RNA (1)...(19): siRNA sense strand
gaaaguguggucccaucug

SEQ ID NO: 423765 - RNA, 19 nt, Homo sapiens
  misc_RNA (1)...(19): siRNA sense strand
cagcacuggagccucauua

SEQ ID NO: 423766 - RNA, 19 nt, Homo sapiens
  misc_RNA (1)...(19): siRNA sense strand
ggaacccaaugccaaccau

SEQ ID NO: 423767 - RNA, 19 nt, Homo sapiens
  misc_RNA (1)...(19): siRNA sense strand
ugaauacggguccaucaau

SEQ ID NO: 423768 - RNA, 19 nt, Homo sapiens
  misc_RNA (1)...(19): siRNA sense strand
acacguaccaccuggaugu

SEQ ID NO: 423769 - RNA, 19 nt, Homo sapiens
  misc_RNA (1)...(19): siRNA sense strand
ucugacaagggaaauuaua

SEQ ID NO: 423770 - RNA, 19 nt, Homo sapiens
  misc_RNA (1)...(19): siRNA sense strand
cauacuggaccaacacaga

SEQ ID NO: 423771 - RNA, 19 nt, Homo sapiens
  misc_RNA (1)...(19): siRNA sense strand
ccaacacugucaaguuucg

SEQ ID NO: 423772 - RNA, 19 nt, Homo sapiens
  misc_RNA (1)...(19): siRNA sense strand
gaggcuacaagguacgaaa

SEQ ID NO: 423773 - RNA, 19 nt, Homo sapiens
  misc_RNA (1)...(19): siRNA sense strand
cguaccaccuggauguugu

SEQ ID NO: 423774 - RNA, 19 nt, Homo sapiens
  misc_RNA (1)...(19): siRNA sense strand
ucaguuuaguugaggauac

SEQ ID NO: 423775 - RNA, 19 nt, Homo sapiens
  misc_RNA (1)...(19): siRNA sense strand
ggaaaguguggucccaucu

SEQ ID NO: 423776 - RNA, 19 nt, Homo sapiens
  misc_RNA (1)...(19): siRNA sense strand
uaguugaggauaccacauu

SEQ ID NO: 423777 - RNA, 19 nt, Homo sapiens
  misc_RNA (1)...(19): siRNA sense strand
gcuacaagguacgaaacca

SEQ ID NO: 423778 - RNA, 19 nt, Homo sapiens
  misc_RNA (1)...(19): siRNA sense strand
cacuggagccucauuaugg

SEQ ID NO: 423779 - RNA, 19 nt, Homo sapiens
  misc_RNA (1)...(19): siRNA sense strand
cggccaacacugucaaguu

SEQ ID NO: 423780 - RNA, 19 nt, Homo sapiens
  misc_RNA (1)...(19): siRNA sense strand
acuggagccucauuaugga

SEQ ID NO: 423781 - RNA, 19 nt, Homo sapiens
  misc_RNA (1)...(19): siRNA sense strand
uaagcaggagcaucgcauu

SEQ ID NO: 423782 - RNA, 19 nt, Homo sapiens
  misc_RNA (1)...(19): siRNA sense strand
ggagccucauuauggaaag

SEQ ID NO: 423783 - RNA, 19 nt, Homo sapiens
  misc_RNA (1)...(19): siRNA sense strand
ggccaacacugucaaguuu

SEQ ID NO: 423784 - RNA, 19 nt, Homo sapiens
  misc_RNA (1)...(19): siRNA sense strand
gaauacggguccaucaauc

SEQ ID NO: 423785 - RNA, 19 nt, Homo sapiens
  misc_RNA (1)...(19): siRNA sense strand
gcaggagcaucgcauugga

SEQ ID NO: 423786 - RNA, 19 nt, Homo sapiens
  misc_RNA (1)...(19): siRNA sense strand
caucugacaagggaaauua

SEQ ID NO: 423787 - RNA, 19 nt, Homo sapiens
  misc_RNA (1)...(19): siRNA sense strand
gcaccauacuggaccaaca

SEQ ID NO: 423788 - RNA, 19 nt, Homo sapiens
  misc_RNA (1)...(19): siRNA sense strand
gcacuggagccucauuaug

SEQ ID NO: 423789 - RNA, 19 nt, Homo sapiens
  misc_RNA (1)...(19): siRNA sense strand
aaaguguggucccaucuga

SEQ ID NO: 423790 - RNA, 19 nt, Homo sapiens
  misc_RNA (1)...(19): siRNA sense strand
cauuggaggcuacaaggua

SEQ ID NO: 423791 - RNA, 19 nt, Homo sapiens
  misc_RNA (1)...(19): siRNA sense strand
aguugaggauaccacauua

SEQ ID NO: 423792 - RNA, 19 nt, Homo sapiens
  misc_RNA (1)...(19): siRNA sense strand
gaaaguguggucccaucug

SEQ ID NO: 423793 - RNA, 19 nt, Homo sapiens
  misc_RNA (1)...(19): siRNA sense strand
cagcacuggagccucauua

SEQ ID NO: 423794 - RNA, 19 nt, Homo sapiens
  misc_RNA (1)...(19): siRNA sense strand
ggaacccaaugccaaccau

SEQ ID NO: 423795 - RNA, 19 nt, Homo sapiens
  misc_RNA (1)...(19): siRNA sense strand
ugaauacggguccaucaau

SEQ ID NO: 423796 - RNA, 19 nt, Homo sapiens
  misc_RNA (1)...(19): siRNA sense strand
acacguaccaccuggaugu

SEQ ID NO: 423797 - RNA, 19 nt, Homo sapiens
  misc_RNA (1)...(19): siRNA sense strand
ucugacaagggaaauuaua

SEQ ID NO: 423798 - RNA, 19 nt, Homo sapiens
  misc_RNA (1)...(19): siRNA sense strand
cauacuggaccaacacaga

SEQ ID NO: 423799 - RNA, 19 nt, Homo sapiens
  misc_RNA (1)...(19): siRNA sense strand
ccaacacugucaaguuucg

SEQ ID NO: 423800 - RNA, 19 nt, Homo sapiens
  misc_RNA (1)...(19): siRNA sense strand
gaggcuacaagguacgaaa

SEQ ID NO: 423801 - RNA, 19 nt, Homo sapiens
  misc_RNA (1)...(19): siRNA sense strand
cguaccaccuggauguugu

SEQ ID NO: 423802 - RNA, 19 nt, Homo sapiens
  misc_RNA (1)...(19): siRNA sense strand
ucaguuuaguugaggauac

SEQ ID NO: 423803 - RNA, 19 nt, Homo sapiens
  misc_RNA (1)...(19): siRNA sense strand
ggaaaguguggucccaucu

SEQ ID NO: 423804 - RNA, 19 nt, Homo sapiens
  misc_RNA (1)...(19): siRNA sense strand
uaguugaggauaccacauu

SEQ ID NO: 423805 - RNA, 19 nt, Homo sapiens
  misc_RNA (1)...(19): siRNA sense strand
gcuacaagguacgaaacca

SEQ ID NO: 423806 - RNA, 19 nt, Homo sapiens
  misc_RNA (1)...(19): siRNA sense strand
cacuggagccucauuaugg

SEQ ID NO: 423807 - RNA, 19 nt, Homo sapiens
  misc_RNA (1)...(19): siRNA sense strand
cggccaacacugucaaguu

SEQ ID NO: 423808 - RNA, 19 nt, Homo sapiens
  misc_RNA (1)...(19): siRNA sense strand
acuggagccucauuaugga

SEQ ID NO: 423809 - RNA, 19 nt, Homo sapiens
  misc_RNA (1)...(19): siRNA sense strand
uaagcaggagcaucgcauu

SEQ ID NO: 423810 - RNA, 19 nt, Homo sapiens
  misc_RNA (1)...(19): siRNA sense strand
ggagccucauuauggaaag

SEQ ID NO: 423811 - RNA, 19 nt, Homo sapiens
  misc_RNA (1)...(19): siRNA sense strand
ggccaacacugucaaguuu

SEQ ID NO: 423812 - RNA, 19 nt, Homo sapiens
  misc_RNA (1)...(19): siRNA sense strand
gaauacggguccaucaauc

SEQ ID NO: 423813 - RNA, 19 nt, Homo sapiens
  misc_RNA (1)...(19): siRNA sense strand
gcaggagcaucgcauugga

SEQ ID NO: 423814 - RNA, 19 nt, Homo sapiens
  misc_RNA (1)...(19): siRNA sense strand
caucugacaagggaaauua

SEQ ID NO: 423815 - RNA, 19 nt, Homo sapiens
  misc_RNA (1)...(19): siRNA sense strand
gcaccauacuggaccaaca

SEQ ID NO: 423816 - RNA, 19 nt, Homo sapiens
  misc_RNA (1)...(19): siRNA sense strand
gcacuggagccucauuaug

SEQ ID NO: 423817 - RNA, 19 nt, Homo sapiens
  misc_RNA (1)...(19): siRNA sense strand
aaaguguggucccaucuga

SEQ ID NO: 423818 - RNA, 19 nt, Homo sapiens
  misc_RNA (1)...(19): siRNA sense strand
cauuggaggcuacaaggua

SEQ ID NO: 423819 - RNA, 19 nt, Homo sapiens
  misc_RNA (1)...(19): siRNA sense strand
aguugaggauaccacauua

SEQ ID NO: 423820 - RNA, 19 nt, Homo sapiens
  misc_RNA (1)...(19): siRNA sense strand
gaaaguguggucccaucug

SEQ ID NO: 423821 - RNA, 19 nt, Homo sapiens
  misc_RNA (1)...(19): siRNA sense strand
cagcacuggagccucauua

SEQ ID NO: 423822 - RNA, 19 nt, Homo sapiens
  misc_RNA (1)...(19): siRNA sense strand
ggaacccaaugccaaccau

SEQ ID NO: 423823 - RNA, 19 nt, Homo sapiens
  misc_RNA (1)...(19): siRNA sense strand
ugaauacggguccaucaau

SEQ ID NO: 423824 - RNA, 19 nt, Homo sapiens
  misc_RNA (1)...(19): siRNA sense strand
acacguaccaccuggaugu

SEQ ID NO: 423825 - RNA, 19 nt, Homo sapiens
  misc_RNA (1)...(19): siRNA sense strand
ucugacaagggaaauuaua

SEQ ID NO: 423826 - RNA, 19 nt, Homo sapiens
  misc_RNA (1)...(19): siRNA sense strand
cauacuggaccaacacaga

SEQ ID NO: 423827 - RNA, 19 nt, Homo sapiens
  misc_RNA (1)...(19): siRNA sense strand
ccaacacugucaaguuucg

SEQ ID NO: 423828 - RNA, 19 nt, Homo sapiens
  misc_RNA (1)...(19): siRNA sense strand
gaggcuacaagguacgaaa

SEQ ID NO: 423829 - RNA, 19 nt, Homo sapiens
  misc_RNA (1)...(19): siRNA sense strand
cguaccaccuggauguugu

SEQ ID NO: 423830 - RNA, 19 nt, Homo sapiens
  misc_RNA (1)...(19): siRNA sense strand
ucaguuuaguugaggauac

SEQ ID NO: 423831 - RNA, 19 nt, Homo sapiens
  misc_RNA (1)...(19): siRNA sense strand
ggaaaguguggucccaucu

SEQ ID NO: 423832 - RNA, 19 nt, Homo sapiens
  misc_RNA (1)...(19): siRNA sense strand
uaguugaggauaccacauu

SEQ ID NO: 423833 - RNA, 19 nt, Homo sapiens
  misc_RNA (1)...(19): siRNA sense strand
gcuacaagguacgaaacca

SEQ ID NO: 423834 - RNA, 19 nt, Homo sapiens
  misc_RNA (1)...(19): siRNA sense strand
cacuggagccucauuaugg

SEQ ID NO: 423835 - RNA, 19 nt, Homo sapiens
  misc_RNA (1)...(19): siRNA sense strand
cggccaacacugucaaguu

SEQ ID NO: 423836 - RNA, 19 nt, Homo sapiens
  misc_RNA (1)...(19): siRNA sense strand
acuggagccucauuaugga

SEQ ID NO: 423837 - RNA, 19 nt, Homo sapiens
  misc_RNA (1)...(19): siRNA sense strand
uaagcaggagcaucgcauu

SEQ ID NO: 423838 - RNA, 19 nt, Homo sapiens
  misc_RNA (1)...(19): siRNA sense strand
ggagccucauuauggaaag

SEQ ID NO: 423839 - RNA, 19 nt, Homo sapiens
  misc_RNA (1)...(19): siRNA sense strand
ggccaacacugucaaguuu

SEQ ID NO: 423840 - RNA, 19 nt, Homo sapiens
  misc_RNA (1)...(19): siRNA sense strand
gaauacggguccaucaauc

SEQ ID NO: 423841 - RNA, 19 nt, Homo sapiens
  misc_RNA (1)...(19): siRNA sense strand
gcaggagcaucgcauugga

SEQ ID NO: 423842 - RNA, 19 nt, Homo sapiens
  misc_RNA (1)...(19): siRNA sense strand
caucugacaagggaaauua

SEQ ID NO: 423843 - RNA, 19 nt, Homo sapiens
  misc_RNA (1)...(19): siRNA sense strand
gcaccauacuggaccaaca

SEQ ID NO: 423844 - RNA, 19 nt, Homo sapiens
  misc_RNA (1)...(19): siRNA sense strand
gcacuggagccucauuaug

SEQ ID NO: 423845 - RNA, 19 nt, Homo sapiens
  misc_RNA (1)...(19): siRNA sense strand
aaaguguggucccaucuga

SEQ ID NO: 423846 - RNA, 19 nt, Homo sapiens
  misc_RNA (1)...(19): siRNA sense strand
cauuggaggcuacaaggua

SEQ ID NO: 423847 - RNA, 19 nt, Homo sapiens
  misc_RNA (1)...(19): siRNA sense strand
aguugaggauaccacauua

SEQ ID NO: 423848 - RNA, 19 nt, Homo sapiens
  misc_RNA (1)...(19): siRNA sense strand
gaaaguguggucccaucug

SEQ ID NO: 423849 - RNA, 19 nt, Homo sapiens
  misc_RNA (1)...(19): siRNA sense strand
cagcacuggagccucauua

SEQ ID NO: 423850 - RNA, 19 nt, Homo sapiens
  misc_RNA (1)...(19): siRNA sense strand
ggaacccaaugccaaccau

SEQ ID NO: 423851 - RNA, 19 nt, Homo sapiens
  misc_RNA (1)...(19): siRNA sense strand
ugaauacggguccaucaau

SEQ ID NO: 423852 - RNA, 19 nt, Homo sapiens
  misc_RNA (1)...(19): siRNA sense strand
acacguaccaccuggaugu

SEQ ID NO: 423853 - RNA, 19 nt, Homo sapiens
  misc_RNA (1)...(19): siRNA sense strand
ucugacaagggaaauuaua

SEQ ID NO: 423854 - RNA, 19 nt, Homo sapiens
  misc_RNA (1)...(19): siRNA sense strand
cauacuggaccaacacaga

SEQ ID NO: 423855 - RNA, 19 nt, Homo sapiens
  misc_RNA (1)...(19): siRNA sense strand
ccaacacugucaaguuucg

SEQ ID NO: 423856 - RNA, 19 nt, Homo sapiens
  misc_RNA (1)...(19): siRNA sense strand
gaggcuacaagguacgaaa

SEQ ID NO: 423857 - RNA, 19 nt, Homo sapiens
  misc_RNA (1)...(19): siRNA sense strand
cguaccaccuggauguugu

SEQ ID NO: 423858 - RNA, 19 nt, Homo sapiens
  misc_RNA (1)...(19): siRNA sense strand
ucaguuuaguugaggauac

SEQ ID NO: 423859 - RNA, 19 nt, Homo sapiens
  misc_RNA (1)...(19): siRNA sense strand
ggaaaguguggucccaucu

SEQ ID NO: 423860 - RNA, 19 nt, Homo sapiens
  misc_RNA (1)...(19): siRNA sense strand
uaguugaggauaccacauu

SEQ ID NO: 423861 - RNA, 19 nt, Homo sapiens
  misc_RNA (1)...(19): siRNA sense strand
gcuacaagguacgaaacca

SEQ ID NO: 423862 - RNA, 19 nt, Homo sapiens
  misc_RNA (1)...(19): siRNA sense strand
cacuggagccucauuaugg

SEQ ID NO: 423863 - RNA, 19 nt, Homo sapiens
  misc_RNA (1)...(19): siRNA sense strand
cggccaacacugucaaguu

SEQ ID NO: 423864 - RNA, 19 nt, Homo sapiens
  misc_RNA (1)...(19): siRNA sense strand
acuggagccucauuaugga

SEQ ID NO: 423865 - RNA, 19 nt, Homo sapiens
  misc_RNA (1)...(19): siRNA sense strand
uaagcaggagcaucgcauu

SEQ ID NO: 423866 - RNA, 19 nt, Homo sapiens
  misc_RNA (1)...(19): siRNA sense strand
ggagccucauuauggaaag

SEQ ID NO: 423867 - RNA, 19 nt, Homo sapiens
  misc_RNA (1)...(19): siRNA sense strand
ggccaacacugucaaguuu

SEQ ID NO: 423868 - RNA, 19 nt, Homo sapiens
  misc_RNA (1)...(19): siRNA sense strand
gaauacggguccaucaauc

SEQ ID NO: 423869 - RNA, 19 nt, Homo sapiens
  misc_RNA (1)...(19): siRNA sense strand
gcaggagcaucgcauugga

SEQ ID NO: 423870 - RNA, 19 nt, Homo sapiens
  misc_RNA (1)...(19): siRNA sense strand
caucugacaagggaaauua

SEQ ID NO: 423871 - RNA, 19 nt, Homo sapiens
  misc_RNA (1)...(19): siRNA sense strand
gcaccauacuggaccaaca

SEQ ID NO: 423872 - RNA, 19 nt, Homo sapiens
  misc_RNA (1)...(19): siRNA sense strand
gcacuggagccucauuaug

SEQ ID NO: 423873 - RNA, 19 nt, Homo sapiens
  misc_RNA (1)...(19): siRNA sense strand
aaaguguggucccaucuga

SEQ ID NO: 423874 - RNA, 19 nt, Homo sapiens
  misc_RNA (1)...(19): siRNA sense strand
cauuggaggcuacaaggua

SEQ ID NO: 423875 - RNA, 19 nt, Homo sapiens
  misc_RNA (1)...(19): siRNA sense strand
aguugaggauaccacauua

SEQ ID NO: 423876 - RNA, 19 nt, Homo sapiens
  misc_RNA (1)...(19): siRNA sense strand
gaaaguguggucccaucug

SEQ ID NO: 423877 - RNA, 19 nt, Homo sapiens
  misc_RNA (1)...(19): siRNA sense strand
cagcacuggagccucauua

SEQ ID NO: 423878 - RNA, 19 nt, Homo sapiens
  misc_RNA (1)...(19): siRNA sense strand
ggaacccaaugccaaccau

SEQ ID NO: 423879 - RNA, 19 nt, Homo sapiens
  misc_RNA (1)...(19): siRNA sense strand
ugaauacggguccaucaau

SEQ ID NO: 423880 - RNA, 19 nt, Homo sapiens
  misc_RNA (1)...(19): siRNA sense strand
acacguaccaccuggaugu

SEQ ID NO: 423881 - RNA, 19 nt, Homo sapiens
  misc_RNA (1)...(19): siRNA sense strand
ucugacaagggaaauuaua

SEQ ID NO: 423882 - RNA, 19 nt, Homo sapiens
  misc_RNA (1)...(19): siRNA sense strand
cauacuggaccaacacaga

SEQ ID NO: 423883 - RNA, 19 nt, Homo sapiens
  misc_RNA (1)...(19): siRNA sense strand
ccaacacugucaaguuucg

SEQ ID NO: 423884 - RNA, 19 nt, Homo sapiens
  misc_RNA (1)...(19): siRNA sense strand
gaggcuacaagguacgaaa

SEQ ID NO: 423885 - RNA, 19 nt, Homo sapiens
  misc_RNA (1)...(19): siRNA sense strand
cguaccaccuggauguugu

SEQ ID NO: 423886 - RNA, 19 nt, Homo sapiens
  misc_RNA (1)...(19): siRNA sense strand
ucaguuuaguugaggauac

SEQ ID NO: 423887 - RNA, 19 nt, Homo sapiens
  misc_RNA (1)...(19): siRNA sense strand
ggaaaguguggucccaucu

SEQ ID NO: 423888 - RNA, 19 nt, Homo sapiens
  misc_RNA (1)...(19): siRNA sense strand
uaguugaggauaccacauu

SEQ ID NO: 423889 - RNA, 19 nt, Homo sapiens
  misc_RNA (1)...(19): siRNA sense strand
gcuacaagguacgaaacca

SEQ ID NO: 423890 - RNA, 19 nt, Homo sapiens
  misc_RNA (1)...(19): siRNA sense strand
cacuggagccucauuaugg

SEQ ID NO: 423891 - RNA, 19 nt, Homo sapiens
  misc_RNA (1)...(19): siRNA sense strand
cggccaacacugucaaguu

SEQ ID NO: 423892 - RNA, 19 nt, Homo sapiens
  misc_RNA (1)...(19): siRNA sense strand
acuggagccucauuaugga

SEQ ID NO: 423893 - RNA, 19 nt, Homo sapiens
  misc_RNA (1)...(19): siRNA sense strand
uaagcaggagcaucgcauu

SEQ ID NO: 423894 - RNA, 19 nt, Homo sapiens
  misc_RNA (1)...(19): siRNA sense strand
ggagccucauuauggaaag

SEQ ID NO: 423895 - RNA, 19 nt, Homo sapiens
  misc_RNA (1)...(19): siRNA sense strand
ggccaacacugucaaguuu

SEQ ID NO: 423896 - RNA, 19 nt, Homo sapiens
  misc_RNA (1)...(19): siRNA sense strand
gaauacggguccaucaauc

SEQ ID NO: 423897 - RNA, 19 nt, Homo sapiens
  misc_RNA (1)...(19): siRNA sense strand
gcaggagcaucgcauugga

SEQ ID NO: 423898 - RNA, 19 nt, Homo sapiens
  misc_RNA (1)...(19): siRNA sense strand
caucugacaagggaaauua

SEQ ID NO: 423899 - RNA, 19 nt, Homo sapiens
  misc_RNA (1)...(19): siRNA sense strand
gcaccauacuggaccaaca

SEQ ID NO: 423900 - RNA, 19 nt, Homo sapiens
  misc_RNA (1)...(19): siRNA sense strand
gcacuggagccucauuaug

SEQ ID NO: 423901 - RNA, 19 nt, Homo sapiens
  misc_RNA (1)...(19): siRNA sense strand
aaaguguggucccaucuga

SEQ ID NO: 423902 - RNA, 19 nt, Homo sapiens
  misc_RNA (1)...(19): siRNA sense strand
cauuggaggcuacaaggua

SEQ ID NO: 423903 - RNA, 19 nt, Homo sapiens
  misc_RNA (1)...(19): siRNA sense strand
aguugaggauaccacauua

SEQ ID NO: 423904 - RNA, 19 nt, Homo sapiens
  misc_RNA (1)...(19): siRNA sense strand
gaaaguguggucccaucug

SEQ ID NO: 423905 - RNA, 19 nt, Homo sapiens
  misc_RNA (1)...(19): siRNA sense strand
cagcacuggagccucauua

SEQ ID NO: 423906 - RNA, 19 nt, Homo sapiens
  misc_RNA (1)...(19): siRNA sense strand
ggaacccaaugccaaccau

SEQ ID NO: 423907 - RNA, 19 nt, Homo sapiens
  misc_RNA (1)...(19): siRNA sense strand
ugaauacggguccaucaau

SEQ ID NO: 423908 - RNA, 19 nt, Homo sapiens
  misc_RNA (1)...(19): siRNA sense strand
acacguaccaccuggaugu

SEQ ID NO: 423909 - RNA, 19 nt, Homo sapiens
  misc_RNA (1)...(19): siRNA sense strand
ucugacaagggaaauuaua

SEQ ID NO: 423910 - RNA, 19 nt, Homo sapiens
  misc_RNA (1)...(19): siRNA sense strand
cauacuggaccaacacaga

SEQ ID NO: 423911 - RNA, 19 nt, Homo sapiens
  misc_RNA (1)...(19): siRNA sense strand
ccaacacugucaaguuucg

SEQ ID NO: 423912 - RNA, 19 nt, Homo sapiens
  misc_RNA (1)...(19): siRNA sense strand
gaggcuacaagguacgaaa

SEQ ID NO: 423913 - RNA, 19 nt, Homo sapiens
  misc_RNA (1)...(19): siRNA sense strand
cguaccaccuggauguugu

SEQ ID NO: 423914 - RNA, 19 nt, Homo sapiens
  misc_RNA (1)...(19): siRNA sense strand
ucaguuuaguugaggauac

SEQ ID NO: 423915 - RNA, 19 nt, Homo sapiens
  misc_RNA (1)...(19): siRNA sense strand
ggaaaguguggucccaucu

SEQ ID NO: 423916 - RNA, 19 nt, Homo sapiens
  misc_RNA (1)...(19): siRNA sense strand
uaguugaggauaccacauu

SEQ ID NO: 423917 - RNA, 19 nt, Homo sapiens
  misc_RNA (1)...(19): siRNA sense strand
gcuacaagguacgaaacca

SEQ ID NO: 423918 - RNA, 19 nt, Homo sapiens
  misc_RNA (1)...(19): siRNA sense strand
cacuggagccucauuaugg

SEQ ID NO: 423919 - RNA, 19 nt, Homo sapiens
  misc_RNA (1)...(19): siRNA sense strand
cggccaacacugucaaguu

SEQ ID NO: 423920 - RNA, 19 nt, Homo sapiens
  misc_RNA (1)...(19): siRNA sense strand
acuggagccucauuaugga

SEQ ID NO: 423921 - RNA, 19 nt, Homo sapiens
  misc_RNA (1)...(19): siRNA sense strand
uaagcaggagcaucgcauu

SEQ ID NO: 423922 - RNA, 19 nt, Homo sapiens
  misc_RNA (1)...(19): siRNA sense strand
ggagccucauuauggaaag

SEQ ID NO: 423923 - RNA, 19 nt, Homo sapiens
  misc_RNA (1)...(19): siRNA sense strand
ggccaacacugucaaguuu

SEQ ID NO: 423924 - RNA, 19 nt, Homo sapiens
  misc_RNA (1)...(19): siRNA sense strand
gaauacggguccaucaauc

SEQ ID NO: 423925 - RNA, 19 nt, Homo sapiens
  misc_RNA (1)...(19): siRNA sense strand
gcaggagcaucgcauugga

SEQ ID NO: 423926 - RNA, 19 nt, Homo sapiens
  misc_RNA (1)...(19): siRNA sense strand
caucugacaagggaaauua

SEQ ID NO: 423927 - RNA, 19 nt, Homo sapiens
  misc_RNA (1)...(19): siRNA sense strand
gcaccauacuggaccaaca

SEQ ID NO: 423928 - RNA, 19 nt, Homo sapiens
  misc_RNA (1)...(19): siRNA sense strand
gcacuggagccucauuaug

SEQ ID NO: 423929 - RNA, 19 nt, Homo sapiens
  misc_RNA (1)...(19): siRNA sense strand
aaaguguggucccaucuga

SEQ ID NO: 423930 - RNA, 19 nt, Homo sapiens
  misc_RNA (1)...(19): siRNA sense strand
cauuggaggcuacaaggua

SEQ ID NO: 423931 - RNA, 19 nt, Homo sapiens
  misc_RNA (1)...(19): siRNA sense strand
aguugaggauaccacauua

SEQ ID NO: 423932 - RNA, 19 nt, Homo sapiens
  misc_RNA (1)...(19): siRNA sense strand
gaaaguguggucccaucug

SEQ ID NO: 423933 - RNA, 19 nt, Homo sapiens
  misc_RNA (1)...(19): siRNA sense strand
cagcacuggagccucauua

SEQ ID NO: 423934 - RNA, 19 nt, Homo sapiens
  misc_RNA (1)...(19): siRNA sense strand
ggaacccaaugccaaccau

SEQ ID NO: 423935 - RNA, 19 nt, Homo sapiens
  misc_RNA (1)...(19): siRNA sense strand
ugaauacggguccaucaau

SEQ ID NO: 423936 - RNA, 19 nt, Homo sapiens
  misc_RNA (1)...(19): siRNA sense strand
acacguaccaccuggaugu

SEQ ID NO: 423937 - RNA, 19 nt, Homo sapiens
  misc_RNA (1)...(19): siRNA sense strand
ucugacaagggaaauuaua

SEQ ID NO: 423938 - RNA, 19 nt, Homo sapiens
  misc_RNA (1)...(19): siRNA sense strand
cauacuggaccaacacaga

SEQ ID NO: 423939 - RNA, 19 nt, Homo sapiens
  misc_RNA (1)...(19): siRNA sense strand
ccaacacugucaaguuucg

SEQ ID NO: 423940 - RNA, 19 nt, Homo sapiens
  misc_RNA (1)...(19): siRNA sense strand
gaggcuacaagguacgaaa

SEQ ID NO: 423941 - RNA, 19 nt, Homo sapiens
  misc_RNA (1)...(19): siRNA sense strand
cguaccaccuggauguugu

SEQ ID NO: 423942 - RNA, 19 nt, Homo sapiens
  misc_RNA (1)...(19): siRNA sense strand
ucaguuuaguugaggauac

SEQ ID NO: 423943 - RNA, 19 nt, Homo sapiens
  misc_RNA (1)...(19): siRNA sense strand
ggaaaguguggucccaucu

SEQ ID NO: 423944 - RNA, 19 nt, Homo sapiens
  misc_RNA (1)...(19): siRNA sense strand
uaguugaggauaccacauu

SEQ ID NO: 423945 - RNA, 19 nt, Homo sapiens
  misc_RNA (1)...(19): siRNA sense strand
gcuacaagguacgaaacca

SEQ ID NO: 423946 - RNA, 19 nt, Homo sapiens
  misc_RNA (1)...(19): siRNA sense strand
cacuggagccucauuaugg

SEQ ID NO: 423947 - RNA, 19 nt, Homo sapiens
  misc_RNA (1)...(19): siRNA sense strand
cggccaacacugucaaguu

SEQ ID NO: 423948 - RNA, 19 nt, Homo sapiens
  misc_RNA (1)...(19): siRNA sense strand
acuggagccucauuaugga

SEQ ID NO: 423949 - RNA, 19 nt, Homo sapiens
  misc_RNA (1)...(19): siRNA sense strand
uaagcaggagcaucgcauu

SEQ ID NO: 423950 - RNA, 19 nt, Homo sapiens
  misc_RNA (1)...(19): siRNA sense strand
ggagccucauuauggaaag

SEQ ID NO: 423951 - RNA, 19 nt, Homo sapiens
  misc_RNA (1)...(19): siRNA sense strand
ggccaacacugucaaguuu

SEQ ID NO: 423952 - RNA, 19 nt, Homo sapiens
  misc_RNA (1)...(19): siRNA sense strand
gaauacggguccaucaauc

SEQ ID NO: 423953 - RNA, 19 nt, Homo sapiens
  misc_RNA (1)...(19): siRNA sense strand
gcaggagcaucgcauugga

SEQ ID NO: 423954 - RNA, 19 nt, Homo sapiens
  misc_RNA (1)...(19): siRNA sense strand
caucugacaagggaaauua

SEQ ID NO: 423955 - RNA, 19 nt, Homo sapiens
  misc_RNA (1)...(19): siRNA sense strand
gcaccauacuggaccaaca

SEQ ID NO: 423956 - RNA, 19 nt, Homo sapiens
  misc_RNA (1)...(19): siRNA sense strand
gcacuggagccucauuaug

SEQ ID NO: 423957 - RNA, 19 nt, Homo sapiens
  misc_RNA (1)...(19): siRNA sense strand
aaaguguggucccaucuga

SEQ ID NO: 423958 - RNA, 19 nt, Homo sapiens
  misc_RNA (1)...(19): siRNA sense strand
cauuggaggcuacaaggua

SEQ ID NO: 423959 - RNA, 19 nt, Homo sapiens
  misc_RNA (1)...(19): siRNA sense strand
aguugaggauaccacauua

SEQ ID NO: 423960 - RNA, 19 nt, Homo sapiens
  misc_RNA (1)...(19): siRNA sense strand
gaaaguguggucccaucug

SEQ ID NO: 423961 - RNA, 19 nt, Homo sapiens
  misc_RNA (1)...(19): siRNA sense strand
cagcacuggagccucauua

SEQ ID NO: 423962 - RNA, 19 nt, Homo sapiens
  misc_RNA (1)...(19): siRNA sense strand
ggaacccaaugccaaccau

SEQ ID NO: 423963 - RNA, 19 nt, Homo sapiens
  misc_RNA (1)...(19): siRNA sense strand
ugaauacggguccaucaau

SEQ ID NO: 423964 - RNA, 19 nt, Homo sapiens
  misc_RNA (1)...(19): siRNA sense strand
acacguaccaccuggaugu

SEQ ID NO: 423965 - RNA, 19 nt, Homo sapiens
  misc_RNA (1)...(19): siRNA sense strand
ucugacaagggaaauuaua

SEQ ID NO: 423966 - RNA, 19 nt, Homo sapiens
  misc_RNA (1)...(19): siRNA sense strand
cauacuggaccaacacaga

SEQ ID NO: 423967 - RNA, 19 nt, Homo sapiens
  misc_RNA (1)...(19): siRNA sense strand
ccaacacugucaaguuucg

SEQ ID NO: 423968 - RNA, 19 nt, Homo sapiens
  misc_RNA (1)...(19): siRNA sense strand
gaggcuacaagguacgaaa

SEQ ID NO: 423969 - RNA, 19 nt, Homo sapiens
  misc_RNA (1)...(19): siRNA sense strand
cguaccaccuggauguugu

SEQ ID NO: 423970 - RNA, 19 nt, Homo sapiens
  misc_RNA (1)...(19): siRNA sense strand
ucaguuuaguugaggauac

SEQ ID NO: 423971 - RNA, 19 nt, Homo sapiens
  misc_RNA (1)...(19): siRNA sense strand
ggaaaguguggucccaucu

SEQ ID NO: 423972 - RNA, 19 nt, Homo sapiens
  misc_RNA (1)...(19): siRNA sense strand
uaguugaggauaccacauu

SEQ ID NO: 423973 - RNA, 19 nt, Homo sapiens
  misc_RNA (1)...(19): siRNA sense strand
gcuacaagguacgaaacca

SEQ ID NO: 423974 - RNA, 19 nt, Homo sapiens
  misc_RNA (1)...(19): siRNA sense strand
cacuggagccucauuaugg

SEQ ID NO: 423975 - RNA, 19 nt, Homo sapiens
  misc_RNA (1)...(19): siRNA sense strand
cggccaacacugucaaguu

SEQ ID NO: 423976 - RNA, 19 nt, Homo sapiens
  misc_RNA (1)...(19): siRNA sense strand
acuggagccucauuaugga

SEQ ID NO: 423977 - RNA, 19 nt, Homo sapiens
  misc_RNA (1)...(19): siRNA sense strand
uaagcaggagcaucgcauu

SEQ ID NO: 423978 - RNA, 19 nt, Homo sapiens
  misc_RNA (1)...(19): siRNA sense strand
ggagccucauuauggaaag

SEQ ID NO: 423979 - RNA, 19 nt, Homo sapiens
  misc_RNA (1)...(19): siRNA sense strand
ggccaacacugucaaguuu

SEQ ID NO: 423980 - RNA, 19 nt, Homo sapiens
  misc_RNA (1)...(19): siRNA sense strand
gaauacggguccaucaauc

SEQ ID NO: 423981 - RNA, 19 nt, Homo sapiens
  misc_RNA (1)...(19): siRNA sense strand
gcaggagcaucgcauugga

SEQ ID NO: 423982 - RNA, 19 nt, Homo sapiens
  misc_RNA (1)...(19): siRNA sense strand
caucugacaagggaaauua

SEQ ID NO: 423983 - RNA, 19 nt, Homo sapiens
  misc_RNA (1)...(19): siRNA sense strand
gcaccauacuggaccaaca

SEQ ID NO: 423984 - RNA, 19 nt, Homo sapiens
  misc_RNA (1)...(19): siRNA sense strand
gcacuggagccucauuaug

SEQ ID NO: 423985 - RNA, 19 nt, Homo sapiens
  misc_RNA (1)...(19): siRNA sense strand
aaaguguggucccaucuga

SEQ ID NO: 423986 - RNA, 19 nt, Homo sapiens
  misc_RNA (1)...(19): siRNA sense strand
cauuggaggcuacaaggua

SEQ ID NO: 423987 - RNA, 19 nt, Homo sapiens
  misc_RNA (1)...(19): siRNA sense strand
aguugaggauaccacauua

SEQ ID NO: 423988 - RNA, 19 nt, Homo sapiens
  misc_RNA (1)...(19): siRNA sense strand
gaaaguguggucccaucug

SEQ ID NO: 423989 - RNA, 19 nt, Homo sapiens
  misc_RNA (1)...(19): siRNA sense strand
cagcacuggagccucauua

SEQ ID NO: 423990 - RNA, 19 nt, Homo sapiens
  misc_RNA (1)...(19): siRNA sense strand
ggaacccaaugccaaccau

SEQ ID NO: 423991 - RNA, 19 nt, Homo sapiens
  misc_RNA (1)...(19): siRNA sense strand
ugaauacggguccaucaau

SEQ ID NO: 423992 - RNA, 19 nt, Homo sapiens
  misc_RNA (1)...(19): siRNA sense strand
acacguaccaccuggaugu

SEQ ID NO: 423993 - RNA, 19 nt, Homo sapiens
  misc_RNA (1)...(19): siRNA sense strand
ucugacaagggaaauuaua

SEQ ID NO: 423994 - RNA, 19 nt, Homo sapiens
  misc_RNA (1)...(19): siRNA sense strand
cauacuggaccaacacaga

SEQ ID NO: 423995 - RNA, 19 nt, Homo sapiens
  misc_RNA (1)...(19): siRNA sense strand
ccaacacugucaaguuucg

SEQ ID NO: 423996 - RNA, 19 nt, Homo sapiens
  misc_RNA (1)...(19): siRNA sense strand
gaggcuacaagguacgaaa

SEQ ID NO: 423997 - RNA, 19 nt, Homo sapiens
  misc_RNA (1)...(19): siRNA sense strand
cguaccaccuggauguugu

SEQ ID NO: 423998 - RNA, 19 nt, Homo sapiens
  misc_RNA (1)...(19): siRNA sense strand
ucaguuuaguugaggauac

SEQ ID NO: 423999 - RNA, 19 nt, Homo sapiens
  misc_RNA (1)...(19): siRNA sense strand
ggaaaguguggucccaucu

SEQ ID NO: 424000 - RNA, 19 nt, Homo sapiens
  misc_RNA (1)...(19): siRNA sense strand
uaguugaggauaccacauu

SEQ ID NO: 424001 - RNA, 19 nt, Homo sapiens
  misc_RNA (1)...(19): siRNA sense strand
gcuacaagguacgaaacca

SEQ ID NO: 424002 - RNA, 19 nt, Homo sapiens
  misc_RNA (1)...(19): siRNA sense strand
cacuggagccucauuaugg

SEQ ID NO: 424003 - RNA, 19 nt, Homo sapiens
  misc_RNA (1)...(19): siRNA sense strand
cggccaacacugucaaguu

SEQ ID NO: 424004 - RNA, 19 nt, Homo sapiens
  misc_RNA (1)...(19): siRNA sense strand
acuggagccucauuaugga

SEQ ID NO: 424005 - RNA, 19 nt, Homo sapiens
  misc_RNA (1)...(19): siRNA sense strand
uaagcaggagcaucgcauu

SEQ ID NO: 424006 - RNA, 19 nt, Homo sapiens
  misc_RNA (1)...(19): siRNA sense strand
ggagccucauuauggaaag

SEQ ID NO: 424007 - RNA, 19 nt, Homo sapiens
  misc_RNA (1)...(19): siRNA sense strand
ggccaacacugucaaguuu

SEQ ID NO: 424008 - RNA, 19 nt, Homo sapiens
  misc_RNA (1)...(19): siRNA sense strand
gaauacggguccaucaauc

SEQ ID NO: 424009 - RNA, 19 nt, Homo sapiens
  misc_RNA (1)...(19): siRNA sense strand
gcaggagcaucgcauugga

SEQ ID NO: 424010 - RNA, 19 nt, Homo sapiens
  misc_RNA (1)...(19): siRNA sense strand
caucugacaagggaaauua

SEQ ID NO: 424011 - RNA, 19 nt, Homo sapiens
  misc_RNA (1)...(19): siRNA sense strand
gcaccauacuggaccaaca

SEQ ID NO: 424012 - RNA, 19 nt, Homo sapiens
  misc_RNA (1)...(19): siRNA sense strand
gcacuggagccucauuaug

SEQ ID NO: 424013 - RNA, 19 nt, Homo sapiens
  misc_RNA (1)...(19): siRNA sense strand
aaaguguggucccaucuga

SEQ ID NO: 424014 - RNA, 19 nt, Homo sapiens
  misc_RNA (1)...(19): siRNA sense strand
cauuggaggcuacaaggua

SEQ ID NO: 424015 - RNA, 19 nt, Homo sapiens
  misc_RNA (1)...(19): siRNA sense strand
aguugaggauaccacauua

SEQ ID NO: 424016 - RNA, 19 nt, Homo sapiens
  misc_RNA (1)...(19): siRNA sense strand
gaaaguguggucccaucug

SEQ ID NO: 424017 - RNA, 19 nt, Homo sapiens
  misc_RNA (1)...(19): siRNA sense strand
cagcacuggagccucauua

SEQ ID NO: 424018 - RNA, 19 nt, Homo sapiens
  misc_RNA (1)...(19): siRNA sense strand
ggaacccaaugccaaccau

SEQ ID NO: 424019 - RNA, 19 nt, Homo sapiens
  misc_RNA (1)...(19): siRNA sense strand
ugaauacggguccaucaau

SEQ ID NO: 424020 - RNA, 19 nt, Homo sapiens
  misc_RNA (1)...(19): siRNA sense strand
acacguaccaccuggaugu

SEQ ID NO: 424021 - RNA, 19 nt, Homo sapiens
  misc_RNA (1)...(19): siRNA sense strand
ucugacaagggaaauuaua

SEQ ID NO: 424022 - RNA, 19 nt, Homo sapiens
  misc_RNA (1)...(19): siRNA sense strand
cauacuggaccaacacaga

SEQ ID NO: 424023 - RNA, 19 nt, Homo sapiens
  misc_RNA (1)...(19): siRNA sense strand
ccaacacugucaaguuucg

SEQ ID NO: 424024 - RNA, 19 nt, Homo sapiens
  misc_RNA (1)...(19): siRNA sense strand
gaggcuacaagguacgaaa

SEQ ID NO: 424025 - RNA, 19 nt, Homo sapiens
  misc_RNA (1)...(19): siRNA sense strand
cguaccaccuggauguugu

SEQ ID NO: 424026 - RNA, 19 nt, Homo sapiens
  misc_RNA (1)...(19): siRNA sense strand
ucaguuuaguugaggauac

SEQ ID NO: 424027 - RNA, 19 nt, Homo sapiens
  misc_RNA (1)...(19): siRNA sense strand
ggaaaguguggucccaucu

SEQ ID NO: 424028 - RNA, 19 nt, Homo sapiens
  misc_RNA (1)...(19): siRNA sense strand
uaguugaggauaccacauu

SEQ ID NO: 424029 - RNA, 19 nt, Homo sapiens
  misc_RNA (1)...(19): siRNA sense strand
gcuacaagguacgaaacca

SEQ ID NO: 424030 - RNA, 19 nt, Homo sapiens
  misc_RNA (1)...(19): siRNA sense strand
cacuggagccucauuaugg

SEQ ID NO: 424031 - RNA, 19 nt, Homo sapiens
  misc_RNA (1)...(19): siRNA sense strand
cggccaacacugucaaguu

SEQ ID NO: 424032 - RNA, 19 nt, Homo sapiens
  misc_RNA (1)...(19): siRNA sense strand
acuggagccucauuaugga

SEQ ID NO: 424033 - RNA, 19 nt, Homo sapiens
  misc_RNA (1)...(19): siRNA sense strand
uaagcaggagcaucgcauu

SEQ ID NO: 424034 - RNA, 19 nt, Homo sapiens
  misc_RNA (1)...(19): siRNA sense strand
ggagccucauuauggaaag

SEQ ID NO: 424035 - RNA, 19 nt, Homo sapiens
  misc_RNA (1)...(19): siRNA sense strand
ggccaacacugucaaguuu

SEQ ID NO: 424036 - RNA, 19 nt, Homo sapiens
  misc_RNA (1)...(19): siRNA sense strand
gaauacggguccaucaauc

SEQ ID NO: 424037 - RNA, 19 nt, Homo sapiens
  misc_RNA (1)...(19): siRNA sense strand
gcaggagcaucgcauugga

SEQ ID NO: 424038 - RNA, 19 nt, Homo sapiens
  misc_RNA (1)...(19): siRNA sense strand
caucugacaagggaaauua

SEQ ID NO: 424039 - RNA, 19 nt, Homo sapiens
  misc_RNA (1)...(19): siRNA sense strand
gcaccauacuggaccaaca

SEQ ID NO: 424040 - RNA, 19 nt, Homo sapiens
  misc_RNA (1)...(19): siRNA sense strand
gcacuggagccucauuaug

SEQ ID NO: 424041 - RNA, 19 nt, Homo sapiens
  misc_RNA (1)...(19): siRNA sense strand
aaaguguggucccaucuga

SEQ ID NO: 424042 - RNA, 19 nt, Homo sapiens
  misc_RNA (1)...(19): siRNA sense strand
cauuggaggcuacaaggua

SEQ ID NO: 424043 - RNA, 19 nt, Homo sapiens
  misc_RNA (1)...(19): siRNA sense strand
aguugaggauaccacauua

SEQ ID NO: 424044 - RNA, 19 nt, Homo sapiens
  misc_RNA (1)...(19): siRNA sense strand
gaaaguguggucccaucug

SEQ ID NO: 424045 - RNA, 19 nt, Homo sapiens
  misc_RNA (1)...(19): siRNA sense strand
cagcacuggagccucauua

SEQ ID NO: 424046 - RNA, 19 nt, Homo sapiens
  misc_RNA (1)...(19): siRNA sense strand
ggaacccaaugccaaccau

SEQ ID NO: 424047 - RNA, 19 nt, Homo sapiens
  misc_RNA (1)...(19): siRNA sense strand
ugaauacggguccaucaau

SEQ ID NO: 424048 - RNA, 19 nt, Homo sapiens
  misc_RNA (1)...(19): siRNA sense strand
acacguaccaccuggaugu

SEQ ID NO: 424049 - RNA, 19 nt, Homo sapiens
  misc_RNA (1)...(19): siRNA sense strand
ucugacaagggaaauuaua

SEQ ID NO: 424050 - RNA, 19 nt, Homo sapiens
  misc_RNA (1)...(19): siRNA sense strand
cauacuggaccaacacaga

SEQ ID NO: 424051 - RNA, 19 nt, Homo sapiens
  misc_RNA (1)...(19): siRNA sense strand
ccaacacugucaaguuucg

SEQ ID NO: 424052 - RNA, 19 nt, Homo sapiens
  misc_RNA (1)...(19): siRNA sense strand
gaggcuacaagguacgaaa

SEQ ID NO: 424053 - RNA, 19 nt, Homo sapiens
  misc_RNA (1)...(19): siRNA sense strand
cguaccaccuggauguugu

SEQ ID NO: 424054 - RNA, 19 nt, Homo sapiens
  misc_RNA (1)...(19): siRNA sense strand
ucaguuuaguugaggauac

SEQ ID NO: 424055 - RNA, 19 nt, Homo sapiens
  misc_RNA (1)...(19): siRNA sense strand
ggaaaguguggucccaucu

SEQ ID NO: 424056 - RNA, 19 nt, Homo sapiens
  misc_RNA (1)...(19): siRNA sense strand
uaguugaggauaccacauu

SEQ ID NO: 424057 - RNA, 19 nt, Homo sapiens
  misc_RNA (1)...(19): siRNA sense strand
gcuacaagguacgaaacca

SEQ ID NO: 424058 - RNA, 19 nt, Homo sapiens
  misc_RNA (1)...(19): siRNA sense strand
cacuggagccucauuaugg

SEQ ID NO: 424059 - RNA, 19 nt, Homo sapiens
  misc_RNA (1)...(19): siRNA sense strand
cggccaacacugucaaguu

SEQ ID NO: 424060 - RNA, 19 nt, Homo sapiens
  misc_RNA (1)...(19): siRNA sense strand
acuggagccucauuaugga

SEQ ID NO: 424061 - RNA, 19 nt, Homo sapiens
  misc_RNA (1)...(19): siRNA sense strand
uaagcaggagcaucgcauu

SEQ ID NO: 424062 - RNA, 19 nt, Homo sapiens
  misc_RNA (1)...(19): siRNA sense strand
ggagccucauuauggaaag

SEQ ID NO: 424063 - RNA, 19 nt, Homo sapiens
  misc_RNA (1)...(19): siRNA sense strand
ggccaacacugucaaguuu

SEQ ID NO: 424064 - RNA, 19 nt, Homo sapiens
  misc_RNA (1)...(19): siRNA sense strand
gaauacggguccaucaauc

SEQ ID NO: 424065 - RNA, 19 nt, Homo sapiens
  misc_RNA (1)...(19): siRNA sense strand
gcaggagcaucgcauugga

SEQ ID NO: 424066 - RNA, 19 nt, Homo sapiens
  misc_RNA (1)...(19): siRNA sense strand
caucugacaagggaaauua

SEQ ID NO: 424067 - RNA, 19 nt, Homo sapiens
  misc_RNA (1)...(19): siRNA sense strand
gcaccauacuggaccaaca

SEQ ID NO: 424068 - RNA, 19 nt, Homo sapiens
  misc_RNA (1)...(19): siRNA sense strand
gcacuggagccucauuaug

SEQ ID NO: 424069 - RNA, 19 nt, Homo sapiens
  misc_RNA (1)...(19): siRNA sense strand
aaaguguggucccaucuga

SEQ ID NO: 424070 - RNA, 19 nt, Homo sapiens
  misc_RNA (1)...(19): siRNA sense strand
cauuggaggcuacaaggua

SEQ ID NO: 424071 - RNA, 19 nt, Homo sapiens
  misc_RNA (1)...(19): siRNA sense strand
aguugaggauaccacauua

SEQ ID NO: 424072 - RNA, 19 nt, Homo sapiens
  misc_RNA (1)...(19): siRNA sense strand
gaaaguguggucccaucug

SEQ ID NO: 424073 - RNA, 19 nt, Homo sapiens
  misc_RNA (1)...(19): siRNA sense strand
cagcacuggagccucauua

SEQ ID NO: 424074 - RNA, 19 nt, Homo sapiens
  misc_RNA (1)...(19): siRNA sense strand
ggaacccaaugccaaccau

SEQ ID NO: 424075 - RNA, 19 nt, Homo sapiens
  misc_RNA (1)...(19): siRNA sense strand
ugaauacggguccaucaau

SEQ ID NO: 424076 - RNA, 19 nt, Homo sapiens
  misc_RNA (1)...(19): siRNA sense strand
acacguaccaccuggaugu

SEQ ID NO: 424077 - RNA, 19 nt, Homo sapiens
  misc_RNA (1)...(19): siRNA sense strand
ucugacaagggaaauuaua

SEQ ID NO: 424078 - RNA, 19 nt, Homo sapiens
  misc_RNA (1)...(19): siRNA sense strand
cauacuggaccaacacaga

SEQ ID NO: 424079 - RNA, 19 nt, Homo sapiens
  misc_RNA (1)...(19): siRNA sense strand
ccaacacugucaaguuucg

SEQ ID NO: 424080 - RNA, 19 nt, Homo sapiens
  misc_RNA (1)...(19): siRNA sense strand
gaggcuacaagguacgaaa

SEQ ID NO: 424081 - RNA, 19 nt, Homo sapiens
  misc_RNA (1)...(19): siRNA sense strand
cguaccaccuggauguugu

SEQ ID NO: 424082 - RNA, 19 nt, Homo sapiens
  misc_RNA (1)...(19): siRNA sense strand
ucaguuuaguugaggauac

SEQ ID NO: 424083 - RNA, 19 nt, Homo sapiens
  misc_RNA (1)...(19): siRNA sense strand
ggaaaguguggucccaucu

SEQ ID NO: 424084 - RNA, 19 nt, Homo sapiens
  misc_RNA (1)...(19): siRNA sense strand
uaguugaggauaccacauu

SEQ ID NO: 424085 - RNA, 19 nt, Homo sapiens
  misc_RNA (1)...(19): siRNA sense strand
gcuacaagguacgaaacca

SEQ ID NO: 424086 - RNA, 19 nt, Homo sapiens
  misc_RNA (1)...(19): siRNA sense strand
cacuggagccucauuaugg

SEQ ID NO: 424087 - RNA, 19 nt, Homo sapiens
  misc_RNA (1)...(19): siRNA sense strand
cggccaacacugucaaguu

SEQ ID NO: 424088 - RNA, 19 nt, Homo sapiens
  misc_RNA (1)...(19): siRNA sense strand
acuggagccucauuaugga

SEQ ID NO: 424089 - RNA, 19 nt, Homo sapiens
  misc_RNA (1)...(19): siRNA sense strand
uaagcaggagcaucgcauu

SEQ ID NO: 424090 - RNA, 19 nt, Homo sapiens
  misc_RNA (1)...(19): siRNA sense strand
ggagccucauuauggaaag

SEQ ID NO: 424091 - RNA, 19 nt, Homo sapiens
  misc_RNA (1)...(19): siRNA sense strand
ggccaacacugucaaguuu

SEQ ID NO: 424092 - RNA, 19 nt, Homo sapiens
  misc_RNA (1)...(19): siRNA sense strand
gaauacggguccaucaauc

SEQ ID NO: 424093 - RNA, 19 nt, Homo sapiens
  misc_RNA (1)...(19): siRNA sense strand
gcaggagcaucgcauugga

SEQ ID NO: 424094 - RNA, 19 nt, Homo sapiens
  misc_RNA (1)...(19): siRNA sense strand
caucugacaagggaaauua

SEQ ID NO: 424095 - RNA, 19 nt, Homo sapiens
  misc_RNA (1)...(19): siRNA sense strand
gcaccauacuggaccaaca

SEQ ID NO: 424096 - RNA, 19 nt, Homo sapiens
  misc_RNA (1)...(19): siRNA sense strand
gcacuggagccucauuaug

SEQ ID NO: 424097 - RNA, 19 nt, Homo sapiens
  misc_RNA (1)...(19): siRNA sense strand
aaaguguggucccaucuga

SEQ ID NO: 424098 - RNA, 19 nt, Homo sapiens
  misc_RNA (1)...(19): siRNA sense strand
cauuggaggcuacaaggua

SEQ ID NO: 424099 - RNA, 19 nt, Homo sapiens
  misc_RNA (1)...(19): siRNA sense strand
aguugaggauaccacauua

SEQ ID NO: 424100 - RNA, 19 nt, Homo sapiens
  misc_RNA (1)...(19): siRNA sense strand
gaaaguguggucccaucug

SEQ ID NO: 424101 - RNA, 19 nt, Homo sapiens
  misc_RNA (1)...(19): siRNA sense strand
cagcacuggagccucauua

SEQ ID NO: 424102 - RNA, 19 nt, Homo sapiens
  misc_RNA (1)...(19): siRNA sense strand
ggaacccaaugccaaccau

SEQ ID NO: 424103 - RNA, 19 nt, Homo sapiens
  misc_RNA (1)...(19): siRNA sense strand
ugaauacggguccaucaau

SEQ ID NO: 424104 - RNA, 19 nt, Homo sapiens
  misc_RNA (1)...(19): siRNA sense strand
acacguaccaccuggaugu

SEQ ID NO: 424105 - RNA, 19 nt, Homo sapiens
  misc_RNA (1)...(19): siRNA sense strand
ucugacaagggaaauuaua

SEQ ID NO: 424106 - RNA, 19 nt, Homo sapiens
  misc_RNA (1)...(19): siRNA sense strand
cauacuggaccaacacaga

SEQ ID NO: 424107 - RNA, 19 nt, Homo sapiens
  misc_RNA (1)...(19): siRNA sense strand
ccaacacugucaaguuucg

SEQ ID NO: 424108 - RNA, 19 nt, Homo sapiens
  misc_RNA (1)...(19): siRNA sense strand
gaggcuacaagguacgaaa

SEQ ID NO: 424109 - RNA, 19 nt, Homo sapiens
  misc_RNA (1)...(19): siRNA sense strand
cguaccaccuggauguugu

SEQ ID NO: 424110 - RNA, 19 nt, Homo sapiens
  misc_RNA (1)...(19): siRNA sense strand
ucaguuuaguugaggauac

SEQ ID NO: 424111 - RNA, 19 nt, Homo sapiens
  misc_RNA (1)...(19): siRNA sense strand
ggaaaguguggucccaucu

SEQ ID NO: 424112 - RNA, 19 nt, Homo sapiens
  misc_RNA (1)...(19): siRNA sense strand
uaguugaggauaccacauu

SEQ ID NO: 424113 - RNA, 19 nt, Homo sapiens
  misc_RNA (1)...(19): siRNA sense strand
gcuacaagguacgaaacca

SEQ ID NO: 424114 - RNA, 19 nt, Homo sapiens
  misc_RNA (1)...(19): siRNA sense strand
cacuggagccucauuaugg

SEQ ID NO: 424115 - RNA, 19 nt, Homo sapiens
  misc_RNA (1)...(19): siRNA sense strand
cggccaacacugucaaguu

SEQ ID NO: 424116 - RNA, 19 nt, Homo sapiens
  misc_RNA (1)...(19): siRNA sense strand
acuggagccucauuaugga

SEQ ID NO: 424117 - RNA, 19 nt, Homo sapiens
  misc_RNA (1)...(19): siRNA sense strand
uaagcaggagcaucgcauu

SEQ ID NO: 424118 - RNA, 19 nt, Homo sapiens
  misc_RNA (1)...(19): siRNA sense strand
ggagccucauuauggaaag

SEQ ID NO: 424119 - RNA, 19 nt, Homo sapiens
  misc_RNA (1)...(19): siRNA sense strand
ggccaacacugucaaguuu

SEQ ID NO: 424120 - RNA, 19 nt, Homo sapiens
  misc_RNA (1)...(19): siRNA sense strand
gaauacggguccaucaauc

SEQ ID NO: 424121 - RNA, 19 nt, Homo sapiens
  misc_RNA (1)...(19): siRNA sense strand
gcaggagcaucgcauugga

SEQ ID NO: 424122 - RNA, 19 nt, Homo sapiens
  misc_RNA (1)...(19): siRNA sense strand
caucugacaagggaaauua

SEQ ID NO: 424123 - RNA, 19 nt, Homo sapiens
  misc_RNA (1)...(19): siRNA sense strand
gcaccauacuggaccaaca

SEQ ID NO: 424124 - RNA, 19 nt, Homo sapiens
  misc_RNA (1)...(19): siRNA sense strand
gcacuggagccucauuaug

SEQ ID NO: 424125 - RNA, 19 nt, Homo sapiens
  misc_RNA (1)...(19): siRNA sense strand
aaaguguggucccaucuga

SEQ ID NO: 424126 - RNA, 19 nt, Homo sapiens
  misc_RNA (1)...(19): siRNA sense strand
cauuggaggcuacaaggua

SEQ ID NO: 424127 - RNA, 19 nt, Homo sapiens
  misc_RNA (1)...(19): siRNA sense strand
aguugaggauaccacauua

SEQ ID NO: 424128 - RNA, 19 nt, Homo sapiens
  misc_RNA (1)...(19): siRNA sense strand
gaaaguguggucccaucug

SEQ ID NO: 424129 - RNA, 19 nt, Homo sapiens
  misc_RNA (1)...(19): siRNA sense strand
cagcacuggagccucauua

SEQ ID NO: 424130 - RNA, 19 nt, Homo sapiens
  misc_RNA (1)...(19): siRNA sense strand
ggaacccaaugccaaccau

SEQ ID NO: 424131 - RNA, 19 nt, Homo sapiens
  misc_RNA (1)...(19): siRNA sense strand
ugaauacggguccaucaau

SEQ ID NO: 424132 - RNA, 19 nt, Homo sapiens
  misc_RNA (1)...(19): siRNA sense strand
acacguaccaccuggaugu

SEQ ID NO: 424133 - RNA, 19 nt, Homo sapiens
  misc_RNA (1)...(19): siRNA sense strand
ucugacaagggaaauuaua

SEQ ID NO: 424134 - RNA, 19 nt, Homo sapiens
  misc_RNA (1)...(19): siRNA sense strand
cauacuggaccaacacaga

SEQ ID NO: 424135 - RNA, 19 nt, Homo sapiens
  misc_RNA (1)...(19): siRNA sense strand
ccaacacugucaaguuucg

SEQ ID NO: 424136 - RNA, 19 nt, Homo sapiens
  misc_RNA (1)...(19): siRNA sense strand
gaggcuacaagguacgaaa

SEQ ID NO: 424137 - RNA, 19 nt, Homo sapiens
  misc_RNA (1)...(19): siRNA sense strand
cguaccaccuggauguugu

SEQ ID NO: 424138 - RNA, 19 nt, Homo sapiens
  misc_RNA (1)...(19): siRNA sense strand
ucaguuuaguugaggauac

SEQ ID NO: 424139 - RNA, 19 nt, Homo sapiens
  misc_RNA (1)...(19): siRNA sense strand
ggaaaguguggucccaucu

SEQ ID NO: 424140 - RNA, 19 nt, Homo sapiens
  misc_RNA (1)...(19): siRNA sense strand
uaguugaggauaccacauu

SEQ ID NO: 424141 - RNA, 19 nt, Homo sapiens
  misc_RNA (1)...(19): siRNA sense strand
gcuacaagguacgaaacca

SEQ ID NO: 424142 - RNA, 19 nt, Homo sapiens
  misc_RNA (1)...(19): siRNA sense strand
cacuggagccucauuaugg

SEQ ID NO: 424143 - RNA, 19 nt, Homo sapiens
  misc_RNA (1)...(19): siRNA sense strand
cggccaacacugucaaguu

SEQ ID NO: 424144 - RNA, 19 nt, Homo sapiens
  misc_RNA (1)...(19): siRNA sense strand
acuggagccucauuaugga

SEQ ID NO: 424145 - RNA, 19 nt, Homo sapiens
  misc_RNA (1)...(19): siRNA sense strand
uaagcaggagcaucgcauu

SEQ ID NO: 424146 - RNA, 19 nt, Homo sapiens
  misc_RNA (1)...(19): siRNA sense strand
ggagccucauuauggaaag

SEQ ID NO: 424147 - RNA, 19 nt, Homo sapiens
  misc_RNA (1)...(19): siRNA sense strand
ggccaacacugucaaguuu

SEQ ID NO: 424148 - RNA, 19 nt, Homo sapiens
  misc_RNA (1)...(19): siRNA sense strand
gaauacggguccaucaauc

SEQ ID NO: 424149 - RNA, 19 nt, Homo sapiens
  misc_RNA (1)...(19): siRNA sense strand
gcaggagcaucgcauugga

SEQ ID NO: 424150 - RNA, 19 nt, Homo sapiens
  misc_RNA (1)...(19): siRNA sense strand
caucugacaagggaaauua

SEQ ID NO: 424151 - RNA, 19 nt, Homo sapiens
  misc_RNA (1)...(19): siRNA sense strand
gcaccauacuggaccaaca

SEQ ID NO: 424152 - RNA, 19 nt, Homo sapiens
  misc_RNA (1)...(19): siRNA sense strand
gcacuggagccucauuaug

SEQ ID NO: 424153 - RNA, 19 nt, Homo sapiens
  misc_RNA (1)...(19): siRNA sense strand
aaaguguggucccaucuga

SEQ ID NO: 424154 - RNA, 19 nt, Homo sapiens
  misc_RNA (1)...(19): siRNA sense strand
cauuggaggcuacaaggua

SEQ ID NO: 424155 - RNA, 19 nt, Homo sapiens
  misc_RNA (1)...(19): siRNA sense strand
aguugaggauaccacauua

SEQ ID NO: 424156 - RNA, 19 nt, Homo sapiens
  misc_RNA (1)...(19): siRNA sense strand
gaaaguguggucccaucug

SEQ ID NO: 424157 - RNA, 19 nt, Homo sapiens
  misc_RNA (1)...(19): siRNA sense strand
cagcacuggagccucauua

SEQ ID NO: 424158 - RNA, 19 nt, Homo sapiens
  misc_RNA (1)...(19): siRNA sense strand
ggaacccaaugccaaccau

SEQ ID NO: 424159 - RNA, 19 nt, Homo sapiens
  misc_RNA (1)...(19): siRNA sense strand
ugaauacggguccaucaau

SEQ ID NO: 424160 - RNA, 19 nt, Homo sapiens
  misc_RNA (1)...(19): siRNA sense strand
acacguaccaccuggaugu

SEQ ID NO: 424161 - RNA, 19 nt, Homo sapiens
  misc_RNA (1)...(19): siRNA sense strand
ucugacaagggaaauuaua

SEQ ID NO: 424162 - RNA, 19 nt, Homo sapiens
  misc_RNA (1)...(19): siRNA sense strand
cauacuggaccaacacaga

SEQ ID NO: 424163 - RNA, 19 nt, Homo sapiens
  misc_RNA (1)...(19): siRNA sense strand
ccaacacugucaaguuucg

SEQ ID NO: 424164 - RNA, 19 nt, Homo sapiens
  misc_RNA (1)...(19): siRNA sense strand
gaggcuacaagguacgaaa

SEQ ID NO: 424165 - RNA, 19 nt, Homo sapiens
  misc_RNA (1)...(19): siRNA sense strand
cguaccaccuggauguugu

SEQ ID NO: 424166 - RNA, 19 nt, Homo sapiens
  misc_RNA (1)...(19): siRNA sense strand
ucaguuuaguugaggauac

SEQ ID NO: 424167 - RNA, 19 nt, Homo sapiens
  misc_RNA (1)...(19): siRNA sense strand
ggaaaguguggucccaucu

SEQ ID NO: 424168 - RNA, 19 nt, Homo sapiens
  misc_RNA (1)...(19): siRNA sense strand
uaguugaggauaccacauu

SEQ ID NO: 424169 - RNA, 19 nt, Homo sapiens
  misc_RNA (1)...(19): siRNA sense strand
gcuacaagguacgaaacca

SEQ ID NO: 424170 - RNA, 19 nt, Homo sapiens
  misc_RNA (1)...(19): siRNA sense strand
cacuggagccucauuaugg

SEQ ID NO: 424171 - RNA, 19 nt, Homo sapiens
  misc_RNA (1)...(19): siRNA sense strand
cggccaacacugucaaguu

SEQ ID NO: 424172 - RNA, 19 nt, Homo sapiens
  misc_RNA (1)...(19): siRNA sense strand
acuggagccucauuaugga

SEQ ID NO: 424173 - RNA, 19 nt, Homo sapiens
  misc_RNA (1)...(19): siRNA sense strand
uaagcaggagcaucgcauu

SEQ ID NO: 424174 - RNA, 19 nt, Homo sapiens
  misc_RNA (1)...(19): siRNA sense strand
ggagccucauuauggaaag

SEQ ID NO: 424175 - RNA, 19 nt, Homo sapiens
  misc_RNA (1)...(19): siRNA sense strand
ggccaacacugucaaguuu

SEQ ID NO: 424176 - RNA, 19 nt, Homo sapiens
  misc_RNA (1)...(19): siRNA sense strand
gaauacggguccaucaauc

SEQ ID NO: 424177 - RNA, 19 nt, Homo sapiens
  misc_RNA (1)...(19): siRNA sense strand
gcaggagcaucgcauugga

SEQ ID NO: 424178 - RNA, 19 nt, Homo sapiens
  misc_RNA (1)...(19): siRNA sense strand
caucugacaagggaaauua

SEQ ID NO: 424179 - RNA, 19 nt, Homo sapiens
  misc_RNA (1)...(19): siRNA sense strand
gcaccauacuggaccaaca

SEQ ID NO: 424180 - RNA, 19 nt, Homo sapiens
  misc_RNA (1)...(19): siRNA sense strand
gcacuggagccucauuaug

SEQ ID NO: 424181 - RNA, 19 nt, Homo sapiens
  misc_RNA (1)...(19): siRNA sense strand
aaaguguggucccaucuga

SEQ ID NO: 424182 - RNA, 19 nt, Homo sapiens
  misc_RNA (1)...(19): siRNA sense strand
cauuggaggcuacaaggua

SEQ ID NO: 424183 - RNA, 19 nt, Homo sapiens
  misc_RNA (1)...(19): siRNA sense strand
aguugaggauaccacauua

SEQ ID NO: 424184 - RNA, 19 nt, Homo sapiens
  misc_RNA (1)...(19): siRNA sense strand
gaaaguguggucccaucug

SEQ ID NO: 424185 - RNA, 19 nt, Homo sapiens
  misc_RNA (1)...(19): siRNA sense strand
cagcacuggagccucauua

SEQ ID NO: 424186 - RNA, 19 nt, Homo sapiens
  misc_RNA (1)...(19): siRNA sense strand
ggaacccaaugccaaccau

SEQ ID NO: 424187 - RNA, 19 nt, Homo sapiens
  misc_RNA (1)...(19): siRNA sense strand
ugaauacggguccaucaau

SEQ ID NO: 424188 - RNA, 19 nt, Homo sapiens
  misc_RNA (1)...(19): siRNA sense strand
acacguaccaccuggaugu

SEQ ID NO: 424189 - RNA, 19 nt, Homo sapiens
  misc_RNA (1)...(19): siRNA sense strand
ucugacaagggaaauuaua

SEQ ID NO: 424190 - RNA, 19 nt, Homo sapiens
  misc_RNA (1)...(19): siRNA sense strand
cauacuggaccaacacaga

SEQ ID NO: 424191 - RNA, 19 nt, Homo sapiens
  misc_RNA (1)...(19): siRNA sense strand
ccaacacugucaaguuucg

SEQ ID NO: 424192 - RNA, 19 nt, Homo sapiens
  misc_RNA (1)...(19): siRNA sense strand
gaggcuacaagguacgaaa

SEQ ID NO: 424193 - RNA, 19 nt, Homo sapiens
  misc_RNA (1)...(19): siRNA sense strand
cguaccaccuggauguugu

SEQ ID NO: 424194 - RNA, 19 nt, Homo sapiens
  misc_RNA (1)...(19): siRNA sense strand
ucaguuuaguugaggauac

SEQ ID NO: 424195 - RNA, 19 nt, Homo sapiens
  misc_RNA (1)...(19): siRNA sense strand
ggaaaguguggucccaucu

SEQ ID NO: 424196 - RNA, 19 nt, Homo sapiens
  misc_RNA (1)...(19): siRNA sense strand
uaguugaggauaccacauu

SEQ ID NO: 424197 - RNA, 19 nt, Homo sapiens
  misc_RNA (1)...(19): siRNA sense strand
gcuacaagguacgaaacca

SEQ ID NO: 424198 - RNA, 19 nt, Homo sapiens
  misc_RNA (1)...(19): siRNA sense strand
cacuggagccucauuaugg

SEQ ID NO: 424199 - RNA, 19 nt, Homo sapiens
  misc_RNA (1)...(19): siRNA sense strand
cggccaacacugucaaguu

SEQ ID NO: 424200 - RNA, 19 nt, Homo sapiens
  misc_RNA (1)...(19): siRNA sense strand
acuggagccucauuaugga

SEQ ID NO: 424201 - RNA, 19 nt, Homo sapiens
  misc_RNA (1)...(19): siRNA sense strand
uaagcaggagcaucgcauu

SEQ ID NO: 424202 - RNA, 19 nt, Homo sapiens
  misc_RNA (1)...(19): siRNA sense strand
ggagccucauuauggaaag

SEQ ID NO: 424203 - RNA, 19 nt, Homo sapiens
  misc_RNA (1)...(19): siRNA sense strand
ggccaacacugucaaguuu

SEQ ID NO: 424204 - RNA, 19 nt, Homo sapiens
  misc_RNA (1)...(19): siRNA sense strand
gaauacggguccaucaauc

SEQ ID NO: 424205 - RNA, 19 nt, Homo sapiens
  misc_RNA (1)...(19): siRNA sense strand
gcaggagcaucgcauugga

SEQ ID NO: 424206 - RNA, 19 nt, Homo sapiens
  misc_RNA (1)...(19): siRNA sense strand
caucugacaagggaaauua

SEQ ID NO: 424207 - RNA, 19 nt, Homo sapiens
  misc_RNA (1)...(19): siRNA sense strand
gcaccauacuggaccaaca

SEQ ID NO: 424208 - RNA, 19 nt, Homo sapiens
  misc_RNA (1)...(19): siRNA sense strand
gcacuggagccucauuaug

SEQ ID NO: 424209 - RNA, 19 nt, Homo sapiens
  misc_RNA (1)...(19): siRNA sense strand
aaaguguggucccaucuga

SEQ ID NO: 424210 - RNA, 19 nt, Homo sapiens
  misc_RNA (1)...(19): siRNA sense strand
cauuggaggcuacaaggua

SEQ ID NO: 424211 - RNA, 19 nt, Homo sapiens
  misc_RNA (1)...(19): siRNA sense strand
aguugaggauaccacauua

SEQ ID NO: 424212 - RNA, 19 nt, Homo sapiens
  misc_RNA (1)...(19): siRNA sense strand
gaaaguguggucccaucug

SEQ ID NO: 424213 - RNA, 19 nt, Homo sapiens
  misc_RNA (1)...(19): siRNA sense strand
cagcacuggagccucauua

SEQ ID NO: 424214 - RNA, 19 nt, Homo sapiens
  misc_RNA (1)...(19): siRNA sense strand
ggaacccaaugccaaccau

SEQ ID NO: 424215 - RNA, 19 nt, Homo sapiens
  misc_RNA (1)...(19): siRNA sense strand
ugaauacggguccaucaau

SEQ ID NO: 424216 - RNA, 19 nt, Homo sapiens
  misc_RNA (1)...(19): siRNA sense strand
acacguaccaccuggaugu

SEQ ID NO: 424217 - RNA, 19 nt, Homo sapiens
  misc_RNA (1)...(19): siRNA sense strand
ucugacaagggaaauuaua

SEQ ID NO: 424218 - RNA, 19 nt, Homo sapiens
  misc_RNA (1)...(19): siRNA sense strand
cauacuggaccaacacaga

SEQ ID NO: 424219 - RNA, 19 nt, Homo sapiens
  misc_RNA (1)...(19): siRNA sense strand
ccaacacugucaaguuucg

SEQ ID NO: 424220 - RNA, 19 nt, Homo sapiens
  misc_RNA (1)...(19): siRNA sense strand
gaggcuacaagguacgaaa

SEQ ID NO: 424221 - RNA, 19 nt, Homo sapiens
  misc_RNA (1)...(19): siRNA sense strand
cguaccaccuggauguugu

SEQ ID NO: 424222 - RNA, 19 nt, Homo sapiens
  misc_RNA (1)...(19): siRNA sense strand
ucaguuuaguugaggauac

SEQ ID NO: 424223 - RNA, 19 nt, Homo sapiens
  misc_RNA (1)...(19): siRNA sense strand
ggaaaguguggucccaucu

SEQ ID NO: 424224 - RNA, 19 nt, Homo sapiens
  misc_RNA (1)...(19): siRNA sense strand
uaguugaggauaccacauu

SEQ ID NO: 424225 - RNA, 19 nt, Homo sapiens
  misc_RNA (1)...(19): siRNA sense strand
gcuacaagguacgaaacca

SEQ ID NO: 424226 - RNA, 19 nt, Homo sapiens
  misc_RNA (1)...(19): siRNA sense strand
cacuggagccucauuaugg

SEQ ID NO: 424227 - RNA, 19 nt, Homo sapiens
  misc_RNA (1)...(19): siRNA sense strand
cggccaacacugucaaguu

SEQ ID NO: 424228 - RNA, 19 nt, Homo sapiens
  misc_RNA (1)...(19): siRNA sense strand
acuggagccucauuaugga

SEQ ID NO: 424229 - RNA, 19 nt, Homo sapiens
  misc_RNA (1)...(19): siRNA sense strand
uaagcaggagcaucgcauu

SEQ ID NO: 424230 - RNA, 19 nt, Homo sapiens
  misc_RNA (1)...(19): siRNA sense strand
ggagccucauuauggaaag

SEQ ID NO: 424231 - RNA, 19 nt, Homo sapiens
  misc_RNA (1)...(19): siRNA sense strand
ggccaacacugucaaguuu

SEQ ID NO: 424232 - RNA, 19 nt, Homo sapiens
  misc_RNA (1)...(19): siRNA sense strand
gaauacggguccaucaauc

SEQ ID NO: 424233 - RNA, 19 nt, Homo sapiens
  misc_RNA (1)...(19): siRNA sense strand
gcaggagcaucgcauugga

SEQ ID NO: 424234 - RNA, 19 nt, Homo sapiens
  misc_RNA (1)...(19): siRNA sense strand
caucugacaagggaaauua

SEQ ID NO: 424235 - RNA, 19 nt, Homo sapiens
  misc_RNA (1)...(19): siRNA sense strand
gcaccauacuggaccaaca

SEQ ID NO: 424236 - RNA, 19 nt, Homo sapiens
  misc_RNA (1)...(19): siRNA sense strand
gcacuggagccucauuaug

SEQ ID NO: 424237 - RNA, 19 nt, Homo sapiens
  misc_RNA (1)...(19): siRNA sense strand
aaaguguggucccaucuga

SEQ ID NO: 424238 - RNA, 19 nt, Homo sapiens
  misc_RNA (1)...(19): siRNA sense strand
cauuggaggcuacaaggua

SEQ ID NO: 424239 - RNA, 19 nt, Homo sapiens
  misc_RNA (1)...(19): siRNA sense strand
aguugaggauaccacauua

SEQ ID NO: 424240 - RNA, 19 nt, Homo sapiens
  misc_RNA (1)...(19): siRNA sense strand
gaaaguguggucccaucug

SEQ ID NO: 424241 - RNA, 19 nt, Homo sapiens
  misc_RNA (1)...(19): siRNA sense strand
cagcacuggagccucauua

SEQ ID NO: 424242 - RNA, 19 nt, Homo sapiens
  misc_RNA (1)...(19): siRNA sense strand
ggaacccaaugccaaccau

SEQ ID NO: 424243 - RNA, 19 nt, Homo sapiens
  misc_RNA (1)...(19): siRNA sense strand
ugaauacggguccaucaau

SEQ ID NO: 424244 - RNA, 19 nt, Homo sapiens
  misc_RNA (1)...(19): siRNA sense strand
acacguaccaccuggaugu

SEQ ID NO: 424245 - RNA, 19 nt, Homo sapiens
  misc_RNA (1)...(19): siRNA sense strand
ucugacaagggaaauuaua

SEQ ID NO: 424246 - RNA, 19 nt, Homo sapiens
  misc_RNA (1)...(19): siRNA sense strand
cauacuggaccaacacaga

SEQ ID NO: 424247 - RNA, 19 nt, Homo sapiens
  misc_RNA (1)...(19): siRNA sense strand
ccaacacugucaaguuucg

SEQ ID NO: 424248 - RNA, 19 nt, Homo sapiens
  misc_RNA (1)...(19): siRNA sense strand
gaggcuacaagguacgaaa

SEQ ID NO: 424249 - RNA, 19 nt, Homo sapiens
  misc_RNA (1)...(19): siRNA sense strand
cguaccaccuggauguugu

SEQ ID NO: 424250 - RNA, 19 nt, Homo sapiens
  misc_RNA (1)...(19): siRNA sense strand
ucaguuuaguugaggauac

SEQ ID NO: 424251 - RNA, 19 nt, Homo sapiens
  misc_RNA (1)...(19): siRNA sense strand
ggaaaguguggucccaucu

SEQ ID NO: 424252 - RNA, 19 nt, Homo sapiens
  misc_RNA (1)...(19): siRNA sense strand
uaguugaggauaccacauu

SEQ ID NO: 424253 - RNA, 19 nt, Homo sapiens
  misc_RNA (1)...(19): siRNA sense strand
gcuacaagguacgaaacca

SEQ ID NO: 424254 - RNA, 19 nt, Homo sapiens
  misc_RNA (1)...(19): siRNA sense strand
cacuggagccucauuaugg

SEQ ID NO: 424255 - RNA, 19 nt, Homo sapiens
  misc_RNA (1)...(19): siRNA sense strand
cggccaacacugucaaguu

SEQ ID NO: 424256 - RNA, 19 nt, Homo sapiens
  misc_RNA (1)...(19): siRNA sense strand
acuggagccucauuaugga

SEQ ID NO: 424257 - RNA, 19 nt, Homo sapiens
  misc_RNA (1)...(19): siRNA sense strand
uaagcaggagcaucgcauu

SEQ ID NO: 424258 - RNA, 19 nt, Homo sapiens
  misc_RNA (1)...(19): siRNA sense strand
ggagccucauuauggaaag

SEQ ID NO: 424259 - RNA, 19 nt, Homo sapiens
  misc_RNA (1)...(19): siRNA sense strand
ggccaacacugucaaguuu

SEQ ID NO: 424260 - RNA, 19 nt, Homo sapiens
  misc_RNA (1)...(19): siRNA sense strand
gaauacggguccaucaauc

SEQ ID NO: 424261 - RNA, 19 nt, Homo sapiens
  misc_RNA (1)...(19): siRNA sense strand
gcaggagcaucgcauugga

SEQ ID NO: 424262 - RNA, 19 nt, Homo sapiens
  misc_RNA (1)...(19): siRNA sense strand
caucugacaagggaaauua

SEQ ID NO: 424263 - RNA, 19 nt, Homo sapiens
  misc_RNA (1)...(19): siRNA sense strand
gcaccauacuggaccaaca

SEQ ID NO: 424264 - RNA, 19 nt, Homo sapiens
  misc_RNA (1)...(19): siRNA sense strand
gcacuggagccucauuaug

SEQ ID NO: 424265 - RNA, 19 nt, Homo sapiens
  misc_RNA (1)...(19): siRNA sense strand
aaaguguggucccaucuga

SEQ ID NO: 424266 - RNA, 19 nt, Homo sapiens
  misc_RNA (1)...(19): siRNA sense strand
cauuggaggcuacaaggua

SEQ ID NO: 424267 - RNA, 19 nt, Homo sapiens
  misc_RNA (1)...(19): siRNA sense strand
aguugaggauaccacauua

SEQ ID NO: 424268 - RNA, 19 nt, Homo sapiens
  misc_RNA (1)...(19): siRNA sense strand
gaaaguguggucccaucug

SEQ ID NO: 424269 - RNA, 19 nt, Homo sapiens
  misc_RNA (1)...(19): siRNA sense strand
cagcacuggagccucauua

SEQ ID NO: 424270 - RNA, 19 nt, Homo sapiens
  misc_RNA (1)...(19): siRNA sense strand
ggaacccaaugccaaccau

SEQ ID NO: 424271 - RNA, 19 nt, Homo sapiens
  misc_RNA (1)...(19): siRNA sense strand
ugaauacggguccaucaau

SEQ ID NO: 424272 - RNA, 19 nt, Homo sapiens
  misc_RNA (1)...(19): siRNA sense strand
acacguaccaccuggaugu

SEQ ID NO: 424273 - RNA, 19 nt, Homo sapiens
  misc_RNA (1)...(19): siRNA sense strand
ucugacaagggaaauuaua

SEQ ID NO: 424274 - RNA, 19 nt, Homo sapiens
  misc_RNA (1)...(19): siRNA sense strand
cauacuggaccaacacaga

SEQ ID NO: 424275 - RNA, 19 nt, Homo sapiens
  misc_RNA (1)...(19): siRNA sense strand
ccaacacugucaaguuucg

SEQ ID NO: 424276 - RNA, 19 nt, Homo sapiens
  misc_RNA (1)...(19): siRNA sense strand
gaggcuacaagguacgaaa

SEQ ID NO: 424277 - RNA, 19 nt, Homo sapiens
  misc_RNA (1)...(19): siRNA sense strand
cguaccaccuggauguugu

SEQ ID NO: 424278 - RNA, 19 nt, Homo sapiens
  misc_RNA (1)...(19): siRNA sense strand
ucaguuuaguugaggauac

SEQ ID NO: 424279 - RNA, 19 nt, Homo sapiens
  misc_RNA (1)...(19): siRNA sense strand
ggaaaguguggucccaucu

SEQ ID NO: 424280 - RNA, 19 nt, Homo sapiens
  misc_RNA (1)...(19): siRNA sense strand
uaguugaggauaccacauu

SEQ ID NO: 424281 - RNA, 19 nt, Homo sapiens
  misc_RNA (1)...(19): siRNA sense strand
gcuacaagguacgaaacca

SEQ ID NO: 424282 - RNA, 19 nt, Homo sapiens
  misc_RNA (1)...(19): siRNA sense strand
cacuggagccucauuaugg

SEQ ID NO: 424283 - RNA, 19 nt, Homo sapiens
  misc_RNA (1)...(19): siRNA sense strand
cggccaacacugucaaguu

SEQ ID NO: 424284 - RNA, 19 nt, Homo sapiens
  misc_RNA (1)...(19): siRNA sense strand
acuggagccucauuaugga

SEQ ID NO: 424285 - RNA, 19 nt, Homo sapiens
  misc_RNA (1)...(19): siRNA sense strand
uaagcaggagcaucgcauu

SEQ ID NO: 424286 - RNA, 19 nt, Homo sapiens
  misc_RNA (1)...(19): siRNA sense strand
ggagccucauuauggaaag

SEQ ID NO: 424287 - RNA, 19 nt, Homo sapiens
  misc_RNA (1)...(19): siRNA sense strand
ggccaacacugucaaguuu

SEQ ID NO: 424288 - RNA, 19 nt, Homo sapiens
  misc_RNA (1)...(19): siRNA sense strand
gaauacggguccaucaauc

SEQ ID NO: 424289 - RNA, 19 nt, Homo sapiens
  misc_RNA (1)...(19): siRNA sense strand
gcaggagcaucgcauugga

SEQ ID NO: 424290 - RNA, 19 nt, Homo sapiens
  misc_RNA (1)...(19): siRNA sense strand
caucugacaagggaaauua

SEQ ID NO: 424291 - RNA, 19 nt, Homo sapiens
  misc_RNA (1)...(19): siRNA sense strand
gcaccauacuggaccaaca

SEQ ID NO: 424292 - RNA, 19 nt, Homo sapiens
  misc_RNA (1)...(19): siRNA sense strand
gcacuggagccucauuaug

SEQ ID NO: 424293 - RNA, 19 nt, Homo sapiens
  misc_RNA (1)...(19): siRNA sense strand
aaaguguggucccaucuga

SEQ ID NO: 424294 - RNA, 19 nt, Homo sapiens
  misc_RNA (1)...(19): siRNA sense strand
cauuggaggcuacaaggua

SEQ ID NO: 424295 - RNA, 19 nt, Homo sapiens
  misc_RNA (1)...(19): siRNA sense strand
aguugaggauaccacauua

SEQ ID NO: 424296 - RNA, 19 nt, Homo sapiens
  misc_RNA (1)...(19): siRNA sense strand
gaaaguguggucccaucug

SEQ ID NO: 424297 - RNA, 19 nt, Homo sapiens
  misc_RNA (1)...(19): siRNA sense strand
cagcacuggagccucauua

SEQ ID NO: 424298 - RNA, 19 nt, Homo sapiens
  misc_RNA (1)...(19): siRNA sense strand
ggaacccaaugccaaccau

SEQ ID NO: 424299 - RNA, 19 nt, Homo sapiens
  misc_RNA (1)...(19): siRNA sense strand
ugaauacggguccaucaau

SEQ ID NO: 424300 - RNA, 19 nt, Homo sapiens
  misc_RNA (1)...(19): siRNA sense strand
acacguaccaccuggaugu

SEQ ID NO: 424301 - RNA, 19 nt, Homo sapiens
  misc_RNA (1)...(19): siRNA sense strand
ucugacaagggaaauuaua

SEQ ID NO: 424302 - RNA, 19 nt, Homo sapiens
  misc_RNA (1)...(19): siRNA sense strand
cauacuggaccaacacaga

SEQ ID NO: 424303 - RNA, 19 nt, Homo sapiens
  misc_RNA (1)...(19): siRNA sense strand
ccaacacugucaaguuucg

SEQ ID NO: 424304 - RNA, 19 nt, Homo sapiens
  misc_RNA (1)...(19): siRNA sense strand
gaggcuacaagguacgaaa

SEQ ID NO: 424305 - RNA, 19 nt, Homo sapiens
  misc_RNA (1)...(19): siRNA sense strand
cguaccaccuggauguugu

SEQ ID NO: 424306 - RNA, 19 nt, Homo sapiens
  misc_RNA (1)...(19): siRNA sense strand
ucaguuuaguugaggauac

SEQ ID NO: 424307 - RNA, 19 nt, Homo sapiens
  misc_RNA (1)...(19): siRNA sense strand
ggaaaguguggucccaucu

SEQ ID NO: 424308 - RNA, 19 nt, Homo sapiens
  misc_RNA (1)...(19): siRNA sense strand
uaguugaggauaccacauu

SEQ ID NO: 424309 - RNA, 19 nt, Homo sapiens
  misc_RNA (1)...(19): siRNA sense strand
gcuacaagguacgaaacca

SEQ ID NO: 424310 - RNA, 19 nt, Homo sapiens
  misc_RNA (1)...(19): siRNA sense strand
cacuggagccucauuaugg

SEQ ID NO: 424311 - RNA, 19 nt, Homo sapiens
  misc_RNA (1)...(19): siRNA sense strand
cggccaacacugucaaguu

SEQ ID NO: 424312 - RNA, 19 nt, Homo sapiens
  misc_RNA (1)...(19): siRNA sense strand
acuggagccucauuaugga

SEQ ID NO: 424313 - RNA, 19 nt, Homo sapiens
  misc_RNA (1)...(19): siRNA sense strand
uaagcaggagcaucgcauu

SEQ ID NO: 424314 - RNA, 19 nt, Homo sapiens
  misc_RNA (1)...(19): siRNA sense strand
ggagccucauuauggaaag

SEQ ID NO: 424315 - RNA, 19 nt, Homo sapiens
  misc_RNA (1)...(19): siRNA sense strand
ggccaacacugucaaguuu

SEQ ID NO: 424316 - RNA, 19 nt, Homo sapiens
  misc_RNA (1)...(19): siRNA sense strand
gaauacggguccaucaauc

SEQ ID NO: 424317 - RNA, 19 nt, Homo sapiens
  misc_RNA (1)...(19): siRNA sense strand
gcaggagcaucgcauugga

SEQ ID NO: 424318 - RNA, 19 nt, Homo sapiens
  misc_RNA (1)...(19): siRNA sense strand
caucugacaagggaaauua

SEQ ID NO: 424319 - RNA, 19 nt, Homo sapiens
  misc_RNA (1)...(19): siRNA sense strand
gcaccauacuggaccaaca

SEQ ID NO: 424320 - RNA, 19 nt, Homo sapiens
  misc_RNA (1)...(19): siRNA sense strand
gcacuggagccucauuaug

SEQ ID NO: 424321 - RNA, 19 nt, Homo sapiens
  misc_RNA (1)...(19): siRNA sense strand
aaaguguggucccaucuga

SEQ ID NO: 424322 - RNA, 19 nt, Homo sapiens
  misc_RNA (1)...(19): siRNA sense strand
cauuggaggcuacaaggua

SEQ ID NO: 424323 - RNA, 19 nt, Homo sapiens
  misc_RNA (1)...(19): siRNA sense strand
aguugaggauaccacauua

SEQ ID NO: 424324 - RNA, 19 nt, Homo sapiens
  misc_RNA (1)...(19): siRNA sense strand
gaaaguguggucccaucug

SEQ ID NO: 424325 - RNA, 19 nt, Homo sapiens
  misc_RNA (1)...(19): siRNA sense strand
cagcacuggagccucauua

SEQ ID NO: 424326 - RNA, 19 nt, Homo sapiens
  misc_RNA (1)...(19): siRNA sense strand
ggaacccaaugccaaccau

SEQ ID NO: 424327 - RNA, 19 nt, Homo sapiens
  misc_RNA (1)...(19): siRNA sense strand
ugaauacggguccaucaau

SEQ ID NO: 424328 - RNA, 19 nt, Homo sapiens
  misc_RNA (1)...(19): siRNA sense strand
acacguaccaccuggaugu

SEQ ID NO: 424329 - RNA, 19 nt, Homo sapiens
  misc_RNA (1)...(19): siRNA sense strand
ucugacaagggaaauuaua

SEQ ID NO: 424330 - RNA, 19 nt, Homo sapiens
  misc_RNA (1)...(19): siRNA sense strand
cauacuggaccaacacaga

SEQ ID NO: 424331 - RNA, 19 nt, Homo sapiens
  misc_RNA (1)...(19): siRNA sense strand
ccaacacugucaaguuucg

SEQ ID NO: 424332 - RNA, 19 nt, Homo sapiens
  misc_RNA (1)...(19): siRNA sense strand
gaggcuacaagguacgaaa

SEQ ID NO: 424333 - RNA, 19 nt, Homo sapiens
  misc_RNA (1)...(19): siRNA sense strand
cguaccaccuggauguugu

SEQ ID NO: 424334 - RNA, 19 nt, Homo sapiens
  misc_RNA (1)...(19): siRNA sense strand
ucaguuuaguugaggauac

SEQ ID NO: 424335 - RNA, 19 nt, Homo sapiens
  misc_RNA (1)...(19): siRNA sense strand
ggaaaguguggucccaucu

SEQ ID NO: 424336 - RNA, 19 nt, Homo sapiens
  misc_RNA (1)...(19): siRNA sense strand
uaguugaggauaccacauu

SEQ ID NO: 424337 - RNA, 19 nt, Homo sapiens
  misc_RNA (1)...(19): siRNA sense strand
gcuacaagguacgaaacca

SEQ ID NO: 424338 - RNA, 19 nt, Homo sapiens
  misc_RNA (1)...(19): siRNA sense strand
cacuggagccucauuaugg

SEQ ID NO: 424339 - RNA, 19 nt, Homo sapiens
  misc_RNA (1)...(19): siRNA sense strand
cggccaacacugucaaguu

SEQ ID NO: 424340 - RNA, 19 nt, Homo sapiens
  misc_RNA (1)...(19): siRNA sense strand
acuggagccucauuaugga

SEQ ID NO: 424341 - RNA, 19 nt, Homo sapiens
  misc_RNA (1)...(19): siRNA sense strand
uaagcaggagcaucgcauu

SEQ ID NO: 424342 - RNA, 19 nt, Homo sapiens
  misc_RNA (1)...(19): siRNA sense strand
ggagccucauuauggaaag

SEQ ID NO: 424343 - RNA, 19 nt, Homo sapiens
  misc_RNA (1)...(19): siRNA sense strand
ggccaacacugucaaguuu

SEQ ID NO: 424344 - RNA, 19 nt, Homo sapiens
  misc_RNA (1)...(19): siRNA sense strand
gaauacggguccaucaauc

SEQ ID NO: 424345 - RNA, 19 nt, Homo sapiens
  misc_RNA (1)...(19): siRNA sense strand
gcaggagcaucgcauugga

SEQ ID NO: 424346 - RNA, 19 nt, Homo sapiens
  misc_RNA (1)...(19): siRNA sense strand
caucugacaagggaaauua

SEQ ID NO: 424347 - RNA, 19 nt, Homo sapiens
  misc_RNA (1)...(19): siRNA sense strand
gcaccauacuggaccaaca

SEQ ID NO: 424348 - RNA, 19 nt, Homo sapiens
  misc_RNA (1)...(19): siRNA sense strand
gcacuggagccucauuaug

SEQ ID NO: 424349 - RNA, 19 nt, Homo sapiens
  misc_RNA (1)...(19): siRNA sense strand
aaaguguggucccaucuga

SEQ ID NO: 424350 - RNA, 19 nt, Homo sapiens
  misc_RNA (1)...(19): siRNA sense strand
cauuggaggcuacaaggua

SEQ ID NO: 424351 - RNA, 19 nt, Homo sapiens
  misc_RNA (1)...(19): siRNA sense strand
aguugaggauaccacauua

SEQ ID NO: 424352 - RNA, 19 nt, Homo sapiens
  misc_RNA (1)...(19): siRNA sense strand
gaaaguguggucccaucug

SEQ ID NO: 424353 - RNA, 19 nt, Homo sapiens
  misc_RNA (1)...(19): siRNA sense strand
cagcacuggagccucauua

SEQ ID NO: 424354 - RNA, 19 nt, Homo sapiens
  misc_RNA (1)...(19): siRNA sense strand
ggaacccaaugccaaccau

SEQ ID NO: 424355 - RNA, 19 nt, Homo sapiens
  misc_RNA (1)...(19): siRNA sense strand
ugaauacggguccaucaau

SEQ ID NO: 424356 - RNA, 19 nt, Homo sapiens
  misc_RNA (1)...(19): siRNA sense strand
acacguaccaccuggaugu

SEQ ID NO: 424357 - RNA, 19 nt, Homo sapiens
  misc_RNA (1)...(19): siRNA sense strand
ucugacaagggaaauuaua

SEQ ID NO: 424358 - RNA, 19 nt, Homo sapiens
  misc_RNA (1)...(19): siRNA sense strand
cauacuggaccaacacaga

SEQ ID NO: 424359 - RNA, 19 nt, Homo sapiens
  misc_RNA (1)...(19): siRNA sense strand
ccaacacugucaaguuucg

SEQ ID NO: 424360 - RNA, 19 nt, Homo sapiens
  misc_RNA (1)...(19): siRNA sense strand
gaggcuacaagguacgaaa

SEQ ID NO: 424361 - RNA, 19 nt, Homo sapiens
  misc_RNA (1)...(19): siRNA sense strand
cguaccaccuggauguugu

SEQ ID NO: 424362 - RNA, 19 nt, Homo sapiens
  misc_RNA (1)...(19): siRNA sense strand
ucaguuuaguugaggauac

SEQ ID NO: 424363 - RNA, 19 nt, Homo sapiens
  misc_RNA (1)...(19): siRNA sense strand
ggaaaguguggucccaucu

SEQ ID NO: 424364 - RNA, 19 nt, Homo sapiens
  misc_RNA (1)...(19): siRNA sense strand
uaguugaggauaccacauu

SEQ ID NO: 424365 - RNA, 19 nt, Homo sapiens
  misc_RNA (1)...(19): siRNA sense strand
gcuacaagguacgaaacca

SEQ ID NO: 424366 - RNA, 19 nt, Homo sapiens
  misc_RNA (1)...(19): siRNA sense strand
cacuggagccucauuaugg

SEQ ID NO: 424367 - RNA, 19 nt, Homo sapiens
  misc_RNA (1)...(19): siRNA sense strand
cggccaacacugucaaguu

SEQ ID NO: 424368 - RNA, 19 nt, Homo sapiens
  misc_RNA (1)...(19): siRNA sense strand
acuggagccucauuaugga

SEQ ID NO: 424369 - RNA, 19 nt, Homo sapiens
  misc_RNA (1)...(19): siRNA sense strand
uaagcaggagcaucgcauu

SEQ ID NO: 424370 - RNA, 19 nt, Homo sapiens
  misc_RNA (1)...(19): siRNA sense strand
ggagccucauuauggaaag

SEQ ID NO: 424371 - RNA, 19 nt, Homo sapiens
  misc_RNA (1)...(19): siRNA sense strand
ggccaacacugucaaguuu

SEQ ID NO: 424372 - RNA, 19 nt, Homo sapiens
  misc_RNA (1)...(19): siRNA sense strand
gaauacggguccaucaauc

SEQ ID NO: 424373 - RNA, 19 nt, Homo sapiens
  misc_RNA (1)...(19): siRNA sense strand
gcaggagcaucgcauugga

SEQ ID NO: 424374 - RNA, 19 nt, Homo sapiens
  misc_RNA (1)...(19): siRNA sense strand
caucugacaagggaaauua

SEQ ID NO: 424375 - RNA, 19 nt, Homo sapiens
  misc_RNA (1)...(19): siRNA sense strand
gcaccauacuggaccaaca

SEQ ID NO: 424376 - RNA, 19 nt, Homo sapiens
  misc_RNA (1)...(19): siRNA sense strand
gcacuggagccucauuaug

SEQ ID NO: 424377 - RNA, 19 nt, Homo sapiens
  misc_RNA (1)...(19): siRNA sense strand
aaaguguggucccaucuga

SEQ ID NO: 424378 - RNA, 19 nt, Homo sapiens
  misc_RNA (1)...(19): siRNA sense strand
cauuggaggcuacaaggua

SEQ ID NO: 424379 - RNA, 19 nt, Homo sapiens
  misc_RNA (1)...(19): siRNA sense strand
aguugaggauaccacauua

SEQ ID NO: 424380 - RNA, 19 nt, Homo sapiens
  misc_RNA (1)...(19): siRNA sense strand
gaaaguguggucccaucug

SEQ ID NO: 424381 - RNA, 19 nt, Homo sapiens
  misc_RNA (1)...(19): siRNA sense strand
cagcacuggagccucauua

SEQ ID NO: 424382 - RNA, 19 nt, Homo sapiens
  misc_RNA (1)...(19): siRNA sense strand
ggaacccaaugccaaccau

SEQ ID NO: 424383 - RNA, 19 nt, Homo sapiens
  misc_RNA (1)...(19): siRNA sense strand
ugaauacggguccaucaau

SEQ ID NO: 424384 - RNA, 19 nt, Homo sapiens
  misc_RNA (1)...(19): siRNA sense strand
acacguaccaccuggaugu

SEQ ID NO: 424385 - RNA, 19 nt, Homo sapiens
  misc_RNA (1)...(19): siRNA sense strand
ucugacaagggaaauuaua

SEQ ID NO: 424386 - RNA, 19 nt, Homo sapiens
  misc_RNA (1)...(19): siRNA sense strand
cauacuggaccaacacaga

SEQ ID NO: 424387 - RNA, 19 nt, Homo sapiens
  misc_RNA (1)...(19): siRNA sense strand
ccaacacugucaaguuucg

SEQ ID NO: 424388 - RNA, 19 nt, Homo sapiens
  misc_RNA (1)...(19): siRNA sense strand
gaggcuacaagguacgaaa

SEQ ID NO: 424389 - RNA, 19 nt, Homo sapiens
  misc_RNA (1)...(19): siRNA sense strand
cguaccaccuggauguugu

SEQ ID NO: 424390 - RNA, 19 nt, Homo sapiens
  misc_RNA (1)...(19): siRNA sense strand
ucaguuuaguugaggauac

SEQ ID NO: 424391 - RNA, 19 nt, Homo sapiens
  misc_RNA (1)...(19): siRNA sense strand
ggaaaguguggucccaucu

SEQ ID NO: 424392 - RNA, 19 nt, Homo sapiens
  misc_RNA (1)...(19): siRNA sense strand
uaguugaggauaccacauu

SEQ ID NO: 424393 - RNA, 19 nt, Homo sapiens
  misc_RNA (1)...(19): siRNA sense strand
gcuacaagguacgaaacca

SEQ ID NO: 424394 - RNA, 19 nt, Homo sapiens
  misc_RNA (1)...(19): siRNA sense strand
cacuggagccucauuaugg

SEQ ID NO: 424395 - RNA, 19 nt, Homo sapiens
  misc_RNA (1)...(19): siRNA sense strand
cggccaacacugucaaguu

SEQ ID NO: 424396 - RNA, 19 nt, Homo sapiens
  misc_RNA (1)...(19): siRNA sense strand
acuggagccucauuaugga

SEQ ID NO: 424397 - RNA, 19 nt, Homo sapiens
  misc_RNA (1)...(19): siRNA sense strand
uaagcaggagcaucgcauu

SEQ ID NO: 424398 - RNA, 19 nt, Homo sapiens
  misc_RNA (1)...(19): siRNA sense strand
ggagccucauuauggaaag

SEQ ID NO: 424399 - RNA, 19 nt, Homo sapiens
  misc_RNA (1)...(19): siRNA sense strand
ggccaacacugucaaguuu

SEQ ID NO: 424400 - RNA, 19 nt, Homo sapiens
  misc_RNA (1)...(19): siRNA sense strand
gaauacggguccaucaauc

SEQ ID NO: 424401 - RNA, 19 nt, Homo sapiens
  misc_RNA (1)...(19): siRNA sense strand
gcaggagcaucgcauugga

SEQ ID NO: 424402 - RNA, 19 nt, Homo sapiens
  misc_RNA (1)...(19): siRNA sense strand
caucugacaagggaaauua

SEQ ID NO: 424403 - RNA, 19 nt, Homo sapiens
  misc_RNA (1)...(19): siRNA sense strand
gcaccauacuggaccaaca

SEQ ID NO: 424404 - RNA, 19 nt, Homo sapiens
  misc_RNA (1)...(19): siRNA sense strand
gcacuggagccucauuaug

SEQ ID NO: 424405 - RNA, 19 nt, Homo sapiens
  misc_RNA (1)...(19): siRNA sense strand
aaaguguggucccaucuga

SEQ ID NO: 424406 - RNA, 19 nt, Homo sapiens
  misc_RNA (1)...(19): siRNA sense strand
cauuggaggcuacaaggua

SEQ ID NO: 424407 - RNA, 19 nt, Homo sapiens
  misc_RNA (1)...(19): siRNA sense strand
aguugaggauaccacauua

SEQ ID NO: 424408 - RNA, 19 nt, Homo sapiens
  misc_RNA (1)...(19): siRNA sense strand
gaaaguguggucccaucug

SEQ ID NO: 424409 - RNA, 19 nt, Homo sapiens
  misc_RNA (1)...(19): siRNA sense strand
cagcacuggagccucauua

SEQ ID NO: 424410 - RNA, 19 nt, Homo sapiens
  misc_RNA (1)...(19): siRNA sense strand
ggaacccaaugccaaccau

SEQ ID NO: 424411 - RNA, 19 nt, Homo sapiens
  misc_RNA (1)...(19): siRNA sense strand
ugaauacggguccaucaau

SEQ ID NO: 424412 - RNA, 19 nt, Homo sapiens
  misc_RNA (1)...(19): siRNA sense strand
acacguaccaccuggaugu

SEQ ID NO: 424413 - RNA, 19 nt, Homo sapiens
  misc_RNA (1)...(19): siRNA sense strand
ucugacaagggaaauuaua

SEQ ID NO: 424414 - RNA, 19 nt, Homo sapiens
  misc_RNA (1)...(19): siRNA sense strand
cauacuggaccaacacaga

SEQ ID NO: 424415 - RNA, 19 nt, Homo sapiens
  misc_RNA (1)...(19): siRNA sense strand
ccaacacugucaaguuucg

SEQ ID NO: 424416 - RNA, 19 nt, Homo sapiens
  misc_RNA (1)...(19): siRNA sense strand
gaggcuacaagguacgaaa

SEQ ID NO: 424417 - RNA, 19 nt, Homo sapiens
  misc_RNA (1)...(19): siRNA sense strand
cguaccaccuggauguugu

SEQ ID NO: 424418 - RNA, 19 nt, Homo sapiens
  misc_RNA (1)...(19): siRNA sense strand
ucaguuuaguugaggauac

SEQ ID NO: 424419 - RNA, 19 nt, Homo sapiens
  misc_RNA (1)...(19): siRNA sense strand
ggaaaguguggucccaucu

SEQ ID NO: 424420 - RNA, 19 nt, Homo sapiens
  misc_RNA (1)...(19): siRNA sense strand
uaguugaggauaccacauu

SEQ ID NO: 424421 - RNA, 19 nt, Homo sapiens
  misc_RNA (1)...(19): siRNA sense strand
gcuacaagguacgaaacca

SEQ ID NO: 424422 - RNA, 19 nt, Homo sapiens
  misc_RNA (1)...(19): siRNA sense strand
cacuggagccucauuaugg

SEQ ID NO: 424423 - RNA, 19 nt, Homo sapiens
  misc_RNA (1)...(19): siRNA sense strand
cggccaacacugucaaguu

SEQ ID NO: 424424 - RNA, 19 nt, Homo sapiens
  misc_RNA (1)...(19): siRNA sense strand
acuggagccucauuaugga

SEQ ID NO: 424425 - RNA, 19 nt, Homo sapiens
  misc_RNA (1)...(19): siRNA sense strand
uaagcaggagcaucgcauu

SEQ ID NO: 424426 - RNA, 19 nt, Homo sapiens
  misc_RNA (1)...(19): siRNA sense strand
ggagccucauuauggaaag

SEQ ID NO: 424427 - RNA, 19 nt, Homo sapiens
  misc_RNA (1)...(19): siRNA sense strand
ggccaacacugucaaguuu

SEQ ID NO: 424428 - RNA, 19 nt, Homo sapiens
  misc_RNA (1)...(19): siRNA sense strand
gaauacggguccaucaauc

SEQ ID NO: 424429 - RNA, 19 nt, Homo sapiens
  misc_RNA (1)...(19): siRNA sense strand
gcaggagcaucgcauugga

SEQ ID NO: 424430 - RNA, 19 nt, Homo sapiens
  misc_RNA (1)...(19): siRNA sense strand
caucugacaagggaaauua

SEQ ID NO: 424431 - RNA, 19 nt, Homo sapiens
  misc_RNA (1)...(19): siRNA sense strand
gcaccauacuggaccaaca

SEQ ID NO: 424432 - RNA, 19 nt, Homo sapiens
  misc_RNA (1)...(19): siRNA sense strand
gcacuggagccucauuaug

SEQ ID NO: 424433 - RNA, 19 nt, Homo sapiens
  misc_RNA (1)...(19): siRNA sense strand
aaaguguggucccaucuga

SEQ ID NO: 424434 - RNA, 19 nt, Homo sapiens
  misc_RNA (1)...(19): siRNA sense strand
cauuggaggcuacaaggua

SEQ ID NO: 424435 - RNA, 19 nt, Homo sapiens
  misc_RNA (1)...(19): siRNA sense strand
aguugaggauaccacauua

SEQ ID NO: 424436 - RNA, 19 nt, Homo sapiens
  misc_RNA (1)...(19): siRNA sense strand
gaaaguguggucccaucug

SEQ ID NO: 424437 - RNA, 19 nt, Homo sapiens
  misc_RNA (1)...(19): siRNA sense strand
cagcacuggagccucauua

SEQ ID NO: 424438 - RNA, 19 nt, Homo sapiens
  misc_RNA (1)...(19): siRNA sense strand
ggaacccaaugccaaccau

SEQ ID NO: 424439 - RNA, 19 nt, Homo sapiens
  misc_RNA (1)...(19): siRNA sense strand
ugaauacggguccaucaau

SEQ ID NO: 424440 - RNA, 19 nt, Homo sapiens
  misc_RNA (1)...(19): siRNA sense strand
acacguaccaccuggaugu

SEQ ID NO: 424441 - RNA, 19 nt, Homo sapiens
  misc_RNA (1)...(19): siRNA sense strand
ucugacaagggaaauuaua

SEQ ID NO: 424442 - RNA, 19 nt, Homo sapiens
  misc_RNA (1)...(19): siRNA sense strand
cauacuggaccaacacaga

SEQ ID NO: 424443 - RNA, 19 nt, Homo sapiens
  misc_RNA (1)...(19): siRNA sense strand
ccaacacugucaaguuucg

SEQ ID NO: 424444 - RNA, 19 nt, Homo sapiens
  misc_RNA (1)...(19): siRNA sense strand
gaggcuacaagguacgaaa

SEQ ID NO: 424445 - RNA, 19 nt, Homo sapiens
  misc_RNA (1)...(19): siRNA sense strand
cguaccaccuggauguugu

SEQ ID NO: 424446 - RNA, 19 nt, Homo sapiens
  misc_RNA (1)...(19): siRNA sense strand
ucaguuuaguugaggauac

SEQ ID NO: 424447 - RNA, 19 nt, Homo sapiens
  misc_RNA (1)...(19): siRNA sense strand
ggaaaguguggucccaucu

SEQ ID NO: 424448 - RNA, 19 nt, Homo sapiens
  misc_RNA (1)...(19): siRNA sense strand
uaguugaggauaccacauu

SEQ ID NO: 424449 - RNA, 19 nt, Homo sapiens
  misc_RNA (1)...(19): siRNA sense strand
gcuacaagguacgaaacca

SEQ ID NO: 424450 - RNA, 19 nt, Homo sapiens
  misc_RNA (1)...(19): siRNA sense strand
cacuggagccucauuaugg

SEQ ID NO: 424451 - RNA, 19 nt, Homo sapiens
  misc_RNA (1)...(19): siRNA sense strand
cggccaacacugucaaguu

SEQ ID NO: 424452 - RNA, 19 nt, Homo sapiens
  misc_RNA (1)...(19): siRNA sense strand
acuggagccucauuaugga

SEQ ID NO: 424453 - RNA, 19 nt, Homo sapiens
  misc_RNA (1)...(19): siRNA sense strand
uaagcaggagcaucgcauu

SEQ ID NO: 424454 - RNA, 19 nt, Homo sapiens
  misc_RNA (1)...(19): siRNA sense strand
ggagccucauuauggaaag

SEQ ID NO: 424455 - RNA, 19 nt, Homo sapiens
  misc_RNA (1)...(19): siRNA sense strand
ggccaacacugucaaguuu

SEQ ID NO: 424456 - RNA, 19 nt, Homo sapiens
  misc_RNA (1)...(19): siRNA sense strand
gaauacggguccaucaauc

SEQ ID NO: 424457 - RNA, 19 nt, Homo sapiens
  misc_RNA (1)...(19): siRNA sense strand
gcaggagcaucgcauugga

SEQ ID NO: 424458 - RNA, 19 nt, Homo sapiens
  misc_RNA (1)...(19): siRNA sense strand
caucugacaagggaaauua

SEQ ID NO: 424459 - RNA, 19 nt, Homo sapiens
  misc_RNA (1)...(19): siRNA sense strand
gcaccauacuggaccaaca

SEQ ID NO: 424460 - RNA, 19 nt, Homo sapiens
  misc_RNA (1)...(19): siRNA sense strand
gcacuggagccucauuaug

SEQ ID NO: 424461 - RNA, 19 nt, Homo sapiens
  misc_RNA (1)...(19): siRNA sense strand
aaaguguggucccaucuga

SEQ ID NO: 424462 - RNA, 19 nt, Homo sapiens
  misc_RNA (1)...(19): siRNA sense strand
cauuggaggcuacaaggua

SEQ ID NO: 424463 - RNA, 19 nt, Homo sapiens
  misc_RNA (1)...(19): siRNA sense strand
aguugaggauaccacauua

SEQ ID NO: 424464 - RNA, 19 nt, Homo sapiens
  misc_RNA (1)...(19): siRNA sense strand
gaaaguguggucccaucug

SEQ ID NO: 424465 - RNA, 19 nt, Homo sapiens
  misc_RNA (1)...(19): siRNA sense strand
cagcacuggagccucauua

SEQ ID NO: 424466 - RNA, 19 nt, Homo sapiens
  misc_RNA (1)...(19): siRNA sense strand
ggaacccaaugccaaccau

SEQ ID NO: 424467 - RNA, 19 nt, Homo sapiens
  misc_RNA (1)...(19): siRNA sense strand
ugaauacggguccaucaau

SEQ ID NO: 424468 - RNA, 19 nt, Homo sapiens
  misc_RNA (1)...(19): siRNA sense strand
acacguaccaccuggaugu

SEQ ID NO: 424469 - RNA, 19 nt, Homo sapiens
  misc_RNA (1)...(19): siRNA sense strand
ucugacaagggaaauuaua

SEQ ID NO: 424470 - RNA, 19 nt, Homo sapiens
  misc_RNA (1)...(19): siRNA sense strand
cauacuggaccaacacaga

SEQ ID NO: 424471 - RNA, 19 nt, Homo sapiens
  misc_RNA (1)...(19): siRNA sense strand
ccaacacugucaaguuucg

SEQ ID NO: 424472 - RNA, 19 nt, Homo sapiens
  misc_RNA (1)...(19): siRNA sense strand
gaggcuacaagguacgaaa

SEQ ID NO: 424473 - RNA, 19 nt, Homo sapiens
  misc_RNA (1)...(19): siRNA sense strand
cguaccaccuggauguugu

SEQ ID NO: 424474 - RNA, 19 nt, Homo sapiens
  misc_RNA (1)...(19): siRNA sense strand
ucaguuuaguugaggauac

SEQ ID NO: 424475 - RNA, 19 nt, Homo sapiens
  misc_RNA (1)...(19): siRNA sense strand
ggaaaguguggucccaucu

SEQ ID NO: 424476 - RNA, 19 nt, Homo sapiens
  misc_RNA (1)...(19): siRNA sense strand
uaguugaggauaccacauu

SEQ ID NO: 424477 - RNA, 19 nt, Homo sapiens
  misc_RNA (1)...(19): siRNA sense strand
gcuacaagguacgaaacca

SEQ ID NO: 424478 - RNA, 19 nt, Homo sapiens
  misc_RNA (1)...(19): siRNA sense strand
cacuggagccucauuaugg

SEQ ID NO: 424479 - RNA, 19 nt, Homo sapiens
  misc_RNA (1)...(19): siRNA sense strand
cggccaacacugucaaguu

SEQ ID NO: 424480 - RNA, 19 nt, Homo sapiens
  misc_RNA (1)...(19): siRNA sense strand
acuggagccucauuaugga

SEQ ID NO: 424481 - RNA, 19 nt, Homo sapiens
  misc_RNA (1)...(19): siRNA sense strand
uaagcaggagcaucgcauu

SEQ ID NO: 424482 - RNA, 19 nt, Homo sapiens
  misc_RNA (1)...(19): siRNA sense strand
ggagccucauuauggaaag

SEQ ID NO: 424483 - RNA, 19 nt, Homo sapiens
  misc_RNA (1)...(19): siRNA sense strand
ggccaacacugucaaguuu

SEQ ID NO: 424484 - RNA, 19 nt, Homo sapiens
  misc_RNA (1)...(19): siRNA sense strand
gaauacggguccaucaauc

SEQ ID NO: 424485 - RNA, 19 nt, Homo sapiens
  misc_RNA (1)...(19): siRNA sense strand
gcaggagcaucgcauugga

SEQ ID NO: 424486 - RNA, 19 nt, Homo sapiens
  misc_RNA (1)...(19): siRNA sense strand
caucugacaagggaaauua

SEQ ID NO: 424487 - RNA, 19 nt, Homo sapiens
  misc_RNA (1)...(19): siRNA sense strand
gcaccauacuggaccaaca

SEQ ID NO: 424488 - RNA, 19 nt, Homo sapiens
  misc_RNA (1)...(19): siRNA sense strand
gcacuggagccucauuaug

SEQ ID NO: 424489 - RNA, 19 nt, Homo sapiens
  misc_RNA (1)...(19): siRNA sense strand
aaaguguggucccaucuga

SEQ ID NO: 424490 - RNA, 19 nt, Homo sapiens
  misc_RNA (1)...(19): siRNA sense strand
cauuggaggcuacaaggua

SEQ ID NO: 424491 - RNA, 19 nt, Homo sapiens
  misc_RNA (1)...(19): siRNA sense strand
aguugaggauaccacauua

SEQ ID NO: 424492 - RNA, 19 nt, Homo sapiens
  misc_RNA (1)...(19): siRNA sense strand
gaaaguguggucccaucug

SEQ ID NO: 424493 - RNA, 19 nt, Homo sapiens
  misc_RNA (1)...(19): siRNA sense strand
cagcacuggagccucauua

SEQ ID NO: 424494 - RNA, 19 nt, Homo sapiens
  misc_RNA (1)...(19): siRNA sense strand
ggaacccaaugccaaccau

SEQ ID NO: 424495 - RNA, 19 nt, Homo sapiens
  misc_RNA (1)...(19): siRNA sense strand
ugaauacggguccaucaau

SEQ ID NO: 424496 - RNA, 19 nt, Homo sapiens
  misc_RNA (1)...(19): siRNA sense strand
acacguaccaccuggaugu

SEQ ID NO: 424497 - RNA, 19 nt, Homo sapiens
  misc_RNA (1)...(19): siRNA sense strand
ucugacaagggaaauuaua

SEQ ID NO: 424498 - RNA, 19 nt, Homo sapiens
  misc_RNA (1)...(19): siRNA sense strand
cauacuggaccaacacaga

SEQ ID NO: 424499 - RNA, 19 nt, Homo sapiens
  misc_RNA (1)...(19): siRNA sense strand
ccaacacugucaaguuucg

SEQ ID NO: 424500 - RNA, 19 nt, Homo sapiens
  misc_RNA (1)...(19): siRNA sense strand
gaggcuacaagguacgaaa

SEQ ID NO: 424501 - RNA, 19 nt, Homo sapiens
  misc_RNA (1)...(19): siRNA sense strand
cguaccaccuggauguugu

SEQ ID NO: 424502 - RNA, 19 nt, Homo sapiens
  misc_RNA (1)...(19): siRNA sense strand
ucaguuuaguugaggauac

SEQ ID NO: 424503 - RNA, 19 nt, Homo sapiens
  misc_RNA (1)...(19): siRNA sense strand
ggaaaguguggucccaucu

SEQ ID NO: 424504 - RNA, 19 nt, Homo sapiens
  misc_RNA (1)...(19): siRNA sense strand
uaguugaggauaccacauu

SEQ ID NO: 424505 - RNA, 19 nt, Homo sapiens
  misc_RNA (1)...(19): siRNA sense strand
gcuacaagguacgaaacca

SEQ ID NO: 424506 - RNA, 19 nt, Homo sapiens
  misc_RNA (1)...(19): siRNA sense strand
cacuggagccucauuaugg

SEQ ID NO: 424507 - RNA, 19 nt, Homo sapiens
  misc_RNA (1)...(19): siRNA sense strand
cggccaacacugucaaguu

SEQ ID NO: 424508 - RNA, 19 nt, Homo sapiens
  misc_RNA (1)...(19): siRNA sense strand
acuggagccucauuaugga

SEQ ID NO: 424509 - RNA, 19 nt, Homo sapiens
  misc_RNA (1)...(19): siRNA sense strand
uaagcaggagcaucgcauu

SEQ ID NO: 424510 - RNA, 19 nt, Homo sapiens
  misc_RNA (1)...(19): siRNA sense strand
ggagccucauuauggaaag

SEQ ID NO: 424511 - RNA, 19 nt, Homo sapiens
  misc_RNA (1)...(19): siRNA sense strand
ggccaacacugucaaguuu

SEQ ID NO: 424512 - RNA, 19 nt, Homo sapiens
  misc_RNA (1)...(19): siRNA sense strand
gaauacggguccaucaauc

SEQ ID NO: 424513 - RNA, 19 nt, Homo sapiens
  misc_RNA (1)...(19): siRNA sense strand
gcaggagcaucgcauugga

SEQ ID NO: 424514 - RNA, 19 nt, Homo sapiens
  misc_RNA (1)...(19): siRNA sense strand
caucugacaagggaaauua

SEQ ID NO: 424515 - RNA, 19 nt, Homo sapiens
  misc_RNA (1)...(19): siRNA sense strand
gcaccauacuggaccaaca

SEQ ID NO: 424516 - RNA, 19 nt, Homo sapiens
  misc_RNA (1)...(19): siRNA sense strand
gcacuggagccucauuaug

SEQ ID NO: 424517 - RNA, 19 nt, Homo sapiens
  misc_RNA (1)...(19): siRNA sense strand
aaaguguggucccaucuga

SEQ ID NO: 424518 - RNA, 19 nt, Homo sapiens
  misc_RNA (1)...(19): siRNA sense strand
cauuggaggcuacaaggua

SEQ ID NO: 424519 - RNA, 19 nt, Homo sapiens
  misc_RNA (1)...(19): siRNA sense strand
aguugaggauaccacauua

SEQ ID NO: 424520 - RNA, 19 nt, Homo sapiens
  misc_RNA (1)...(19): siRNA sense strand
gaaaguguggucccaucug

SEQ ID NO: 424521 - RNA, 19 nt, Homo sapiens
  misc_RNA (1)...(19): siRNA sense strand
cagcacuggagccucauua

SEQ ID NO: 424522 - RNA, 19 nt, Homo sapiens
  misc_RNA (1)...(19): siRNA sense strand
ggaacccaaugccaaccau

SEQ ID NO: 424523 - RNA, 19 nt, Homo sapiens
  misc_RNA (1)...(19): siRNA sense strand
ugaauacggguccaucaau

SEQ ID NO: 424524 - RNA, 19 nt, Homo sapiens
  misc_RNA (1)...(19): siRNA sense strand
acacguaccaccuggaugu

SEQ ID NO: 424525 - RNA, 19 nt, Homo sapiens
  misc_RNA (1)...(19): siRNA sense strand
ucugacaagggaaauuaua

SEQ ID NO: 424526 - RNA, 19 nt, Homo sapiens
  misc_RNA (1)...(19): siRNA sense strand
cauacuggaccaacacaga

SEQ ID NO: 424527 - RNA, 19 nt, Homo sapiens
  misc_RNA (1)...(19): siRNA sense strand
ccaacacugucaaguuucg

SEQ ID NO: 424528 - RNA, 19 nt, Homo sapiens
  misc_RNA (1)...(19): siRNA sense strand
gaggcuacaagguacgaaa

SEQ ID NO: 424529 - RNA, 19 nt, Homo sapiens
  misc_RNA (1)...(19): siRNA sense strand
cguaccaccuggauguugu

SEQ ID NO: 424530 - RNA, 19 nt, Homo sapiens
  misc_RNA (1)...(19): siRNA sense strand
ucaguuuaguugaggauac

SEQ ID NO: 424531 - RNA, 19 nt, Homo sapiens
  misc_RNA (1)...(19): siRNA sense strand
ggaaaguguggucccaucu

SEQ ID NO: 424532 - RNA, 19 nt, Homo sapiens
  misc_RNA (1)...(19): siRNA sense strand
uaguugaggauaccacauu

SEQ ID NO: 424533 - RNA, 19 nt, Homo sapiens
  misc_RNA (1)...(19): siRNA sense strand
gcuacaagguacgaaacca

SEQ ID NO: 424534 - RNA, 19 nt, Homo sapiens
  misc_RNA (1)...(19): siRNA sense strand
cacuggagccucauuaugg

SEQ ID NO: 424535 - RNA, 19 nt, Homo sapiens
  misc_RNA (1)...(19): siRNA sense strand
cggccaacacugucaaguu

SEQ ID NO: 424536 - RNA, 19 nt, Homo sapiens
  misc_RNA (1)...(19): siRNA sense strand
acuggagccucauuaugga

SEQ ID NO: 424537 - RNA, 19 nt, Homo sapiens
  misc_RNA (1)...(19): siRNA sense strand
uaagcaggagcaucgcauu

SEQ ID NO: 424538 - RNA, 19 nt, Homo sapiens
  misc_RNA (1)...(19): siRNA sense strand
ggagccucauuauggaaag

SEQ ID NO: 424539 - RNA, 19 nt, Homo sapiens
  misc_RNA (1)...(19): siRNA sense strand
ggccaacacugucaaguuu

SEQ ID NO: 424540 - RNA, 19 nt, Homo sapiens
  misc_RNA (1)...(19): siRNA sense strand
gaauacggguccaucaauc

SEQ ID NO: 424541 - RNA, 19 nt, Homo sapiens
  misc_RNA (1)...(19): siRNA sense strand
gcaggagcaucgcauugga

SEQ ID NO: 424542 - RNA, 19 nt, Homo sapiens
  misc_RNA (1)...(19): siRNA sense strand
caucugacaagggaaauua

SEQ ID NO: 424543 - RNA, 19 nt, Homo sapiens
  misc_RNA (1)...(19): siRNA sense strand
gcaccauacuggaccaaca

SEQ ID NO: 424544 - RNA, 19 nt, Homo sapiens
  misc_RNA (1)...(19): siRNA sense strand
gcacuggagccucauuaug

SEQ ID NO: 424545 - RNA, 19 nt, Homo sapiens
  misc_RNA (1)...(19): siRNA sense strand
aaaguguggucccaucuga

SEQ ID NO: 424546 - RNA, 19 nt, Homo sapiens
  misc_RNA (1)...(19): siRNA sense strand
cauuggaggcuacaaggua

SEQ ID NO: 424547 - RNA, 19 nt, Homo sapiens
  misc_RNA (1)...(19): siRNA sense strand
aguugaggauaccacauua

SEQ ID NO: 424548 - RNA, 19 nt, Homo sapiens
  misc_RNA (1)...(19): siRNA sense strand
gaaaguguggucccaucug

SEQ ID NO: 424549 - RNA, 19 nt, Homo sapiens
  misc_RNA (1)...(19): siRNA sense strand
cagcacuggagccucauua

SEQ ID NO: 424550 - RNA, 19 nt, Homo sapiens
  misc_RNA (1)...(19): siRNA sense strand
ggaacccaaugccaaccau

SEQ ID NO: 424551 - RNA, 19 nt, Homo sapiens
  misc_RNA (1)...(19): siRNA sense strand
ugaauacggguccaucaau

SEQ ID NO: 424552 - RNA, 19 nt, Homo sapiens
  misc_RNA (1)...(19): siRNA sense strand
acacguaccaccuggaugu

SEQ ID NO: 424553 - RNA, 19 nt, Homo sapiens
  misc_RNA (1)...(19): siRNA sense strand
ucugacaagggaaauuaua

SEQ ID NO: 424554 - RNA, 19 nt, Homo sapiens
  misc_RNA (1)...(19): siRNA sense strand
cauacuggaccaacacaga

SEQ ID NO: 424555 - RNA, 19 nt, Homo sapiens
  misc_RNA (1)...(19): siRNA sense strand
ccaacacugucaaguuucg

SEQ ID NO: 424556 - RNA, 19 nt, Homo sapiens
  misc_RNA (1)...(19): siRNA sense strand
gaggcuacaagguacgaaa

SEQ ID NO: 424557 - RNA, 19 nt, Homo sapiens
  misc_RNA (1)...(19): siRNA sense strand
cguaccaccuggauguugu

SEQ ID NO: 424558 - RNA, 19 nt, Homo sapiens
  misc_RNA (1)...(19): siRNA sense strand
ucaguuuaguugaggauac

SEQ ID NO: 424559 - RNA, 19 nt, Homo sapiens
  misc_RNA (1)...(19): siRNA sense strand
ggaaaguguggucccaucu

SEQ ID NO: 424560 - RNA, 19 nt, Homo sapiens
  misc_RNA (1)...(19): siRNA sense strand
uaguugaggauaccacauu

SEQ ID NO: 424561 - RNA, 19 nt, Homo sapiens
  misc_RNA (1)...(19): siRNA sense strand
gcuacaagguacgaaacca

SEQ ID NO: 424562 - RNA, 19 nt, Homo sapiens
  misc_RNA (1)...(19): siRNA sense strand
cacuggagccucauuaugg

SEQ ID NO: 424563 - RNA, 19 nt, Homo sapiens
  misc_RNA (1)...(19): siRNA sense strand
cggccaacacugucaaguu

SEQ ID NO: 424564 - RNA, 19 nt, Homo sapiens
  misc_RNA (1)...(19): siRNA sense strand
acuggagccucauuaugga

SEQ ID NO: 424565 - RNA, 19 nt, Homo sapiens
  misc_RNA (1)...(19): siRNA sense strand
uaagcaggagcaucgcauu

SEQ ID NO: 424566 - RNA, 19 nt, Homo sapiens
  misc_RNA (1)...(19): siRNA sense strand
ggagccucauuauggaaag

SEQ ID NO: 424567 - RNA, 19 nt, Homo sapiens
  misc_RNA (1)...(19): siRNA sense strand
ggccaacacugucaaguuu

SEQ ID NO: 424568 - RNA, 19 nt, Homo sapiens
  misc_RNA (1)...(19): siRNA sense strand
gaauacggguccaucaauc

SEQ ID NO: 424569 - RNA, 19 nt, Homo sapiens
  misc_RNA (1)...(19): siRNA sense strand
gcaggagcaucgcauugga

SEQ ID NO: 424570 - RNA, 19 nt, Homo sapiens
  misc_RNA (1)...(19): siRNA sense strand
caucugacaagggaaauua

SEQ ID NO: 424571 - RNA, 19 nt, Homo sapiens
  misc_RNA (1)...(19): siRNA sense strand
gcaccauacuggaccaaca

SEQ ID NO: 424572 - RNA, 19 nt, Homo sapiens
  misc_RNA (1)...(19): siRNA sense strand
gcacuggagccucauuaug

SEQ ID NO: 424573 - RNA, 19 nt, Homo sapiens
  misc_RNA (1)...(19): siRNA sense strand
aaaguguggucccaucuga

SEQ ID NO: 424574 - RNA, 19 nt, Homo sapiens
  misc_RNA (1)...(19): siRNA sense strand
cauuggaggcuacaaggua

SEQ ID NO: 424575 - RNA, 19 nt, Homo sapiens
  misc_RNA (1)...(19): siRNA sense strand
aguugaggauaccacauua

SEQ ID NO: 424576 - RNA, 19 nt, Homo sapiens
  misc_RNA (1)...(19): siRNA sense strand
gaaaguguggucccaucug

SEQ ID NO: 424577 - RNA, 19 nt, Homo sapiens
  misc_RNA (1)...(19): siRNA sense strand
cagcacuggagccucauua

SEQ ID NO: 424578 - RNA, 19 nt, Homo sapiens
  misc_RNA (1)...(19): siRNA sense strand
ggaacccaaugccaaccau

SEQ ID NO: 424579 - RNA, 19 nt, Homo sapiens
  misc_RNA (1)...(19): siRNA sense strand
ugaauacggguccaucaau

SEQ ID NO: 424580 - RNA, 19 nt, Homo sapiens
  misc_RNA (1)...(19): siRNA sense strand
acacguaccaccuggaugu

SEQ ID NO: 424581 - RNA, 19 nt, Homo sapiens
  misc_RNA (1)...(19): siRNA sense strand
ucugacaagggaaauuaua

SEQ ID NO: 424582 - RNA, 19 nt, Homo sapiens
  misc_RNA (1)...(19): siRNA sense strand
cauacuggaccaacacaga

SEQ ID NO: 424583 - RNA, 19 nt, Homo sapiens
  misc_RNA (1)...(19): siRNA sense strand
ccaacacugucaaguuucg

SEQ ID NO: 424584 - RNA, 19 nt, Homo sapiens
  misc_RNA (1)...(19): siRNA sense strand
gaggcuacaagguacgaaa

SEQ ID NO: 424585 - RNA, 19 nt, Homo sapiens
  misc_RNA (1)...(19): siRNA sense strand
cguaccaccuggauguugu

SEQ ID NO: 424586 - RNA, 19 nt, Homo sapiens
  misc_RNA (1)...(19): siRNA sense strand
ucaguuuaguugaggauac

SEQ ID NO: 424587 - RNA, 19 nt, Homo sapiens
  misc_RNA (1)...(19): siRNA sense strand
ggaaaguguggucccaucu

SEQ ID NO: 424588 - RNA, 19 nt, Homo sapiens
  misc_RNA (1)...(19): siRNA sense strand
uaguugaggauaccacauu

SEQ ID NO: 424589 - RNA, 19 nt, Homo sapiens
  misc_RNA (1)...(19): siRNA sense strand
gcuacaagguacgaaacca

SEQ ID NO: 424590 - RNA, 19 nt, Homo sapiens
  misc_RNA (1)...(19): siRNA sense strand
cacuggagccucauuaugg

SEQ ID NO: 424591 - RNA, 19 nt, Homo sapiens
  misc_RNA (1)...(19): siRNA sense strand
cggccaacacugucaaguu

SEQ ID NO: 424592 - RNA, 19 nt, Homo sapiens
  misc_RNA (1)...(19): siRNA sense strand
acuggagccucauuaugga

SEQ ID NO: 424593 - RNA, 19 nt, Homo sapiens
  misc_RNA (1)...(19): siRNA sense strand
uaagcaggagcaucgcauu

SEQ ID NO: 424594 - RNA, 19 nt, Homo sapiens
  misc_RNA (1)...(19): siRNA sense strand
ggagccucauuauggaaag

SEQ ID NO: 424595 - RNA, 19 nt, Homo sapiens
  misc_RNA (1)...(19): siRNA sense strand
ggccaacacugucaaguuu

SEQ ID NO: 424596 - RNA, 19 nt, Homo sapiens
  misc_RNA (1)...(19): siRNA sense strand
gaauacggguccaucaauc

SEQ ID NO: 424597 - RNA, 19 nt, Homo sapiens
  misc_RNA (1)...(19): siRNA sense strand
gcaggagcaucgcauugga

SEQ ID NO: 424598 - RNA, 19 nt, Homo sapiens
  misc_RNA (1)...(19): siRNA sense strand
caucugacaagggaaauua

SEQ ID NO: 424599 - RNA, 19 nt, Homo sapiens
  misc_RNA (1)...(19): siRNA sense strand
gcaccauacuggaccaaca

SEQ ID NO: 424600 - RNA, 19 nt, Homo sapiens
  misc_RNA (1)...(19): siRNA sense strand
gcacuggagccucauuaug

SEQ ID NO: 424601 - RNA, 19 nt, Homo sapiens
  misc_RNA (1)...(19): siRNA sense strand
aaaguguggucccaucuga

SEQ ID NO: 424602 - RNA, 19 nt, Homo sapiens
  misc_RNA (1)...(19): siRNA sense strand
cauuggaggcuacaaggua

SEQ ID NO: 424603 - RNA, 19 nt, Homo sapiens
  misc_RNA (1)...(19): siRNA sense strand
aguugaggauaccacauua

SEQ ID NO: 424604 - RNA, 19 nt, Homo sapiens
  misc_RNA (1)...(19): siRNA sense strand
gaaaguguggucccaucug

SEQ ID NO: 424605 - RNA, 19 nt, Homo sapiens
  misc_RNA (1)...(19): siRNA sense strand
cagcacuggagccucauua

SEQ ID NO: 424606 - RNA, 19 nt, Homo sapiens
  misc_RNA (1)...(19): siRNA sense strand
ggaacccaaugccaaccau

SEQ ID NO: 424607 - RNA, 19 nt, Homo sapiens
  misc_RNA (1)...(19): siRNA sense strand
ugaauacggguccaucaau

SEQ ID NO: 424608 - RNA, 19 nt, Homo sapiens
  misc_RNA (1)...(19): siRNA sense strand
acacguaccaccuggaugu

SEQ ID NO: 424609 - RNA, 19 nt, Homo sapiens
  misc_RNA (1)...(19): siRNA sense strand
ucugacaagggaaauuaua

SEQ ID NO: 424610 - RNA, 19 nt, Homo sapiens
  misc_RNA (1)...(19): siRNA sense strand
cauacuggaccaacacaga

SEQ ID NO: 424611 - RNA, 19 nt, Homo sapiens
  misc_RNA (1)...(19): siRNA sense strand
ccaacacugucaaguuucg

SEQ ID NO: 424612 - RNA, 19 nt, Homo sapiens
  misc_RNA (1)...(19): siRNA sense strand
gaggcuacaagguacgaaa

SEQ ID NO: 424613 - RNA, 19 nt, Homo sapiens
  misc_RNA (1)...(19): siRNA sense strand
cguaccaccuggauguugu

SEQ ID NO: 424614 - RNA, 19 nt, Homo sapiens
  misc_RNA (1)...(19): siRNA sense strand
ucaguuuaguugaggauac

SEQ ID NO: 424615 - RNA, 19 nt, Homo sapiens
  misc_RNA (1)...(19): siRNA sense strand
ggaaaguguggucccaucu

SEQ ID NO: 424616 - RNA, 19 nt, Homo sapiens
  misc_RNA (1)...(19): siRNA sense strand
uaguugaggauaccacauu

SEQ ID NO: 424617 - RNA, 19 nt, Homo sapiens
  misc_RNA (1)...(19): siRNA sense strand
gcuacaagguacgaaacca

SEQ ID NO: 424618 - RNA, 19 nt, Homo sapiens
  misc_RNA (1)...(19): siRNA sense strand
cacuggagccucauuaugg

SEQ ID NO: 424619 - RNA, 19 nt, Homo sapiens
  misc_RNA (1)...(19): siRNA sense strand
cggccaacacugucaaguu

SEQ ID NO: 424620 - RNA, 19 nt, Homo sapiens
  misc_RNA (1)...(19): siRNA sense strand
acuggagccucauuaugga

SEQ ID NO: 424621 - RNA, 19 nt, Homo sapiens
  misc_RNA (1)...(19): siRNA sense strand
uaagcaggagcaucgcauu

SEQ ID NO: 424622 - RNA, 19 nt, Homo sapiens
  misc_RNA (1)...(19): siRNA sense strand
ggagccucauuauggaaag

SEQ ID NO: 424623 - RNA, 19 nt, Homo sapiens
  misc_RNA (1)...(19): siRNA sense strand
ggccaacacugucaaguuu

SEQ ID NO: 424624 - RNA, 19 nt, Homo sapiens
  misc_RNA (1)...(19): siRNA sense strand
gaauacggguccaucaauc

SEQ ID NO: 424625 - RNA, 19 nt, Homo sapiens
  misc_RNA (1)...(19): siRNA sense strand
gcaggagcaucgcauugga

SEQ ID NO: 424626 - RNA, 19 nt, Homo sapiens
  misc_RNA (1)...(19): siRNA sense strand
caucugacaagggaaauua

SEQ ID NO: 424627 - RNA, 19 nt, Homo sapiens
  misc_RNA (1)...(19): siRNA sense strand
gcaccauacuggaccaaca

SEQ ID NO: 424628 - RNA, 19 nt, Homo sapiens
  misc_RNA (1)...(19): siRNA sense strand
gcacuggagccucauuaug

SEQ ID NO: 424629 - RNA, 19 nt, Homo sapiens
  misc_RNA (1)...(19): siRNA sense strand
aaaguguggucccaucuga

SEQ ID NO: 424630 - RNA, 19 nt, Homo sapiens
  misc_RNA (1)...(19): siRNA sense strand
cauuggaggcuacaaggua

SEQ ID NO: 424631 - RNA, 19 nt, Homo sapiens
  misc_RNA (1)...(19): siRNA sense strand
aguugaggauaccacauua

SEQ ID NO: 424632 - RNA, 19 nt, Homo sapiens
  misc_RNA (1)...(19): siRNA sense strand
gaaaguguggucccaucug

SEQ ID NO: 424633 - RNA, 19 nt, Homo sapiens
  misc_RNA (1)...(19): siRNA sense strand
cagcacuggagccucauua

SEQ ID NO: 424634 - RNA, 19 nt, Homo sapiens
  misc_RNA (1)...(19): siRNA sense strand
ggaacccaaugccaaccau

SEQ ID NO: 424635 - RNA, 19 nt, Homo sapiens
  misc_RNA (1)...(19): siRNA sense strand
ugaauacggguccaucaau

SEQ ID NO: 424636 - RNA, 19 nt, Homo sapiens
  misc_RNA (1)...(19): siRNA sense strand
acacguaccaccuggaugu

SEQ ID NO: 424637 - RNA, 19 nt, Homo sapiens
  misc_RNA (1)...(19): siRNA sense strand
ucugacaagggaaauuaua

SEQ ID NO: 424638 - RNA, 19 nt, Homo sapiens
  misc_RNA (1)...(19): siRNA sense strand
cauacuggaccaacacaga

SEQ ID NO: 424639 - RNA, 19 nt, Homo sapiens
  misc_RNA (1)...(19): siRNA sense strand
ccaacacugucaaguuucg

SEQ ID NO: 424640 - RNA, 19 nt, Homo sapiens
  misc_RNA (1)...(19): siRNA sense strand
gaggcuacaagguacgaaa

SEQ ID NO: 424641 - RNA, 19 nt, Homo sapiens
  misc_RNA (1)...(19): siRNA sense strand
cguaccaccuggauguugu

SEQ ID NO: 424642 - RNA, 19 nt, Homo sapiens
  misc_RNA (1)...(19): siRNA sense strand
ucaguuuaguugaggauac

SEQ ID NO: 424643 - RNA, 19 nt, Homo sapiens
  misc_RNA (1)...(19): siRNA sense strand
ggaaaguguggucccaucu

SEQ ID NO: 424644 - RNA, 19 nt, Homo sapiens
  misc_RNA (1)...(19): siRNA sense strand
uaguugaggauaccacauu

SEQ ID NO: 424645 - RNA, 19 nt, Homo sapiens
  misc_RNA (1)...(19): siRNA sense strand
gcuacaagguacgaaacca

SEQ ID NO: 424646 - RNA, 19 nt, Homo sapiens
  misc_RNA (1)...(19): siRNA sense strand
cacuggagccucauuaugg

SEQ ID NO: 424647 - RNA, 19 nt, Homo sapiens
  misc_RNA (1)...(19): siRNA sense strand
cggccaacacugucaaguu

SEQ ID NO: 424648 - RNA, 19 nt, Homo sapiens
  misc_RNA (1)...(19): siRNA sense strand
acuggagccucauuaugga

SEQ ID NO: 424649 - RNA, 19 nt, Homo sapiens
  misc_RNA (1)...(19): siRNA sense strand
uaagcaggagcaucgcauu

SEQ ID NO: 424650 - RNA, 19 nt, Homo sapiens
  misc_RNA (1)...(19): siRNA sense strand
ggagccucauuauggaaag

SEQ ID NO: 424651 - RNA, 19 nt, Homo sapiens
  misc_RNA (1)...(19): siRNA sense strand
ggccaacacugucaaguuu

SEQ ID NO: 424652 - RNA, 19 nt, Homo sapiens
  misc_RNA (1)...(19): siRNA sense strand
gaauacggguccaucaauc

SEQ ID NO: 424653 - RNA, 19 nt, Homo sapiens
  misc_RNA (1)...(19): siRNA sense strand
gcaggagcaucgcauugga

SEQ ID NO: 424654 - RNA, 19 nt, Homo sapiens
  misc_RNA (1)...(19): siRNA sense strand
caucugacaagggaaauua

SEQ ID NO: 424655 - RNA, 19 nt, Homo sapiens
  misc_RNA (1)...(19): siRNA sense strand
gcaccauacuggaccaaca

SEQ ID NO: 424656 - RNA, 19 nt, Homo sapiens
  misc_RNA (1)...(19): siRNA sense strand
gcacuggagccucauuaug

SEQ ID NO: 424657 - RNA, 19 nt, Homo sapiens
  misc_RNA (1)...(19): siRNA sense strand
aaaguguggucccaucuga

SEQ ID NO: 424658 - RNA, 19 nt, Homo sapiens
  misc_RNA (1)...(19): siRNA sense strand
cauuggaggcuacaaggua

SEQ ID NO: 424659 - RNA, 19 nt, Homo sapiens
  misc_RNA (1)...(19): siRNA sense strand
aguugaggauaccacauua

SEQ ID NO: 424660 - RNA, 19 nt, Homo sapiens
  misc_RNA (1)...(19): siRNA sense strand
gaaaguguggucccaucug

SEQ ID NO: 424661 - RNA, 19 nt, Homo sapiens
  misc_RNA (1)...(19): siRNA sense strand
cagcacuggagccucauua

SEQ ID NO: 424662 - RNA, 19 nt, Homo sapiens
  misc_RNA (1)...(19): siRNA sense strand
ggaacccaaugccaaccau

SEQ ID NO: 424663 - RNA, 19 nt, Homo sapiens
  misc_RNA (1)...(19): siRNA sense strand
ugaauacggguccaucaau

SEQ ID NO: 424664 - RNA, 19 nt, Homo sapiens
  misc_RNA (1)...(19): siRNA sense strand
acacguaccaccuggaugu

SEQ ID NO: 424665 - RNA, 19 nt, Homo sapiens
  misc_RNA (1)...(19): siRNA sense strand
ucugacaagggaaauuaua

SEQ ID NO: 424666 - RNA, 19 nt, Homo sapiens
  misc_RNA (1)...(19): siRNA sense strand
cauacuggaccaacacaga

SEQ ID NO: 424667 - RNA, 19 nt, Homo sapiens
  misc_RNA (1)...(19): siRNA sense strand
ccaacacugucaaguuucg

SEQ ID NO: 424668 - RNA, 19 nt, Homo sapiens
  misc_RNA (1)...(19): siRNA sense strand
gaggcuacaagguacgaaa

SEQ ID NO: 424669 - RNA, 19 nt, Homo sapiens
  misc_RNA (1)...(19): siRNA sense strand
cguaccaccuggauguugu

SEQ ID NO: 424670 - RNA, 19 nt, Homo sapiens
  misc_RNA (1)...(19): siRNA sense strand
ucaguuuaguugaggauac

SEQ ID NO: 424671 - RNA, 19 nt, Homo sapiens
  misc_RNA (1)...(19): siRNA sense strand
ggaaaguguggucccaucu

SEQ ID NO: 424672 - RNA, 19 nt, Homo sapiens
  misc_RNA (1)...(19): siRNA sense strand
uaguugaggauaccacauu

SEQ ID NO: 424673 - RNA, 19 nt, Homo sapiens
  misc_RNA (1)...(19): siRNA sense strand
gcuacaagguacgaaacca

SEQ ID NO: 424674 - RNA, 19 nt, Homo sapiens
  misc_RNA (1)...(19): siRNA sense strand
cacuggagccucauuaugg

SEQ ID NO: 424675 - RNA, 19 nt, Homo sapiens
  misc_RNA (1)...(19): siRNA sense strand
cggccaacacugucaaguu

SEQ ID NO: 424676 - RNA, 19 nt, Homo sapiens
  misc_RNA (1)...(19): siRNA sense strand
acuggagccucauuaugga

SEQ ID NO: 424677 - RNA, 19 nt, Homo sapiens
  misc_RNA (1)...(19): siRNA sense strand
uaagcaggagcaucgcauu

SEQ ID NO: 424678 - RNA, 19 nt, Homo sapiens
  misc_RNA (1)...(19): siRNA sense strand
ggagccucauuauggaaag

SEQ ID NO: 424679 - RNA, 19 nt, Homo sapiens
  misc_RNA (1)...(19): siRNA sense strand
ggccaacacugucaaguuu

SEQ ID NO: 424680 - RNA, 19 nt, Homo sapiens
  misc_RNA (1)...(19): siRNA sense strand
gaauacggguccaucaauc

SEQ ID NO: 424681 - RNA, 19 nt, Homo sapiens
  misc_RNA (1)...(19): siRNA sense strand
gcaggagcaucgcauugga

SEQ ID NO: 424682 - RNA, 19 nt, Homo sapiens
  misc_RNA (1)...(19): siRNA sense strand
caucugacaagggaaauua

SEQ ID NO: 424683 - RNA, 19 nt, Homo sapiens
  misc_RNA (1)...(19): siRNA sense strand
gcaccauacuggaccaaca

SEQ ID NO: 424684 - RNA, 19 nt, Homo sapiens
  misc_RNA (1)...(19): siRNA sense strand
gcacuggagccucauuaug

SEQ ID NO: 424685 - RNA, 19 nt, Homo sapiens
  misc_RNA (1)...(19): siRNA sense strand
aaaguguggucccaucuga

SEQ ID NO: 424686 - RNA, 19 nt, Homo sapiens
  misc_RNA (1)...(19): siRNA sense strand
cauuggaggcuacaaggua

SEQ ID NO: 424687 - RNA, 19 nt, Homo sapiens
  misc_RNA (1)...(19): siRNA sense strand
aguugaggauaccacauua

SEQ ID NO: 424688 - RNA, 19 nt, Homo sapiens
  misc_RNA (1)...(19): siRNA sense strand
gaaaguguggucccaucug

SEQ ID NO: 424689 - RNA, 19 nt, Homo sapiens
  misc_RNA (1)...(19): siRNA sense strand
cagcacuggagccucauua

SEQ ID NO: 424690 - RNA, 19 nt, Homo sapiens
  misc_RNA (1)...(19): siRNA sense strand
ggaacccaaugccaaccau

SEQ ID NO: 424691 - RNA, 19 nt, Homo sapiens
  misc_RNA (1)...(19): siRNA sense strand
ugaauacggguccaucaau

SEQ ID NO: 424692 - RNA, 19 nt, Homo sapiens
  misc_RNA (1)...(19): siRNA sense strand
acacguaccaccuggaugu

SEQ ID NO: 424693 - RNA, 19 nt, Homo sapiens
  misc_RNA (1)...(19): siRNA sense strand
ucugacaagggaaauuaua

SEQ ID NO: 424694 - RNA, 19 nt, Homo sapiens
  misc_RNA (1)...(19): siRNA sense strand
cauacuggaccaacacaga

SEQ ID NO: 424695 - RNA, 19 nt, Homo sapiens
  misc_RNA (1)...(19): siRNA sense strand
ccaacacugucaaguuucg

SEQ ID NO: 424696 - RNA, 19 nt, Homo sapiens
  misc_RNA (1)...(19): siRNA sense strand
gaggcuacaagguacgaaa

SEQ ID NO: 424697 - RNA, 19 nt, Homo sapiens
  misc_RNA (1)...(19): siRNA sense strand
cguaccaccuggauguugu

SEQ ID NO: 424698 - RNA, 19 nt, Homo sapiens
  misc_RNA (1)...(19): siRNA sense strand
ucaguuuaguugaggauac

SEQ ID NO: 424699 - RNA, 19 nt, Homo sapiens
  misc_RNA (1)...(19): siRNA sense strand
ggaaaguguggucccaucu

SEQ ID NO: 424700 - RNA, 19 nt, Homo sapiens
  misc_RNA (1)...(19): siRNA sense strand
uaguugaggauaccacauu

SEQ ID NO: 424701 - RNA, 19 nt, Homo sapiens
  misc_RNA (1)...(19): siRNA sense strand
gcuacaagguacgaaacca

SEQ ID NO: 424702 - RNA, 19 nt, Homo sapiens
  misc_RNA (1)...(19): siRNA sense strand
cacuggagccucauuaugg

SEQ ID NO: 424703 - RNA, 19 nt, Homo sapiens
  misc_RNA (1)...(19): siRNA sense strand
cggccaacacugucaaguu

SEQ ID NO: 424704 - RNA, 19 nt, Homo sapiens
  misc_RNA (1)...(19): siRNA sense strand
acuggagccucauuaugga

SEQ ID NO: 424705 - RNA, 19 nt, Homo sapiens
  misc_RNA (1)...(19): siRNA sense strand
uaagcaggagcaucgcauu

SEQ ID NO: 424706 - RNA, 19 nt, Homo sapiens
  misc_RNA (1)...(19): siRNA sense strand
ggagccucauuauggaaag

SEQ ID NO: 424707 - RNA, 19 nt, Homo sapiens
  misc_RNA (1)...(19): siRNA sense strand
ggccaacacugucaaguuu

SEQ ID NO: 424708 - RNA, 19 nt, Homo sapiens
  misc_RNA (1)...(19): siRNA sense strand
gaauacggguccaucaauc

SEQ ID NO: 424709 - RNA, 19 nt, Homo sapiens
  misc_RNA (1)...(19): siRNA sense strand
gcaggagcaucgcauugga

SEQ ID NO: 424710 - RNA, 19 nt, Homo sapiens
  misc_RNA (1)...(19): siRNA sense strand
caucugacaagggaaauua

SEQ ID NO: 424711 - RNA, 19 nt, Homo sapiens
  misc_RNA (1)...(19): siRNA sense strand
gcaccauacuggaccaaca

SEQ ID NO: 424712 - RNA, 19 nt, Homo sapiens
  misc_RNA (1)...(19): siRNA sense strand
gcacuggagccucauuaug

SEQ ID NO: 424713 - RNA, 19 nt, Homo sapiens
  misc_RNA (1)...(19): siRNA sense strand
aaaguguggucccaucuga

SEQ ID NO: 424714 - RNA, 19 nt, Homo sapiens
  misc_RNA (1)...(19): siRNA sense strand
cauuggaggcuacaaggua

SEQ ID NO: 424715 - RNA, 19 nt, Homo sapiens
  misc_RNA (1)...(19): siRNA sense strand
aguugaggauaccacauua

SEQ ID NO: 424716 - RNA, 19 nt, Homo sapiens
  misc_RNA (1)...(19): siRNA sense strand
gaaaguguggucccaucug

SEQ ID NO: 424717 - RNA, 19 nt, Homo sapiens
  misc_RNA (1)...(19): siRNA sense strand
cagcacuggagccucauua

SEQ ID NO: 424718 - RNA, 19 nt, Homo sapiens
  misc_RNA (1)...(19): siRNA sense strand
ggaacccaaugccaaccau

SEQ ID NO: 424719 - RNA, 19 nt, Homo sapiens
  misc_RNA (1)...(19): siRNA sense strand
ugaauacggguccaucaau

SEQ ID NO: 424720 - RNA, 19 nt, Homo sapiens
  misc_RNA (1)...(19): siRNA sense strand
acacguaccaccuggaugu

SEQ ID NO: 424721 - RNA, 19 nt, Homo sapiens
  misc_RNA (1)...(19): siRNA sense strand
ucugacaagggaaauuaua

SEQ ID NO: 424722 - RNA, 19 nt, Homo sapiens
  misc_RNA (1)...(19): siRNA sense strand
cauacuggaccaacacaga

SEQ ID NO: 424723 - RNA, 19 nt, Homo sapiens
  misc_RNA (1)...(19): siRNA sense strand
ccaacacugucaaguuucg

SEQ ID NO: 424724 - RNA, 19 nt, Homo sapiens
  misc_RNA (1)...(19): siRNA sense strand
gaggcuacaagguacgaaa

SEQ ID NO: 424725 - RNA, 19 nt, Homo sapiens
  misc_RNA (1)...(19): siRNA sense strand
cguaccaccuggauguugu

SEQ ID NO: 424726 - RNA, 19 nt, Homo sapiens
  misc_RNA (1)...(19): siRNA sense strand
ucaguuuaguugaggauac

SEQ ID NO: 424727 - RNA, 19 nt, Homo sapiens
  misc_RNA (1)...(19): siRNA sense strand
ggaaaguguggucccaucu

SEQ ID NO: 424728 - RNA, 19 nt, Homo sapiens
  misc_RNA (1)...(19): siRNA sense strand
uaguugaggauaccacauu

SEQ ID NO: 424729 - RNA, 19 nt, Homo sapiens
  misc_RNA (1)...(19): siRNA sense strand
gcuacaagguacgaaacca

SEQ ID NO: 424730 - RNA, 19 nt, Homo sapiens
  misc_RNA (1)...(19): siRNA sense strand
cacuggagccucauuaugg

SEQ ID NO: 424731 - RNA, 19 nt, Homo sapiens
  misc_RNA (1)...(19): siRNA sense strand
cggccaacacugucaaguu

SEQ ID NO: 424732 - RNA, 19 nt, Homo sapiens
  misc_RNA (1)...(19): siRNA sense strand
acuggagccucauuaugga

SEQ ID NO: 424733 - RNA, 19 nt, Homo sapiens
  misc_RNA (1)...(19): siRNA sense strand
uaagcaggagcaucgcauu

SEQ ID NO: 424734 - RNA, 19 nt, Homo sapiens
  misc_RNA (1)...(19): siRNA sense strand
ggagccucauuauggaaag

SEQ ID NO: 424735 - RNA, 19 nt, Homo sapiens
  misc_RNA (1)...(19): siRNA sense strand
ggccaacacugucaaguuu

SEQ ID NO: 424736 - RNA, 19 nt, Homo sapiens
  misc_RNA (1)...(19): siRNA sense strand
gaauacggguccaucaauc

SEQ ID NO: 424737 - RNA, 19 nt, Homo sapiens
  misc_RNA (1)...(19): siRNA sense strand
gcaggagcaucgcauugga

SEQ ID NO: 424738 - RNA, 19 nt, Homo sapiens
  misc_RNA (1)...(19): siRNA sense strand
caucugacaagggaaauua

SEQ ID NO: 424739 - RNA, 19 nt, Homo sapiens
  misc_RNA (1)...(19): siRNA sense strand
gcaccauacuggaccaaca

SEQ ID NO: 424740 - RNA, 19 nt, Homo sapiens
  misc_RNA (1)...(19): siRNA sense strand
gcacuggagccucauuaug

SEQ ID NO: 424741 - RNA, 19 nt, Homo sapiens
  misc_RNA (1)...(19): siRNA sense strand
aaaguguggucccaucuga

SEQ ID NO: 424742 - RNA, 19 nt, Homo sapiens
  misc_RNA (1)...(19): siRNA sense strand
cauuggaggcuacaaggua

SEQ ID NO: 424743 - RNA, 19 nt, Homo sapiens
  misc_RNA (1)...(19): siRNA sense strand
aguugaggauaccacauua

SEQ ID NO: 424744 - RNA, 19 nt, Homo sapiens
  misc_RNA (1)...(19): siRNA sense strand
gaaaguguggucccaucug

SEQ ID NO: 424745 - RNA, 19 nt, Homo sapiens
  misc_RNA (1)...(19): siRNA sense strand
cagcacuggagccucauua

SEQ ID NO: 424746 - RNA, 19 nt, Homo sapiens
  misc_RNA (1)...(19): siRNA sense strand
ggaacccaaugccaaccau

SEQ ID NO: 424747 - RNA, 19 nt, Homo sapiens
  misc_RNA (1)...(19): siRNA sense strand
ugaauacggguccaucaau

SEQ ID NO: 424748 - RNA, 19 nt, Homo sapiens
  misc_RNA (1)...(19): siRNA sense strand
acacguaccaccuggaugu

SEQ ID NO: 424749 - RNA, 19 nt, Homo sapiens
  misc_RNA (1)...(19): siRNA sense strand
ucugacaagggaaauuaua

SEQ ID NO: 424750 - RNA, 19 nt, Homo sapiens
  misc_RNA (1)...(19): siRNA sense strand
cauacuggaccaacacaga

SEQ ID NO: 424751 - RNA, 19 nt, Homo sapiens
  misc_RNA (1)...(19): siRNA sense strand
ccaacacugucaaguuucg

SEQ ID NO: 424752 - RNA, 19 nt, Homo sapiens
  misc_RNA (1)...(19): siRNA sense strand
gaggcuacaagguacgaaa

SEQ ID NO: 424753 - RNA, 19 nt, Homo sapiens
  misc_RNA (1)...(19): siRNA sense strand
cguaccaccuggauguugu

SEQ ID NO: 424754 - RNA, 19 nt, Homo sapiens
  misc_RNA (1)...(19): siRNA sense strand
ucaguuuaguugaggauac

SEQ ID NO: 424755 - RNA, 19 nt, Homo sapiens
  misc_RNA (1)...(19): siRNA sense strand
ggaaaguguggucccaucu

SEQ ID NO: 424756 - RNA, 19 nt, Homo sapiens
  misc_RNA (1)...(19): siRNA sense strand
uaguugaggauaccacauu

SEQ ID NO: 424757 - RNA, 19 nt, Homo sapiens
  misc_RNA (1)...(19): siRNA sense strand
gcuacaagguacgaaacca

SEQ ID NO: 424758 - RNA, 19 nt, Homo sapiens
  misc_RNA (1)...(19): siRNA sense strand
cacuggagccucauuaugg

SEQ ID NO: 424759 - RNA, 19 nt, Homo sapiens
  misc_RNA (1)...(19): siRNA sense strand
cggccaacacugucaaguu

SEQ ID NO: 424760 - RNA, 19 nt, Homo sapiens
  misc_RNA (1)...(19): siRNA sense strand
acuggagccucauuaugga

SEQ ID NO: 424761 - RNA, 19 nt, Homo sapiens
  misc_RNA (1)...(19): siRNA sense strand
uaagcaggagcaucgcauu

SEQ ID NO: 424762 - RNA, 19 nt, Homo sapiens
  misc_RNA (1)...(19): siRNA sense strand
ggagccucauuauggaaag

SEQ ID NO: 424763 - RNA, 19 nt, Homo sapiens
  misc_RNA (1)...(19): siRNA sense strand
ggccaacacugucaaguuu

SEQ ID NO: 424764 - RNA, 19 nt, Homo sapiens
  misc_RNA (1)...(19): siRNA sense strand
gaauacggguccaucaauc

SEQ ID NO: 424765 - RNA, 19 nt, Homo sapiens
  misc_RNA (1)...(19): siRNA sense strand
gcaggagcaucgcauugga

SEQ ID NO: 424766 - RNA, 19 nt, Homo sapiens
  misc_RNA (1)...(19): siRNA sense strand
caucugacaagggaaauua

SEQ ID NO: 424767 - RNA, 19 nt, Homo sapiens
  misc_RNA (1)...(19): siRNA sense strand
gcaccauacuggaccaaca

SEQ ID NO: 424768 - RNA, 19 nt, Homo sapiens
  misc_RNA (1)...(19): siRNA sense strand
gcacuggagccucauuaug

SEQ ID NO: 424769 - RNA, 19 nt, Homo sapiens
  misc_RNA (1)...(19): siRNA sense strand
aaaguguggucccaucuga

SEQ ID NO: 424770 - RNA, 19 nt, Homo sapiens
  misc_RNA (1)...(19): siRNA sense strand
cauuggaggcuacaaggua

SEQ ID NO: 424771 - RNA, 19 nt, Homo sapiens
  misc_RNA (1)...(19): siRNA sense strand
aguugaggauaccacauua

SEQ ID NO: 424772 - RNA, 19 nt, Homo sapiens
  misc_RNA (1)...(19): siRNA sense strand
gaaaguguggucccaucug

SEQ ID NO: 424773 - RNA, 19 nt, Homo sapiens
  misc_RNA (1)...(19): siRNA sense strand
cagcacuggagccucauua

SEQ ID NO: 424774 - RNA, 19 nt, Homo sapiens
  misc_RNA (1)...(19): siRNA sense strand
ggaacccaaugccaaccau

SEQ ID NO: 424775 - RNA, 19 nt, Homo sapiens
  misc_RNA (1)...(19): siRNA sense strand
ugaauacggguccaucaau

SEQ ID NO: 424776 - RNA, 19 nt, Homo sapiens
  misc_RNA (1)...(19): siRNA sense strand
acacguaccaccuggaugu

SEQ ID NO: 424777 - RNA, 19 nt, Homo sapiens
  misc_RNA (1)...(19): siRNA sense strand
ucugacaagggaaauuaua

SEQ ID NO: 424778 - RNA, 19 nt, Homo sapiens
  misc_RNA (1)...(19): siRNA sense strand
cauacuggaccaacacaga

SEQ ID NO: 424779 - RNA, 19 nt, Homo sapiens
  misc_RNA (1)...(19): siRNA sense strand
ccaacacugucaaguuucg

SEQ ID NO: 424780 - RNA, 19 nt, Homo sapiens
  misc_RNA (1)...(19): siRNA sense strand
gaggcuacaagguacgaaa

SEQ ID NO: 424781 - RNA, 19 nt, Homo sapiens
  misc_RNA (1)...(19): siRNA sense strand
cguaccaccuggauguugu

SEQ ID NO: 424782 - RNA, 19 nt, Homo sapiens
  misc_RNA (1)...(19): siRNA sense strand
ucaguuuaguugaggauac

SEQ ID NO: 424783 - RNA, 19 nt, Homo sapiens
  misc_RNA (1)...(19): siRNA sense strand
ggaaaguguggucccaucu

SEQ ID NO: 424784 - RNA, 19 nt, Homo sapiens
  misc_RNA (1)...(19): siRNA sense strand
uaguugaggauaccacauu

SEQ ID NO: 424785 - RNA, 19 nt, Homo sapiens
  misc_RNA (1)...(19): siRNA sense strand
gcuacaagguacgaaacca

SEQ ID NO: 424786 - RNA, 19 nt, Homo sapiens
  misc_RNA (1)...(19): siRNA sense strand
cacuggagccucauuaugg

SEQ ID NO: 424787 - RNA, 19 nt, Homo sapiens
  misc_RNA (1)...(19): siRNA sense strand
cggccaacacugucaaguu

SEQ ID NO: 424788 - RNA, 19 nt, Homo sapiens
  misc_RNA (1)...(19): siRNA sense strand
acuggagccucauuaugga

SEQ ID NO: 424789 - RNA, 19 nt, Homo sapiens
  misc_RNA (1)...(19): siRNA sense strand
uaagcaggagcaucgcauu

SEQ ID NO: 424790 - RNA, 19 nt, Homo sapiens
  misc_RNA (1)...(19): siRNA sense strand
ggagccucauuauggaaag

SEQ ID NO: 424791 - RNA, 19 nt, Homo sapiens
  misc_RNA (1)...(19): siRNA sense strand
ggccaacacugucaaguuu

SEQ ID NO: 424792 - RNA, 19 nt, Homo sapiens
  misc_RNA (1)...(19): siRNA sense strand
gaauacggguccaucaauc

SEQ ID NO: 424793 - RNA, 19 nt, Homo sapiens
  misc_RNA (1)...(19): siRNA sense strand
gcaggagcaucgcauugga

SEQ ID NO: 424794 - RNA, 19 nt, Homo sapiens
  misc_RNA (1)...(19): siRNA sense strand
caucugacaagggaaauua

SEQ ID NO: 424795 - RNA, 19 nt, Homo sapiens
  misc_RNA (1)...(19): siRNA sense strand
gcaccauacuggaccaaca

SEQ ID NO: 424796 - RNA, 19 nt, Homo sapiens
  misc_RNA (1)...(19): siRNA sense strand
gcacuggagccucauuaug

SEQ ID NO: 424797 - RNA, 19 nt, Homo sapiens
  misc_RNA (1)...(19): siRNA sense strand
aaaguguggucccaucuga

SEQ ID NO: 424798 - RNA, 19 nt, Homo sapiens
  misc_RNA (1)...(19): siRNA sense strand
cauuggaggcuacaaggua

SEQ ID NO: 424799 - RNA, 19 nt, Homo sapiens
  misc_RNA (1)...(19): siRNA sense strand
aguugaggauaccacauua

SEQ ID NO: 424800 - RNA, 19 nt, Homo sapiens
  misc_RNA (1)...(19): siRNA sense strand
gaaaguguggucccaucug

SEQ ID NO: 424801 - RNA, 19 nt, Homo sapiens
  misc_RNA (1)...(19): siRNA sense strand
cagcacuggagccucauua

SEQ ID NO: 424802 - RNA, 19 nt, Homo sapiens
  misc_RNA (1)...(19): siRNA sense strand
ggaacccaaugccaaccau

SEQ ID NO: 424803 - RNA, 19 nt, Homo sapiens
  misc_RNA (1)...(19): siRNA sense strand
ugaauacggguccaucaau

SEQ ID NO: 424804 - RNA, 19 nt, Homo sapiens
  misc_RNA (1)...(19): siRNA sense strand
acacguaccaccuggaugu

SEQ ID NO: 424805 - RNA, 19 nt, Homo sapiens
  misc_RNA (1)...(19): siRNA sense strand
ucugacaagggaaauuaua

SEQ ID NO: 424806 - RNA, 19 nt, Homo sapiens
  misc_RNA (1)...(19): siRNA sense strand
cauacuggaccaacacaga

SEQ ID NO: 424807 - RNA, 19 nt, Homo sapiens
  misc_RNA (1)...(19): siRNA sense strand
ccaacacugucaaguuucg

SEQ ID NO: 424808 - RNA, 19 nt, Homo sapiens
  misc_RNA (1)...(19): siRNA sense strand
gaggcuacaagguacgaaa

SEQ ID NO: 424809 - RNA, 19 nt, Homo sapiens
  misc_RNA (1)...(19): siRNA sense strand
cguaccaccuggauguugu

SEQ ID NO: 424810 - RNA, 19 nt, Homo sapiens
  misc_RNA (1)...(19): siRNA sense strand
ucaguuuaguugaggauac

SEQ ID NO: 424811 - RNA, 19 nt, Homo sapiens
  misc_RNA (1)...(19): siRNA sense strand
ggaaaguguggucccaucu

SEQ ID NO: 424812 - RNA, 19 nt, Homo sapiens
  misc_RNA (1)...(19): siRNA sense strand
uaguugaggauaccacauu

SEQ ID NO: 424813 - RNA, 19 nt, Homo sapiens
  misc_RNA (1)...(19): siRNA sense strand
gcuacaagguacgaaacca

SEQ ID NO: 424814 - RNA, 19 nt, Homo sapiens
  misc_RNA (1)...(19): siRNA sense strand
cacuggagccucauuaugg

SEQ ID NO: 424815 - RNA, 19 nt, Homo sapiens
  misc_RNA (1)...(19): siRNA sense strand
cggccaacacugucaaguu

SEQ ID NO: 424816 - RNA, 19 nt, Homo sapiens
  misc_RNA (1)...(19): siRNA sense strand
acuggagccucauuaugga

SEQ ID NO: 424817 - RNA, 19 nt, Homo sapiens
  misc_RNA (1)...(19): siRNA sense strand
uaagcaggagcaucgcauu

SEQ ID NO: 424818 - RNA, 19 nt, Homo sapiens
  misc_RNA (1)...(19): siRNA sense strand
ggagccucauuauggaaag

SEQ ID NO: 424819 - RNA, 19 nt, Homo sapiens
  misc_RNA (1)...(19): siRNA sense strand
ggccaacacugucaaguuu

SEQ ID NO: 424820 - RNA, 19 nt, Homo sapiens
  misc_RNA (1)...(19): siRNA sense strand
gaauacggguccaucaauc

SEQ ID NO: 424821 - RNA, 19 nt, Homo sapiens
  misc_RNA (1)...(19): siRNA sense strand
gcaggagcaucgcauugga

SEQ ID NO: 424822 - RNA, 19 nt, Homo sapiens
  misc_RNA (1)...(19): siRNA sense strand
caucugacaagggaaauua

SEQ ID NO: 424823 - RNA, 19 nt, Homo sapiens
  misc_RNA (1)...(19): siRNA sense strand
gcaccauacuggaccaaca

SEQ ID NO: 424824 - RNA, 19 nt, Homo sapiens
  misc_RNA (1)...(19): siRNA sense strand
gcacuggagccucauuaug

SEQ ID NO: 424825 - RNA, 19 nt, Homo sapiens
  misc_RNA (1)...(19): siRNA sense strand
aaaguguggucccaucuga

SEQ ID NO: 424826 - RNA, 19 nt, Homo sapiens
  misc_RNA (1)...(19): siRNA sense strand
cauuggaggcuacaaggua

SEQ ID NO: 424827 - RNA, 19 nt, Homo sapiens
  misc_RNA (1)...(19): siRNA sense strand
aguugaggauaccacauua

SEQ ID NO: 424828 - RNA, 19 nt, Homo sapiens
  misc_RNA (1)...(19): siRNA sense strand
gaaaguguggucccaucug

SEQ ID NO: 424829 - RNA, 19 nt, Homo sapiens
  misc_RNA (1)...(19): siRNA sense strand
cagcacuggagccucauua

SEQ ID NO: 424830 - RNA, 19 nt, Homo sapiens
  misc_RNA (1)...(19): siRNA sense strand
ggaacccaaugccaaccau

SEQ ID NO: 424831 - RNA, 19 nt, Homo sapiens
  misc_RNA (1)...(19): siRNA sense strand
ugaauacggguccaucaau

SEQ ID NO: 424832 - RNA, 19 nt, Homo sapiens
  misc_RNA (1)...(19): siRNA sense strand
acacguaccaccuggaugu

SEQ ID NO: 424833 - RNA, 19 nt, Homo sapiens
  misc_RNA (1)...(19): siRNA sense strand
ucugacaagggaaauuaua

SEQ ID NO: 424834 - RNA, 19 nt, Homo sapiens
  misc_RNA (1)...(19): siRNA sense strand
cauacuggaccaacacaga

SEQ ID NO: 424835 - RNA, 19 nt, Homo sapiens
  misc_RNA (1)...(19): siRNA sense strand
ccaacacugucaaguuucg

SEQ ID NO: 424836 - RNA, 19 nt, Homo sapiens
  misc_RNA (1)...(19): siRNA sense strand
gaggcuacaagguacgaaa

SEQ ID NO: 424837 - RNA, 19 nt, Homo sapiens
  misc_RNA (1)...(19): siRNA sense strand
cguaccaccuggauguugu

SEQ ID NO: 424838 - RNA, 19 nt, Homo sapiens
  misc_RNA (1)...(19): siRNA sense strand
ucaguuuaguugaggauac

SEQ ID NO: 424839 - RNA, 19 nt, Homo sapiens
  misc_RNA (1)...(19): siRNA sense strand
ggaaaguguggucccaucu

SEQ ID NO: 424840 - RNA, 19 nt, Homo sapiens
  misc_RNA (1)...(19): siRNA sense strand
uaguugaggauaccacauu

SEQ ID NO: 424841 - RNA, 19 nt, Homo sapiens
  misc_RNA (1)...(19): siRNA sense strand
gcuacaagguacgaaacca

SEQ ID NO: 424842 - RNA, 19 nt, Homo sapiens
  misc_RNA (1)...(19): siRNA sense strand
cacuggagccucauuaugg

SEQ ID NO: 424843 - RNA, 19 nt, Homo sapiens
  misc_RNA (1)...(19): siRNA sense strand
cggccaacacugucaaguu

SEQ ID NO: 424844 - RNA, 19 nt, Homo sapiens
  misc_RNA (1)...(19): siRNA sense strand
acuggagccucauuaugga

SEQ ID NO: 424845 - RNA, 19 nt, Homo sapiens
  misc_RNA (1)...(19): siRNA sense strand
uaagcaggagcaucgcauu

SEQ ID NO: 424846 - RNA, 19 nt, Homo sapiens
  misc_RNA (1)...(19): siRNA sense strand
ggagccucauuauggaaag

SEQ ID NO: 424847 - RNA, 19 nt, Homo sapiens
  misc_RNA (1)...(19): siRNA sense strand
ggccaacacugucaaguuu

SEQ ID NO: 424848 - RNA, 19 nt, Homo sapiens
  misc_RNA (1)...(19): siRNA sense strand
gaauacggguccaucaauc

SEQ ID NO: 424849 - RNA, 19 nt, Homo sapiens
  misc_RNA (1)...(19): siRNA sense strand
gcaggagcaucgcauugga

SEQ ID NO: 424850 - RNA, 19 nt, Homo sapiens
  misc_RNA (1)...(19): siRNA sense strand
caucugacaagggaaauua

SEQ ID NO: 424851 - RNA, 19 nt, Homo sapiens
  misc_RNA (1)...(19): siRNA sense strand
gcaccauacuggaccaaca

SEQ ID NO: 424852 - RNA, 19 nt, Homo sapiens
  misc_RNA (1)...(19): siRNA sense strand
gcacuggagccucauuaug

SEQ ID NO: 424853 - RNA, 19 nt, Homo sapiens
  misc_RNA (1)...(19): siRNA sense strand
aaaguguggucccaucuga

SEQ ID NO: 424854 - RNA, 19 nt, Homo sapiens
  misc_RNA (1)...(19): siRNA sense strand
cauuggaggcuacaaggua

SEQ ID NO: 424855 - RNA, 19 nt, Homo sapiens
  misc_RNA (1)...(19): siRNA sense strand
aguugaggauaccacauua

SEQ ID NO: 424856 - RNA, 19 nt, Homo sapiens
  misc_RNA (1)...(19): siRNA sense strand
gaaaguguggucccaucug

SEQ ID NO: 424857 - RNA, 19 nt, Homo sapiens
  misc_RNA (1)...(19): siRNA sense strand
cagcacuggagccucauua

SEQ ID NO: 424858 - RNA, 19 nt, Homo sapiens
  misc_RNA (1)...(19): siRNA sense strand
ggaacccaaugccaaccau

SEQ ID NO: 424859 - RNA, 19 nt, Homo sapiens
  misc_RNA (1)...(19): siRNA sense strand
ugaauacggguccaucaau

SEQ ID NO: 424860 - RNA, 19 nt, Homo sapiens
  misc_RNA (1)...(19): siRNA sense strand
acacguaccaccuggaugu

SEQ ID NO: 424861 - RNA, 19 nt, Homo sapiens
  misc_RNA (1)...(19): siRNA sense strand
ucugacaagggaaauuaua

SEQ ID NO: 424862 - RNA, 19 nt, Homo sapiens
  misc_RNA (1)...(19): siRNA sense strand
cauacuggaccaacacaga

SEQ ID NO: 424863 - RNA, 19 nt, Homo sapiens
  misc_RNA (1)...(19): siRNA sense strand
ccaacacugucaaguuucg

SEQ ID NO: 424864 - RNA, 19 nt, Homo sapiens
  misc_RNA (1)...(19): siRNA sense strand
gaggcuacaagguacgaaa

SEQ ID NO: 424865 - RNA, 19 nt, Homo sapiens
  misc_RNA (1)...(19): siRNA sense strand
cguaccaccuggauguugu

SEQ ID NO: 424866 - RNA, 19 nt, Homo sapiens
  misc_RNA (1)...(19): siRNA sense strand
ucaguuuaguugaggauac

SEQ ID NO: 424867 - RNA, 19 nt, Homo sapiens
  misc_RNA (1)...(19): siRNA sense strand
ggaaaguguggucccaucu

SEQ ID NO: 424868 - RNA, 19 nt, Homo sapiens
  misc_RNA (1)...(19): siRNA sense strand
uaguugaggauaccacauu

SEQ ID NO: 424869 - RNA, 19 nt, Homo sapiens
  misc_RNA (1)...(19): siRNA sense strand
gcuacaagguacgaaacca

SEQ ID NO: 424870 - RNA, 19 nt, Homo sapiens
  misc_RNA (1)...(19): siRNA sense strand
cacuggagccucauuaugg

SEQ ID NO: 424871 - RNA, 19 nt, Homo sapiens
  misc_RNA (1)...(19): siRNA sense strand
cggccaacacugucaaguu

SEQ ID NO: 424872 - RNA, 19 nt, Homo sapiens
  misc_RNA (1)...(19): siRNA sense strand
acuggagccucauuaugga

SEQ ID NO: 424873 - RNA, 19 nt, Homo sapiens
  misc_RNA (1)...(19): siRNA sense strand
uaagcaggagcaucgcauu

SEQ ID NO: 424874 - RNA, 19 nt, Homo sapiens
  misc_RNA (1)...(19): siRNA sense strand
ggagccucauuauggaaag

SEQ ID NO: 424875 - RNA, 19 nt, Homo sapiens
  misc_RNA (1)...(19): siRNA sense strand
ggccaacacugucaaguuu

SEQ ID NO: 424876 - RNA, 19 nt, Homo sapiens
  misc_RNA (1)...(19): siRNA sense strand
gaauacggguccaucaauc

SEQ ID NO: 424877 - RNA, 19 nt, Homo sapiens
  misc_RNA (1)...(19): siRNA sense strand
gcaggagcaucgcauugga

SEQ ID NO: 424878 - RNA, 19 nt, Homo sapiens
  misc_RNA (1)...(19): siRNA sense strand
caucugacaagggaaauua

SEQ ID NO: 424879 - RNA, 19 nt, Homo sapiens
  misc_RNA (1)...(19): siRNA sense strand
gcaccauacuggaccaaca

SEQ ID NO: 424880 - RNA, 19 nt, Homo sapiens
  misc_RNA (1)...(19): siRNA sense strand
gcacuggagccucauuaug

SEQ ID NO: 424881 - RNA, 19 nt, Homo sapiens
  misc_RNA (1)...(19): siRNA sense strand
aaaguguggucccaucuga

SEQ ID NO: 424882 - RNA, 19 nt, Homo sapiens
  misc_RNA (1)...(19): siRNA sense strand
cauuggaggcuacaaggua

SEQ ID NO: 424883 - RNA, 19 nt, Homo sapiens
  misc_RNA (1)...(19): siRNA sense strand
aguugaggauaccacauua

SEQ ID NO: 424884 - RNA, 19 nt, Homo sapiens
  misc_RNA (1)...(19): siRNA sense strand
gaaaguguggucccaucug

SEQ ID NO: 424885 - RNA, 19 nt, Homo sapiens
  misc_RNA (1)...(19): siRNA sense strand
cagcacuggagccucauua

SEQ ID NO: 424886 - RNA, 19 nt, Homo sapiens
  misc_RNA (1)...(19): siRNA sense strand
ggaacccaaugccaaccau

SEQ ID NO: 424887 - RNA, 19 nt, Homo sapiens
  misc_RNA (1)...(19): siRNA sense strand
ugaauacggguccaucaau

SEQ ID NO: 424888 - RNA, 19 nt, Homo sapiens
  misc_RNA (1)...(19): siRNA sense strand
acacguaccaccuggaugu

SEQ ID NO: 424889 - RNA, 19 nt, Homo sapiens
  misc_RNA (1)...(19): siRNA sense strand
ucugacaagggaaauuaua

SEQ ID NO: 424890 - RNA, 19 nt, Homo sapiens
  misc_RNA (1)...(19): siRNA sense strand
cauacuggaccaacacaga

SEQ ID NO: 424891 - RNA, 19 nt, Homo sapiens
  misc_RNA (1)...(19): siRNA sense strand
ccaacacugucaaguuucg

SEQ ID NO: 424892 - RNA, 19 nt, Homo sapiens
  misc_RNA (1)...(19): siRNA sense strand
gaggcuacaagguacgaaa

SEQ ID NO: 424893 - RNA, 19 nt, Homo sapiens
  misc_RNA (1)...(19): siRNA sense strand
cguaccaccuggauguugu

SEQ ID NO: 424894 - RNA, 19 nt, Homo sapiens
  misc_RNA (1)...(19): siRNA sense strand
ucaguuuaguugaggauac

SEQ ID NO: 424895 - RNA, 19 nt, Homo sapiens
  misc_RNA (1)...(19): siRNA sense strand
ggaaaguguggucccaucu

SEQ ID NO: 424896 - RNA, 19 nt, Homo sapiens
  misc_RNA (1)...(19): siRNA sense strand
uaguugaggauaccacauu

SEQ ID NO: 424897 - RNA, 19 nt, Homo sapiens
  misc_RNA (1)...(19): siRNA sense strand
gcuacaagguacgaaacca

SEQ ID NO: 424898 - RNA, 19 nt, Homo sapiens
  misc_RNA (1)...(19): siRNA sense strand
cacuggagccucauuaugg

SEQ ID NO: 424899 - RNA, 19 nt, Homo sapiens
  misc_RNA (1)...(19): siRNA sense strand
cggccaacacugucaaguu

SEQ ID NO: 424900 - RNA, 19 nt, Homo sapiens
  misc_RNA (1)...(19): siRNA sense strand
acuggagccucauuaugga

SEQ ID NO: 424901 - RNA, 19 nt, Homo sapiens
  misc_RNA (1)...(19): siRNA sense strand
uaagcaggagcaucgcauu

SEQ ID NO: 424902 - RNA, 19 nt, Homo sapiens
  misc_RNA (1)...(19): siRNA sense strand
ggagccucauuauggaaag

SEQ ID NO: 424903 - RNA, 19 nt, Homo sapiens
  misc_RNA (1)...(19): siRNA sense strand
ggccaacacugucaaguuu

SEQ ID NO: 424904 - RNA, 19 nt, Homo sapiens
  misc_RNA (1)...(19): siRNA sense strand
gaauacggguccaucaauc

SEQ ID NO: 424905 - RNA, 19 nt, Homo sapiens
  misc_RNA (1)...(19): siRNA sense strand
gcaggagcaucgcauugga

SEQ ID NO: 424906 - RNA, 19 nt, Homo sapiens
  misc_RNA (1)...(19): siRNA sense strand
caucugacaagggaaauua

SEQ ID NO: 424907 - RNA, 19 nt, Homo sapiens
  misc_RNA (1)...(19): siRNA sense strand
gcaccauacuggaccaaca

SEQ ID NO: 424908 - RNA, 19 nt, Homo sapiens
  misc_RNA (1)...(19): siRNA sense strand
gcacuggagccucauuaug

SEQ ID NO: 424909 - RNA, 19 nt, Homo sapiens
  misc_RNA (1)...(19): siRNA sense strand
aaaguguggucccaucuga

SEQ ID NO: 424910 - RNA, 19 nt, Homo sapiens
  misc_RNA (1)...(19): siRNA sense strand
cauuggaggcuacaaggua

SEQ ID NO: 424911 - RNA, 19 nt, Homo sapiens
  misc_RNA (1)...(19): siRNA sense strand
aguugaggauaccacauua

SEQ ID NO: 424912 - RNA, 19 nt, Homo sapiens
  misc_RNA (1)...(19): siRNA sense strand
gaaaguguggucccaucug

SEQ ID NO: 424913 - RNA, 19 nt, Homo sapiens
  misc_RNA (1)...(19): siRNA sense strand
cagcacuggagccucauua

SEQ ID NO: 424914 - RNA, 19 nt, Homo sapiens
  misc_RNA (1)...(19): siRNA sense strand
ggaacccaaugccaaccau

SEQ ID NO: 424915 - RNA, 19 nt, Homo sapiens
  misc_RNA (1)...(19): siRNA sense strand
ugaauacggguccaucaau

SEQ ID NO: 424916 - RNA, 19 nt, Homo sapiens
  misc_RNA (1)...(19): siRNA sense strand
acacguaccaccuggaugu

SEQ ID NO: 424917 - RNA, 19 nt, Homo sapiens
  misc_RNA (1)...(19): siRNA sense strand
ucugacaagggaaauuaua

SEQ ID NO: 424918 - RNA, 19 nt, Homo sapiens
  misc_RNA (1)...(19): siRNA sense strand
cauacuggaccaacacaga

SEQ ID NO: 424919 - RNA, 19 nt, Homo sapiens
  misc_RNA (1)...(19): siRNA sense strand
ccaacacugucaaguuucg

SEQ ID NO: 424920 - RNA, 19 nt, Homo sapiens
  misc_RNA (1)...(19): siRNA sense strand
gaggcuacaagguacgaaa

SEQ ID NO: 424921 - RNA, 19 nt, Homo sapiens
  misc_RNA (1)...(19): siRNA sense strand
cguaccaccuggauguugu

SEQ ID NO: 424922 - RNA, 19 nt, Homo sapiens
  misc_RNA (1)...(19): siRNA sense strand
ucaguuuaguugaggauac

SEQ ID NO: 424923 - RNA, 19 nt, Homo sapiens
  misc_RNA (1)...(19): siRNA sense strand
ggaaaguguggucccaucu

SEQ ID NO: 424924 - RNA, 19 nt, Homo sapiens
  misc_RNA (1)...(19): siRNA sense strand
uaguugaggauaccacauu

SEQ ID NO: 424925 - RNA, 19 nt, Homo sapiens
  misc_RNA (1)...(19): siRNA sense strand
gcuacaagguacgaaacca

SEQ ID NO: 424926 - RNA, 19 nt, Homo sapiens
  misc_RNA (1)...(19): siRNA sense strand
cacuggagccucauuaugg

SEQ ID NO: 424927 - RNA, 19 nt, Homo sapiens
  misc_RNA (1)...(19): siRNA sense strand
cggccaacacugucaaguu

SEQ ID NO: 424928 - RNA, 19 nt, Homo sapiens
  misc_RNA (1)...(19): siRNA sense strand
acuggagccucauuaugga

SEQ ID NO: 424929 - RNA, 19 nt, Homo sapiens
  misc_RNA (1)...(19): siRNA sense strand
uaagcaggagcaucgcauu

SEQ ID NO: 424930 - RNA, 19 nt, Homo sapiens
  misc_RNA (1)...(19): siRNA sense strand
ggagccucauuauggaaag

SEQ ID NO: 424931 - RNA, 19 nt, Homo sapiens
  misc_RNA (1)...(19): siRNA sense strand
ggccaacacugucaaguuu

SEQ ID NO: 424932 - RNA, 19 nt, Homo sapiens
  misc_RNA (1)...(19): siRNA sense strand
gaauacggguccaucaauc

SEQ ID NO: 424933 - RNA, 19 nt, Homo sapiens
  misc_RNA (1)...(19): siRNA sense strand
gcaggagcaucgcauugga

SEQ ID NO: 424934 - RNA, 19 nt, Homo sapiens
  misc_RNA (1)...(19): siRNA sense strand
caucugacaagggaaauua

SEQ ID NO: 424935 - RNA, 19 nt, Homo sapiens
  misc_RNA (1)...(19): siRNA sense strand
gcaccauacuggaccaaca

SEQ ID NO: 424936 - RNA, 19 nt, Homo sapiens
  misc_RNA (1)...(19): siRNA sense strand
gcacuggagccucauuaug

SEQ ID NO: 424937 - RNA, 19 nt, Homo sapiens
  misc_RNA (1)...(19): siRNA sense strand
aaaguguggucccaucuga

SEQ ID NO: 424938 - RNA, 19 nt, Homo sapiens
  misc_RNA (1)...(19): siRNA sense strand
cauuggaggcuacaaggua

SEQ ID NO: 424939 - RNA, 19 nt, Homo sapiens
  misc_RNA (1)...(19): siRNA sense strand
aguugaggauaccacauua

SEQ ID NO: 424940 - RNA, 19 nt, Homo sapiens
  misc_RNA (1)...(19): siRNA sense strand
gaaaguguggucccaucug

SEQ ID NO: 424941 - RNA, 19 nt, Homo sapiens
  misc_RNA (1)...(19): siRNA sense strand
cagcacuggagccucauua

SEQ ID NO: 424942 - RNA, 19 nt, Homo sapiens
  misc_RNA (1)...(19): siRNA sense strand
ggaacccaaugccaaccau

SEQ ID NO: 424943 - RNA, 19 nt, Homo sapiens
  misc_RNA (1)...(19): siRNA sense strand
ugaauacggguccaucaau

SEQ ID NO: 424944 - RNA, 19 nt, Homo sapiens
  misc_RNA (1)...(19): siRNA sense strand
acacguaccaccuggaugu

SEQ ID NO: 424945 - RNA, 19 nt, Homo sapiens
  misc_RNA (1)...(19): siRNA sense strand
ucugacaagggaaauuaua

SEQ ID NO: 424946 - RNA, 19 nt, Homo sapiens
  misc_RNA (1)...(19): siRNA sense strand
cauacuggaccaacacaga

SEQ ID NO: 424947 - RNA, 19 nt, Homo sapiens
  misc_RNA (1)...(19): siRNA sense strand
ccaacacugucaaguuucg

SEQ ID NO: 424948 - RNA, 19 nt, Homo sapiens
  misc_RNA (1)...(19): siRNA sense strand
gaggcuacaagguacgaaa

SEQ ID NO: 424949 - RNA, 19 nt, Homo sapiens
  misc_RNA (1)...(19): siRNA sense strand
cguaccaccuggauguugu

SEQ ID NO: 424950 - RNA, 19 nt, Homo sapiens
  misc_RNA (1)...(19): siRNA sense strand
ucaguuuaguugaggauac

SEQ ID NO: 424951 - RNA, 19 nt, Homo sapiens
  misc_RNA (1)...(19): siRNA sense strand
ggaaaguguggucccaucu

SEQ ID NO: 424952 - RNA, 19 nt, Homo sapiens
  misc_RNA (1)...(19): siRNA sense strand
uaguugaggauaccacauu

SEQ ID NO: 424953 - RNA, 19 nt, Homo sapiens
  misc_RNA (1)...(19): siRNA sense strand
gcuacaagguacgaaacca

SEQ ID NO: 424954 - RNA, 19 nt, Homo sapiens
  misc_RNA (1)...(19): siRNA sense strand
cacuggagccucauuaugg

SEQ ID NO: 424955 - RNA, 19 nt, Homo sapiens
  misc_RNA (1)...(19): siRNA sense strand
cggccaacacugucaaguu

SEQ ID NO: 424956 - RNA, 19 nt, Homo sapiens
  misc_RNA (1)...(19): siRNA sense strand
acuggagccucauuaugga

SEQ ID NO: 424957 - RNA, 19 nt, Homo sapiens
  misc_RNA (1)...(19): siRNA sense strand
uaagcaggagcaucgcauu

SEQ ID NO: 424958 - RNA, 19 nt, Homo sapiens
  misc_RNA (1)...(19): siRNA sense strand
ggagccucauuauggaaag

SEQ ID NO: 424959 - RNA, 19 nt, Homo sapiens
  misc_RNA (1)...(19): siRNA sense strand
ggccaacacugucaaguuu

SEQ ID NO: 424960 - RNA, 19 nt, Homo sapiens
  misc_RNA (1)...(19): siRNA sense strand
gaauacggguccaucaauc

SEQ ID NO: 424961 - RNA, 19 nt, Homo sapiens
  misc_RNA (1)...(19): siRNA sense strand
gcaggagcaucgcauugga

SEQ ID NO: 424962 - RNA, 19 nt, Homo sapiens
  misc_RNA (1)...(19): siRNA sense strand
caucugacaagggaaauua

SEQ ID NO: 424963 - RNA, 19 nt, Homo sapiens
  misc_RNA (1)...(19): siRNA sense strand
gcaccauacuggaccaaca

SEQ ID NO: 424964 - RNA, 19 nt, Homo sapiens
  misc_RNA (1)...(19): siRNA sense strand
gcacuggagccucauuaug

SEQ ID NO: 424965 - RNA, 19 nt, Homo sapiens
  misc_RNA (1)...(19): siRNA sense strand
aaaguguggucccaucuga

SEQ ID NO: 424966 - RNA, 19 nt, Homo sapiens
  misc_RNA (1)...(19): siRNA sense strand
cauuggaggcuacaaggua

SEQ ID NO: 424967 - RNA, 19 nt, Homo sapiens
  misc_RNA (1)...(19): siRNA sense strand
aguugaggauaccacauua

SEQ ID NO: 424968 - RNA, 19 nt, Homo sapiens
  misc_RNA (1)...(19): siRNA sense strand
gaaaguguggucccaucug

SEQ ID NO: 424969 - RNA, 19 nt, Homo sapiens
  misc_RNA (1)...(19): siRNA sense strand
cagcacuggagccucauua

SEQ ID NO: 424970 - RNA, 19 nt, Homo sapiens
  misc_RNA (1)...(19): siRNA sense strand
ggaacccaaugccaaccau

SEQ ID NO: 424971 - RNA, 19 nt, Homo sapiens
  misc_RNA (1)...(19): siRNA sense strand
ugaauacggguccaucaau

SEQ ID NO: 424972 - RNA, 19 nt, Homo sapiens
  misc_RNA (1)...(19): siRNA sense strand
acacguaccaccuggaugu

SEQ ID NO: 424973 - RNA, 19 nt, Homo sapiens
  misc_RNA (1)...(19): siRNA sense strand
ucugacaagggaaauuaua

SEQ ID NO: 424974 - RNA, 19 nt, Homo sapiens
  misc_RNA (1)...(19): siRNA sense strand
cauacuggaccaacacaga

SEQ ID NO: 424975 - RNA, 19 nt, Homo sapiens
  misc_RNA (1)...(19): siRNA sense strand
ccaacacugucaaguuucg

SEQ ID NO: 424976 - RNA, 19 nt, Homo sapiens
  misc_RNA (1)...(19): siRNA sense strand
gaggcuacaagguacgaaa

SEQ ID NO: 424977 - RNA, 19 nt, Homo sapiens
  misc_RNA (1)...(19): siRNA sense strand
cguaccaccuggauguugu

SEQ ID NO: 424978 - RNA, 19 nt, Homo sapiens
  misc_RNA (1)...(19): siRNA sense strand
ucaguuuaguugaggauac

SEQ ID NO: 424979 - RNA, 19 nt, Homo sapiens
  misc_RNA (1)...(19): siRNA sense strand
ggaaaguguggucccaucu

SEQ ID NO: 424980 - RNA, 19 nt, Homo sapiens
  misc_RNA (1)...(19): siRNA sense strand
uaguugaggauaccacauu

SEQ ID NO: 424981 - RNA, 19 nt, Homo sapiens
  misc_RNA (1)...(19): siRNA sense strand
gcuacaagguacgaaacca

SEQ ID NO: 424982 - RNA, 19 nt, Homo sapiens
  misc_RNA (1)...(19): siRNA sense strand
cacuggagccucauuaugg

SEQ ID NO: 424983 - RNA, 19 nt, Homo sapiens
  misc_RNA (1)...(19): siRNA sense strand
cggccaacacugucaaguu

SEQ ID NO: 424984 - RNA, 19 nt, Homo sapiens
  misc_RNA (1)...(19): siRNA sense strand
acuggagccucauuaugga

SEQ ID NO: 424985 - RNA, 19 nt, Homo sapiens
  misc_RNA (1)...(19): siRNA sense strand
uaagcaggagcaucgcauu

SEQ ID NO: 424986 - RNA, 19 nt, Homo sapiens
  misc_RNA (1)...(19): siRNA sense strand
ggagccucauuauggaaag

SEQ ID NO: 424987 - RNA, 19 nt, Homo sapiens
  misc_RNA (1)...(19): siRNA sense strand
ggccaacacugucaaguuu

SEQ ID NO: 424988 - RNA, 19 nt, Homo sapiens
  misc_RNA (1)...(19): siRNA sense strand
gaauacggguccaucaauc

SEQ ID NO: 424989 - RNA, 19 nt, Homo sapiens
  misc_RNA (1)...(19): siRNA sense strand
gcaggagcaucgcauugga

SEQ ID NO: 424990 - RNA, 19 nt, Homo sapiens
  misc_RNA (1)...(19): siRNA sense strand
caucugacaagggaaauua

SEQ ID NO: 424991 - RNA, 19 nt, Homo sapiens
  misc_RNA (1)...(19): siRNA sense strand
gcaccauacuggaccaaca

SEQ ID NO: 424992 - RNA, 19 nt, Homo sapiens
  misc_RNA (1)...(19): siRNA sense strand
gcacuggagccucauuaug

SEQ ID NO: 424993 - RNA, 19 nt, Homo sapiens
  misc_RNA (1)...(19): siRNA sense strand
aaaguguggucccaucuga

SEQ ID NO: 424994 - RNA, 19 nt, Homo sapiens
  misc_RNA (1)...(19): siRNA sense strand
cauuggaggcuacaaggua

SEQ ID NO: 424995 - RNA, 19 nt, Homo sapiens
  misc_RNA (1)...(19): siRNA sense strand
aguugaggauaccacauua

SEQ ID NO: 424996 - RNA, 19 nt, Homo sapiens
  misc_RNA (1)...(19): siRNA sense strand
gaaaguguggucccaucug

SEQ ID NO: 424997 - RNA, 19 nt, Homo sapiens
  misc_RNA (1)...(19): siRNA sense strand
cagcacuggagccucauua

SEQ ID NO: 424998 - RNA, 19 nt, Homo sapiens
  misc_RNA (1)...(19): siRNA sense strand
ggaacccaaugccaaccau

SEQ ID NO: 424999 - RNA, 19 nt, Homo sapiens
  misc_RNA (1)...(19): siRNA sense strand
ugaauacggguccaucaau

SEQ ID NO: 425000 - RNA, 19 nt, Homo sapiens
  misc_RNA (1)...(19): siRNA sense strand
acacguaccaccuggaugu

SEQ ID NO: 425001 - RNA, 19 nt, Homo sapiens
  misc_RNA (1)...(19): siRNA sense strand
ucugacaagggaaauuaua

SEQ ID NO: 425002 - RNA, 19 nt, Homo sapiens
  misc_RNA (1)...(19): siRNA sense strand
cauacuggaccaacacaga

SEQ ID NO: 425003 - RNA, 19 nt, Homo sapiens
  misc_RNA (1)...(19): siRNA sense strand
ccaacacugucaaguuucg

SEQ ID NO: 425004 - RNA, 19 nt, Homo sapiens
  misc_RNA (1)...(19): siRNA sense strand
gaggcuacaagguacgaaa

SEQ ID NO: 425005 - RNA, 19 nt, Homo sapiens
  misc_RNA (1)...(19): siRNA sense strand
cguaccaccuggauguugu

SEQ ID NO: 425006 - RNA, 19 nt, Homo sapiens
  misc_RNA (1)...(19): siRNA sense strand
ucaguuuaguugaggauac

SEQ ID NO: 425007 - RNA, 19 nt, Homo sapiens
  misc_RNA (1)...(19): siRNA sense strand
ggaaaguguggucccaucu

SEQ ID NO: 425008 - RNA, 19 nt, Homo sapiens
  misc_RNA (1)...(19): siRNA sense strand
uaguugaggauaccacauu

SEQ ID NO: 425009 - RNA, 19 nt, Homo sapiens
  misc_RNA (1)...(19): siRNA sense strand
gcuacaagguacgaaacca

SEQ ID NO: 425010 - RNA, 19 nt, Homo sapiens
  misc_RNA (1)...(19): siRNA sense strand
cacuggagccucauuaugg

SEQ ID NO: 425011 - RNA, 19 nt, Homo sapiens
  misc_RNA (1)...(19): siRNA sense strand
cggccaacacugucaaguu

SEQ ID NO: 425012 - RNA, 19 nt, Homo sapiens
  misc_RNA (1)...(19): siRNA sense strand
acuggagccucauuaugga

SEQ ID NO: 425013 - RNA, 19 nt, Homo sapiens
  misc_RNA (1)...(19): siRNA sense strand
uaagcaggagcaucgcauu

SEQ ID NO: 425014 - RNA, 19 nt, Homo sapiens
  misc_RNA (1)...(19): siRNA sense strand
ggagccucauuauggaaag

SEQ ID NO: 425015 - RNA, 19 nt, Homo sapiens
  misc_RNA (1)...(19): siRNA sense strand
ggccaacacugucaaguuu

SEQ ID NO: 425016 - RNA, 19 nt, Homo sapiens
  misc_RNA (1)...(19): siRNA sense strand
gaauacggguccaucaauc

SEQ ID NO: 425017 - RNA, 19 nt, Homo sapiens
  misc_RNA (1)...(19): siRNA sense strand
gcaggagcaucgcauugga

SEQ ID NO: 425018 - RNA, 19 nt, Homo sapiens
  misc_RNA (1)...(19): siRNA sense strand
caucugacaagggaaauua

SEQ ID NO: 425019 - RNA, 19 nt, Homo sapiens
  misc_RNA (1)...(19): siRNA sense strand
gcaccauacuggaccaaca

SEQ ID NO: 425020 - RNA, 19 nt, Homo sapiens
  misc_RNA (1)...(19): siRNA sense strand
gcacuggagccucauuaug

SEQ ID NO: 425021 - RNA, 19 nt, Homo sapiens
  misc_RNA (1)...(19): siRNA sense strand
aaaguguggucccaucuga

SEQ ID NO: 425022 - RNA, 19 nt, Homo sapiens
  misc_RNA (1)...(19): siRNA sense strand
cauuggaggcuacaaggua

SEQ ID NO: 425023 - RNA, 19 nt, Homo sapiens
  misc_RNA (1)...(19): siRNA sense strand
aguugaggauaccacauua

SEQ ID NO: 425024 - RNA, 19 nt, Homo sapiens
  misc_RNA (1)...(19): siRNA sense strand
gaaaguguggucccaucug

SEQ ID NO: 425025 - RNA, 19 nt, Homo sapiens
  misc_RNA (1)...(19): siRNA sense strand
cagcacuggagccucauua

SEQ ID NO: 425026 - RNA, 19 nt, Homo sapiens
  misc_RNA (1)...(19): siRNA sense strand
ggaacccaaugccaaccau

SEQ ID NO: 425027 - RNA, 19 nt, Homo sapiens
  misc_RNA (1)...(19): siRNA sense strand
ugaauacggguccaucaau

SEQ ID NO: 425028 - RNA, 19 nt, Homo sapiens
  misc_RNA (1)...(19): siRNA sense strand
acacguaccaccuggaugu

SEQ ID NO: 425029 - RNA, 19 nt, Homo sapiens
  misc_RNA (1)...(19): siRNA sense strand
ucugacaagggaaauuaua

SEQ ID NO: 425030 - RNA, 19 nt, Homo sapiens
  misc_RNA (1)...(19): siRNA sense strand
cauacuggaccaacacaga

SEQ ID NO: 425031 - RNA, 19 nt, Homo sapiens
  misc_RNA (1)...(19): siRNA sense strand
ccaacacugucaaguuucg

SEQ ID NO: 425032 - RNA, 19 nt, Homo sapiens
  misc_RNA (1)...(19): siRNA sense strand
gaggcuacaagguacgaaa

SEQ ID NO: 425033 - RNA, 19 nt, Homo sapiens
  misc_RNA (1)...(19): siRNA sense strand
cguaccaccuggauguugu

SEQ ID NO: 425034 - RNA, 19 nt, Homo sapiens
  misc_RNA (1)...(19): siRNA sense strand
ucaguuuaguugaggauac

SEQ ID NO: 425035 - RNA, 19 nt, Homo sapiens
  misc_RNA (1)...(19): siRNA sense strand
ggaaaguguggucccaucu

SEQ ID NO: 425036 - RNA, 19 nt, Homo sapiens
  misc_RNA (1)...(19): siRNA sense strand
uaguugaggauaccacauu

SEQ ID NO: 425037 - RNA, 19 nt, Homo sapiens
  misc_RNA (1)...(19): siRNA sense strand
gcuacaagguacgaaacca

SEQ ID NO: 425038 - RNA, 19 nt, Homo sapiens
  misc_RNA (1)...(19): siRNA sense strand
cacuggagccucauuaugg

SEQ ID NO: 425039 - RNA, 19 nt, Homo sapiens
  misc_RNA (1)...(19): siRNA sense strand
cggccaacacugucaaguu

SEQ ID NO: 425040 - RNA, 19 nt, Homo sapiens
  misc_RNA (1)...(19): siRNA sense strand
acuggagccucauuaugga

SEQ ID NO: 425041 - RNA, 19 nt, Homo sapiens
  misc_RNA (1)...(19): siRNA sense strand
uaagcaggagcaucgcauu

SEQ ID NO: 425042 - RNA, 19 nt, Homo sapiens
  misc_RNA (1)...(19): siRNA sense strand
ggagccucauuauggaaag

SEQ ID NO: 425043 - RNA, 19 nt, Homo sapiens
  misc_RNA (1)...(19): siRNA sense strand
ggccaacacugucaaguuu

SEQ ID NO: 425044 - RNA, 19 nt, Homo sapiens
  misc_RNA (1)...(19): siRNA sense strand
gaauacggguccaucaauc

SEQ ID NO: 425045 - RNA, 19 nt, Homo sapiens
  misc_RNA (1)...(19): siRNA sense strand
gcaggagcaucgcauugga

SEQ ID NO: 425046 - RNA, 19 nt, Homo sapiens
  misc_RNA (1)...(19): siRNA sense strand
caucugacaagggaaauua

SEQ ID NO: 425047 - RNA, 19 nt, Homo sapiens
  misc_RNA (1)...(19): siRNA sense strand
gcaccauacuggaccaaca

SEQ ID NO: 425048 - RNA, 19 nt, Homo sapiens
  misc_RNA (1)...(19): siRNA sense strand
gcacuggagccucauuaug

SEQ ID NO: 425049 - RNA, 19 nt, Homo sapiens
  misc_RNA (1)...(19): siRNA sense strand
aaaguguggucccaucuga

SEQ ID NO: 425050 - RNA, 19 nt, Homo sapiens
  misc_RNA (1)...(19): siRNA sense strand
cauuggaggcuacaaggua

SEQ ID NO: 425051 - RNA, 19 nt, Homo sapiens
  misc_RNA (1)...(19): siRNA sense strand
aguugaggauaccacauua

SEQ ID NO: 425052 - RNA, 19 nt, Homo sapiens
  misc_RNA (1)...(19): siRNA sense strand
gaaaguguggucccaucug

SEQ ID NO: 425053 - RNA, 19 nt, Homo sapiens
  misc_RNA (1)...(19): siRNA sense strand
cagcacuggagccucauua

SEQ ID NO: 425054 - RNA, 19 nt, Homo sapiens
  misc_RNA (1)...(19): siRNA sense strand
ggaacccaaugccaaccau

SEQ ID NO: 425055 - RNA, 19 nt, Homo sapiens
  misc_RNA (1)...(19): siRNA sense strand
ugaauacggguccaucaau

SEQ ID NO: 425056 - RNA, 19 nt, Homo sapiens
  misc_RNA (1)...(19): siRNA sense strand
acacguaccaccuggaugu

SEQ ID NO: 425057 - RNA, 19 nt, Homo sapiens
  misc_RNA (1)...(19): siRNA sense strand
ucugacaagggaaauuaua

SEQ ID NO: 425058 - RNA, 19 nt, Homo sapiens
  misc_RNA (1)...(19): siRNA sense strand
cauacuggaccaacacaga

SEQ ID NO: 425059 - RNA, 19 nt, Homo sapiens
  misc_RNA (1)...(19): siRNA sense strand
ccaacacugucaaguuucg

SEQ ID NO: 425060 - RNA, 19 nt, Homo sapiens
  misc_RNA (1)...(19): siRNA sense strand
gaggcuacaagguacgaaa

SEQ ID NO: 425061 - RNA, 19 nt, Homo sapiens
  misc_RNA (1)...(19): siRNA sense strand
cguaccaccuggauguugu

SEQ ID NO: 425062 - RNA, 19 nt, Homo sapiens
  misc_RNA (1)...(19): siRNA sense strand
ucaguuuaguugaggauac

SEQ ID NO: 425063 - RNA, 19 nt, Homo sapiens
  misc_RNA (1)...(19): siRNA sense strand
ggaaaguguggucccaucu

SEQ ID NO: 425064 - RNA, 19 nt, Homo sapiens
  misc_RNA (1)...(19): siRNA sense strand
uaguugaggauaccacauu

SEQ ID NO: 425065 - RNA, 19 nt, Homo sapiens
  misc_RNA (1)...(19): siRNA sense strand
gcuacaagguacgaaacca

SEQ ID NO: 425066 - RNA, 19 nt, Homo sapiens
  misc_RNA (1)...(19): siRNA sense strand
cacuggagccucauuaugg

SEQ ID NO: 425067 - RNA, 19 nt, Homo sapiens
  misc_RNA (1)...(19): siRNA sense strand
cggccaacacugucaaguu

SEQ ID NO: 425068 - RNA, 19 nt, Homo sapiens
  misc_RNA (1)...(19): siRNA sense strand
acuggagccucauuaugga

SEQ ID NO: 425069 - RNA, 19 nt, Homo sapiens
  misc_RNA (1)...(19): siRNA sense strand
uaagcaggagcaucgcauu

SEQ ID NO: 425070 - RNA, 19 nt, Homo sapiens
  misc_RNA (1)...(19): siRNA sense strand
ggagccucauuauggaaag

SEQ ID NO: 425071 - RNA, 19 nt, Homo sapiens
  misc_RNA (1)...(19): siRNA sense strand
ggccaacacugucaaguuu

SEQ ID NO: 425072 - RNA, 19 nt, Homo sapiens
  misc_RNA (1)...(19): siRNA sense strand
gaauacggguccaucaauc

SEQ ID NO: 425073 - RNA, 19 nt, Homo sapiens
  misc_RNA (1)...(19): siRNA sense strand
gcaggagcaucgcauugga

SEQ ID NO: 425074 - RNA, 19 nt, Homo sapiens
  misc_RNA (1)...(19): siRNA sense strand
caucugacaagggaaauua

SEQ ID NO: 425075 - RNA, 19 nt, Homo sapiens
  misc_RNA (1)...(19): siRNA sense strand
gcaccauacuggaccaaca

SEQ ID NO: 425076 - RNA, 19 nt, Homo sapiens
  misc_RNA (1)...(19): siRNA sense strand
gcacuggagccucauuaug

SEQ ID NO: 425077 - RNA, 19 nt, Homo sapiens
  misc_RNA (1)...(19): siRNA sense strand
aaaguguggucccaucuga

SEQ ID NO: 425078 - RNA, 19 nt, Homo sapiens
  misc_RNA (1)...(19): siRNA sense strand
cauuggaggcuacaaggua

SEQ ID NO: 425079 - RNA, 19 nt, Homo sapiens
  misc_RNA (1)...(19): siRNA sense strand
aguugaggauaccacauua

SEQ ID NO: 425080 - RNA, 19 nt, Homo sapiens
  misc_RNA (1)...(19): siRNA sense strand
gaaaguguggucccaucug

SEQ ID NO: 425081 - RNA, 19 nt, Homo sapiens
  misc_RNA (1)...(19): siRNA sense strand
cagcacuggagccucauua

SEQ ID NO: 425082 - RNA, 19 nt, Homo sapiens
  misc_RNA (1)...(19): siRNA sense strand
ggaacccaaugccaaccau

SEQ ID NO: 425083 - RNA, 19 nt, Homo sapiens
  misc_RNA (1)...(19): siRNA sense strand
ugaauacggguccaucaau

SEQ ID NO: 425084 - RNA, 19 nt, Homo sapiens
  misc_RNA (1)...(19): siRNA sense strand
acacguaccaccuggaugu

SEQ ID NO: 425085 - RNA, 19 nt, Homo sapiens
  misc_RNA (1)...(19): siRNA sense strand
ucugacaagggaaauuaua

SEQ ID NO: 425086 - RNA, 19 nt, Homo sapiens
  misc_RNA (1)...(19): siRNA sense strand
cauacuggaccaacacaga

SEQ ID NO: 425087 - RNA, 19 nt, Homo sapiens
  misc_RNA (1)...(19): siRNA sense strand
ccaacacugucaaguuucg

SEQ ID NO: 425088 - RNA, 19 nt, Homo sapiens
  misc_RNA (1)...(19): siRNA sense strand
gaggcuacaagguacgaaa

SEQ ID NO: 425089 - RNA, 19 nt, Homo sapiens
  misc_RNA (1)...(19): siRNA sense strand
cguaccaccuggauguugu

SEQ ID NO: 425090 - RNA, 19 nt, Homo sapiens
  misc_RNA (1)...(19): siRNA sense strand
ucaguuuaguugaggauac

SEQ ID NO: 425091 - RNA, 19 nt, Homo sapiens
  misc_RNA (1)...(19): siRNA sense strand
ggaaaguguggucccaucu

SEQ ID NO: 425092 - RNA, 19 nt, Homo sapiens
  misc_RNA (1)...(19): siRNA sense strand
uaguugaggauaccacauu

SEQ ID NO: 425093 - RNA, 19 nt, Homo sapiens
  misc_RNA (1)...(19): siRNA sense strand
gcuacaagguacgaaacca

SEQ ID NO: 425094 - RNA, 19 nt, Homo sapiens
  misc_RNA (1)...(19): siRNA sense strand
cacuggagccucauuaugg

SEQ ID NO: 425095 - RNA, 19 nt, Homo sapiens
  misc_RNA (1)...(19): siRNA sense strand
cggccaacacugucaaguu

SEQ ID NO: 425096 - RNA, 19 nt, Homo sapiens
  misc_RNA (1)...(19): siRNA sense strand
acuggagccucauuaugga

SEQ ID NO: 425097 - RNA, 19 nt, Homo sapiens
  misc_RNA (1)...(19): siRNA sense strand
uaagcaggagcaucgcauu

SEQ ID NO: 425098 - RNA, 19 nt, Homo sapiens
  misc_RNA (1)...(19): siRNA sense strand
ggagccucauuauggaaag

SEQ ID NO: 425099 - RNA, 19 nt, Homo sapiens
  misc_RNA (1)...(19): siRNA sense strand
ggccaacacugucaaguuu

SEQ ID NO: 425100 - RNA, 19 nt, Homo sapiens
  misc_RNA (1)...(19): siRNA sense strand
gaauacggguccaucaauc

SEQ ID NO: 425101 - RNA, 19 nt, Homo sapiens
  misc_RNA (1)...(19): siRNA sense strand
gcaggagcaucgcauugga

SEQ ID NO: 425102 - RNA, 19 nt, Homo sapiens
  misc_RNA (1)...(19): siRNA sense strand
caucugacaagggaaauua

SEQ ID NO: 425103 - RNA, 19 nt, Homo sapiens
  misc_RNA (1)...(19): siRNA sense strand
gcaccauacuggaccaaca

SEQ ID NO: 425104 - RNA, 19 nt, Homo sapiens
  misc_RNA (1)...(19): siRNA sense strand
gcacuggagccucauuaug

SEQ ID NO: 425105 - RNA, 19 nt, Homo sapiens
  misc_RNA (1)...(19): siRNA sense strand
aaaguguggucccaucuga

SEQ ID NO: 425106 - RNA, 19 nt, Homo sapiens
  misc_RNA (1)...(19): siRNA sense strand
cauuggaggcuacaaggua

SEQ ID NO: 425107 - RNA, 19 nt, Homo sapiens
  misc_RNA (1)...(19): siRNA sense strand
aguugaggauaccacauua

SEQ ID NO: 425108 - RNA, 19 nt, Homo sapiens
  misc_RNA (1)...(19): siRNA sense strand
gaaaguguggucccaucug

SEQ ID NO: 425109 - RNA, 19 nt, Homo sapiens
  misc_RNA (1)...(19): siRNA sense strand
cagcacuggagccucauua

SEQ ID NO: 425110 - RNA, 19 nt, Homo sapiens
  misc_RNA (1)...(19): siRNA sense strand
ggaacccaaugccaaccau

SEQ ID NO: 425111 - RNA, 19 nt, Homo sapiens
  misc_RNA (1)...(19): siRNA sense strand
ugaauacggguccaucaau

SEQ ID NO: 425112 - RNA, 19 nt, Homo sapiens
  misc_RNA (1)...(19): siRNA sense strand
acacguaccaccuggaugu

SEQ ID NO: 425113 - RNA, 19 nt, Homo sapiens
  misc_RNA (1)...(19): siRNA sense strand
ucugacaagggaaauuaua

SEQ ID NO: 425114 - RNA, 19 nt, Homo sapiens
  misc_RNA (1)...(19): siRNA sense strand
cauacuggaccaacacaga

SEQ ID NO: 425115 - RNA, 19 nt, Homo sapiens
  misc_RNA (1)...(19): siRNA sense strand
ccaacacugucaaguuucg

SEQ ID NO: 425116 - RNA, 19 nt, Homo sapiens
  misc_RNA (1)...(19): siRNA sense strand
gaggcuacaagguacgaaa

SEQ ID NO: 425117 - RNA, 19 nt, Homo sapiens
  misc_RNA (1)...(19): siRNA sense strand
cguaccaccuggauguugu

SEQ ID NO: 425118 - RNA, 19 nt, Homo sapiens
  misc_RNA (1)...(19): siRNA sense strand
ucaguuuaguugaggauac

SEQ ID NO: 425119 - RNA, 19 nt, Homo sapiens
  misc_RNA (1)...(19): siRNA sense strand
ggaaaguguggucccaucu

SEQ ID NO: 425120 - RNA, 19 nt, Homo sapiens
  misc_RNA (1)...(19): siRNA sense strand
uaguugaggauaccacauu

SEQ ID NO: 425121 - RNA, 19 nt, Homo sapiens
  misc_RNA (1)...(19): siRNA sense strand
gcuacaagguacgaaacca

SEQ ID NO: 425122 - RNA, 19 nt, Homo sapiens
  misc_RNA (1)...(19): siRNA sense strand
cacuggagccucauuaugg

SEQ ID NO: 425123 - RNA, 19 nt, Homo sapiens
  misc_RNA (1)...(19): siRNA sense strand
cggccaacacugucaaguu

SEQ ID NO: 425124 - RNA, 19 nt, Homo sapiens
  misc_RNA (1)...(19): siRNA sense strand
acuggagccucauuaugga

SEQ ID NO: 425125 - RNA, 19 nt, Homo sapiens
  misc_RNA (1)...(19): siRNA sense strand
uaagcaggagcaucgcauu

SEQ ID NO: 425126 - RNA, 19 nt, Homo sapiens
  misc_RNA (1)...(19): siRNA sense strand
ggagccucauuauggaaag

SEQ ID NO: 425127 - RNA, 19 nt, Homo sapiens
  misc_RNA (1)...(19): siRNA sense strand
ggccaacacugucaaguuu

SEQ ID NO: 425128 - RNA, 19 nt, Homo sapiens
  misc_RNA (1)...(19): siRNA sense strand
gaauacggguccaucaauc

SEQ ID NO: 425129 - RNA, 19 nt, Homo sapiens
  misc_RNA (1)...(19): siRNA sense strand
gcaggagcaucgcauugga

SEQ ID NO: 425130 - RNA, 19 nt, Homo sapiens
  misc_RNA (1)...(19): siRNA sense strand
caucugacaagggaaauua

SEQ ID NO: 425131 - RNA, 19 nt, Homo sapiens
  misc_RNA (1)...(19): siRNA sense strand
gcaccauacuggaccaaca

SEQ ID NO: 425132 - RNA, 19 nt, Homo sapiens
  misc_RNA (1)...(19): siRNA sense strand
gcacuggagccucauuaug

SEQ ID NO: 425133 - RNA, 19 nt, Homo sapiens
  misc_RNA (1)...(19): siRNA sense strand
aaaguguggucccaucuga

SEQ ID NO: 425134 - RNA, 19 nt, Homo sapiens
  misc_RNA (1)...(19): siRNA sense strand
cauuggaggcuacaaggua

SEQ ID NO: 425135 - RNA, 19 nt, Homo sapiens
  misc_RNA (1)...(19): siRNA sense strand
aguugaggauaccacauua

SEQ ID NO: 425136 - RNA, 19 nt, Homo sapiens
  misc_RNA (1)...(19): siRNA sense strand
gaaaguguggucccaucug

SEQ ID NO: 425137 - RNA, 19 nt, Homo sapiens
  misc_RNA (1)...(19): siRNA sense strand
cagcacuggagccucauua

SEQ ID NO: 425138 - RNA, 19 nt, Homo sapiens
  misc_RNA (1)...(19): siRNA sense strand
ggaacccaaugccaaccau

SEQ ID NO: 425139 - RNA, 19 nt, Homo sapiens
  misc_RNA (1)...(19): siRNA sense strand
ugaauacggguccaucaau

SEQ ID NO: 425140 - RNA, 19 nt, Homo sapiens
  misc_RNA (1)...(19): siRNA sense strand
acacguaccaccuggaugu

SEQ ID NO: 425141 - RNA, 19 nt, Homo sapiens
  misc_RNA (1)...(19): siRNA sense strand
ucugacaagggaaauuaua

SEQ ID NO: 425142 - RNA, 19 nt, Homo sapiens
  misc_RNA (1)...(19): siRNA sense strand
cauacuggaccaacacaga

SEQ ID NO: 425143 - RNA, 19 nt, Homo sapiens
  misc_RNA (1)...(19): siRNA sense strand
ccaacacugucaaguuucg

SEQ ID NO: 425144 - RNA, 19 nt, Homo sapiens
  misc_RNA (1)...(19): siRNA sense strand
gaggcuacaagguacgaaa

SEQ ID NO: 425145 - RNA, 19 nt, Homo sapiens
  misc_RNA (1)...(19): siRNA sense strand
cguaccaccuggauguugu

SEQ ID NO: 425146 - RNA, 19 nt, Homo sapiens
  misc_RNA (1)...(19): siRNA sense strand
ucaguuuaguugaggauac

SEQ ID NO: 425147 - RNA, 19 nt, Homo sapiens
  misc_RNA (1)...(19): siRNA sense strand
ggaaaguguggucccaucu

SEQ ID NO: 425148 - RNA, 19 nt, Homo sapiens
  misc_RNA (1)...(19): siRNA sense strand
uaguugaggauaccacauu

SEQ ID NO: 425149 - RNA, 19 nt, Homo sapiens
  misc_RNA (1)...(19): siRNA sense strand
gcuacaagguacgaaacca

SEQ ID NO: 425150 - RNA, 19 nt, Homo sapiens
  misc_RNA (1)...(19): siRNA sense strand
cacuggagccucauuaugg

SEQ ID NO: 425151 - RNA, 19 nt, Homo sapiens
  misc_RNA (1)...(19): siRNA sense strand
cggccaacacugucaaguu

SEQ ID NO: 425152 - RNA, 19 nt, Homo sapiens
  misc_RNA (1)...(19): siRNA sense strand
acuggagccucauuaugga

SEQ ID NO: 425153 - RNA, 19 nt, Homo sapiens
  misc_RNA (1)...(19): siRNA sense strand
uaagcaggagcaucgcauu

SEQ ID NO: 425154 - RNA, 19 nt, Homo sapiens
  misc_RNA (1)...(19): siRNA sense strand
ggagccucauuauggaaag

SEQ ID NO: 425155 - RNA, 19 nt, Homo sapiens
  misc_RNA (1)...(19): siRNA sense strand
ggccaacacugucaaguuu

SEQ ID NO: 425156 - RNA, 19 nt, Homo sapiens
  misc_RNA (1)...(19): siRNA sense strand
gaauacggguccaucaauc

SEQ ID NO: 425157 - RNA, 19 nt, Homo sapiens
  misc_RNA (1)...(19): siRNA sense strand
gcaggagcaucgcauugga

SEQ ID NO: 425158 - RNA, 19 nt, Homo sapiens
  misc_RNA (1)...(19): siRNA sense strand
caucugacaagggaaauua

SEQ ID NO: 425159 - RNA, 19 nt, Homo sapiens
  misc_RNA (1)...(19): siRNA sense strand
gcaccauacuggaccaaca

SEQ ID NO: 425160 - RNA, 19 nt, Homo sapiens
  misc_RNA (1)...(19): siRNA sense strand
gcacuggagccucauuaug

SEQ ID NO: 425161 - RNA, 19 nt, Homo sapiens
  misc_RNA (1)...(19): siRNA sense strand
aaaguguggucccaucuga

SEQ ID NO: 425162 - RNA, 19 nt, Homo sapiens
  misc_RNA (1)...(19): siRNA sense strand
cauuggaggcuacaaggua

SEQ ID NO: 425163 - RNA, 19 nt, Homo sapiens
  misc_RNA (1)...(19): siRNA sense strand
aguugaggauaccacauua

SEQ ID NO: 425164 - RNA, 19 nt, Homo sapiens
  misc_RNA (1)...(19): siRNA sense strand
gaaaguguggucccaucug

SEQ ID NO: 425165 - RNA, 19 nt, Homo sapiens
  misc_RNA (1)...(19): siRNA sense strand
cagcacuggagccucauua

SEQ ID NO: 425166 - RNA, 19 nt, Homo sapiens
  misc_RNA (1)...(19): siRNA sense strand
ggaacccaaugccaaccau

SEQ ID NO: 425167 - RNA, 19 nt, Homo sapiens
  misc_RNA (1)...(19): siRNA sense strand
ugaauacggguccaucaau

SEQ ID NO: 425168 - RNA, 19 nt, Homo sapiens
  misc_RNA (1)...(19): siRNA sense strand
acacguaccaccuggaugu

SEQ ID NO: 425169 - RNA, 19 nt, Homo sapiens
  misc_RNA (1)...(19): siRNA sense strand
ucugacaagggaaauuaua

SEQ ID NO: 425170 - RNA, 19 nt, Homo sapiens
  misc_RNA (1)...(19): siRNA sense strand
cauacuggaccaacacaga

SEQ ID NO: 425171 - RNA, 19 nt, Homo sapiens
  misc_RNA (1)...(19): siRNA sense strand
ccaacacugucaaguuucg

SEQ ID NO: 425172 - RNA, 19 nt, Homo sapiens
  misc_RNA (1)...(19): siRNA sense strand
gaggcuacaagguacgaaa

SEQ ID NO: 425173 - RNA, 19 nt, Homo sapiens
  misc_RNA (1)...(19): siRNA sense strand
cguaccaccuggauguugu

SEQ ID NO: 425174 - RNA, 19 nt, Homo sapiens
  misc_RNA (1)...(19): siRNA sense strand
ucaguuuaguugaggauac

SEQ ID NO: 425175 - RNA, 19 nt, Homo sapiens
  misc_RNA (1)...(19): siRNA sense strand
ggaaaguguggucccaucu

SEQ ID NO: 425176 - RNA, 19 nt, Homo sapiens
  misc_RNA (1)...(19): siRNA sense strand
uaguugaggauaccacauu

SEQ ID NO: 425177 - RNA, 19 nt, Homo sapiens
  misc_RNA (1)...(19): siRNA sense strand
gcuacaagguacgaaacca

SEQ ID NO: 425178 - RNA, 19 nt, Homo sapiens
  misc_RNA (1)...(19): siRNA sense strand
cacuggagccucauuaugg

SEQ ID NO: 425179 - RNA, 19 nt, Homo sapiens
  misc_RNA (1)...(19): siRNA sense strand
cggccaacacugucaaguu

SEQ ID NO: 425180 - RNA, 19 nt, Homo sapiens
  misc_RNA (1)...(19): siRNA sense strand
acuggagccucauuaugga

SEQ ID NO: 425181 - RNA, 19 nt, Homo sapiens
  misc_RNA (1)...(19): siRNA sense strand
uaagcaggagcaucgcauu

SEQ ID NO: 425182 - RNA, 19 nt, Homo sapiens
  misc_RNA (1)...(19): siRNA sense strand
ggagccucauuauggaaag

SEQ ID NO: 425183 - RNA, 19 nt, Homo sapiens
  misc_RNA (1)...(19): siRNA sense strand
ggccaacacugucaaguuu

SEQ ID NO: 425184 - RNA, 19 nt, Homo sapiens
  misc_RNA (1)...(19): siRNA sense strand
gaauacggguccaucaauc

SEQ ID NO: 425185 - RNA, 19 nt, Homo sapiens
  misc_RNA (1)...(19): siRNA sense strand
gcaggagcaucgcauugga

SEQ ID NO: 425186 - RNA, 19 nt, Homo sapiens
  misc_RNA (1)...(19): siRNA sense strand
caucugacaagggaaauua

SEQ ID NO: 425187 - RNA, 19 nt, Homo sapiens
  misc_RNA (1)...(19): siRNA sense strand
gcaccauacuggaccaaca

SEQ ID NO: 425188 - RNA, 19 nt, Homo sapiens
  misc_RNA (1)...(19): siRNA sense strand
gcacuggagccucauuaug

SEQ ID NO: 425189 - RNA, 19 nt, Homo sapiens
  misc_RNA (1)...(19): siRNA sense strand
aaaguguggucccaucuga

SEQ ID NO: 425190 - RNA, 19 nt, Homo sapiens
  misc_RNA (1)...(19): siRNA sense strand
cauuggaggcuacaaggua

SEQ ID NO: 425191 - RNA, 19 nt, Homo sapiens
  misc_RNA (1)...(19): siRNA sense strand
aguugaggauaccacauua

SEQ ID NO: 425192 - RNA, 19 nt, Homo sapiens
  misc_RNA (1)...(19): siRNA sense strand
gaaaguguggucccaucug

SEQ ID NO: 425193 - RNA, 19 nt, Homo sapiens
  misc_RNA (1)...(19): siRNA sense strand
cagcacuggagccucauua

SEQ ID NO: 425194 - RNA, 19 nt, Homo sapiens
  misc_RNA (1)...(19): siRNA sense strand
ggaacccaaugccaaccau

SEQ ID NO: 425195 - RNA, 19 nt, Homo sapiens
  misc_RNA (1)...(19): siRNA sense strand
ugaauacggguccaucaau

SEQ ID NO: 425196 - RNA, 19 nt, Homo sapiens
  misc_RNA (1)...(19): siRNA sense strand
acacguaccaccuggaugu

SEQ ID NO: 425197 - RNA, 19 nt, Homo sapiens
  misc_RNA (1)...(19): siRNA sense strand
ucugacaagggaaauuaua

SEQ ID NO: 425198 - RNA, 19 nt, Homo sapiens
  misc_RNA (1)...(19): siRNA sense strand
cauacuggaccaacacaga

SEQ ID NO: 425199 - RNA, 19 nt, Homo sapiens
  misc_RNA (1)...(19): siRNA sense strand
ccaacacugucaaguuucg

SEQ ID NO: 425200 - RNA, 19 nt, Homo sapiens
  misc_RNA (1)...(19): siRNA sense strand
gaggcuacaagguacgaaa

SEQ ID NO: 425201 - RNA, 19 nt, Homo sapiens
  misc_RNA (1)...(19): siRNA sense strand
cguaccaccuggauguugu

SEQ ID NO: 425202 - RNA, 19 nt, Homo sapiens
  misc_RNA (1)...(19): siRNA sense strand
ucaguuuaguugaggauac

SEQ ID NO: 425203 - RNA, 19 nt, Homo sapiens
  misc_RNA (1)...(19): siRNA sense strand
ggaaaguguggucccaucu

SEQ ID NO: 425204 - RNA, 19 nt, Homo sapiens
  misc_RNA (1)...(19): siRNA sense strand
uaguugaggauaccacauu

SEQ ID NO: 425205 - RNA, 19 nt, Homo sapiens
  misc_RNA (1)...(19): siRNA sense strand
gcuacaagguacgaaacca

SEQ ID NO: 425206 - RNA, 19 nt, Homo sapiens
  misc_RNA (1)...(19): siRNA sense strand
cacuggagccucauuaugg

SEQ ID NO: 425207 - RNA, 19 nt, Homo sapiens
  misc_RNA (1)...(19): siRNA sense strand
cggccaacacugucaaguu

SEQ ID NO: 425208 - RNA, 19 nt, Homo sapiens
  misc_RNA (1)...(19): siRNA sense strand
acuggagccucauuaugga

SEQ ID NO: 425209 - RNA, 19 nt, Homo sapiens
  misc_RNA (1)...(19): siRNA sense strand
uaagcaggagcaucgcauu

SEQ ID NO: 425210 - RNA, 19 nt, Homo sapiens
  misc_RNA (1)...(19): siRNA sense strand
ggagccucauuauggaaag

SEQ ID NO: 425211 - RNA, 19 nt, Homo sapiens
  misc_RNA (1)...(19): siRNA sense strand
ggccaacacugucaaguuu

SEQ ID NO: 425212 - RNA, 19 nt, Homo sapiens
  misc_RNA (1)...(19): siRNA sense strand
gaauacggguccaucaauc

SEQ ID NO: 425213 - RNA, 19 nt, Homo sapiens
  misc_RNA (1)...(19): siRNA sense strand
gcaggagcaucgcauugga

SEQ ID NO: 425214 - RNA, 19 nt, Homo sapiens
  misc_RNA (1)...(19): siRNA sense strand
caucugacaagggaaauua

SEQ ID NO: 425215 - RNA, 19 nt, Homo sapiens
  misc_RNA (1)...(19): siRNA sense strand
gcaccauacuggaccaaca

SEQ ID NO: 425216 - RNA, 19 nt, Homo sapiens
  misc_RNA (1)...(19): siRNA sense strand
gcacuggagccucauuaug

SEQ ID NO: 425217 - RNA, 19 nt, Homo sapiens
  misc_RNA (1)...(19): siRNA sense strand
aaaguguggucccaucuga

SEQ ID NO: 425218 - RNA, 19 nt, Homo sapiens
  misc_RNA (1)...(19): siRNA sense strand
cauuggaggcuacaaggua

SEQ ID NO: 425219 - RNA, 19 nt, Homo sapiens
  misc_RNA (1)...(19): siRNA sense strand
aguugaggauaccacauua

SEQ ID NO: 425220 - RNA, 19 nt, Homo sapiens
  misc_RNA (1)...(19): siRNA sense strand
gaaaguguggucccaucug

SEQ ID NO: 425221 - RNA, 19 nt, Homo sapiens
  misc_RNA (1)...(19): siRNA sense strand
cagcacuggagccucauua

SEQ ID NO: 425222 - RNA, 19 nt, Homo sapiens
  misc_RNA (1)...(19): siRNA sense strand
ggaacccaaugccaaccau

SEQ ID NO: 425223 - RNA, 19 nt, Homo sapiens
  misc_RNA (1)...(19): siRNA sense strand
ugaauacggguccaucaau

SEQ ID NO: 425224 - RNA, 19 nt, Homo sapiens
  misc_RNA (1)...(19): siRNA sense strand
acacguaccaccuggaugu

SEQ ID NO: 425225 - RNA, 19 nt, Homo sapiens
  misc_RNA (1)...(19): siRNA sense strand
ucugacaagggaaauuaua

SEQ ID NO: 425226 - RNA, 19 nt, Homo sapiens
  misc_RNA (1)...(19): siRNA sense strand
cauacuggaccaacacaga

SEQ ID NO: 425227 - RNA, 19 nt, Homo sapiens
  misc_RNA (1)...(19): siRNA sense strand
ccaacacugucaaguuucg

SEQ ID NO: 425228 - RNA, 19 nt, Homo sapiens
  misc_RNA (1)...(19): siRNA sense strand
gaggcuacaagguacgaaa

SEQ ID NO: 425229 - RNA, 19 nt, Homo sapiens
  misc_RNA (1)...(19): siRNA sense strand
cguaccaccuggauguugu

SEQ ID NO: 425230 - RNA, 19 nt, Homo sapiens
  misc_RNA (1)...(19): siRNA sense strand
ucaguuuaguugaggauac

SEQ ID NO: 425231 - RNA, 19 nt, Homo sapiens
  misc_RNA (1)...(19): siRNA sense strand
ggaaaguguggucccaucu

SEQ ID NO: 425232 - RNA, 19 nt, Homo sapiens
  misc_RNA (1)...(19): siRNA sense strand
uaguugaggauaccacauu

SEQ ID NO: 425233 - RNA, 19 nt, Homo sapiens
  misc_RNA (1)...(19): siRNA sense strand
gcuacaagguacgaaacca

SEQ ID NO: 425234 - RNA, 19 nt, Homo sapiens
  misc_RNA (1)...(19): siRNA sense strand
cacuggagccucauuaugg

SEQ ID NO: 425235 - RNA, 19 nt, Homo sapiens
  misc_RNA (1)...(19): siRNA sense strand
cggccaacacugucaaguu

SEQ ID NO: 425236 - RNA, 19 nt, Homo sapiens
  misc_RNA (1)...(19): siRNA sense strand
acuggagccucauuaugga

SEQ ID NO: 425237 - RNA, 19 nt, Homo sapiens
  misc_RNA (1)...(19): siRNA sense strand
uaagcaggagcaucgcauu

SEQ ID NO: 425238 - RNA, 19 nt, Homo sapiens
  misc_RNA (1)...(19): siRNA sense strand
ggagccucauuauggaaag

SEQ ID NO: 425239 - RNA, 19 nt, Homo sapiens
  misc_RNA (1)...(19): siRNA sense strand
ggccaacacugucaaguuu

SEQ ID NO: 425240 - RNA, 19 nt, Homo sapiens
  misc_RNA (1)...(19): siRNA sense strand
gaauacggguccaucaauc

SEQ ID NO: 425241 - RNA, 19 nt, Homo sapiens
  misc_RNA (1)...(19): siRNA sense strand
gcaggagcaucgcauugga

SEQ ID NO: 425242 - RNA, 19 nt, Homo sapiens
  misc_RNA (1)...(19): siRNA sense strand
caucugacaagggaaauua

SEQ ID NO: 425243 - RNA, 19 nt, Homo sapiens
  misc_RNA (1)...(19): siRNA sense strand
gcaccauacuggaccaaca

SEQ ID NO: 425244 - RNA, 19 nt, Homo sapiens
  misc_RNA (1)...(19): siRNA sense strand
gcacuggagccucauuaug

SEQ ID NO: 425245 - RNA, 19 nt, Homo sapiens
  misc_RNA (1)...(19): siRNA sense strand
aaaguguggucccaucuga

SEQ ID NO: 425246 - RNA, 19 nt, Homo sapiens
  misc_RNA (1)...(19): siRNA sense strand
cauuggaggcuacaaggua

SEQ ID NO: 425247 - RNA, 19 nt, Homo sapiens
  misc_RNA (1)...(19): siRNA sense strand
aguugaggauaccacauua

SEQ ID NO: 425248 - RNA, 19 nt, Homo sapiens
  misc_RNA (1)...(19): siRNA sense strand
gaaaguguggucccaucug

SEQ ID NO: 425249 - RNA, 19 nt, Homo sapiens
  misc_RNA (1)...(19): siRNA sense strand
cagcacuggagccucauua

SEQ ID NO: 425250 - RNA, 19 nt, Homo sapiens
  misc_RNA (1)...(19): siRNA sense strand
ggaacccaaugccaaccau

SEQ ID NO: 425251 - RNA, 19 nt, Homo sapiens
  misc_RNA (1)...(19): siRNA sense strand
ugaauacggguccaucaau

SEQ ID NO: 425252 - RNA, 19 nt, Homo sapiens
  misc_RNA (1)...(19): siRNA sense strand
acacguaccaccuggaugu

SEQ ID NO: 425253 - RNA, 19 nt, Homo sapiens
  misc_RNA (1)...(19): siRNA sense strand
ucugacaagggaaauuaua

SEQ ID NO: 425254 - RNA, 19 nt, Homo sapiens
  misc_RNA (1)...(19): siRNA sense strand
cauacuggaccaacacaga

SEQ ID NO: 425255 - RNA, 19 nt, Homo sapiens
  misc_RNA (1)...(19): siRNA sense strand
ccaacacugucaaguuucg

SEQ ID NO: 425256 - RNA, 19 nt, Homo sapiens
  misc_RNA (1)...(19): siRNA sense strand
gaggcuacaagguacgaaa

SEQ ID NO: 425257 - RNA, 19 nt, Homo sapiens
  misc_RNA (1)...(19): siRNA sense strand
cguaccaccuggauguugu

SEQ ID NO: 425258 - RNA, 19 nt, Homo sapiens
  misc_RNA (1)...(19): siRNA sense strand
ucaguuuaguugaggauac

SEQ ID NO: 425259 - RNA, 19 nt, Homo sapiens
  misc_RNA (1)...(19): siRNA sense strand
ggaaaguguggucccaucu

SEQ ID NO: 425260 - RNA, 19 nt, Homo sapiens
  misc_RNA (1)...(19): siRNA sense strand
uaguugaggauaccacauu

SEQ ID NO: 425261 - RNA, 19 nt, Homo sapiens
  misc_RNA (1)...(19): siRNA sense strand
gcuacaagguacgaaacca

SEQ ID NO: 425262 - RNA, 19 nt, Homo sapiens
  misc_RNA (1)...(19): siRNA sense strand
cacuggagccucauuaugg

SEQ ID NO: 425263 - RNA, 19 nt, Homo sapiens
  misc_RNA (1)...(19): siRNA sense strand
cggccaacacugucaaguu

SEQ ID NO: 425264 - RNA, 19 nt, Homo sapiens
  misc_RNA (1)...(19): siRNA sense strand
acuggagccucauuaugga

SEQ ID NO: 425265 - RNA, 19 nt, Homo sapiens
  misc_RNA (1)...(19): siRNA sense strand
uaagcaggagcaucgcauu

SEQ ID NO: 425266 - RNA, 19 nt, Homo sapiens
  misc_RNA (1)...(19): siRNA sense strand
ggagccucauuauggaaag

SEQ ID NO: 425267 - RNA, 19 nt, Homo sapiens
  misc_RNA (1)...(19): siRNA sense strand
ggccaacacugucaaguuu

SEQ ID NO: 425268 - RNA, 19 nt, Homo sapiens
  misc_RNA (1)...(19): siRNA sense strand
gaauacggguccaucaauc

SEQ ID NO: 425269 - RNA, 19 nt, Homo sapiens
  misc_RNA (1)...(19): siRNA sense strand
gcaggagcaucgcauugga

SEQ ID NO: 425270 - RNA, 19 nt, Homo sapiens
  misc_RNA (1)...(19): siRNA sense strand
caucugacaagggaaauua

SEQ ID NO: 425271 - RNA, 19 nt, Homo sapiens
  misc_RNA (1)...(19): siRNA sense strand
gcaccauacuggaccaaca

SEQ ID NO: 425272 - RNA, 19 nt, Homo sapiens
  misc_RNA (1)...(19): siRNA sense strand
gcacuggagccucauuaug

SEQ ID NO: 425273 - RNA, 19 nt, Homo sapiens
  misc_RNA (1)...(19): siRNA sense strand
aaaguguggucccaucuga

SEQ ID NO: 425274 - RNA, 19 nt, Homo sapiens
  misc_RNA (1)...(19): siRNA sense strand
cauuggaggcuacaaggua

SEQ ID NO: 425275 - RNA, 19 nt, Homo sapiens
  misc_RNA (1)...(19): siRNA sense strand
aguugaggauaccacauua

SEQ ID NO: 425276 - RNA, 19 nt, Homo sapiens
  misc_RNA (1)...(19): siRNA sense strand
gaaaguguggucccaucug

SEQ ID NO: 425277 - RNA, 19 nt, Homo sapiens
  misc_RNA (1)...(19): siRNA sense strand
cagcacuggagccucauua

SEQ ID NO: 425278 - RNA, 19 nt, Homo sapiens
  misc_RNA (1)...(19): siRNA sense strand
ggaacccaaugccaaccau

SEQ ID NO: 425279 - RNA, 19 nt, Homo sapiens
  misc_RNA (1)...(19): siRNA sense strand
ugaauacggguccaucaau

SEQ ID NO: 425280 - RNA, 19 nt, Homo sapiens
  misc_RNA (1)...(19): siRNA sense strand
acacguaccaccuggaugu

SEQ ID NO: 425281 - RNA, 19 nt, Homo sapiens
  misc_RNA (1)...(19): siRNA sense strand
ucugacaagggaaauuaua

SEQ ID NO: 425282 - RNA, 19 nt, Homo sapiens
  misc_RNA (1)...(19): siRNA sense strand
cauacuggaccaacacaga

SEQ ID NO: 425283 - RNA, 19 nt, Homo sapiens
  misc_RNA (1)...(19): siRNA sense strand
ccaacacugucaaguuucg

SEQ ID NO: 425284 - RNA, 19 nt, Homo sapiens
  misc_RNA (1)...(19): siRNA sense strand
gaggcuacaagguacgaaa

SEQ ID NO: 425285 - RNA, 19 nt, Homo sapiens
  misc_RNA (1)...(19): siRNA sense strand
cguaccaccuggauguugu

SEQ ID NO: 425286 - RNA, 19 nt, Homo sapiens
  misc_RNA (1)...(19): siRNA sense strand
ucaguuuaguugaggauac

SEQ ID NO: 425287 - RNA, 19 nt, Homo sapiens
  misc_RNA (1)...(19): siRNA sense strand
ggaaaguguggucccaucu

SEQ ID NO: 425288 - RNA, 19 nt, Homo sapiens
  misc_RNA (1)...(19): siRNA sense strand
uaguugaggauaccacauu

SEQ ID NO: 425289 - RNA, 19 nt, Homo sapiens
  misc_RNA (1)...(19): siRNA sense strand
gcuacaagguacgaaacca

SEQ ID NO: 425290 - RNA, 19 nt, Homo sapiens
  misc_RNA (1)...(19): siRNA sense strand
cacuggagccucauuaugg

SEQ ID NO: 425291 - RNA, 19 nt, Homo sapiens
  misc_RNA (1)...(19): siRNA sense strand
cggccaacacugucaaguu

SEQ ID NO: 425292 - RNA, 19 nt, Homo sapiens
  misc_RNA (1)...(19): siRNA sense strand
acuggagccucauuaugga

SEQ ID NO: 425293 - RNA, 19 nt, Homo sapiens
  misc_RNA (1)...(19): siRNA sense strand
uaagcaggagcaucgcauu

SEQ ID NO: 425294 - RNA, 19 nt, Homo sapiens
  misc_RNA (1)...(19): siRNA sense strand
ggagccucauuauggaaag

SEQ ID NO: 425295 - RNA, 19 nt, Homo sapiens
  misc_RNA (1)...(19): siRNA sense strand
ggccaacacugucaaguuu

SEQ ID NO: 425296 - RNA, 19 nt, Homo sapiens
  misc_RNA (1)...(19): siRNA sense strand
gaauacggguccaucaauc

SEQ ID NO: 425297 - RNA, 19 nt, Homo sapiens
  misc_RNA (1)...(19): siRNA sense strand
gcaggagcaucgcauugga

SEQ ID NO: 425298 - RNA, 19 nt, Homo sapiens
  misc_RNA (1)...(19): siRNA sense strand
caucugacaagggaaauua

SEQ ID NO: 425299 - RNA, 19 nt, Homo sapiens
  misc_RNA (1)...(19): siRNA sense strand
gcaccauacuggaccaaca

SEQ ID NO: 425300 - RNA, 19 nt, Homo sapiens
  misc_RNA (1)...(19): siRNA sense strand
gcacuggagccucauuaug

SEQ ID NO: 425301 - RNA, 19 nt, Homo sapiens
  misc_RNA (1)...(19): siRNA sense strand
aaaguguggucccaucuga

SEQ ID NO: 425302 - RNA, 19 nt, Homo sapiens
  misc_RNA (1)...(19): siRNA sense strand
cauuggaggcuacaaggua

SEQ ID NO: 425303 - RNA, 19 nt, Homo sapiens
  misc_RNA (1)...(19): siRNA sense strand
aguugaggauaccacauua

SEQ ID NO: 425304 - RNA, 19 nt, Homo sapiens
  misc_RNA (1)...(19): siRNA sense strand
gaaaguguggucccaucug

SEQ ID NO: 425305 - RNA, 19 nt, Homo sapiens
  misc_RNA (1)...(19): siRNA sense strand
cagcacuggagccucauua

SEQ ID NO: 425306 - RNA, 19 nt, Homo sapiens
  misc_RNA (1)...(19): siRNA sense strand
ggaacccaaugccaaccau

SEQ ID NO: 425307 - RNA, 19 nt, Homo sapiens
  misc_RNA (1)...(19): siRNA sense strand
ugaauacggguccaucaau

SEQ ID NO: 425308 - RNA, 19 nt, Homo sapiens
  misc_RNA (1)...(19): siRNA sense strand
acacguaccaccuggaugu

SEQ ID NO: 425309 - RNA, 19 nt, Homo sapiens
  misc_RNA (1)...(19): siRNA sense strand
ucugacaagggaaauuaua

SEQ ID NO: 425310 - RNA, 19 nt, Homo sapiens
  misc_RNA (1)...(19): siRNA sense strand
cauacuggaccaacacaga

SEQ ID NO: 425311 - RNA, 19 nt, Homo sapiens
  misc_RNA (1)...(19): siRNA sense strand
ccaacacugucaaguuucg

SEQ ID NO: 425312 - RNA, 19 nt, Homo sapiens
  misc_RNA (1)...(19): siRNA sense strand
gaggcuacaagguacgaaa

SEQ ID NO: 425313 - RNA, 19 nt, Homo sapiens
  misc_RNA (1)...(19): siRNA sense strand
cguaccaccuggauguugu

SEQ ID NO: 425314 - RNA, 19 nt, Homo sapiens
  misc_RNA (1)...(19): siRNA sense strand
ucaguuuaguugaggauac

SEQ ID NO: 425315 - RNA, 19 nt, Homo sapiens
  misc_RNA (1)...(19): siRNA sense strand
ggaaaguguggucccaucu

SEQ ID NO: 425316 - RNA, 19 nt, Homo sapiens
  misc_RNA (1)...(19): siRNA sense strand
uaguugaggauaccacauu

SEQ ID NO: 425317 - RNA, 19 nt, Homo sapiens
  misc_RNA (1)...(19): siRNA sense strand
gcuacaagguacgaaacca

SEQ ID NO: 425318 - RNA, 19 nt, Homo sapiens
  misc_RNA (1)...(19): siRNA sense strand
cacuggagccucauuaugg

SEQ ID NO: 425319 - RNA, 19 nt, Homo sapiens
  misc_RNA (1)...(19): siRNA sense strand
cggccaacacugucaaguu

SEQ ID NO: 425320 - RNA, 19 nt, Homo sapiens
  misc_RNA (1)...(19): siRNA sense strand
acuggagccucauuaugga

SEQ ID NO: 425321 - RNA, 19 nt, Homo sapiens
  misc_RNA (1)...(19): siRNA sense strand
uaagcaggagcaucgcauu

SEQ ID NO: 425322 - RNA, 19 nt, Homo sapiens
  misc_RNA (1)...(19): siRNA sense strand
ggagccucauuauggaaag

SEQ ID NO: 425323 - RNA, 19 nt, Homo sapiens
  misc_RNA (1)...(19): siRNA sense strand
ggccaacacugucaaguuu

SEQ ID NO: 425324 - RNA, 19 nt, Homo sapiens
  misc_RNA (1)...(19): siRNA sense strand
gaauacggguccaucaauc

SEQ ID NO: 425325 - RNA, 19 nt, Homo sapiens
  misc_RNA (1)...(19): siRNA sense strand
gcaggagcaucgcauugga

SEQ ID NO: 425326 - RNA, 19 nt, Homo sapiens
  misc_RNA (1)...(19): siRNA sense strand
caucugacaagggaaauua

SEQ ID NO: 425327 - RNA, 19 nt, Homo sapiens
  misc_RNA (1)...(19): siRNA sense strand
gcaccauacuggaccaaca

SEQ ID NO: 425328 - RNA, 19 nt, Homo sapiens
  misc_RNA (1)...(19): siRNA sense strand
gcacuggagccucauuaug

SEQ ID NO: 425329 - RNA, 19 nt, Homo sapiens
  misc_RNA (1)...(19): siRNA sense strand
aaaguguggucccaucuga

SEQ ID NO: 425330 - RNA, 19 nt, Homo sapiens
  misc_RNA (1)...(19): siRNA sense strand
cauuggaggcuacaaggua

SEQ ID NO: 425331 - RNA, 19 nt, Homo sapiens
  misc_RNA (1)...(19): siRNA sense strand
aguugaggauaccacauua

SEQ ID NO: 425332 - RNA, 19 nt, Homo sapiens
  misc_RNA (1)...(19): siRNA sense strand
gaaaguguggucccaucug

SEQ ID NO: 425333 - RNA, 19 nt, Homo sapiens
  misc_RNA (1)...(19): siRNA sense strand
cagcacuggagccucauua

SEQ ID NO: 425334 - RNA, 19 nt, Homo sapiens
  misc_RNA (1)...(19): siRNA sense strand
ggaacccaaugccaaccau

SEQ ID NO: 425335 - RNA, 19 nt, Homo sapiens
  misc_RNA (1)...(19): siRNA sense strand
ugaauacggguccaucaau

SEQ ID NO: 425336 - RNA, 19 nt, Homo sapiens
  misc_RNA (1)...(19): siRNA sense strand
acacguaccaccuggaugu

SEQ ID NO: 425337 - RNA, 19 nt, Homo sapiens
  misc_RNA (1)...(19): siRNA sense strand
ucugacaagggaaauuaua

SEQ ID NO: 425338 - RNA, 19 nt, Homo sapiens
  misc_RNA (1)...(19): siRNA sense strand
cauacuggaccaacacaga

SEQ ID NO: 425339 - RNA, 19 nt, Homo sapiens
  misc_RNA (1)...(19): siRNA sense strand
ccaacacugucaaguuucg

SEQ ID NO: 425340 - RNA, 19 nt, Homo sapiens
  misc_RNA (1)...(19): siRNA sense strand
gaggcuacaagguacgaaa

SEQ ID NO: 425341 - RNA, 19 nt, Homo sapiens
  misc_RNA (1)...(19): siRNA sense strand
cguaccaccuggauguugu

SEQ ID NO: 425342 - RNA, 19 nt, Homo sapiens
  misc_RNA (1)...(19): siRNA sense strand
ucaguuuaguugaggauac

SEQ ID NO: 425343 - RNA, 19 nt, Homo sapiens
  misc_RNA (1)...(19): siRNA sense strand
ggaaaguguggucccaucu

SEQ ID NO: 425344 - RNA, 19 nt, Homo sapiens
  misc_RNA (1)...(19): siRNA sense strand
uaguugaggauaccacauu

SEQ ID NO: 425345 - RNA, 19 nt, Homo sapiens
  misc_RNA (1)...(19): siRNA sense strand
gcuacaagguacgaaacca

SEQ ID NO: 425346 - RNA, 19 nt, Homo sapiens
  misc_RNA (1)...(19): siRNA sense strand
cacuggagccucauuaugg

SEQ ID NO: 425347 - RNA, 19 nt, Homo sapiens
  misc_RNA (1)...(19): siRNA sense strand
cggccaacacugucaaguu

SEQ ID NO: 425348 - RNA, 19 nt, Homo sapiens
  misc_RNA (1)...(19): siRNA sense strand
acuggagccucauuaugga

SEQ ID NO: 425349 - RNA, 19 nt, Homo sapiens
  misc_RNA (1)...(19): siRNA sense strand
uaagcaggagcaucgcauu

SEQ ID NO: 425350 - RNA, 19 nt, Homo sapiens
  misc_RNA (1)...(19): siRNA sense strand
ggagccucauuauggaaag

SEQ ID NO: 425351 - RNA, 19 nt, Homo sapiens
  misc_RNA (1)...(19): siRNA sense strand
ggccaacacugucaaguuu

SEQ ID NO: 425352 - RNA, 19 nt, Homo sapiens
  misc_RNA (1)...(19): siRNA sense strand
gaauacggguccaucaauc

SEQ ID NO: 425353 - RNA, 19 nt, Homo sapiens
  misc_RNA (1)...(19): siRNA sense strand
gcaggagcaucgcauugga

SEQ ID NO: 425354 - RNA, 19 nt, Homo sapiens
  misc_RNA (1)...(19): siRNA sense strand
caucugacaagggaaauua

SEQ ID NO: 425355 - RNA, 19 nt, Homo sapiens
  misc_RNA (1)...(19): siRNA sense strand
gcaccauacuggaccaaca

SEQ ID NO: 425356 - RNA, 19 nt, Homo sapiens
  misc_RNA (1)...(19): siRNA sense strand
gcacuggagccucauuaug

SEQ ID NO: 425357 - RNA, 19 nt, Homo sapiens
  misc_RNA (1)...(19): siRNA sense strand
aaaguguggucccaucuga

SEQ ID NO: 425358 - RNA, 19 nt, Homo sapiens
  misc_RNA (1)...(19): siRNA sense strand
cauuggaggcuacaaggua

SEQ ID NO: 425359 - RNA, 19 nt, Homo sapiens
  misc_RNA (1)...(19): siRNA sense strand
aguugaggauaccacauua

SEQ ID NO: 425360 - RNA, 19 nt, Homo sapiens
  misc_RNA (1)...(19): siRNA sense strand
gaaaguguggucccaucug

SEQ ID NO: 425361 - RNA, 19 nt, Homo sapiens
  misc_RNA (1)...(19): siRNA sense strand
cagcacuggagccucauua

SEQ ID NO: 425362 - RNA, 19 nt, Homo sapiens
  misc_RNA (1)...(19): siRNA sense strand
ggaacccaaugccaaccau

SEQ ID NO: 425363 - RNA, 19 nt, Homo sapiens
  misc_RNA (1)...(19): siRNA sense strand
ugaauacggguccaucaau

SEQ ID NO: 425364 - RNA, 19 nt, Homo sapiens
  misc_RNA (1)...(19): siRNA sense strand
acacguaccaccuggaugu

SEQ ID NO: 425365 - RNA, 19 nt, Homo sapiens
  misc_RNA (1)...(19): siRNA sense strand
ucugacaagggaaauuaua

SEQ ID NO: 425366 - RNA, 19 nt, Homo sapiens
  misc_RNA (1)...(19): siRNA sense strand
cauacuggaccaacacaga

SEQ ID NO: 425367 - RNA, 19 nt, Homo sapiens
  misc_RNA (1)...(19): siRNA sense strand
ccaacacugucaaguuucg

SEQ ID NO: 425368 - RNA, 19 nt, Homo sapiens
  misc_RNA (1)...(19): siRNA sense strand
gaggcuacaagguacgaaa

SEQ ID NO: 425369 - RNA, 19 nt, Homo sapiens
  misc_RNA (1)...(19): siRNA sense strand
cguaccaccuggauguugu

SEQ ID NO: 425370 - RNA, 19 nt, Homo sapiens
  misc_RNA (1)...(19): siRNA sense strand
ucaguuuaguugaggauac

SEQ ID NO: 425371 - RNA, 19 nt, Homo sapiens
  misc_RNA (1)...(19): siRNA sense strand
ggaaaguguggucccaucu

SEQ ID NO: 425372 - RNA, 19 nt, Homo sapiens
  misc_RNA (1)...(19): siRNA sense strand
uaguugaggauaccacauu

SEQ ID NO: 425373 - RNA, 19 nt, Homo sapiens
  misc_RNA (1)...(19): siRNA sense strand
gcuacaagguacgaaacca

SEQ ID NO: 425374 - RNA, 19 nt, Homo sapiens
  misc_RNA (1)...(19): siRNA sense strand
cacuggagccucauuaugg

SEQ ID NO: 425375 - RNA, 19 nt, Homo sapiens
  misc_RNA (1)...(19): siRNA sense strand
cggccaacacugucaaguu

SEQ ID NO: 425376 - RNA, 19 nt, Homo sapiens
  misc_RNA (1)...(19): siRNA sense strand
acuggagccucauuaugga

SEQ ID NO: 425377 - RNA, 19 nt, Homo sapiens
  misc_RNA (1)...(19): siRNA sense strand
uaagcaggagcaucgcauu

SEQ ID NO: 425378 - RNA, 19 nt, Homo sapiens
  misc_RNA (1)...(19): siRNA sense strand
ggagccucauuauggaaag

SEQ ID NO: 425379 - RNA, 19 nt, Homo sapiens
  misc_RNA (1)...(19): siRNA sense strand
ggccaacacugucaaguuu

SEQ ID NO: 425380 - RNA, 19 nt, Homo sapiens
  misc_RNA (1)...(19): siRNA sense strand
gaauacggguccaucaauc

SEQ ID NO: 425381 - RNA, 19 nt, Homo sapiens
  misc_RNA (1)...(19): siRNA sense strand
gcaggagcaucgcauugga

SEQ ID NO: 425382 - RNA, 19 nt, Homo sapiens
  misc_RNA (1)...(19): siRNA sense strand
caucugacaagggaaauua

SEQ ID NO: 425383 - RNA, 19 nt, Homo sapiens
  misc_RNA (1)...(19): siRNA sense strand
gcaccauacuggaccaaca

SEQ ID NO: 425384 - RNA, 19 nt, Homo sapiens
  misc_RNA (1)...(19): siRNA sense strand
gcacuggagccucauuaug

SEQ ID NO: 425385 - RNA, 19 nt, Homo sapiens
  misc_RNA (1)...(19): siRNA sense strand
aaaguguggucccaucuga

SEQ ID NO: 425386 - RNA, 19 nt, Homo sapiens
  misc_RNA (1)...(19): siRNA sense strand
cauuggaggcuacaaggua

SEQ ID NO: 425387 - RNA, 19 nt, Homo sapiens
  misc_RNA (1)...(19): siRNA sense strand
aguugaggauaccacauua

SEQ ID NO: 425388 - RNA, 19 nt, Homo sapiens
  misc_RNA (1)...(19): siRNA sense strand
gaaaguguggucccaucug

SEQ ID NO: 425389 - RNA, 19 nt, Homo sapiens
  misc_RNA (1)...(19): siRNA sense strand
cagcacuggagccucauua

SEQ ID NO: 425390 - RNA, 19 nt, Homo sapiens
  misc_RNA (1)...(19): siRNA sense strand
ggaacccaaugccaaccau

SEQ ID NO: 425391 - RNA, 19 nt, Homo sapiens
  misc_RNA (1)...(19): siRNA sense strand
ugaauacggguccaucaau

SEQ ID NO: 425392 - RNA, 19 nt, Homo sapiens
  misc_RNA (1)...(19): siRNA sense strand
acacguaccaccuggaugu

SEQ ID NO: 425393 - RNA, 19 nt, Homo sapiens
  misc_RNA (1)...(19): siRNA sense strand
ucugacaagggaaauuaua

SEQ ID NO: 425394 - RNA, 19 nt, Homo sapiens
  misc_RNA (1)...(19): siRNA sense strand
cauacuggaccaacacaga

SEQ ID NO: 425395 - RNA, 19 nt, Homo sapiens
  misc_RNA (1)...(19): siRNA sense strand
ccaacacugucaaguuucg

SEQ ID NO: 425396 - RNA, 19 nt, Homo sapiens
  misc_RNA (1)...(19): siRNA sense strand
gaggcuacaagguacgaaa

SEQ ID NO: 425397 - RNA, 19 nt, Homo sapiens
  misc_RNA (1)...(19): siRNA sense strand
cguaccaccuggauguugu

SEQ ID NO: 425398 - RNA, 19 nt, Homo sapiens
  misc_RNA (1)...(19): siRNA sense strand
ucaguuuaguugaggauac

SEQ ID NO: 425399 - RNA, 19 nt, Homo sapiens
  misc_RNA (1)...(19): siRNA sense strand
ggaaaguguggucccaucu

SEQ ID NO: 425400 - RNA, 19 nt, Homo sapiens
  misc_RNA (1)...(19): siRNA sense strand
uaguugaggauaccacauu

SEQ ID NO: 425401 - RNA, 19 nt, Homo sapiens
  misc_RNA (1)...(19): siRNA sense strand
gcuacaagguacgaaacca

SEQ ID NO: 425402 - RNA, 19 nt, Homo sapiens
  misc_RNA (1)...(19): siRNA sense strand
cacuggagccucauuaugg

SEQ ID NO: 425403 - RNA, 19 nt, Homo sapiens
  misc_RNA (1)...(19): siRNA sense strand
cggccaacacugucaaguu

SEQ ID NO: 425404 - RNA, 19 nt, Homo sapiens
  misc_RNA (1)...(19): siRNA sense strand
acuggagccucauuaugga

SEQ ID NO: 425405 - RNA, 19 nt, Homo sapiens
  misc_RNA (1)...(19): siRNA sense strand
uaagcaggagcaucgcauu

SEQ ID NO: 425406 - RNA, 19 nt, Homo sapiens
  misc_RNA (1)...(19): siRNA sense strand
ggagccucauuauggaaag

SEQ ID NO: 425407 - RNA, 19 nt, Homo sapiens
  misc_RNA (1)...(19): siRNA sense strand
ggccaacacugucaaguuu

SEQ ID NO: 425408 - RNA, 19 nt, Homo sapiens
  misc_RNA (1)...(19): siRNA sense strand
gaauacggguccaucaauc

SEQ ID NO: 425409 - RNA, 19 nt, Homo sapiens
  misc_RNA (1)...(19): siRNA sense strand
gcaggagcaucgcauugga

SEQ ID NO: 425410 - RNA, 19 nt, Homo sapiens
  misc_RNA (1)...(19): siRNA sense strand
caucugacaagggaaauua

SEQ ID NO: 425411 - RNA, 19 nt, Homo sapiens
  misc_RNA (1)...(19): siRNA sense strand
gcaccauacuggaccaaca

SEQ ID NO: 425412 - RNA, 19 nt, Homo sapiens
  misc_RNA (1)...(19): siRNA sense strand
gcacuggagccucauuaug

SEQ ID NO: 425413 - RNA, 19 nt, Homo sapiens
  misc_RNA (1)...(19): siRNA sense strand
aaaguguggucccaucuga

SEQ ID NO: 425414 - RNA, 19 nt, Homo sapiens
  misc_RNA (1)...(19): siRNA sense strand
cauuggaggcuacaaggua

SEQ ID NO: 425415 - RNA, 19 nt, Homo sapiens
  misc_RNA (1)...(19): siRNA sense strand
aguugaggauaccacauua

SEQ ID NO: 425416 - RNA, 19 nt, Homo sapiens
  misc_RNA (1)...(19): siRNA sense strand
gaaaguguggucccaucug

SEQ ID NO: 425417 - RNA, 19 nt, Homo sapiens
  misc_RNA (1)...(19): siRNA sense strand
cagcacuggagccucauua

SEQ ID NO: 425418 - RNA, 19 nt, Homo sapiens
  misc_RNA (1)...(19): siRNA sense strand
ggaacccaaugccaaccau

SEQ ID NO: 425419 - RNA, 19 nt, Homo sapiens
  misc_RNA (1)...(19): siRNA sense strand
ugaauacggguccaucaau

SEQ ID NO: 425420 - RNA, 19 nt, Homo sapiens
  misc_RNA (1)...(19): siRNA sense strand
acacguaccaccuggaugu

SEQ ID NO: 425421 - RNA, 19 nt, Homo sapiens
  misc_RNA (1)...(19): siRNA sense strand
ucugacaagggaaauuaua

SEQ ID NO: 425422 - RNA, 19 nt, Homo sapiens
  misc_RNA (1)...(19): siRNA sense strand
cauacuggaccaacacaga

SEQ ID NO: 425423 - RNA, 19 nt, Homo sapiens
  misc_RNA (1)...(19): siRNA sense strand
ccaacacugucaaguuucg

SEQ ID NO: 425424 - RNA, 19 nt, Homo sapiens
  misc_RNA (1)...(19): siRNA sense strand
gaggcuacaagguacgaaa

SEQ ID NO: 425425 - RNA, 19 nt, Homo sapiens
  misc_RNA (1)...(19): siRNA sense strand
cguaccaccuggauguugu

SEQ ID NO: 425426 - RNA, 19 nt, Homo sapiens
  misc_RNA (1)...(19): siRNA sense strand
ucaguuuaguugaggauac

SEQ ID NO: 425427 - RNA, 19 nt, Homo sapiens
  misc_RNA (1)...(19): siRNA sense strand
ggaaaguguggucccaucu

SEQ ID NO: 425428 - RNA, 19 nt, Homo sapiens
  misc_RNA (1)...(19): siRNA sense strand
uaguugaggauaccacauu

SEQ ID NO: 425429 - RNA, 19 nt, Homo sapiens
  misc_RNA (1)...(19): siRNA sense strand
gcuacaagguacgaaacca

SEQ ID NO: 425430 - RNA, 19 nt, Homo sapiens
  misc_RNA (1)...(19): siRNA sense strand
cacuggagccucauuaugg

SEQ ID NO: 425431 - RNA, 19 nt, Homo sapiens
  misc_RNA (1)...(19): siRNA sense strand
cggccaacacugucaaguu

SEQ ID NO: 425432 - RNA, 19 nt, Homo sapiens
  misc_RNA (1)...(19): siRNA sense strand
acuggagccucauuaugga

SEQ ID NO: 425433 - RNA, 19 nt, Homo sapiens
  misc_RNA (1)...(19): siRNA sense strand
uaagcaggagcaucgcauu

SEQ ID NO: 425434 - RNA, 19 nt, Homo sapiens
  misc_RNA (1)...(19): siRNA sense strand
ggagccucauuauggaaag

SEQ ID NO: 425435 - RNA, 19 nt, Homo sapiens
  misc_RNA (1)...(19): siRNA sense strand
ggccaacacugucaaguuu

SEQ ID NO: 425436 - RNA, 19 nt, Homo sapiens
  misc_RNA (1)...(19): siRNA sense strand
gaauacggguccaucaauc

SEQ ID NO: 425437 - RNA, 19 nt, Homo sapiens
  misc_RNA (1)...(19): siRNA sense strand
gcaggagcaucgcauugga

SEQ ID NO: 425438 - RNA, 19 nt, Homo sapiens
  misc_RNA (1)...(19): siRNA sense strand
caucugacaagggaaauua

SEQ ID NO: 425439 - RNA, 19 nt, Homo sapiens
  misc_RNA (1)...(19): siRNA sense strand
gcaccauacuggaccaaca

SEQ ID NO: 425440 - RNA, 19 nt, Homo sapiens
  misc_RNA (1)...(19): siRNA sense strand
gcacuggagccucauuaug

SEQ ID NO: 425441 - RNA, 19 nt, Homo sapiens
  misc_RNA (1)...(19): siRNA sense strand
aaaguguggucccaucuga

SEQ ID NO: 425442 - RNA, 19 nt, Homo sapiens
  misc_RNA (1)...(19): siRNA sense strand
cauuggaggcuacaaggua

SEQ ID NO: 425443 - RNA, 19 nt, Homo sapiens
  misc_RNA (1)...(19): siRNA sense strand
aguugaggauaccacauua

SEQ ID NO: 425444 - RNA, 19 nt, Homo sapiens
  misc_RNA (1)...(19): siRNA sense strand
gaaaguguggucccaucug

SEQ ID NO: 425445 - RNA, 19 nt, Homo sapiens
  misc_RNA (1)...(19): siRNA sense strand
cagcacuggagccucauua

SEQ ID NO: 425446 - RNA, 19 nt, Homo sapiens
  misc_RNA (1)...(19): siRNA sense strand
ggaacccaaugccaaccau

SEQ ID NO: 425447 - RNA, 19 nt, Homo sapiens
  misc_RNA (1)...(19): siRNA sense strand
ugaauacggguccaucaau

SEQ ID NO: 425448 - RNA, 19 nt, Homo sapiens
  misc_RNA (1)...(19): siRNA sense strand
acacguaccaccuggaugu

SEQ ID NO: 425449 - RNA, 19 nt, Homo sapiens
  misc_RNA (1)...(19): siRNA sense strand
ucugacaagggaaauuaua

SEQ ID NO: 425450 - RNA, 19 nt, Homo sapiens
  misc_RNA (1)...(19): siRNA sense strand
cauacuggaccaacacaga

SEQ ID NO: 425451 - RNA, 19 nt, Homo sapiens
  misc_RNA (1)...(19): siRNA sense strand
ccaacacugucaaguuucg

SEQ ID NO: 425452 - RNA, 19 nt, Homo sapiens
  misc_RNA (1)...(19): siRNA sense strand
gaggcuacaagguacgaaa

SEQ ID NO: 425453 - RNA, 19 nt, Homo sapiens
  misc_RNA (1)...(19): siRNA sense strand
cguaccaccuggauguugu

SEQ ID NO: 425454 - RNA, 19 nt, Homo sapiens
  misc_RNA (1)...(19): siRNA sense strand
ucaguuuaguugaggauac

SEQ ID NO: 425455 - RNA, 19 nt, Homo sapiens
  misc_RNA (1)...(19): siRNA sense strand
ggaaaguguggucccaucu

SEQ ID NO: 425456 - RNA, 19 nt, Homo sapiens
  misc_RNA (1)...(19): siRNA sense strand
uaguugaggauaccacauu

SEQ ID NO: 425457 - RNA, 19 nt, Homo sapiens
  misc_RNA (1)...(19): siRNA sense strand
gcuacaagguacgaaacca

SEQ ID NO: 425458 - RNA, 19 nt, Homo sapiens
  misc_RNA (1)...(19): siRNA sense strand
cacuggagccucauuaugg

SEQ ID NO: 425459 - RNA, 19 nt, Homo sapiens
  misc_RNA (1)...(19): siRNA sense strand
cggccaacacugucaaguu

SEQ ID NO: 425460 - RNA, 19 nt, Homo sapiens
  misc_RNA (1)...(19): siRNA sense strand
acuggagccucauuaugga

SEQ ID NO: 425461 - RNA, 19 nt, Homo sapiens
  misc_RNA (1)...(19): siRNA sense strand
uaagcaggagcaucgcauu

SEQ ID NO: 425462 - RNA, 19 nt, Homo sapiens
  misc_RNA (1)...(19): siRNA sense strand
ggagccucauuauggaaag

SEQ ID NO: 425463 - RNA, 19 nt, Homo sapiens
  misc_RNA (1)...(19): siRNA sense strand
ggccaacacugucaaguuu

SEQ ID NO: 425464 - RNA, 19 nt, Homo sapiens
  misc_RNA (1)...(19): siRNA sense strand
gaauacggguccaucaauc

SEQ ID NO: 425465 - RNA, 19 nt, Homo sapiens
  misc_RNA (1)...(19): siRNA sense strand
gcaggagcaucgcauugga

SEQ ID NO: 425466 - RNA, 19 nt, Homo sapiens
  misc_RNA (1)...(19): siRNA sense strand
caucugacaagggaaauua

SEQ ID NO: 425467 - RNA, 19 nt, Homo sapiens
  misc_RNA (1)...(19): siRNA sense strand
gcaccauacuggaccaaca

SEQ ID NO: 425468 - RNA, 19 nt, Homo sapiens
  misc_RNA (1)...(19): siRNA sense strand
gcacuggagccucauuaug

SEQ ID NO: 425469 - RNA, 19 nt, Homo sapiens
  misc_RNA (1)...(19): siRNA sense strand
aaaguguggucccaucuga

SEQ ID NO: 425470 - RNA, 19 nt, Homo sapiens
  misc_RNA (1)...(19): siRNA sense strand
cauuggaggcuacaaggua

SEQ ID NO: 425471 - RNA, 19 nt, Homo sapiens
  misc_RNA (1)...(19): siRNA sense strand
aguugaggauaccacauua

SEQ ID NO: 425472 - RNA, 19 nt, Homo sapiens
  misc_RNA (1)...(19): siRNA sense strand
gaaaguguggucccaucug

SEQ ID NO: 425473 - RNA, 19 nt, Homo sapiens
  misc_RNA (1)...(19): siRNA sense strand
cagcacuggagccucauua

SEQ ID NO: 425474 - RNA, 19 nt, Homo sapiens
  misc_RNA (1)...(19): siRNA sense strand
ggaacccaaugccaaccau

SEQ ID NO: 425475 - RNA, 19 nt, Homo sapiens
  misc_RNA (1)...(19): siRNA sense strand
ugaauacggguccaucaau

SEQ ID NO: 425476 - RNA, 19 nt, Homo sapiens
  misc_RNA (1)...(19): siRNA sense strand
acacguaccaccuggaugu

SEQ ID NO: 425477 - RNA, 19 nt, Homo sapiens
  misc_RNA (1)...(19): siRNA sense strand
ucugacaagggaaauuaua

SEQ ID NO: 425478 - RNA, 19 nt, Homo sapiens
  misc_RNA (1)...(19): siRNA sense strand
cauacuggaccaacacaga

SEQ ID NO: 425479 - RNA, 19 nt, Homo sapiens
  misc_RNA (1)...(19): siRNA sense strand
ccaacacugucaaguuucg

SEQ ID NO: 425480 - RNA, 19 nt, Homo sapiens
  misc_RNA (1)...(19): siRNA sense strand
gaggcuacaagguacgaaa

SEQ ID NO: 425481 - RNA, 19 nt, Homo sapiens
  misc_RNA (1)...(19): siRNA sense strand
cguaccaccuggauguugu

SEQ ID NO: 425482 - RNA, 19 nt, Homo sapiens
  misc_RNA (1)...(19): siRNA sense strand
ucaguuuaguugaggauac

SEQ ID NO: 425483 - RNA, 19 nt, Homo sapiens
  misc_RNA (1)...(19): siRNA sense strand
ggaaaguguggucccaucu

SEQ ID NO: 425484 - RNA, 19 nt, Homo sapiens
  misc_RNA (1)...(19): siRNA sense strand
uaguugaggauaccacauu

SEQ ID NO: 425485 - RNA, 19 nt, Homo sapiens
  misc_RNA (1)...(19): siRNA sense strand
gcuacaagguacgaaacca

SEQ ID NO: 425486 - RNA, 19 nt, Homo sapiens
  misc_RNA (1)...(19): siRNA sense strand
cacuggagccucauuaugg

SEQ ID NO: 425487 - RNA, 19 nt, Homo sapiens
  misc_RNA (1)...(19): siRNA sense strand
cggccaacacugucaaguu

SEQ ID NO: 425488 - RNA, 19 nt, Homo sapiens
  misc_RNA (1)...(19): siRNA sense strand
acuggagccucauuaugga

SEQ ID NO: 425489 - RNA, 19 nt, Homo sapiens
  misc_RNA (1)...(19): siRNA sense strand
uaagcaggagcaucgcauu

SEQ ID NO: 425490 - RNA, 19 nt, Homo sapiens
  misc_RNA (1)...(19): siRNA sense strand
ggagccucauuauggaaag

SEQ ID NO: 425491 - RNA, 19 nt, Homo sapiens
  misc_RNA (1)...(19): siRNA sense strand
ggccaacacugucaaguuu

SEQ ID NO: 425492 - RNA, 19 nt, Homo sapiens
  misc_RNA (1)...(19): siRNA sense strand
gaauacggguccaucaauc

SEQ ID NO: 425493 - RNA, 19 nt, Homo sapiens
  misc_RNA (1)...(19): siRNA sense strand
gcaggagcaucgcauugga

SEQ ID NO: 425494 - RNA, 19 nt, Homo sapiens
  misc_RNA (1)...(19): siRNA sense strand
caucugacaagggaaauua

SEQ ID NO: 425495 - RNA, 19 nt, Homo sapiens
  misc_RNA (1)...(19): siRNA sense strand
gcaccauacuggaccaaca

SEQ ID NO: 425496 - RNA, 19 nt, Homo sapiens
  misc_RNA (1)...(19): siRNA sense strand
gcacuggagccucauuaug

SEQ ID NO: 425497 - RNA, 19 nt, Homo sapiens
  misc_RNA (1)...(19): siRNA sense strand
aaaguguggucccaucuga

SEQ ID NO: 425498 - RNA, 19 nt, Homo sapiens
  misc_RNA (1)...(19): siRNA sense strand
cauuggaggcuacaaggua

SEQ ID NO: 425499 - RNA, 19 nt, Homo sapiens
  misc_RNA (1)...(19): siRNA sense strand
aguugaggauaccacauua

SEQ ID NO: 425500 - RNA, 19 nt, Homo sapiens
  misc_RNA (1)...(19): siRNA sense strand
gaaaguguggucccaucug

SEQ ID NO: 425501 - RNA, 19 nt, Homo sapiens
  misc_RNA (1)...(19): siRNA sense strand
cagcacuggagccucauua

SEQ ID NO: 425502 - RNA, 19 nt, Homo sapiens
  misc_RNA (1)...(19): siRNA sense strand
ggaacccaaugccaaccau

SEQ ID NO: 425503 - RNA, 19 nt, Homo sapiens
  misc_RNA (1)...(19): siRNA sense strand
ugaauacggguccaucaau

SEQ ID NO: 425504 - RNA, 19 nt, Homo sapiens
  misc_RNA (1)...(19): siRNA sense strand
acacguaccaccuggaugu

SEQ ID NO: 425505 - RNA, 19 nt, Homo sapiens
  misc_RNA (1)...(19): siRNA sense strand
ucugacaagggaaauuaua

SEQ ID NO: 425506 - RNA, 19 nt, Homo sapiens
  misc_RNA (1)...(19): siRNA sense strand
cauacuggaccaacacaga

SEQ ID NO: 425507 - RNA, 19 nt, Homo sapiens
  misc_RNA (1)...(19): siRNA sense strand
ccaacacugucaaguuucg

SEQ ID NO: 425508 - RNA, 19 nt, Homo sapiens
  misc_RNA (1)...(19): siRNA sense strand
gaggcuacaagguacgaaa

SEQ ID NO: 425509 - RNA, 19 nt, Homo sapiens
  misc_RNA (1)...(19): siRNA sense strand
cguaccaccuggauguugu

SEQ ID NO: 425510 - RNA, 19 nt, Homo sapiens
  misc_RNA (1)...(19): siRNA sense strand
ucaguuuaguugaggauac

SEQ ID NO: 425511 - RNA, 19 nt, Homo sapiens
  misc_RNA (1)...(19): siRNA sense strand
ggaaaguguggucccaucu

SEQ ID NO: 425512 - RNA, 19 nt, Homo sapiens
  misc_RNA (1)...(19): siRNA sense strand
uaguugaggauaccacauu

SEQ ID NO: 425513 - RNA, 19 nt, Homo sapiens
  misc_RNA (1)...(19): siRNA sense strand
gcuacaagguacgaaacca

SEQ ID NO: 425514 - RNA, 19 nt, Homo sapiens
  misc_RNA (1)...(19): siRNA sense strand
cacuggagccucauuaugg

SEQ ID NO: 425515 - RNA, 19 nt, Homo sapiens
  misc_RNA (1)...(19): siRNA sense strand
cggccaacacugucaaguu

SEQ ID NO: 425516 - RNA, 19 nt, Homo sapiens
  misc_RNA (1)...(19): siRNA sense strand
acuggagccucauuaugga

SEQ ID NO: 425517 - RNA, 19 nt, Homo sapiens
  misc_RNA (1)...(19): siRNA sense strand
uaagcaggagcaucgcauu

SEQ ID NO: 425518 - RNA, 19 nt, Homo sapiens
  misc_RNA (1)...(19): siRNA sense strand
ggagccucauuauggaaag

SEQ ID NO: 425519 - RNA, 19 nt, Homo sapiens
  misc_RNA (1)...(19): siRNA sense strand
ggccaacacugucaaguuu

SEQ ID NO: 425520 - RNA, 19 nt, Homo sapiens
  misc_RNA (1)...(19): siRNA sense strand
gaauacggguccaucaauc

SEQ ID NO: 425521 - RNA, 19 nt, Homo sapiens
  misc_RNA (1)...(19): siRNA sense strand
gcaggagcaucgcauugga

SEQ ID NO: 425522 - RNA, 19 nt, Homo sapiens
  misc_RNA (1)...(19): siRNA sense strand
caucugacaagggaaauua

SEQ ID NO: 425523 - RNA, 19 nt, Homo sapiens
  misc_RNA (1)...(19): siRNA sense strand
gcaccauacuggaccaaca

SEQ ID NO: 425524 - RNA, 19 nt, Homo sapiens
  misc_RNA (1)...(19): siRNA sense strand
gcacuggagccucauuaug

SEQ ID NO: 425525 - RNA, 19 nt, Homo sapiens
  misc_RNA (1)...(19): siRNA sense strand
aaaguguggucccaucuga

SEQ ID NO: 425526 - RNA, 19 nt, Homo sapiens
  misc_RNA (1)...(19): siRNA sense strand
cauuggaggcuacaaggua

SEQ ID NO: 425527 - RNA, 19 nt, Homo sapiens
  misc_RNA (1)...(19): siRNA sense strand
aguugaggauaccacauua

SEQ ID NO: 425528 - RNA, 19 nt, Homo sapiens
  misc_RNA (1)...(19): siRNA sense strand
gaaaguguggucccaucug

SEQ ID NO: 425529 - RNA, 19 nt, Homo sapiens
  misc_RNA (1)...(19): siRNA sense strand
cagcacuggagccucauua

SEQ ID NO: 425530 - RNA, 19 nt, Homo sapiens
  misc_RNA (1)...(19): siRNA sense strand
ggaacccaaugccaaccau

SEQ ID NO: 425531 - RNA, 19 nt, Homo sapiens
  misc_RNA (1)...(19): siRNA sense strand
ugaauacggguccaucaau

SEQ ID NO: 425532 - RNA, 19 nt, Homo sapiens
  misc_RNA (1)...(19): siRNA sense strand
acacguaccaccuggaugu

SEQ ID NO: 425533 - RNA, 19 nt, Homo sapiens
  misc_RNA (1)...(19): siRNA sense strand
ucugacaagggaaauuaua

SEQ ID NO: 425534 - RNA, 19 nt, Homo sapiens
  misc_RNA (1)...(19): siRNA sense strand
cauacuggaccaacacaga

SEQ ID NO: 425535 - RNA, 19 nt, Homo sapiens
  misc_RNA (1)...(19): siRNA sense strand
ccaacacugucaaguuucg

SEQ ID NO: 425536 - RNA, 19 nt, Homo sapiens
  misc_RNA (1)...(19): siRNA sense strand
gaggcuacaagguacgaaa

SEQ ID NO: 425537 - RNA, 19 nt, Homo sapiens
  misc_RNA (1)...(19): siRNA sense strand
cguaccaccuggauguugu

SEQ ID NO: 425538 - RNA, 19 nt, Homo sapiens
  misc_RNA (1)...(19): siRNA sense strand
ucaguuuaguugaggauac

SEQ ID NO: 425539 - RNA, 19 nt, Homo sapiens
  misc_RNA (1)...(19): siRNA sense strand
ggaaaguguggucccaucu

SEQ ID NO: 425540 - RNA, 19 nt, Homo sapiens
  misc_RNA (1)...(19): siRNA sense strand
uaguugaggauaccacauu

SEQ ID NO: 425541 - RNA, 19 nt, Homo sapiens
  misc_RNA (1)...(19): siRNA sense strand
gcuacaagguacgaaacca

SEQ ID NO: 425542 - RNA, 19 nt, Homo sapiens
  misc_RNA (1)...(19): siRNA sense strand
cacuggagccucauuaugg

SEQ ID NO: 425543 - RNA, 19 nt, Homo sapiens
  misc_RNA (1)...(19): siRNA sense strand
cggccaacacugucaaguu

SEQ ID NO: 425544 - RNA, 19 nt, Homo sapiens
  misc_RNA (1)...(19): siRNA sense strand
acuggagccucauuaugga

SEQ ID NO: 425545 - RNA, 19 nt, Homo sapiens
  misc_RNA (1)...(19): siRNA sense strand
uaagcaggagcaucgcauu

SEQ ID NO: 425546 - RNA, 19 nt, Homo sapiens
  misc_RNA (1)...(19): siRNA sense strand
ggagccucauuauggaaag

SEQ ID NO: 425547 - RNA, 19 nt, Homo sapiens
  misc_RNA (1)...(19): siRNA sense strand
ggccaacacugucaaguuu

SEQ ID NO: 425548 - RNA, 19 nt, Homo sapiens
  misc_RNA (1)...(19): siRNA sense strand
gaauacggguccaucaauc

SEQ ID NO: 425549 - RNA, 19 nt, Homo sapiens
  misc_RNA (1)...(19): siRNA sense strand
gcaggagcaucgcauugga

SEQ ID NO: 425550 - RNA, 19 nt, Homo sapiens
  misc_RNA (1)...(19): siRNA sense strand
caucugacaagggaaauua

SEQ ID NO: 425551 - RNA, 19 nt, Homo sapiens
  misc_RNA (1)...(19): siRNA sense strand
gcaccauacuggaccaaca

SEQ ID NO: 425552 - RNA, 19 nt, Homo sapiens
  misc_RNA (1)...(19): siRNA sense strand
gcacuggagccucauuaug

SEQ ID NO: 425553 - RNA, 19 nt, Homo sapiens
  misc_RNA (1)...(19): siRNA sense strand
aaaguguggucccaucuga

SEQ ID NO: 425554 - RNA, 19 nt, Homo sapiens
  misc_RNA (1)...(19): siRNA sense strand
cauuggaggcuacaaggua

SEQ ID NO: 425555 - RNA, 19 nt, Homo sapiens
  misc_RNA (1)...(19): siRNA sense strand
aguugaggauaccacauua

SEQ ID NO: 425556 - RNA, 19 nt, Homo sapiens
  misc_RNA (1)...(19): siRNA sense strand
gaaaguguggucccaucug

SEQ ID NO: 425557 - RNA, 19 nt, Homo sapiens
  misc_RNA (1)...(19): siRNA sense strand
cagcacuggagccucauua

SEQ ID NO: 425558 - RNA, 19 nt, Homo sapiens
  misc_RNA (1)...(19): siRNA sense strand
ggaacccaaugccaaccau

SEQ ID NO: 425559 - RNA, 19 nt, Homo sapiens
  misc_RNA (1)...(19): siRNA sense strand
ugaauacggguccaucaau

SEQ ID NO: 425560 - RNA, 19 nt, Homo sapiens
  misc_RNA (1)...(19): siRNA sense strand
acacguaccaccuggaugu

SEQ ID NO: 425561 - RNA, 19 nt, Homo sapiens
  misc_RNA (1)...(19): siRNA sense strand
ucugacaagggaaauuaua

SEQ ID NO: 425562 - RNA, 19 nt, Homo sapiens
  misc_RNA (1)...(19): siRNA sense strand
cauacuggaccaacacaga

SEQ ID NO: 425563 - RNA, 19 nt, Homo sapiens
  misc_RNA (1)...(19): siRNA sense strand
ccaacacugucaaguuucg

SEQ ID NO: 425564 - RNA, 19 nt, Homo sapiens
  misc_RNA (1)...(19): siRNA sense strand
gaggcuacaagguacgaaa

SEQ ID NO: 425565 - RNA, 19 nt, Homo sapiens
  misc_RNA (1)...(19): siRNA sense strand
cguaccaccuggauguugu

SEQ ID NO: 425566 - RNA, 19 nt, Homo sapiens
  misc_RNA (1)...(19): siRNA sense strand
ucaguuuaguugaggauac

SEQ ID NO: 425567 - RNA, 19 nt, Homo sapiens
  misc_RNA (1)...(19): siRNA sense strand
ggaaaguguggucccaucu

SEQ ID NO: 425568 - RNA, 19 nt, Homo sapiens
  misc_RNA (1)...(19): siRNA sense strand
uaguugaggauaccacauu

SEQ ID NO: 425569 - RNA, 19 nt, Homo sapiens
  misc_RNA (1)...(19): siRNA sense strand
gcuacaagguacgaaacca

SEQ ID NO: 425570 - RNA, 19 nt, Homo sapiens
  misc_RNA (1)...(19): siRNA sense strand
cacuggagccucauuaugg

SEQ ID NO: 425571 - RNA, 19 nt, Homo sapiens
  misc_RNA (1)...(19): siRNA sense strand
cggccaacacugucaaguu

SEQ ID NO: 425572 - RNA, 19 nt, Homo sapiens
  misc_RNA (1)...(19): siRNA sense strand
acuggagccucauuaugga

SEQ ID NO: 425573 - RNA, 19 nt, Homo sapiens
  misc_RNA (1)...(19): siRNA sense strand
uaagcaggagcaucgcauu

SEQ ID NO: 425574 - RNA, 19 nt, Homo sapiens
  misc_RNA (1)...(19): siRNA sense strand
ggagccucauuauggaaag

SEQ ID NO: 425575 - RNA, 19 nt, Homo sapiens
  misc_RNA (1)...(19): siRNA sense strand
ggccaacacugucaaguuu

SEQ ID NO: 425576 - RNA, 19 nt, Homo sapiens
  misc_RNA (1)...(19): siRNA sense strand
gaauacggguccaucaauc

SEQ ID NO: 425577 - RNA, 19 nt, Homo sapiens
  misc_RNA (1)...(19): siRNA sense strand
gcaggagcaucgcauugga

SEQ ID NO: 425578 - RNA, 19 nt, Homo sapiens
  misc_RNA (1)...(19): siRNA sense strand
caucugacaagggaaauua

SEQ ID NO: 425579 - RNA, 19 nt, Homo sapiens
  misc_RNA (1)...(19): siRNA sense strand
gcaccauacuggaccaaca

SEQ ID NO: 425580 - RNA, 19 nt, Homo sapiens
  misc_RNA (1)...(19): siRNA sense strand
gcacuggagccucauuaug

SEQ ID NO: 425581 - RNA, 19 nt, Homo sapiens
  misc_RNA (1)...(19): siRNA sense strand
aaaguguggucccaucuga

SEQ ID NO: 425582 - RNA, 19 nt, Homo sapiens
  misc_RNA (1)...(19): siRNA sense strand
cauuggaggcuacaaggua

SEQ ID NO: 425583 - RNA, 19 nt, Homo sapiens
  misc_RNA (1)...(19): siRNA sense strand
aguugaggauaccacauua

SEQ ID NO: 425584 - RNA, 19 nt, Homo sapiens
  misc_RNA (1)...(19): siRNA sense strand
gaaaguguggucccaucug

SEQ ID NO: 425585 - RNA, 19 nt, Homo sapiens
  misc_RNA (1)...(19): siRNA sense strand
cagcacuggagccucauua

SEQ ID NO: 425586 - RNA, 19 nt, Homo sapiens
  misc_RNA (1)...(19): siRNA sense strand
ggaacccaaugccaaccau

SEQ ID NO: 425587 - RNA, 19 nt, Homo sapiens
  misc_RNA (1)...(19): siRNA sense strand
ugaauacggguccaucaau

SEQ ID NO: 425588 - RNA, 19 nt, Homo sapiens
  misc_RNA (1)...(19): siRNA sense strand
acacguaccaccuggaugu

SEQ ID NO: 425589 - RNA, 19 nt, Homo sapiens
  misc_RNA (1)...(19): siRNA sense strand
ucugacaagggaaauuaua

SEQ ID NO: 425590 - RNA, 19 nt, Homo sapiens
  misc_RNA (1)...(19): siRNA sense strand
cauacuggaccaacacaga

SEQ ID NO: 425591 - RNA, 19 nt, Homo sapiens
  misc_RNA (1)...(19): siRNA sense strand
ccaacacugucaaguuucg

SEQ ID NO: 425592 - RNA, 19 nt, Homo sapiens
  misc_RNA (1)...(19): siRNA sense strand
gaggcuacaagguacgaaa

SEQ ID NO: 425593 - RNA, 19 nt, Homo sapiens
  misc_RNA (1)...(19): siRNA sense strand
cguaccaccuggauguugu

SEQ ID NO: 425594 - RNA, 19 nt, Homo sapiens
  misc_RNA (1)...(19): siRNA sense strand
ucaguuuaguugaggauac

SEQ ID NO: 425595 - RNA, 19 nt, Homo sapiens
  misc_RNA (1)...(19): siRNA sense strand
ggaaaguguggucccaucu

SEQ ID NO: 425596 - RNA, 19 nt, Homo sapiens
  misc_RNA (1)...(19): siRNA sense strand
uaguugaggauaccacauu

SEQ ID NO: 425597 - RNA, 19 nt, Homo sapiens
  misc_RNA (1)...(19): siRNA sense strand
gcuacaagguacgaaacca

SEQ ID NO: 425598 - RNA, 19 nt, Homo sapiens
  misc_RNA (1)...(19): siRNA sense strand
cacuggagccucauuaugg

SEQ ID NO: 425599 - RNA, 19 nt, Homo sapiens
  misc_RNA (1)...(19): siRNA sense strand
cggccaacacugucaaguu

SEQ ID NO: 425600 - RNA, 19 nt, Homo sapiens
  misc_RNA (1)...(19): siRNA sense strand
acuggagccucauuaugga

SEQ ID NO: 425601 - RNA, 19 nt, Homo sapiens
  misc_RNA (1)...(19): siRNA sense strand
uaagcaggagcaucgcauu

SEQ ID NO: 425602 - RNA, 19 nt, Homo sapiens
  misc_RNA (1)...(19): siRNA sense strand
ggagccucauuauggaaag

SEQ ID NO: 425603 - RNA, 19 nt, Homo sapiens
  misc_RNA (1)...(19): siRNA sense strand
ggccaacacugucaaguuu

SEQ ID NO: 425604 - RNA, 19 nt, Homo sapiens
  misc_RNA (1)...(19): siRNA sense strand
gaauacggguccaucaauc

SEQ ID NO: 425605 - RNA, 19 nt, Homo sapiens
  misc_RNA (1)...(19): siRNA sense strand
gcaggagcaucgcauugga

SEQ ID NO: 425606 - RNA, 19 nt, Homo sapiens
  misc_RNA (1)...(19): siRNA sense strand
caucugacaagggaaauua

SEQ ID NO: 425607 - RNA, 19 nt, Homo sapiens
  misc_RNA (1)...(19): siRNA sense strand
gcaccauacuggaccaaca

SEQ ID NO: 425608 - RNA, 19 nt, Homo sapiens
  misc_RNA (1)...(19): siRNA sense strand
gcacuggagccucauuaug

SEQ ID NO: 425609 - RNA, 19 nt, Homo sapiens
  misc_RNA (1)...(19): siRNA sense strand
aaaguguggucccaucuga

SEQ ID NO: 425610 - RNA, 19 nt, Homo sapiens
  misc_RNA (1)...(19): siRNA sense strand
cauuggaggcuacaaggua

SEQ ID NO: 425611 - RNA, 19 nt, Homo sapiens
  misc_RNA (1)...(19): siRNA sense strand
aguugaggauaccacauua

SEQ ID NO: 425612 - RNA, 19 nt, Homo sapiens
  misc_RNA (1)...(19): siRNA sense strand
gaaaguguggucccaucug

SEQ ID NO: 425613 - RNA, 19 nt, Homo sapiens
  misc_RNA (1)...(19): siRNA sense strand
cagcacuggagccucauua

SEQ ID NO: 425614 - RNA, 19 nt, Homo sapiens
  misc_RNA (1)...(19): siRNA sense strand
ggaacccaaugccaaccau

SEQ ID NO: 425615 - RNA, 19 nt, Homo sapiens
  misc_RNA (1)...(19): siRNA sense strand
ugaauacggguccaucaau

SEQ ID NO: 425616 - RNA, 19 nt, Homo sapiens
  misc_RNA (1)...(19): siRNA sense strand
acacguaccaccuggaugu

SEQ ID NO: 425617 - RNA, 19 nt, Homo sapiens
  misc_RNA (1)...(19): siRNA sense strand
ucugacaagggaaauuaua

SEQ ID NO: 425618 - RNA, 19 nt, Homo sapiens
  misc_RNA (1)...(19): siRNA sense strand
cauacuggaccaacacaga

SEQ ID NO: 425619 - RNA, 19 nt, Homo sapiens
  misc_RNA (1)...(19): siRNA sense strand
ccaacacugucaaguuucg

SEQ ID NO: 425620 - RNA, 19 nt, Homo sapiens
  misc_RNA (1)...(19): siRNA sense strand
gaggcuacaagguacgaaa

SEQ ID NO: 425621 - RNA, 19 nt, Homo sapiens
  misc_RNA (1)...(19): siRNA sense strand
cguaccaccuggauguugu

SEQ ID NO: 425622 - RNA, 19 nt, Homo sapiens
  misc_RNA (1)...(19): siRNA sense strand
ucaguuuaguugaggauac

SEQ ID NO: 425623 - RNA, 19 nt, Homo sapiens
  misc_RNA (1)...(19): siRNA sense strand
ggaaaguguggucccaucu

SEQ ID NO: 425624 - RNA, 19 nt, Homo sapiens
  misc_RNA (1)...(19): siRNA sense strand
uaguugaggauaccacauu

SEQ ID NO: 425625 - RNA, 19 nt, Homo sapiens
  misc_RNA (1)...(19): siRNA sense strand
gcuacaagguacgaaacca

SEQ ID NO: 425626 - RNA, 19 nt, Homo sapiens
  misc_RNA (1)...(19): siRNA sense strand
cacuggagccucauuaugg

SEQ ID NO: 425627 - RNA, 19 nt, Homo sapiens
  misc_RNA (1)...(19): siRNA sense strand
cggccaacacugucaaguu

SEQ ID NO: 425628 - RNA, 19 nt, Homo sapiens
  misc_RNA (1)...(19): siRNA sense strand
acuggagccucauuaugga

SEQ ID NO: 425629 - RNA, 19 nt, Homo sapiens
  misc_RNA (1)...(19): siRNA sense strand
uaagcaggagcaucgcauu

SEQ ID NO: 425630 - RNA, 19 nt, Homo sapiens
  misc_RNA (1)...(19): siRNA sense strand
ggagccucauuauggaaag

SEQ ID NO: 425631 - RNA, 19 nt, Homo sapiens
  misc_RNA (1)...(19): siRNA sense strand
ggccaacacugucaaguuu

SEQ ID NO: 425632 - RNA, 19 nt, Homo sapiens
  misc_RNA (1)...(19): siRNA sense strand
gaauacggguccaucaauc

SEQ ID NO: 425633 - RNA, 19 nt, Homo sapiens
  misc_RNA (1)...(19): siRNA sense strand
gcaggagcaucgcauugga

SEQ ID NO: 425634 - RNA, 19 nt, Homo sapiens
  misc_RNA (1)...(19): siRNA sense strand
caucugacaagggaaauua

SEQ ID NO: 425635 - RNA, 19 nt, Homo sapiens
  misc_RNA (1)...(19): siRNA sense strand
gcaccauacuggaccaaca

SEQ ID NO: 425636 - RNA, 19 nt, Homo sapiens
  misc_RNA (1)...(19): siRNA sense strand
gcacuggagccucauuaug

SEQ ID NO: 425637 - RNA, 19 nt, Homo sapiens
  misc_RNA (1)...(19): siRNA sense strand
aaaguguggucccaucuga

SEQ ID NO: 425638 - RNA, 19 nt, Homo sapiens
  misc_RNA (1)...(19): siRNA sense strand
cauuggaggcuacaaggua

SEQ ID NO: 425639 - RNA, 19 nt, Homo sapiens
  misc_RNA (1)...(19): siRNA sense strand
aguugaggauaccacauua

SEQ ID NO: 425640 - RNA, 19 nt, Homo sapiens
  misc_RNA (1)...(19): siRNA sense strand
gaaaguguggucccaucug

SEQ ID NO: 425641 - RNA, 19 nt, Homo sapiens
  misc_RNA (1)...(19): siRNA sense strand
cagcacuggagccucauua

SEQ ID NO: 425642 - RNA, 19 nt, Homo sapiens
  misc_RNA (1)...(19): siRNA sense strand
ggaacccaaugccaaccau

SEQ ID NO: 425643 - RNA, 19 nt, Homo sapiens
  misc_RNA (1)...(19): siRNA sense strand
ugaauacggguccaucaau

SEQ ID NO: 425644 - RNA, 19 nt, Homo sapiens
  misc_RNA (1)...(19): siRNA sense strand
acacguaccaccuggaugu

SEQ ID NO: 425645 - RNA, 19 nt, Homo sapiens
  misc_RNA (1)...(19): siRNA sense strand
ucugacaagggaaauuaua

SEQ ID NO: 425646 - RNA, 19 nt, Homo sapiens
  misc_RNA (1)...(19): siRNA sense strand
cauacuggaccaacacaga

SEQ ID NO: 425647 - RNA, 19 nt, Homo sapiens
  misc_RNA (1)...(19): siRNA sense strand
ccaacacugucaaguuucg

SEQ ID NO: 425648 - RNA, 19 nt, Homo sapiens
  misc_RNA (1)...(19): siRNA sense strand
gaggcuacaagguacgaaa

SEQ ID NO: 425649 - RNA, 19 nt, Homo sapiens
  misc_RNA (1)...(19): siRNA sense strand
cguaccaccuggauguugu

SEQ ID NO: 425650 - RNA, 19 nt, Homo sapiens
  misc_RNA (1)...(19): siRNA sense strand
ucaguuuaguugaggauac

SEQ ID NO: 425651 - RNA, 19 nt, Homo sapiens
  misc_RNA (1)...(19): siRNA sense strand
ggaaaguguggucccaucu

SEQ ID NO: 425652 - RNA, 19 nt, Homo sapiens
  misc_RNA (1)...(19): siRNA sense strand
uaguugaggauaccacauu

SEQ ID NO: 425653 - RNA, 19 nt, Homo sapiens
  misc_RNA (1)...(19): siRNA sense strand
gcuacaagguacgaaacca

SEQ ID NO: 425654 - RNA, 19 nt, Homo sapiens
  misc_RNA (1)...(19): siRNA sense strand
cacuggagccucauuaugg

SEQ ID NO: 425655 - RNA, 19 nt, Homo sapiens
  misc_RNA (1)...(19): siRNA sense strand
cggccaacacugucaaguu

SEQ ID NO: 425656 - RNA, 19 nt, Homo sapiens
  misc_RNA (1)...(19): siRNA sense strand
acuggagccucauuaugga

SEQ ID NO: 425657 - RNA, 19 nt, Homo sapiens
  misc_RNA (1)...(19): siRNA sense strand
uaagcaggagcaucgcauu

SEQ ID NO: 425658 - RNA, 19 nt, Homo sapiens
  misc_RNA (1)...(19): siRNA sense strand
ggagccucauuauggaaag

SEQ ID NO: 425659 - RNA, 19 nt, Homo sapiens
  misc_RNA (1)...(19): siRNA sense strand
ggccaacacugucaaguuu

SEQ ID NO: 425660 - RNA, 19 nt, Homo sapiens
  misc_RNA (1)...(19): siRNA sense strand
gaauacggguccaucaauc

SEQ ID NO: 425661 - RNA, 19 nt, Homo sapiens
  misc_RNA (1)...(19): siRNA sense strand
gcaggagcaucgcauugga

SEQ ID NO: 425662 - RNA, 19 nt, Homo sapiens
  misc_RNA (1)...(19): siRNA sense strand
caucugacaagggaaauua

SEQ ID NO: 425663 - RNA, 19 nt, Homo sapiens
  misc_RNA (1)...(19): siRNA sense strand
gcaccauacuggaccaaca

SEQ ID NO: 425664 - RNA, 19 nt, Homo sapiens
  misc_RNA (1)...(19): siRNA sense strand
gcacuggagccucauuaug

SEQ ID NO: 425665 - RNA, 19 nt, Homo sapiens
  misc_RNA (1)...(19): siRNA sense strand
aaaguguggucccaucuga

SEQ ID NO: 425666 - RNA, 19 nt, Homo sapiens
  misc_RNA (1)...(19): siRNA sense strand
cauuggaggcuacaaggua

SEQ ID NO: 425667 - RNA, 19 nt, Homo sapiens
  misc_RNA (1)...(19): siRNA sense strand
aguugaggauaccacauua

SEQ ID NO: 425668 - RNA, 19 nt, Homo sapiens
  misc_RNA (1)...(19): siRNA sense strand
gaaaguguggucccaucug

SEQ ID NO: 425669 - RNA, 19 nt, Homo sapiens
  misc_RNA (1)...(19): siRNA sense strand
cagcacuggagccucauua

SEQ ID NO: 425670 - RNA, 19 nt, Homo sapiens
  misc_RNA (1)...(19): siRNA sense strand
ggaacccaaugccaaccau

SEQ ID NO: 425671 - RNA, 19 nt, Homo sapiens
  misc_RNA (1)...(19): siRNA sense strand
ugaauacggguccaucaau

SEQ ID NO: 425672 - RNA, 19 nt, Homo sapiens
  misc_RNA (1)...(19): siRNA sense strand
acacguaccaccuggaugu

SEQ ID NO: 425673 - RNA, 19 nt, Homo sapiens
  misc_RNA (1)...(19): siRNA sense strand
ucugacaagggaaauuaua

SEQ ID NO: 425674 - RNA, 19 nt, Homo sapiens
  misc_RNA (1)...(19): siRNA sense strand
cauacuggaccaacacaga

SEQ ID NO: 425675 - RNA, 19 nt, Homo sapiens
  misc_RNA (1)...(19): siRNA sense strand
ccaacacugucaaguuucg

SEQ ID NO: 425676 - RNA, 19 nt, Homo sapiens
  misc_RNA (1)...(19): siRNA sense strand
gaggcuacaagguacgaaa

SEQ ID NO: 425677 - RNA, 19 nt, Homo sapiens
  misc_RNA (1)...(19): siRNA sense strand
cguaccaccuggauguugu

SEQ ID NO: 425678 - RNA, 19 nt, Homo sapiens
  misc_RNA (1)...(19): siRNA sense strand
ucaguuuaguugaggauac

SEQ ID NO: 425679 - RNA, 19 nt, Homo sapiens
  misc_RNA (1)...(19): siRNA sense strand
ggaaaguguggucccaucu

SEQ ID NO: 425680 - RNA, 19 nt, Homo sapiens
  misc_RNA (1)...(19): siRNA sense strand
uaguugaggauaccacauu

SEQ ID NO: 425681 - RNA, 19 nt, Homo sapiens
  misc_RNA (1)...(19): siRNA sense strand
gcuacaagguacgaaacca

SEQ ID NO: 425682 - RNA, 19 nt, Homo sapiens
  misc_RNA (1)...(19): siRNA sense strand
cacuggagccucauuaugg

SEQ ID NO: 425683 - RNA, 19 nt, Homo sapiens
  misc_RNA (1)...(19): siRNA sense strand
cggccaacacugucaaguu

SEQ ID NO: 425684 - RNA, 19 nt, Homo sapiens
  misc_RNA (1)...(19): siRNA sense strand
acuggagccucauuaugga

SEQ ID NO: 425685 - RNA, 19 nt, Homo sapiens
  misc_RNA (1)...(19): siRNA sense strand
uaagcaggagcaucgcauu

SEQ ID NO: 425686 - RNA, 19 nt, Homo sapiens
  misc_RNA (1)...(19): siRNA sense strand
ggagccucauuauggaaag

SEQ ID NO: 425687 - RNA, 19 nt, Homo sapiens
  misc_RNA (1)...(19): siRNA sense strand
ggccaacacugucaaguuu

SEQ ID NO: 425688 - RNA, 19 nt, Homo sapiens
  misc_RNA (1)...(19): siRNA sense strand
gaauacggguccaucaauc

SEQ ID NO: 425689 - RNA, 19 nt, Homo sapiens
  misc_RNA (1)...(19): siRNA sense strand
gcaggagcaucgcauugga

SEQ ID NO: 425690 - RNA, 19 nt, Homo sapiens
  misc_RNA (1)...(19): siRNA sense strand
caucugacaagggaaauua

SEQ ID NO: 425691 - RNA, 19 nt, Homo sapiens
  misc_RNA (1)...(19): siRNA sense strand
gcaccauacuggaccaaca

SEQ ID NO: 425692 - RNA, 19 nt, Homo sapiens
  misc_RNA (1)...(19): siRNA sense strand
gcacuggagccucauuaug

SEQ ID NO: 425693 - RNA, 19 nt, Homo sapiens
  misc_RNA (1)...(19): siRNA sense strand
aaaguguggucccaucuga

SEQ ID NO: 425694 - RNA, 19 nt, Homo sapiens
  misc_RNA (1)...(19): siRNA sense strand
cauuggaggcuacaaggua

SEQ ID NO: 425695 - RNA, 19 nt, Homo sapiens
  misc_RNA (1)...(19): siRNA sense strand
aguugaggauaccacauua

SEQ ID NO: 425696 - RNA, 19 nt, Homo sapiens
  misc_RNA (1)...(19): siRNA sense strand
gaaaguguggucccaucug

SEQ ID NO: 425697 - RNA, 19 nt, Homo sapiens
  misc_RNA (1)...(19): siRNA sense strand
cagcacuggagccucauua

SEQ ID NO: 425698 - RNA, 19 nt, Homo sapiens
  misc_RNA (1)...(19): siRNA sense strand
ggaacccaaugccaaccau

SEQ ID NO: 425699 - RNA, 19 nt, Homo sapiens
  misc_RNA (1)...(19): siRNA sense strand
ugaauacggguccaucaau

SEQ ID NO: 425700 - RNA, 19 nt, Homo sapiens
  misc_RNA (1)...(19): siRNA sense strand
acacguaccaccuggaugu

SEQ ID NO: 425701 - RNA, 19 nt, Homo sapiens
  misc_RNA (1)...(19): siRNA sense strand
ucugacaagggaaauuaua

SEQ ID NO: 425702 - RNA, 19 nt, Homo sapiens
  misc_RNA (1)...(19): siRNA sense strand
cauacuggaccaacacaga

SEQ ID NO: 425703 - RNA, 19 nt, Homo sapiens
  misc_RNA (1)...(19): siRNA sense strand
ccaacacugucaaguuucg

SEQ ID NO: 425704 - RNA, 19 nt, Homo sapiens
  misc_RNA (1)...(19): siRNA sense strand
gaggcuacaagguacgaaa

SEQ ID NO: 425705 - RNA, 19 nt, Homo sapiens
  misc_RNA (1)...(19): siRNA sense strand
cguaccaccuggauguugu

SEQ ID NO: 425706 - RNA, 19 nt, Homo sapiens
  misc_RNA (1)...(19): siRNA sense strand
ucaguuuaguugaggauac

SEQ ID NO: 425707 - RNA, 19 nt, Homo sapiens
  misc_RNA (1)...(19): siRNA sense strand
ggaaaguguggucccaucu

SEQ ID NO: 425708 - RNA, 19 nt, Homo sapiens
  misc_RNA (1)...(19): siRNA sense strand
uaguugaggauaccacauu

SEQ ID NO: 425709 - RNA, 19 nt, Homo sapiens
  misc_RNA (1)...(19): siRNA sense strand
gcuacaagguacgaaacca

SEQ ID NO: 425710 - RNA, 19 nt, Homo sapiens
  misc_RNA (1)...(19): siRNA sense strand
cacuggagccucauuaugg

SEQ ID NO: 425711 - RNA, 19 nt, Homo sapiens
  misc_RNA (1)...(19): siRNA sense strand
cggccaacacugucaaguu

SEQ ID NO: 425712 - RNA, 19 nt, Homo sapiens
  misc_RNA (1)...(19): siRNA sense strand
acuggagccucauuaugga

SEQ ID NO: 425713 - RNA, 19 nt, Homo sapiens
  misc_RNA (1)...(19): siRNA sense strand
uaagcaggagcaucgcauu

SEQ ID NO: 425714 - RNA, 19 nt, Homo sapiens
  misc_RNA (1)...(19): siRNA sense strand
ggagccucauuauggaaag

SEQ ID NO: 425715 - RNA, 19 nt, Homo sapiens
  misc_RNA (1)...(19): siRNA sense strand
ggccaacacugucaaguuu

SEQ ID NO: 425716 - RNA, 19 nt, Homo sapiens
  misc_RNA (1)...(19): siRNA sense strand
gaauacggguccaucaauc

SEQ ID NO: 425717 - RNA, 19 nt, Homo sapiens
  misc_RNA (1)...(19): siRNA sense strand
gcaggagcaucgcauugga

SEQ ID NO: 425718 - RNA, 19 nt, Homo sapiens
  misc_RNA (1)...(19): siRNA sense strand
caucugacaagggaaauua

SEQ ID NO: 425719 - RNA, 19 nt, Homo sapiens
  misc_RNA (1)...(19): siRNA sense strand
gcaccauacuggaccaaca

SEQ ID NO: 425720 - RNA, 19 nt, Homo sapiens
  misc_RNA (1)...(19): siRNA sense strand
gcacuggagccucauuaug

SEQ ID NO: 425721 - RNA, 19 nt, Homo sapiens
  misc_RNA (1)...(19): siRNA sense strand
aaaguguggucccaucuga

SEQ ID NO: 425722 - RNA, 19 nt, Homo sapiens
  misc_RNA (1)...(19): siRNA sense strand
cauuggaggcuacaaggua

SEQ ID NO: 425723 - RNA, 19 nt, Homo sapiens
  misc_RNA (1)...(19): siRNA sense strand
aguugaggauaccacauua

SEQ ID NO: 425724 - RNA, 19 nt, Homo sapiens
  misc_RNA (1)...(19): siRNA sense strand
gaaaguguggucccaucug

SEQ ID NO: 425725 - RNA, 19 nt, Homo sapiens
  misc_RNA (1)...(19): siRNA sense strand
cagcacuggagccucauua

SEQ ID NO: 425726 - RNA, 19 nt, Homo sapiens
  misc_RNA (1)...(19): siRNA sense strand
ggaacccaaugccaaccau

SEQ ID NO: 425727 - RNA, 19 nt, Homo sapiens
  misc_RNA (1)...(19): siRNA sense strand
ugaauacggguccaucaau

SEQ ID NO: 425728 - RNA, 19 nt, Homo sapiens
  misc_RNA (1)...(19): siRNA sense strand
acacguaccaccuggaugu

SEQ ID NO: 425729 - RNA, 19 nt, Homo sapiens
  misc_RNA (1)...(19): siRNA sense strand
ucugacaagggaaauuaua

SEQ ID NO: 425730 - RNA, 19 nt, Homo sapiens
  misc_RNA (1)...(19): siRNA sense strand
cauacuggaccaacacaga

SEQ ID NO: 425731 - RNA, 19 nt, Homo sapiens
  misc_RNA (1)...(19): siRNA sense strand
ccaacacugucaaguuucg

SEQ ID NO: 425732 - RNA, 19 nt, Homo sapiens
  misc_RNA (1)...(19): siRNA sense strand
gaggcuacaagguacgaaa

SEQ ID NO: 425733 - RNA, 19 nt, Homo sapiens
  misc_RNA (1)...(19): siRNA sense strand
cguaccaccuggauguugu

SEQ ID NO: 425734 - RNA, 19 nt, Homo sapiens
  misc_RNA (1)...(19): siRNA sense strand
ucaguuuaguugaggauac

SEQ ID NO: 425735 - RNA, 19 nt, Homo sapiens
  misc_RNA (1)...(19): siRNA sense strand
ggaaaguguggucccaucu

SEQ ID NO: 425736 - RNA, 19 nt, Homo sapiens
  misc_RNA (1)...(19): siRNA sense strand
uaguugaggauaccacauu

SEQ ID NO: 425737 - RNA, 19 nt, Homo sapiens
  misc_RNA (1)...(19): siRNA sense strand
gcuacaagguacgaaacca

SEQ ID NO: 425738 - RNA, 19 nt, Homo sapiens
  misc_RNA (1)...(19): siRNA sense strand
cacuggagccucauuaugg

SEQ ID NO: 425739 - RNA, 19 nt, Homo sapiens
  misc_RNA (1)...(19): siRNA sense strand
cggccaacacugucaaguu

SEQ ID NO: 425740 - RNA, 19 nt, Homo sapiens
  misc_RNA (1)...(19): siRNA sense strand
acuggagccucauuaugga

SEQ ID NO: 425741 - RNA, 19 nt, Homo sapiens
  misc_RNA (1)...(19): siRNA sense strand
uaagcaggagcaucgcauu

SEQ ID NO: 425742 - RNA, 19 nt, Homo sapiens
  misc_RNA (1)...(19): siRNA sense strand
ggagccucauuauggaaag

SEQ ID NO: 425743 - RNA, 19 nt, Homo sapiens
  misc_RNA (1)...(19): siRNA sense strand
ggccaacacugucaaguuu

SEQ ID NO: 425744 - RNA, 19 nt, Homo sapiens
  misc_RNA (1)...(19): siRNA sense strand
gaauacggguccaucaauc

SEQ ID NO: 425745 - RNA, 19 nt, Homo sapiens
  misc_RNA (1)...(19): siRNA sense strand
gcaggagcaucgcauugga

SEQ ID NO: 425746 - RNA, 19 nt, Homo sapiens
  misc_RNA (1)...(19): siRNA sense strand
caucugacaagggaaauua

SEQ ID NO: 425747 - RNA, 19 nt, Homo sapiens
  misc_RNA (1)...(19): siRNA sense strand
gcaccauacuggaccaaca

SEQ ID NO: 425748 - RNA, 19 nt, Homo sapiens
  misc_RNA (1)...(19): siRNA sense strand
gcacuggagccucauuaug

SEQ ID NO: 425749 - RNA, 19 nt, Homo sapiens
  misc_RNA (1)...(19): siRNA sense strand
aaaguguggucccaucuga

SEQ ID NO: 425750 - RNA, 19 nt, Homo sapiens
  misc_RNA (1)...(19): siRNA sense strand
cauuggaggcuacaaggua

SEQ ID NO: 425751 - RNA, 19 nt, Homo sapiens
  misc_RNA (1)...(19): siRNA sense strand
aguugaggauaccacauua

SEQ ID NO: 425752 - RNA, 19 nt, Homo sapiens
  misc_RNA (1)...(19): siRNA sense strand
gaaaguguggucccaucug

SEQ ID NO: 425753 - RNA, 19 nt, Homo sapiens
  misc_RNA (1)...(19): siRNA sense strand
cagcacuggagccucauua

SEQ ID NO: 425754 - RNA, 19 nt, Homo sapiens
  misc_RNA (1)...(19): siRNA sense strand
ggaacccaaugccaaccau

SEQ ID NO: 425755 - RNA, 19 nt, Homo sapiens
  misc_RNA (1)...(19): siRNA sense strand
ugaauacggguccaucaau

SEQ ID NO: 425756 - RNA, 19 nt, Homo sapiens
  misc_RNA (1)...(19): siRNA sense strand
acacguaccaccuggaugu

SEQ ID NO: 425757 - RNA, 19 nt, Homo sapiens
  misc_RNA (1)...(19): siRNA sense strand
ucugacaagggaaauuaua

SEQ ID NO: 425758 - RNA, 19 nt, Homo sapiens
  misc_RNA (1)...(19): siRNA sense strand
cauacuggaccaacacaga

SEQ ID NO: 425759 - RNA, 19 nt, Homo sapiens
  misc_RNA (1)...(19): siRNA sense strand
ccaacacugucaaguuucg

SEQ ID NO: 425760 - RNA, 19 nt, Homo sapiens
  misc_RNA (1)...(19): siRNA sense strand
gaggcuacaagguacgaaa

SEQ ID NO: 425761 - RNA, 19 nt, Homo sapiens
  misc_RNA (1)...(19): siRNA sense strand
cguaccaccuggauguugu

SEQ ID NO: 425762 - RNA, 19 nt, Homo sapiens
  misc_RNA (1)...(19): siRNA sense strand
ucaguuuaguugaggauac

SEQ ID NO: 425763 - RNA, 19 nt, Homo sapiens
  misc_RNA (1)...(19): siRNA sense strand
ggaaaguguggucccaucu

SEQ ID NO: 425764 - RNA, 19 nt, Homo sapiens
  misc_RNA (1)...(19): siRNA sense strand
uaguugaggauaccacauu

SEQ ID NO: 425765 - RNA, 19 nt, Homo sapiens
  misc_RNA (1)...(19): siRNA sense strand
gcuacaagguacgaaacca

SEQ ID NO: 425766 - RNA, 19 nt, Homo sapiens
  misc_RNA (1)...(19): siRNA sense strand
cacuggagccucauuaugg

SEQ ID NO: 425767 - RNA, 19 nt, Homo sapiens
  misc_RNA (1)...(19): siRNA sense strand
cggccaacacugucaaguu

SEQ ID NO: 425768 - RNA, 19 nt, Homo sapiens
  misc_RNA (1)...(19): siRNA sense strand
acuggagccucauuaugga

SEQ ID NO: 425769 - RNA, 19 nt, Homo sapiens
  misc_RNA (1)...(19): siRNA sense strand
uaagcaggagcaucgcauu

SEQ ID NO: 425770 - RNA, 19 nt, Homo sapiens
  misc_RNA (1)...(19): siRNA sense strand
ggagccucauuauggaaag

SEQ ID NO: 425771 - RNA, 19 nt, Homo sapiens
  misc_RNA (1)...(19): siRNA sense strand
ggccaacacugucaaguuu

SEQ ID NO: 425772 - RNA, 19 nt, Homo sapiens
  misc_RNA (1)...(19): siRNA sense strand
gaauacggguccaucaauc

SEQ ID NO: 425773 - RNA, 19 nt, Homo sapiens
  misc_RNA (1)...(19): siRNA sense strand
gcaggagcaucgcauugga

SEQ ID NO: 425774 - RNA, 19 nt, Homo sapiens
  misc_RNA (1)...(19): siRNA sense strand
caucugacaagggaaauua

SEQ ID NO: 425775 - RNA, 19 nt, Homo sapiens
  misc_RNA (1)...(19): siRNA sense strand
gcaccauacuggaccaaca

SEQ ID NO: 425776 - RNA, 19 nt, Homo sapiens
  misc_RNA (1)...(19): siRNA sense strand
gcacuggagccucauuaug

SEQ ID NO: 425777 - RNA, 19 nt, Homo sapiens
  misc_RNA (1)...(19): siRNA sense strand
aaaguguggucccaucuga

SEQ ID NO: 425778 - RNA, 19 nt, Homo sapiens
  misc_RNA (1)...(19): siRNA sense strand
cauuggaggcuacaaggua

SEQ ID NO: 425779 - RNA, 19 nt, Homo sapiens
  misc_RNA (1)...(19): siRNA sense strand
aguugaggauaccacauua

SEQ ID NO: 425780 - RNA, 19 nt, Homo sapiens
  misc_RNA (1)...(19): siRNA sense strand
gaaaguguggucccaucug

SEQ ID NO: 425781 - RNA, 19 nt, Homo sapiens
  misc_RNA (1)...(19): siRNA sense strand
cagcacuggagccucauua

SEQ ID NO: 425782 - RNA, 19 nt, Homo sapiens
  misc_RNA (1)...(19): siRNA sense strand
ggaacccaaugccaaccau

SEQ ID NO: 425783 - RNA, 19 nt, Homo sapiens
  misc_RNA (1)...(19): siRNA sense strand
ugaauacggguccaucaau

SEQ ID NO: 425784 - RNA, 19 nt, Homo sapiens
  misc_RNA (1)...(19): siRNA sense strand
acacguaccaccuggaugu

SEQ ID NO: 425785 - RNA, 19 nt, Homo sapiens
  misc_RNA (1)...(19): siRNA sense strand
ucugacaagggaaauuaua

SEQ ID NO: 425786 - RNA, 19 nt, Homo sapiens
  misc_RNA (1)...(19): siRNA sense strand
cauacuggaccaacacaga

SEQ ID NO: 425787 - RNA, 19 nt, Homo sapiens
  misc_RNA (1)...(19): siRNA sense strand
ccaacacugucaaguuucg

SEQ ID NO: 425788 - RNA, 19 nt, Homo sapiens
  misc_RNA (1)...(19): siRNA sense strand
gaggcuacaagguacgaaa

SEQ ID NO: 425789 - RNA, 19 nt, Homo sapiens
  misc_RNA (1)...(19): siRNA sense strand
cguaccaccuggauguugu

SEQ ID NO: 425790 - RNA, 19 nt, Homo sapiens
  misc_RNA (1)...(19): siRNA sense strand
ucaguuuaguugaggauac

SEQ ID NO: 425791 - RNA, 19 nt, Homo sapiens
  misc_RNA (1)...(19): siRNA sense strand
ggaaaguguggucccaucu

SEQ ID NO: 425792 - RNA, 19 nt, Homo sapiens
  misc_RNA (1)...(19): siRNA sense strand
uaguugaggauaccacauu

SEQ ID NO: 425793 - RNA, 19 nt, Homo sapiens
  misc_RNA (1)...(19): siRNA sense strand
gcuacaagguacgaaacca

SEQ ID NO: 425794 - RNA, 19 nt, Homo sapiens
  misc_RNA (1)...(19): siRNA sense strand
cacuggagccucauuaugg

SEQ ID NO: 425795 - RNA, 19 nt, Homo sapiens
  misc_RNA (1)...(19): siRNA sense strand
cggccaacacugucaaguu

SEQ ID NO: 425796 - RNA, 19 nt, Homo sapiens
  misc_RNA (1)...(19): siRNA sense strand
acuggagccucauuaugga

SEQ ID NO: 425797 - RNA, 19 nt, Homo sapiens
  misc_RNA (1)...(19): siRNA sense strand
uaagcaggagcaucgcauu

SEQ ID NO: 425798 - RNA, 19 nt, Homo sapiens
  misc_RNA (1)...(19): siRNA sense strand
ggagccucauuauggaaag

SEQ ID NO: 425799 - RNA, 19 nt, Homo sapiens
  misc_RNA (1)...(19): siRNA sense strand
ggccaacacugucaaguuu

SEQ ID NO: 425800 - RNA, 19 nt, Homo sapiens
  misc_RNA (1)...(19): siRNA sense strand
gaauacggguccaucaauc

SEQ ID NO: 425801 - RNA, 19 nt, Homo sapiens
  misc_RNA (1)...(19): siRNA sense strand
gcaggagcaucgcauugga

SEQ ID NO: 425802 - RNA, 19 nt, Homo sapiens
  misc_RNA (1)...(19): siRNA sense strand
caucugacaagggaaauua

SEQ ID NO: 425803 - RNA, 19 nt, Homo sapiens
  misc_RNA (1)...(19): siRNA sense strand
gcaccauacuggaccaaca

SEQ ID NO: 425804 - RNA, 19 nt, Homo sapiens
  misc_RNA (1)...(19): siRNA sense strand
gcacuggagccucauuaug

SEQ ID NO: 425805 - RNA, 19 nt, Homo sapiens
  misc_RNA (1)...(19): siRNA sense strand
aaaguguggucccaucuga

SEQ ID NO: 425806 - RNA, 19 nt, Homo sapiens
  misc_RNA (1)...(19): siRNA sense strand
cauuggaggcuacaaggua

SEQ ID NO: 425807 - RNA, 19 nt, Homo sapiens
  misc_RNA (1)...(19): siRNA sense strand
aguugaggauaccacauua

SEQ ID NO: 425808 - RNA, 19 nt, Homo sapiens
  misc_RNA (1)...(19): siRNA sense strand
gaaaguguggucccaucug

SEQ ID NO: 425809 - RNA, 19 nt, Homo sapiens
  misc_RNA (1)...(19): siRNA sense strand
cagcacuggagccucauua

SEQ ID NO: 425810 - RNA, 19 nt, Homo sapiens
  misc_RNA (1)...(19): siRNA sense strand
ggaacccaaugccaaccau

SEQ ID NO: 425811 - RNA, 19 nt, Homo sapiens
  misc_RNA (1)...(19): siRNA sense strand
ugaauacggguccaucaau

SEQ ID NO: 425812 - RNA, 19 nt, Homo sapiens
  misc_RNA (1)...(19): siRNA sense strand
acacguaccaccuggaugu

SEQ ID NO: 425813 - RNA, 19 nt, Homo sapiens
  misc_RNA (1)...(19): siRNA sense strand
ucugacaagggaaauuaua

SEQ ID NO: 425814 - RNA, 19 nt, Homo sapiens
  misc_RNA (1)...(19): siRNA sense strand
cauacuggaccaacacaga

SEQ ID NO: 425815 - RNA, 19 nt, Homo sapiens
  misc_RNA (1)...(19): siRNA sense strand
ccaacacugucaaguuucg

SEQ ID NO: 425816 - RNA, 19 nt, Homo sapiens
  misc_RNA (1)...(19): siRNA sense strand
gaggcuacaagguacgaaa

SEQ ID NO: 425817 - RNA, 19 nt, Homo sapiens
  misc_RNA (1)...(19): siRNA sense strand
cguaccaccuggauguugu

SEQ ID NO: 425818 - RNA, 19 nt, Homo sapiens
  misc_RNA (1)...(19): siRNA sense strand
ucaguuuaguugaggauac

SEQ ID NO: 425819 - RNA, 19 nt, Homo sapiens
  misc_RNA (1)...(19): siRNA sense strand
ggaaaguguggucccaucu

SEQ ID NO: 425820 - RNA, 19 nt, Homo sapiens
  misc_RNA (1)...(19): siRNA sense strand
uaguugaggauaccacauu

SEQ ID NO: 425821 - RNA, 19 nt, Homo sapiens
  misc_RNA (1)...(19): siRNA sense strand
gcuacaagguacgaaacca

SEQ ID NO: 425822 - RNA, 19 nt, Homo sapiens
  misc_RNA (1)...(19): siRNA sense strand
cacuggagccucauuaugg

SEQ ID NO: 425823 - RNA, 19 nt, Homo sapiens
  misc_RNA (1)...(19): siRNA sense strand
cggccaacacugucaaguu

SEQ ID NO: 425824 - RNA, 19 nt, Homo sapiens
  misc_RNA (1)...(19): siRNA sense strand
acuggagccucauuaugga

SEQ ID NO: 425825 - RNA, 19 nt, Homo sapiens
  misc_RNA (1)...(19): siRNA sense strand
uaagcaggagcaucgcauu

SEQ ID NO: 425826 - RNA, 19 nt, Homo sapiens
  misc_RNA (1)...(19): siRNA sense strand
ggagccucauuauggaaag

SEQ ID NO: 425827 - RNA, 19 nt, Homo sapiens
  misc_RNA (1)...(19): siRNA sense strand
ggccaacacugucaaguuu

SEQ ID NO: 425828 - RNA, 19 nt, Homo sapiens
  misc_RNA (1)...(19): siRNA sense strand
gaauacggguccaucaauc

SEQ ID NO: 425829 - RNA, 19 nt, Homo sapiens
  misc_RNA (1)...(19): siRNA sense strand
gcaggagcaucgcauugga

SEQ ID NO: 425830 - RNA, 19 nt, Homo sapiens
  misc_RNA (1)...(19): siRNA sense strand
caucugacaagggaaauua

SEQ ID NO: 425831 - RNA, 19 nt, Homo sapiens
  misc_RNA (1)...(19): siRNA sense strand
gcaccauacuggaccaaca

SEQ ID NO: 425832 - RNA, 19 nt, Homo sapiens
  misc_RNA (1)...(19): siRNA sense strand
gcacuggagccucauuaug

SEQ ID NO: 425833 - RNA, 19 nt, Homo sapiens
  misc_RNA (1)...(19): siRNA sense strand
aaaguguggucccaucuga

SEQ ID NO: 425834 - RNA, 19 nt, Homo sapiens
  misc_RNA (1)...(19): siRNA sense strand
cauuggaggcuacaaggua

SEQ ID NO: 425835 - RNA, 19 nt, Homo sapiens
  misc_RNA (1)...(19): siRNA sense strand
aguugaggauaccacauua

SEQ ID NO: 425836 - RNA, 19 nt, Homo sapiens
  misc_RNA (1)...(19): siRNA sense strand
gaaaguguggucccaucug

SEQ ID NO: 425837 - RNA, 19 nt, Homo sapiens
  misc_RNA (1)...(19): siRNA sense strand
cagcacuggagccucauua

SEQ ID NO: 425838 - RNA, 19 nt, Homo sapiens
  misc_RNA (1)...(19): siRNA sense strand
ggaacccaaugccaaccau

SEQ ID NO: 425839 - RNA, 19 nt, Homo sapiens
  misc_RNA (1)...(19): siRNA sense strand
ugaauacggguccaucaau

SEQ ID NO: 425840 - RNA, 19 nt, Homo sapiens
  misc_RNA (1)...(19): siRNA sense strand
acacguaccaccuggaugu

SEQ ID NO: 425841 - RNA, 19 nt, Homo sapiens
  misc_RNA (1)...(19): siRNA sense strand
ucugacaagggaaauuaua

SEQ ID NO: 425842 - RNA, 19 nt, Homo sapiens
  misc_RNA (1)...(19): siRNA sense strand
cauacuggaccaacacaga

SEQ ID NO: 425843 - RNA, 19 nt, Homo sapiens
  misc_RNA (1)...(19): siRNA sense strand
ccaacacugucaaguuucg

SEQ ID NO: 425844 - RNA, 19 nt, Homo sapiens
  misc_RNA (1)...(19): siRNA sense strand
gaggcuacaagguacgaaa

SEQ ID NO: 425845 - RNA, 19 nt, Homo sapiens
  misc_RNA (1)...(19): siRNA sense strand
cguaccaccuggauguugu

SEQ ID NO: 425846 - RNA, 19 nt, Homo sapiens
  misc_RNA (1)...(19): siRNA sense strand
ucaguuuaguugaggauac

SEQ ID NO: 425847 - RNA, 19 nt, Homo sapiens
  misc_RNA (1)...(19): siRNA sense strand
ggaaaguguggucccaucu

SEQ ID NO: 425848 - RNA, 19 nt, Homo sapiens
  misc_RNA (1)...(19): siRNA sense strand
uaguugaggauaccacauu

SEQ ID NO: 425849 - RNA, 19 nt, Homo sapiens
  misc_RNA (1)...(19): siRNA sense strand
gcuacaagguacgaaacca

SEQ ID NO: 425850 - RNA, 19 nt, Homo sapiens
  misc_RNA (1)...(19): siRNA sense strand
cacuggagccucauuaugg

SEQ ID NO: 425851 - RNA, 19 nt, Homo sapiens
  misc_RNA (1)...(19): siRNA sense strand
cggccaacacugucaaguu

SEQ ID NO: 425852 - RNA, 19 nt, Homo sapiens
  misc_RNA (1)...(19): siRNA sense strand
acuggagccucauuaugga

SEQ ID NO: 425853 - RNA, 19 nt, Homo sapiens
  misc_RNA (1)...(19): siRNA sense strand
uaagcaggagcaucgcauu

SEQ ID NO: 425854 - RNA, 19 nt, Homo sapiens
  misc_RNA (1)...(19): siRNA sense strand
ggagccucauuauggaaag

SEQ ID NO: 425855 - RNA, 19 nt, Homo sapiens
  misc_RNA (1)...(19): siRNA sense strand
ggccaacacugucaaguuu

SEQ ID NO: 425856 - RNA, 19 nt, Homo sapiens
  misc_RNA (1)...(19): siRNA sense strand
gaauacggguccaucaauc

SEQ ID NO: 425857 - RNA, 19 nt, Homo sapiens
  misc_RNA (1)...(19): siRNA sense strand
gcaggagcaucgcauugga

SEQ ID NO: 425858 - RNA, 19 nt, Homo sapiens
  misc_RNA (1)...(19): siRNA sense strand
caucugacaagggaaauua

SEQ ID NO: 425859 - RNA, 19 nt, Homo sapiens
  misc_RNA (1)...(19): siRNA sense strand
gcaccauacuggaccaaca

SEQ ID NO: 425860 - RNA, 19 nt, Homo sapiens
  misc_RNA (1)...(19): siRNA sense strand
gcacuggagccucauuaug

SEQ ID NO: 425861 - RNA, 19 nt, Homo sapiens
  misc_RNA (1)...(19): siRNA sense strand
aaaguguggucccaucuga

SEQ ID NO: 425862 - RNA, 19 nt, Homo sapiens
  misc_RNA (1)...(19): siRNA sense strand
cauuggaggcuacaaggua

SEQ ID NO: 425863 - RNA, 19 nt, Homo sapiens
  misc_RNA (1)...(19): siRNA sense strand
aguugaggauaccacauua

SEQ ID NO: 425864 - RNA, 19 nt, Homo sapiens
  misc_RNA (1)...(19): siRNA sense strand
gaaaguguggucccaucug

SEQ ID NO: 425865 - RNA, 19 nt, Homo sapiens
  misc_RNA (1)...(19): siRNA sense strand
cagcacuggagccucauua

SEQ ID NO: 425866 - RNA, 19 nt, Homo sapiens
  misc_RNA (1)...(19): siRNA sense strand
ggaacccaaugccaaccau

SEQ ID NO: 425867 - RNA, 19 nt, Homo sapiens
  misc_RNA (1)...(19): siRNA sense strand
ugaauacggguccaucaau

SEQ ID NO: 425868 - RNA, 19 nt, Homo sapiens
  misc_RNA (1)...(19): siRNA sense strand
acacguaccaccuggaugu

SEQ ID NO: 425869 - RNA, 19 nt, Homo sapiens
  misc_RNA (1)...(19): siRNA sense strand
ucugacaagggaaauuaua

SEQ ID NO: 425870 - RNA, 19 nt, Homo sapiens
  misc_RNA (1)...(19): siRNA sense strand
cauacuggaccaacacaga

SEQ ID NO: 425871 - RNA, 19 nt, Homo sapiens
  misc_RNA (1)...(19): siRNA sense strand
ccaacacugucaaguuucg

SEQ ID NO: 425872 - RNA, 19 nt, Homo sapiens
  misc_RNA (1)...(19): siRNA sense strand
gaggcuacaagguacgaaa

SEQ ID NO: 425873 - RNA, 19 nt, Homo sapiens
  misc_RNA (1)...(19): siRNA sense strand
cguaccaccuggauguugu

SEQ ID NO: 425874 - RNA, 19 nt, Homo sapiens
  misc_RNA (1)...(19): siRNA sense strand
ucaguuuaguugaggauac

SEQ ID NO: 425875 - RNA, 19 nt, Homo sapiens
  misc_RNA (1)...(19): siRNA sense strand
ggaaaguguggucccaucu

SEQ ID NO: 425876 - RNA, 19 nt, Homo sapiens
  misc_RNA (1)...(19): siRNA sense strand
uaguugaggauaccacauu

SEQ ID NO: 425877 - RNA, 19 nt, Homo sapiens
  misc_RNA (1)...(19): siRNA sense strand
gcuacaagguacgaaacca

SEQ ID NO: 425878 - RNA, 19 nt, Homo sapiens
  misc_RNA (1)...(19): siRNA sense strand
cacuggagccucauuaugg

SEQ ID NO: 425879 - RNA, 19 nt, Homo sapiens
  misc_RNA (1)...(19): siRNA sense strand
cggccaacacugucaaguu

SEQ ID NO: 425880 - RNA, 19 nt, Homo sapiens
  misc_RNA (1)...(19): siRNA sense strand
acuggagccucauuaugga

SEQ ID NO: 425881 - RNA, 19 nt, Homo sapiens
  misc_RNA (1)...(19): siRNA sense strand
uaagcaggagcaucgcauu

SEQ ID NO: 425882 - RNA, 19 nt, Homo sapiens
  misc_RNA (1)...(19): siRNA sense strand
ggagccucauuauggaaag

SEQ ID NO: 425883 - RNA, 19 nt, Homo sapiens
  misc_RNA (1)...(19): siRNA sense strand
ggccaacacugucaaguuu

SEQ ID NO: 425884 - RNA, 19 nt, Homo sapiens
  misc_RNA (1)...(19): siRNA sense strand
gaauacggguccaucaauc

SEQ ID NO: 425885 - RNA, 19 nt, Homo sapiens
  misc_RNA (1)...(19): siRNA sense strand
gcaggagcaucgcauugga

SEQ ID NO: 425886 - RNA, 19 nt, Homo sapiens
  misc_RNA (1)...(19): siRNA sense strand
caucugacaagggaaauua

SEQ ID NO: 425887 - RNA, 19 nt, Homo sapiens
  misc_RNA (1)...(19): siRNA sense strand
gcaccauacuggaccaaca

SEQ ID NO: 425888 - RNA, 19 nt, Homo sapiens
  misc_RNA (1)...(19): siRNA sense strand
gcacuggagccucauuaug

SEQ ID NO: 425889 - RNA, 19 nt, Homo sapiens
  misc_RNA (1)...(19): siRNA sense strand
aaaguguggucccaucuga

SEQ ID NO: 425890 - RNA, 19 nt, Homo sapiens
  misc_RNA (1)...(19): siRNA sense strand
cauuggaggcuacaaggua

SEQ ID NO: 425891 - RNA, 19 nt, Homo sapiens
  misc_RNA (1)...(19): siRNA sense strand
aguugaggauaccacauua

SEQ ID NO: 425892 - RNA, 19 nt, Homo sapiens
  misc_RNA (1)...(19): siRNA sense strand
gaaaguguggucccaucug

SEQ ID NO: 425893 - RNA, 19 nt, Homo sapiens
  misc_RNA (1)...(19): siRNA sense strand
cagcacuggagccucauua

SEQ ID NO: 425894 - RNA, 19 nt, Homo sapiens
  misc_RNA (1)...(19): siRNA sense strand
ggaacccaaugccaaccau

SEQ ID NO: 425895 - RNA, 19 nt, Homo sapiens
  misc_RNA (1)...(19): siRNA sense strand
ugaauacggguccaucaau

SEQ ID NO: 425896 - RNA, 19 nt, Homo sapiens
  misc_RNA (1)...(19): siRNA sense strand
acacguaccaccuggaugu

SEQ ID NO: 425897 - RNA, 19 nt, Homo sapiens
  misc_RNA (1)...(19): siRNA sense strand
ucugacaagggaaauuaua

SEQ ID NO: 425898 - RNA, 19 nt, Homo sapiens
  misc_RNA (1)...(19): siRNA sense strand
cauacuggaccaacacaga

SEQ ID NO: 425899 - RNA, 19 nt, Homo sapiens
  misc_RNA (1)...(19): siRNA sense strand
ccaacacugucaaguuucg

SEQ ID NO: 425900 - RNA, 19 nt, Homo sapiens
  misc_RNA (1)...(19): siRNA sense strand
gaggcuacaagguacgaaa

SEQ ID NO: 425901 - RNA, 19 nt, Homo sapiens
  misc_RNA (1)...(19): siRNA sense strand
cguaccaccuggauguugu

SEQ ID NO: 425902 - RNA, 19 nt, Homo sapiens
  misc_RNA (1)...(19): siRNA sense strand
ucaguuuaguugaggauac

SEQ ID NO: 425903 - RNA, 19 nt, Homo sapiens
  misc_RNA (1)...(19): siRNA sense strand
ggaaaguguggucccaucu

SEQ ID NO: 425904 - RNA, 19 nt, Homo sapiens
  misc_RNA (1)...(19): siRNA sense strand
uaguugaggauaccacauu

SEQ ID NO: 425905 - RNA, 19 nt, Homo sapiens
  misc_RNA (1)...(19): siRNA sense strand
gcuacaagguacgaaacca

SEQ ID NO: 425906 - RNA, 19 nt, Homo sapiens
  misc_RNA (1)...(19): siRNA sense strand
cacuggagccucauuaugg

SEQ ID NO: 425907 - RNA, 19 nt, Homo sapiens
  misc_RNA (1)...(19): siRNA sense strand
cggccaacacugucaaguu

SEQ ID NO: 425908 - RNA, 19 nt, Homo sapiens
  misc_RNA (1)...(19): siRNA sense strand
acuggagccucauuaugga

SEQ ID NO: 425909 - RNA, 19 nt, Homo sapiens
  misc_RNA (1)...(19): siRNA sense strand
uaagcaggagcaucgcauu

SEQ ID NO: 425910 - RNA, 19 nt, Homo sapiens
  misc_RNA (1)...(19): siRNA sense strand
ggagccucauuauggaaag

SEQ ID NO: 425911 - RNA, 19 nt, Homo sapiens
  misc_RNA (1)...(19): siRNA sense strand
ggccaacacugucaaguuu

SEQ ID NO: 425912 - RNA, 19 nt, Homo sapiens
  misc_RNA (1)...(19): siRNA sense strand
gaauacggguccaucaauc

SEQ ID NO: 425913 - RNA, 19 nt, Homo sapiens
  misc_RNA (1)...(19): siRNA sense strand
gcaggagcaucgcauugga

SEQ ID NO: 425914 - RNA, 19 nt, Homo sapiens
  misc_RNA (1)...(19): siRNA sense strand
caucugacaagggaaauua

SEQ ID NO: 425915 - RNA, 19 nt, Homo sapiens
  misc_RNA (1)...(19): siRNA sense strand
gcaccauacuggaccaaca

SEQ ID NO: 425916 - RNA, 19 nt, Homo sapiens
  misc_RNA (1)...(19): siRNA sense strand
gcacuggagccucauuaug

SEQ ID NO: 425917 - RNA, 19 nt, Homo sapiens
  misc_RNA (1)...(19): siRNA sense strand
aaaguguggucccaucuga

SEQ ID NO: 425918 - RNA, 19 nt, Homo sapiens
  misc_RNA (1)...(19): siRNA sense strand
cauuggaggcuacaaggua

SEQ ID NO: 425919 - RNA, 19 nt, Homo sapiens
  misc_RNA (1)...(19): siRNA sense strand
aguugaggauaccacauua

SEQ ID NO: 425920 - RNA, 19 nt, Homo sapiens
  misc_RNA (1)...(19): siRNA sense strand
gaaaguguggucccaucug

SEQ ID NO: 425921 - RNA, 19 nt, Homo sapiens
  misc_RNA (1)...(19): siRNA sense strand
cagcacuggagccucauua

SEQ ID NO: 425922 - RNA, 19 nt, Homo sapiens
  misc_RNA (1)...(19): siRNA sense strand
ggaacccaaugccaaccau

SEQ ID NO: 425923 - RNA, 19 nt, Homo sapiens
  misc_RNA (1)...(19): siRNA sense strand
ugaauacggguccaucaau

SEQ ID NO: 425924 - RNA, 19 nt, Homo sapiens
  misc_RNA (1)...(19): siRNA sense strand
acacguaccaccuggaugu

SEQ ID NO: 425925 - RNA, 19 nt, Homo sapiens
  misc_RNA (1)...(19): siRNA sense strand
ucugacaagggaaauuaua

SEQ ID NO: 425926 - RNA, 19 nt, Homo sapiens
  misc_RNA (1)...(19): siRNA sense strand
cauacuggaccaacacaga

SEQ ID NO: 425927 - RNA, 19 nt, Homo sapiens
  misc_RNA (1)...(19): siRNA sense strand
ccaacacugucaaguuucg

SEQ ID NO: 425928 - RNA, 19 nt, Homo sapiens
  misc_RNA (1)...(19): siRNA sense strand
gaggcuacaagguacgaaa

SEQ ID NO: 425929 - RNA, 19 nt, Homo sapiens
  misc_RNA (1)...(19): siRNA sense strand
cguaccaccuggauguugu

SEQ ID NO: 425930 - RNA, 19 nt, Homo sapiens
  misc_RNA (1)...(19): siRNA sense strand
ucaguuuaguugaggauac

SEQ ID NO: 425931 - RNA, 19 nt, Homo sapiens
  misc_RNA (1)...(19): siRNA sense strand
ggaaaguguggucccaucu

SEQ ID NO: 425932 - RNA, 19 nt, Homo sapiens
  misc_RNA (1)...(19): siRNA sense strand
uaguugaggauaccacauu

SEQ ID NO: 425933 - RNA, 19 nt, Homo sapiens
  misc_RNA (1)...(19): siRNA sense strand
gcuacaagguacgaaacca

SEQ ID NO: 425934 - RNA, 19 nt, Homo sapiens
  misc_RNA (1)...(19): siRNA sense strand
cacuggagccucauuaugg

SEQ ID NO: 425935 - RNA, 19 nt, Homo sapiens
  misc_RNA (1)...(19): siRNA sense strand
cggccaacacugucaaguu

SEQ ID NO: 425936 - RNA, 19 nt, Homo sapiens
  misc_RNA (1)...(19): siRNA sense strand
acuggagccucauuaugga

SEQ ID NO: 425937 - RNA, 19 nt, Homo sapiens
  misc_RNA (1)...(19): siRNA sense strand
uaagcaggagcaucgcauu

SEQ ID NO: 425938 - RNA, 19 nt, Homo sapiens
  misc_RNA (1)...(19): siRNA sense strand
ggagccucauuauggaaag

SEQ ID NO: 425939 - RNA, 19 nt, Homo sapiens
  misc_RNA (1)...(19): siRNA sense strand
ggccaacacugucaaguuu

SEQ ID NO: 425940 - RNA, 19 nt, Homo sapiens
  misc_RNA (1)...(19): siRNA sense strand
gaauacggguccaucaauc

SEQ ID NO: 425941 - RNA, 19 nt, Homo sapiens
  misc_RNA (1)...(19): siRNA sense strand
gcaggagcaucgcauugga

SEQ ID NO: 425942 - RNA, 19 nt, Homo sapiens
  misc_RNA (1)...(19): siRNA sense strand
caucugacaagggaaauua

SEQ ID NO: 425943 - RNA, 19 nt, Homo sapiens
  misc_RNA (1)...(19): siRNA sense strand
gcaccauacuggaccaaca

SEQ ID NO: 425944 - RNA, 19 nt, Homo sapiens
  misc_RNA (1)...(19): siRNA sense strand
gcacuggagccucauuaug

SEQ ID NO: 425945 - RNA, 19 nt, Homo sapiens
  misc_RNA (1)...(19): siRNA sense strand
aaaguguggucccaucuga

SEQ ID NO: 425946 - RNA, 19 nt, Homo sapiens
  misc_RNA (1)...(19): siRNA sense strand
cauuggaggcuacaaggua

SEQ ID NO: 425947 - RNA, 19 nt, Homo sapiens
  misc_RNA (1)...(19): siRNA sense strand
aguugaggauaccacauua

SEQ ID NO: 425948 - RNA, 19 nt, Homo sapiens
  misc_RNA (1)...(19): siRNA sense strand
gaaaguguggucccaucug

SEQ ID NO: 425949 - RNA, 19 nt, Homo sapiens
  misc_RNA (1)...(19): siRNA sense strand
cagcacuggagccucauua

SEQ ID NO: 425950 - RNA, 19 nt, Homo sapiens
  misc_RNA (1)...(19): siRNA sense strand
ggaacccaaugccaaccau

SEQ ID NO: 425951 - RNA, 19 nt, Homo sapiens
  misc_RNA (1)...(19): siRNA sense strand
ugaauacggguccaucaau

SEQ ID NO: 425952 - RNA, 19 nt, Homo sapiens
  misc_RNA (1)...(19): siRNA sense strand
acacguaccaccuggaugu

SEQ ID NO: 425953 - RNA, 19 nt, Homo sapiens
  misc_RNA (1)...(19): siRNA sense strand
ucugacaagggaaauuaua

SEQ ID NO: 425954 - RNA, 19 nt, Homo sapiens
  misc_RNA (1)...(19): siRNA sense strand
cauacuggaccaacacaga

SEQ ID NO: 425955 - RNA, 19 nt, Homo sapiens
  misc_RNA (1)...(19): siRNA sense strand
ccaacacugucaaguuucg

SEQ ID NO: 425956 - RNA, 19 nt, Homo sapiens
  misc_RNA (1)...(19): siRNA sense strand
gaggcuacaagguacgaaa

SEQ ID NO: 425957 - RNA, 19 nt, Homo sapiens
  misc_RNA (1)...(19): siRNA sense strand
cguaccaccuggauguugu

SEQ ID NO: 425958 - RNA, 19 nt, Homo sapiens
  misc_RNA (1)...(19): siRNA sense strand
ucaguuuaguugaggauac

SEQ ID NO: 425959 - RNA, 19 nt, Homo sapiens
  misc_RNA (1)...(19): siRNA sense strand
ggaaaguguggucccaucu

SEQ ID NO: 425960 - RNA, 19 nt, Homo sapiens
  misc_RNA (1)...(19): siRNA sense strand
uaguugaggauaccacauu

SEQ ID NO: 425961 - RNA, 19 nt, Homo sapiens
  misc_RNA (1)...(19): siRNA sense strand
gcuacaagguacgaaacca

SEQ ID NO: 425962 - RNA, 19 nt, Homo sapiens
  misc_RNA (1)...(19): siRNA sense strand
cacuggagccucauuaugg

SEQ ID NO: 425963 - RNA, 19 nt, Homo sapiens
  misc_RNA (1)...(19): siRNA sense strand
cggccaacacugucaaguu

SEQ ID NO: 425964 - RNA, 19 nt, Homo sapiens
  misc_RNA (1)...(19): siRNA sense strand
acuggagccucauuaugga

SEQ ID NO: 425965 - RNA, 19 nt, Homo sapiens
  misc_RNA (1)...(19): siRNA sense strand
uaagcaggagcaucgcauu

SEQ ID NO: 425966 - RNA, 19 nt, Homo sapiens
  misc_RNA (1)...(19): siRNA sense strand
ggagccucauuauggaaag

SEQ ID NO: 425967 - RNA, 19 nt, Homo sapiens
  misc_RNA (1)...(19): siRNA sense strand
ggccaacacugucaaguuu

SEQ ID NO: 425968 - RNA, 19 nt, Homo sapiens
  misc_RNA (1)...(19): siRNA sense strand
gaauacggguccaucaauc

SEQ ID NO: 425969 - RNA, 19 nt, Homo sapiens
  misc_RNA (1)...(19): siRNA sense strand
gcaggagcaucgcauugga

SEQ ID NO: 425970 - RNA, 19 nt, Homo sapiens
  misc_RNA (1)...(19): siRNA sense strand
caucugacaagggaaauua

SEQ ID NO: 425971 - RNA, 19 nt, Homo sapiens
  misc_RNA (1)...(19): siRNA sense strand
gcaccauacuggaccaaca

SEQ ID NO: 425972 - RNA, 19 nt, Homo sapiens
  misc_RNA (1)...(19): siRNA sense strand
gcacuggagccucauuaug

SEQ ID NO: 425973 - RNA, 19 nt, Homo sapiens
  misc_RNA (1)...(19): siRNA sense strand
aaaguguggucccaucuga

SEQ ID NO: 425974 - RNA, 19 nt, Homo sapiens
  misc_RNA (1)...(19): siRNA sense strand
cauuggaggcuacaaggua

SEQ ID NO: 425975 - RNA, 19 nt, Homo sapiens
  misc_RNA (1)...(19): siRNA sense strand
aguugaggauaccacauua

SEQ ID NO: 425976 - RNA, 19 nt, Homo sapiens
  misc_RNA (1)...(19): siRNA sense strand
gaaaguguggucccaucug

SEQ ID NO: 425977 - RNA, 19 nt, Homo sapiens
  misc_RNA (1)...(19): siRNA sense strand
cagcacuggagccucauua

SEQ ID NO: 425978 - RNA, 19 nt, Homo sapiens
  misc_RNA (1)...(19): siRNA sense strand
ggaacccaaugccaaccau

SEQ ID NO: 425979 - RNA, 19 nt, Homo sapiens
  misc_RNA (1)...(19): siRNA sense strand
ugaauacggguccaucaau

SEQ ID NO: 425980 - RNA, 19 nt, Homo sapiens
  misc_RNA (1)...(19): siRNA sense strand
acacguaccaccuggaugu

SEQ ID NO: 425981 - RNA, 19 nt, Homo sapiens
  misc_RNA (1)...(19): siRNA sense strand
ucugacaagggaaauuaua

SEQ ID NO: 425982 - RNA, 19 nt, Homo sapiens
  misc_RNA (1)...(19): siRNA sense strand
cauacuggaccaacacaga

SEQ ID NO: 425983 - RNA, 19 nt, Homo sapiens
  misc_RNA (1)...(19): siRNA sense strand
ccaacacugucaaguuucg

SEQ ID NO: 425984 - RNA, 19 nt, Homo sapiens
  misc_RNA (1)...(19): siRNA sense strand
gaggcuacaagguacgaaa

SEQ ID NO: 425985 - RNA, 19 nt, Homo sapiens
  misc_RNA (1)...(19): siRNA sense strand
cguaccaccuggauguugu

SEQ ID NO: 425986 - RNA, 19 nt, Homo sapiens
  misc_RNA (1)...(19): siRNA sense strand
ucaguuuaguugaggauac

SEQ ID NO: 425987 - RNA, 19 nt, Homo sapiens
  misc_RNA (1)...(19): siRNA sense strand
ggaaaguguggucccaucu

SEQ ID NO: 425988 - RNA, 19 nt, Homo sapiens
  misc_RNA (1)...(19): siRNA sense strand
uaguugaggauaccacauu

SEQ ID NO: 425989 - RNA, 19 nt, Homo sapiens
  misc_RNA (1)...(19): siRNA sense strand
gcuacaagguacgaaacca

SEQ ID NO: 425990 - RNA, 19 nt, Homo sapiens
  misc_RNA (1)...(19): siRNA sense strand
cacuggagccucauuaugg

SEQ ID NO: 425991 - RNA, 19 nt, Homo sapiens
  misc_RNA (1)...(19): siRNA sense strand
cggccaacacugucaaguu

SEQ ID NO: 425992 - RNA, 19 nt, Homo sapiens
  misc_RNA (1)...(19): siRNA sense strand
acuggagccucauuaugga

SEQ ID NO: 425993 - RNA, 19 nt, Homo sapiens
  misc_RNA (1)...(19): siRNA sense strand
uaagcaggagcaucgcauu

SEQ ID NO: 425994 - RNA, 19 nt, Homo sapiens
  misc_RNA (1)...(19): siRNA sense strand
ggagccucauuauggaaag

SEQ ID NO: 425995 - RNA, 19 nt, Homo sapiens
  misc_RNA (1)...(19): siRNA sense strand
ggccaacacugucaaguuu

SEQ ID NO: 425996 - RNA, 19 nt, Homo sapiens
  misc_RNA (1)...(19): siRNA sense strand
gaauacggguccaucaauc

SEQ ID NO: 425997 - RNA, 19 nt, Homo sapiens
  misc_RNA (1)...(19): siRNA sense strand
gcaggagcaucgcauugga

SEQ ID NO: 425998 - RNA, 19 nt, Homo sapiens
  misc_RNA (1)...(19): siRNA sense strand
caucugacaagggaaauua

SEQ ID NO: 425999 - RNA, 19 nt, Homo sapiens
  misc_RNA (1)...(19): siRNA sense strand
gcaccauacuggaccaaca

SEQ ID NO: 426000 - RNA, 19 nt, Homo sapiens
  misc_RNA (1)...(19): siRNA sense strand
gcacuggagccucauuaug

SEQ ID NO: 426001 - RNA, 19 nt, Homo sapiens
  misc_RNA (1)...(19): siRNA sense strand
aaaguguggucccaucuga

SEQ ID NO: 426002 - RNA, 19 nt, Homo sapiens
  misc_RNA (1)...(19): siRNA sense strand
cauuggaggcuacaaggua

SEQ ID NO: 426003 - RNA, 19 nt, Homo sapiens
  misc_RNA (1)...(19): siRNA sense strand
aguugaggauaccacauua

SEQ ID NO: 426004 - RNA, 19 nt, Homo sapiens
  misc_RNA (1)...(19): siRNA sense strand
gaaaguguggucccaucug

SEQ ID NO: 426005 - RNA, 19 nt, Homo sapiens
  misc_RNA (1)...(19): siRNA sense strand
cagcacuggagccucauua

SEQ ID NO: 426006 - RNA, 19 nt, Homo sapiens
  misc_RNA (1)...(19): siRNA sense strand
ggaacccaaugccaaccau

SEQ ID NO: 426007 - RNA, 19 nt, Homo sapiens
  misc_RNA (1)...(19): siRNA sense strand
ugaauacggguccaucaau

SEQ ID NO: 426008 - RNA, 19 nt, Homo sapiens
  misc_RNA (1)...(19): siRNA sense strand
acacguaccaccuggaugu

SEQ ID NO: 426009 - RNA, 19 nt, Homo sapiens
  misc_RNA (1)...(19): siRNA sense strand
ucugacaagggaaauuaua

SEQ ID NO: 426010 - RNA, 19 nt, Homo sapiens
  misc_RNA (1)...(19): siRNA sense strand
cauacuggaccaacacaga

SEQ ID NO: 426011 - RNA, 19 nt, Homo sapiens
  misc_RNA (1)...(19): siRNA sense strand
ccaacacugucaaguuucg

SEQ ID NO: 426012 - RNA, 19 nt, Homo sapiens
  misc_RNA (1)...(19): siRNA sense strand
gaggcuacaagguacgaaa

SEQ ID NO: 426013 - RNA, 19 nt, Homo sapiens
  misc_RNA (1)...(19): siRNA sense strand
cguaccaccuggauguugu

SEQ ID NO: 426014 - RNA, 19 nt, Homo sapiens
  misc_RNA (1)...(19): siRNA sense strand
ucaguuuaguugaggauac

SEQ ID NO: 426015 - RNA, 19 nt, Homo sapiens
  misc_RNA (1)...(19): siRNA sense strand
ggaaaguguggucccaucu

SEQ ID NO: 426016 - RNA, 19 nt, Homo sapiens
  misc_RNA (1)...(19): siRNA sense strand
uaguugaggauaccacauu

SEQ ID NO: 426017 - RNA, 19 nt, Homo sapiens
  misc_RNA (1)...(19): siRNA sense strand
gcuacaagguacgaaacca

SEQ ID NO: 426018 - RNA, 19 nt, Homo sapiens
  misc_RNA (1)...(19): siRNA sense strand
cacuggagccucauuaugg

SEQ ID NO: 426019 - RNA, 19 nt, Homo sapiens
  misc_RNA (1)...(19): siRNA sense strand
cggccaacacugucaaguu

SEQ ID NO: 426020 - RNA, 19 nt, Homo sapiens
  misc_RNA (1)...(19): siRNA sense strand
acuggagccucauuaugga

SEQ ID NO: 426021 - RNA, 19 nt, Homo sapiens
  misc_RNA (1)...(19): siRNA sense strand
uaagcaggagcaucgcauu

SEQ ID NO: 426022 - RNA, 19 nt, Homo sapiens
  misc_RNA (1)...(19): siRNA sense strand
ggagccucauuauggaaag

SEQ ID NO: 426023 - RNA, 19 nt, Homo sapiens
  misc_RNA (1)...(19): siRNA sense strand
ggccaacacugucaaguuu

SEQ ID NO: 426024 - RNA, 19 nt, Homo sapiens
  misc_RNA (1)...(19): siRNA sense strand
gaauacggguccaucaauc

SEQ ID NO: 426025 - RNA, 19 nt, Homo sapiens
  misc_RNA (1)...(19): siRNA sense strand
gcaggagcaucgcauugga

SEQ ID NO: 426026 - RNA, 19 nt, Homo sapiens
  misc_RNA (1)...(19): siRNA sense strand
caucugacaagggaaauua

SEQ ID NO: 426027 - RNA, 19 nt, Homo sapiens
  misc_RNA (1)...(19): siRNA sense strand
gcaccauacuggaccaaca

SEQ ID NO: 426028 - RNA, 19 nt, Homo sapiens
  misc_RNA (1)...(19): siRNA sense strand
gcacuggagccucauuaug

SEQ ID NO: 426029 - RNA, 19 nt, Homo sapiens
  misc_RNA (1)...(19): siRNA sense strand
aaaguguggucccaucuga

SEQ ID NO: 426030 - RNA, 19 nt, Homo sapiens
  misc_RNA (1)...(19): siRNA sense strand
cauuggaggcuacaaggua

SEQ ID NO: 426031 - RNA, 19 nt, Homo sapiens
  misc_RNA (1)...(19): siRNA sense strand
aguugaggauaccacauua

SEQ ID NO: 426032 - RNA, 19 nt, Homo sapiens
  misc_RNA (1)...(19): siRNA sense strand
gaaaguguggucccaucug

SEQ ID NO: 426033 - RNA, 19 nt, Homo sapiens
  misc_RNA (1)...(19): siRNA sense strand
cagcacuggagccucauua

SEQ ID NO: 426034 - RNA, 19 nt, Homo sapiens
  misc_RNA (1)...(19): siRNA sense strand
ggaacccaaugccaaccau

SEQ ID NO: 426035 - RNA, 19 nt, Homo sapiens
  misc_RNA (1)...(19): siRNA sense strand
ugaauacggguccaucaau

SEQ ID NO: 426036 - RNA, 19 nt, Homo sapiens
  misc_RNA (1)...(19): siRNA sense strand
acacguaccaccuggaugu

SEQ ID NO: 426037 - RNA, 19 nt, Homo sapiens
  misc_RNA (1)...(19): siRNA sense strand
ucugacaagggaaauuaua

SEQ ID NO: 426038 - RNA, 19 nt, Homo sapiens
  misc_RNA (1)...(19): siRNA sense strand
cauacuggaccaacacaga

SEQ ID NO: 426039 - RNA, 19 nt, Homo sapiens
  misc_RNA (1)...(19): siRNA sense strand
ccaacacugucaaguuucg

SEQ ID NO: 426040 - RNA, 19 nt, Homo sapiens
  misc_RNA (1)...(19): siRNA sense strand
gaggcuacaagguacgaaa

SEQ ID NO: 426041 - RNA, 19 nt, Homo sapiens
  misc_RNA (1)...(19): siRNA sense strand
cguaccaccuggauguugu

SEQ ID NO: 426042 - RNA, 19 nt, Homo sapiens
  misc_RNA (1)...(19): siRNA sense strand
ucaguuuaguugaggauac

SEQ ID NO: 426043 - RNA, 19 nt, Homo sapiens
  misc_RNA (1)...(19): siRNA sense strand
ggaaaguguggucccaucu

SEQ ID NO: 426044 - RNA, 19 nt, Homo sapiens
  misc_RNA (1)...(19): siRNA sense strand
uaguugaggauaccacauu

SEQ ID NO: 426045 - RNA, 19 nt, Homo sapiens
  misc_RNA (1)...(19): siRNA sense strand
gcuacaagguacgaaacca

SEQ ID NO: 426046 - RNA, 19 nt, Homo sapiens
  misc_RNA (1)...(19): siRNA sense strand
cacuggagccucauuaugg

SEQ ID NO: 426047 - RNA, 19 nt, Homo sapiens
  misc_RNA (1)...(19): siRNA sense strand
cggccaacacugucaaguu

SEQ ID NO: 426048 - RNA, 19 nt, Homo sapiens
  misc_RNA (1)...(19): siRNA sense strand
acuggagccucauuaugga

SEQ ID NO: 426049 - RNA, 19 nt, Homo sapiens
  misc_RNA (1)...(19): siRNA sense strand
uaagcaggagcaucgcauu

SEQ ID NO: 426050 - RNA, 19 nt, Homo sapiens
  misc_RNA (1)...(19): siRNA sense strand
ggagccucauuauggaaag

SEQ ID NO: 426051 - RNA, 19 nt, Homo sapiens
  misc_RNA (1)...(19): siRNA sense strand
ggccaacacugucaaguuu

SEQ ID NO: 426052 - RNA, 19 nt, Homo sapiens
  misc_RNA (1)...(19): siRNA sense strand
gaauacggguccaucaauc

SEQ ID NO: 426053 - RNA, 19 nt, Homo sapiens
  misc_RNA (1)...(19): siRNA sense strand
gcaggagcaucgcauugga

SEQ ID NO: 426054 - RNA, 19 nt, Homo sapiens
  misc_RNA (1)...(19): siRNA sense strand
caucugacaagggaaauua

SEQ ID NO: 426055 - RNA, 19 nt, Homo sapiens
  misc_RNA (1)...(19): siRNA sense strand
gcaccauacuggaccaaca

SEQ ID NO: 426056 - RNA, 19 nt, Homo sapiens
  misc_RNA (1)...(19): siRNA sense strand
gcacuggagccucauuaug

SEQ ID NO: 426057 - RNA, 19 nt, Homo sapiens
  misc_RNA (1)...(19): siRNA sense strand
aaaguguggucccaucuga

SEQ ID NO: 426058 - RNA, 19 nt, Homo sapiens
  misc_RNA (1)...(19): siRNA sense strand
cauuggaggcuacaaggua

SEQ ID NO: 426059 - RNA, 19 nt, Homo sapiens
  misc_RNA (1)...(19): siRNA sense strand
aguugaggauaccacauua

SEQ ID NO: 426060 - RNA, 19 nt, Homo sapiens
  misc_RNA (1)...(19): siRNA sense strand
gaaaguguggucccaucug

SEQ ID NO: 426061 - RNA, 19 nt, Homo sapiens
  misc_RNA (1)...(19): siRNA sense strand
cagcacuggagccucauua

SEQ ID NO: 426062 - RNA, 19 nt, Homo sapiens
  misc_RNA (1)...(19): siRNA sense strand
ggaacccaaugccaaccau

SEQ ID NO: 426063 - RNA, 19 nt, Homo sapiens
  misc_RNA (1)...(19): siRNA sense strand
ugaauacggguccaucaau

SEQ ID NO: 426064 - RNA, 19 nt, Homo sapiens
  misc_RNA (1)...(19): siRNA sense strand
acacguaccaccuggaugu

SEQ ID NO: 426065 - RNA, 19 nt, Homo sapiens
  misc_RNA (1)...(19): siRNA sense strand
ucugacaagggaaauuaua

SEQ ID NO: 426066 - RNA, 19 nt, Homo sapiens
  misc_RNA (1)...(19): siRNA sense strand
cauacuggaccaacacaga

SEQ ID NO: 426067 - RNA, 19 nt, Homo sapiens
  misc_RNA (1)...(19): siRNA sense strand
ccaacacugucaaguuucg

SEQ ID NO: 426068 - RNA, 19 nt, Homo sapiens
  misc_RNA (1)...(19): siRNA sense strand
gaggcuacaagguacgaaa

SEQ ID NO: 426069 - RNA, 19 nt, Homo sapiens
  misc_RNA (1)...(19): siRNA sense strand
cguaccaccuggauguugu

SEQ ID NO: 426070 - RNA, 19 nt, Homo sapiens
  misc_RNA (1)...(19): siRNA sense strand
ucaguuuaguugaggauac

SEQ ID NO: 426071 - RNA, 19 nt, Homo sapiens
  misc_RNA (1)...(19): siRNA sense strand
ggaaaguguggucccaucu

SEQ ID NO: 426072 - RNA, 19 nt, Homo sapiens
  misc_RNA (1)...(19): siRNA sense strand
uaguugaggauaccacauu

SEQ ID NO: 426073 - RNA, 19 nt, Homo sapiens
  misc_RNA (1)...(19): siRNA sense strand
gcuacaagguacgaaacca

SEQ ID NO: 426074 - RNA, 19 nt, Homo sapiens
  misc_RNA (1)...(19): siRNA sense strand
cacuggagccucauuaugg

SEQ ID NO: 426075 - RNA, 19 nt, Homo sapiens
  misc_RNA (1)...(19): siRNA sense strand
cggccaacacugucaaguu

SEQ ID NO: 426076 - RNA, 19 nt, Homo sapiens
  misc_RNA (1)...(19): siRNA sense strand
acuggagccucauuaugga

SEQ ID NO: 426077 - RNA, 19 nt, Homo sapiens
  misc_RNA (1)...(19): siRNA sense strand
uaagcaggagcaucgcauu

SEQ ID NO: 426078 - RNA, 19 nt, Homo sapiens
  misc_RNA (1)...(19): siRNA sense strand
ggagccucauuauggaaag

SEQ ID NO: 426079 - RNA, 19 nt, Homo sapiens
  misc_RNA (1)...(19): siRNA sense strand
ggccaacacugucaaguuu

SEQ ID NO: 426080 - RNA, 19 nt, Homo sapiens
  misc_RNA (1)...(19): siRNA sense strand
gaauacggguccaucaauc

SEQ ID NO: 426081 - RNA, 19 nt, Homo sapiens
  misc_RNA (1)...(19): siRNA sense strand
gcaggagcaucgcauugga

SEQ ID NO: 426082 - RNA, 19 nt, Homo sapiens
  misc_RNA (1)...(19): siRNA sense strand
caucugacaagggaaauua

SEQ ID NO: 426083 - RNA, 19 nt, Homo sapiens
  misc_RNA (1)...(19): siRNA sense strand
gcaccauacuggaccaaca

SEQ ID NO: 426084 - RNA, 19 nt, Homo sapiens
  misc_RNA (1)...(19): siRNA sense strand
gcacuggagccucauuaug

SEQ ID NO: 426085 - RNA, 19 nt, Homo sapiens
  misc_RNA (1)...(19): siRNA sense strand
aaaguguggucccaucuga

SEQ ID NO: 426086 - RNA, 19 nt, Homo sapiens
  misc_RNA (1)...(19): siRNA sense strand
cauuggaggcuacaaggua

SEQ ID NO: 426087 - RNA, 19 nt, Homo sapiens
  misc_RNA (1)...(19): siRNA sense strand
aguugaggauaccacauua

SEQ ID NO: 426088 - RNA, 19 nt, Homo sapiens
  misc_RNA (1)...(19): siRNA sense strand
gaaaguguggucccaucug

SEQ ID NO: 426089 - RNA, 19 nt, Homo sapiens
  misc_RNA (1)...(19): siRNA sense strand
cagcacuggagccucauua

SEQ ID NO: 426090 - RNA, 19 nt, Homo sapiens
  misc_RNA (1)...(19): siRNA sense strand
ggaacccaaugccaaccau

SEQ ID NO: 426091 - RNA, 19 nt, Homo sapiens
  misc_RNA (1)...(19): siRNA sense strand
ugaauacggguccaucaau

SEQ ID NO: 426092 - RNA, 19 nt, Homo sapiens
  misc_RNA (1)...(19): siRNA sense strand
acacguaccaccuggaugu

SEQ ID NO: 426093 - RNA, 19 nt, Homo sapiens
  misc_RNA (1)...(19): siRNA sense strand
ucugacaagggaaauuaua

SEQ ID NO: 426094 - RNA, 19 nt, Homo sapiens
  misc_RNA (1)...(19): siRNA sense strand
cauacuggaccaacacaga

SEQ ID NO: 426095 - RNA, 19 nt, Homo sapiens
  misc_RNA (1)...(19): siRNA sense strand
ccaacacugucaaguuucg

SEQ ID NO: 426096 - RNA, 19 nt, Homo sapiens
  misc_RNA (1)...(19): siRNA sense strand
gaggcuacaagguacgaaa

SEQ ID NO: 426097 - RNA, 19 nt, Homo sapiens
  misc_RNA (1)...(19): siRNA sense strand
cguaccaccuggauguugu

SEQ ID NO: 426098 - RNA, 19 nt, Homo sapiens
  misc_RNA (1)...(19): siRNA sense strand
ucaguuuaguugaggauac

SEQ ID NO: 426099 - RNA, 19 nt, Homo sapiens
  misc_RNA (1)...(19): siRNA sense strand
ggaaaguguggucccaucu

SEQ ID NO: 426100 - RNA, 19 nt, Homo sapiens
  misc_RNA (1)...(19): siRNA sense strand
uaguugaggauaccacauu

SEQ ID NO: 426101 - RNA, 19 nt, Homo sapiens
  misc_RNA (1)...(19): siRNA sense strand
gcuacaagguacgaaacca

SEQ ID NO: 426102 - RNA, 19 nt, Homo sapiens
  misc_RNA (1)...(19): siRNA sense strand
cacuggagccucauuaugg

SEQ ID NO: 426103 - RNA, 19 nt, Homo sapiens
  misc_RNA (1)...(19): siRNA sense strand
cggccaacacugucaaguu

SEQ ID NO: 426104 - RNA, 19 nt, Homo sapiens
  misc_RNA (1)...(19): siRNA sense strand
acuggagccucauuaugga

SEQ ID NO: 426105 - RNA, 19 nt, Homo sapiens
  misc_RNA (1)...(19): siRNA sense strand
uaagcaggagcaucgcauu

SEQ ID NO: 426106 - RNA, 19 nt, Homo sapiens
  misc_RNA (1)...(19): siRNA sense strand
ggagccucauuauggaaag

SEQ ID NO: 426107 - RNA, 19 nt, Homo sapiens
  misc_RNA (1)...(19): siRNA sense strand
ggccaacacugucaaguuu

SEQ ID NO: 426108 - RNA, 19 nt, Homo sapiens
  misc_RNA (1)...(19): siRNA sense strand
gaauacggguccaucaauc

SEQ ID NO: 426109 - RNA, 19 nt, Homo sapiens
  misc_RNA (1)...(19): siRNA sense strand
gcaggagcaucgcauugga

SEQ ID NO: 426110 - RNA, 19 nt, Homo sapiens
  misc_RNA (1)...(19): siRNA sense strand
caucugacaagggaaauua

SEQ ID NO: 426111 - RNA, 19 nt, Homo sapiens
  misc_RNA (1)...(19): siRNA sense strand
gcaccauacuggaccaaca

SEQ ID NO: 426112 - RNA, 19 nt, Homo sapiens
  misc_RNA (1)...(19): siRNA sense strand
gcacuggagccucauuaug

SEQ ID NO: 426113 - RNA, 19 nt, Homo sapiens
  misc_RNA (1)...(19): siRNA sense strand
aaaguguggucccaucuga

SEQ ID NO: 426114 - RNA, 19 nt, Homo sapiens
  misc_RNA (1)...(19): siRNA sense strand
cauuggaggcuacaaggua

SEQ ID NO: 426115 - RNA, 19 nt, Homo sapiens
  misc_RNA (1)...(19): siRNA sense strand
aguugaggauaccacauua

SEQ ID NO: 426116 - RNA, 19 nt, Homo sapiens
  misc_RNA (1)...(19): siRNA sense strand
gaaaguguggucccaucug

SEQ ID NO: 426117 - RNA, 19 nt, Homo sapiens
  misc_RNA (1)...(19): siRNA sense strand
cagcacuggagccucauua

SEQ ID NO: 426118 - RNA, 19 nt, Homo sapiens
  misc_RNA (1)...(19): siRNA sense strand
ggaacccaaugccaaccau

SEQ ID NO: 426119 - RNA, 19 nt, Homo sapiens
  misc_RNA (1)...(19): siRNA sense strand
ugaauacggguccaucaau

SEQ ID NO: 426120 - RNA, 19 nt, Homo sapiens
  misc_RNA (1)...(19): siRNA sense strand
acacguaccaccuggaugu

SEQ ID NO: 426121 - RNA, 19 nt, Homo sapiens
  misc_RNA (1)...(19): siRNA sense strand
ucugacaagggaaauuaua

SEQ ID NO: 426122 - RNA, 19 nt, Homo sapiens
  misc_RNA (1)...(19): siRNA sense strand
cauacuggaccaacacaga

SEQ ID NO: 426123 - RNA, 19 nt, Homo sapiens
  misc_RNA (1)...(19): siRNA sense strand
ccaacacugucaaguuucg

SEQ ID NO: 426124 - RNA, 19 nt, Homo sapiens
  misc_RNA (1)...(19): siRNA sense strand
gaggcuacaagguacgaaa

SEQ ID NO: 426125 - RNA, 19 nt, Homo sapiens
  misc_RNA (1)...(19): siRNA sense strand
cguaccaccuggauguugu

SEQ ID NO: 426126 - RNA, 19 nt, Homo sapiens
  misc_RNA (1)...(19): siRNA sense strand
ucaguuuaguugaggauac

SEQ ID NO: 426127 - RNA, 19 nt, Homo sapiens
  misc_RNA (1)...(19): siRNA sense strand
ggaaaguguggucccaucu

SEQ ID NO: 426128 - RNA, 19 nt, Homo sapiens
  misc_RNA (1)...(19): siRNA sense strand
uaguugaggauaccacauu

SEQ ID NO: 426129 - RNA, 19 nt, Homo sapiens
  misc_RNA (1)...(19): siRNA sense strand
gcuacaagguacgaaacca

SEQ ID NO: 426130 - RNA, 19 nt, Homo sapiens
  misc_RNA (1)...(19): siRNA sense strand
cacuggagccucauuaugg

SEQ ID NO: 426131 - RNA, 19 nt, Homo sapiens
  misc_RNA (1)...(19): siRNA sense strand
cggccaacacugucaaguu

SEQ ID NO: 426132 - RNA, 19 nt, Homo sapiens
  misc_RNA (1)...(19): siRNA sense strand
acuggagccucauuaugga

SEQ ID NO: 426133 - RNA, 19 nt, Homo sapiens
  misc_RNA (1)...(19): siRNA sense strand
uaagcaggagcaucgcauu

SEQ ID NO: 426134 - RNA, 19 nt, Homo sapiens
  misc_RNA (1)...(19): siRNA sense strand
ggagccucauuauggaaag

SEQ ID NO: 426135 - RNA, 19 nt, Homo sapiens
  misc_RNA (1)...(19): siRNA sense strand
ggccaacacugucaaguuu

SEQ ID NO: 426136 - RNA, 19 nt, Homo sapiens
  misc_RNA (1)...(19): siRNA sense strand
gaauacggguccaucaauc

SEQ ID NO: 426137 - RNA, 19 nt, Homo sapiens
  misc_RNA (1)...(19): siRNA sense strand
gcaggagcaucgcauugga

SEQ ID NO: 426138 - RNA, 19 nt, Homo sapiens
  misc_RNA (1)...(19): siRNA sense strand
caucugacaagggaaauua

SEQ ID NO: 426139 - RNA, 19 nt, Homo sapiens
  misc_RNA (1)...(19): siRNA sense strand
gcaccauacuggaccaaca

SEQ ID NO: 426140 - RNA, 19 nt, Homo sapiens
  misc_RNA (1)...(19): siRNA sense strand
gcacuggagccucauuaug

SEQ ID NO: 426141 - RNA, 19 nt, Homo sapiens
  misc_RNA (1)...(19): siRNA sense strand
aaaguguggucccaucuga

SEQ ID NO: 426142 - RNA, 19 nt, Homo sapiens
  misc_RNA (1)...(19): siRNA sense strand
cauuggaggcuacaaggua

SEQ ID NO: 426143 - RNA, 19 nt, Homo sapiens
  misc_RNA (1)...(19): siRNA sense strand
aguugaggauaccacauua

SEQ ID NO: 426144 - RNA, 19 nt, Homo sapiens
  misc_RNA (1)...(19): siRNA sense strand
gaaaguguggucccaucug

SEQ ID NO: 426145 - RNA, 19 nt, Homo sapiens
  misc_RNA (1)...(19): siRNA sense strand
cagcacuggagccucauua

SEQ ID NO: 426146 - RNA, 19 nt, Homo sapiens
  misc_RNA (1)...(19): siRNA sense strand
ggaacccaaugccaaccau

SEQ ID NO: 426147 - RNA, 19 nt, Homo sapiens
  misc_RNA (1)...(19): siRNA sense strand
ugaauacggguccaucaau

SEQ ID NO: 426148 - RNA, 19 nt, Homo sapiens
  misc_RNA (1)...(19): siRNA sense strand
acacguaccaccuggaugu

SEQ ID NO: 426149 - RNA, 19 nt, Homo sapiens
  misc_RNA (1)...(19): siRNA sense strand
ucugacaagggaaauuaua

SEQ ID NO: 426150 - RNA, 19 nt, Homo sapiens
  misc_RNA (1)...(19): siRNA sense strand
cauacuggaccaacacaga

SEQ ID NO: 426151 - RNA, 19 nt, Homo sapiens
  misc_RNA (1)...(19): siRNA sense strand
ccaacacugucaaguuucg

SEQ ID NO: 426152 - RNA, 19 nt, Homo sapiens
  misc_RNA (1)...(19): siRNA sense strand
gaggcuacaagguacgaaa

SEQ ID NO: 426153 - RNA, 19 nt, Homo sapiens
  misc_RNA (1)...(19): siRNA sense strand
cguaccaccuggauguugu

SEQ ID NO: 426154 - RNA, 19 nt, Homo sapiens
  misc_RNA (1)...(19): siRNA sense strand
ucaguuuaguugaggauac

SEQ ID NO: 426155 - RNA, 19 nt, Homo sapiens
  misc_RNA (1)...(19): siRNA sense strand
ggaaaguguggucccaucu

SEQ ID NO: 426156 - RNA, 19 nt, Homo sapiens
  misc_RNA (1)...(19): siRNA sense strand
uaguugaggauaccacauu

SEQ ID NO: 426157 - RNA, 19 nt, Homo sapiens
  misc_RNA (1)...(19): siRNA sense strand
gcuacaagguacgaaacca

SEQ ID NO: 426158 - RNA, 19 nt, Homo sapiens
  misc_RNA (1)...(19): siRNA sense strand
cacuggagccucauuaugg

SEQ ID NO: 426159 - RNA, 19 nt, Homo sapiens
  misc_RNA (1)...(19): siRNA sense strand
cggccaacacugucaaguu

SEQ ID NO: 426160 - RNA, 19 nt, Homo sapiens
  misc_RNA (1)...(19): siRNA sense strand
acuggagccucauuaugga

SEQ ID NO: 426161 - RNA, 19 nt, Homo sapiens
  misc_RNA (1)...(19): siRNA sense strand
uaagcaggagcaucgcauu

SEQ ID NO: 426162 - RNA, 19 nt, Homo sapiens
  misc_RNA (1)...(19): siRNA sense strand
ggagccucauuauggaaag

SEQ ID NO: 426163 - RNA, 19 nt, Homo sapiens
  misc_RNA (1)...(19): siRNA sense strand
ggccaacacugucaaguuu

SEQ ID NO: 426164 - RNA, 19 nt, Homo sapiens
  misc_RNA (1)...(19): siRNA sense strand
gaauacggguccaucaauc

SEQ ID NO: 426165 - RNA, 19 nt, Homo sapiens
  misc_RNA (1)...(19): siRNA sense strand
gcaggagcaucgcauugga

SEQ ID NO: 426166 - RNA, 19 nt, Homo sapiens
  misc_RNA (1)...(19): siRNA sense strand
caucugacaagggaaauua

SEQ ID NO: 426167 - RNA, 19 nt, Homo sapiens
  misc_RNA (1)...(19): siRNA sense strand
gcaccauacuggaccaaca

SEQ ID NO: 426168 - RNA, 19 nt, Homo sapiens
  misc_RNA (1)...(19): siRNA sense strand
gcacuggagccucauuaug

SEQ ID NO: 426169 - RNA, 19 nt, Homo sapiens
  misc_RNA (1)...(19): siRNA sense strand
aaaguguggucccaucuga

SEQ ID NO: 426170 - RNA, 19 nt, Homo sapiens
  misc_RNA (1)...(19): siRNA sense strand
cauuggaggcuacaaggua

SEQ ID NO: 426171 - RNA, 19 nt, Homo sapiens
  misc_RNA (1)...(19): siRNA sense strand
aguugaggauaccacauua

SEQ ID NO: 426172 - RNA, 19 nt, Homo sapiens
  misc_RNA (1)...(19): siRNA sense strand
gaaaguguggucccaucug

SEQ ID NO: 426173 - RNA, 19 nt, Homo sapiens
  misc_RNA (1)...(19): siRNA sense strand
cagcacuggagccucauua

SEQ ID NO: 426174 - RNA, 19 nt, Homo sapiens
  misc_RNA (1)...(19): siRNA sense strand
ggaacccaaugccaaccau

SEQ ID NO: 426175 - RNA, 19 nt, Homo sapiens
  misc_RNA (1)...(19): siRNA sense strand
ugaauacggguccaucaau

SEQ ID NO: 426176 - RNA, 19 nt, Homo sapiens
  misc_RNA (1)...(19): siRNA sense strand
acacguaccaccuggaugu

SEQ ID NO: 426177 - RNA, 19 nt, Homo sapiens
  misc_RNA (1)...(19): siRNA sense strand
ucugacaagggaaauuaua

SEQ ID NO: 426178 - RNA, 19 nt, Homo sapiens
  misc_RNA (1)...(19): siRNA sense strand
cauacuggaccaacacaga

SEQ ID NO: 426179 - RNA, 19 nt, Homo sapiens
  misc_RNA (1)...(19): siRNA sense strand
ccaacacugucaaguuucg

SEQ ID NO: 426180 - RNA, 19 nt, Homo sapiens
  misc_RNA (1)...(19): siRNA sense strand
gaggcuacaagguacgaaa

SEQ ID NO: 426181 - RNA, 19 nt, Homo sapiens
  misc_RNA (1)...(19): siRNA sense strand
cguaccaccuggauguugu

SEQ ID NO: 426182 - RNA, 19 nt, Homo sapiens
  misc_RNA (1)...(19): siRNA sense strand
ucaguuuaguugaggauac

SEQ ID NO: 426183 - RNA, 19 nt, Homo sapiens
  misc_RNA (1)...(19): siRNA sense strand
ggaaaguguggucccaucu

SEQ ID NO: 426184 - RNA, 19 nt, Homo sapiens
  misc_RNA (1)...(19): siRNA sense strand
uaguugaggauaccacauu

SEQ ID NO: 426185 - RNA, 19 nt, Homo sapiens
  misc_RNA (1)...(19): siRNA sense strand
gcuacaagguacgaaacca

SEQ ID NO: 426186 - RNA, 19 nt, Homo sapiens
  misc_RNA (1)...(19): siRNA sense strand
cacuggagccucauuaugg

SEQ ID NO: 426187 - RNA, 19 nt, Homo sapiens
  misc_RNA (1)...(19): siRNA sense strand
cggccaacacugucaaguu

SEQ ID NO: 426188 - RNA, 19 nt, Homo sapiens
  misc_RNA (1)...(19): siRNA sense strand
acuggagccucauuaugga

SEQ ID NO: 426189 - RNA, 19 nt, Homo sapiens
  misc_RNA (1)...(19): siRNA sense strand
uaagcaggagcaucgcauu

SEQ ID NO: 426190 - RNA, 19 nt, Homo sapiens
  misc_RNA (1)...(19): siRNA sense strand
ggagccucauuauggaaag

SEQ ID NO: 426191 - RNA, 19 nt, Homo sapiens
  misc_RNA (1)...(19): siRNA sense strand
ggccaacacugucaaguuu

SEQ ID NO: 426192 - RNA, 19 nt, Homo sapiens
  misc_RNA (1)...(19): siRNA sense strand
gaauacggguccaucaauc

SEQ ID NO: 426193 - RNA, 19 nt, Homo sapiens
  misc_RNA (1)...(19): siRNA sense strand
gcaggagcaucgcauugga

SEQ ID NO: 426194 - RNA, 19 nt, Homo sapiens
  misc_RNA (1)...(19): siRNA sense strand
caucugacaagggaaauua

SEQ ID NO: 426195 - RNA, 19 nt, Homo sapiens
  misc_RNA (1)...(19): siRNA sense strand
gcaccauacuggaccaaca

SEQ ID NO: 426196 - RNA, 19 nt, Homo sapiens
  misc_RNA (1)...(19): siRNA sense strand
gcacuggagccucauuaug

SEQ ID NO: 426197 - RNA, 19 nt, Homo sapiens
  misc_RNA (1)...(19): siRNA sense strand
aaaguguggucccaucuga

SEQ ID NO: 426198 - RNA, 19 nt, Homo sapiens
  misc_RNA (1)...(19): siRNA sense strand
cauuggaggcuacaaggua

SEQ ID NO: 426199 - RNA, 19 nt, Homo sapiens
  misc_RNA (1)...(19): siRNA sense strand
aguugaggauaccacauua

SEQ ID NO: 426200 - RNA, 19 nt, Homo sapiens
  misc_RNA (1)...(19): siRNA sense strand
gaaaguguggucccaucug

SEQ ID NO: 426201 - RNA, 19 nt, Homo sapiens
  misc_RNA (1)...(19): siRNA sense strand
cagcacuggagccucauua

SEQ ID NO: 426202 - RNA, 19 nt, Homo sapiens
  misc_RNA (1)...(19): siRNA sense strand
ggaacccaaugccaaccau

SEQ ID NO: 426203 - RNA, 19 nt, Homo sapiens
  misc_RNA (1)...(19): siRNA sense strand
ugaauacggguccaucaau

SEQ ID NO: 426204 - RNA, 19 nt, Homo sapiens
  misc_RNA (1)...(19): siRNA sense strand
acacguaccaccuggaugu

SEQ ID NO: 426205 - RNA, 19 nt, Homo sapiens
  misc_RNA (1)...(19): siRNA sense strand
ucugacaagggaaauuaua

SEQ ID NO: 426206 - RNA, 19 nt, Homo sapiens
  misc_RNA (1)...(19): siRNA sense strand
cauacuggaccaacacaga

SEQ ID NO: 426207 - RNA, 19 nt, Homo sapiens
  misc_RNA (1)...(19): siRNA sense strand
ccaacacugucaaguuucg

SEQ ID NO: 426208 - RNA, 19 nt, Homo sapiens
  misc_RNA (1)...(19): siRNA sense strand
gaggcuacaagguacgaaa

SEQ ID NO: 426209 - RNA, 19 nt, Homo sapiens
  misc_RNA (1)...(19): siRNA sense strand
cguaccaccuggauguugu

SEQ ID NO: 426210 - RNA, 19 nt, Homo sapiens
  misc_RNA (1)...(19): siRNA sense strand
ucaguuuaguugaggauac

SEQ ID NO: 426211 - RNA, 19 nt, Homo sapiens
  misc_RNA (1)...(19): siRNA sense strand
ggaaaguguggucccaucu

SEQ ID NO: 426212 - RNA, 19 nt, Homo sapiens
  misc_RNA (1)...(19): siRNA sense strand
uaguugaggauaccacauu

SEQ ID NO: 426213 - RNA, 19 nt, Homo sapiens
  misc_RNA (1)...(19): siRNA sense strand
gcuacaagguacgaaacca

SEQ ID NO: 426214 - RNA, 19 nt, Homo sapiens
  misc_RNA (1)...(19): siRNA sense strand
cacuggagccucauuaugg

SEQ ID NO: 426215 - RNA, 19 nt, Homo sapiens
  misc_RNA (1)...(19): siRNA sense strand
cggccaacacugucaaguu

SEQ ID NO: 426216 - RNA, 19 nt, Homo sapiens
  misc_RNA (1)...(19): siRNA sense strand
acuggagccucauuaugga

SEQ ID NO: 426217 - RNA, 19 nt, Homo sapiens
  misc_RNA (1)...(19): siRNA sense strand
uaagcaggagcaucgcauu

SEQ ID NO: 426218 - RNA, 19 nt, Homo sapiens
  misc_RNA (1)...(19): siRNA sense strand
ggagccucauuauggaaag

SEQ ID NO: 426219 - RNA, 19 nt, Homo sapiens
  misc_RNA (1)...(19): siRNA sense strand
ggccaacacugucaaguuu

SEQ ID NO: 426220 - RNA, 19 nt, Homo sapiens
  misc_RNA (1)...(19): siRNA sense strand
gaauacggguccaucaauc

SEQ ID NO: 426221 - RNA, 19 nt, Homo sapiens
  misc_RNA (1)...(19): siRNA sense strand
gcaggagcaucgcauugga

SEQ ID NO: 426222 - RNA, 19 nt, Homo sapiens
  misc_RNA (1)...(19): siRNA sense strand
caucugacaagggaaauua

SEQ ID NO: 426223 - RNA, 19 nt, Homo sapiens
  misc_RNA (1)...(19): siRNA sense strand
gcaccauacuggaccaaca

SEQ ID NO: 426224 - RNA, 19 nt, Homo sapiens
  misc_RNA (1)...(19): siRNA sense strand
gcacuggagccucauuaug

SEQ ID NO: 426225 - RNA, 19 nt, Homo sapiens
  misc_RNA (1)...(19): siRNA sense strand
aaaguguggucccaucuga

SEQ ID NO: 426226 - RNA, 19 nt, Homo sapiens
  misc_RNA (1)...(19): siRNA sense strand
cauuggaggcuacaaggua

SEQ ID NO: 426227 - RNA, 19 nt, Homo sapiens
  misc_RNA (1)...(19): siRNA sense strand
aguugaggauaccacauua

SEQ ID NO: 426228 - RNA, 19 nt, Homo sapiens
  misc_RNA (1)...(19): siRNA sense strand
gaaaguguggucccaucug

SEQ ID NO: 426229 - RNA, 19 nt, Homo sapiens
  misc_RNA (1)...(19): siRNA sense strand
cagcacuggagccucauua

SEQ ID NO: 426230 - RNA, 19 nt, Homo sapiens
  misc_RNA (1)...(19): siRNA sense strand
ggaacccaaugccaaccau

SEQ ID NO: 426231 - RNA, 19 nt, Homo sapiens
  misc_RNA (1)...(19): siRNA sense strand
ugaauacggguccaucaau

SEQ ID NO: 426232 - RNA, 19 nt, Homo sapiens
  misc_RNA (1)...(19): siRNA sense strand
acacguaccaccuggaugu

SEQ ID NO: 426233 - RNA, 19 nt, Homo sapiens
  misc_RNA (1)...(19): siRNA sense strand
ucugacaagggaaauuaua

SEQ ID NO: 426234 - RNA, 19 nt, Homo sapiens
  misc_RNA (1)...(19): siRNA sense strand
cauacuggaccaacacaga

SEQ ID NO: 426235 - RNA, 19 nt, Homo sapiens
  misc_RNA (1)...(19): siRNA sense strand
ccaacacugucaaguuucg

SEQ ID NO: 426236 - RNA, 19 nt, Homo sapiens
  misc_RNA (1)...(19): siRNA sense strand
gaggcuacaagguacgaaa

SEQ ID NO: 426237 - RNA, 19 nt, Homo sapiens
  misc_RNA (1)...(19): siRNA sense strand
cguaccaccuggauguugu

SEQ ID NO: 426238 - RNA, 19 nt, Homo sapiens
  misc_RNA (1)...(19): siRNA sense strand
ucaguuuaguugaggauac

SEQ ID NO: 426239 - RNA, 19 nt, Homo sapiens
  misc_RNA (1)...(19): siRNA sense strand
ggaaaguguggucccaucu

SEQ ID NO: 426240 - RNA, 19 nt, Homo sapiens
  misc_RNA (1)...(19): siRNA sense strand
uaguugaggauaccacauu

SEQ ID NO: 426241 - RNA, 19 nt, Homo sapiens
  misc_RNA (1)...(19): siRNA sense strand
gcuacaagguacgaaacca

SEQ ID NO: 426242 - RNA, 19 nt, Homo sapiens
  misc_RNA (1)...(19): siRNA sense strand
cacuggagccucauuaugg

SEQ ID NO: 426243 - RNA, 19 nt, Homo sapiens
  misc_RNA (1)...(19): siRNA sense strand
cggccaacacugucaaguu

SEQ ID NO: 426244 - RNA, 19 nt, Homo sapiens
  misc_RNA (1)...(19): siRNA sense strand
acuggagccucauuaugga

SEQ ID NO: 426245 - RNA, 19 nt, Homo sapiens
  misc_RNA (1)...(19): siRNA sense strand
uaagcaggagcaucgcauu

SEQ ID NO: 426246 - RNA, 19 nt, Homo sapiens
  misc_RNA (1)...(19): siRNA sense strand
ggagccucauuauggaaag

SEQ ID NO: 426247 - RNA, 19 nt, Homo sapiens
  misc_RNA (1)...(19): siRNA sense strand
ggccaacacugucaaguuu

SEQ ID NO: 426248 - RNA, 19 nt, Homo sapiens
  misc_RNA (1)...(19): siRNA sense strand
gaauacggguccaucaauc

SEQ ID NO: 426249 - RNA, 19 nt, Homo sapiens
  misc_RNA (1)...(19): siRNA sense strand
gcaggagcaucgcauugga

SEQ ID NO: 426250 - RNA, 19 nt, Homo sapiens
  misc_RNA (1)...(19): siRNA sense strand
caucugacaagggaaauua

SEQ ID NO: 426251 - RNA, 19 nt, Homo sapiens
  misc_RNA (1)...(19): siRNA sense strand
gcaccauacuggaccaaca

SEQ ID NO: 426252 - RNA, 19 nt, Homo sapiens
  misc_RNA (1)...(19): siRNA sense strand
gcacuggagccucauuaug

SEQ ID NO: 426253 - RNA, 19 nt, Homo sapiens
  misc_RNA (1)...(19): siRNA sense strand
aaaguguggucccaucuga

SEQ ID NO: 426254 - RNA, 19 nt, Homo sapiens
  misc_RNA (1)...(19): siRNA sense strand
cauuggaggcuacaaggua

SEQ ID NO: 426255 - RNA, 19 nt, Homo sapiens
  misc_RNA (1)...(19): siRNA sense strand
aguugaggauaccacauua

SEQ ID NO: 426256 - RNA, 19 nt, Homo sapiens
  misc_RNA (1)...(19): siRNA sense strand
gaaaguguggucccaucug

SEQ ID NO: 426257 - RNA, 19 nt, Homo sapiens
  misc_RNA (1)...(19): siRNA sense strand
cagcacuggagccucauua

SEQ ID NO: 426258 - RNA, 19 nt, Homo sapiens
  misc_RNA (1)...(19): siRNA sense strand
ggaacccaaugccaaccau

SEQ ID NO: 426259 - RNA, 19 nt, Homo sapiens
  misc_RNA (1)...(19): siRNA sense strand
ugaauacggguccaucaau

SEQ ID NO: 426260 - RNA, 19 nt, Homo sapiens
  misc_RNA (1)...(19): siRNA sense strand
acacguaccaccuggaugu

SEQ ID NO: 426261 - RNA, 19 nt, Homo sapiens
  misc_RNA (1)...(19): siRNA sense strand
ucugacaagggaaauuaua

SEQ ID NO: 426262 - RNA, 19 nt, Homo sapiens
  misc_RNA (1)...(19): siRNA sense strand
cauacuggaccaacacaga

SEQ ID NO: 426263 - RNA, 19 nt, Homo sapiens
  misc_RNA (1)...(19): siRNA sense strand
ccaacacugucaaguuucg

SEQ ID NO: 426264 - RNA, 19 nt, Homo sapiens
  misc_RNA (1)...(19): siRNA sense strand
gaggcuacaagguacgaaa

SEQ ID NO: 426265 - RNA, 19 nt, Homo sapiens
  misc_RNA (1)...(19): siRNA sense strand
cguaccaccuggauguugu

SEQ ID NO: 426266 - RNA, 19 nt, Homo sapiens
  misc_RNA (1)...(19): siRNA sense strand
ucaguuuaguugaggauac

SEQ ID NO: 426267 - RNA, 19 nt, Homo sapiens
  misc_RNA (1)...(19): siRNA sense strand
ggaaaguguggucccaucu

SEQ ID NO: 426268 - RNA, 19 nt, Homo sapiens
  misc_RNA (1)...(19): siRNA sense strand
uaguugaggauaccacauu

SEQ ID NO: 426269 - RNA, 19 nt, Homo sapiens
  misc_RNA (1)...(19): siRNA sense strand
gcuacaagguacgaaacca

SEQ ID NO: 426270 - RNA, 19 nt, Homo sapiens
  misc_RNA (1)...(19): siRNA sense strand
cacuggagccucauuaugg

SEQ ID NO: 426271 - RNA, 19 nt, Homo sapiens
  misc_RNA (1)...(19): siRNA sense strand
cggccaacacugucaaguu

SEQ ID NO: 426272 - RNA, 19 nt, Homo sapiens
  misc_RNA (1)...(19): siRNA sense strand
acuggagccucauuaugga

SEQ ID NO: 426273 - RNA, 19 nt, Homo sapiens
  misc_RNA (1)...(19): siRNA sense strand
uaagcaggagcaucgcauu

SEQ ID NO: 426274 - RNA, 19 nt, Homo sapiens
  misc_RNA (1)...(19): siRNA sense strand
ggagccucauuauggaaag

SEQ ID NO: 426275 - RNA, 19 nt, Homo sapiens
  misc_RNA (1)...(19): siRNA sense strand
ggccaacacugucaaguuu

SEQ ID NO: 426276 - RNA, 19 nt, Homo sapiens
  misc_RNA (1)...(19): siRNA sense strand
gaauacggguccaucaauc

SEQ ID NO: 426277 - RNA, 19 nt, Homo sapiens
  misc_RNA (1)...(19): siRNA sense strand
gcaggagcaucgcauugga

SEQ ID NO: 426278 - RNA, 19 nt, Homo sapiens
  misc_RNA (1)...(19): siRNA sense strand
caucugacaagggaaauua

SEQ ID NO: 426279 - RNA, 19 nt, Homo sapiens
  misc_RNA (1)...(19): siRNA sense strand
gcaccauacuggaccaaca

SEQ ID NO: 426280 - RNA, 19 nt, Homo sapiens
  misc_RNA (1)...(19): siRNA sense strand
gcacuggagccucauuaug

SEQ ID NO: 426281 - RNA, 19 nt, Homo sapiens
  misc_RNA (1)...(19): siRNA sense strand
aaaguguggucccaucuga

SEQ ID NO: 426282 - RNA, 19 nt, Homo sapiens
  misc_RNA (1)...(19): siRNA sense strand
cauuggaggcuacaaggua

SEQ ID NO: 426283 - RNA, 19 nt, Homo sapiens
  misc_RNA (1)...(19): siRNA sense strand
aguugaggauaccacauua

SEQ ID NO: 426284 - RNA, 19 nt, Homo sapiens
  misc_RNA (1)...(19): siRNA sense strand
gaaaguguggucccaucug

SEQ ID NO: 426285 - RNA, 19 nt, Homo sapiens
  misc_RNA (1)...(19): siRNA sense strand
cagcacuggagccucauua

SEQ ID NO: 426286 - RNA, 19 nt, Homo sapiens
  misc_RNA (1)...(19): siRNA sense strand
ggaacccaaugccaaccau

SEQ ID NO: 426287 - RNA, 19 nt, Homo sapiens
  misc_RNA (1)...(19): siRNA sense strand
ugaauacggguccaucaau

SEQ ID NO: 426288 - RNA, 19 nt, Homo sapiens
  misc_RNA (1)...(19): siRNA sense strand
acacguaccaccuggaugu

SEQ ID NO: 426289 - RNA, 19 nt, Homo sapiens
  misc_RNA (1)...(19): siRNA sense strand
ucugacaagggaaauuaua

SEQ ID NO: 426290 - RNA, 19 nt, Homo sapiens
  misc_RNA (1)...(19): siRNA sense strand
cauacuggaccaacacaga

SEQ ID NO: 426291 - RNA, 19 nt, Homo sapiens
  misc_RNA (1)...(19): siRNA sense strand
ccaacacugucaaguuucg

SEQ ID NO: 426292 - RNA, 19 nt, Homo sapiens
  misc_RNA (1)...(19): siRNA sense strand
gaggcuacaagguacgaaa

SEQ ID NO: 426293 - RNA, 19 nt, Homo sapiens
  misc_RNA (1)...(19): siRNA sense strand
cguaccaccuggauguugu

SEQ ID NO: 426294 - RNA, 19 nt, Homo sapiens
  misc_RNA (1)...(19): siRNA sense strand
ucaguuuaguugaggauac

SEQ ID NO: 426295 - RNA, 19 nt, Homo sapiens
  misc_RNA (1)...(19): siRNA sense strand
ggaaaguguggucccaucu

SEQ ID NO: 426296 - RNA, 19 nt, Homo sapiens
  misc_RNA (1)...(19): siRNA sense strand
uaguugaggauaccacauu

SEQ ID NO: 426297 - RNA, 19 nt, Homo sapiens
  misc_RNA (1)...(19): siRNA sense strand
gcuacaagguacgaaacca

SEQ ID NO: 426298 - RNA, 19 nt, Homo sapiens
  misc_RNA (1)...(19): siRNA sense strand
cacuggagccucauuaugg

SEQ ID NO: 426299 - RNA, 19 nt, Homo sapiens
  misc_RNA (1)...(19): siRNA sense strand
cggccaacacugucaaguu

SEQ ID NO: 426300 - RNA, 19 nt, Homo sapiens
  misc_RNA (1)...(19): siRNA sense strand
acuggagccucauuaugga

SEQ ID NO: 426301 - RNA, 19 nt, Homo sapiens
  misc_RNA (1)...(19): siRNA sense strand
uaagcaggagcaucgcauu

SEQ ID NO: 426302 - RNA, 19 nt, Homo sapiens
  misc_RNA (1)...(19): siRNA sense strand
ggagccucauuauggaaag

SEQ ID NO: 426303 - RNA, 19 nt, Homo sapiens
  misc_RNA (1)...(19): siRNA sense strand
ggccaacacugucaaguuu

SEQ ID NO: 426304 - RNA, 19 nt, Homo sapiens
  misc_RNA (1)...(19): siRNA sense strand
gaauacggguccaucaauc

SEQ ID NO: 426305 - RNA, 19 nt, Homo sapiens
  misc_RNA (1)...(19): siRNA sense strand
gcaggagcaucgcauugga

SEQ ID NO: 426306 - RNA, 19 nt, Homo sapiens
  misc_RNA (1)...(19): siRNA sense strand
caucugacaagggaaauua

SEQ ID NO: 426307 - RNA, 19 nt, Homo sapiens
  misc_RNA (1)...(19): siRNA sense strand
gcaccauacuggaccaaca

SEQ ID NO: 426308 - RNA, 19 nt, Homo sapiens
  misc_RNA (1)...(19): siRNA sense strand
gcacuggagccucauuaug

SEQ ID NO: 426309 - RNA, 19 nt, Homo sapiens
  misc_RNA (1)...(19): siRNA sense strand
aaaguguggucccaucuga

SEQ ID NO: 426310 - RNA, 19 nt, Homo sapiens
  misc_RNA (1)...(19): siRNA sense strand
cauuggaggcuacaaggua

SEQ ID NO: 426311 - RNA, 19 nt, Homo sapiens
  misc_RNA (1)...(19): siRNA sense strand
aguugaggauaccacauua

SEQ ID NO: 426312 - RNA, 19 nt, Homo sapiens
  misc_RNA (1)...(19): siRNA sense strand
gaaaguguggucccaucug

SEQ ID NO: 426313 - RNA, 19 nt, Homo sapiens
  misc_RNA (1)...(19): siRNA sense strand
cagcacuggagccucauua

SEQ ID NO: 426314 - RNA, 19 nt, Homo sapiens
  misc_RNA (1)...(19): siRNA sense strand
ggaacccaaugccaaccau

SEQ ID NO: 426315 - RNA, 19 nt, Homo sapiens
  misc_RNA (1)...(19): siRNA sense strand
ugaauacggguccaucaau

SEQ ID NO: 426316 - RNA, 19 nt, Homo sapiens
  misc_RNA (1)...(19): siRNA sense strand
acacguaccaccuggaugu

SEQ ID NO: 426317 - RNA, 19 nt, Homo sapiens
  misc_RNA (1)...(19): siRNA sense strand
ucugacaagggaaauuaua

SEQ ID NO: 426318 - RNA, 19 nt, Homo sapiens
  misc_RNA (1)...(19): siRNA sense strand
cauacuggaccaacacaga

SEQ ID NO: 426319 - RNA, 19 nt, Homo sapiens
  misc_RNA (1)...(19): siRNA sense strand
ccaacacugucaaguuucg

SEQ ID NO: 426320 - RNA, 19 nt, Homo sapiens
  misc_RNA (1)...(19): siRNA sense strand
gaggcuacaagguacgaaa

SEQ ID NO: 426321 - RNA, 19 nt, Homo sapiens
  misc_RNA (1)...(19): siRNA sense strand
cguaccaccuggauguugu

SEQ ID NO: 426322 - RNA, 19 nt, Homo sapiens
  misc_RNA (1)...(19): siRNA sense strand
ucaguuuaguugaggauac

SEQ ID NO: 426323 - RNA, 19 nt, Homo sapiens
  misc_RNA (1)...(19): siRNA sense strand
ggaaaguguggucccaucu

SEQ ID NO: 426324 - RNA, 19 nt, Homo sapiens
  misc_RNA (1)...(19): siRNA sense strand
uaguugaggauaccacauu

SEQ ID NO: 426325 - RNA, 19 nt, Homo sapiens
  misc_RNA (1)...(19): siRNA sense strand
gcuacaagguacgaaacca

SEQ ID NO: 426326 - RNA, 19 nt, Homo sapiens
  misc_RNA (1)...(19): siRNA sense strand
cacuggagccucauuaugg

SEQ ID NO: 426327 - RNA, 19 nt, Homo sapiens
  misc_RNA (1)...(19): siRNA sense strand
cggccaacacugucaaguu

SEQ ID NO: 426328 - RNA, 19 nt, Homo sapiens
  misc_RNA (1)...(19): siRNA sense strand
acuggagccucauuaugga

SEQ ID NO: 426329 - RNA, 19 nt, Homo sapiens
  misc_RNA (1)...(19): siRNA sense strand
uaagcaggagcaucgcauu

SEQ ID NO: 426330 - RNA, 19 nt, Homo sapiens
  misc_RNA (1)...(19): siRNA sense strand
ggagccucauuauggaaag

SEQ ID NO: 426331 - RNA, 19 nt, Homo sapiens
  misc_RNA (1)...(19): siRNA sense strand
ggccaacacugucaaguuu

SEQ ID NO: 426332 - RNA, 19 nt, Homo sapiens
  misc_RNA (1)...(19): siRNA sense strand
gaauacggguccaucaauc

SEQ ID NO: 426333 - RNA, 19 nt, Homo sapiens
  misc_RNA (1)...(19): siRNA sense strand
gcaggagcaucgcauugga

SEQ ID NO: 426334 - RNA, 19 nt, Homo sapiens
  misc_RNA (1)...(19): siRNA sense strand
caucugacaagggaaauua

SEQ ID NO: 426335 - RNA, 19 nt, Homo sapiens
  misc_RNA (1)...(19): siRNA sense strand
gcaccauacuggaccaaca

SEQ ID NO: 426336 - RNA, 19 nt, Homo sapiens
  misc_RNA (1)...(19): siRNA sense strand
gcacuggagccucauuaug

SEQ ID NO: 426337 - RNA, 19 nt, Homo sapiens
  misc_RNA (1)...(19): siRNA sense strand
aaaguguggucccaucuga

SEQ ID NO: 426338 - RNA, 19 nt, Homo sapiens
  misc_RNA (1)...(19): siRNA sense strand
cauuggaggcuacaaggua

SEQ ID NO: 426339 - RNA, 19 nt, Homo sapiens
  misc_RNA (1)...(19): siRNA sense strand
aguugaggauaccacauua

SEQ ID NO: 426340 - RNA, 19 nt, Homo sapiens
  misc_RNA (1)...(19): siRNA sense strand
gaaaguguggucccaucug

SEQ ID NO: 426341 - RNA, 19 nt, Homo sapiens
  misc_RNA (1)...(19): siRNA sense strand
cagcacuggagccucauua

SEQ ID NO: 426342 - RNA, 19 nt, Homo sapiens
  misc_RNA (1)...(19): siRNA sense strand
ggaacccaaugccaaccau

SEQ ID NO: 426343 - RNA, 19 nt, Homo sapiens
  misc_RNA (1)...(19): siRNA sense strand
ugaauacggguccaucaau

SEQ ID NO: 426344 - RNA, 19 nt, Homo sapiens
  misc_RNA (1)...(19): siRNA sense strand
acacguaccaccuggaugu

SEQ ID NO: 426345 - RNA, 19 nt, Homo sapiens
  misc_RNA (1)...(19): siRNA sense strand
ucugacaagggaaauuaua

SEQ ID NO: 426346 - RNA, 19 nt, Homo sapiens
  misc_RNA (1)...(19): siRNA sense strand
cauacuggaccaacacaga

SEQ ID NO: 426347 - RNA, 19 nt, Homo sapiens
  misc_RNA (1)...(19): siRNA sense strand
ccaacacugucaaguuucg

SEQ ID NO: 426348 - RNA, 19 nt, Homo sapiens
  misc_RNA (1)...(19): siRNA sense strand
gaggcuacaagguacgaaa

SEQ ID NO: 426349 - RNA, 19 nt, Homo sapiens
  misc_RNA (1)...(19): siRNA sense strand
cguaccaccuggauguugu

SEQ ID NO: 426350 - RNA, 19 nt, Homo sapiens
  misc_RNA (1)...(19): siRNA sense strand
ucaguuuaguugaggauac

SEQ ID NO: 426351 - RNA, 19 nt, Homo sapiens
  misc_RNA (1)...(19): siRNA sense strand
ggaaaguguggucccaucu

SEQ ID NO: 426352 - RNA, 19 nt, Homo sapiens
  misc_RNA (1)...(19): siRNA sense strand
uaguugaggauaccacauu

SEQ ID NO: 426353 - RNA, 19 nt, Homo sapiens
  misc_RNA (1)...(19): siRNA sense strand
gcuacaagguacgaaacca

SEQ ID NO: 426354 - RNA, 19 nt, Homo sapiens
  misc_RNA (1)...(19): siRNA sense strand
cacuggagccucauuaugg

SEQ ID NO: 426355 - RNA, 19 nt, Homo sapiens
  misc_RNA (1)...(19): siRNA sense strand
cggccaacacugucaaguu

SEQ ID NO: 426356 - RNA, 19 nt, Homo sapiens
  misc_RNA (1)...(19): siRNA sense strand
acuggagccucauuaugga

SEQ ID NO: 426357 - RNA, 19 nt, Homo sapiens
  misc_RNA (1)...(19): siRNA sense strand
uaagcaggagcaucgcauu

SEQ ID NO: 426358 - RNA, 19 nt, Homo sapiens
  misc_RNA (1)...(19): siRNA sense strand
ggagccucauuauggaaag

SEQ ID NO: 426359 - RNA, 19 nt, Homo sapiens
  misc_RNA (1)...(19): siRNA sense strand
gcagagauaucuugcuuua

SEQ ID NO: 426360 - RNA, 19 nt, Homo sapiens
  misc_RNA (1)...(19): siRNA sense strand
gcacagaccugcuuuaagu

SEQ ID NO: 426361 - RNA, 19 nt, Homo sapiens
  misc_RNA (1)...(19): siRNA sense strand
gaaggcgguuauacaauua

SEQ ID NO: 426362 - RNA, 19 nt, Homo sapiens
  misc_RNA (1)...(19): siRNA sense strand
gaagaauuguccacuuauu

SEQ ID NO: 426363 - RNA, 19 nt, Homo sapiens
  misc_RNA (1)...(19): siRNA sense strand
gaaggaacuuggguugaua

SEQ ID NO: 426364 - RNA, 19 nt, Homo sapiens
  misc_RNA (1)...(19): siRNA sense strand
gauaggguaugauuacaaa

SEQ ID NO: 426365 - RNA, 19 nt, Homo sapiens
  misc_RNA (1)...(19): siRNA sense strand
gaacuuggguugauaucug

SEQ ID NO: 426366 - RNA, 19 nt, Homo sapiens
  misc_RNA (1)...(19): siRNA sense strand
agaaagaucuagugaaguu

SEQ ID NO: 426367 - RNA, 19 nt, Homo sapiens
  misc_RNA (1)...(19): siRNA sense strand
guacugaagcccacacuua

SEQ ID NO: 426368 - RNA, 19 nt, Homo sapiens
  misc_RNA (1)...(19): siRNA sense strand
uaagaaagaucuagugaag

SEQ ID NO: 426369 - RNA, 19 nt, Homo sapiens
  misc_RNA (1)...(19): siRNA sense strand
gauggauguuuacagauua

SEQ ID NO: 426370 - RNA, 19 nt, Homo sapiens
  misc_RNA (1)...(19): siRNA sense strand
caaaggagacuguacugua

SEQ ID NO: 426371 - RNA, 19 nt, Homo sapiens
  misc_RNA (1)...(19): siRNA sense strand
guugauaucugcaauaauc

SEQ ID NO: 426372 - RNA, 19 nt, Homo sapiens
  misc_RNA (1)...(19): siRNA sense strand
guauguaucucuugggaaa

SEQ ID NO: 426373 - RNA, 19 nt, Homo sapiens
  misc_RNA (1)...(19): siRNA sense strand
gcaauaauccugcuaugga

SEQ ID NO: 426374 - RNA, 19 nt, Homo sapiens
  misc_RNA (1)...(19): siRNA sense strand
gaacaccauugccaucuuc

SEQ ID NO: 426375 - RNA, 19 nt, Homo sapiens
  misc_RNA (1)...(19): siRNA sense strand
gacaauaaggcuaucaaua

SEQ ID NO: 426376 - RNA, 19 nt, Homo sapiens
  misc_RNA (1)...(19): siRNA sense strand
gaugaacuaucuugaagug

SEQ ID NO: 426377 - RNA, 19 nt, Homo sapiens
  misc_RNA (1)...(19): siRNA sense strand
gaaagaaauucgagaagcu

SEQ ID NO: 426378 - RNA, 19 nt, Homo sapiens
  misc_RNA (1)...(19): siRNA sense strand
ccagggaaauccuaaguga

SEQ ID NO: 426379 - RNA, 19 nt, Homo sapiens
  misc_RNA (1)...(19): siRNA sense strand
ggaaggagcugaggaacca

SEQ ID NO: 426380 - RNA, 19 nt, Homo sapiens
  misc_RNA (1)...(19): siRNA sense strand
cugaagaauuguccacuua

SEQ ID NO: 426381 - RNA, 19 nt, Homo sapiens
  misc_RNA (1)...(19): siRNA sense strand
gaaaugcagccaaauggaa

SEQ ID NO: 426382 - RNA, 19 nt, Homo sapiens
  misc_RNA (1)...(19): siRNA sense strand
caaaugccaugaaauugga

SEQ ID NO: 426383 - RNA, 19 nt, Homo sapiens
  misc_RNA (1)...(19): siRNA sense strand
agaaggcgguuauacaauu

SEQ ID NO: 426384 - RNA, 19 nt, Homo sapiens
  misc_RNA (1)...(19): siRNA sense strand
gcugugaaauuaagcuaaa

SEQ ID NO: 426385 - RNA, 19 nt, Homo sapiens
  misc_RNA (1)...(19): siRNA sense strand
ugaacuaucuugaagugaa

SEQ ID NO: 426386 - RNA, 19 nt, Homo sapiens
  misc_RNA (1)...(19): siRNA sense strand
gugaauaacuuugguagug

SEQ ID NO: 426387 - RNA, 19 nt, Homo sapiens
  misc_RNA (1)...(19): siRNA sense strand
gaacuaucuugaagugaau

SEQ ID NO: 426388 - RNA, 19 nt, Homo sapiens
  misc_RNA (1)...(19): siRNA sense strand
agaguacccugaaggauuu

SEQ ID NO: 426389 - RNA, 19 nt, Homo sapiens
  misc_RNA (1)...(19): siRNA sense strand
gcaagaaggcgguuauaca

SEQ ID NO: 426390 - RNA, 19 nt, Homo sapiens
  misc_RNA (1)...(19): siRNA sense strand
gaagugaaucgcagaguga

SEQ ID NO: 426391 - RNA, 19 nt, Homo sapiens
  misc_RNA (1)...(19): siRNA sense strand
gguaacugaugcuuucaaa

SEQ ID NO: 426392 - RNA, 19 nt, Homo sapiens
  misc_RNA (1)...(19): siRNA sense strand
gaacaucuccaugggauau

SEQ ID NO: 426393 - RNA, 19 nt, Homo sapiens
  misc_RNA (1)...(19): siRNA sense strand
gcaaucuguuacuguuuaa

SEQ ID NO: 426394 - RNA, 19 nt, Homo sapiens
  misc_RNA (1)...(19): siRNA sense strand
ggauauucuucuccgcuua

SEQ ID NO: 426395 - RNA, 19 nt, Homo sapiens
  misc_RNA (1)...(19): siRNA sense strand
gagcaaaguccaagagaug

SEQ ID NO: 426396 - RNA, 19 nt, Homo sapiens
  misc_RNA (1)...(19): siRNA sense strand
gcugaaauacugaaagaaa

SEQ ID NO: 426397 - RNA, 19 nt, Homo sapiens
  misc_RNA (1)...(19): siRNA sense strand
uauggaagcugaaauacug

SEQ ID NO: 426398 - RNA, 19 nt, Homo sapiens
  misc_RNA (1)...(19): siRNA sense strand
caauaauccugcuauggaa

SEQ ID NO: 426399 - RNA, 19 nt, Homo sapiens
  misc_RNA (1)...(19): siRNA sense strand
aagcugcacugaagaauug

SEQ ID NO: 426400 - RNA, 19 nt, Homo sapiens
  misc_RNA (1)...(19): siRNA sense strand
cgauggauguuuacagauu

SEQ ID NO: 426401 - RNA, 19 nt, Homo sapiens
  misc_RNA (1)...(19): siRNA sense strand
gaaaacagcagaagauuau

SEQ ID NO: 426402 - RNA, 19 nt, Homo sapiens
  misc_RNA (1)...(19): siRNA sense strand
caagaaggcgguuauacaa

SEQ ID NO: 426403 - RNA, 19 nt, Homo sapiens
  misc_RNA (1)...(19): siRNA sense strand
gaggcuuccuaucugauua

SEQ ID NO: 426404 - RNA, 19 nt, Homo sapiens
  misc_RNA (1)...(19): siRNA sense strand
acuuaagacugcauuguua

SEQ ID NO: 426405 - RNA, 19 nt, Homo sapiens
  misc_RNA (1)...(19): siRNA sense strand
ggaaaucauggauagaauu

SEQ ID NO: 426406 - RNA, 19 nt, Homo sapiens
  misc_RNA (1)...(19): siRNA sense strand
ggguugauaucugcaauaa

SEQ ID NO: 426407 - RNA, 19 nt, Homo sapiens
  misc_RNA (1)...(19): siRNA sense strand
gaggugaaaucguaauugg

SEQ ID NO: 426408 - RNA, 19 nt, Homo sapiens
  misc_RNA (1)...(19): siRNA sense strand
gcaaagaagcaguaguuca

SEQ ID NO: 426409 - RNA, 19 nt, Homo sapiens
  misc_RNA (1)...(19): siRNA sense strand
gcaaaugccaugaaauugg

SEQ ID NO: 426410 - RNA, 19 nt, Homo sapiens
  misc_RNA (1)...(19): siRNA sense strand
ugcaaucuguuacuguuua

SEQ ID NO: 426411 - RNA, 19 nt, Homo sapiens
  misc_RNA (1)...(19): siRNA sense strand
acacauauauuggcuacuu

SEQ ID NO: 426412 - RNA, 19 nt, Homo sapiens
  misc_RNA (1)...(19): siRNA sense strand
caaagaagcaguaguucau

SEQ ID NO: 426413 - RNA, 19 nt, Homo sapiens
  misc_RNA (1)...(19): siRNA sense strand
gaacugacagcagagauau

SEQ ID NO: 426414 - RNA, 19 nt, Homo sapiens
  misc_RNA (1)...(19): siRNA sense strand
gaccgaaggacacauauau

SEQ ID NO: 426415 - RNA, 19 nt, Homo sapiens
  misc_RNA (1)...(19): siRNA sense strand
gcaauuugauagcuggaau

SEQ ID NO: 426416 - RNA, 19 nt, Homo sapiens
  misc_RNA (1)...(19): siRNA sense strand
gcaaagagaauaaaagcua

SEQ ID NO: 426417 - RNA, 19 nt, Homo sapiens
  misc_RNA (1)...(19): siRNA sense strand
gcaaucaguagaagaguug

SEQ ID NO: 426418 - RNA, 19 nt, Homo sapiens
  misc_RNA (1)...(19): siRNA sense strand
ccucuuauuugcugugaaa

SEQ ID NO: 426419 - RNA, 19 nt, Homo sapiens
  misc_RNA (1)...(19): siRNA sense strand
gauuugagauucacagcau

SEQ ID NO: 426420 - RNA, 19 nt, Homo sapiens
  misc_RNA (1)...(19): siRNA sense strand
gaagcugcacugaagaauu

SEQ ID NO: 426421 - RNA, 19 nt, Homo sapiens
  misc_RNA (1)...(19): siRNA sense strand
caagauaggguaugauuac

SEQ ID NO: 426422 - RNA, 19 nt, Homo sapiens
  misc_RNA (1)...(19): siRNA sense strand
gggcauuccuccaaguaga

SEQ ID NO: 426423 - RNA, 19 nt, Homo sapiens
  misc_RNA (1)...(19): siRNA sense strand
ggaccgaaggacacauaua

SEQ ID NO: 426424 - RNA, 19 nt, Homo sapiens
  misc_RNA (1)...(19): siRNA sense strand
uaagcccacuucagacaaa

SEQ ID NO: 426425 - RNA, 19 nt, Homo sapiens
  misc_RNA (1)...(19): siRNA sense strand
guaacugacuauacuacug

SEQ ID NO: 426426 - RNA, 19 nt, Homo sapiens
  misc_RNA (1)...(19): siRNA sense strand
aagacugcauuguuagaua

SEQ ID NO: 426427 - RNA, 19 nt, Homo sapiens
  misc_RNA (1)...(19): siRNA sense strand
aagcugaaauacugaaaga

SEQ ID NO: 426428 - RNA, 19 nt, Homo sapiens
  misc_RNA (1)...(19): siRNA sense strand
gaaagaucuagugaaguua

SEQ ID NO: 426429 - RNA, 19 nt, Homo sapiens
  misc_RNA (1)...(19): siRNA sense strand
agacaucccuggagcagau

SEQ ID NO: 426430 - RNA, 19 nt, Homo sapiens
  misc_RNA (1)...(19): siRNA sense strand
gcgguuauacaauuaauga

SEQ ID NO: 426431 - RNA, 19 nt, Homo sapiens
  misc_RNA (1)...(19): siRNA sense strand
guuauggacugacagaauc

SEQ ID NO: 426432 - RNA, 19 nt, Homo sapiens
  misc_RNA (1)...(19): siRNA sense strand
gcaccucuuugcaaucugu

SEQ ID NO: 426433 - RNA, 19 nt, Homo sapiens
  misc_RNA (1)...(19): siRNA sense strand
ucagacauggccauuguua

SEQ ID NO: 426434 - RNA, 19 nt, Homo sapiens
  misc_RNA (1)...(19): siRNA sense strand
gugaaucgcagagugaaua

SEQ ID NO: 426435 - RNA, 19 nt, Homo sapiens
  misc_RNA (1)...(19): siRNA sense strand
uuugauagcuggaaugaca

SEQ ID NO: 426436 - RNA, 19 nt, Homo sapiens
  misc_RNA (1)...(19): siRNA sense strand
cagaguacccugaaggauu

SEQ ID NO: 426437 - RNA, 19 nt, Homo sapiens
  misc_RNA (1)...(19): siRNA sense strand
caacuuuccucuugugacu

SEQ ID NO: 426438 - RNA, 19 nt, Homo sapiens
  misc_RNA (1)...(19): siRNA sense strand
caaauuggaacagaucaaa

SEQ ID NO: 426439 - RNA, 19 nt, Homo sapiens
  misc_RNA (1)...(19): siRNA sense strand
gauuacaaauuggaacaga

SEQ ID NO: 426440 - RNA, 19 nt, Homo sapiens
  misc_RNA (1)...(19): siRNA sense strand
ucacugcacugggacuaaa

SEQ ID NO: 426441 - RNA, 19 nt, Homo sapiens
  misc_RNA (1)...(19): siRNA sense strand
gccuuuggcucaugugcua

SEQ ID NO: 426442 - RNA, 19 nt, Homo sapiens
  misc_RNA (1)...(19): siRNA sense strand
agacugcauuguuagauau

SEQ ID NO: 426443 - RNA, 19 nt, Homo sapiens
  misc_RNA (1)...(19): siRNA sense strand
gauuaccaguguugaacuu

SEQ ID NO: 426444 - RNA, 19 nt, Homo sapiens
  misc_RNA (1)...(19): siRNA sense strand
ccauugccaucuucuguga

SEQ ID NO: 426445 - RNA, 19 nt, Homo sapiens
  misc_RNA (1)...(19): siRNA sense strand
gauaucaguuguguuaaac

SEQ ID NO: 426446 - RNA, 19 nt, Homo sapiens
  misc_RNA (1)...(19): siRNA sense strand
aaagugaucaguccuaugu

SEQ ID NO: 426447 - RNA, 19 nt, Homo sapiens
  misc_RNA (1)...(19): siRNA sense strand
aguagaagcugcacugaag

SEQ ID NO: 426448 - RNA, 19 nt, Homo sapiens
  misc_RNA (1)...(19): siRNA sense strand
guaagaaagaucuagugaa

SEQ ID NO: 426449 - RNA, 19 nt, Homo sapiens
  misc_RNA (1)...(19): siRNA sense strand
ggaaauccuaagugaagaa

SEQ ID NO: 426450 - RNA, 19 nt, Homo sapiens
  misc_RNA (1)...(19): siRNA sense strand
cgacucacuagcuguaaua

SEQ ID NO: 426451 - RNA, 19 nt, Homo sapiens
  misc_RNA (1)...(19): siRNA sense strand
gauaugaugcaccucuuug

SEQ ID NO: 426452 - RNA, 19 nt, Homo sapiens
  misc_RNA (1)...(19): siRNA sense strand
aagcuaagcccacuucaga

SEQ ID NO: 426453 - RNA, 19 nt, Homo sapiens
  misc_RNA (1)...(19): siRNA sense strand
ccgaaggacacauauauug

SEQ ID NO: 426454 - RNA, 19 nt, Homo sapiens
  misc_RNA (1)...(19): siRNA sense strand
agacauggccauuguuaug

SEQ ID NO: 426455 - RNA, 19 nt, Homo sapiens
  misc_RNA (1)...(19): siRNA sense strand
uaacugaugcuuucaaacu

SEQ ID NO: 426456 - RNA, 19 nt, Homo sapiens
  misc_RNA (1)...(19): siRNA sense strand
cugcaaaugccaugaaauu

SEQ ID NO: 426457 - RNA, 19 nt, Homo sapiens
  misc_RNA (1)...(19): siRNA sense strand
aguccuaugugaucaguuu

SEQ ID NO: 426458 - RNA, 19 nt, Homo sapiens
  misc_RNA (1)...(19): siRNA sense strand
gaaauccuaagugaagaaa

SEQ ID NO: 426459 - RNA, 19 nt, Homo sapiens
  misc_RNA (1)...(19): siRNA sense strand
gcagagauaucuugcuuua

SEQ ID NO: 426460 - RNA, 19 nt, Homo sapiens
  misc_RNA (1)...(19): siRNA sense strand
gcacagaccugcuuuaagu

SEQ ID NO: 426461 - RNA, 19 nt, Homo sapiens
  misc_RNA (1)...(19): siRNA sense strand
gaaggcgguuauacaauua

SEQ ID NO: 426462 - RNA, 19 nt, Homo sapiens
  misc_RNA (1)...(19): siRNA sense strand
gaagaauuguccacuuauu

SEQ ID NO: 426463 - RNA, 19 nt, Homo sapiens
  misc_RNA (1)...(19): siRNA sense strand
gaaggaacuuggguugaua

SEQ ID NO: 426464 - RNA, 19 nt, Homo sapiens
  misc_RNA (1)...(19): siRNA sense strand
gauaggguaugauuacaaa

SEQ ID NO: 426465 - RNA, 19 nt, Homo sapiens
  misc_RNA (1)...(19): siRNA sense strand
gaacuuggguugauaucug

SEQ ID NO: 426466 - RNA, 19 nt, Homo sapiens
  misc_RNA (1)...(19): siRNA sense strand
agaaagaucuagugaaguu

SEQ ID NO: 426467 - RNA, 19 nt, Homo sapiens
  misc_RNA (1)...(19): siRNA sense strand
guacugaagcccacacuua

SEQ ID NO: 426468 - RNA, 19 nt, Homo sapiens
  misc_RNA (1)...(19): siRNA sense strand
uaagaaagaucuagugaag

SEQ ID NO: 426469 - RNA, 19 nt, Homo sapiens
  misc_RNA (1)...(19): siRNA sense strand
gauggauguuuacagauua

SEQ ID NO: 426470 - RNA, 19 nt, Homo sapiens
  misc_RNA (1)...(19): siRNA sense strand
caaaggagacuguacugua

SEQ ID NO: 426471 - RNA, 19 nt, Homo sapiens
  misc_RNA (1)...(19): siRNA sense strand
guugauaucugcaauaauc

SEQ ID NO: 426472 - RNA, 19 nt, Homo sapiens
  misc_RNA (1)...(19): siRNA sense strand
guauguaucucuugggaaa

SEQ ID NO: 426473 - RNA, 19 nt, Homo sapiens
  misc_RNA (1)...(19): siRNA sense strand
gcaauaauccugcuaugga

SEQ ID NO: 426474 - RNA, 19 nt, Homo sapiens
  misc_RNA (1)...(19): siRNA sense strand
gaacaccauugccaucuuc

SEQ ID NO: 426475 - RNA, 19 nt, Homo sapiens
  misc_RNA (1)...(19): siRNA sense strand
gacaauaaggcuaucaaua

SEQ ID NO: 426476 - RNA, 19 nt, Homo sapiens
  misc_RNA (1)...(19): siRNA sense strand
gaugaacuaucuugaagug

SEQ ID NO: 426477 - RNA, 19 nt, Homo sapiens
  misc_RNA (1)...(19): siRNA sense strand
gaaagaaauucgagaagcu

SEQ ID NO: 426478 - RNA, 19 nt, Homo sapiens
  misc_RNA (1)...(19): siRNA sense strand
ccagggaaauccuaaguga

SEQ ID NO: 426479 - RNA, 19 nt, Homo sapiens
  misc_RNA (1)...(19): siRNA sense strand
ggaaggagcugaggaacca

SEQ ID NO: 426480 - RNA, 19 nt, Homo sapiens
  misc_RNA (1)...(19): siRNA sense strand
cugaagaauuguccacuua

SEQ ID NO: 426481 - RNA, 19 nt, Homo sapiens
  misc_RNA (1)...(19): siRNA sense strand
gaaaugcagccaaauggaa

SEQ ID NO: 426482 - RNA, 19 nt, Homo sapiens
  misc_RNA (1)...(19): siRNA sense strand
caaaugccaugaaauugga

SEQ ID NO: 426483 - RNA, 19 nt, Homo sapiens
  misc_RNA (1)...(19): siRNA sense strand
agaaggcgguuauacaauu

SEQ ID NO: 426484 - RNA, 19 nt, Homo sapiens
  misc_RNA (1)...(19): siRNA sense strand
gcugugaaauuaagcuaaa

SEQ ID NO: 426485 - RNA, 19 nt, Homo sapiens
  misc_RNA (1)...(19): siRNA sense strand
ugaacuaucuugaagugaa

SEQ ID NO: 426486 - RNA, 19 nt, Homo sapiens
  misc_RNA (1)...(19): siRNA sense strand
gugaauaacuuugguagug

SEQ ID NO: 426487 - RNA, 19 nt, Homo sapiens
  misc_RNA (1)...(19): siRNA sense strand
gaacuaucuugaagugaau

SEQ ID NO: 426488 - RNA, 19 nt, Homo sapiens
  misc_RNA (1)...(19): siRNA sense strand
agaguacccugaaggauuu

SEQ ID NO: 426489 - RNA, 19 nt, Homo sapiens
  misc_RNA (1)...(19): siRNA sense strand
gcaagaaggcgguuauaca

SEQ ID NO: 426490 - RNA, 19 nt, Homo sapiens
  misc_RNA (1)...(19): siRNA sense strand
gaagugaaucgcagaguga

SEQ ID NO: 426491 - RNA, 19 nt, Homo sapiens
  misc_RNA (1)...(19): siRNA sense strand
gguaacugaugcuuucaaa

SEQ ID NO: 426492 - RNA, 19 nt, Homo sapiens
  misc_RNA (1)...(19): siRNA sense strand
gaacaucuccaugggauau

SEQ ID NO: 426493 - RNA, 19 nt, Homo sapiens
  misc_RNA (1)...(19): siRNA sense strand
gcaaucuguuacuguuuaa

SEQ ID NO: 426494 - RNA, 19 nt, Homo sapiens
  misc_RNA (1)...(19): siRNA sense strand
ggauauucuucuccgcuua

SEQ ID NO: 426495 - RNA, 19 nt, Homo sapiens
  misc_RNA (1)...(19): siRNA sense strand
gagcaaaguccaagagaug

SEQ ID NO: 426496 - RNA, 19 nt, Homo sapiens
  misc_RNA (1)...(19): siRNA sense strand
gcugaaauacugaaagaaa

SEQ ID NO: 426497 - RNA, 19 nt, Homo sapiens
  misc_RNA (1)...(19): siRNA sense strand
uauggaagcugaaauacug

SEQ ID NO: 426498 - RNA, 19 nt, Homo sapiens
  misc_RNA (1)...(19): siRNA sense strand
caauaauccugcuauggaa

SEQ ID NO: 426499 - RNA, 19 nt, Homo sapiens
  misc_RNA (1)...(19): siRNA sense strand
aagcugcacugaagaauug

SEQ ID NO: 426500 - RNA, 19 nt, Homo sapiens
  misc_RNA (1)...(19): siRNA sense strand
cgauggauguuuacagauu

SEQ ID NO: 426501 - RNA, 19 nt, Homo sapiens
  misc_RNA (1)...(19): siRNA sense strand
gaaaacagcagaagauuau

SEQ ID NO: 426502 - RNA, 19 nt, Homo sapiens
  misc_RNA (1)...(19): siRNA sense strand
caagaaggcgguuauacaa

SEQ ID NO: 426503 - RNA, 19 nt, Homo sapiens
  misc_RNA (1)...(19): siRNA sense strand
gaggcuuccuaucugauua

SEQ ID NO: 426504 - RNA, 19 nt, Homo sapiens
  misc_RNA (1)...(19): siRNA sense strand
acuuaagacugcauuguua

SEQ ID NO: 426505 - RNA, 19 nt, Homo sapiens
  misc_RNA (1)...(19): siRNA sense strand
ggaaaucauggauagaauu

SEQ ID NO: 426506 - RNA, 19 nt, Homo sapiens
  misc_RNA (1)...(19): siRNA sense strand
ggguugauaucugcaauaa

SEQ ID NO: 426507 - RNA, 19 nt, Homo sapiens
  misc_RNA (1)...(19): siRNA sense strand
gaggugaaaucguaauugg

SEQ ID NO: 426508 - RNA, 19 nt, Homo sapiens
  misc_RNA (1)...(19): siRNA sense strand
gcaaagaagcaguaguuca

SEQ ID NO: 426509 - RNA, 19 nt, Homo sapiens
  misc_RNA (1)...(19): siRNA sense strand
gcaaaugccaugaaauugg

SEQ ID NO: 426510 - RNA, 19 nt, Homo sapiens
  misc_RNA (1)...(19): siRNA sense strand
ugcaaucuguuacuguuua

SEQ ID NO: 426511 - RNA, 19 nt, Homo sapiens
  misc_RNA (1)...(19): siRNA sense strand
acacauauauuggcuacuu

SEQ ID NO: 426512 - RNA, 19 nt, Homo sapiens
  misc_RNA (1)...(19): siRNA sense strand
caaagaagcaguaguucau

SEQ ID NO: 426513 - RNA, 19 nt, Homo sapiens
  misc_RNA (1)...(19): siRNA sense strand
gaacugacagcagagauau

SEQ ID NO: 426514 - RNA, 19 nt, Homo sapiens
  misc_RNA (1)...(19): siRNA sense strand
gaccgaaggacacauauau

SEQ ID NO: 426515 - RNA, 19 nt, Homo sapiens
  misc_RNA (1)...(19): siRNA sense strand
gcaauuugauagcuggaau

SEQ ID NO: 426516 - RNA, 19 nt, Homo sapiens
  misc_RNA (1)...(19): siRNA sense strand
gcaaucaguagaagaguug

SEQ ID NO: 426517 - RNA, 19 nt, Homo sapiens
  misc_RNA (1)...(19): siRNA sense strand
gcaaagagaauaaaagcua

SEQ ID NO: 426518 - RNA, 19 nt, Homo sapiens
  misc_RNA (1)...(19): siRNA sense strand
ccucuuauuugcugugaaa

SEQ ID NO: 426519 - RNA, 19 nt, Homo sapiens
  misc_RNA (1)...(19): siRNA sense strand
gauuugagauucacagcau

SEQ ID NO: 426520 - RNA, 19 nt, Homo sapiens
  misc_RNA (1)...(19): siRNA sense strand
gaagcugcacugaagaauu

SEQ ID NO: 426521 - RNA, 19 nt, Homo sapiens
  misc_RNA (1)...(19): siRNA sense strand
caagauaggguaugauuac

SEQ ID NO: 426522 - RNA, 19 nt, Homo sapiens
  misc_RNA (1)...(19): siRNA sense strand
gggcauuccuccaaguaga

SEQ ID NO: 426523 - RNA, 19 nt, Homo sapiens
  misc_RNA (1)...(19): siRNA sense strand
ggaccgaaggacacauaua

SEQ ID NO: 426524 - RNA, 19 nt, Homo sapiens
  misc_RNA (1)...(19): siRNA sense strand
uaagcccacuucagacaaa

SEQ ID NO: 426525 - RNA, 19 nt, Homo sapiens
  misc_RNA (1)...(19): siRNA sense strand
guaacugacuauacuacug

SEQ ID NO: 426526 - RNA, 19 nt, Homo sapiens
  misc_RNA (1)...(19): siRNA sense strand
aagacugcauuguuagaua

SEQ ID NO: 426527 - RNA, 19 nt, Homo sapiens
  misc_RNA (1)...(19): siRNA sense strand
agacaucccuggagcagau

SEQ ID NO: 426528 - RNA, 19 nt, Homo sapiens
  misc_RNA (1)...(19): siRNA sense strand
aagcugaaauacugaaaga

SEQ ID NO: 426529 - RNA, 19 nt, Homo sapiens
  misc_RNA (1)...(19): siRNA sense strand
gaaagaucuagugaaguua

SEQ ID NO: 426530 - RNA, 19 nt, Homo sapiens
  misc_RNA (1)...(19): siRNA sense strand
gcgguuauacaauuaauga

SEQ ID NO: 426531 - RNA, 19 nt, Homo sapiens
  misc_RNA (1)...(19): siRNA sense strand
guuauggacugacagaauc

SEQ ID NO: 426532 - RNA, 19 nt, Homo sapiens
  misc_RNA (1)...(19): siRNA sense strand
gcaccucuuugcaaucugu

SEQ ID NO: 426533 - RNA, 19 nt, Homo sapiens
  misc_RNA (1)...(19): siRNA sense strand
ucagacauggccauuguua

SEQ ID NO: 426534 - RNA, 19 nt, Homo sapiens
  misc_RNA (1)...(19): siRNA sense strand
gugaaucgcagagugaaua

SEQ ID NO: 426535 - RNA, 19 nt, Homo sapiens
  misc_RNA (1)...(19): siRNA sense strand
uuugauagcuggaaugaca

SEQ ID NO: 426536 - RNA, 19 nt, Homo sapiens
  misc_RNA (1)...(19): siRNA sense strand
cagaguacccugaaggauu

SEQ ID NO: 426537 - RNA, 19 nt, Homo sapiens
  misc_RNA (1)...(19): siRNA sense strand
caacuuuccucuugugacu

SEQ ID NO: 426538 - RNA, 19 nt, Homo sapiens
  misc_RNA (1)...(19): siRNA sense strand
caaauuggaacagaucaaa

SEQ ID NO: 426539 - RNA, 19 nt, Homo sapiens
  misc_RNA (1)...(19): siRNA sense strand
gauuacaaauuggaacaga

SEQ ID NO: 426540 - RNA, 19 nt, Homo sapiens
  misc_RNA (1)...(19): siRNA sense strand
ucacugcacugggacuaaa

SEQ ID NO: 426541 - RNA, 19 nt, Homo sapiens
  misc_RNA (1)...(19): siRNA sense strand
gccuuuggcucaugugcua

SEQ ID NO: 426542 - RNA, 19 nt, Homo sapiens
  misc_RNA (1)...(19): siRNA sense strand
agacugcauuguuagauau

SEQ ID NO: 426543 - RNA, 19 nt, Homo sapiens
  misc_RNA (1)...(19): siRNA sense strand
gauuaccaguguugaacuu

SEQ ID NO: 426544 - RNA, 19 nt, Homo sapiens
  misc_RNA (1)...(19): siRNA sense strand
ccauugccaucuucuguga

SEQ ID NO: 426545 - RNA, 19 nt, Homo sapiens
  misc_RNA (1)...(19): siRNA sense strand
aagcuaagcccacuucaga

SEQ ID NO: 426546 - RNA, 19 nt, Homo sapiens
  misc_RNA (1)...(19): siRNA sense strand
aaagugaucaguccuaugu

SEQ ID NO: 426547 - RNA, 19 nt, Homo sapiens
  misc_RNA (1)...(19): siRNA sense strand
aguagaagcugcacugaag

SEQ ID NO: 426548 - RNA, 19 nt, Homo sapiens
  misc_RNA (1)...(19): siRNA sense strand
guaagaaagaucuagugaa

SEQ ID NO: 426549 - RNA, 19 nt, Homo sapiens
  misc_RNA (1)...(19): siRNA sense strand
cgacucacuagcuguaaua

SEQ ID NO: 426550 - RNA, 19 nt, Homo sapiens
  misc_RNA (1)...(19): siRNA sense strand
gauaugaugcaccucuuug

SEQ ID NO: 426551 - RNA, 19 nt, Homo sapiens
  misc_RNA (1)...(19): siRNA sense strand
ggaaauccuaagugaagaa

SEQ ID NO: 426552 - RNA, 19 nt, Homo sapiens
  misc_RNA (1)...(19): siRNA sense strand
ccgaaggacacauauauug

SEQ ID NO: 426553 - RNA, 19 nt, Homo sapiens
  misc_RNA (1)...(19): siRNA sense strand
gauaucaguuguguuaaac

SEQ ID NO: 426554 - RNA, 19 nt, Homo sapiens
  misc_RNA (1)...(19): siRNA sense strand
agacauggccauuguuaug

SEQ ID NO: 426555 - RNA, 19 nt, Homo sapiens
  misc_RNA (1)...(19): siRNA sense strand
uaacugaugcuuucaaacu

SEQ ID NO: 426556 - RNA, 19 nt, Homo sapiens
  misc_RNA (1)...(19): siRNA sense strand
cugcaaaugccaugaaauu

SEQ ID NO: 426557 - RNA, 19 nt, Homo sapiens
  misc_RNA (1)...(19): siRNA sense strand
aguccuaugugaucaguuu

SEQ ID NO: 426558 - RNA, 19 nt, Homo sapiens
  misc_RNA (1)...(19): siRNA sense strand
ucaagauaggguaugauua

SEQ ID NO: 426559 - RNA, 19 nt, Homo sapiens
  misc_RNA (1)...(19): siRNA sense strand
gaaauuagcaagggaaaga

SEQ ID NO: 426560 - RNA, 19 nt, Homo sapiens
  misc_RNA (1)...(19): siRNA sense strand
cagcauaacuccuaucucu

SEQ ID NO: 426561 - RNA, 19 nt, Homo sapiens
  misc_RNA (1)...(19): siRNA sense strand
gaaagaggauagcuugacu

SEQ ID NO: 426562 - RNA, 19 nt, Homo sapiens
  misc_RNA (1)...(19): siRNA sense strand
ggaaagaggaaagaggaua

SEQ ID NO: 426563 - RNA, 19 nt, Homo sapiens
  misc_RNA (1)...(19): siRNA sense strand
ggaaaucaacgagaacuug

SEQ ID NO: 426564 - RNA, 19 nt, Homo sapiens
  misc_RNA (1)...(19): siRNA sense strand
gaagaaaacccaggaaauu

SEQ ID NO: 426565 - RNA, 19 nt, Homo sapiens
  misc_RNA (1)...(19): siRNA sense strand
gguauuacuuggcuuaugg

SEQ ID NO: 426566 - RNA, 19 nt, Homo sapiens
  misc_RNA (1)...(19): siRNA sense strand
gaaagaggaaagaggauag

SEQ ID NO: 426567 - RNA, 19 nt, Homo sapiens
  misc_RNA (1)...(19): siRNA sense strand
ggccacaccucccucugaa

SEQ ID NO: 426568 - RNA, 19 nt, Homo sapiens
  misc_RNA (1)...(19): siRNA sense strand
ccagguauuacuuggcuua

SEQ ID NO: 426569 - RNA, 19 nt, Homo sapiens
  misc_RNA (1)...(19): siRNA sense strand
ggagaauccuugcuuuccu

SEQ ID NO: 426570 - RNA, 19 nt, Homo sapiens
  misc_RNA (1)...(19): siRNA sense strand
uaucucugccuuugucuuu

SEQ ID NO: 426571 - RNA, 19 nt, Homo sapiens
  misc_RNA (1)...(19): siRNA sense strand
gcaagggaaagaggaaaga

SEQ ID NO: 426572 - RNA, 19 nt, Homo sapiens
  misc_RNA (1)...(19): siRNA sense strand
aauccuugcuuuccucuuc

SEQ ID NO: 426573 - RNA, 19 nt, Homo sapiens
  misc_RNA (1)...(19): siRNA sense strand
ggaaagaggauagcuugac

SEQ ID NO: 426574 - RNA, 19 nt, Homo sapiens
  misc_RNA (1)...(19): siRNA sense strand
ccguggaaaucaacgagaa

SEQ ID NO: 426575 - RNA, 19 nt, Homo sapiens
  misc_RNA (1)...(19): siRNA sense strand
gacuuuugcuguuggauuu

SEQ ID NO: 426576 - RNA, 19 nt, Homo sapiens
  misc_RNA (1)...(19): siRNA sense strand
aagaaaacccaggaaauua

SEQ ID NO: 426577 - RNA, 19 nt, Homo sapiens
  misc_RNA (1)...(19): siRNA sense strand
acuccuaucucugccuuug

SEQ ID NO: 426578 - RNA, 19 nt, Homo sapiens
  misc_RNA (1)...(19): siRNA sense strand
ucucugccuuugucuuugu

SEQ ID NO: 426579 - RNA, 19 nt, Homo sapiens
  misc_RNA (1)...(19): siRNA sense strand
gaaaguaucucuaugguuu

SEQ ID NO: 426580 - RNA, 19 nt, Homo sapiens
  misc_RNA (1)...(19): siRNA sense strand
ggaagaaacugaaagcaaa

SEQ ID NO: 426581 - RNA, 19 nt, Homo sapiens
  misc_RNA (1)...(19): siRNA sense strand
gagaauugcucgagaugua

SEQ ID NO: 426582 - RNA, 19 nt, Homo sapiens
  misc_RNA (1)...(19): siRNA sense strand
uaacagaagugaagaguga

SEQ ID NO: 426583 - RNA, 19 nt, Homo sapiens
  misc_RNA (1)...(19): siRNA sense strand
gaaccaaagugaaaguaaa

SEQ ID NO: 426584 - RNA, 19 nt, Homo sapiens
  misc_RNA (1)...(19): siRNA sense strand
gaaaggacauuaaggaagu

SEQ ID NO: 426585 - RNA, 19 nt, Homo sapiens
  misc_RNA (1)...(19): siRNA sense strand
ggacaaagguggaccaaag

SEQ ID NO: 426586 - RNA, 19 nt, Homo sapiens
  misc_RNA (1)...(19): siRNA sense strand
gguacaagaugaccaagua

SEQ ID NO: 426587 - RNA, 19 nt, Homo sapiens
  misc_RNA (1)...(19): siRNA sense strand
gagcgaacauugagacgua

SEQ ID NO: 426588 - RNA, 19 nt, Homo sapiens
  misc_RNA (1)...(19): siRNA sense strand
ggauguagaugaugacuau

SEQ ID NO: 426589 - RNA, 19 nt, Homo sapiens
  misc_RNA (1)...(19): siRNA sense strand
ggugaaggcugacaggaua

SEQ ID NO: 426590 - RNA, 19 nt, Homo sapiens
  misc_RNA (1)...(19): siRNA sense strand
aaucugagcucuccacuaa

SEQ ID NO: 426591 - RNA, 19 nt, Homo sapiens
  misc_RNA (1)...(19): siRNA sense strand
cagaagaaguuaagaaaga

SEQ ID NO: 426592 - RNA, 19 nt, Homo sapiens
  misc_RNA (1)...(19): siRNA sense strand
gaaagcaagcaucuucuua

SEQ ID NO: 426593 - RNA, 19 nt, Homo sapiens
  misc_RNA (1)...(19): siRNA sense strand
ggagaggacugaaugguau

SEQ ID NO: 426594 - RNA, 19 nt, Homo sapiens
  misc_RNA (1)...(19): siRNA sense strand
gaagugaaccucauauaga

SEQ ID NO: 426595 - RNA, 19 nt, Homo sapiens
  misc_RNA (1)...(19): siRNA sense strand
ggacucaaaugcagccuuu

SEQ ID NO: 426596 - RNA, 19 nt, Homo sapiens
  misc_RNA (1)...(19): siRNA sense strand
gaauggaaaugacaaauac

SEQ ID NO: 426597 - RNA, 19 nt, Homo sapiens
  misc_RNA (1)...(19): siRNA sense strand
uaaagaagauagugaagug

SEQ ID NO: 426598 - RNA, 19 nt, Homo sapiens
  misc_RNA (1)...(19): siRNA sense strand
ggaauggaaaugacaaaua

SEQ ID NO: 426599 - RNA, 19 nt, Homo sapiens
  misc_RNA (1)...(19): siRNA sense strand
ggaagcaaauuuauaugga

SEQ ID NO: 426600 - RNA, 19 nt, Homo sapiens
  misc_RNA (1)...(19): siRNA sense strand
ccaaagauuucugcacaua

SEQ ID NO: 426601 - RNA, 19 nt, Homo sapiens
  misc_RNA (1)...(19): siRNA sense strand
agaaaugccuuuaacagaa

SEQ ID NO: 426602 - RNA, 19 nt, Homo sapiens
  misc_RNA (1)...(19): siRNA sense strand
gaaaggaccagugauugua

SEQ ID NO: 426603 - RNA, 19 nt, Homo sapiens
  misc_RNA (1)...(19): siRNA sense strand
ucugguaccuguaguauaa

SEQ ID NO: 426604 - RNA, 19 nt, Homo sapiens
  misc_RNA (1)...(19): siRNA sense strand
ggaagaacuugauccugaa

SEQ ID NO: 426605 - RNA, 19 nt, Homo sapiens
  misc_RNA (1)...(19): siRNA sense strand
caacauaacuuuucaguag

SEQ ID NO: 426606 - RNA, 19 nt, Homo sapiens
  misc_RNA (1)...(19): siRNA sense strand
gaacuccaguaauugcaaa

SEQ ID NO: 426607 - RNA, 19 nt, Homo sapiens
  misc_RNA (1)...(19): siRNA sense strand
ugaagaaucucaagaaggu

SEQ ID NO: 426608 - RNA, 19 nt, Homo sapiens
  misc_RNA (1)...(19): siRNA sense strand
gaaaugccuuuaacagaag

SEQ ID NO: 426609 - RNA, 19 nt, Homo sapiens
  misc_RNA (1)...(19): siRNA sense strand
gaccuuggcauuccuauuu

SEQ ID NO: 426610 - RNA, 19 nt, Homo sapiens
  misc_RNA (1)...(19): siRNA sense strand
ggaaauaguggauuaaugg

SEQ ID NO: 426611 - RNA, 19 nt, Homo sapiens
  misc_RNA (1)...(19): siRNA sense strand
ggaaaugacaaauacugua

SEQ ID NO: 426612 - RNA, 19 nt, Homo sapiens
  misc_RNA (1)...(19): siRNA sense strand
ggacaaucaucgccagaga

SEQ ID NO: 426613 - RNA, 19 nt, Homo sapiens
  misc_RNA (1)...(19): siRNA sense strand
aaucaacccucucaucaaa

SEQ ID NO: 426614 - RNA, 19 nt, Homo sapiens
  misc_RNA (1)...(19): siRNA sense strand
ggaaauugaagaagagaaa

SEQ ID NO: 426615 - RNA, 19 nt, Homo sapiens
  misc_RNA (1)...(19): siRNA sense strand
ugauggaaauaguggauua

SEQ ID NO: 426616 - RNA, 19 nt, Homo sapiens
  misc_RNA (1)...(19): siRNA sense strand
caagaaaggaccagugauu

SEQ ID NO: 426617 - RNA, 19 nt, Homo sapiens
  misc_RNA (1)...(19): siRNA sense strand
uauagaagcucauagucuu

SEQ ID NO: 426618 - RNA, 19 nt, Homo sapiens
  misc_RNA (1)...(19): siRNA sense strand
uagaaacccugaaguuaga

SEQ ID NO: 426619 - RNA, 19 nt, Homo sapiens
  misc_RNA (1)...(19): siRNA sense strand
ugaaacagaagaugcuuua

SEQ ID NO: 426620 - RNA, 19 nt, Homo sapiens
  misc_RNA (1)...(19): siRNA sense strand
aaacaugccguauggcuua

SEQ ID NO: 426621 - RNA, 19 nt, Homo sapiens
  misc_RNA (1)...(19): siRNA sense strand
ggaaguagacauucucaau

SEQ ID NO: 426622 - RNA, 19 nt, Homo sapiens
  misc_RNA (1)...(19): siRNA sense strand
gaaguagauuuggaugauu

SEQ ID NO: 426623 - RNA, 19 nt, Homo sapiens
  misc_RNA (1)...(19): siRNA sense strand
uggagagaaugaacaaaua

SEQ ID NO: 426624 - RNA, 19 nt, Homo sapiens
  misc_RNA (1)...(19): siRNA sense strand
ugacaaagacucagaugaa

SEQ ID NO: 426625 - RNA, 19 nt, Homo sapiens
  misc_RNA (1)...(19): siRNA sense strand
gaucaagaaaugccuuuaa

SEQ ID NO: 426626 - RNA, 19 nt, Homo sapiens
  misc_RNA (1)...(19): siRNA sense strand
caagaaaggacauuaagga

SEQ ID NO: 426627 - RNA, 19 nt, Homo sapiens
  misc_RNA (1)...(19): siRNA sense strand
cagcagcuuuauaaguuua

SEQ ID NO: 426628 - RNA, 19 nt, Homo sapiens
  misc_RNA (1)...(19): siRNA sense strand
caucaaacaugccguaugg

SEQ ID NO: 426629 - RNA, 19 nt, Homo sapiens
  misc_RNA (1)...(19): siRNA sense strand
ugaaauugaugacggagaa

SEQ ID NO: 426630 - RNA, 19 nt, Homo sapiens
  misc_RNA (1)...(19): siRNA sense strand
cuaugaaacugcagagaaa

SEQ ID NO: 426631 - RNA, 19 nt, Homo sapiens
  misc_RNA (1)...(19): siRNA sense strand
gcaaauauucaguucagaa

SEQ ID NO: 426632 - RNA, 19 nt, Homo sapiens
  misc_RNA (1)...(19): siRNA sense strand
gguauaccgugguguuuga

SEQ ID NO: 426633 - RNA, 19 nt, Homo sapiens
  misc_RNA (1)...(19): siRNA sense strand
cgauugaaguugauaguau

SEQ ID NO: 426634 - RNA, 19 nt, Homo sapiens
  misc_RNA (1)...(19): siRNA sense strand
gaaugaagcaggaagugaa

SEQ ID NO: 426635 - RNA, 19 nt, Homo sapiens
  misc_RNA (1)...(19): siRNA sense strand
guaccgaggugccuucugu

SEQ ID NO: 426636 - RNA, 19 nt, Homo sapiens
  misc_RNA (1)...(19): siRNA sense strand
ccacacaauugguacaaga

SEQ ID NO: 426637 - RNA, 19 nt, Homo sapiens
  misc_RNA (1)...(19): siRNA sense strand
ucaguagcuucaccacuua

SEQ ID NO: 426638 - RNA, 19 nt, Homo sapiens
  misc_RNA (1)...(19): siRNA sense strand
gaucuucucuuccuguuac

SEQ ID NO: 426639 - RNA, 19 nt, Homo sapiens
  misc_RNA (1)...(19): siRNA sense strand
cuaacucucuuguuucuau

SEQ ID NO: 426640 - RNA, 19 nt, Homo sapiens
  misc_RNA (1)...(19): siRNA sense strand
guugaaagcucugagucua

SEQ ID NO: 426641 - RNA, 19 nt, Homo sapiens
  misc_RNA (1)...(19): siRNA sense strand
ggaagugaaccucauauag

SEQ ID NO: 426642 - RNA, 19 nt, Homo sapiens
  misc_RNA (1)...(19): siRNA sense strand
caaaugcagccuuuagaaa

SEQ ID NO: 426643 - RNA, 19 nt, Homo sapiens
  misc_RNA (1)...(19): siRNA sense strand
aacagaagaugcuuuagaa

SEQ ID NO: 426644 - RNA, 19 nt, Homo sapiens
  misc_RNA (1)...(19): siRNA sense strand
gauaauaccacacaauugg

SEQ ID NO: 426645 - RNA, 19 nt, Homo sapiens
  misc_RNA (1)...(19): siRNA sense strand
caacaacugacuagugaaa

SEQ ID NO: 426646 - RNA, 19 nt, Homo sapiens
  misc_RNA (1)...(19): siRNA sense strand
guguuuaguucgaucauuu

SEQ ID NO: 426647 - RNA, 19 nt, Homo sapiens
  misc_RNA (1)...(19): siRNA sense strand
gagaauggaauggaaauga

SEQ ID NO: 426648 - RNA, 19 nt, Homo sapiens
  misc_RNA (1)...(19): siRNA sense strand
agacucagaugaagaggaa

SEQ ID NO: 426649 - RNA, 19 nt, Homo sapiens
  misc_RNA (1)...(19): siRNA sense strand
gcaaagauuaagacuguga

SEQ ID NO: 426650 - RNA, 19 nt, Homo sapiens
  misc_RNA (1)...(19): siRNA sense strand
aagcaagcaucuucuuaaa

SEQ ID NO: 426651 - RNA, 19 nt, Homo sapiens
  misc_RNA (1)...(19): siRNA sense strand
agaaagcagugaagaggaa

SEQ ID NO: 426652 - RNA, 19 nt, Homo sapiens
  misc_RNA (1)...(19): siRNA sense strand
aggcaaagauuaagacugu

SEQ ID NO: 426653 - RNA, 19 nt, Homo sapiens
  misc_RNA (1)...(19): siRNA sense strand
gaagacagagguacuccaa

SEQ ID NO: 426654 - RNA, 19 nt, Homo sapiens
  misc_RNA (1)...(19): siRNA sense strand
gacaagcgccgucucaaug

SEQ ID NO: 426655 - RNA, 19 nt, Homo sapiens
  misc_RNA (1)...(19): siRNA sense strand
guuagaaguuggagagaau

SEQ ID NO: 426656 - RNA, 19 nt, Homo sapiens
  misc_RNA (1)...(19): siRNA sense strand
ggaaccaaagugaaaguaa

SEQ ID NO: 426657 - RNA, 19 nt, Homo sapiens
  misc_RNA (1)...(19): siRNA sense strand
acaggaggauucugacaaa

SEQ ID NO: 426658 - RNA, 19 nt, Homo sapiens
  misc_RNA (1)...(19): siRNA sense strand
gcuauuaucagcaaguuga

SEQ ID NO: 426659 - RNA, 19 nt, Homo sapiens
  misc_RNA (1)...(19): siRNA sense strand
gaccagugauuguauugga

SEQ ID NO: 426660 - RNA, 19 nt, Homo sapiens
  misc_RNA (1)...(19): siRNA sense strand
gcaggaagugaaccucaua

SEQ ID NO: 426661 - RNA, 19 nt, Homo sapiens
  misc_RNA (1)...(19): siRNA sense strand
ggguggaugugacaauauu

SEQ ID NO: 426662 - RNA, 19 nt, Homo sapiens
  misc_RNA (1)...(19): siRNA sense strand
agacagagguacuccaauc

SEQ ID NO: 426663 - RNA, 19 nt, Homo sapiens
  misc_RNA (1)...(19): siRNA sense strand
uccagcagcuuuauaaguu

SEQ ID NO: 426664 - RNA, 19 nt, Homo sapiens
  misc_RNA (1)...(19): siRNA sense strand
cuagaguuguuccugauaa

SEQ ID NO: 426665 - RNA, 19 nt, Homo sapiens
  misc_RNA (1)...(19): siRNA sense strand
gaaguagacauucucaauc

SEQ ID NO: 426666 - RNA, 19 nt, Homo sapiens
  misc_RNA (1)...(19): siRNA sense strand
caacggagaggacugaaug

SEQ ID NO: 426667 - RNA, 19 nt, Homo sapiens
  misc_RNA (1)...(19): siRNA sense strand
gcagugaagaggaagauga

SEQ ID NO: 426668 - RNA, 19 nt, Homo sapiens
  misc_RNA (1)...(19): siRNA sense strand
ugaaugguauccugcuuug

SEQ ID NO: 426669 - RNA, 19 nt, Homo sapiens
  misc_RNA (1)...(19): siRNA sense strand
ugaaguagauuuggaugau

SEQ ID NO: 426670 - RNA, 19 nt, Homo sapiens
  misc_RNA (1)...(19): siRNA sense strand
aagugaaccucauauagaa

SEQ ID NO: 426671 - RNA, 19 nt, Homo sapiens
  misc_RNA (1)...(19): siRNA sense strand
gaagacgaagcaagacaaa

SEQ ID NO: 426672 - RNA, 19 nt, Homo sapiens
  misc_RNA (1)...(19): siRNA sense strand
ggaugugacaauauugaua

SEQ ID NO: 426673 - RNA, 19 nt, Homo sapiens
  misc_RNA (1)...(19): siRNA sense strand
aagcaaaugugacucugaa

SEQ ID NO: 426674 - RNA, 19 nt, Homo sapiens
  misc_RNA (1)...(19): siRNA sense strand
caugucaucugcuucauca

SEQ ID NO: 426675 - RNA, 19 nt, Homo sapiens
  misc_RNA (1)...(19): siRNA sense strand
cagaagaggccaagugaug

SEQ ID NO: 426676 - RNA, 19 nt, Homo sapiens
  misc_RNA (1)...(19): siRNA sense strand
agagugauauaacgauuga

SEQ ID NO: 426677 - RNA, 19 nt, Homo sapiens
  misc_RNA (1)...(19): siRNA sense strand
uccaacaacugacuaguga

SEQ ID NO: 426678 - RNA, 19 nt, Homo sapiens
  misc_RNA (1)...(19): siRNA sense strand
cuacagaagaugaaauuga

SEQ ID NO: 426679 - RNA, 19 nt, Homo sapiens
  misc_RNA (1)...(19): siRNA sense strand
gaaaguaucucuaugguuu

SEQ ID NO: 426680 - RNA, 19 nt, Homo sapiens
  misc_RNA (1)...(19): siRNA sense strand
ggaagaaacugaaagcaaa

SEQ ID NO: 426681 - RNA, 19 nt, Homo sapiens
  misc_RNA (1)...(19): siRNA sense strand
gagaauugcucgagaugua

SEQ ID NO: 426682 - RNA, 19 nt, Homo sapiens
  misc_RNA (1)...(19): siRNA sense strand
uaacagaagugaagaguga

SEQ ID NO: 426683 - RNA, 19 nt, Homo sapiens
  misc_RNA (1)...(19): siRNA sense strand
gaaccaaagugaaaguaaa

SEQ ID NO: 426684 - RNA, 19 nt, Homo sapiens
  misc_RNA (1)...(19): siRNA sense strand
gaaaggacauuaaggaagu

SEQ ID NO: 426685 - RNA, 19 nt, Homo sapiens
  misc_RNA (1)...(19): siRNA sense strand
ggacaaagguggaccaaag

SEQ ID NO: 426686 - RNA, 19 nt, Homo sapiens
  misc_RNA (1)...(19): siRNA sense strand
gguacaagaugaccaagua

SEQ ID NO: 426687 - RNA, 19 nt, Homo sapiens
  misc_RNA (1)...(19): siRNA sense strand
gagcgaacauugagacgua

SEQ ID NO: 426688 - RNA, 19 nt, Homo sapiens
  misc_RNA (1)...(19): siRNA sense strand
ggauguagaugaugacuau

SEQ ID NO: 426689 - RNA, 19 nt, Homo sapiens
  misc_RNA (1)...(19): siRNA sense strand
ggugaaggcugacaggaua

SEQ ID NO: 426690 - RNA, 19 nt, Homo sapiens
  misc_RNA (1)...(19): siRNA sense strand
aaucugagcucuccacuaa

SEQ ID NO: 426691 - RNA, 19 nt, Homo sapiens
  misc_RNA (1)...(19): siRNA sense strand
cagaagaaguuaagaaaga

SEQ ID NO: 426692 - RNA, 19 nt, Homo sapiens
  misc_RNA (1)...(19): siRNA sense strand
gaaagcaagcaucuucuua

SEQ ID NO: 426693 - RNA, 19 nt, Homo sapiens
  misc_RNA (1)...(19): siRNA sense strand
ggagaggacugaaugguau

SEQ ID NO: 426694 - RNA, 19 nt, Homo sapiens
  misc_RNA (1)...(19): siRNA sense strand
gaagugaaccucauauaga

SEQ ID NO: 426695 - RNA, 19 nt, Homo sapiens
  misc_RNA (1)...(19): siRNA sense strand
ggacucaaaugcagccuuu

SEQ ID NO: 426696 - RNA, 19 nt, Homo sapiens
  misc_RNA (1)...(19): siRNA sense strand
gaauggaaaugacaaauac

SEQ ID NO: 426697 - RNA, 19 nt, Homo sapiens
  misc_RNA (1)...(19): siRNA sense strand
uaaagaagauagugaagug

SEQ ID NO: 426698 - RNA, 19 nt, Homo sapiens
  misc_RNA (1)...(19): siRNA sense strand
ggaauggaaaugacaaaua

SEQ ID NO: 426699 - RNA, 19 nt, Homo sapiens
  misc_RNA (1)...(19): siRNA sense strand
ggaagcaaauuuauaugga

SEQ ID NO: 426700 - RNA, 19 nt, Homo sapiens
  misc_RNA (1)...(19): siRNA sense strand
ccaaagauuucugcacaua

SEQ ID NO: 426701 - RNA, 19 nt, Homo sapiens
  misc_RNA (1)...(19): siRNA sense strand
agaaaugccuuuaacagaa

SEQ ID NO: 426702 - RNA, 19 nt, Homo sapiens
  misc_RNA (1)...(19): siRNA sense strand
gaaaggaccagugauugua

SEQ ID NO: 426703 - RNA, 19 nt, Homo sapiens
  misc_RNA (1)...(19): siRNA sense strand
ucugguaccuguaguauaa

SEQ ID NO: 426704 - RNA, 19 nt, Homo sapiens
  misc_RNA (1)...(19): siRNA sense strand
ggaagaacuugauccugaa

SEQ ID NO: 426705 - RNA, 19 nt, Homo sapiens
  misc_RNA (1)...(19): siRNA sense strand
caacauaacuuuucaguag

SEQ ID NO: 426706 - RNA, 19 nt, Homo sapiens
  misc_RNA (1)...(19): siRNA sense strand
gaacuccaguaauugcaaa

SEQ ID NO: 426707 - RNA, 19 nt, Homo sapiens
  misc_RNA (1)...(19): siRNA sense strand
ugaagaaucucaagaaggu

SEQ ID NO: 426708 - RNA, 19 nt, Homo sapiens
  misc_RNA (1)...(19): siRNA sense strand
gaaaugccuuuaacagaag

SEQ ID NO: 426709 - RNA, 19 nt, Homo sapiens
  misc_RNA (1)...(19): siRNA sense strand
gaccuuggcauuccuauuu

SEQ ID NO: 426710 - RNA, 19 nt, Homo sapiens
  misc_RNA (1)...(19): siRNA sense strand
ggaaauaguggauuaaugg

SEQ ID NO: 426711 - RNA, 19 nt, Homo sapiens
  misc_RNA (1)...(19): siRNA sense strand
ggaaaugacaaauacugua

SEQ ID NO: 426712 - RNA, 19 nt, Homo sapiens
  misc_RNA (1)...(19): siRNA sense strand
ggacaaucaucgccagaga

SEQ ID NO: 426713 - RNA, 19 nt, Homo sapiens
  misc_RNA (1)...(19): siRNA sense strand
aaucaacccucucaucaaa

SEQ ID NO: 426714 - RNA, 19 nt, Homo sapiens
  misc_RNA (1)...(19): siRNA sense strand
ggaaauugaagaagagaaa

SEQ ID NO: 426715 - RNA, 19 nt, Homo sapiens
  misc_RNA (1)...(19): siRNA sense strand
ugauggaaauaguggauua

SEQ ID NO: 426716 - RNA, 19 nt, Homo sapiens
  misc_RNA (1)...(19): siRNA sense strand
caagaaaggaccagugauu

SEQ ID NO: 426717 - RNA, 19 nt, Homo sapiens
  misc_RNA (1)...(19): siRNA sense strand
uauagaagcucauagucuu

SEQ ID NO: 426718 - RNA, 19 nt, Homo sapiens
  misc_RNA (1)...(19): siRNA sense strand
uagaaacccugaaguuaga

SEQ ID NO: 426719 - RNA, 19 nt, Homo sapiens
  misc_RNA (1)...(19): siRNA sense strand
ugaaacagaagaugcuuua

SEQ ID NO: 426720 - RNA, 19 nt, Homo sapiens
  misc_RNA (1)...(19): siRNA sense strand
aaacaugccguauggcuua

SEQ ID NO: 426721 - RNA, 19 nt, Homo sapiens
  misc_RNA (1)...(19): siRNA sense strand
ggaaguagacauucucaau

SEQ ID NO: 426722 - RNA, 19 nt, Homo sapiens
  misc_RNA (1)...(19): siRNA sense strand
gaaguagauuuggaugauu

SEQ ID NO: 426723 - RNA, 19 nt, Homo sapiens
  misc_RNA (1)...(19): siRNA sense strand
uggagagaaugaacaaaua

SEQ ID NO: 426724 - RNA, 19 nt, Homo sapiens
  misc_RNA (1)...(19): siRNA sense strand
ugacaaagacucagaugaa

SEQ ID NO: 426725 - RNA, 19 nt, Homo sapiens
  misc_RNA (1)...(19): siRNA sense strand
gaucaagaaaugccuuuaa

SEQ ID NO: 426726 - RNA, 19 nt, Homo sapiens
  misc_RNA (1)...(19): siRNA sense strand
caagaaaggacauuaagga

SEQ ID NO: 426727 - RNA, 19 nt, Homo sapiens
  misc_RNA (1)...(19): siRNA sense strand
cagcagcuuuauaaguuua

SEQ ID NO: 426728 - RNA, 19 nt, Homo sapiens
  misc_RNA (1)...(19): siRNA sense strand
caucaaacaugccguaugg

SEQ ID NO: 426729 - RNA, 19 nt, Homo sapiens
  misc_RNA (1)...(19): siRNA sense strand
ugaaauugaugacggagaa

SEQ ID NO: 426730 - RNA, 19 nt, Homo sapiens
  misc_RNA (1)...(19): siRNA sense strand
cuaugaaacugcagagaaa

SEQ ID NO: 426731 - RNA, 19 nt, Homo sapiens
  misc_RNA (1)...(19): siRNA sense strand
gcaaauauucaguucagaa

SEQ ID NO: 426732 - RNA, 19 nt, Homo sapiens
  misc_RNA (1)...(19): siRNA sense strand
gguauaccgugguguuuga

SEQ ID NO: 426733 - RNA, 19 nt, Homo sapiens
  misc_RNA (1)...(19): siRNA sense strand
cgauugaaguugauaguau

SEQ ID NO: 426734 - RNA, 19 nt, Homo sapiens
  misc_RNA (1)...(19): siRNA sense strand
gaaugaagcaggaagugaa

SEQ ID NO: 426735 - RNA, 19 nt, Homo sapiens
  misc_RNA (1)...(19): siRNA sense strand
guaccgaggugccuucugu

SEQ ID NO: 426736 - RNA, 19 nt, Homo sapiens
  misc_RNA (1)...(19): siRNA sense strand
ccacacaauugguacaaga

SEQ ID NO: 426737 - RNA, 19 nt, Homo sapiens
  misc_RNA (1)...(19): siRNA sense strand
ucaguagcuucaccacuua

SEQ ID NO: 426738 - RNA, 19 nt, Homo sapiens
  misc_RNA (1)...(19): siRNA sense strand
gaucuucucuuccuguuac

SEQ ID NO: 426739 - RNA, 19 nt, Homo sapiens
  misc_RNA (1)...(19): siRNA sense strand
cuaacucucuuguuucuau

SEQ ID NO: 426740 - RNA, 19 nt, Homo sapiens
  misc_RNA (1)...(19): siRNA sense strand
guugaaagcucugagucua

SEQ ID NO: 426741 - RNA, 19 nt, Homo sapiens
  misc_RNA (1)...(19): siRNA sense strand
ggaagugaaccucauauag

SEQ ID NO: 426742 - RNA, 19 nt, Homo sapiens
  misc_RNA (1)...(19): siRNA sense strand
caaaugcagccuuuagaaa

SEQ ID NO: 426743 - RNA, 19 nt, Homo sapiens
  misc_RNA (1)...(19): siRNA sense strand
aacagaagaugcuuuagaa

SEQ ID NO: 426744 - RNA, 19 nt, Homo sapiens
  misc_RNA (1)...(19): siRNA sense strand
gauaauaccacacaauugg

SEQ ID NO: 426745 - RNA, 19 nt, Homo sapiens
  misc_RNA (1)...(19): siRNA sense strand
caacaacugacuagugaaa

SEQ ID NO: 426746 - RNA, 19 nt, Homo sapiens
  misc_RNA (1)...(19): siRNA sense strand
guguuuaguucgaucauuu

SEQ ID NO: 426747 - RNA, 19 nt, Homo sapiens
  misc_RNA (1)...(19): siRNA sense strand
gagaauggaauggaaauga

SEQ ID NO: 426748 - RNA, 19 nt, Homo sapiens
  misc_RNA (1)...(19): siRNA sense strand
agacucagaugaagaggaa

SEQ ID NO: 426749 - RNA, 19 nt, Homo sapiens
  misc_RNA (1)...(19): siRNA sense strand
gcaaagauuaagacuguga

SEQ ID NO: 426750 - RNA, 19 nt, Homo sapiens
  misc_RNA (1)...(19): siRNA sense strand
aagcaagcaucuucuuaaa

SEQ ID NO: 426751 - RNA, 19 nt, Homo sapiens
  misc_RNA (1)...(19): siRNA sense strand
agaaagcagugaagaggaa

SEQ ID NO: 426752 - RNA, 19 nt, Homo sapiens
  misc_RNA (1)...(19): siRNA sense strand
aggcaaagauuaagacugu

SEQ ID NO: 426753 - RNA, 19 nt, Homo sapiens
  misc_RNA (1)...(19): siRNA sense strand
gaagacagagguacuccaa

SEQ ID NO: 426754 - RNA, 19 nt, Homo sapiens
  misc_RNA (1)...(19): siRNA sense strand
gacaagcgccgucucaaug

SEQ ID NO: 426755 - RNA, 19 nt, Homo sapiens
  misc_RNA (1)...(19): siRNA sense strand
guuagaaguuggagagaau

SEQ ID NO: 426756 - RNA, 19 nt, Homo sapiens
  misc_RNA (1)...(19): siRNA sense strand
ggaaccaaagugaaaguaa

SEQ ID NO: 426757 - RNA, 19 nt, Homo sapiens
  misc_RNA (1)...(19): siRNA sense strand
acaggaggauucugacaaa

SEQ ID NO: 426758 - RNA, 19 nt, Homo sapiens
  misc_RNA (1)...(19): siRNA sense strand
gcuauuaucagcaaguuga

SEQ ID NO: 426759 - RNA, 19 nt, Homo sapiens
  misc_RNA (1)...(19): siRNA sense strand
gaccagugauuguauugga

SEQ ID NO: 426760 - RNA, 19 nt, Homo sapiens
  misc_RNA (1)...(19): siRNA sense strand
gcaggaagugaaccucaua

SEQ ID NO: 426761 - RNA, 19 nt, Homo sapiens
  misc_RNA (1)...(19): siRNA sense strand
ggguggaugugacaauauu

SEQ ID NO: 426762 - RNA, 19 nt, Homo sapiens
  misc_RNA (1)...(19): siRNA sense strand
agacagagguacuccaauc

SEQ ID NO: 426763 - RNA, 19 nt, Homo sapiens
  misc_RNA (1)...(19): siRNA sense strand
uccagcagcuuuauaaguu

SEQ ID NO: 426764 - RNA, 19 nt, Homo sapiens
  misc_RNA (1)...(19): siRNA sense strand
cuagaguuguuccugauaa

SEQ ID NO: 426765 - RNA, 19 nt, Homo sapiens
  misc_RNA (1)...(19): siRNA sense strand
gaaguagacauucucaauc

SEQ ID NO: 426766 - RNA, 19 nt, Homo sapiens
  misc_RNA (1)...(19): siRNA sense strand
caacggagaggacugaaug

SEQ ID NO: 426767 - RNA, 19 nt, Homo sapiens
  misc_RNA (1)...(19): siRNA sense strand
gcagugaagaggaagauga

SEQ ID NO: 426768 - RNA, 19 nt, Homo sapiens
  misc_RNA (1)...(19): siRNA sense strand
ugaaugguauccugcuuug

SEQ ID NO: 426769 - RNA, 19 nt, Homo sapiens
  misc_RNA (1)...(19): siRNA sense strand
ugaaguagauuuggaugau

SEQ ID NO: 426770 - RNA, 19 nt, Homo sapiens
  misc_RNA (1)...(19): siRNA sense strand
aagugaaccucauauagaa

SEQ ID NO: 426771 - RNA, 19 nt, Homo sapiens
  misc_RNA (1)...(19): siRNA sense strand
gaagacgaagcaagacaaa

SEQ ID NO: 426772 - RNA, 19 nt, Homo sapiens
  misc_RNA (1)...(19): siRNA sense strand
ggaugugacaauauugaua

SEQ ID NO: 426773 - RNA, 19 nt, Homo sapiens
  misc_RNA (1)...(19): siRNA sense strand
aagcaaaugugacucugaa

SEQ ID NO: 426774 - RNA, 19 nt, Homo sapiens
  misc_RNA (1)...(19): siRNA sense strand
caugucaucugcuucauca

SEQ ID NO: 426775 - RNA, 19 nt, Homo sapiens
  misc_RNA (1)...(19): siRNA sense strand
cagaagaggccaagugaug

SEQ ID NO: 426776 - RNA, 19 nt, Homo sapiens
  misc_RNA (1)...(19): siRNA sense strand
agagugauauaacgauuga

SEQ ID NO: 426777 - RNA, 19 nt, Homo sapiens
  misc_RNA (1)...(19): siRNA sense strand
uccaacaacugacuaguga

SEQ ID NO: 426778 - RNA, 19 nt, Homo sapiens
  misc_RNA (1)...(19): siRNA sense strand
cuacagaagaugaaauuga

SEQ ID NO: 426779 - RNA, 19 nt, Homo sapiens
  misc_RNA (1)...(19): siRNA sense strand
gaaaguaucucuaugguuu

SEQ ID NO: 426780 - RNA, 19 nt, Homo sapiens
  misc_RNA (1)...(19): siRNA sense strand
ggaagaaacugaaagcaaa

SEQ ID NO: 426781 - RNA, 19 nt, Homo sapiens
  misc_RNA (1)...(19): siRNA sense strand
gagaauugcucgagaugua

SEQ ID NO: 426782 - RNA, 19 nt, Homo sapiens
  misc_RNA (1)...(19): siRNA sense strand
uaacagaagugaagaguga

SEQ ID NO: 426783 - RNA, 19 nt, Homo sapiens
  misc_RNA (1)...(19): siRNA sense strand
gaaccaaagugaaaguaaa

SEQ ID NO: 426784 - RNA, 19 nt, Homo sapiens
  misc_RNA (1)...(19): siRNA sense strand
gaaaggacauuaaggaagu

SEQ ID NO: 426785 - RNA, 19 nt, Homo sapiens
  misc_RNA (1)...(19): siRNA sense strand
ggacaaagguggaccaaag

SEQ ID NO: 426786 - RNA, 19 nt, Homo sapiens
  misc_RNA (1)...(19): siRNA sense strand
gguacaagaugaccaagua

SEQ ID NO: 426787 - RNA, 19 nt, Homo sapiens
  misc_RNA (1)...(19): siRNA sense strand
gagcgaacauugagacgua

SEQ ID NO: 426788 - RNA, 19 nt, Homo sapiens
  misc_RNA (1)...(19): siRNA sense strand
ggauguagaugaugacuau

SEQ ID NO: 426789 - RNA, 19 nt, Homo sapiens
  misc_RNA (1)...(19): siRNA sense strand
ggugaaggcugacaggaua

SEQ ID NO: 426790 - RNA, 19 nt, Homo sapiens
  misc_RNA (1)...(19): siRNA sense strand
aaucugagcucuccacuaa

SEQ ID NO: 426791 - RNA, 19 nt, Homo sapiens
  misc_RNA (1)...(19): siRNA sense strand
cagaagaaguuaagaaaga

SEQ ID NO: 426792 - RNA, 19 nt, Homo sapiens
  misc_RNA (1)...(19): siRNA sense strand
gaaagcaagcaucuucuua

SEQ ID NO: 426793 - RNA, 19 nt, Homo sapiens
  misc_RNA (1)...(19): siRNA sense strand
ggagaggacugaaugguau

SEQ ID NO: 426794 - RNA, 19 nt, Homo sapiens
  misc_RNA (1)...(19): siRNA sense strand
gaagugaaccucauauaga

SEQ ID NO: 426795 - RNA, 19 nt, Homo sapiens
  misc_RNA (1)...(19): siRNA sense strand
ggacucaaaugcagccuuu

SEQ ID NO: 426796 - RNA, 19 nt, Homo sapiens
  misc_RNA (1)...(19): siRNA sense strand
gaauggaaaugacaaauac

SEQ ID NO: 426797 - RNA, 19 nt, Homo sapiens
  misc_RNA (1)...(19): siRNA sense strand
uaaagaagauagugaagug

SEQ ID NO: 426798 - RNA, 19 nt, Homo sapiens
  misc_RNA (1)...(19): siRNA sense strand
ggaauggaaaugacaaaua

SEQ ID NO: 426799 - RNA, 19 nt, Homo sapiens
  misc_RNA (1)...(19): siRNA sense strand
ggaagcaaauuuauaugga

SEQ ID NO: 426800 - RNA, 19 nt, Homo sapiens
  misc_RNA (1)...(19): siRNA sense strand
ccaaagauuucugcacaua

SEQ ID NO: 426801 - RNA, 19 nt, Homo sapiens
  misc_RNA (1)...(19): siRNA sense strand
agaaaugccuuuaacagaa

SEQ ID NO: 426802 - RNA, 19 nt, Homo sapiens
  misc_RNA (1)...(19): siRNA sense strand
gaaaggaccagugauugua

SEQ ID NO: 426803 - RNA, 19 nt, Homo sapiens
  misc_RNA (1)...(19): siRNA sense strand
ucugguaccuguaguauaa

SEQ ID NO: 426804 - RNA, 19 nt, Homo sapiens
  misc_RNA (1)...(19): siRNA sense strand
ggaagaacuugauccugaa

SEQ ID NO: 426805 - RNA, 19 nt, Homo sapiens
  misc_RNA (1)...(19): siRNA sense strand
caacauaacuuuucaguag

SEQ ID NO: 426806 - RNA, 19 nt, Homo sapiens
  misc_RNA (1)...(19): siRNA sense strand
gaacuccaguaauugcaaa

SEQ ID NO: 426807 - RNA, 19 nt, Homo sapiens
  misc_RNA (1)...(19): siRNA sense strand
ugaagaaucucaagaaggu

SEQ ID NO: 426808 - RNA, 19 nt, Homo sapiens
  misc_RNA (1)...(19): siRNA sense strand
gaaaugccuuuaacagaag

SEQ ID NO: 426809 - RNA, 19 nt, Homo sapiens
  misc_RNA (1)...(19): siRNA sense strand
gaccuuggcauuccuauuu

SEQ ID NO: 426810 - RNA, 19 nt, Homo sapiens
  misc_RNA (1)...(19): siRNA sense strand
ggaaauaguggauuaaugg

SEQ ID NO: 426811 - RNA, 19 nt, Homo sapiens
  misc_RNA (1)...(19): siRNA sense strand
ggaaaugacaaauacugua

SEQ ID NO: 426812 - RNA, 19 nt, Homo sapiens
  misc_RNA (1)...(19): siRNA sense strand
ggacaaucaucgccagaga

SEQ ID NO: 426813 - RNA, 19 nt, Homo sapiens
  misc_RNA (1)...(19): siRNA sense strand
aaucaacccucucaucaaa

SEQ ID NO: 426814 - RNA, 19 nt, Homo sapiens
  misc_RNA (1)...(19): siRNA sense strand
ggaaauugaagaagagaaa

SEQ ID NO: 426815 - RNA, 19 nt, Homo sapiens
  misc_RNA (1)...(19): siRNA sense strand
ugauggaaauaguggauua

SEQ ID NO: 426816 - RNA, 19 nt, Homo sapiens
  misc_RNA (1)...(19): siRNA sense strand
caagaaaggaccagugauu

SEQ ID NO: 426817 - RNA, 19 nt, Homo sapiens
  misc_RNA (1)...(19): siRNA sense strand
uauagaagcucauagucuu

SEQ ID NO: 426818 - RNA, 19 nt, Homo sapiens
  misc_RNA (1)...(19): siRNA sense strand
uagaaacccugaaguuaga

SEQ ID NO: 426819 - RNA, 19 nt, Homo sapiens
  misc_RNA (1)...(19): siRNA sense strand
ugaaacagaagaugcuuua

SEQ ID NO: 426820 - RNA, 19 nt, Homo sapiens
  misc_RNA (1)...(19): siRNA sense strand
aaacaugccguauggcuua

SEQ ID NO: 426821 - RNA, 19 nt, Homo sapiens
  misc_RNA (1)...(19): siRNA sense strand
ggaaguagacauucucaau

SEQ ID NO: 426822 - RNA, 19 nt, Homo sapiens
  misc_RNA (1)...(19): siRNA sense strand
gaaguagauuuggaugauu

SEQ ID NO: 426823 - RNA, 19 nt, Homo sapiens
  misc_RNA (1)...(19): siRNA sense strand
uggagagaaugaacaaaua

SEQ ID NO: 426824 - RNA, 19 nt, Homo sapiens
  misc_RNA (1)...(19): siRNA sense strand
ugacaaagacucagaugaa

SEQ ID NO: 426825 - RNA, 19 nt, Homo sapiens
  misc_RNA (1)...(19): siRNA sense strand
gaucaagaaaugccuuuaa

SEQ ID NO: 426826 - RNA, 19 nt, Homo sapiens
  misc_RNA (1)...(19): siRNA sense strand
caagaaaggacauuaagga

SEQ ID NO: 426827 - RNA, 19 nt, Homo sapiens
  misc_RNA (1)...(19): siRNA sense strand
cagcagcuuuauaaguuua

SEQ ID NO: 426828 - RNA, 19 nt, Homo sapiens
  misc_RNA (1)...(19): siRNA sense strand
caucaaacaugccguaugg

SEQ ID NO: 426829 - RNA, 19 nt, Homo sapiens
  misc_RNA (1)...(19): siRNA sense strand
ugaaauugaugacggagaa

SEQ ID NO: 426830 - RNA, 19 nt, Homo sapiens
  misc_RNA (1)...(19): siRNA sense strand
cuaugaaacugcagagaaa

SEQ ID NO: 426831 - RNA, 19 nt, Homo sapiens
  misc_RNA (1)...(19): siRNA sense strand
gcaaauauucaguucagaa

SEQ ID NO: 426832 - RNA, 19 nt, Homo sapiens
  misc_RNA (1)...(19): siRNA sense strand
gguauaccgugguguuuga

SEQ ID NO: 426833 - RNA, 19 nt, Homo sapiens
  misc_RNA (1)...(19): siRNA sense strand
cgauugaaguugauaguau

SEQ ID NO: 426834 - RNA, 19 nt, Homo sapiens
  misc_RNA (1)...(19): siRNA sense strand
gaaugaagcaggaagugaa

SEQ ID NO: 426835 - RNA, 19 nt, Homo sapiens
  misc_RNA (1)...(19): siRNA sense strand
guaccgaggugccuucugu

SEQ ID NO: 426836 - RNA, 19 nt, Homo sapiens
  misc_RNA (1)...(19): siRNA sense strand
ccacacaauugguacaaga

SEQ ID NO: 426837 - RNA, 19 nt, Homo sapiens
  misc_RNA (1)...(19): siRNA sense strand
ucaguagcuucaccacuua

SEQ ID NO: 426838 - RNA, 19 nt, Homo sapiens
  misc_RNA (1)...(19): siRNA sense strand
gaucuucucuuccuguuac

SEQ ID NO: 426839 - RNA, 19 nt, Homo sapiens
  misc_RNA (1)...(19): siRNA sense strand
cuaacucucuuguuucuau

SEQ ID NO: 426840 - RNA, 19 nt, Homo sapiens
  misc_RNA (1)...(19): siRNA sense strand
guugaaagcucugagucua

SEQ ID NO: 426841 - RNA, 19 nt, Homo sapiens
  misc_RNA (1)...(19): siRNA sense strand
ggaagugaaccucauauag

SEQ ID NO: 426842 - RNA, 19 nt, Homo sapiens
  misc_RNA (1)...(19): siRNA sense strand
caaaugcagccuuuagaaa

SEQ ID NO: 426843 - RNA, 19 nt, Homo sapiens
  misc_RNA (1)...(19): siRNA sense strand
aacagaagaugcuuuagaa

SEQ ID NO: 426844 - RNA, 19 nt, Homo sapiens
  misc_RNA (1)...(19): siRNA sense strand
gauaauaccacacaauugg

SEQ ID NO: 426845 - RNA, 19 nt, Homo sapiens
  misc_RNA (1)...(19): siRNA sense strand
caacaacugacuagugaaa

SEQ ID NO: 426846 - RNA, 19 nt, Homo sapiens
  misc_RNA (1)...(19): siRNA sense strand
guguuuaguucgaucauuu

SEQ ID NO: 426847 - RNA, 19 nt, Homo sapiens
  misc_RNA (1)...(19): siRNA sense strand
gagaauggaauggaaauga

SEQ ID NO: 426848 - RNA, 19 nt, Homo sapiens
  misc_RNA (1)...(19): siRNA sense strand
agacucagaugaagaggaa

SEQ ID NO: 426849 - RNA, 19 nt, Homo sapiens
  misc_RNA (1)...(19): siRNA sense strand
gcaaagauuaagacuguga

SEQ ID NO: 426850 - RNA, 19 nt, Homo sapiens
  misc_RNA (1)...(19): siRNA sense strand
aagcaagcaucuucuuaaa

SEQ ID NO: 426851 - RNA, 19 nt, Homo sapiens
  misc_RNA (1)...(19): siRNA sense strand
agaaagcagugaagaggaa

SEQ ID NO: 426852 - RNA, 19 nt, Homo sapiens
  misc_RNA (1)...(19): siRNA sense strand
aggcaaagauuaagacugu

SEQ ID NO: 426853 - RNA, 19 nt, Homo sapiens
  misc_RNA (1)...(19): siRNA sense strand
gaagacagagguacuccaa

SEQ ID NO: 426854 - RNA, 19 nt, Homo sapiens
  misc_RNA (1)...(19): siRNA sense strand
gacaagcgccgucucaaug

SEQ ID NO: 426855 - RNA, 19 nt, Homo sapiens
  misc_RNA (1)...(19): siRNA sense strand
guuagaaguuggagagaau

SEQ ID NO: 426856 - RNA, 19 nt, Homo sapiens
  misc_RNA (1)...(19): siRNA sense strand
ggaaccaaagugaaaguaa

SEQ ID NO: 426857 - RNA, 19 nt, Homo sapiens
  misc_RNA (1)...(19): siRNA sense strand
acaggaggauucugacaaa

SEQ ID NO: 426858 - RNA, 19 nt, Homo sapiens
  misc_RNA (1)...(19): siRNA sense strand
gcuauuaucagcaaguuga

SEQ ID NO: 426859 - RNA, 19 nt, Homo sapiens
  misc_RNA (1)...(19): siRNA sense strand
gaccagugauuguauugga

SEQ ID NO: 426860 - RNA, 19 nt, Homo sapiens
  misc_RNA (1)...(19): siRNA sense strand
gcaggaagugaaccucaua

SEQ ID NO: 426861 - RNA, 19 nt, Homo sapiens
  misc_RNA (1)...(19): siRNA sense strand
ggguggaugugacaauauu

SEQ ID NO: 426862 - RNA, 19 nt, Homo sapiens
  misc_RNA (1)...(19): siRNA sense strand
agacagagguacuccaauc

SEQ ID NO: 426863 - RNA, 19 nt, Homo sapiens
  misc_RNA (1)...(19): siRNA sense strand
uccagcagcuuuauaaguu

SEQ ID NO: 426864 - RNA, 19 nt, Homo sapiens
  misc_RNA (1)...(19): siRNA sense strand
cuagaguuguuccugauaa

SEQ ID NO: 426865 - RNA, 19 nt, Homo sapiens
  misc_RNA (1)...(19): siRNA sense strand
gaaguagacauucucaauc

SEQ ID NO: 426866 - RNA, 19 nt, Homo sapiens
  misc_RNA (1)...(19): siRNA sense strand
caacggagaggacugaaug

SEQ ID NO: 426867 - RNA, 19 nt, Homo sapiens
  misc_RNA (1)...(19): siRNA sense strand
gcagugaagaggaagauga

SEQ ID NO: 426868 - RNA, 19 nt, Homo sapiens
  misc_RNA (1)...(19): siRNA sense strand
ugaaugguauccugcuuug

SEQ ID NO: 426869 - RNA, 19 nt, Homo sapiens
  misc_RNA (1)...(19): siRNA sense strand
ugaaguagauuuggaugau

SEQ ID NO: 426870 - RNA, 19 nt, Homo sapiens
  misc_RNA (1)...(19): siRNA sense strand
aagugaaccucauauagaa

SEQ ID NO: 426871 - RNA, 19 nt, Homo sapiens
  misc_RNA (1)...(19): siRNA sense strand
gaagacgaagcaagacaaa

SEQ ID NO: 426872 - RNA, 19 nt, Homo sapiens
  misc_RNA (1)...(19): siRNA sense strand
ggaugugacaauauugaua

SEQ ID NO: 426873 - RNA, 19 nt, Homo sapiens
  misc_RNA (1)...(19): siRNA sense strand
aagcaaaugugacucugaa

SEQ ID NO: 426874 - RNA, 19 nt, Homo sapiens
  misc_RNA (1)...(19): siRNA sense strand
caugucaucugcuucauca

SEQ ID NO: 426875 - RNA, 19 nt, Homo sapiens
  misc_RNA (1)...(19): siRNA sense strand
cagaagaggccaagugaug

SEQ ID NO: 426876 - RNA, 19 nt, Homo sapiens
  misc_RNA (1)...(19): siRNA sense strand
agagugauauaacgauuga

SEQ ID NO: 426877 - RNA, 19 nt, Homo sapiens
  misc_RNA (1)...(19): siRNA sense strand
uccaacaacugacuaguga

SEQ ID NO: 426878 - RNA, 19 nt, Homo sapiens
  misc_RNA (1)...(19): siRNA sense strand
cuacagaagaugaaauuga

SEQ ID NO: 426879 - RNA, 19 nt, Homo sapiens
  misc_RNA (1)...(19): siRNA sense strand
gaaaguaucucuaugguuu

SEQ ID NO: 426880 - RNA, 19 nt, Homo sapiens
  misc_RNA (1)...(19): siRNA sense strand
ggaagaaacugaaagcaaa

SEQ ID NO: 426881 - RNA, 19 nt, Homo sapiens
  misc_RNA (1)...(19): siRNA sense strand
gagaauugcucgagaugua

SEQ ID NO: 426882 - RNA, 19 nt, Homo sapiens
  misc_RNA (1)...(19): siRNA sense strand
uaacagaagugaagaguga

SEQ ID NO: 426883 - RNA, 19 nt, Homo sapiens
  misc_RNA (1)...(19): siRNA sense strand
gaaccaaagugaaaguaaa

SEQ ID NO: 426884 - RNA, 19 nt, Homo sapiens
  misc_RNA (1)...(19): siRNA sense strand
gaaaggacauuaaggaagu

SEQ ID NO: 426885 - RNA, 19 nt, Homo sapiens
  misc_RNA (1)...(19): siRNA sense strand
ggacaaagguggaccaaag

SEQ ID NO: 426886 - RNA, 19 nt, Homo sapiens
  misc_RNA (1)...(19): siRNA sense strand
gguacaagaugaccaagua

SEQ ID NO: 426887 - RNA, 19 nt, Homo sapiens
  misc_RNA (1)...(19): siRNA sense strand
gagcgaacauugagacgua

SEQ ID NO: 426888 - RNA, 19 nt, Homo sapiens
  misc_RNA (1)...(19): siRNA sense strand
ggauguagaugaugacuau

SEQ ID NO: 426889 - RNA, 19 nt, Homo sapiens
  misc_RNA (1)...(19): siRNA sense strand
ggugaaggcugacaggaua

SEQ ID NO: 426890 - RNA, 19 nt, Homo sapiens
  misc_RNA (1)...(19): siRNA sense strand
aaucugagcucuccacuaa

SEQ ID NO: 426891 - RNA, 19 nt, Homo sapiens
  misc_RNA (1)...(19): siRNA sense strand
cagaagaaguuaagaaaga

SEQ ID NO: 426892 - RNA, 19 nt, Homo sapiens
  misc_RNA (1)...(19): siRNA sense strand
gaaagcaagcaucuucuua

SEQ ID NO: 426893 - RNA, 19 nt, Homo sapiens
  misc_RNA (1)...(19): siRNA sense strand
ggagaggacugaaugguau

SEQ ID NO: 426894 - RNA, 19 nt, Homo sapiens
  misc_RNA (1)...(19): siRNA sense strand
gaagugaaccucauauaga

SEQ ID NO: 426895 - RNA, 19 nt, Homo sapiens
  misc_RNA (1)...(19): siRNA sense strand
ggacucaaaugcagccuuu

SEQ ID NO: 426896 - RNA, 19 nt, Homo sapiens
  misc_RNA (1)...(19): siRNA sense strand
gaauggaaaugacaaauac

SEQ ID NO: 426897 - RNA, 19 nt, Homo sapiens
  misc_RNA (1)...(19): siRNA sense strand
uaaagaagauagugaagug

SEQ ID NO: 426898 - RNA, 19 nt, Homo sapiens
  misc_RNA (1)...(19): siRNA sense strand
ggaauggaaaugacaaaua

SEQ ID NO: 426899 - RNA, 19 nt, Homo sapiens
  misc_RNA (1)...(19): siRNA sense strand
ggaagcaaauuuauaugga

SEQ ID NO: 426900 - RNA, 19 nt, Homo sapiens
  misc_RNA (1)...(19): siRNA sense strand
ccaaagauuucugcacaua

SEQ ID NO: 426901 - RNA, 19 nt, Homo sapiens
  misc_RNA (1)...(19): siRNA sense strand
agaaaugccuuuaacagaa

SEQ ID NO: 426902 - RNA, 19 nt, Homo sapiens
  misc_RNA (1)...(19): siRNA sense strand
gaaaggaccagugauugua

SEQ ID NO: 426903 - RNA, 19 nt, Homo sapiens
  misc_RNA (1)...(19): siRNA sense strand
ucugguaccuguaguauaa

SEQ ID NO: 426904 - RNA, 19 nt, Homo sapiens
  misc_RNA (1)...(19): siRNA sense strand
ggaagaacuugauccugaa

SEQ ID NO: 426905 - RNA, 19 nt, Homo sapiens
  misc_RNA (1)...(19): siRNA sense strand
caacauaacuuuucaguag

SEQ ID NO: 426906 - RNA, 19 nt, Homo sapiens
  misc_RNA (1)...(19): siRNA sense strand
gaacuccaguaauugcaaa

SEQ ID NO: 426907 - RNA, 19 nt, Homo sapiens
  misc_RNA (1)...(19): siRNA sense strand
ugaagaaucucaagaaggu

SEQ ID NO: 426908 - RNA, 19 nt, Homo sapiens
  misc_RNA (1)...(19): siRNA sense strand
gaaaugccuuuaacagaag

SEQ ID NO: 426909 - RNA, 19 nt, Homo sapiens
  misc_RNA (1)...(19): siRNA sense strand
gaccuuggcauuccuauuu

SEQ ID NO: 426910 - RNA, 19 nt, Homo sapiens
  misc_RNA (1)...(19): siRNA sense strand
ggaaauaguggauuaaugg

SEQ ID NO: 426911 - RNA, 19 nt, Homo sapiens
  misc_RNA (1)...(19): siRNA sense strand
ggaaaugacaaauacugua

SEQ ID NO: 426912 - RNA, 19 nt, Homo sapiens
  misc_RNA (1)...(19): siRNA sense strand
ggacaaucaucgccagaga

SEQ ID NO: 426913 - RNA, 19 nt, Homo sapiens
  misc_RNA (1)...(19): siRNA sense strand
aaucaacccucucaucaaa

SEQ ID NO: 426914 - RNA, 19 nt, Homo sapiens
  misc_RNA (1)...(19): siRNA sense strand
ggaaauugaagaagagaaa

SEQ ID NO: 426915 - RNA, 19 nt, Homo sapiens
  misc_RNA (1)...(19): siRNA sense strand
ugauggaaauaguggauua

SEQ ID NO: 426916 - RNA, 19 nt, Homo sapiens
  misc_RNA (1)...(19): siRNA sense strand
caagaaaggaccagugauu

SEQ ID NO: 426917 - RNA, 19 nt, Homo sapiens
  misc_RNA (1)...(19): siRNA sense strand
uauagaagcucauagucuu

SEQ ID NO: 426918 - RNA, 19 nt, Homo sapiens
  misc_RNA (1)...(19): siRNA sense strand
uagaaacccugaaguuaga

SEQ ID NO: 426919 - RNA, 19 nt, Homo sapiens
  misc_RNA (1)...(19): siRNA sense strand
ugaaacagaagaugcuuua

SEQ ID NO: 426920 - RNA, 19 nt, Homo sapiens
  misc_RNA (1)...(19): siRNA sense strand
aaacaugccguauggcuua

SEQ ID NO: 426921 - RNA, 19 nt, Homo sapiens
  misc_RNA (1)...(19): siRNA sense strand
ggaaguagacauucucaau

SEQ ID NO: 426922 - RNA, 19 nt, Homo sapiens
  misc_RNA (1)...(19): siRNA sense strand
gaaguagauuuggaugauu

SEQ ID NO: 426923 - RNA, 19 nt, Homo sapiens
  misc_RNA (1)...(19): siRNA sense strand
uggagagaaugaacaaaua

SEQ ID NO: 426924 - RNA, 19 nt, Homo sapiens
  misc_RNA (1)...(19): siRNA sense strand
ugacaaagacucagaugaa

SEQ ID NO: 426925 - RNA, 19 nt, Homo sapiens
  misc_RNA (1)...(19): siRNA sense strand
gaucaagaaaugccuuuaa

SEQ ID NO: 426926 - RNA, 19 nt, Homo sapiens
  misc_RNA (1)...(19): siRNA sense strand
caagaaaggacauuaagga

SEQ ID NO: 426927 - RNA, 19 nt, Homo sapiens
  misc_RNA (1)...(19): siRNA sense strand
cagcagcuuuauaaguuua

SEQ ID NO: 426928 - RNA, 19 nt, Homo sapiens
  misc_RNA (1)...(19): siRNA sense strand
caucaaacaugccguaugg

SEQ ID NO: 426929 - RNA, 19 nt, Homo sapiens
  misc_RNA (1)...(19): siRNA sense strand
ugaaauugaugacggagaa

SEQ ID NO: 426930 - RNA, 19 nt, Homo sapiens
  misc_RNA (1)...(19): siRNA sense strand
cuaugaaacugcagagaaa

SEQ ID NO: 426931 - RNA, 19 nt, Homo sapiens
  misc_RNA (1)...(19): siRNA sense strand
gcaaauauucaguucagaa

SEQ ID NO: 426932 - RNA, 19 nt, Homo sapiens
  misc_RNA (1)...(19): siRNA sense strand
gguauaccgugguguuuga

SEQ ID NO: 426933 - RNA, 19 nt, Homo sapiens
  misc_RNA (1)...(19): siRNA sense strand
cgauugaaguugauaguau

SEQ ID NO: 426934 - RNA, 19 nt, Homo sapiens
  misc_RNA (1)...(19): siRNA sense strand
gaaugaagcaggaagugaa

SEQ ID NO: 426935 - RNA, 19 nt, Homo sapiens
  misc_RNA (1)...(19): siRNA sense strand
guaccgaggugccuucugu

SEQ ID NO: 426936 - RNA, 19 nt, Homo sapiens
  misc_RNA (1)...(19): siRNA sense strand
ccacacaauugguacaaga

SEQ ID NO: 426937 - RNA, 19 nt, Homo sapiens
  misc_RNA (1)...(19): siRNA sense strand
ucaguagcuucaccacuua

SEQ ID NO: 426938 - RNA, 19 nt, Homo sapiens
  misc_RNA (1)...(19): siRNA sense strand
gaucuucucuuccuguuac

SEQ ID NO: 426939 - RNA, 19 nt, Homo sapiens
  misc_RNA (1)...(19): siRNA sense strand
cuaacucucuuguuucuau

SEQ ID NO: 426940 - RNA, 19 nt, Homo sapiens
  misc_RNA (1)...(19): siRNA sense strand
guugaaagcucugagucua

SEQ ID NO: 426941 - RNA, 19 nt, Homo sapiens
  misc_RNA (1)...(19): siRNA sense strand
ggaagugaaccucauauag

SEQ ID NO: 426942 - RNA, 19 nt, Homo sapiens
  misc_RNA (1)...(19): siRNA sense strand
caaaugcagccuuuagaaa

SEQ ID NO: 426943 - RNA, 19 nt, Homo sapiens
  misc_RNA (1)...(19): siRNA sense strand
aacagaagaugcuuuagaa

SEQ ID NO: 426944 - RNA, 19 nt, Homo sapiens
  misc_RNA (1)...(19): siRNA sense strand
gauaauaccacacaauugg

SEQ ID NO: 426945 - RNA, 19 nt, Homo sapiens
  misc_RNA (1)...(19): siRNA sense strand
caacaacugacuagugaaa

SEQ ID NO: 426946 - RNA, 19 nt, Homo sapiens
  misc_RNA (1)...(19): siRNA sense strand
guguuuaguucgaucauuu

SEQ ID NO: 426947 - RNA, 19 nt, Homo sapiens
  misc_RNA (1)...(19): siRNA sense strand
gagaauggaauggaaauga

SEQ ID NO: 426948 - RNA, 19 nt, Homo sapiens
  misc_RNA (1)...(19): siRNA sense strand
agacucagaugaagaggaa

SEQ ID NO: 426949 - RNA, 19 nt, Homo sapiens
  misc_RNA (1)...(19): siRNA sense strand
gcaaagauuaagacuguga

SEQ ID NO: 426950 - RNA, 19 nt, Homo sapiens
  misc_RNA (1)...(19): siRNA sense strand
aagcaagcaucuucuuaaa

SEQ ID NO: 426951 - RNA, 19 nt, Homo sapiens
  misc_RNA (1)...(19): siRNA sense strand
agaaagcagugaagaggaa

SEQ ID NO: 426952 - RNA, 19 nt, Homo sapiens
  misc_RNA (1)...(19): siRNA sense strand
aggcaaagauuaagacugu

SEQ ID NO: 426953 - RNA, 19 nt, Homo sapiens
  misc_RNA (1)...(19): siRNA sense strand
gaagacagagguacuccaa

SEQ ID NO: 426954 - RNA, 19 nt, Homo sapiens
  misc_RNA (1)...(19): siRNA sense strand
gacaagcgccgucucaaug

SEQ ID NO: 426955 - RNA, 19 nt, Homo sapiens
  misc_RNA (1)...(19): siRNA sense strand
guuagaaguuggagagaau

SEQ ID NO: 426956 - RNA, 19 nt, Homo sapiens
  misc_RNA (1)...(19): siRNA sense strand
ggaaccaaagugaaaguaa

SEQ ID NO: 426957 - RNA, 19 nt, Homo sapiens
  misc_RNA (1)...(19): siRNA sense strand
acaggaggauucugacaaa

SEQ ID NO: 426958 - RNA, 19 nt, Homo sapiens
  misc_RNA (1)...(19): siRNA sense strand
gcuauuaucagcaaguuga

SEQ ID NO: 426959 - RNA, 19 nt, Homo sapiens
  misc_RNA (1)...(19): siRNA sense strand
gaccagugauuguauugga

SEQ ID NO: 426960 - RNA, 19 nt, Homo sapiens
  misc_RNA (1)...(19): siRNA sense strand
gcaggaagugaaccucaua

SEQ ID NO: 426961 - RNA, 19 nt, Homo sapiens
  misc_RNA (1)...(19): siRNA sense strand
ggguggaugugacaauauu

SEQ ID NO: 426962 - RNA, 19 nt, Homo sapiens
  misc_RNA (1)...(19): siRNA sense strand
agacagagguacuccaauc

SEQ ID NO: 426963 - RNA, 19 nt, Homo sapiens
  misc_RNA (1)...(19): siRNA sense strand
uccagcagcuuuauaaguu

SEQ ID NO: 426964 - RNA, 19 nt, Homo sapiens
  misc_RNA (1)...(19): siRNA sense strand
cuagaguuguuccugauaa

SEQ ID NO: 426965 - RNA, 19 nt, Homo sapiens
  misc_RNA (1)...(19): siRNA sense strand
gaaguagacauucucaauc

SEQ ID NO: 426966 - RNA, 19 nt, Homo sapiens
  misc_RNA (1)...(19): siRNA sense strand
caacggagaggacugaaug

SEQ ID NO: 426967 - RNA, 19 nt, Homo sapiens
  misc_RNA (1)...(19): siRNA sense strand
gcagugaagaggaagauga

SEQ ID NO: 426968 - RNA, 19 nt, Homo sapiens
  misc_RNA (1)...(19): siRNA sense strand
ugaaugguauccugcuuug

SEQ ID NO: 426969 - RNA, 19 nt, Homo sapiens
  misc_RNA (1)...(19): siRNA sense strand
ugaaguagauuuggaugau

SEQ ID NO: 426970 - RNA, 19 nt, Homo sapiens
  misc_RNA (1)...(19): siRNA sense strand
aagugaaccucauauagaa

SEQ ID NO: 426971 - RNA, 19 nt, Homo sapiens
  misc_RNA (1)...(19): siRNA sense strand
gaagacgaagcaagacaaa

SEQ ID NO: 426972 - RNA, 19 nt, Homo sapiens
  misc_RNA (1)...(19): siRNA sense strand
ggaugugacaauauugaua

SEQ ID NO: 426973 - RNA, 19 nt, Homo sapiens
  misc_RNA (1)...(19): siRNA sense strand
aagcaaaugugacucugaa

SEQ ID NO: 426974 - RNA, 19 nt, Homo sapiens
  misc_RNA (1)...(19): siRNA sense strand
caugucaucugcuucauca

SEQ ID NO: 426975 - RNA, 19 nt, Homo sapiens
  misc_RNA (1)...(19): siRNA sense strand
cagaagaggccaagugaug

SEQ ID NO: 426976 - RNA, 19 nt, Homo sapiens
  misc_RNA (1)...(19): siRNA sense strand
agagugauauaacgauuga

SEQ ID NO: 426977 - RNA, 19 nt, Homo sapiens
  misc_RNA (1)...(19): siRNA sense strand
uccaacaacugacuaguga

SEQ ID NO: 426978 - RNA, 19 nt, Homo sapiens
  misc_RNA (1)...(19): siRNA sense strand
cuacagaagaugaaauuga

SEQ ID NO: 426979 - RNA, 19 nt, Homo sapiens
  misc_RNA (1)...(19): siRNA sense strand
gaaaguaucucuaugguuu

SEQ ID NO: 426980 - RNA, 19 nt, Homo sapiens
  misc_RNA (1)...(19): siRNA sense strand
ggaagaaacugaaagcaaa

SEQ ID NO: 426981 - RNA, 19 nt, Homo sapiens
  misc_RNA (1)...(19): siRNA sense strand
gagaauugcucgagaugua

SEQ ID NO: 426982 - RNA, 19 nt, Homo sapiens
  misc_RNA (1)...(19): siRNA sense strand
uaacagaagugaagaguga

SEQ ID NO: 426983 - RNA, 19 nt, Homo sapiens
  misc_RNA (1)...(19): siRNA sense strand
gaaccaaagugaaaguaaa

SEQ ID NO: 426984 - RNA, 19 nt, Homo sapiens
  misc_RNA (1)...(19): siRNA sense strand
gaaaggacauuaaggaagu

SEQ ID NO: 426985 - RNA, 19 nt, Homo sapiens
  misc_RNA (1)...(19): siRNA sense strand
ggacaaagguggaccaaag

SEQ ID NO: 426986 - RNA, 19 nt, Homo sapiens
  misc_RNA (1)...(19): siRNA sense strand
gguacaagaugaccaagua

SEQ ID NO: 426987 - RNA, 19 nt, Homo sapiens
  misc_RNA (1)...(19): siRNA sense strand
gagcgaacauugagacgua

SEQ ID NO: 426988 - RNA, 19 nt, Homo sapiens
  misc_RNA (1)...(19): siRNA sense strand
ggauguagaugaugacuau

SEQ ID NO: 426989 - RNA, 19 nt, Homo sapiens
  misc_RNA (1)...(19): siRNA sense strand
ggugaaggcugacaggaua

SEQ ID NO: 426990 - RNA, 19 nt, Homo sapiens
  misc_RNA (1)...(19): siRNA sense strand
aaucugagcucuccacuaa

SEQ ID NO: 426991 - RNA, 19 nt, Homo sapiens
  misc_RNA (1)...(19): siRNA sense strand
cagaagaaguuaagaaaga

SEQ ID NO: 426992 - RNA, 19 nt, Homo sapiens
  misc_RNA (1)...(19): siRNA sense strand
gaaagcaagcaucuucuua

SEQ ID NO: 426993 - RNA, 19 nt, Homo sapiens
  misc_RNA (1)...(19): siRNA sense strand
ggagaggacugaaugguau

SEQ ID NO: 426994 - RNA, 19 nt, Homo sapiens
  misc_RNA (1)...(19): siRNA sense strand
gaagugaaccucauauaga

SEQ ID NO: 426995 - RNA, 19 nt, Homo sapiens
  misc_RNA (1)...(19): siRNA sense strand
ggacucaaaugcagccuuu

SEQ ID NO: 426996 - RNA, 19 nt, Homo sapiens
  misc_RNA (1)...(19): siRNA sense strand
gaauggaaaugacaaauac

SEQ ID NO: 426997 - RNA, 19 nt, Homo sapiens
  misc_RNA (1)...(19): siRNA sense strand
uaaagaagauagugaagug

SEQ ID NO: 426998 - RNA, 19 nt, Homo sapiens
  misc_RNA (1)...(19): siRNA sense strand
ggaauggaaaugacaaaua

SEQ ID NO: 426999 - RNA, 19 nt, Homo sapiens
  misc_RNA (1)...(19): siRNA sense strand
ggaagcaaauuuauaugga

SEQ ID NO: 427000 - RNA, 19 nt, Homo sapiens
  misc_RNA (1)...(19): siRNA sense strand
ccaaagauuucugcacaua

SEQ ID NO: 427001 - RNA, 19 nt, Homo sapiens
  misc_RNA (1)...(19): siRNA sense strand
agaaaugccuuuaacagaa

SEQ ID NO: 427002 - RNA, 19 nt, Homo sapiens
  misc_RNA (1)...(19): siRNA sense strand
gaaaggaccagugauugua

SEQ ID NO: 427003 - RNA, 19 nt, Homo sapiens
  misc_RNA (1)...(19): siRNA sense strand
ucugguaccuguaguauaa

SEQ ID NO: 427004 - RNA, 19 nt, Homo sapiens
  misc_RNA (1)...(19): siRNA sense strand
ggaagaacuugauccugaa

SEQ ID NO: 427005 - RNA, 19 nt, Homo sapiens
  misc_RNA (1)...(19): siRNA sense strand
caacauaacuuuucaguag

SEQ ID NO: 427006 - RNA, 19 nt, Homo sapiens
  misc_RNA (1)...(19): siRNA sense strand
gaacuccaguaauugcaaa

SEQ ID NO: 427007 - RNA, 19 nt, Homo sapiens
  misc_RNA (1)...(19): siRNA sense strand
ugaagaaucucaagaaggu

SEQ ID NO: 427008 - RNA, 19 nt, Homo sapiens
  misc_RNA (1)...(19): siRNA sense strand
gaaaugccuuuaacagaag

SEQ ID NO: 427009 - RNA, 19 nt, Homo sapiens
  misc_RNA (1)...(19): siRNA sense strand
gaccuuggcauuccuauuu

SEQ ID NO: 427010 - RNA, 19 nt, Homo sapiens
  misc_RNA (1)...(19): siRNA sense strand
ggaaauaguggauuaaugg

SEQ ID NO: 427011 - RNA, 19 nt, Homo sapiens
  misc_RNA (1)...(19): siRNA sense strand
ggaaaugacaaauacugua

SEQ ID NO: 427012 - RNA, 19 nt, Homo sapiens
  misc_RNA (1)...(19): siRNA sense strand
ggacaaucaucgccagaga

SEQ ID NO: 427013 - RNA, 19 nt, Homo sapiens
  misc_RNA (1)...(19): siRNA sense strand
aaucaacccucucaucaaa

SEQ ID NO: 427014 - RNA, 19 nt, Homo sapiens
  misc_RNA (1)...(19): siRNA sense strand
ggaaauugaagaagagaaa

SEQ ID NO: 427015 - RNA, 19 nt, Homo sapiens
  misc_RNA (1)...(19): siRNA sense strand
ugauggaaauaguggauua

SEQ ID NO: 427016 - RNA, 19 nt, Homo sapiens
  misc_RNA (1)...(19): siRNA sense strand
caagaaaggaccagugauu

SEQ ID NO: 427017 - RNA, 19 nt, Homo sapiens
  misc_RNA (1)...(19): siRNA sense strand
uauagaagcucauagucuu

SEQ ID NO: 427018 - RNA, 19 nt, Homo sapiens
  misc_RNA (1)...(19): siRNA sense strand
uagaaacccugaaguuaga

SEQ ID NO: 427019 - RNA, 19 nt, Homo sapiens
  misc_RNA (1)...(19): siRNA sense strand
ugaaacagaagaugcuuua

SEQ ID NO: 427020 - RNA, 19 nt, Homo sapiens
  misc_RNA (1)...(19): siRNA sense strand
aaacaugccguauggcuua

SEQ ID NO: 427021 - RNA, 19 nt, Homo sapiens
  misc_RNA (1)...(19): siRNA sense strand
ggaaguagacauucucaau

SEQ ID NO: 427022 - RNA, 19 nt, Homo sapiens
  misc_RNA (1)...(19): siRNA sense strand
gaaguagauuuggaugauu

SEQ ID NO: 427023 - RNA, 19 nt, Homo sapiens
  misc_RNA (1)...(19): siRNA sense strand
uggagagaaugaacaaaua

SEQ ID NO: 427024 - RNA, 19 nt, Homo sapiens
  misc_RNA (1)...(19): siRNA sense strand
ugacaaagacucagaugaa

SEQ ID NO: 427025 - RNA, 19 nt, Homo sapiens
  misc_RNA (1)...(19): siRNA sense strand
gaucaagaaaugccuuuaa

SEQ ID NO: 427026 - RNA, 19 nt, Homo sapiens
  misc_RNA (1)...(19): siRNA sense strand
caagaaaggacauuaagga

SEQ ID NO: 427027 - RNA, 19 nt, Homo sapiens
  misc_RNA (1)...(19): siRNA sense strand
cagcagcuuuauaaguuua

SEQ ID NO: 427028 - RNA, 19 nt, Homo sapiens
  misc_RNA (1)...(19): siRNA sense strand
caucaaacaugccguaugg

SEQ ID NO: 427029 - RNA, 19 nt, Homo sapiens
  misc_RNA (1)...(19): siRNA sense strand
ugaaauugaugacggagaa

SEQ ID NO: 427030 - RNA, 19 nt, Homo sapiens
  misc_RNA (1)...(19): siRNA sense strand
cuaugaaacugcagagaaa

SEQ ID NO: 427031 - RNA, 19 nt, Homo sapiens
  misc_RNA (1)...(19): siRNA sense strand
gcaaauauucaguucagaa

SEQ ID NO: 427032 - RNA, 19 nt, Homo sapiens
  misc_RNA (1)...(19): siRNA sense strand
gguauaccgugguguuuga

SEQ ID NO: 427033 - RNA, 19 nt, Homo sapiens
  misc_RNA (1)...(19): siRNA sense strand
cgauugaaguugauaguau

SEQ ID NO: 427034 - RNA, 19 nt, Homo sapiens
  misc_RNA (1)...(19): siRNA sense strand
gaaugaagcaggaagugaa

SEQ ID NO: 427035 - RNA, 19 nt, Homo sapiens
  misc_RNA (1)...(19): siRNA sense strand
guaccgaggugccuucugu

SEQ ID NO: 427036 - RNA, 19 nt, Homo sapiens
  misc_RNA (1)...(19): siRNA sense strand
ccacacaauugguacaaga

SEQ ID NO: 427037 - RNA, 19 nt, Homo sapiens
  misc_RNA (1)...(19): siRNA sense strand
ucaguagcuucaccacuua

SEQ ID NO: 427038 - RNA, 19 nt, Homo sapiens
  misc_RNA (1)...(19): siRNA sense strand
gaucuucucuuccuguuac

SEQ ID NO: 427039 - RNA, 19 nt, Homo sapiens
  misc_RNA (1)...(19): siRNA sense strand
cuaacucucuuguuucuau

SEQ ID NO: 427040 - RNA, 19 nt, Homo sapiens
  misc_RNA (1)...(19): siRNA sense strand
guugaaagcucugagucua

SEQ ID NO: 427041 - RNA, 19 nt, Homo sapiens
  misc_RNA (1)...(19): siRNA sense strand
ggaagugaaccucauauag

SEQ ID NO: 427042 - RNA, 19 nt, Homo sapiens
  misc_RNA (1)...(19): siRNA sense strand
caaaugcagccuuuagaaa

SEQ ID NO: 427043 - RNA, 19 nt, Homo sapiens
  misc_RNA (1)...(19): siRNA sense strand
aacagaagaugcuuuagaa

SEQ ID NO: 427044 - RNA, 19 nt, Homo sapiens
  misc_RNA (1)...(19): siRNA sense strand
gauaauaccacacaauugg

SEQ ID NO: 427045 - RNA, 19 nt, Homo sapiens
  misc_RNA (1)...(19): siRNA sense strand
caacaacugacuagugaaa

SEQ ID NO: 427046 - RNA, 19 nt, Homo sapiens
  misc_RNA (1)...(19): siRNA sense strand
guguuuaguucgaucauuu

SEQ ID NO: 427047 - RNA, 19 nt, Homo sapiens
  misc_RNA (1)...(19): siRNA sense strand
gagaauggaauggaaauga

SEQ ID NO: 427048 - RNA, 19 nt, Homo sapiens
  misc_RNA (1)...(19): siRNA sense strand
agacucagaugaagaggaa

SEQ ID NO: 427049 - RNA, 19 nt, Homo sapiens
  misc_RNA (1)...(19): siRNA sense strand
gcaaagauuaagacuguga

SEQ ID NO: 427050 - RNA, 19 nt, Homo sapiens
  misc_RNA (1)...(19): siRNA sense strand
aagcaagcaucuucuuaaa

SEQ ID NO: 427051 - RNA, 19 nt, Homo sapiens
  misc_RNA (1)...(19): siRNA sense strand
agaaagcagugaagaggaa

SEQ ID NO: 427052 - RNA, 19 nt, Homo sapiens
  misc_RNA (1)...(19): siRNA sense strand
aggcaaagauuaagacugu

SEQ ID NO: 427053 - RNA, 19 nt, Homo sapiens
  misc_RNA (1)...(19): siRNA sense strand
gaagacagagguacuccaa

SEQ ID NO: 427054 - RNA, 19 nt, Homo sapiens
  misc_RNA (1)...(19): siRNA sense strand
gacaagcgccgucucaaug

SEQ ID NO: 427055 - RNA, 19 nt, Homo sapiens
  misc_RNA (1)...(19): siRNA sense strand
guuagaaguuggagagaau

SEQ ID NO: 427056 - RNA, 19 nt, Homo sapiens
  misc_RNA (1)...(19): siRNA sense strand
ggaaccaaagugaaaguaa

SEQ ID NO: 427057 - RNA, 19 nt, Homo sapiens
  misc_RNA (1)...(19): siRNA sense strand
acaggaggauucugacaaa

SEQ ID NO: 427058 - RNA, 19 nt, Homo sapiens
  misc_RNA (1)...(19): siRNA sense strand
gcuauuaucagcaaguuga

SEQ ID NO: 427059 - RNA, 19 nt, Homo sapiens
  misc_RNA (1)...(19): siRNA sense strand
gaccagugauuguauugga

SEQ ID NO: 427060 - RNA, 19 nt, Homo sapiens
  misc_RNA (1)...(19): siRNA sense strand
gcaggaagugaaccucaua

SEQ ID NO: 427061 - RNA, 19 nt, Homo sapiens
  misc_RNA (1)...(19): siRNA sense strand
ggguggaugugacaauauu

SEQ ID NO: 427062 - RNA, 19 nt, Homo sapiens
  misc_RNA (1)...(19): siRNA sense strand
agacagagguacuccaauc

SEQ ID NO: 427063 - RNA, 19 nt, Homo sapiens
  misc_RNA (1)...(19): siRNA sense strand
uccagcagcuuuauaaguu

SEQ ID NO: 427064 - RNA, 19 nt, Homo sapiens
  misc_RNA (1)...(19): siRNA sense strand
cuagaguuguuccugauaa

SEQ ID NO: 427065 - RNA, 19 nt, Homo sapiens
  misc_RNA (1)...(19): siRNA sense strand
gaaguagacauucucaauc

SEQ ID NO: 427066 - RNA, 19 nt, Homo sapiens
  misc_RNA (1)...(19): siRNA sense strand
caacggagaggacugaaug

SEQ ID NO: 427067 - RNA, 19 nt, Homo sapiens
  misc_RNA (1)...(19): siRNA sense strand
gcagugaagaggaagauga

SEQ ID NO: 427068 - RNA, 19 nt, Homo sapiens
  misc_RNA (1)...(19): siRNA sense strand
ugaaugguauccugcuuug

SEQ ID NO: 427069 - RNA, 19 nt, Homo sapiens
  misc_RNA (1)...(19): siRNA sense strand
ugaaguagauuuggaugau

SEQ ID NO: 427070 - RNA, 19 nt, Homo sapiens
  misc_RNA (1)...(19): siRNA sense strand
aagugaaccucauauagaa

SEQ ID NO: 427071 - RNA, 19 nt, Homo sapiens
  misc_RNA (1)...(19): siRNA sense strand
gaagacgaagcaagacaaa

SEQ ID NO: 427072 - RNA, 19 nt, Homo sapiens
  misc_RNA (1)...(19): siRNA sense strand
ggaugugacaauauugaua

SEQ ID NO: 427073 - RNA, 19 nt, Homo sapiens
  misc_RNA (1)...(19): siRNA sense strand
aagcaaaugugacucugaa

SEQ ID NO: 427074 - RNA, 19 nt, Homo sapiens
  misc_RNA (1)...(19): siRNA sense strand
caugucaucugcuucauca

SEQ ID NO: 427075 - RNA, 19 nt, Homo sapiens
  misc_RNA (1)...(19): siRNA sense strand
cagaagaggccaagugaug

SEQ ID NO: 427076 - RNA, 19 nt, Homo sapiens
  misc_RNA (1)...(19): siRNA sense strand
agagugauauaacgauuga

SEQ ID NO: 427077 - RNA, 19 nt, Homo sapiens
  misc_RNA (1)...(19): siRNA sense strand
uccaacaacugacuaguga

SEQ ID NO: 427078 - RNA, 19 nt, Homo sapiens
  misc_RNA (1)...(19): siRNA sense strand
cuacagaagaugaaauuga

SEQ ID NO: 427079 - RNA, 19 nt, Homo sapiens
  misc_RNA (1)...(19): siRNA sense strand
gaaaguaucucuaugguuu

SEQ ID NO: 427080 - RNA, 19 nt, Homo sapiens
  misc_RNA (1)...(19): siRNA sense strand
ggaagaaacugaaagcaaa

SEQ ID NO: 427081 - RNA, 19 nt, Homo sapiens
  misc_RNA (1)...(19): siRNA sense strand
gagaauugcucgagaugua

SEQ ID NO: 427082 - RNA, 19 nt, Homo sapiens
  misc_RNA (1)...(19): siRNA sense strand
uaacagaagugaagaguga

SEQ ID NO: 427083 - RNA, 19 nt, Homo sapiens
  misc_RNA (1)...(19): siRNA sense strand
gaaccaaagugaaaguaaa

SEQ ID NO: 427084 - RNA, 19 nt, Homo sapiens
  misc_RNA (1)...(19): siRNA sense strand
gaaaggacauuaaggaagu

SEQ ID NO: 427085 - RNA, 19 nt, Homo sapiens
  misc_RNA (1)...(19): siRNA sense strand
ggacaaagguggaccaaag

SEQ ID NO: 427086 - RNA, 19 nt, Homo sapiens
  misc_RNA (1)...(19): siRNA sense strand
gguacaagaugaccaagua

SEQ ID NO: 427087 - RNA, 19 nt, Homo sapiens
  misc_RNA (1)...(19): siRNA sense strand
gagcgaacauugagacgua

SEQ ID NO: 427088 - RNA, 19 nt, Homo sapiens
  misc_RNA (1)...(19): siRNA sense strand
ggauguagaugaugacuau

SEQ ID NO: 427089 - RNA, 19 nt, Homo sapiens
  misc_RNA (1)...(19): siRNA sense strand
ggugaaggcugacaggaua

SEQ ID NO: 427090 - RNA, 19 nt, Homo sapiens
  misc_RNA (1)...(19): siRNA sense strand
aaucugagcucuccacuaa

SEQ ID NO: 427091 - RNA, 19 nt, Homo sapiens
  misc_RNA (1)...(19): siRNA sense strand
cagaagaaguuaagaaaga

SEQ ID NO: 427092 - RNA, 19 nt, Homo sapiens
  misc_RNA (1)...(19): siRNA sense strand
gaaagcaagcaucuucuua

SEQ ID NO: 427093 - RNA, 19 nt, Homo sapiens
  misc_RNA (1)...(19): siRNA sense strand
ggagaggacugaaugguau

SEQ ID NO: 427094 - RNA, 19 nt, Homo sapiens
  misc_RNA (1)...(19): siRNA sense strand
gaagugaaccucauauaga

SEQ ID NO: 427095 - RNA, 19 nt, Homo sapiens
  misc_RNA (1)...(19): siRNA sense strand
ggacucaaaugcagccuuu

SEQ ID NO: 427096 - RNA, 19 nt, Homo sapiens
  misc_RNA (1)...(19): siRNA sense strand
gaauggaaaugacaaauac

SEQ ID NO: 427097 - RNA, 19 nt, Homo sapiens
  misc_RNA (1)...(19): siRNA sense strand
uaaagaagauagugaagug

SEQ ID NO: 427098 - RNA, 19 nt, Homo sapiens
  misc_RNA (1)...(19): siRNA sense strand
ggaauggaaaugacaaaua

SEQ ID NO: 427099 - RNA, 19 nt, Homo sapiens
  misc_RNA (1)...(19): siRNA sense strand
ggaagcaaauuuauaugga

SEQ ID NO: 427100 - RNA, 19 nt, Homo sapiens
  misc_RNA (1)...(19): siRNA sense strand
ccaaagauuucugcacaua

SEQ ID NO: 427101 - RNA, 19 nt, Homo sapiens
  misc_RNA (1)...(19): siRNA sense strand
agaaaugccuuuaacagaa

SEQ ID NO: 427102 - RNA, 19 nt, Homo sapiens
  misc_RNA (1)...(19): siRNA sense strand
gaaaggaccagugauugua

SEQ ID NO: 427103 - RNA, 19 nt, Homo sapiens
  misc_RNA (1)...(19): siRNA sense strand
ucugguaccuguaguauaa

SEQ ID NO: 427104 - RNA, 19 nt, Homo sapiens
  misc_RNA (1)...(19): siRNA sense strand
ggaagaacuugauccugaa

SEQ ID NO: 427105 - RNA, 19 nt, Homo sapiens
  misc_RNA (1)...(19): siRNA sense strand
caacauaacuuuucaguag

SEQ ID NO: 427106 - RNA, 19 nt, Homo sapiens
  misc_RNA (1)...(19): siRNA sense strand
gaacuccaguaauugcaaa

SEQ ID NO: 427107 - RNA, 19 nt, Homo sapiens
  misc_RNA (1)...(19): siRNA sense strand
ugaagaaucucaagaaggu

SEQ ID NO: 427108 - RNA, 19 nt, Homo sapiens
  misc_RNA (1)...(19): siRNA sense strand
gaaaugccuuuaacagaag

SEQ ID NO: 427109 - RNA, 19 nt, Homo sapiens
  misc_RNA (1)...(19): siRNA sense strand
gaccuuggcauuccuauuu

SEQ ID NO: 427110 - RNA, 19 nt, Homo sapiens
  misc_RNA (1)...(19): siRNA sense strand
ggaaauaguggauuaaugg

SEQ ID NO: 427111 - RNA, 19 nt, Homo sapiens
  misc_RNA (1)...(19): siRNA sense strand
ggaaaugacaaauacugua

SEQ ID NO: 427112 - RNA, 19 nt, Homo sapiens
  misc_RNA (1)...(19): siRNA sense strand
ggacaaucaucgccagaga

SEQ ID NO: 427113 - RNA, 19 nt, Homo sapiens
  misc_RNA (1)...(19): siRNA sense strand
aaucaacccucucaucaaa

SEQ ID NO: 427114 - RNA, 19 nt, Homo sapiens
  misc_RNA (1)...(19): siRNA sense strand
ggaaauugaagaagagaaa

SEQ ID NO: 427115 - RNA, 19 nt, Homo sapiens
  misc_RNA (1)...(19): siRNA sense strand
ugauggaaauaguggauua

SEQ ID NO: 427116 - RNA, 19 nt, Homo sapiens
  misc_RNA (1)...(19): siRNA sense strand
caagaaaggaccagugauu

SEQ ID NO: 427117 - RNA, 19 nt, Homo sapiens
  misc_RNA (1)...(19): siRNA sense strand
uauagaagcucauagucuu

SEQ ID NO: 427118 - RNA, 19 nt, Homo sapiens
  misc_RNA (1)...(19): siRNA sense strand
uagaaacccugaaguuaga

SEQ ID NO: 427119 - RNA, 19 nt, Homo sapiens
  misc_RNA (1)...(19): siRNA sense strand
ugaaacagaagaugcuuua

SEQ ID NO: 427120 - RNA, 19 nt, Homo sapiens
  misc_RNA (1)...(19): siRNA sense strand
aaacaugccguauggcuua

SEQ ID NO: 427121 - RNA, 19 nt, Homo sapiens
  misc_RNA (1)...(19): siRNA sense strand
ggaaguagacauucucaau

SEQ ID NO: 427122 - RNA, 19 nt, Homo sapiens
  misc_RNA (1)...(19): siRNA sense strand
gaaguagauuuggaugauu

SEQ ID NO: 427123 - RNA, 19 nt, Homo sapiens
  misc_RNA (1)...(19): siRNA sense strand
uggagagaaugaacaaaua

SEQ ID NO: 427124 - RNA, 19 nt, Homo sapiens
  misc_RNA (1)...(19): siRNA sense strand
ugacaaagacucagaugaa

SEQ ID NO: 427125 - RNA, 19 nt, Homo sapiens
  misc_RNA (1)...(19): siRNA sense strand
gaucaagaaaugccuuuaa

SEQ ID NO: 427126 - RNA, 19 nt, Homo sapiens
  misc_RNA (1)...(19): siRNA sense strand
caagaaaggacauuaagga

SEQ ID NO: 427127 - RNA, 19 nt, Homo sapiens
  misc_RNA (1)...(19): siRNA sense strand
cagcagcuuuauaaguuua

SEQ ID NO: 427128 - RNA, 19 nt, Homo sapiens
  misc_RNA (1)...(19): siRNA sense strand
caucaaacaugccguaugg

SEQ ID NO: 427129 - RNA, 19 nt, Homo sapiens
  misc_RNA (1)...(19): siRNA sense strand
ugaaauugaugacggagaa

SEQ ID NO: 427130 - RNA, 19 nt, Homo sapiens
  misc_RNA (1)...(19): siRNA sense strand
cuaugaaacugcagagaaa

SEQ ID NO: 427131 - RNA, 19 nt, Homo sapiens
  misc_RNA (1)...(19): siRNA sense strand
gcaaauauucaguucagaa

SEQ ID NO: 427132 - RNA, 19 nt, Homo sapiens
  misc_RNA (1)...(19): siRNA sense strand
gguauaccgugguguuuga

SEQ ID NO: 427133 - RNA, 19 nt, Homo sapiens
  misc_RNA (1)...(19): siRNA sense strand
cgauugaaguugauaguau

SEQ ID NO: 427134 - RNA, 19 nt, Homo sapiens
  misc_RNA (1)...(19): siRNA sense strand
gaaugaagcaggaagugaa

SEQ ID NO: 427135 - RNA, 19 nt, Homo sapiens
  misc_RNA (1)...(19): siRNA sense strand
guaccgaggugccuucugu

SEQ ID NO: 427136 - RNA, 19 nt, Homo sapiens
  misc_RNA (1)...(19): siRNA sense strand
ccacacaauugguacaaga

SEQ ID NO: 427137 - RNA, 19 nt, Homo sapiens
  misc_RNA (1)...(19): siRNA sense strand
ucaguagcuucaccacuua

SEQ ID NO: 427138 - RNA, 19 nt, Homo sapiens
  misc_RNA (1)...(19): siRNA sense strand
gaucuucucuuccuguuac

SEQ ID NO: 427139 - RNA, 19 nt, Homo sapiens
  misc_RNA (1)...(19): siRNA sense strand
cuaacucucuuguuucuau

SEQ ID NO: 427140 - RNA, 19 nt, Homo sapiens
  misc_RNA (1)...(19): siRNA sense strand
guugaaagcucugagucua

SEQ ID NO: 427141 - RNA, 19 nt, Homo sapiens
  misc_RNA (1)...(19): siRNA sense strand
ggaagugaaccucauauag

SEQ ID NO: 427142 - RNA, 19 nt, Homo sapiens
  misc_RNA (1)...(19): siRNA sense strand
caaaugcagccuuuagaaa

SEQ ID NO: 427143 - RNA, 19 nt, Homo sapiens
  misc_RNA (1)...(19): siRNA sense strand
aacagaagaugcuuuagaa

SEQ ID NO: 427144 - RNA, 19 nt, Homo sapiens
  misc_RNA (1)...(19): siRNA sense strand
gauaauaccacacaauugg

SEQ ID NO: 427145 - RNA, 19 nt, Homo sapiens
  misc_RNA (1)...(19): siRNA sense strand
caacaacugacuagugaaa

SEQ ID NO: 427146 - RNA, 19 nt, Homo sapiens
  misc_RNA (1)...(19): siRNA sense strand
guguuuaguucgaucauuu

SEQ ID NO: 427147 - RNA, 19 nt, Homo sapiens
  misc_RNA (1)...(19): siRNA sense strand
gagaauggaauggaaauga

SEQ ID NO: 427148 - RNA, 19 nt, Homo sapiens
  misc_RNA (1)...(19): siRNA sense strand
agacucagaugaagaggaa

SEQ ID NO: 427149 - RNA, 19 nt, Homo sapiens
  misc_RNA (1)...(19): siRNA sense strand
gcaaagauuaagacuguga

SEQ ID NO: 427150 - RNA, 19 nt, Homo sapiens
  misc_RNA (1)...(19): siRNA sense strand
aagcaagcaucuucuuaaa

SEQ ID NO: 427151 - RNA, 19 nt, Homo sapiens
  misc_RNA (1)...(19): siRNA sense strand
agaaagcagugaagaggaa

SEQ ID NO: 427152 - RNA, 19 nt, Homo sapiens
  misc_RNA (1)...(19): siRNA sense strand
aggcaaagauuaagacugu

SEQ ID NO: 427153 - RNA, 19 nt, Homo sapiens
  misc_RNA (1)...(19): siRNA sense strand
gaagacagagguacuccaa

SEQ ID NO: 427154 - RNA, 19 nt, Homo sapiens
  misc_RNA (1)...(19): siRNA sense strand
gacaagcgccgucucaaug

SEQ ID NO: 427155 - RNA, 19 nt, Homo sapiens
  misc_RNA (1)...(19): siRNA sense strand
guuagaaguuggagagaau

SEQ ID NO: 427156 - RNA, 19 nt, Homo sapiens
  misc_RNA (1)...(19): siRNA sense strand
ggaaccaaagugaaaguaa

SEQ ID NO: 427157 - RNA, 19 nt, Homo sapiens
  misc_RNA (1)...(19): siRNA sense strand
acaggaggauucugacaaa

SEQ ID NO: 427158 - RNA, 19 nt, Homo sapiens
  misc_RNA (1)...(19): siRNA sense strand
gcuauuaucagcaaguuga

SEQ ID NO: 427159 - RNA, 19 nt, Homo sapiens
  misc_RNA (1)...(19): siRNA sense strand
gaccagugauuguauugga

SEQ ID NO: 427160 - RNA, 19 nt, Homo sapiens
  misc_RNA (1)...(19): siRNA sense strand
gcaggaagugaaccucaua

SEQ ID NO: 427161 - RNA, 19 nt, Homo sapiens
  misc_RNA (1)...(19): siRNA sense strand
ggguggaugugacaauauu

SEQ ID NO: 427162 - RNA, 19 nt, Homo sapiens
  misc_RNA (1)...(19): siRNA sense strand
agacagagguacuccaauc

SEQ ID NO: 427163 - RNA, 19 nt, Homo sapiens
  misc_RNA (1)...(19): siRNA sense strand
uccagcagcuuuauaaguu

SEQ ID NO: 427164 - RNA, 19 nt, Homo sapiens
  misc_RNA (1)...(19): siRNA sense strand
cuagaguuguuccugauaa

SEQ ID NO: 427165 - RNA, 19 nt, Homo sapiens
  misc_RNA (1)...(19): siRNA sense strand
gaaguagacauucucaauc

SEQ ID NO: 427166 - RNA, 19 nt, Homo sapiens
  misc_RNA (1)...(19): siRNA sense strand
caacggagaggacugaaug

SEQ ID NO: 427167 - RNA, 19 nt, Homo sapiens
  misc_RNA (1)...(19): siRNA sense strand
gcagugaagaggaagauga

SEQ ID NO: 427168 - RNA, 19 nt, Homo sapiens
  misc_RNA (1)...(19): siRNA sense strand
ugaaugguauccugcuuug

SEQ ID NO: 427169 - RNA, 19 nt, Homo sapiens
  misc_RNA (1)...(19): siRNA sense strand
ugaaguagauuuggaugau

SEQ ID NO: 427170 - RNA, 19 nt, Homo sapiens
  misc_RNA (1)...(19): siRNA sense strand
aagugaaccucauauagaa

SEQ ID NO: 427171 - RNA, 19 nt, Homo sapiens
  misc_RNA (1)...(19): siRNA sense strand
gaagacgaagcaagacaaa

SEQ ID NO: 427172 - RNA, 19 nt, Homo sapiens
  misc_RNA (1)...(19): siRNA sense strand
ggaugugacaauauugaua

SEQ ID NO: 427173 - RNA, 19 nt, Homo sapiens
  misc_RNA (1)...(19): siRNA sense strand
aagcaaaugugacucugaa

SEQ ID NO: 427174 - RNA, 19 nt, Homo sapiens
  misc_RNA (1)...(19): siRNA sense strand
caugucaucugcuucauca

SEQ ID NO: 427175 - RNA, 19 nt, Homo sapiens
  misc_RNA (1)...(19): siRNA sense strand
cagaagaggccaagugaug

SEQ ID NO: 427176 - RNA, 19 nt, Homo sapiens
  misc_RNA (1)...(19): siRNA sense strand
agagugauauaacgauuga

SEQ ID NO: 427177 - RNA, 19 nt, Homo sapiens
  misc_RNA (1)...(19): siRNA sense strand
uccaacaacugacuaguga

SEQ ID NO: 427178 - RNA, 19 nt, Homo sapiens
  misc_RNA (1)...(19): siRNA sense strand
cuacagaagaugaaauuga

SEQ ID NO: 427179 - RNA, 19 nt, Homo sapiens
  misc_RNA (1)...(19): siRNA sense strand
gaacggcaccuaugaguuu

SEQ ID NO: 427180 - RNA, 19 nt, Homo sapiens
  misc_RNA (1)...(19): siRNA sense strand
gacaagcaguuucugauuu

SEQ ID NO: 427181 - RNA, 19 nt, Homo sapiens
  misc_RNA (1)...(19): siRNA sense strand
gaaggagaauucauguuga

SEQ ID NO: 427182 - RNA, 19 nt, Homo sapiens
  misc_RNA (1)...(19): siRNA sense strand
ggaaggagaauucauguug

SEQ ID NO: 427183 - RNA, 19 nt, Homo sapiens
  misc_RNA (1)...(19): siRNA sense strand
guacaagaaucccaagguu

SEQ ID NO: 427184 - RNA, 19 nt, Homo sapiens
  misc_RNA (1)...(19): siRNA sense strand
ggaaugugauggaauuuua

SEQ ID NO: 427185 - RNA, 19 nt, Homo sapiens
  misc_RNA (1)...(19): siRNA sense strand
caaccaaugugugcagaua

SEQ ID NO: 427186 - RNA, 19 nt, Homo sapiens
  misc_RNA (1)...(19): siRNA sense strand
ggucaacuauggccucaaa

SEQ ID NO: 427187 - RNA, 19 nt, Homo sapiens
  misc_RNA (1)...(19): siRNA sense strand
ggaaaugggcaguuuaaug

SEQ ID NO: 427188 - RNA, 19 nt, Homo sapiens
  misc_RNA (1)...(19): siRNA sense strand
gcaagagugugcugcuuau

SEQ ID NO: 427189 - RNA, 19 nt, Homo sapiens
  misc_RNA (1)...(19): siRNA sense strand
gcagaaagcugugaaaaga

SEQ ID NO: 427190 - RNA, 19 nt, Homo sapiens
  misc_RNA (1)...(19): siRNA sense strand
ccagaagacuuuaaaugug

SEQ ID NO: 427191 - RNA, 19 nt, Homo sapiens
  misc_RNA (1)...(19): siRNA sense strand
gaugggaaauuuaagacaa

SEQ ID NO: 427192 - RNA, 19 nt, Homo sapiens
  misc_RNA (1)...(19): siRNA sense strand
gaaggaaaugggcaguuua

SEQ ID NO: 427193 - RNA, 19 nt, Homo sapiens
  misc_RNA (1)...(19): siRNA sense strand
gaaaugggcaguuuaaugc

SEQ ID NO: 427194 - RNA, 19 nt, Homo sapiens
  misc_RNA (1)...(19): siRNA sense strand
gaaauagauucugcucuuc

SEQ ID NO: 427195 - RNA, 19 nt, Homo sapiens
  misc_RNA (1)...(19): siRNA sense strand
gauauuaauugcagacagu

SEQ ID NO: 427196 - RNA, 19 nt, Homo sapiens
  misc_RNA (1)...(19): siRNA sense strand
gcuggaugcugucaacaaa

SEQ ID NO: 427197 - RNA, 19 nt, Homo sapiens
  misc_RNA (1)...(19): siRNA sense strand
ggaauuggaggucaacuau

SEQ ID NO: 427198 - RNA, 19 nt, Homo sapiens
  misc_RNA (1)...(19): siRNA sense strand
ugacauucauuccaccuuu

SEQ ID NO: 427199 - RNA, 19 nt, Homo sapiens
  misc_RNA (1)...(19): siRNA sense strand
gcaguggauucaaauggaa

SEQ ID NO: 427200 - RNA, 19 nt, Homo sapiens
  misc_RNA (1)...(19): siRNA sense strand
acaagcaguuucugauuug

SEQ ID NO: 427201 - RNA, 19 nt, Homo sapiens
  misc_RNA (1)...(19): siRNA sense strand
agaaggaaaugggcaguuu

SEQ ID NO: 427202 - RNA, 19 nt, Homo sapiens
  misc_RNA (1)...(19): siRNA sense strand
agaggugccugcagaacua

SEQ ID NO: 427203 - RNA, 19 nt, Homo sapiens
  misc_RNA (1)...(19): siRNA sense strand
ggauucaaauggaaacauc

SEQ ID NO: 427204 - RNA, 19 nt, Homo sapiens
  misc_RNA (1)...(19): siRNA sense strand
ucaaggaugugguggaaca

SEQ ID NO: 427205 - RNA, 19 nt, Homo sapiens
  misc_RNA (1)...(19): siRNA sense strand
gaaaauagucaccagguuu

SEQ ID NO: 427206 - RNA, 19 nt, Homo sapiens
  misc_RNA (1)...(19): siRNA sense strand
aaaggagaguuuacaaauc

SEQ ID NO: 427207 - RNA, 19 nt, Homo sapiens
  misc_RNA (1)...(19): siRNA sense strand
cgggaaagccucucucuug

SEQ ID NO: 427208 - RNA, 19 nt, Homo sapiens
  misc_RNA (1)...(19): siRNA sense strand
caacaagaacggcaccuau

SEQ ID NO: 427209 - RNA, 19 nt, Homo sapiens
  misc_RNA (1)...(19): siRNA sense strand
gggagauccuggacaacaa

SEQ ID NO: 427210 - RNA, 19 nt, Homo sapiens
  misc_RNA (1)...(19): siRNA sense strand
gaacaauuucuucaucaca

SEQ ID NO: 427211 - RNA, 19 nt, Homo sapiens
  misc_RNA (1)...(19): siRNA sense strand
caaaggaagaaauaaagga

SEQ ID NO: 427212 - RNA, 19 nt, Homo sapiens
  misc_RNA (1)...(19): siRNA sense strand
gcaguuuaaugcuccaaca

SEQ ID NO: 427213 - RNA, 19 nt, Homo sapiens
  misc_RNA (1)...(19): siRNA sense strand
aaggagaguuuacaaaucu

SEQ ID NO: 427214 - RNA, 19 nt, Homo sapiens
  misc_RNA (1)...(19): siRNA sense strand
gaagaaauaaaggagaguu

SEQ ID NO: 427215 - RNA, 19 nt, Homo sapiens
  misc_RNA (1)...(19): siRNA sense strand
gacauucauuccaccuuug

SEQ ID NO: 427216 - RNA, 19 nt, Homo sapiens
  misc_RNA (1)...(19): siRNA sense strand
gguaccaaaggaagaaaua

SEQ ID NO: 427217 - RNA, 19 nt, Homo sapiens
  misc_RNA (1)...(19): siRNA sense strand
gaagaaguccauccacaac

SEQ ID NO: 427218 - RNA, 19 nt, Homo sapiens
  misc_RNA (1)...(19): siRNA sense strand
guuucaaagucuaucgaua

SEQ ID NO: 427219 - RNA, 19 nt, Homo sapiens
  misc_RNA (1)...(19): siRNA sense strand
caagguguuuaaucaggaa

SEQ ID NO: 427220 - RNA, 19 nt, Homo sapiens
  misc_RNA (1)...(19): siRNA sense strand
gacuuuacccugucucuga

SEQ ID NO: 427221 - RNA, 19 nt, Homo sapiens
  misc_RNA (1)...(19): siRNA sense strand
guacagcacuggaaaacga

SEQ ID NO: 427222 - RNA, 19 nt, Homo sapiens
  misc_RNA (1)...(19): siRNA sense strand
ugacaagcaguuucugauu

SEQ ID NO: 427223 - RNA, 19 nt, Homo sapiens
  misc_RNA (1)...(19): siRNA sense strand
guguagcaguggauucaaa

SEQ ID NO: 427224 - RNA, 19 nt, Homo sapiens
  misc_RNA (1)...(19): siRNA sense strand
acaaaaggcucccagaaau

SEQ ID NO: 427225 - RNA, 19 nt, Homo sapiens
  misc_RNA (1)...(19): siRNA sense strand
ggaaaauagucaccagguu

SEQ ID NO: 427226 - RNA, 19 nt, Homo sapiens
  misc_RNA (1)...(19): siRNA sense strand
gcagauauuuuccaaugau

SEQ ID NO: 427227 - RNA, 19 nt, Homo sapiens
  misc_RNA (1)...(19): siRNA sense strand
acaagaacggcaccuauga

SEQ ID NO: 427228 - RNA, 19 nt, Homo sapiens
  misc_RNA (1)...(19): siRNA sense strand
caaaaggcucccagaaaua

SEQ ID NO: 427229 - RNA, 19 nt, Homo sapiens
  misc_RNA (1)...(19): siRNA sense strand
cuacauuccugcccacagu

SEQ ID NO: 427230 - RNA, 19 nt, Homo sapiens
  misc_RNA (1)...(19): siRNA sense strand
aagagaaucccaucgaaga

SEQ ID NO: 427231 - RNA, 19 nt, Homo sapiens
  misc_RNA (1)...(19): siRNA sense strand
cguuuaagcugaaagugau

SEQ ID NO: 427232 - RNA, 19 nt, Homo sapiens
  misc_RNA (1)...(19): siRNA sense strand
agaacgaccagcuggauuu

SEQ ID NO: 427233 - RNA, 19 nt, Homo sapiens
  misc_RNA (1)...(19): siRNA sense strand
agaagcagaugagcgagaa

SEQ ID NO: 427234 - RNA, 19 nt, Homo sapiens
  misc_RNA (1)...(19): siRNA sense strand
uaaaugugcgcaagagugu

SEQ ID NO: 427235 - RNA, 19 nt, Homo sapiens
  misc_RNA (1)...(19): siRNA sense strand
gcucaaauggagaaggaaa

SEQ ID NO: 427236 - RNA, 19 nt, Homo sapiens
  misc_RNA (1)...(19): siRNA sense strand
gcagcuguaaauagcaaua

SEQ ID NO: 427237 - RNA, 19 nt, Homo sapiens
  misc_RNA (1)...(19): siRNA sense strand
guaccaaaggaagaaauaa

SEQ ID NO: 427238 - RNA, 19 nt, Homo sapiens
  misc_RNA (1)...(19): siRNA sense strand
gaaaagagaaucccaucga

SEQ ID NO: 427239 - RNA, 19 nt, Homo sapiens
  misc_RNA (1)...(19): siRNA sense strand
gagaacgaccagcuggauu

SEQ ID NO: 427240 - RNA, 19 nt, Homo sapiens
  misc_RNA (1)...(19): siRNA sense strand
agagugugcugcuuaugga

SEQ ID NO: 427241 - RNA, 19 nt, Homo sapiens
  misc_RNA (1)...(19): siRNA sense strand
gcauguacagcacuggaaa

SEQ ID NO: 427242 - RNA, 19 nt, Homo sapiens
  misc_RNA (1)...(19): siRNA sense strand
ugaagaaguccauccacaa

SEQ ID NO: 427243 - RNA, 19 nt, Homo sapiens
  misc_RNA (1)...(19): siRNA sense strand
gggcaggagagcauuaaga

SEQ ID NO: 427244 - RNA, 19 nt, Homo sapiens
  misc_RNA (1)...(19): siRNA sense strand
gaugagcuccagaagacuu

SEQ ID NO: 427245 - RNA, 19 nt, Homo sapiens
  misc_RNA (1)...(19): siRNA sense strand
gugcagauauuuuccaaug

SEQ ID NO: 427246 - RNA, 19 nt, Homo sapiens
  misc_RNA (1)...(19): siRNA sense strand
auuaagagcugcagcaacu

SEQ ID NO: 427247 - RNA, 19 nt, Homo sapiens
  misc_RNA (1)...(19): siRNA sense strand
ucaggaaggagaauucaug

SEQ ID NO: 427248 - RNA, 19 nt, Homo sapiens
  misc_RNA (1)...(19): siRNA sense strand
aaggaaaugggcaguuuaa

SEQ ID NO: 427249 - RNA, 19 nt, Homo sapiens
  misc_RNA (1)...(19): siRNA sense strand
gcgcaagagugugcugcuu

SEQ ID NO: 427250 - RNA, 19 nt, Homo sapiens
  misc_RNA (1)...(19): siRNA sense strand
ggcccuaacuucagauggu

SEQ ID NO: 427251 - RNA, 19 nt, Homo sapiens
  misc_RNA (1)...(19): siRNA sense strand
caaggcgugcugcguguuu

SEQ ID NO: 427252 - RNA, 19 nt, Homo sapiens
  misc_RNA (1)...(19): siRNA sense strand
accaaugugugcagauauu

SEQ ID NO: 427253 - RNA, 19 nt, Homo sapiens
  misc_RNA (1)...(19): siRNA sense strand
gaacgaccagcuggauuuc

SEQ ID NO: 427254 - RNA, 19 nt, Homo sapiens
  misc_RNA (1)...(19): siRNA sense strand
aauuggaggucaacuaugg

SEQ ID NO: 427255 - RNA, 19 nt, Homo sapiens
  misc_RNA (1)...(19): siRNA sense strand
cgcaagagugugcugcuua

SEQ ID NO: 427256 - RNA, 19 nt, Homo sapiens
  misc_RNA (1)...(19): siRNA sense strand
uugaugagcuccagaagac

SEQ ID NO: 427257 - RNA, 19 nt, Homo sapiens
  misc_RNA (1)...(19): siRNA sense strand
gcuguaaauagcaauaaug

SEQ ID NO: 427258 - RNA, 19 nt, Homo sapiens
  misc_RNA (1)...(19): siRNA sense strand
acuauggccucaaacacaa

SEQ ID NO: 427259 - RNA, 19 nt, Homo sapiens
  misc_RNA (1)...(19): siRNA sense strand
uccagaagacuuuaaaugu

SEQ ID NO: 427260 - RNA, 19 nt, Homo sapiens
  misc_RNA (1)...(19): siRNA sense strand
ccacaguuccacucaagga

SEQ ID NO: 427261 - RNA, 19 nt, Homo sapiens
  misc_RNA (1)...(19): siRNA sense strand
uggcucaaauggagaagga

SEQ ID NO: 427262 - RNA, 19 nt, Homo sapiens
  misc_RNA (1)...(19): siRNA sense strand
ccaaugauggccaguucaa

SEQ ID NO: 427263 - RNA, 19 nt, Homo sapiens
  misc_RNA (1)...(19): siRNA sense strand
ugaagaggcgcguuaaguc

SEQ ID NO: 427264 - RNA, 19 nt, Homo sapiens
  misc_RNA (1)...(19): siRNA sense strand
gugugcugcuuauggaauu

SEQ ID NO: 427265 - RNA, 19 nt, Homo sapiens
  misc_RNA (1)...(19): siRNA sense strand
ccacagaaggcgugaagag

SEQ ID NO: 427266 - RNA, 19 nt, Homo sapiens
  misc_RNA (1)...(19): siRNA sense strand
ggagaacgaccagcuggau

SEQ ID NO: 427267 - RNA, 19 nt, Homo sapiens
  misc_RNA (1)...(19): siRNA sense strand
gaauuggaggucaacuaug

SEQ ID NO: 427268 - RNA, 19 nt, Homo sapiens
  misc_RNA (1)...(19): siRNA sense strand
uguccuacauuaacacauc

SEQ ID NO: 427269 - RNA, 19 nt, Homo sapiens
  misc_RNA (1)...(19): siRNA sense strand
ccauaaucauucugucaag

SEQ ID NO: 427270 - RNA, 19 nt, Homo sapiens
  misc_RNA (1)...(19): siRNA sense strand
gacaguaacaaccaaugug

SEQ ID NO: 427271 - RNA, 19 nt, Homo sapiens
  misc_RNA (1)...(19): siRNA sense strand
ccgauccgcugaugugucu

SEQ ID NO: 427272 - RNA, 19 nt, Homo sapiens
  misc_RNA (1)...(19): siRNA sense strand
agucgcagcuggauacucu

SEQ ID NO: 427273 - RNA, 19 nt, Homo sapiens
  misc_RNA (1)...(19): siRNA sense strand
aaaccacgaugggaaugug

SEQ ID NO: 427274 - RNA, 19 nt, Homo sapiens
  misc_RNA (1)...(19): siRNA sense strand
cugucaagguguuuaauca

SEQ ID NO: 427275 - RNA, 19 nt, Homo sapiens
  misc_RNA (1)...(19): siRNA sense strand
gugaagaggcgcguuaagu

SEQ ID NO: 427276 - RNA, 19 nt, Homo sapiens
  misc_RNA (1)...(19): siRNA sense strand
gagcuccagaagacuuuaa

SEQ ID NO: 427277 - RNA, 19 nt, Homo sapiens
  misc_RNA (1)...(19): siRNA sense strand
acucaaggaugugguggaa

SEQ ID NO: 427278 - RNA, 19 nt, Homo sapiens
  misc_RNA (1)...(19): siRNA sense strand
ccaaugugugcagauauuu

SEQ ID NO: 427279 - RNA, 19 nt, Homo sapiens
  misc_RNA (1)...(19): siRNA sense strand
gaaaguaucucuaugguuu

SEQ ID NO: 427280 - RNA, 19 nt, Homo sapiens
  misc_RNA (1)...(19): siRNA sense strand
ggaagaaacugaaagcaaa

SEQ ID NO: 427281 - RNA, 19 nt, Homo sapiens
  misc_RNA (1)...(19): siRNA sense strand
gagaauugcucgagaugua

SEQ ID NO: 427282 - RNA, 19 nt, Homo sapiens
  misc_RNA (1)...(19): siRNA sense strand
uaacagaagugaagaguga

SEQ ID NO: 427283 - RNA, 19 nt, Homo sapiens
  misc_RNA (1)...(19): siRNA sense strand
gaaccaaagugaaaguaaa

SEQ ID NO: 427284 - RNA, 19 nt, Homo sapiens
  misc_RNA (1)...(19): siRNA sense strand
gaaaggacauuaaggaagu

SEQ ID NO: 427285 - RNA, 19 nt, Homo sapiens
  misc_RNA (1)...(19): siRNA sense strand
ggacaaagguggaccaaag

SEQ ID NO: 427286 - RNA, 19 nt, Homo sapiens
  misc_RNA (1)...(19): siRNA sense strand
gguacaagaugaccaagua

SEQ ID NO: 427287 - RNA, 19 nt, Homo sapiens
  misc_RNA (1)...(19): siRNA sense strand
gagcgaacauugagacgua

SEQ ID NO: 427288 - RNA, 19 nt, Homo sapiens
  misc_RNA (1)...(19): siRNA sense strand
ggauguagaugaugacuau

SEQ ID NO: 427289 - RNA, 19 nt, Homo sapiens
  misc_RNA (1)...(19): siRNA sense strand
ggugaaggcugacaggaua

SEQ ID NO: 427290 - RNA, 19 nt, Homo sapiens
  misc_RNA (1)...(19): siRNA sense strand
aaucugagcucuccacuaa

SEQ ID NO: 427291 - RNA, 19 nt, Homo sapiens
  misc_RNA (1)...(19): siRNA sense strand
cagaagaaguuaagaaaga

SEQ ID NO: 427292 - RNA, 19 nt, Homo sapiens
  misc_RNA (1)...(19): siRNA sense strand
gaaagcaagcaucuucuua

SEQ ID NO: 427293 - RNA, 19 nt, Homo sapiens
  misc_RNA (1)...(19): siRNA sense strand
ggagaggacugaaugguau

SEQ ID NO: 427294 - RNA, 19 nt, Homo sapiens
  misc_RNA (1)...(19): siRNA sense strand
gaagugaaccucauauaga

SEQ ID NO: 427295 - RNA, 19 nt, Homo sapiens
  misc_RNA (1)...(19): siRNA sense strand
ggacucaaaugcagccuuu

SEQ ID NO: 427296 - RNA, 19 nt, Homo sapiens
  misc_RNA (1)...(19): siRNA sense strand
gaauggaaaugacaaauac

SEQ ID NO: 427297 - RNA, 19 nt, Homo sapiens
  misc_RNA (1)...(19): siRNA sense strand
uaaagaagauagugaagug

SEQ ID NO: 427298 - RNA, 19 nt, Homo sapiens
  misc_RNA (1)...(19): siRNA sense strand
ggaauggaaaugacaaaua

SEQ ID NO: 427299 - RNA, 19 nt, Homo sapiens
  misc_RNA (1)...(19): siRNA sense strand
ggaagcaaauuuauaugga

SEQ ID NO: 427300 - RNA, 19 nt, Homo sapiens
  misc_RNA (1)...(19): siRNA sense strand
ccaaagauuucugcacaua

SEQ ID NO: 427301 - RNA, 19 nt, Homo sapiens
  misc_RNA (1)...(19): siRNA sense strand
agaaaugccuuuaacagaa

SEQ ID NO: 427302 - RNA, 19 nt, Homo sapiens
  misc_RNA (1)...(19): siRNA sense strand
gaaaggaccagugauugua

SEQ ID NO: 427303 - RNA, 19 nt, Homo sapiens
  misc_RNA (1)...(19): siRNA sense strand
ucugguaccuguaguauaa

SEQ ID NO: 427304 - RNA, 19 nt, Homo sapiens
  misc_RNA (1)...(19): siRNA sense strand
ggaagaacuugauccugaa

SEQ ID NO: 427305 - RNA, 19 nt, Homo sapiens
  misc_RNA (1)...(19): siRNA sense strand
caacauaacuuuucaguag

SEQ ID NO: 427306 - RNA, 19 nt, Homo sapiens
  misc_RNA (1)...(19): siRNA sense strand
gaacuccaguaauugcaaa

SEQ ID NO: 427307 - RNA, 19 nt, Homo sapiens
  misc_RNA (1)...(19): siRNA sense strand
ugaagaaucucaagaaggu

SEQ ID NO: 427308 - RNA, 19 nt, Homo sapiens
  misc_RNA (1)...(19): siRNA sense strand
gaaaugccuuuaacagaag

SEQ ID NO: 427309 - RNA, 19 nt, Homo sapiens
  misc_RNA (1)...(19): siRNA sense strand
gaccuuggcauuccuauuu

SEQ ID NO: 427310 - RNA, 19 nt, Homo sapiens
  misc_RNA (1)...(19): siRNA sense strand
ggaaauaguggauuaaugg

SEQ ID NO: 427311 - RNA, 19 nt, Homo sapiens
  misc_RNA (1)...(19): siRNA sense strand
ggaaaugacaaauacugua

SEQ ID NO: 427312 - RNA, 19 nt, Homo sapiens
  misc_RNA (1)...(19): siRNA sense strand
ggacaaucaucgccagaga

SEQ ID NO: 427313 - RNA, 19 nt, Homo sapiens
  misc_RNA (1)...(19): siRNA sense strand
aaucaacccucucaucaaa

SEQ ID NO: 427314 - RNA, 19 nt, Homo sapiens
  misc_RNA (1)...(19): siRNA sense strand
ggaaauugaagaagagaaa

SEQ ID NO: 427315 - RNA, 19 nt, Homo sapiens
  misc_RNA (1)...(19): siRNA sense strand
ugauggaaauaguggauua

SEQ ID NO: 427316 - RNA, 19 nt, Homo sapiens
  misc_RNA (1)...(19): siRNA sense strand
caagaaaggaccagugauu

SEQ ID NO: 427317 - RNA, 19 nt, Homo sapiens
  misc_RNA (1)...(19): siRNA sense strand
uauagaagcucauagucuu

SEQ ID NO: 427318 - RNA, 19 nt, Homo sapiens
  misc_RNA (1)...(19): siRNA sense strand
uagaaacccugaaguuaga

SEQ ID NO: 427319 - RNA, 19 nt, Homo sapiens
  misc_RNA (1)...(19): siRNA sense strand
ugaaacagaagaugcuuua

SEQ ID NO: 427320 - RNA, 19 nt, Homo sapiens
  misc_RNA (1)...(19): siRNA sense strand
aaacaugccguauggcuua

SEQ ID NO: 427321 - RNA, 19 nt, Homo sapiens
  misc_RNA (1)...(19): siRNA sense strand
ggaaguagacauucucaau

SEQ ID NO: 427322 - RNA, 19 nt, Homo sapiens
  misc_RNA (1)...(19): siRNA sense strand
gaaguagauuuggaugauu

SEQ ID NO: 427323 - RNA, 19 nt, Homo sapiens
  misc_RNA (1)...(19): siRNA sense strand
uggagagaaugaacaaaua

SEQ ID NO: 427324 - RNA, 19 nt, Homo sapiens
  misc_RNA (1)...(19): siRNA sense strand
ugacaaagacucagaugaa

SEQ ID NO: 427325 - RNA, 19 nt, Homo sapiens
  misc_RNA (1)...(19): siRNA sense strand
gaucaagaaaugccuuuaa

SEQ ID NO: 427326 - RNA, 19 nt, Homo sapiens
  misc_RNA (1)...(19): siRNA sense strand
caagaaaggacauuaagga

SEQ ID NO: 427327 - RNA, 19 nt, Homo sapiens
  misc_RNA (1)...(19): siRNA sense strand
cagcagcuuuauaaguuua

SEQ ID NO: 427328 - RNA, 19 nt, Homo sapiens
  misc_RNA (1)...(19): siRNA sense strand
caucaaacaugccguaugg

SEQ ID NO: 427329 - RNA, 19 nt, Homo sapiens
  misc_RNA (1)...(19): siRNA sense strand
ugaaauugaugacggagaa

SEQ ID NO: 427330 - RNA, 19 nt, Homo sapiens
  misc_RNA (1)...(19): siRNA sense strand
cuaugaaacugcagagaaa

SEQ ID NO: 427331 - RNA, 19 nt, Homo sapiens
  misc_RNA (1)...(19): siRNA sense strand
gcaaauauucaguucagaa

SEQ ID NO: 427332 - RNA, 19 nt, Homo sapiens
  misc_RNA (1)...(19): siRNA sense strand
gguauaccgugguguuuga

SEQ ID NO: 427333 - RNA, 19 nt, Homo sapiens
  misc_RNA (1)...(19): siRNA sense strand
cgauugaaguugauaguau

SEQ ID NO: 427334 - RNA, 19 nt, Homo sapiens
  misc_RNA (1)...(19): siRNA sense strand
gaaugaagcaggaagugaa

SEQ ID NO: 427335 - RNA, 19 nt, Homo sapiens
  misc_RNA (1)...(19): siRNA sense strand
guaccgaggugccuucugu

SEQ ID NO: 427336 - RNA, 19 nt, Homo sapiens
  misc_RNA (1)...(19): siRNA sense strand
ccacacaauugguacaaga

SEQ ID NO: 427337 - RNA, 19 nt, Homo sapiens
  misc_RNA (1)...(19): siRNA sense strand
ucaguagcuucaccacuua

SEQ ID NO: 427338 - RNA, 19 nt, Homo sapiens
  misc_RNA (1)...(19): siRNA sense strand
gaucuucucuuccuguuac

SEQ ID NO: 427339 - RNA, 19 nt, Homo sapiens
  misc_RNA (1)...(19): siRNA sense strand
cuaacucucuuguuucuau

SEQ ID NO: 427340 - RNA, 19 nt, Homo sapiens
  misc_RNA (1)...(19): siRNA sense strand
guugaaagcucugagucua

SEQ ID NO: 427341 - RNA, 19 nt, Homo sapiens
  misc_RNA (1)...(19): siRNA sense strand
ggaagugaaccucauauag

SEQ ID NO: 427342 - RNA, 19 nt, Homo sapiens
  misc_RNA (1)...(19): siRNA sense strand
caaaugcagccuuuagaaa

SEQ ID NO: 427343 - RNA, 19 nt, Homo sapiens
  misc_RNA (1)...(19): siRNA sense strand
aacagaagaugcuuuagaa

SEQ ID NO: 427344 - RNA, 19 nt, Homo sapiens
  misc_RNA (1)...(19): siRNA sense strand
gauaauaccacacaauugg

SEQ ID NO: 427345 - RNA, 19 nt, Homo sapiens
  misc_RNA (1)...(19): siRNA sense strand
caacaacugacuagugaaa

SEQ ID NO: 427346 - RNA, 19 nt, Homo sapiens
  misc_RNA (1)...(19): siRNA sense strand
guguuuaguucgaucauuu

SEQ ID NO: 427347 - RNA, 19 nt, Homo sapiens
  misc_RNA (1)...(19): siRNA sense strand
gagaauggaauggaaauga

SEQ ID NO: 427348 - RNA, 19 nt, Homo sapiens
  misc_RNA (1)...(19): siRNA sense strand
agacucagaugaagaggaa

SEQ ID NO: 427349 - RNA, 19 nt, Homo sapiens
  misc_RNA (1)...(19): siRNA sense strand
gcaaagauuaagacuguga

SEQ ID NO: 427350 - RNA, 19 nt, Homo sapiens
  misc_RNA (1)...(19): siRNA sense strand
aagcaagcaucuucuuaaa

SEQ ID NO: 427351 - RNA, 19 nt, Homo sapiens
  misc_RNA (1)...(19): siRNA sense strand
agaaagcagugaagaggaa

SEQ ID NO: 427352 - RNA, 19 nt, Homo sapiens
  misc_RNA (1)...(19): siRNA sense strand
aggcaaagauuaagacugu

SEQ ID NO: 427353 - RNA, 19 nt, Homo sapiens
  misc_RNA (1)...(19): siRNA sense strand
gaagacagagguacuccaa

SEQ ID NO: 427354 - RNA, 19 nt, Homo sapiens
  misc_RNA (1)...(19): siRNA sense strand
gacaagcgccgucucaaug

SEQ ID NO: 427355 - RNA, 19 nt, Homo sapiens
  misc_RNA (1)...(19): siRNA sense strand
guuagaaguuggagagaau

SEQ ID NO: 427356 - RNA, 19 nt, Homo sapiens
  misc_RNA (1)...(19): siRNA sense strand
ggaaccaaagugaaaguaa

SEQ ID NO: 427357 - RNA, 19 nt, Homo sapiens
  misc_RNA (1)...(19): siRNA sense strand
acaggaggauucugacaaa

SEQ ID NO: 427358 - RNA, 19 nt, Homo sapiens
  misc_RNA (1)...(19): siRNA sense strand
gcuauuaucagcaaguuga

SEQ ID NO: 427359 - RNA, 19 nt, Homo sapiens
  misc_RNA (1)...(19): siRNA sense strand
gaccagugauuguauugga

SEQ ID NO: 427360 - RNA, 19 nt, Homo sapiens
  misc_RNA (1)...(19): siRNA sense strand
gcaggaagugaaccucaua

SEQ ID NO: 427361 - RNA, 19 nt, Homo sapiens
  misc_RNA (1)...(19): siRNA sense strand
ggguggaugugacaauauu

SEQ ID NO: 427362 - RNA, 19 nt, Homo sapiens
  misc_RNA (1)...(19): siRNA sense strand
agacagagguacuccaauc

SEQ ID NO: 427363 - RNA, 19 nt, Homo sapiens
  misc_RNA (1)...(19): siRNA sense strand
uccagcagcuuuauaaguu

SEQ ID NO: 427364 - RNA, 19 nt, Homo sapiens
  misc_RNA (1)...(19): siRNA sense strand
cuagaguuguuccugauaa

SEQ ID NO: 427365 - RNA, 19 nt, Homo sapiens
  misc_RNA (1)...(19): siRNA sense strand
gaaguagacauucucaauc

SEQ ID NO: 427366 - RNA, 19 nt, Homo sapiens
  misc_RNA (1)...(19): siRNA sense strand
caacggagaggacugaaug

SEQ ID NO: 427367 - RNA, 19 nt, Homo sapiens
  misc_RNA (1)...(19): siRNA sense strand
gcagugaagaggaagauga

SEQ ID NO: 427368 - RNA, 19 nt, Homo sapiens
  misc_RNA (1)...(19): siRNA sense strand
ugaaugguauccugcuuug

SEQ ID NO: 427369 - RNA, 19 nt, Homo sapiens
  misc_RNA (1)...(19): siRNA sense strand
ugaaguagauuuggaugau

SEQ ID NO: 427370 - RNA, 19 nt, Homo sapiens
  misc_RNA (1)...(19): siRNA sense strand
aagugaaccucauauagaa

SEQ ID NO: 427371 - RNA, 19 nt, Homo sapiens
  misc_RNA (1)...(19): siRNA sense strand
gaagacgaagcaagacaaa

SEQ ID NO: 427372 - RNA, 19 nt, Homo sapiens
  misc_RNA (1)...(19): siRNA sense strand
ggaugugacaauauugaua

SEQ ID NO: 427373 - RNA, 19 nt, Homo sapiens
  misc_RNA (1)...(19): siRNA sense strand
aagcaaaugugacucugaa

SEQ ID NO: 427374 - RNA, 19 nt, Homo sapiens
  misc_RNA (1)...(19): siRNA sense strand
caugucaucugcuucauca

SEQ ID NO: 427375 - RNA, 19 nt, Homo sapiens
  misc_RNA (1)...(19): siRNA sense strand
cagaagaggccaagugaug

SEQ ID NO: 427376 - RNA, 19 nt, Homo sapiens
  misc_RNA (1)...(19): siRNA sense strand
agagugauauaacgauuga

SEQ ID NO: 427377 - RNA, 19 nt, Homo sapiens
  misc_RNA (1)...(19): siRNA sense strand
uccaacaacugacuaguga

SEQ ID NO: 427378 - RNA, 19 nt, Homo sapiens
  misc_RNA (1)...(19): siRNA sense strand
cuacagaagaugaaauuga

SEQ ID NO: 427379 - RNA, 19 nt, Homo sapiens
  misc_RNA (1)...(19): siRNA sense strand
gaaaguaucucuaugguuu

SEQ ID NO: 427380 - RNA, 19 nt, Homo sapiens
  misc_RNA (1)...(19): siRNA sense strand
ggaagaaacugaaagcaaa

SEQ ID NO: 427381 - RNA, 19 nt, Homo sapiens
  misc_RNA (1)...(19): siRNA sense strand
gagaauugcucgagaugua

SEQ ID NO: 427382 - RNA, 19 nt, Homo sapiens
  misc_RNA (1)...(19): siRNA sense strand
uaacagaagugaagaguga

SEQ ID NO: 427383 - RNA, 19 nt, Homo sapiens
  misc_RNA (1)...(19): siRNA sense strand
gaaccaaagugaaaguaaa

SEQ ID NO: 427384 - RNA, 19 nt, Homo sapiens
  misc_RNA (1)...(19): siRNA sense strand
gaaaggacauuaaggaagu

SEQ ID NO: 427385 - RNA, 19 nt, Homo sapiens
  misc_RNA (1)...(19): siRNA sense strand
ggacaaagguggaccaaag

SEQ ID NO: 427386 - RNA, 19 nt, Homo sapiens
  misc_RNA (1)...(19): siRNA sense strand
gguacaagaugaccaagua

SEQ ID NO: 427387 - RNA, 19 nt, Homo sapiens
  misc_RNA (1)...(19): siRNA sense strand
gagcgaacauugagacgua

SEQ ID NO: 427388 - RNA, 19 nt, Homo sapiens
  misc_RNA (1)...(19): siRNA sense strand
ggauguagaugaugacuau

SEQ ID NO: 427389 - RNA, 19 nt, Homo sapiens
  misc_RNA (1)...(19): siRNA sense strand
ggugaaggcugacaggaua

SEQ ID NO: 427390 - RNA, 19 nt, Homo sapiens
  misc_RNA (1)...(19): siRNA sense strand
aaucugagcucuccacuaa

SEQ ID NO: 427391 - RNA, 19 nt, Homo sapiens
  misc_RNA (1)...(19): siRNA sense strand
cagaagaaguuaagaaaga

SEQ ID NO: 427392 - RNA, 19 nt, Homo sapiens
  misc_RNA (1)...(19): siRNA sense strand
gaaagcaagcaucuucuua

SEQ ID NO: 427393 - RNA, 19 nt, Homo sapiens
  misc_RNA (1)...(19): siRNA sense strand
ggagaggacugaaugguau

SEQ ID NO: 427394 - RNA, 19 nt, Homo sapiens
  misc_RNA (1)...(19): siRNA sense strand
gaagugaaccucauauaga

SEQ ID NO: 427395 - RNA, 19 nt, Homo sapiens
  misc_RNA (1)...(19): siRNA sense strand
ggacucaaaugcagccuuu

SEQ ID NO: 427396 - RNA, 19 nt, Homo sapiens
  misc_RNA (1)...(19): siRNA sense strand
gaauggaaaugacaaauac

SEQ ID NO: 427397 - RNA, 19 nt, Homo sapiens
  misc_RNA (1)...(19): siRNA sense strand
uaaagaagauagugaagug

SEQ ID NO: 427398 - RNA, 19 nt, Homo sapiens
  misc_RNA (1)...(19): siRNA sense strand
ggaauggaaaugacaaaua

SEQ ID NO: 427399 - RNA, 19 nt, Homo sapiens
  misc_RNA (1)...(19): siRNA sense strand
ggaagcaaauuuauaugga

SEQ ID NO: 427400 - RNA, 19 nt, Homo sapiens
  misc_RNA (1)...(19): siRNA sense strand
ccaaagauuucugcacaua

SEQ ID NO: 427401 - RNA, 19 nt, Homo sapiens
  misc_RNA (1)...(19): siRNA sense strand
agaaaugccuuuaacagaa

SEQ ID NO: 427402 - RNA, 19 nt, Homo sapiens
  misc_RNA (1)...(19): siRNA sense strand
gaaaggaccagugauugua

SEQ ID NO: 427403 - RNA, 19 nt, Homo sapiens
  misc_RNA (1)...(19): siRNA sense strand
ucugguaccuguaguauaa

SEQ ID NO: 427404 - RNA, 19 nt, Homo sapiens
  misc_RNA (1)...(19): siRNA sense strand
ggaagaacuugauccugaa

SEQ ID NO: 427405 - RNA, 19 nt, Homo sapiens
  misc_RNA (1)...(19): siRNA sense strand
caacauaacuuuucaguag

SEQ ID NO: 427406 - RNA, 19 nt, Homo sapiens
  misc_RNA (1)...(19): siRNA sense strand
gaacuccaguaauugcaaa

SEQ ID NO: 427407 - RNA, 19 nt, Homo sapiens
  misc_RNA (1)...(19): siRNA sense strand
ugaagaaucucaagaaggu

SEQ ID NO: 427408 - RNA, 19 nt, Homo sapiens
  misc_RNA (1)...(19): siRNA sense strand
gaaaugccuuuaacagaag

SEQ ID NO: 427409 - RNA, 19 nt, Homo sapiens
  misc_RNA (1)...(19): siRNA sense strand
gaccuuggcauuccuauuu

SEQ ID NO: 427410 - RNA, 19 nt, Homo sapiens
  misc_RNA (1)...(19): siRNA sense strand
ggaaauaguggauuaaugg

SEQ ID NO: 427411 - RNA, 19 nt, Homo sapiens
  misc_RNA (1)...(19): siRNA sense strand
ggaaaugacaaauacugua

SEQ ID NO: 427412 - RNA, 19 nt, Homo sapiens
  misc_RNA (1)...(19): siRNA sense strand
ggacaaucaucgccagaga

SEQ ID NO: 427413 - RNA, 19 nt, Homo sapiens
  misc_RNA (1)...(19): siRNA sense strand
aaucaacccucucaucaaa

SEQ ID NO: 427414 - RNA, 19 nt, Homo sapiens
  misc_RNA (1)...(19): siRNA sense strand
ggaaauugaagaagagaaa

SEQ ID NO: 427415 - RNA, 19 nt, Homo sapiens
  misc_RNA (1)...(19): siRNA sense strand
ugauggaaauaguggauua

SEQ ID NO: 427416 - RNA, 19 nt, Homo sapiens
  misc_RNA (1)...(19): siRNA sense strand
caagaaaggaccagugauu

SEQ ID NO: 427417 - RNA, 19 nt, Homo sapiens
  misc_RNA (1)...(19): siRNA sense strand
uauagaagcucauagucuu

SEQ ID NO: 427418 - RNA, 19 nt, Homo sapiens
  misc_RNA (1)...(19): siRNA sense strand
uagaaacccugaaguuaga

SEQ ID NO: 427419 - RNA, 19 nt, Homo sapiens
  misc_RNA (1)...(19): siRNA sense strand
ugaaacagaagaugcuuua

SEQ ID NO: 427420 - RNA, 19 nt, Homo sapiens
  misc_RNA (1)...(19): siRNA sense strand
aaacaugccguauggcuua

SEQ ID NO: 427421 - RNA, 19 nt, Homo sapiens
  misc_RNA (1)...(19): siRNA sense strand
ggaaguagacauucucaau

SEQ ID NO: 427422 - RNA, 19 nt, Homo sapiens
  misc_RNA (1)...(19): siRNA sense strand
gaaguagauuuggaugauu

SEQ ID NO: 427423 - RNA, 19 nt, Homo sapiens
  misc_RNA (1)...(19): siRNA sense strand
uggagagaaugaacaaaua

SEQ ID NO: 427424 - RNA, 19 nt, Homo sapiens
  misc_RNA (1)...(19): siRNA sense strand
ugacaaagacucagaugaa

SEQ ID NO: 427425 - RNA, 19 nt, Homo sapiens
  misc_RNA (1)...(19): siRNA sense strand
gaucaagaaaugccuuuaa

SEQ ID NO: 427426 - RNA, 19 nt, Homo sapiens
  misc_RNA (1)...(19): siRNA sense strand
caagaaaggacauuaagga

SEQ ID NO: 427427 - RNA, 19 nt, Homo sapiens
  misc_RNA (1)...(19): siRNA sense strand
cagcagcuuuauaaguuua

SEQ ID NO: 427428 - RNA, 19 nt, Homo sapiens
  misc_RNA (1)...(19): siRNA sense strand
caucaaacaugccguaugg

SEQ ID NO: 427429 - RNA, 19 nt, Homo sapiens
  misc_RNA (1)...(19): siRNA sense strand
ugaaauugaugacggagaa

SEQ ID NO: 427430 - RNA, 19 nt, Homo sapiens
  misc_RNA (1)...(19): siRNA sense strand
cuaugaaacugcagagaaa

SEQ ID NO: 427431 - RNA, 19 nt, Homo sapiens
  misc_RNA (1)...(19): siRNA sense strand
gcaaauauucaguucagaa

SEQ ID NO: 427432 - RNA, 19 nt, Homo sapiens
  misc_RNA (1)...(19): siRNA sense strand
gguauaccgugguguuuga

SEQ ID NO: 427433 - RNA, 19 nt, Homo sapiens
  misc_RNA (1)...(19): siRNA sense strand
cgauugaaguugauaguau

SEQ ID NO: 427434 - RNA, 19 nt, Homo sapiens
  misc_RNA (1)...(19): siRNA sense strand
gaaugaagcaggaagugaa

SEQ ID NO: 427435 - RNA, 19 nt, Homo sapiens
  misc_RNA (1)...(19): siRNA sense strand
guaccgaggugccuucugu

SEQ ID NO: 427436 - RNA, 19 nt, Homo sapiens
  misc_RNA (1)...(19): siRNA sense strand
ccacacaauugguacaaga

SEQ ID NO: 427437 - RNA, 19 nt, Homo sapiens
  misc_RNA (1)...(19): siRNA sense strand
ucaguagcuucaccacuua

SEQ ID NO: 427438 - RNA, 19 nt, Homo sapiens
  misc_RNA (1)...(19): siRNA sense strand
gaucuucucuuccuguuac

SEQ ID NO: 427439 - RNA, 19 nt, Homo sapiens
  misc_RNA (1)...(19): siRNA sense strand
cuaacucucuuguuucuau

SEQ ID NO: 427440 - RNA, 19 nt, Homo sapiens
  misc_RNA (1)...(19): siRNA sense strand
guugaaagcucugagucua

SEQ ID NO: 427441 - RNA, 19 nt, Homo sapiens
  misc_RNA (1)...(19): siRNA sense strand
ggaagugaaccucauauag

SEQ ID NO: 427442 - RNA, 19 nt, Homo sapiens
  misc_RNA (1)...(19): siRNA sense strand
caaaugcagccuuuagaaa

SEQ ID NO: 427443 - RNA, 19 nt, Homo sapiens
  misc_RNA (1)...(19): siRNA sense strand
aacagaagaugcuuuagaa

SEQ ID NO: 427444 - RNA, 19 nt, Homo sapiens
  misc_RNA (1)...(19): siRNA sense strand
gauaauaccacacaauugg

SEQ ID NO: 427445 - RNA, 19 nt, Homo sapiens
  misc_RNA (1)...(19): siRNA sense strand
caacaacugacuagugaaa

SEQ ID NO: 427446 - RNA, 19 nt, Homo sapiens
  misc_RNA (1)...(19): siRNA sense strand
guguuuaguucgaucauuu

SEQ ID NO: 427447 - RNA, 19 nt, Homo sapiens
  misc_RNA (1)...(19): siRNA sense strand
gagaauggaauggaaauga

SEQ ID NO: 427448 - RNA, 19 nt, Homo sapiens
  misc_RNA (1)...(19): siRNA sense strand
agacucagaugaagaggaa

SEQ ID NO: 427449 - RNA, 19 nt, Homo sapiens
  misc_RNA (1)...(19): siRNA sense strand
gcaaagauuaagacuguga

SEQ ID NO: 427450 - RNA, 19 nt, Homo sapiens
  misc_RNA (1)...(19): siRNA sense strand
aagcaagcaucuucuuaaa

SEQ ID NO: 427451 - RNA, 19 nt, Homo sapiens
  misc_RNA (1)...(19): siRNA sense strand
agaaagcagugaagaggaa

SEQ ID NO: 427452 - RNA, 19 nt, Homo sapiens
  misc_RNA (1)...(19): siRNA sense strand
aggcaaagauuaagacugu

SEQ ID NO: 427453 - RNA, 19 nt, Homo sapiens
  misc_RNA (1)...(19): siRNA sense strand
gaagacagagguacuccaa

SEQ ID NO: 427454 - RNA, 19 nt, Homo sapiens
  misc_RNA (1)...(19): siRNA sense strand
gacaagcgccgucucaaug

SEQ ID NO: 427455 - RNA, 19 nt, Homo sapiens
  misc_RNA (1)...(19): siRNA sense strand
guuagaaguuggagagaau

SEQ ID NO: 427456 - RNA, 19 nt, Homo sapiens
  misc_RNA (1)...(19): siRNA sense strand
ggaaccaaagugaaaguaa

SEQ ID NO: 427457 - RNA, 19 nt, Homo sapiens
  misc_RNA (1)...(19): siRNA sense strand
acaggaggauucugacaaa

SEQ ID NO: 427458 - RNA, 19 nt, Homo sapiens
  misc_RNA (1)...(19): siRNA sense strand
gcuauuaucagcaaguuga

SEQ ID NO: 427459 - RNA, 19 nt, Homo sapiens
  misc_RNA (1)...(19): siRNA sense strand
gaccagugauuguauugga

SEQ ID NO: 427460 - RNA, 19 nt, Homo sapiens
  misc_RNA (1)...(19): siRNA sense strand
gcaggaagugaaccucaua

SEQ ID NO: 427461 - RNA, 19 nt, Homo sapiens
  misc_RNA (1)...(19): siRNA sense strand
ggguggaugugacaauauu

SEQ ID NO: 427462 - RNA, 19 nt, Homo sapiens
  misc_RNA (1)...(19): siRNA sense strand
agacagagguacuccaauc

SEQ ID NO: 427463 - RNA, 19 nt, Homo sapiens
  misc_RNA (1)...(19): siRNA sense strand
uccagcagcuuuauaaguu

SEQ ID NO: 427464 - RNA, 19 nt, Homo sapiens
  misc_RNA (1)...(19): siRNA sense strand
cuagaguuguuccugauaa

SEQ ID NO: 427465 - RNA, 19 nt, Homo sapiens
  misc_RNA (1)...(19): siRNA sense strand
gaaguagacauucucaauc

SEQ ID NO: 427466 - RNA, 19 nt, Homo sapiens
  misc_RNA (1)...(19): siRNA sense strand
caacggagaggacugaaug

SEQ ID NO: 427467 - RNA, 19 nt, Homo sapiens
  misc_RNA (1)...(19): siRNA sense strand
gcagugaagaggaagauga

SEQ ID NO: 427468 - RNA, 19 nt, Homo sapiens
  misc_RNA (1)...(19): siRNA sense strand
ugaaugguauccugcuuug

SEQ ID NO: 427469 - RNA, 19 nt, Homo sapiens
  misc_RNA (1)...(19): siRNA sense strand
ugaaguagauuuggaugau

SEQ ID NO: 427470 - RNA, 19 nt, Homo sapiens
  misc_RNA (1)...(19): siRNA sense strand
aagugaaccucauauagaa

SEQ ID NO: 427471 - RNA, 19 nt, Homo sapiens
  misc_RNA (1)...(19): siRNA sense strand
gaagacgaagcaagacaaa

SEQ ID NO: 427472 - RNA, 19 nt, Homo sapiens
  misc_RNA (1)...(19): siRNA sense strand
ggaugugacaauauugaua

SEQ ID NO: 427473 - RNA, 19 nt, Homo sapiens
  misc_RNA (1)...(19): siRNA sense strand
aagcaaaugugacucugaa

SEQ ID NO: 427474 - RNA, 19 nt, Homo sapiens
  misc_RNA (1)...(19): siRNA sense strand
caugucaucugcuucauca

SEQ ID NO: 427475 - RNA, 19 nt, Homo sapiens
  misc_RNA (1)...(19): siRNA sense strand
cagaagaggccaagugaug

SEQ ID NO: 427476 - RNA, 19 nt, Homo sapiens
  misc_RNA (1)...(19): siRNA sense strand
agagugauauaacgauuga

SEQ ID NO: 427477 - RNA, 19 nt, Homo sapiens
  misc_RNA (1)...(19): siRNA sense strand
uccaacaacugacuaguga

SEQ ID NO: 427478 - RNA, 19 nt, Homo sapiens
  misc_RNA (1)...(19): siRNA sense strand
cuacagaagaugaaauuga

SEQ ID NO: 427479 - RNA, 19 nt, Homo sapiens
  misc_RNA (1)...(19): siRNA sense strand
gaaaguaucucuaugguuu

SEQ ID NO: 427480 - RNA, 19 nt, Homo sapiens
  misc_RNA (1)...(19): siRNA sense strand
ggaagaaacugaaagcaaa

SEQ ID NO: 427481 - RNA, 19 nt, Homo sapiens
  misc_RNA (1)...(19): siRNA sense strand
gagaauugcucgagaugua

SEQ ID NO: 427482 - RNA, 19 nt, Homo sapiens
  misc_RNA (1)...(19): siRNA sense strand
uaacagaagugaagaguga

SEQ ID NO: 427483 - RNA, 19 nt, Homo sapiens
  misc_RNA (1)...(19): siRNA sense strand
gaaccaaagugaaaguaaa

SEQ ID NO: 427484 - RNA, 19 nt, Homo sapiens
  misc_RNA (1)...(19): siRNA sense strand
gaaaggacauuaaggaagu

SEQ ID NO: 427485 - RNA, 19 nt, Homo sapiens
  misc_RNA (1)...(19): siRNA sense strand
ggacaaagguggaccaaag

SEQ ID NO: 427486 - RNA, 19 nt, Homo sapiens
  misc_RNA (1)...(19): siRNA sense strand
gguacaagaugaccaagua

SEQ ID NO: 427487 - RNA, 19 nt, Homo sapiens
  misc_RNA (1)...(19): siRNA sense strand
gagcgaacauugagacgua

SEQ ID NO: 427488 - RNA, 19 nt, Homo sapiens
  misc_RNA (1)...(19): siRNA sense strand
ggauguagaugaugacuau

SEQ ID NO: 427489 - RNA, 19 nt, Homo sapiens
  misc_RNA (1)...(19): siRNA sense strand
ggugaaggcugacaggaua

SEQ ID NO: 427490 - RNA, 19 nt, Homo sapiens
  misc_RNA (1)...(19): siRNA sense strand
aaucugagcucuccacuaa

SEQ ID NO: 427491 - RNA, 19 nt, Homo sapiens
  misc_RNA (1)...(19): siRNA sense strand
cagaagaaguuaagaaaga

SEQ ID NO: 427492 - RNA, 19 nt, Homo sapiens
  misc_RNA (1)...(19): siRNA sense strand
gaaagcaagcaucuucuua

SEQ ID NO: 427493 - RNA, 19 nt, Homo sapiens
  misc_RNA (1)...(19): siRNA sense strand
ggagaggacugaaugguau

SEQ ID NO: 427494 - RNA, 19 nt, Homo sapiens
  misc_RNA (1)...(19): siRNA sense strand
gaagugaaccucauauaga

SEQ ID NO: 427495 - RNA, 19 nt, Homo sapiens
  misc_RNA (1)...(19): siRNA sense strand
ggacucaaaugcagccuuu

SEQ ID NO: 427496 - RNA, 19 nt, Homo sapiens
  misc_RNA (1)...(19): siRNA sense strand
gaauggaaaugacaaauac

SEQ ID NO: 427497 - RNA, 19 nt, Homo sapiens
  misc_RNA (1)...(19): siRNA sense strand
uaaagaagauagugaagug

SEQ ID NO: 427498 - RNA, 19 nt, Homo sapiens
  misc_RNA (1)...(19): siRNA sense strand
ggaauggaaaugacaaaua

SEQ ID NO: 427499 - RNA, 19 nt, Homo sapiens
  misc_RNA (1)...(19): siRNA sense strand
ggaagcaaauuuauaugga

SEQ ID NO: 427500 - RNA, 19 nt, Homo sapiens
  misc_RNA (1)...(19): siRNA sense strand
ccaaagauuucugcacaua

SEQ ID NO: 427501 - RNA, 19 nt, Homo sapiens
  misc_RNA (1)...(19): siRNA sense strand
agaaaugccuuuaacagaa

SEQ ID NO: 427502 - RNA, 19 nt, Homo sapiens
  misc_RNA (1)...(19): siRNA sense strand
gaaaggaccagugauugua

SEQ ID NO: 427503 - RNA, 19 nt, Homo sapiens
  misc_RNA (1)...(19): siRNA sense strand
ucugguaccuguaguauaa

SEQ ID NO: 427504 - RNA, 19 nt, Homo sapiens
  misc_RNA (1)...(19): siRNA sense strand
ggaagaacuugauccugaa

SEQ ID NO: 427505 - RNA, 19 nt, Homo sapiens
  misc_RNA (1)...(19): siRNA sense strand
caacauaacuuuucaguag

SEQ ID NO: 427506 - RNA, 19 nt, Homo sapiens
  misc_RNA (1)...(19): siRNA sense strand
gaacuccaguaauugcaaa

SEQ ID NO: 427507 - RNA, 19 nt, Homo sapiens
  misc_RNA (1)...(19): siRNA sense strand
ugaagaaucucaagaaggu

SEQ ID NO: 427508 - RNA, 19 nt, Homo sapiens
  misc_RNA (1)...(19): siRNA sense strand
gaaaugccuuuaacagaag

SEQ ID NO: 427509 - RNA, 19 nt, Homo sapiens
  misc_RNA (1)...(19): siRNA sense strand
gaccuuggcauuccuauuu

SEQ ID NO: 427510 - RNA, 19 nt, Homo sapiens
  misc_RNA (1)...(19): siRNA sense strand
ggaaauaguggauuaaugg

SEQ ID NO: 427511 - RNA, 19 nt, Homo sapiens
  misc_RNA (1)...(19): siRNA sense strand
ggaaaugacaaauacugua

SEQ ID NO: 427512 - RNA, 19 nt, Homo sapiens
  misc_RNA (1)...(19): siRNA sense strand
ggacaaucaucgccagaga

SEQ ID NO: 427513 - RNA, 19 nt, Homo sapiens
  misc_RNA (1)...(19): siRNA sense strand
aaucaacccucucaucaaa

SEQ ID NO: 427514 - RNA, 19 nt, Homo sapiens
  misc_RNA (1)...(19): siRNA sense strand
ggaaauugaagaagagaaa

SEQ ID NO: 427515 - RNA, 19 nt, Homo sapiens
  misc_RNA (1)...(19): siRNA sense strand
ugauggaaauaguggauua

SEQ ID NO: 427516 - RNA, 19 nt, Homo sapiens
  misc_RNA (1)...(19): siRNA sense strand
caagaaaggaccagugauu

SEQ ID NO: 427517 - RNA, 19 nt, Homo sapiens
  misc_RNA (1)...(19): siRNA sense strand
uauagaagcucauagucuu

SEQ ID NO: 427518 - RNA, 19 nt, Homo sapiens
  misc_RNA (1)...(19): siRNA sense strand
uagaaacccugaaguuaga

SEQ ID NO: 427519 - RNA, 19 nt, Homo sapiens
  misc_RNA (1)...(19): siRNA sense strand
ugaaacagaagaugcuuua

SEQ ID NO: 427520 - RNA, 19 nt, Homo sapiens
  misc_RNA (1)...(19): siRNA sense strand
aaacaugccguauggcuua

SEQ ID NO: 427521 - RNA, 19 nt, Homo sapiens
  misc_RNA (1)...(19): siRNA sense strand
ggaaguagacauucucaau

SEQ ID NO: 427522 - RNA, 19 nt, Homo sapiens
  misc_RNA (1)...(19): siRNA sense strand
gaaguagauuuggaugauu

SEQ ID NO: 427523 - RNA, 19 nt, Homo sapiens
  misc_RNA (1)...(19): siRNA sense strand
uggagagaaugaacaaaua

SEQ ID NO: 427524 - RNA, 19 nt, Homo sapiens
  misc_RNA (1)...(19): siRNA sense strand
ugacaaagacucagaugaa

SEQ ID NO: 427525 - RNA, 19 nt, Homo sapiens
  misc_RNA (1)...(19): siRNA sense strand
gaucaagaaaugccuuuaa

SEQ ID NO: 427526 - RNA, 19 nt, Homo sapiens
  misc_RNA (1)...(19): siRNA sense strand
caagaaaggacauuaagga

SEQ ID NO: 427527 - RNA, 19 nt, Homo sapiens
  misc_RNA (1)...(19): siRNA sense strand
cagcagcuuuauaaguuua

SEQ ID NO: 427528 - RNA, 19 nt, Homo sapiens
  misc_RNA (1)...(19): siRNA sense strand
caucaaacaugccguaugg

SEQ ID NO: 427529 - RNA, 19 nt, Homo sapiens
  misc_RNA (1)...(19): siRNA sense strand
ugaaauugaugacggagaa

SEQ ID NO: 427530 - RNA, 19 nt, Homo sapiens
  misc_RNA (1)...(19): siRNA sense strand
cuaugaaacugcagagaaa

SEQ ID NO: 427531 - RNA, 19 nt, Homo sapiens
  misc_RNA (1)...(19): siRNA sense strand
gcaaauauucaguucagaa

SEQ ID NO: 427532 - RNA, 19 nt, Homo sapiens
  misc_RNA (1)...(19): siRNA sense strand
gguauaccgugguguuuga

SEQ ID NO: 427533 - RNA, 19 nt, Homo sapiens
  misc_RNA (1)...(19): siRNA sense strand
cgauugaaguugauaguau

SEQ ID NO: 427534 - RNA, 19 nt, Homo sapiens
  misc_RNA (1)...(19): siRNA sense strand
gaaugaagcaggaagugaa

SEQ ID NO: 427535 - RNA, 19 nt, Homo sapiens
  misc_RNA (1)...(19): siRNA sense strand
guaccgaggugccuucugu

SEQ ID NO: 427536 - RNA, 19 nt, Homo sapiens
  misc_RNA (1)...(19): siRNA sense strand
ccacacaauugguacaaga

SEQ ID NO: 427537 - RNA, 19 nt, Homo sapiens
  misc_RNA (1)...(19): siRNA sense strand
ucaguagcuucaccacuua

SEQ ID NO: 427538 - RNA, 19 nt, Homo sapiens
  misc_RNA (1)...(19): siRNA sense strand
gaucuucucuuccuguuac

SEQ ID NO: 427539 - RNA, 19 nt, Homo sapiens
  misc_RNA (1)...(19): siRNA sense strand
cuaacucucuuguuucuau

SEQ ID NO: 427540 - RNA, 19 nt, Homo sapiens
  misc_RNA (1)...(19): siRNA sense strand
guugaaagcucugagucua

SEQ ID NO: 427541 - RNA, 19 nt, Homo sapiens
  misc_RNA (1)...(19): siRNA sense strand
ggaagugaaccucauauag

SEQ ID NO: 427542 - RNA, 19 nt, Homo sapiens
  misc_RNA (1)...(19): siRNA sense strand
caaaugcagccuuuagaaa

SEQ ID NO: 427543 - RNA, 19 nt, Homo sapiens
  misc_RNA (1)...(19): siRNA sense strand
aacagaagaugcuuuagaa

SEQ ID NO: 427544 - RNA, 19 nt, Homo sapiens
  misc_RNA (1)...(19): siRNA sense strand
gauaauaccacacaauugg

SEQ ID NO: 427545 - RNA, 19 nt, Homo sapiens
  misc_RNA (1)...(19): siRNA sense strand
caacaacugacuagugaaa

SEQ ID NO: 427546 - RNA, 19 nt, Homo sapiens
  misc_RNA (1)...(19): siRNA sense strand
guguuuaguucgaucauuu

SEQ ID NO: 427547 - RNA, 19 nt, Homo sapiens
  misc_RNA (1)...(19): siRNA sense strand
gagaauggaauggaaauga

SEQ ID NO: 427548 - RNA, 19 nt, Homo sapiens
  misc_RNA (1)...(19): siRNA sense strand
agacucagaugaagaggaa

SEQ ID NO: 427549 - RNA, 19 nt, Homo sapiens
  misc_RNA (1)...(19): siRNA sense strand
gcaaagauuaagacuguga

SEQ ID NO: 427550 - RNA, 19 nt, Homo sapiens
  misc_RNA (1)...(19): siRNA sense strand
aagcaagcaucuucuuaaa

SEQ ID NO: 427551 - RNA, 19 nt, Homo sapiens
  misc_RNA (1)...(19): siRNA sense strand
agaaagcagugaagaggaa

SEQ ID NO: 427552 - RNA, 19 nt, Homo sapiens
  misc_RNA (1)...(19): siRNA sense strand
aggcaaagauuaagacugu

SEQ ID NO: 427553 - RNA, 19 nt, Homo sapiens
  misc_RNA (1)...(19): siRNA sense strand
gaagacagagguacuccaa

SEQ ID NO: 427554 - RNA, 19 nt, Homo sapiens
  misc_RNA (1)...(19): siRNA sense strand
gacaagcgccgucucaaug

SEQ ID NO: 427555 - RNA, 19 nt, Homo sapiens
  misc_RNA (1)...(19): siRNA sense strand
guuagaaguuggagagaau

SEQ ID NO: 427556 - RNA, 19 nt, Homo sapiens
  misc_RNA (1)...(19): siRNA sense strand
ggaaccaaagugaaaguaa

SEQ ID NO: 427557 - RNA, 19 nt, Homo sapiens
  misc_RNA (1)...(19): siRNA sense strand
acaggaggauucugacaaa

SEQ ID NO: 427558 - RNA, 19 nt, Homo sapiens
  misc_RNA (1)...(19): siRNA sense strand
gcuauuaucagcaaguuga

SEQ ID NO: 427559 - RNA, 19 nt, Homo sapiens
  misc_RNA (1)...(19): siRNA sense strand
gaccagugauuguauugga

SEQ ID NO: 427560 - RNA, 19 nt, Homo sapiens
  misc_RNA (1)...(19): siRNA sense strand
gcaggaagugaaccucaua

SEQ ID NO: 427561 - RNA, 19 nt, Homo sapiens
  misc_RNA (1)...(19): siRNA sense strand
ggguggaugugacaauauu

SEQ ID NO: 427562 - RNA, 19 nt, Homo sapiens
  misc_RNA (1)...(19): siRNA sense strand
agacagagguacuccaauc

SEQ ID NO: 427563 - RNA, 19 nt, Homo sapiens
  misc_RNA (1)...(19): siRNA sense strand
uccagcagcuuuauaaguu

SEQ ID NO: 427564 - RNA, 19 nt, Homo sapiens
  misc_RNA (1)...(19): siRNA sense strand
cuagaguuguuccugauaa

SEQ ID NO: 427565 - RNA, 19 nt, Homo sapiens
  misc_RNA (1)...(19): siRNA sense strand
gaaguagacauucucaauc

SEQ ID NO: 427566 - RNA, 19 nt, Homo sapiens
  misc_RNA (1)...(19): siRNA sense strand
caacggagaggacugaaug

SEQ ID NO: 427567 - RNA, 19 nt, Homo sapiens
  misc_RNA (1)...(19): siRNA sense strand
gcagugaagaggaagauga

SEQ ID NO: 427568 - RNA, 19 nt, Homo sapiens
  misc_RNA (1)...(19): siRNA sense strand
ugaaugguauccugcuuug

SEQ ID NO: 427569 - RNA, 19 nt, Homo sapiens
  misc_RNA (1)...(19): siRNA sense strand
ugaaguagauuuggaugau

SEQ ID NO: 427570 - RNA, 19 nt, Homo sapiens
  misc_RNA (1)...(19): siRNA sense strand
aagugaaccucauauagaa

SEQ ID NO: 427571 - RNA, 19 nt, Homo sapiens
  misc_RNA (1)...(19): siRNA sense strand
gaagacgaagcaagacaaa

SEQ ID NO: 427572 - RNA, 19 nt, Homo sapiens
  misc_RNA (1)...(19): siRNA sense strand
ggaugugacaauauugaua

SEQ ID NO: 427573 - RNA, 19 nt, Homo sapiens
  misc_RNA (1)...(19): siRNA sense strand
aagcaaaugugacucugaa

SEQ ID NO: 427574 - RNA, 19 nt, Homo sapiens
  misc_RNA (1)...(19): siRNA sense strand
caugucaucugcuucauca

SEQ ID NO: 427575 - RNA, 19 nt, Homo sapiens
  misc_RNA (1)...(19): siRNA sense strand
cagaagaggccaagugaug

SEQ ID NO: 427576 - RNA, 19 nt, Homo sapiens
  misc_RNA (1)...(19): siRNA sense strand
agagugauauaacgauuga

SEQ ID NO: 427577 - RNA, 19 nt, Homo sapiens
  misc_RNA (1)...(19): siRNA sense strand
uccaacaacugacuaguga

SEQ ID NO: 427578 - RNA, 19 nt, Homo sapiens
  misc_RNA (1)...(19): siRNA sense strand
cuacagaagaugaaauuga

SEQ ID NO: 427579 - RNA, 19 nt, Homo sapiens
  misc_RNA (1)...(19): siRNA sense strand
ccaauaagcugcacacuaa

SEQ ID NO: 427580 - RNA, 19 nt, Homo sapiens
  misc_RNA (1)...(19): siRNA sense strand
gcagacagcuugauucgua

SEQ ID NO: 427581 - RNA, 19 nt, Homo sapiens
  misc_RNA (1)...(19): siRNA sense strand
ggagauaguucgauacuuu

SEQ ID NO: 427582 - RNA, 19 nt, Homo sapiens
  misc_RNA (1)...(19): siRNA sense strand
ggaagaaacaucagaauuu

SEQ ID NO: 427583 - RNA, 19 nt, Homo sapiens
  misc_RNA (1)...(19): siRNA sense strand
gaagaaacaucagaauuug

SEQ ID NO: 427584 - RNA, 19 nt, Homo sapiens
  misc_RNA (1)...(19): siRNA sense strand
ggaaggagagagaguauua

SEQ ID NO: 427585 - RNA, 19 nt, Homo sapiens
  misc_RNA (1)...(19): siRNA sense strand
gugaagaacucaaagaauu

SEQ ID NO: 427586 - RNA, 19 nt, Homo sapiens
  misc_RNA (1)...(19): siRNA sense strand
gcacguagaucgccacgaa

SEQ ID NO: 427587 - RNA, 19 nt, Homo sapiens
  misc_RNA (1)...(19): siRNA sense strand
acagacaacucuucucuua

SEQ ID NO: 427588 - RNA, 19 nt, Homo sapiens
  misc_RNA (1)...(19): siRNA sense strand
gaagaaaacuccaaaguga

SEQ ID NO: 427589 - RNA, 19 nt, Homo sapiens
  misc_RNA (1)...(19): siRNA sense strand
ggagagagaguauuaauga

SEQ ID NO: 427590 - RNA, 19 nt, Homo sapiens
  misc_RNA (1)...(19): siRNA sense strand
gaagauaagaucaucagua

SEQ ID NO: 427591 - RNA, 19 nt, Homo sapiens
  misc_RNA (1)...(19): siRNA sense strand
gcaagaaguuuccugauag

SEQ ID NO: 427592 - RNA, 19 nt, Homo sapiens
  misc_RNA (1)...(19): siRNA sense strand
gcacagaucgaaaccauaa

SEQ ID NO: 427593 - RNA, 19 nt, Homo sapiens
  misc_RNA (1)...(19): siRNA sense strand
gaagaaaugaugaagauga

SEQ ID NO: 427594 - RNA, 19 nt, Homo sapiens
  misc_RNA (1)...(19): siRNA sense strand
caagaugaguuccuagaaa

SEQ ID NO: 427595 - RNA, 19 nt, Homo sapiens
  misc_RNA (1)...(19): siRNA sense strand
gaagguugcuugccauuca

SEQ ID NO: 427596 - RNA, 19 nt, Homo sapiens
  misc_RNA (1)...(19): siRNA sense strand
aaagagaacuccagucaga

SEQ ID NO: 427597 - RNA, 19 nt, Homo sapiens
  misc_RNA (1)...(19): siRNA sense strand
gaaaugggcuccuccaaaa

SEQ ID NO: 427598 - RNA, 19 nt, Homo sapiens
  misc_RNA (1)...(19): siRNA sense strand
ugaagaacaucuagaagaa

SEQ ID NO: 427599 - RNA, 19 nt, Homo sapiens
  misc_RNA (1)...(19): siRNA sense strand
agacacagaugacaauaaa

SEQ ID NO: 427600 - RNA, 19 nt, Homo sapiens
  misc_RNA (1)...(19): siRNA sense strand
gaacgaagagagaaagaaa

SEQ ID NO: 427601 - RNA, 19 nt, Homo sapiens
  misc_RNA (1)...(19): siRNA sense strand
gcaaaggcauccugaaugg

SEQ ID NO: 427602 - RNA, 19 nt, Homo sapiens
  misc_RNA (1)...(19): siRNA sense strand
gaaagaaaggugaggauga

SEQ ID NO: 427603 - RNA, 19 nt, Homo sapiens
  misc_RNA (1)...(19): siRNA sense strand
gaagaugaauuggugaaga

SEQ ID NO: 427604 - RNA, 19 nt, Homo sapiens
  misc_RNA (1)...(19): siRNA sense strand
gaacuauacugaagagucu

SEQ ID NO: 427605 - RNA, 19 nt, Homo sapiens
  misc_RNA (1)...(19): siRNA sense strand
gauacuggcucuucucaga

SEQ ID NO: 427606 - RNA, 19 nt, Homo sapiens
  misc_RNA (1)...(19): siRNA sense strand
ggaaguggaugaagagaag

SEQ ID NO: 427607 - RNA, 19 nt, Homo sapiens
  misc_RNA (1)...(19): siRNA sense strand
gaugcucaguauccuauua

SEQ ID NO: 427608 - RNA, 19 nt, Homo sapiens
  misc_RNA (1)...(19): siRNA sense strand
gcaggaagcgcaagaaguu

SEQ ID NO: 427609 - RNA, 19 nt, Homo sapiens
  misc_RNA (1)...(19): siRNA sense strand
guagugaucucauugaagu

SEQ ID NO: 427610 - RNA, 19 nt, Homo sapiens
  misc_RNA (1)...(19): siRNA sense strand
gaaagcaaacuuagguaaa

SEQ ID NO: 427611 - RNA, 19 nt, Homo sapiens
  misc_RNA (1)...(19): siRNA sense strand
gaaagagaaaugaaaguga

SEQ ID NO: 427612 - RNA, 19 nt, Homo sapiens
  misc_RNA (1)...(19): siRNA sense strand
ggaaaugggcuccuccaaa

SEQ ID NO: 427613 - RNA, 19 nt, Homo sapiens
  misc_RNA (1)...(19): siRNA sense strand
ggacuacuaugaugugauc

SEQ ID NO: 427614 - RNA, 19 nt, Homo sapiens
  misc_RNA (1)...(19): siRNA sense strand
gcagucagcuaacacacaa

SEQ ID NO: 427615 - RNA, 19 nt, Homo sapiens
  misc_RNA (1)...(19): siRNA sense strand
guacagagcgcccaccaaa

SEQ ID NO: 427616 - RNA, 19 nt, Homo sapiens
  misc_RNA (1)...(19): siRNA sense strand
cgcaagaaguuuccugaua

SEQ ID NO: 427617 - RNA, 19 nt, Homo sapiens
  misc_RNA (1)...(19): siRNA sense strand
ggacauuauucacucuauu

SEQ ID NO: 427618 - RNA, 19 nt, Homo sapiens
  misc_RNA (1)...(19): siRNA sense strand
aaacagaaacggaaagaaa

SEQ ID NO: 427619 - RNA, 19 nt, Homo sapiens
  misc_RNA (1)...(19): siRNA sense strand
agaugaaguuccaggauua

SEQ ID NO: 427620 - RNA, 19 nt, Homo sapiens
  misc_RNA (1)...(19): siRNA sense strand
gaaggagacaguugugaaa

SEQ ID NO: 427621 - RNA, 19 nt, Homo sapiens
  misc_RNA (1)...(19): siRNA sense strand
gcagaagugugaagagauc

SEQ ID NO: 427622 - RNA, 19 nt, Homo sapiens
  misc_RNA (1)...(19): siRNA sense strand
aagaaaugcuugagagauu

SEQ ID NO: 427623 - RNA, 19 nt, Homo sapiens
  misc_RNA (1)...(19): siRNA sense strand
cagaugacuuuguuggaua

SEQ ID NO: 427624 - RNA, 19 nt, Homo sapiens
  misc_RNA (1)...(19): siRNA sense strand
acagagcgcccaccaaaua

SEQ ID NO: 427625 - RNA, 19 nt, Homo sapiens
  misc_RNA (1)...(19): siRNA sense strand
aagaugaugucgcccaaua

SEQ ID NO: 427626 - RNA, 19 nt, Homo sapiens
  misc_RNA (1)...(19): siRNA sense strand
caucugcacuggagaaaug

SEQ ID NO: 427627 - RNA, 19 nt, Homo sapiens
  misc_RNA (1)...(19): siRNA sense strand
ugaagcagaugacuuuguu

SEQ ID NO: 427628 - RNA, 19 nt, Homo sapiens
  misc_RNA (1)...(19): siRNA sense strand
caaauaugcugugggagaa

SEQ ID NO: 427629 - RNA, 19 nt, Homo sapiens
  misc_RNA (1)...(19): siRNA sense strand
uacagaagcugaagacaug

SEQ ID NO: 427630 - RNA, 19 nt, Homo sapiens
  misc_RNA (1)...(19): siRNA sense strand
agaagacuauggugaauug

SEQ ID NO: 427631 - RNA, 19 nt, Homo sapiens
  misc_RNA (1)...(19): siRNA sense strand
gcauucagauugguggaua

SEQ ID NO: 427632 - RNA, 19 nt, Homo sapiens
  misc_RNA (1)...(19): siRNA sense strand
gaagaacaacggaaagaau

SEQ ID NO: 427633 - RNA, 19 nt, Homo sapiens
  misc_RNA (1)...(19): siRNA sense strand
auaaggagauaguucgaua

SEQ ID NO: 427634 - RNA, 19 nt, Homo sapiens
  misc_RNA (1)...(19): siRNA sense strand
agaaaugcuugagagauua

SEQ ID NO: 427635 - RNA, 19 nt, Homo sapiens
  misc_RNA (1)...(19): siRNA sense strand
gcagaugacuuuguuggau

SEQ ID NO: 427636 - RNA, 19 nt, Homo sapiens
  misc_RNA (1)...(19): siRNA sense strand
ggucguagaagaugaauug

SEQ ID NO: 427637 - RNA, 19 nt, Homo sapiens
  misc_RNA (1)...(19): siRNA sense strand
gaaagaaauggaagccaaa

SEQ ID NO: 427638 - RNA, 19 nt, Homo sapiens
  misc_RNA (1)...(19): siRNA sense strand
gaaagaaaugcuugagaga

SEQ ID NO: 427639 - RNA, 19 nt, Homo sapiens
  misc_RNA (1)...(19): siRNA sense strand
gaaggaaggagagagagua

SEQ ID NO: 427640 - RNA, 19 nt, Homo sapiens
  misc_RNA (1)...(19): siRNA sense strand
gagaugaggccgaggacua

SEQ ID NO: 427641 - RNA, 19 nt, Homo sapiens
  misc_RNA (1)...(19): siRNA sense strand
gaaaggugaggaugacaaa

SEQ ID NO: 427642 - RNA, 19 nt, Homo sapiens
  misc_RNA (1)...(19): siRNA sense strand
cagaugaaguuccaggauu

SEQ ID NO: 427643 - RNA, 19 nt, Homo sapiens
  misc_RNA (1)...(19): siRNA sense strand
guaugaggaccaagaguua

SEQ ID NO: 427644 - RNA, 19 nt, Homo sapiens
  misc_RNA (1)...(19): siRNA sense strand
gaacaucuagaagaaauga

SEQ ID NO: 427645 - RNA, 19 nt, Homo sapiens
  misc_RNA (1)...(19): siRNA sense strand
gagauaguucgauacuuua

SEQ ID NO: 427646 - RNA, 19 nt, Homo sapiens
  misc_RNA (1)...(19): siRNA sense strand
ccacugagaagaaaucuga

SEQ ID NO: 427647 - RNA, 19 nt, Homo sapiens
  misc_RNA (1)...(19): siRNA sense strand
gaucgaaaccauaauagau

SEQ ID NO: 427648 - RNA, 19 nt, Homo sapiens
  misc_RNA (1)...(19): siRNA sense strand
auaaugagguacaagauga

SEQ ID NO: 427649 - RNA, 19 nt, Homo sapiens
  misc_RNA (1)...(19): siRNA sense strand
gaacaacggaaagaauauu

SEQ ID NO: 427650 - RNA, 19 nt, Homo sapiens
  misc_RNA (1)...(19): siRNA sense strand
gaggugggcuucuaugucu

SEQ ID NO: 427651 - RNA, 19 nt, Homo sapiens
  misc_RNA (1)...(19): siRNA sense strand
gcaaagggcagaagcaaag

SEQ ID NO: 427652 - RNA, 19 nt, Homo sapiens
  misc_RNA (1)...(19): siRNA sense strand
agacaacucuucucuuagu

SEQ ID NO: 427653 - RNA, 19 nt, Homo sapiens
  misc_RNA (1)...(19): siRNA sense strand
gcagaagacuauggugaau

SEQ ID NO: 427654 - RNA, 19 nt, Homo sapiens
  misc_RNA (1)...(19): siRNA sense strand
gagcucgucucccagaaga

SEQ ID NO: 427655 - RNA, 19 nt, Homo sapiens
  misc_RNA (1)...(19): siRNA sense strand
aaaugaagcagaugacuuu

SEQ ID NO: 427656 - RNA, 19 nt, Homo sapiens
  misc_RNA (1)...(19): siRNA sense strand
gaaaugaugaagaugaugu

SEQ ID NO: 427657 - RNA, 19 nt, Homo sapiens
  misc_RNA (1)...(19): siRNA sense strand
uaacacagccuccuuagag

SEQ ID NO: 427658 - RNA, 19 nt, Homo sapiens
  misc_RNA (1)...(19): siRNA sense strand
ggaguuuccugccugguau

SEQ ID NO: 427659 - RNA, 19 nt, Homo sapiens
  misc_RNA (1)...(19): siRNA sense strand
ggaaauccaggaaagagaa

SEQ ID NO: 427660 - RNA, 19 nt, Homo sapiens
  misc_RNA (1)...(19): siRNA sense strand
gcuggagaccucugaauuu

SEQ ID NO: 427661 - RNA, 19 nt, Homo sapiens
  misc_RNA (1)...(19): siRNA sense strand
guucaccacuaaauccuaa

SEQ ID NO: 427662 - RNA, 19 nt, Homo sapiens
  misc_RNA (1)...(19): siRNA sense strand
gguacaagaugaguuccua

SEQ ID NO: 427663 - RNA, 19 nt, Homo sapiens
  misc_RNA (1)...(19): siRNA sense strand
cagcugcauuugaggauaa

SEQ ID NO: 427664 - RNA, 19 nt, Homo sapiens
  misc_RNA (1)...(19): siRNA sense strand
gacgaagacagaagaagua

SEQ ID NO: 427665 - RNA, 19 nt, Homo sapiens
  misc_RNA (1)...(19): siRNA sense strand
aaaaggagcuggaugaguu

SEQ ID NO: 427666 - RNA, 19 nt, Homo sapiens
  misc_RNA (1)...(19): siRNA sense strand
gaacacacaacauggaaca

SEQ ID NO: 427667 - RNA, 19 nt, Homo sapiens
  misc_RNA (1)...(19): siRNA sense strand
guuccaggauuauucauug

SEQ ID NO: 427668 - RNA, 19 nt, Homo sapiens
  misc_RNA (1)...(19): siRNA sense strand
gaagcugaagacaugauua

SEQ ID NO: 427669 - RNA, 19 nt, Homo sapiens
  misc_RNA (1)...(19): siRNA sense strand
acaggaagcccucaaagaa

SEQ ID NO: 427670 - RNA, 19 nt, Homo sapiens
  misc_RNA (1)...(19): siRNA sense strand
aaugcuaggugcaaaguuu

SEQ ID NO: 427671 - RNA, 19 nt, Homo sapiens
  misc_RNA (1)...(19): siRNA sense strand
ggaacggcuugcuguguug

SEQ ID NO: 427672 - RNA, 19 nt, Homo sapiens
  misc_RNA (1)...(19): siRNA sense strand
caacggaaagaauauuuga

SEQ ID NO: 427673 - RNA, 19 nt, Homo sapiens
  misc_RNA (1)...(19): siRNA sense strand
cacacuaacuuucacauuc

SEQ ID NO: 427674 - RNA, 19 nt, Homo sapiens
  misc_RNA (1)...(19): siRNA sense strand
gaagaacaucuagaagaaa

SEQ ID NO: 427675 - RNA, 19 nt, Homo sapiens
  misc_RNA (1)...(19): siRNA sense strand
caaagaaauccaagacaga

SEQ ID NO: 427676 - RNA, 19 nt, Homo sapiens
  misc_RNA (1)...(19): siRNA sense strand
ggaaagagaaaugaaagug

SEQ ID NO: 427677 - RNA, 19 nt, Homo sapiens
  misc_RNA (1)...(19): siRNA sense strand
gaagagguaccaggacauu

SEQ ID NO: 427678 - RNA, 19 nt, Homo sapiens
  misc_RNA (1)...(19): siRNA sense strand
acgccaagcugaagaagaa

SEQ ID NO: 427679 - RNA, 19 nt, Homo sapiens
  misc_RNA (1)...(19): siRNA sense strand
ccaauaagcugcacacuaa

SEQ ID NO: 427680 - RNA, 19 nt, Homo sapiens
  misc_RNA (1)...(19): siRNA sense strand
gcagacagcuugauucgua

SEQ ID NO: 427681 - RNA, 19 nt, Homo sapiens
  misc_RNA (1)...(19): siRNA sense strand
ggagauaguucgauacuuu

SEQ ID NO: 427682 - RNA, 19 nt, Homo sapiens
  misc_RNA (1)...(19): siRNA sense strand
ggaagaaacaucagaauuu

SEQ ID NO: 427683 - RNA, 19 nt, Homo sapiens
  misc_RNA (1)...(19): siRNA sense strand
gaagaaacaucagaauuug

SEQ ID NO: 427684 - RNA, 19 nt, Homo sapiens
  misc_RNA (1)...(19): siRNA sense strand
ggaaggagagagaguauua

SEQ ID NO: 427685 - RNA, 19 nt, Homo sapiens
  misc_RNA (1)...(19): siRNA sense strand
gugaagaacucaaagaauu

SEQ ID NO: 427686 - RNA, 19 nt, Homo sapiens
  misc_RNA (1)...(19): siRNA sense strand
gcacguagaucgccacgaa

SEQ ID NO: 427687 - RNA, 19 nt, Homo sapiens
  misc_RNA (1)...(19): siRNA sense strand
acagacaacucuucucuua

SEQ ID NO: 427688 - RNA, 19 nt, Homo sapiens
  misc_RNA (1)...(19): siRNA sense strand
gaagaaaacuccaaaguga

SEQ ID NO: 427689 - RNA, 19 nt, Homo sapiens
  misc_RNA (1)...(19): siRNA sense strand
ggagagagaguauuaauga

SEQ ID NO: 427690 - RNA, 19 nt, Homo sapiens
  misc_RNA (1)...(19): siRNA sense strand
gaagauaagaucaucagua

SEQ ID NO: 427691 - RNA, 19 nt, Homo sapiens
  misc_RNA (1)...(19): siRNA sense strand
gcaagaaguuuccugauag

SEQ ID NO: 427692 - RNA, 19 nt, Homo sapiens
  misc_RNA (1)...(19): siRNA sense strand
gcacagaucgaaaccauaa

SEQ ID NO: 427693 - RNA, 19 nt, Homo sapiens
  misc_RNA (1)...(19): siRNA sense strand
gaagaaaugaugaagauga

SEQ ID NO: 427694 - RNA, 19 nt, Homo sapiens
  misc_RNA (1)...(19): siRNA sense strand
caagaugaguuccuagaaa

SEQ ID NO: 427695 - RNA, 19 nt, Homo sapiens
  misc_RNA (1)...(19): siRNA sense strand
gaagguugcuugccauuca

SEQ ID NO: 427696 - RNA, 19 nt, Homo sapiens
  misc_RNA (1)...(19): siRNA sense strand
aaagagaacuccagucaga

SEQ ID NO: 427697 - RNA, 19 nt, Homo sapiens
  misc_RNA (1)...(19): siRNA sense strand
gaaaugggcuccuccaaaa

SEQ ID NO: 427698 - RNA, 19 nt, Homo sapiens
  misc_RNA (1)...(19): siRNA sense strand
ugaagaacaucuagaagaa

SEQ ID NO: 427699 - RNA, 19 nt, Homo sapiens
  misc_RNA (1)...(19): siRNA sense strand
agacacagaugacaauaaa

SEQ ID NO: 427700 - RNA, 19 nt, Homo sapiens
  misc_RNA (1)...(19): siRNA sense strand
gaacgaagagagaaagaaa

SEQ ID NO: 427701 - RNA, 19 nt, Homo sapiens
  misc_RNA (1)...(19): siRNA sense strand
gcaaaggcauccugaaugg

SEQ ID NO: 427702 - RNA, 19 nt, Homo sapiens
  misc_RNA (1)...(19): siRNA sense strand
gaaagaaaggugaggauga

SEQ ID NO: 427703 - RNA, 19 nt, Homo sapiens
  misc_RNA (1)...(19): siRNA sense strand
gaagaugaauuggugaaga

SEQ ID NO: 427704 - RNA, 19 nt, Homo sapiens
  misc_RNA (1)...(19): siRNA sense strand
gaacuauacugaagagucu

SEQ ID NO: 427705 - RNA, 19 nt, Homo sapiens
  misc_RNA (1)...(19): siRNA sense strand
gauacuggcucuucucaga

SEQ ID NO: 427706 - RNA, 19 nt, Homo sapiens
  misc_RNA (1)...(19): siRNA sense strand
ggaaguggaugaagagaag

SEQ ID NO: 427707 - RNA, 19 nt, Homo sapiens
  misc_RNA (1)...(19): siRNA sense strand
gaugcucaguauccuauua

SEQ ID NO: 427708 - RNA, 19 nt, Homo sapiens
  misc_RNA (1)...(19): siRNA sense strand
gcaggaagcgcaagaaguu

SEQ ID NO: 427709 - RNA, 19 nt, Homo sapiens
  misc_RNA (1)...(19): siRNA sense strand
guagugaucucauugaagu

SEQ ID NO: 427710 - RNA, 19 nt, Homo sapiens
  misc_RNA (1)...(19): siRNA sense strand
gaaagcaaacuuagguaaa

SEQ ID NO: 427711 - RNA, 19 nt, Homo sapiens
  misc_RNA (1)...(19): siRNA sense strand
gaaagagaaaugaaaguga

SEQ ID NO: 427712 - RNA, 19 nt, Homo sapiens
  misc_RNA (1)...(19): siRNA sense strand
ggaaaugggcuccuccaaa

SEQ ID NO: 427713 - RNA, 19 nt, Homo sapiens
  misc_RNA (1)...(19): siRNA sense strand
ggacuacuaugaugugauc

SEQ ID NO: 427714 - RNA, 19 nt, Homo sapiens
  misc_RNA (1)...(19): siRNA sense strand
gcagucagcuaacacacaa

SEQ ID NO: 427715 - RNA, 19 nt, Homo sapiens
  misc_RNA (1)...(19): siRNA sense strand
guacagagcgcccaccaaa

SEQ ID NO: 427716 - RNA, 19 nt, Homo sapiens
  misc_RNA (1)...(19): siRNA sense strand
cgcaagaaguuuccugaua

SEQ ID NO: 427717 - RNA, 19 nt, Homo sapiens
  misc_RNA (1)...(19): siRNA sense strand
ggacauuauucacucuauu

SEQ ID NO: 427718 - RNA, 19 nt, Homo sapiens
  misc_RNA (1)...(19): siRNA sense strand
aaacagaaacggaaagaaa

SEQ ID NO: 427719 - RNA, 19 nt, Homo sapiens
  misc_RNA (1)...(19): siRNA sense strand
agaugaaguuccaggauua

SEQ ID NO: 427720 - RNA, 19 nt, Homo sapiens
  misc_RNA (1)...(19): siRNA sense strand
gaaggagacaguugugaaa

SEQ ID NO: 427721 - RNA, 19 nt, Homo sapiens
  misc_RNA (1)...(19): siRNA sense strand
gcagaagugugaagagauc

SEQ ID NO: 427722 - RNA, 19 nt, Homo sapiens
  misc_RNA (1)...(19): siRNA sense strand
aagaaaugcuugagagauu

SEQ ID NO: 427723 - RNA, 19 nt, Homo sapiens
  misc_RNA (1)...(19): siRNA sense strand
cagaugacuuuguuggaua

SEQ ID NO: 427724 - RNA, 19 nt, Homo sapiens
  misc_RNA (1)...(19): siRNA sense strand
acagagcgcccaccaaaua

SEQ ID NO: 427725 - RNA, 19 nt, Homo sapiens
  misc_RNA (1)...(19): siRNA sense strand
aagaugaugucgcccaaua

SEQ ID NO: 427726 - RNA, 19 nt, Homo sapiens
  misc_RNA (1)...(19): siRNA sense strand
caucugcacuggagaaaug

SEQ ID NO: 427727 - RNA, 19 nt, Homo sapiens
  misc_RNA (1)...(19): siRNA sense strand
ugaagcagaugacuuuguu

SEQ ID NO: 427728 - RNA, 19 nt, Homo sapiens
  misc_RNA (1)...(19): siRNA sense strand
caaauaugcugugggagaa

SEQ ID NO: 427729 - RNA, 19 nt, Homo sapiens
  misc_RNA (1)...(19): siRNA sense strand
uacagaagcugaagacaug

SEQ ID NO: 427730 - RNA, 19 nt, Homo sapiens
  misc_RNA (1)...(19): siRNA sense strand
agaagacuauggugaauug

SEQ ID NO: 427731 - RNA, 19 nt, Homo sapiens
  misc_RNA (1)...(19): siRNA sense strand
gcauucagauugguggaua

SEQ ID NO: 427732 - RNA, 19 nt, Homo sapiens
  misc_RNA (1)...(19): siRNA sense strand
gaagaacaacggaaagaau

SEQ ID NO: 427733 - RNA, 19 nt, Homo sapiens
  misc_RNA (1)...(19): siRNA sense strand
auaaggagauaguucgaua

SEQ ID NO: 427734 - RNA, 19 nt, Homo sapiens
  misc_RNA (1)...(19): siRNA sense strand
agaaaugcuugagagauua

SEQ ID NO: 427735 - RNA, 19 nt, Homo sapiens
  misc_RNA (1)...(19): siRNA sense strand
gcagaugacuuuguuggau

SEQ ID NO: 427736 - RNA, 19 nt, Homo sapiens
  misc_RNA (1)...(19): siRNA sense strand
ggucguagaagaugaauug

SEQ ID NO: 427737 - RNA, 19 nt, Homo sapiens
  misc_RNA (1)...(19): siRNA sense strand
gaaagaaauggaagccaaa

SEQ ID NO: 427738 - RNA, 19 nt, Homo sapiens
  misc_RNA (1)...(19): siRNA sense strand
gaaagaaaugcuugagaga

SEQ ID NO: 427739 - RNA, 19 nt, Homo sapiens
  misc_RNA (1)...(19): siRNA sense strand
gaaggaaggagagagagua

SEQ ID NO: 427740 - RNA, 19 nt, Homo sapiens
  misc_RNA (1)...(19): siRNA sense strand
gagaugaggccgaggacua

SEQ ID NO: 427741 - RNA, 19 nt, Homo sapiens
  misc_RNA (1)...(19): siRNA sense strand
gaaaggugaggaugacaaa

SEQ ID NO: 427742 - RNA, 19 nt, Homo sapiens
  misc_RNA (1)...(19): siRNA sense strand
cagaugaaguuccaggauu

SEQ ID NO: 427743 - RNA, 19 nt, Homo sapiens
  misc_RNA (1)...(19): siRNA sense strand
guaugaggaccaagaguua

SEQ ID NO: 427744 - RNA, 19 nt, Homo sapiens
  misc_RNA (1)...(19): siRNA sense strand
gaacaucuagaagaaauga

SEQ ID NO: 427745 - RNA, 19 nt, Homo sapiens
  misc_RNA (1)...(19): siRNA sense strand
gagauaguucgauacuuua

SEQ ID NO: 427746 - RNA, 19 nt, Homo sapiens
  misc_RNA (1)...(19): siRNA sense strand
ccacugagaagaaaucuga

SEQ ID NO: 427747 - RNA, 19 nt, Homo sapiens
  misc_RNA (1)...(19): siRNA sense strand
gaucgaaaccauaauagau

SEQ ID NO: 427748 - RNA, 19 nt, Homo sapiens
  misc_RNA (1)...(19): siRNA sense strand
auaaugagguacaagauga

SEQ ID NO: 427749 - RNA, 19 nt, Homo sapiens
  misc_RNA (1)...(19): siRNA sense strand
gaacaacggaaagaauauu

SEQ ID NO: 427750 - RNA, 19 nt, Homo sapiens
  misc_RNA (1)...(19): siRNA sense strand
gaggugggcuucuaugucu

SEQ ID NO: 427751 - RNA, 19 nt, Homo sapiens
  misc_RNA (1)...(19): siRNA sense strand
gcaaagggcagaagcaaag

SEQ ID NO: 427752 - RNA, 19 nt, Homo sapiens
  misc_RNA (1)...(19): siRNA sense strand
agacaacucuucucuuagu

SEQ ID NO: 427753 - RNA, 19 nt, Homo sapiens
  misc_RNA (1)...(19): siRNA sense strand
gcagaagacuauggugaau

SEQ ID NO: 427754 - RNA, 19 nt, Homo sapiens
  misc_RNA (1)...(19): siRNA sense strand
gagcucgucucccagaaga

SEQ ID NO: 427755 - RNA, 19 nt, Homo sapiens
  misc_RNA (1)...(19): siRNA sense strand
aaaugaagcagaugacuuu

SEQ ID NO: 427756 - RNA, 19 nt, Homo sapiens
  misc_RNA (1)...(19): siRNA sense strand
gaaaugaugaagaugaugu

SEQ ID NO: 427757 - RNA, 19 nt, Homo sapiens
  misc_RNA (1)...(19): siRNA sense strand
uaacacagccuccuuagag

SEQ ID NO: 427758 - RNA, 19 nt, Homo sapiens
  misc_RNA (1)...(19): siRNA sense strand
ggaguuuccugccugguau

SEQ ID NO: 427759 - RNA, 19 nt, Homo sapiens
  misc_RNA (1)...(19): siRNA sense strand
ggaaauccaggaaagagaa

SEQ ID NO: 427760 - RNA, 19 nt, Homo sapiens
  misc_RNA (1)...(19): siRNA sense strand
gcuggagaccucugaauuu

SEQ ID NO: 427761 - RNA, 19 nt, Homo sapiens
  misc_RNA (1)...(19): siRNA sense strand
guucaccacuaaauccuaa

SEQ ID NO: 427762 - RNA, 19 nt, Homo sapiens
  misc_RNA (1)...(19): siRNA sense strand
gguacaagaugaguuccua

SEQ ID NO: 427763 - RNA, 19 nt, Homo sapiens
  misc_RNA (1)...(19): siRNA sense strand
cagcugcauuugaggauaa

SEQ ID NO: 427764 - RNA, 19 nt, Homo sapiens
  misc_RNA (1)...(19): siRNA sense strand
gacgaagacagaagaagua

SEQ ID NO: 427765 - RNA, 19 nt, Homo sapiens
  misc_RNA (1)...(19): siRNA sense strand
aaaaggagcuggaugaguu

SEQ ID NO: 427766 - RNA, 19 nt, Homo sapiens
  misc_RNA (1)...(19): siRNA sense strand
gaacacacaacauggaaca

SEQ ID NO: 427767 - RNA, 19 nt, Homo sapiens
  misc_RNA (1)...(19): siRNA sense strand
guuccaggauuauucauug

SEQ ID NO: 427768 - RNA, 19 nt, Homo sapiens
  misc_RNA (1)...(19): siRNA sense strand
gaagcugaagacaugauua

SEQ ID NO: 427769 - RNA, 19 nt, Homo sapiens
  misc_RNA (1)...(19): siRNA sense strand
acaggaagcccucaaagaa

SEQ ID NO: 427770 - RNA, 19 nt, Homo sapiens
  misc_RNA (1)...(19): siRNA sense strand
aaugcuaggugcaaaguuu

SEQ ID NO: 427771 - RNA, 19 nt, Homo sapiens
  misc_RNA (1)...(19): siRNA sense strand
ggaacggcuugcuguguug

SEQ ID NO: 427772 - RNA, 19 nt, Homo sapiens
  misc_RNA (1)...(19): siRNA sense strand
caacggaaagaauauuuga

SEQ ID NO: 427773 - RNA, 19 nt, Homo sapiens
  misc_RNA (1)...(19): siRNA sense strand
cacacuaacuuucacauuc

SEQ ID NO: 427774 - RNA, 19 nt, Homo sapiens
  misc_RNA (1)...(19): siRNA sense strand
gaagaacaucuagaagaaa

SEQ ID NO: 427775 - RNA, 19 nt, Homo sapiens
  misc_RNA (1)...(19): siRNA sense strand
caaagaaauccaagacaga

SEQ ID NO: 427776 - RNA, 19 nt, Homo sapiens
  misc_RNA (1)...(19): siRNA sense strand
ggaaagagaaaugaaagug

SEQ ID NO: 427777 - RNA, 19 nt, Homo sapiens
  misc_RNA (1)...(19): siRNA sense strand
gaagagguaccaggacauu

SEQ ID NO: 427778 - RNA, 19 nt, Homo sapiens
  misc_RNA (1)...(19): siRNA sense strand
acgccaagcugaagaagaa

SEQ ID NO: 427779 - RNA, 19 nt, Homo sapiens
  misc_RNA (1)...(19): siRNA sense strand
gggaaaccaugaagaggaa

SEQ ID NO: 427780 - RNA, 19 nt, Homo sapiens
  misc_RNA (1)...(19): siRNA sense strand
gcuggaaggugacgagugu

SEQ ID NO: 427781 - RNA, 19 nt, Homo sapiens
  misc_RNA (1)...(19): siRNA sense strand
ccaggauggugacaaguug

SEQ ID NO: 427782 - RNA, 19 nt, Homo sapiens
  misc_RNA (1)...(19): siRNA sense strand
cauggcaaguggcucucua

SEQ ID NO: 427783 - RNA, 19 nt, Homo sapiens
  misc_RNA (1)...(19): siRNA sense strand
gaucagggaaaccaugaag

SEQ ID NO: 427784 - RNA, 19 nt, Homo sapiens
  misc_RNA (1)...(19): siRNA sense strand
auaccaaagucugccacua

SEQ ID NO: 427785 - RNA, 19 nt, Homo sapiens
  misc_RNA (1)...(19): siRNA sense strand
ggggugacgucccuuguga

SEQ ID NO: 427786 - RNA, 19 nt, Homo sapiens
  misc_RNA (1)...(19): siRNA sense strand
ucagggaaaccaugaagag

SEQ ID NO: 427787 - RNA, 19 nt, Homo sapiens
  misc_RNA (1)...(19): siRNA sense strand
ccaccgcaacgacaucaug

SEQ ID NO: 427788 - RNA, 19 nt, Homo sapiens
  misc_RNA (1)...(19): siRNA sense strand
ggugacgucccuugugaca

SEQ ID NO: 427789 - RNA, 19 nt, Homo sapiens
  misc_RNA (1)...(19): siRNA sense strand
gcuggaaggugacgagugu

SEQ ID NO: 427790 - RNA, 19 nt, Homo sapiens
  misc_RNA (1)...(19): siRNA sense strand
ccaggauggugacaaguug

SEQ ID NO: 427791 - RNA, 19 nt, Homo sapiens
  misc_RNA (1)...(19): siRNA sense strand
cauggcaaguggcucucua

SEQ ID NO: 427792 - RNA, 19 nt, Homo sapiens
  misc_RNA (1)...(19): siRNA sense strand
ccaccgcaacgacaucaug

SEQ ID NO: 427793 - RNA, 19 nt, Homo sapiens
  misc_RNA (1)...(19): siRNA sense strand
gcuggaaggugacgagugu

SEQ ID NO: 427794 - RNA, 19 nt, Homo sapiens
  misc_RNA (1)...(19): siRNA sense strand
ccaggauggugacaaguug

SEQ ID NO: 427795 - RNA, 19 nt, Homo sapiens
  misc_RNA (1)...(19): siRNA sense strand
cauggcaaguggcucucua

SEQ ID NO: 427796 - RNA, 19 nt, Homo sapiens
  misc_RNA (1)...(19): siRNA sense strand
ccaccgcaacgacaucaug

SEQ ID NO: 427797 - RNA, 19 nt, Homo sapiens
  misc_RNA (1)...(19): siRNA sense strand
gggaaaccaugaagaggaa

SEQ ID NO: 427798 - RNA, 19 nt, Homo sapiens
  misc_RNA (1)...(19): siRNA sense strand
gcuggaaggugacgagugu

SEQ ID NO: 427799 - RNA, 19 nt, Homo sapiens
  misc_RNA (1)...(19): siRNA sense strand
ccaggauggugacaaguug

SEQ ID NO: 427800 - RNA, 19 nt, Homo sapiens
  misc_RNA (1)...(19): siRNA sense strand
cauggcaaguggcucucua

SEQ ID NO: 427801 - RNA, 19 nt, Homo sapiens
  misc_RNA (1)...(19): siRNA sense strand
gaucagggaaaccaugaag

SEQ ID NO: 427802 - RNA, 19 nt, Homo sapiens
  misc_RNA (1)...(19): siRNA sense strand
auaccaaagucugccacua

SEQ ID NO: 427803 - RNA, 19 nt, Homo sapiens
  misc_RNA (1)...(19): siRNA sense strand
ggggugacgucccuuguga

SEQ ID NO: 427804 - RNA, 19 nt, Homo sapiens
  misc_RNA (1)...(19): siRNA sense strand
ucagggaaaccaugaagag

SEQ ID NO: 427805 - RNA, 19 nt, Homo sapiens
  misc_RNA (1)...(19): siRNA sense strand
ccaccgcaacgacaucaug

SEQ ID NO: 427806 - RNA, 19 nt, Homo sapiens
  misc_RNA (1)...(19): siRNA sense strand
ggugacgucccuugugaca

SEQ ID NO: 427807 - RNA, 19 nt, Homo sapiens
  misc_RNA (1)...(19): siRNA sense strand
ggaggaagaugaagaggaa

SEQ ID NO: 427808 - RNA, 19 nt, Homo sapiens
  misc_RNA (1)...(19): siRNA sense strand
ugacgcaucucaaggaaua

SEQ ID NO: 427809 - RNA, 19 nt, Homo sapiens
  misc_RNA (1)...(19): siRNA sense strand
ugaagaaccugaagaggaa

SEQ ID NO: 427810 - RNA, 19 nt, Homo sapiens
  misc_RNA (1)...(19): siRNA sense strand
ggagaaggcaggcaaauau

SEQ ID NO: 427811 - RNA, 19 nt, Homo sapiens
  misc_RNA (1)...(19): siRNA sense strand
gaaguacaauuuccguuuc

SEQ ID NO: 427812 - RNA, 19 nt, Homo sapiens
  misc_RNA (1)...(19): siRNA sense strand
gaacagaaguacaauuucc

SEQ ID NO: 427813 - RNA, 19 nt, Homo sapiens
  misc_RNA (1)...(19): siRNA sense strand
gaacccagauucccugaag

SEQ ID NO: 427814 - RNA, 19 nt, Homo sapiens
  misc_RNA (1)...(19): siRNA sense strand
gaaagaugccaccuucuau

SEQ ID NO: 427815 - RNA, 19 nt, Homo sapiens
  misc_RNA (1)...(19): siRNA sense strand
gagaagcugcggaaaguaa

SEQ ID NO: 427816 - RNA, 19 nt, Homo sapiens
  misc_RNA (1)...(19): siRNA sense strand
gaagaaacaggaggacuuu

SEQ ID NO: 427817 - RNA, 19 nt, Homo sapiens
  misc_RNA (1)...(19): siRNA sense strand
agaaacagcucaaggaaag

SEQ ID NO: 427818 - RNA, 19 nt, Homo sapiens
  misc_RNA (1)...(19): siRNA sense strand
ccauguaccugaaggacua

SEQ ID NO: 427819 - RNA, 19 nt, Homo sapiens
  misc_RNA (1)...(19): siRNA sense strand
gaacgacccugaguuggau

SEQ ID NO: 427820 - RNA, 19 nt, Homo sapiens
  misc_RNA (1)...(19): siRNA sense strand
ggaagguuaucuuggagaa

SEQ ID NO: 427821 - RNA, 19 nt, Homo sapiens
  misc_RNA (1)...(19): siRNA sense strand
gaacagcaucgucaucaga

SEQ ID NO: 427822 - RNA, 19 nt, Homo sapiens
  misc_RNA (1)...(19): siRNA sense strand
agacaucgucgcaaaguua

SEQ ID NO: 427823 - RNA, 19 nt, Homo sapiens
  misc_RNA (1)...(19): siRNA sense strand
uaaagaagaccugcaugua

SEQ ID NO: 427824 - RNA, 19 nt, Homo sapiens
  misc_RNA (1)...(19): siRNA sense strand
ugaaggaacugacgcaucu

SEQ ID NO: 427825 - RNA, 19 nt, Homo sapiens
  misc_RNA (1)...(19): siRNA sense strand
gaggagaagccacaauuug

SEQ ID NO: 427826 - RNA, 19 nt, Homo sapiens
  misc_RNA (1)...(19): siRNA sense strand
ggacgacuccucagacgaa

SEQ ID NO: 427827 - RNA, 19 nt, Homo sapiens
  misc_RNA (1)...(19): siRNA sense strand
gcaaaguuauguggaggaa

SEQ ID NO: 427828 - RNA, 19 nt, Homo sapiens
  misc_RNA (1)...(19): siRNA sense strand
aggaguaccuggaugagua

SEQ ID NO: 427829 - RNA, 19 nt, Homo sapiens
  misc_RNA (1)...(19): siRNA sense strand
gaaaggagaagagggaaga

SEQ ID NO: 427830 - RNA, 19 nt, Homo sapiens
  misc_RNA (1)...(19): siRNA sense strand
gaugccaccuucuauaaca

SEQ ID NO: 427831 - RNA, 19 nt, Homo sapiens
  misc_RNA (1)...(19): siRNA sense strand
gauccucgcugcugacgau

SEQ ID NO: 427832 - RNA, 19 nt, Homo sapiens
  misc_RNA (1)...(19): siRNA sense strand
ggaggagaagccacaauuu

SEQ ID NO: 427833 - RNA, 19 nt, Homo sapiens
  misc_RNA (1)...(19): siRNA sense strand
caggagacaucgucgcaaa

SEQ ID NO: 427834 - RNA, 19 nt, Homo sapiens
  misc_RNA (1)...(19): siRNA sense strand
acaagacguucgaggagua

SEQ ID NO: 427835 - RNA, 19 nt, Homo sapiens
  misc_RNA (1)...(19): siRNA sense strand
gaaagaagagggagaaagc

SEQ ID NO: 427836 - RNA, 19 nt, Homo sapiens
  misc_RNA (1)...(19): siRNA sense strand
gaaacaggaggacuuugaa

SEQ ID NO: 427837 - RNA, 19 nt, Homo sapiens
  misc_RNA (1)...(19): siRNA sense strand
gaaggcaggcaaauauguu

SEQ ID NO: 427838 - RNA, 19 nt, Homo sapiens
  misc_RNA (1)...(19): siRNA sense strand
gaagggacagaaagagauu

SEQ ID NO: 427839 - RNA, 19 nt, Homo sapiens
  misc_RNA (1)...(19): siRNA sense strand
agaggaagguuaucuugga

SEQ ID NO: 427840 - RNA, 19 nt, Homo sapiens
  misc_RNA (1)...(19): siRNA sense strand
ggaaauggaggaagagaag

SEQ ID NO: 427841 - RNA, 19 nt, Homo sapiens
  misc_RNA (1)...(19): siRNA sense strand
ggaacgacccugaguugga

SEQ ID NO: 427842 - RNA, 19 nt, Homo sapiens
  misc_RNA (1)...(19): siRNA sense strand
aaaguuauguggaggaaca

SEQ ID NO: 427843 - RNA, 19 nt, Homo sapiens
  misc_RNA (1)...(19): siRNA sense strand
aaagaugccaccuucuaua

SEQ ID NO: 427844 - RNA, 19 nt, Homo sapiens
  misc_RNA (1)...(19): siRNA sense strand
aagaagaccugcauguaca

SEQ ID NO: 427845 - RNA, 19 nt, Homo sapiens
  misc_RNA (1)...(19): siRNA sense strand
gcccagaacucauggaaaa

SEQ ID NO: 427846 - RNA, 19 nt, Homo sapiens
  misc_RNA (1)...(19): siRNA sense strand
ggaggaggccgacuacauc

SEQ ID NO: 427847 - RNA, 19 nt, Homo sapiens
  misc_RNA (1)...(19): siRNA sense strand
ggaagaagaagggcuugaa

SEQ ID NO: 427848 - RNA, 19 nt, Homo sapiens
  misc_RNA (1)...(19): siRNA sense strand
aagaggaaauggaggaaga

SEQ ID NO: 427849 - RNA, 19 nt, Homo sapiens
  misc_RNA (1)...(19): siRNA sense strand
caacauggacgccgacuac

SEQ ID NO: 427850 - RNA, 19 nt, Homo sapiens
  misc_RNA (1)...(19): siRNA sense strand
gagacaucgucgcaaaguu

SEQ ID NO: 427851 - RNA, 19 nt, Homo sapiens
  misc_RNA (1)...(19): siRNA sense strand
gaccugcccugucgcuuca

SEQ ID NO: 427852 - RNA, 19 nt, Homo sapiens
  misc_RNA (1)...(19): siRNA sense strand
caggaggacuuugaacaga

SEQ ID NO: 427853 - RNA, 19 nt, Homo sapiens
  misc_RNA (1)...(19): siRNA sense strand
ggagaagcccguguucgaa

SEQ ID NO: 427854 - RNA, 19 nt, Homo sapiens
  misc_RNA (1)...(19): siRNA sense strand
ggaggacuuugaacagaag

SEQ ID NO: 427855 - RNA, 19 nt, Homo sapiens
  misc_RNA (1)...(19): siRNA sense strand
ucaagcagcugaagaaccu

SEQ ID NO: 427856 - RNA, 19 nt, Homo sapiens
  misc_RNA (1)...(19): siRNA sense strand
ggacuacgaggacaucauc

SEQ ID NO: 427857 - RNA, 19 nt, Homo sapiens
  misc_RNA (1)...(19): siRNA sense strand
gcaggcaaauauguugaug

SEQ ID NO: 427858 - RNA, 19 nt, Homo sapiens
  misc_RNA (1)...(19): siRNA sense strand
gaagaagaagggcuugaag

SEQ ID NO: 427859 - RNA, 19 nt, Homo sapiens
  misc_RNA (1)...(19): siRNA sense strand
agaaacaggaggacuuuga

SEQ ID NO: 427860 - RNA, 19 nt, Homo sapiens
  misc_RNA (1)...(19): siRNA sense strand
gcuaugaggaggaggaaga

SEQ ID NO: 427861 - RNA, 19 nt, Homo sapiens
  misc_RNA (1)...(19): siRNA sense strand
gagaaggcaggcaaauaug

SEQ ID NO: 427862 - RNA, 19 nt, Homo sapiens
  misc_RNA (1)...(19): siRNA sense strand
gaagagggagaaagcaaag

SEQ ID NO: 427863 - RNA, 19 nt, Homo sapiens
  misc_RNA (1)...(19): siRNA sense strand
agaaguacaauuuccguuu

SEQ ID NO: 427864 - RNA, 19 nt, Homo sapiens
  misc_RNA (1)...(19): siRNA sense strand
aagaugccaccuucuauaa

SEQ ID NO: 427865 - RNA, 19 nt, Homo sapiens
  misc_RNA (1)...(19): siRNA sense strand
uggagaagcugcggaaagu

SEQ ID NO: 427866 - RNA, 19 nt, Homo sapiens
  misc_RNA (1)...(19): siRNA sense strand
cagaaacagcucaaggaaa

SEQ ID NO: 427867 - RNA, 19 nt, Homo sapiens
  misc_RNA (1)...(19): siRNA sense strand
gaaagcuuccgggcauuug

SEQ ID NO: 427868 - RNA, 19 nt, Homo sapiens
  misc_RNA (1)...(19): siRNA sense strand
gcaagaagaagcgcaaguc

SEQ ID NO: 427869 - RNA, 19 nt, Homo sapiens
  misc_RNA (1)...(19): siRNA sense strand
ugaagaaacaggaggacuu

SEQ ID NO: 427870 - RNA, 19 nt, Homo sapiens
  misc_RNA (1)...(19): siRNA sense strand
gagauucggaacccagauu

SEQ ID NO: 427871 - RNA, 19 nt, Homo sapiens
  misc_RNA (1)...(19): siRNA sense strand
ggagaagccacaauuugag

SEQ ID NO: 427872 - RNA, 19 nt, Homo sapiens
  misc_RNA (1)...(19): siRNA sense strand
guaccuggaugaguauuac

SEQ ID NO: 427873 - RNA, 19 nt, Homo sapiens
  misc_RNA (1)...(19): siRNA sense strand
gaagccacaauuugaggaa

SEQ ID NO: 427874 - RNA, 19 nt, Homo sapiens
  misc_RNA (1)...(19): siRNA sense strand
ggaggaagaggaggaggaa

SEQ ID NO: 427875 - RNA, 19 nt, Homo sapiens
  misc_RNA (1)...(19): siRNA sense strand
ccagaaggcccagaacuca

SEQ ID NO: 427876 - RNA, 19 nt, Homo sapiens
  misc_RNA (1)...(19): siRNA sense strand
aaagaagaccugcauguac

SEQ ID NO: 427877 - RNA, 19 nt, Homo sapiens
  misc_RNA (1)...(19): siRNA sense strand
cgagaggaagguuaucuug

SEQ ID NO: 427878 - RNA, 19 nt, Homo sapiens
  misc_RNA (1)...(19): siRNA sense strand
aggagaagccacaauuuga

SEQ ID NO: 427879 - RNA, 19 nt, Homo sapiens
  misc_RNA (1)...(19): siRNA sense strand
aagcaaagaagcaggaaga

SEQ ID NO: 427880 - RNA, 19 nt, Homo sapiens
  misc_RNA (1)...(19): siRNA sense strand
ggaagaugaagaggaaaug

SEQ ID NO: 427881 - RNA, 19 nt, Homo sapiens
  misc_RNA (1)...(19): siRNA sense strand
ggaagccacagagagauga

SEQ ID NO: 427882 - RNA, 19 nt, Homo sapiens
  misc_RNA (1)...(19): siRNA sense strand
cuaaagaagaccugcaugu

SEQ ID NO: 427883 - RNA, 19 nt, Homo sapiens
  misc_RNA (1)...(19): siRNA sense strand
ggagaagcugcggaaagua

SEQ ID NO: 427884 - RNA, 19 nt, Homo sapiens
  misc_RNA (1)...(19): siRNA sense strand
guaaggaugagcgcagaaa

SEQ ID NO: 427885 - RNA, 19 nt, Homo sapiens
  misc_RNA (1)...(19): siRNA sense strand
ggagacaucgucgcaaagu

SEQ ID NO: 427886 - RNA, 19 nt, Homo sapiens
  misc_RNA (1)...(19): siRNA sense strand
cagggaagccacagagaga

SEQ ID NO: 427887 - RNA, 19 nt, Homo sapiens
  misc_RNA (1)...(19): siRNA sense strand
cagaagccuuggagaagca

SEQ ID NO: 427888 - RNA, 19 nt, Homo sapiens
  misc_RNA (1)...(19): siRNA sense strand
ggacucagcaucggucaag

SEQ ID NO: 427889 - RNA, 19 nt, Homo sapiens
  misc_RNA (1)...(19): siRNA sense strand
acgaccagcucaugcagaa

SEQ ID NO: 427890 - RNA, 19 nt, Homo sapiens
  misc_RNA (1)...(19): siRNA sense strand
ggagacuuccaaucacaga

SEQ ID NO: 427891 - RNA, 19 nt, Homo sapiens
  misc_RNA (1)...(19): siRNA sense strand
aggcaaauauguugaugag

SEQ ID NO: 427892 - RNA, 19 nt, Homo sapiens
  misc_RNA (1)...(19): siRNA sense strand
gaaagcaaagaagcaggaa

SEQ ID NO: 427893 - RNA, 19 nt, Homo sapiens
  misc_RNA (1)...(19): siRNA sense strand
uggagaagcagaagaaagu

SEQ ID NO: 427894 - RNA, 19 nt, Homo sapiens
  misc_RNA (1)...(19): siRNA sense strand
aagaggaggaggaagauga

SEQ ID NO: 427895 - RNA, 19 nt, Homo sapiens
  misc_RNA (1)...(19): siRNA sense strand
ggaagaggaggaggaagau

SEQ ID NO: 427896 - RNA, 19 nt, Homo sapiens
  misc_RNA (1)...(19): siRNA sense strand
gauuacauccucaacaaac

SEQ ID NO: 427897 - RNA, 19 nt, Homo sapiens
  misc_RNA (1)...(19): siRNA sense strand
gagcgguuccugcgggauu

SEQ ID NO: 427898 - RNA, 19 nt, Homo sapiens
  misc_RNA (1)...(19): siRNA sense strand
ggaacugacgcaucucaag

SEQ ID NO: 427899 - RNA, 19 nt, Homo sapiens
  misc_RNA (1)...(19): siRNA sense strand
gcuccaguuugcugcagaa

SEQ ID NO: 427900 - RNA, 19 nt, Homo sapiens
  misc_RNA (1)...(19): siRNA sense strand
cagaacagcaucgucauca

SEQ ID NO: 427901 - RNA, 19 nt, Homo sapiens
  misc_RNA (1)...(19): siRNA sense strand
ggaggaggaagaugaagag

SEQ ID NO: 427902 - RNA, 19 nt, Homo sapiens
  misc_RNA (1)...(19): siRNA sense strand
acagaaacagcucaaggaa

SEQ ID NO: 427903 - RNA, 19 nt, Homo sapiens
  misc_RNA (1)...(19): siRNA sense strand
ggaguaccuggaugaguau

SEQ ID NO: 427904 - RNA, 19 nt, Homo sapiens
  misc_RNA (1)...(19): siRNA sense strand
gccacaauuugaggaagaa

SEQ ID NO: 427905 - RNA, 19 nt, Homo sapiens
  misc_RNA (1)...(19): siRNA sense strand
uggagaaggcaggcaaaua

SEQ ID NO: 427906 - RNA, 19 nt, Homo sapiens
  misc_RNA (1)...(19): siRNA sense strand
aggaggacuuugaacagaa

SEQ ID NO: 427907 - RNA, 19 nt, Homo sapiens
  misc_RNA (1)...(19): siRNA sense strand
ggaggaagaugaagaggaa

SEQ ID NO: 427908 - RNA, 19 nt, Homo sapiens
  misc_RNA (1)...(19): siRNA sense strand
ugacgcaucucaaggaaua

SEQ ID NO: 427909 - RNA, 19 nt, Homo sapiens
  misc_RNA (1)...(19): siRNA sense strand
ugaagaaccugaagaggaa

SEQ ID NO: 427910 - RNA, 19 nt, Homo sapiens
  misc_RNA (1)...(19): siRNA sense strand
ggagaaggcaggcaaauau

SEQ ID NO: 427911 - RNA, 19 nt, Homo sapiens
  misc_RNA (1)...(19): siRNA sense strand
gaaguacaauuuccguuuc

SEQ ID NO: 427912 - RNA, 19 nt, Homo sapiens
  misc_RNA (1)...(19): siRNA sense strand
gaacagaaguacaauuucc

SEQ ID NO: 427913 - RNA, 19 nt, Homo sapiens
  misc_RNA (1)...(19): siRNA sense strand
gaacccagauucccugaag

SEQ ID NO: 427914 - RNA, 19 nt, Homo sapiens
  misc_RNA (1)...(19): siRNA sense strand
agaaacagcucaaggaaag

SEQ ID NO: 427915 - RNA, 19 nt, Homo sapiens
  misc_RNA (1)...(19): siRNA sense strand
gagaagcugcggaaaguaa

SEQ ID NO: 427916 - RNA, 19 nt, Homo sapiens
  misc_RNA (1)...(19): siRNA sense strand
gaagaaacaggaggacuuu

SEQ ID NO: 427917 - RNA, 19 nt, Homo sapiens
  misc_RNA (1)...(19): siRNA sense strand
ggaagguuaucuuggagaa

SEQ ID NO: 427918 - RNA, 19 nt, Homo sapiens
  misc_RNA (1)...(19): siRNA sense strand
gaacgacccugaguuggau

SEQ ID NO: 427919 - RNA, 19 nt, Homo sapiens
  misc_RNA (1)...(19): siRNA sense strand
agacaucgucgcaaaguua

SEQ ID NO: 427920 - RNA, 19 nt, Homo sapiens
  misc_RNA (1)...(19): siRNA sense strand
uaaagaagaccugcaugua

SEQ ID NO: 427921 - RNA, 19 nt, Homo sapiens
  misc_RNA (1)...(19): siRNA sense strand
ugaaggaacugacgcaucu

SEQ ID NO: 427922 - RNA, 19 nt, Homo sapiens
  misc_RNA (1)...(19): siRNA sense strand
gaggagaagccacaauuug

SEQ ID NO: 427923 - RNA, 19 nt, Homo sapiens
  misc_RNA (1)...(19): siRNA sense strand
ggacgacuccucagacgaa

SEQ ID NO: 427924 - RNA, 19 nt, Homo sapiens
  misc_RNA (1)...(19): siRNA sense strand
gcaaaguuauguggaggaa

SEQ ID NO: 427925 - RNA, 19 nt, Homo sapiens
  misc_RNA (1)...(19): siRNA sense strand
aggaguaccuggaugagua

SEQ ID NO: 427926 - RNA, 19 nt, Homo sapiens
  misc_RNA (1)...(19): siRNA sense strand
gaaaggagaagagggaaga

SEQ ID NO: 427927 - RNA, 19 nt, Homo sapiens
  misc_RNA (1)...(19): siRNA sense strand
ggaggagaagccacaauuu

SEQ ID NO: 427928 - RNA, 19 nt, Homo sapiens
  misc_RNA (1)...(19): siRNA sense strand
gauccucgcugcugacgau

SEQ ID NO: 427929 - RNA, 19 nt, Homo sapiens
  misc_RNA (1)...(19): siRNA sense strand
caggagacaucgucgcaaa

SEQ ID NO: 427930 - RNA, 19 nt, Homo sapiens
  misc_RNA (1)...(19): siRNA sense strand
acaagacguucgaggagua

SEQ ID NO: 427931 - RNA, 19 nt, Homo sapiens
  misc_RNA (1)...(19): siRNA sense strand
gaaagaagagggagaaagc

SEQ ID NO: 427932 - RNA, 19 nt, Homo sapiens
  misc_RNA (1)...(19): siRNA sense strand
gaaacaggaggacuuugaa

SEQ ID NO: 427933 - RNA, 19 nt, Homo sapiens
  misc_RNA (1)...(19): siRNA sense strand
gaagggacagaaagagauu

SEQ ID NO: 427934 - RNA, 19 nt, Homo sapiens
  misc_RNA (1)...(19): siRNA sense strand
gaaggcaggcaaauauguu

SEQ ID NO: 427935 - RNA, 19 nt, Homo sapiens
  misc_RNA (1)...(19): siRNA sense strand
aaaguuauguggaggaaca

SEQ ID NO: 427936 - RNA, 19 nt, Homo sapiens
  misc_RNA (1)...(19): siRNA sense strand
ggaaauggaggaagagaag

SEQ ID NO: 427937 - RNA, 19 nt, Homo sapiens
  misc_RNA (1)...(19): siRNA sense strand
ggaacgacccugaguugga

SEQ ID NO: 427938 - RNA, 19 nt, Homo sapiens
  misc_RNA (1)...(19): siRNA sense strand
agaggaagguuaucuugga

SEQ ID NO: 427939 - RNA, 19 nt, Homo sapiens
  misc_RNA (1)...(19): siRNA sense strand
aagaagaccugcauguaca

SEQ ID NO: 427940 - RNA, 19 nt, Homo sapiens
  misc_RNA (1)...(19): siRNA sense strand
gcccagaacucauggaaaa

SEQ ID NO: 427941 - RNA, 19 nt, Homo sapiens
  misc_RNA (1)...(19): siRNA sense strand
ggaggaggccgacuacauc

SEQ ID NO: 427942 - RNA, 19 nt, Homo sapiens
  misc_RNA (1)...(19): siRNA sense strand
ggaagaagaagggcuugaa

SEQ ID NO: 427943 - RNA, 19 nt, Homo sapiens
  misc_RNA (1)...(19): siRNA sense strand
aagaggaaauggaggaaga

SEQ ID NO: 427944 - RNA, 19 nt, Homo sapiens
  misc_RNA (1)...(19): siRNA sense strand
caacauggacgccgacuac

SEQ ID NO: 427945 - RNA, 19 nt, Homo sapiens
  misc_RNA (1)...(19): siRNA sense strand
gagacaucgucgcaaaguu

SEQ ID NO: 427946 - RNA, 19 nt, Homo sapiens
  misc_RNA (1)...(19): siRNA sense strand
gaccugcccugucgcuuca

SEQ ID NO: 427947 - RNA, 19 nt, Homo sapiens
  misc_RNA (1)...(19): siRNA sense strand
caggaggacuuugaacaga

SEQ ID NO: 427948 - RNA, 19 nt, Homo sapiens
  misc_RNA (1)...(19): siRNA sense strand
ggagaagcccguguucgaa

SEQ ID NO: 427949 - RNA, 19 nt, Homo sapiens
  misc_RNA (1)...(19): siRNA sense strand
ggaggacuuugaacagaag

SEQ ID NO: 427950 - RNA, 19 nt, Homo sapiens
  misc_RNA (1)...(19): siRNA sense strand
ucaagcagcugaagaaccu

SEQ ID NO: 427951 - RNA, 19 nt, Homo sapiens
  misc_RNA (1)...(19): siRNA sense strand
ggacuacgaggacaucauc

SEQ ID NO: 427952 - RNA, 19 nt, Homo sapiens
  misc_RNA (1)...(19): siRNA sense strand
gcuaugaggaggaggaaga

SEQ ID NO: 427953 - RNA, 19 nt, Homo sapiens
  misc_RNA (1)...(19): siRNA sense strand
gcaggcaaauauguugaug

SEQ ID NO: 427954 - RNA, 19 nt, Homo sapiens
  misc_RNA (1)...(19): siRNA sense strand
gaagaagaagggcuugaag

SEQ ID NO: 427955 - RNA, 19 nt, Homo sapiens
  misc_RNA (1)...(19): siRNA sense strand
agaaacaggaggacuuuga

SEQ ID NO: 427956 - RNA, 19 nt, Homo sapiens
  misc_RNA (1)...(19): siRNA sense strand
gagaaggcaggcaaauaug

SEQ ID NO: 427957 - RNA, 19 nt, Homo sapiens
  misc_RNA (1)...(19): siRNA sense strand
gaagagggagaaagcaaag

SEQ ID NO: 427958 - RNA, 19 nt, Homo sapiens
  misc_RNA (1)...(19): siRNA sense strand
agaaguacaauuuccguuu

SEQ ID NO: 427959 - RNA, 19 nt, Homo sapiens
  misc_RNA (1)...(19): siRNA sense strand
uggagaagcugcggaaagu

SEQ ID NO: 427960 - RNA, 19 nt, Homo sapiens
  misc_RNA (1)...(19): siRNA sense strand
cagaaacagcucaaggaaa

SEQ ID NO: 427961 - RNA, 19 nt, Homo sapiens
  misc_RNA (1)...(19): siRNA sense strand
gaaagcuuccgggcauuug

SEQ ID NO: 427962 - RNA, 19 nt, Homo sapiens
  misc_RNA (1)...(19): siRNA sense strand
gcaagaagaagcgcaaguc

SEQ ID NO: 427963 - RNA, 19 nt, Homo sapiens
  misc_RNA (1)...(19): siRNA sense strand
ugaagaaacaggaggacuu

SEQ ID NO: 427964 - RNA, 19 nt, Homo sapiens
  misc_RNA (1)...(19): siRNA sense strand
gagauucggaacccagauu

SEQ ID NO: 427965 - RNA, 19 nt, Homo sapiens
  misc_RNA (1)...(19): siRNA sense strand
ggagaagccacaauuugag

SEQ ID NO: 427966 - RNA, 19 nt, Homo sapiens
  misc_RNA (1)...(19): siRNA sense strand
guaccuggaugaguauuac

SEQ ID NO: 427967 - RNA, 19 nt, Homo sapiens
  misc_RNA (1)...(19): siRNA sense strand
gaagccacaauuugaggaa

SEQ ID NO: 427968 - RNA, 19 nt, Homo sapiens
  misc_RNA (1)...(19): siRNA sense strand
ggaggaagaggaggaggaa

SEQ ID NO: 427969 - RNA, 19 nt, Homo sapiens
  misc_RNA (1)...(19): siRNA sense strand
ccagaaggcccagaacuca

SEQ ID NO: 427970 - RNA, 19 nt, Homo sapiens
  misc_RNA (1)...(19): siRNA sense strand
aaagaagaccugcauguac

SEQ ID NO: 427971 - RNA, 19 nt, Homo sapiens
  misc_RNA (1)...(19): siRNA sense strand
aggagaagccacaauuuga

SEQ ID NO: 427972 - RNA, 19 nt, Homo sapiens
  misc_RNA (1)...(19): siRNA sense strand
aagcaaagaagcaggaaga

SEQ ID NO: 427973 - RNA, 19 nt, Homo sapiens
  misc_RNA (1)...(19): siRNA sense strand
cgagaggaagguuaucuug

SEQ ID NO: 427974 - RNA, 19 nt, Homo sapiens
  misc_RNA (1)...(19): siRNA sense strand
ggaagaugaagaggaaaug

SEQ ID NO: 427975 - RNA, 19 nt, Homo sapiens
  misc_RNA (1)...(19): siRNA sense strand
ggaagccacagagagauga

SEQ ID NO: 427976 - RNA, 19 nt, Homo sapiens
  misc_RNA (1)...(19): siRNA sense strand
cuaaagaagaccugcaugu

SEQ ID NO: 427977 - RNA, 19 nt, Homo sapiens
  misc_RNA (1)...(19): siRNA sense strand
ggagaagcugcggaaagua

SEQ ID NO: 427978 - RNA, 19 nt, Homo sapiens
  misc_RNA (1)...(19): siRNA sense strand
guaaggaugagcgcagaaa

SEQ ID NO: 427979 - RNA, 19 nt, Homo sapiens
  misc_RNA (1)...(19): siRNA sense strand
ggagacaucgucgcaaagu

SEQ ID NO: 427980 - RNA, 19 nt, Homo sapiens
  misc_RNA (1)...(19): siRNA sense strand
cagggaagccacagagaga

SEQ ID NO: 427981 - RNA, 19 nt, Homo sapiens
  misc_RNA (1)...(19): siRNA sense strand
ggacucagcaucggucaag

SEQ ID NO: 427982 - RNA, 19 nt, Homo sapiens
  misc_RNA (1)...(19): siRNA sense strand
acgaccagcucaugcagaa

SEQ ID NO: 427983 - RNA, 19 nt, Homo sapiens
  misc_RNA (1)...(19): siRNA sense strand
ggaacugacgcaucucaag

SEQ ID NO: 427984 - RNA, 19 nt, Homo sapiens
  misc_RNA (1)...(19): siRNA sense strand
ggagacuuccaaucacaga

SEQ ID NO: 427985 - RNA, 19 nt, Homo sapiens
  misc_RNA (1)...(19): siRNA sense strand
gaaagcaaagaagcaggaa

SEQ ID NO: 427986 - RNA, 19 nt, Homo sapiens
  misc_RNA (1)...(19): siRNA sense strand
aggcaaauauguugaugag

SEQ ID NO: 427987 - RNA, 19 nt, Homo sapiens
  misc_RNA (1)...(19): siRNA sense strand
gcuccaguuugcugcagaa

SEQ ID NO: 427988 - RNA, 19 nt, Homo sapiens
  misc_RNA (1)...(19): siRNA sense strand
aagaggaggaggaagauga

SEQ ID NO: 427989 - RNA, 19 nt, Homo sapiens
  misc_RNA (1)...(19): siRNA sense strand
ggaagaggaggaggaagau

SEQ ID NO: 427990 - RNA, 19 nt, Homo sapiens
  misc_RNA (1)...(19): siRNA sense strand
gauuacauccucaacaaac

SEQ ID NO: 427991 - RNA, 19 nt, Homo sapiens
  misc_RNA (1)...(19): siRNA sense strand
gagcgguuccugcgggauu

SEQ ID NO: 427992 - RNA, 19 nt, Homo sapiens
  misc_RNA (1)...(19): siRNA sense strand
ggaggaggaagaugaagag

SEQ ID NO: 427993 - RNA, 19 nt, Homo sapiens
  misc_RNA (1)...(19): siRNA sense strand
aggaggacuuugaacagaa

SEQ ID NO: 427994 - RNA, 19 nt, Homo sapiens
  misc_RNA (1)...(19): siRNA sense strand
acagaaacagcucaaggaa

SEQ ID NO: 427995 - RNA, 19 nt, Homo sapiens
  misc_RNA (1)...(19): siRNA sense strand
ggaguaccuggaugaguau

SEQ ID NO: 427996 - RNA, 19 nt, Homo sapiens
  misc_RNA (1)...(19): siRNA sense strand
gccacaauuugaggaagaa

SEQ ID NO: 427997 - RNA, 19 nt, Homo sapiens
  misc_RNA (1)...(19): siRNA sense strand
uggagaaggcaggcaaaua

SEQ ID NO: 427998 - RNA, 19 nt, Homo sapiens
  misc_RNA (1)...(19): siRNA sense strand
gaccagcucaugcagaagu

SEQ ID NO: 427999 - RNA, 19 nt, Homo sapiens
  misc_RNA (1)...(19): siRNA sense strand
cgguggugcucccuaaaga

SEQ ID NO: 428000 - RNA, 19 nt, Homo sapiens
  misc_RNA (1)...(19): siRNA sense strand
acaauuugaggaagaagaa

SEQ ID NO: 428001 - RNA, 19 nt, Homo sapiens
  misc_RNA (1)...(19): siRNA sense strand
gaagaugaagaggaaaugg

SEQ ID NO: 428002 - RNA, 19 nt, Homo sapiens
  misc_RNA (1)...(19): siRNA sense strand
aagaagaagggcuugaaga

SEQ ID NO: 428003 - RNA, 19 nt, Homo sapiens
  misc_RNA (1)...(19): siRNA sense strand
agaagagggagaaagcaaa

SEQ ID NO: 428004 - RNA, 19 nt, Homo sapiens
  misc_RNA (1)...(19): siRNA sense strand
gaaggggagcuguuucuga

SEQ ID NO: 428005 - RNA, 19 nt, Homo sapiens
  misc_RNA (1)...(19): siRNA sense strand
gcaggagaagcccguguuc

SEQ ID NO: 428006 - RNA, 19 nt, Homo sapiens
  misc_RNA (1)...(19): siRNA sense strand
gggaagccacagagagaug

SEQ ID NO: 428007 - RNA, 19 nt, Homo sapiens
  misc_RNA (1)...(19): siRNA sense strand
gagcauacaucaacuuuaa

SEQ ID NO: 428008 - RNA, 19 nt, Homo sapiens
  misc_RNA (1)...(19): siRNA sense strand
caagagagaucgaauaaga

SEQ ID NO: 428009 - RNA, 19 nt, Homo sapiens
  misc_RNA (1)...(19): siRNA sense strand
ggagagaaauagaaagaaa

SEQ ID NO: 428010 - RNA, 19 nt, Homo sapiens
  misc_RNA (1)...(19): siRNA sense strand
caauaaaggucaggaauau

SEQ ID NO: 428011 - RNA, 19 nt, Homo sapiens
  misc_RNA (1)...(19): siRNA sense strand
gaaaggaggaggagagaaa

SEQ ID NO: 428012 - RNA, 19 nt, Homo sapiens
  misc_RNA (1)...(19): siRNA sense strand
gaagauuaccucccacuuu

SEQ ID NO: 428013 - RNA, 19 nt, Homo sapiens
  misc_RNA (1)...(19): siRNA sense strand
gaaagaaggcugaaaguac

SEQ ID NO: 428014 - RNA, 19 nt, Homo sapiens
  misc_RNA (1)...(19): siRNA sense strand
ggaauaucccgcuauagua

SEQ ID NO: 428015 - RNA, 19 nt, Homo sapiens
  misc_RNA (1)...(19): siRNA sense strand
gcgcauacuucgagaaaga

SEQ ID NO: 428016 - RNA, 19 nt, Homo sapiens
  misc_RNA (1)...(19): siRNA sense strand
ggaaagaaggcugaaagua

SEQ ID NO: 428017 - RNA, 19 nt, Homo sapiens
  misc_RNA (1)...(19): siRNA sense strand
gaaagugguauuagccaua

SEQ ID NO: 428018 - RNA, 19 nt, Homo sapiens
  misc_RNA (1)...(19): siRNA sense strand
caaagagaccugaagauga

SEQ ID NO: 428019 - RNA, 19 nt, Homo sapiens
  misc_RNA (1)...(19): siRNA sense strand
gaaaagagauaccaaaguc

SEQ ID NO: 428020 - RNA, 19 nt, Homo sapiens
  misc_RNA (1)...(19): siRNA sense strand
ucaggaauaucccgcuaua

SEQ ID NO: 428021 - RNA, 19 nt, Homo sapiens
  misc_RNA (1)...(19): siRNA sense strand
gaaaguacagaaucaauag

SEQ ID NO: 428022 - RNA, 19 nt, Homo sapiens
  misc_RNA (1)...(19): siRNA sense strand
gaaucucagugaugaaaga

SEQ ID NO: 428023 - RNA, 19 nt, Homo sapiens
  misc_RNA (1)...(19): siRNA sense strand
gaaauuggacaaagagaau

SEQ ID NO: 428024 - RNA, 19 nt, Homo sapiens
  misc_RNA (1)...(19): siRNA sense strand
gaagagaggaggaaaugga

SEQ ID NO: 428025 - RNA, 19 nt, Homo sapiens
  misc_RNA (1)...(19): siRNA sense strand
guccagcgaugcagcuuua

SEQ ID NO: 428026 - RNA, 19 nt, Homo sapiens
  misc_RNA (1)...(19): siRNA sense strand
gcaacaaggagaagaaaga

SEQ ID NO: 428027 - RNA, 19 nt, Homo sapiens
  misc_RNA (1)...(19): siRNA sense strand
aaagaaggcugaaaguaca

SEQ ID NO: 428028 - RNA, 19 nt, Homo sapiens
  misc_RNA (1)...(19): siRNA sense strand
ggaaaguuaugccacagau

SEQ ID NO: 428029 - RNA, 19 nt, Homo sapiens
  misc_RNA (1)...(19): siRNA sense strand
gaaggagcgcuaugagaaa

SEQ ID NO: 428030 - RNA, 19 nt, Homo sapiens
  misc_RNA (1)...(19): siRNA sense strand
aaagagaccugaagaugag

SEQ ID NO: 428031 - RNA, 19 nt, Homo sapiens
  misc_RNA (1)...(19): siRNA sense strand
aagauuaccucccacuuug

SEQ ID NO: 428032 - RNA, 19 nt, Homo sapiens
  misc_RNA (1)...(19): siRNA sense strand
ccagaaagggacaaauuaa

SEQ ID NO: 428033 - RNA, 19 nt, Homo sapiens
  misc_RNA (1)...(19): siRNA sense strand
ggaaauggaaagaagaaga

SEQ ID NO: 428034 - RNA, 19 nt, Homo sapiens
  misc_RNA (1)...(19): siRNA sense strand
gaaagaagaagagaaacga

SEQ ID NO: 428035 - RNA, 19 nt, Homo sapiens
  misc_RNA (1)...(19): siRNA sense strand
gaggagagaaauagaaaga

SEQ ID NO: 428036 - RNA, 19 nt, Homo sapiens
  misc_RNA (1)...(19): siRNA sense strand
gaaaguuaugccacagaua

SEQ ID NO: 428037 - RNA, 19 nt, Homo sapiens
  misc_RNA (1)...(19): siRNA sense strand
gaauaucccgcuauaguag

SEQ ID NO: 428038 - RNA, 19 nt, Homo sapiens
  misc_RNA (1)...(19): siRNA sense strand
gcagaaaggaagcaggaaa

SEQ ID NO: 428039 - RNA, 19 nt, Homo sapiens
  misc_RNA (1)...(19): siRNA sense strand
caccaagucuggagauuca

SEQ ID NO: 428040 - RNA, 19 nt, Homo sapiens
  misc_RNA (1)...(19): siRNA sense strand
ggucaagagagaucgaaua

SEQ ID NO: 428041 - RNA, 19 nt, Homo sapiens
  misc_RNA (1)...(19): siRNA sense strand
gaagauagacagaauucca

SEQ ID NO: 428042 - RNA, 19 nt, Homo sapiens
  misc_RNA (1)...(19): siRNA sense strand
gggaucgcuuugaugguua

SEQ ID NO: 428043 - RNA, 19 nt, Homo sapiens
  misc_RNA (1)...(19): siRNA sense strand
auagcgaacuuaaagauga

SEQ ID NO: 428044 - RNA, 19 nt, Homo sapiens
  misc_RNA (1)...(19): siRNA sense strand
acaauaaaggucaggaaua

SEQ ID NO: 428045 - RNA, 19 nt, Homo sapiens
  misc_RNA (1)...(19): siRNA sense strand
ucaauaggcagcucagaaa

SEQ ID NO: 428046 - RNA, 19 nt, Homo sapiens
  misc_RNA (1)...(19): siRNA sense strand
cgaugaugauccagaauau

SEQ ID NO: 428047 - RNA, 19 nt, Homo sapiens
  misc_RNA (1)...(19): siRNA sense strand
gcacaggccuaaggagaag

SEQ ID NO: 428048 - RNA, 19 nt, Homo sapiens
  misc_RNA (1)...(19): siRNA sense strand
ccaaagagaccugaagaug

SEQ ID NO: 428049 - RNA, 19 nt, Homo sapiens
  misc_RNA (1)...(19): siRNA sense strand
cagaaagggacaaauuaaa

SEQ ID NO: 428050 - RNA, 19 nt, Homo sapiens
  misc_RNA (1)...(19): siRNA sense strand
gaagaagagaggaggaaau

SEQ ID NO: 428051 - RNA, 19 nt, Homo sapiens
  misc_RNA (1)...(19): siRNA sense strand
uagaggaaauagaagcaaa

SEQ ID NO: 428052 - RNA, 19 nt, Homo sapiens
  misc_RNA (1)...(19): siRNA sense strand
gcaggaaagugguauuagc

SEQ ID NO: 428053 - RNA, 19 nt, Homo sapiens
  misc_RNA (1)...(19): siRNA sense strand
gaaagaagaaguggucaag

SEQ ID NO: 428054 - RNA, 19 nt, Homo sapiens
  misc_RNA (1)...(19): siRNA sense strand
gagcgcauacuucgagaaa

SEQ ID NO: 428055 - RNA, 19 nt, Homo sapiens
  misc_RNA (1)...(19): siRNA sense strand
ugccugagcaugauuauuu

SEQ ID NO: 428056 - RNA, 19 nt, Homo sapiens
  misc_RNA (1)...(19): siRNA sense strand
gucaagagagaucgaauaa

SEQ ID NO: 428057 - RNA, 19 nt, Homo sapiens
  misc_RNA (1)...(19): siRNA sense strand
gggacaaauuaaaggauga

SEQ ID NO: 428058 - RNA, 19 nt, Homo sapiens
  misc_RNA (1)...(19): siRNA sense strand
gaaagggacaaauuaaagg

SEQ ID NO: 428059 - RNA, 19 nt, Homo sapiens
  misc_RNA (1)...(19): siRNA sense strand
guucagggaucgcuuugau

SEQ ID NO: 428060 - RNA, 19 nt, Homo sapiens
  misc_RNA (1)...(19): siRNA sense strand
gaguuuguauccucauaug

SEQ ID NO: 428061 - RNA, 19 nt, Homo sapiens
  misc_RNA (1)...(19): siRNA sense strand
aggaacaucuucaaccuau

SEQ ID NO: 428062 - RNA, 19 nt, Homo sapiens
  misc_RNA (1)...(19): siRNA sense strand
agaaggagcgcuaugagaa

SEQ ID NO: 428063 - RNA, 19 nt, Homo sapiens
  misc_RNA (1)...(19): siRNA sense strand
gaucaggagcgcauacuuc

SEQ ID NO: 428064 - RNA, 19 nt, Homo sapiens
  misc_RNA (1)...(19): siRNA sense strand
aaggaugaaccaaagauua

SEQ ID NO: 428065 - RNA, 19 nt, Homo sapiens
  misc_RNA (1)...(19): siRNA sense strand
gaaauggaaagaagaagag

SEQ ID NO: 428066 - RNA, 19 nt, Homo sapiens
  misc_RNA (1)...(19): siRNA sense strand
gaggaaauggaaagaagaa

SEQ ID NO: 428067 - RNA, 19 nt, Homo sapiens
  misc_RNA (1)...(19): siRNA sense strand
aaaccaagaggacauuauu

SEQ ID NO: 428068 - RNA, 19 nt, Homo sapiens
  misc_RNA (1)...(19): siRNA sense strand
uaguagaauuugcaccuuu

SEQ ID NO: 428069 - RNA, 19 nt, Homo sapiens
  misc_RNA (1)...(19): siRNA sense strand
gaaaggaagcaggaaagug

SEQ ID NO: 428070 - RNA, 19 nt, Homo sapiens
  misc_RNA (1)...(19): siRNA sense strand
aaagacacacuucgggaua

SEQ ID NO: 428071 - RNA, 19 nt, Homo sapiens
  misc_RNA (1)...(19): siRNA sense strand
gaaagagccagugggcaaa

SEQ ID NO: 428072 - RNA, 19 nt, Homo sapiens
  misc_RNA (1)...(19): siRNA sense strand
gauccagaauauagaaagu

SEQ ID NO: 428073 - RNA, 19 nt, Homo sapiens
  misc_RNA (1)...(19): siRNA sense strand
guuuguauccucauaugua

SEQ ID NO: 428074 - RNA, 19 nt, Homo sapiens
  misc_RNA (1)...(19): siRNA sense strand
agacagaauuccagaaagg

SEQ ID NO: 428075 - RNA, 19 nt, Homo sapiens
  misc_RNA (1)...(19): siRNA sense strand
gcagagaaugagagaagaa

SEQ ID NO: 428076 - RNA, 19 nt, Homo sapiens
  misc_RNA (1)...(19): siRNA sense strand
ucgcuuugaugguuaugua

SEQ ID NO: 428077 - RNA, 19 nt, Homo sapiens
  misc_RNA (1)...(19): siRNA sense strand
aagaagaaguggucaagag

SEQ ID NO: 428078 - RNA, 19 nt, Homo sapiens
  misc_RNA (1)...(19): siRNA sense strand
gaugaugauccagaauaua

SEQ ID NO: 428079 - RNA, 19 nt, Homo sapiens
  misc_RNA (1)...(19): siRNA sense strand
uaucgaugaugauccagaa

SEQ ID NO: 428080 - RNA, 19 nt, Homo sapiens
  misc_RNA (1)...(19): siRNA sense strand
agagagaucgaauaagaaa

SEQ ID NO: 428081 - RNA, 19 nt, Homo sapiens
  misc_RNA (1)...(19): siRNA sense strand
caacaaggagaagaaagaa

SEQ ID NO: 428082 - RNA, 19 nt, Homo sapiens
  misc_RNA (1)...(19): siRNA sense strand
gaggaggagagaaauagaa

SEQ ID NO: 428083 - RNA, 19 nt, Homo sapiens
  misc_RNA (1)...(19): siRNA sense strand
aagaaguggucaagagaga

SEQ ID NO: 428084 - RNA, 19 nt, Homo sapiens
  misc_RNA (1)...(19): siRNA sense strand
gaacaucuucaaccuaugc

SEQ ID NO: 428085 - RNA, 19 nt, Homo sapiens
  misc_RNA (1)...(19): siRNA sense strand
gguuauguauuccuugaca

SEQ ID NO: 428086 - RNA, 19 nt, Homo sapiens
  misc_RNA (1)...(19): siRNA sense strand
caaauuaaaggaugaacca

SEQ ID NO: 428087 - RNA, 19 nt, Homo sapiens
  misc_RNA (1)...(19): siRNA sense strand
ggaggaaauggaaagaaga

SEQ ID NO: 428088 - RNA, 19 nt, Homo sapiens
  misc_RNA (1)...(19): siRNA sense strand
ugccacagauaaugagaaa

SEQ ID NO: 428089 - RNA, 19 nt, Homo sapiens
  misc_RNA (1)...(19): siRNA sense strand
cuaaugauacgaguuugua

SEQ ID NO: 428090 - RNA, 19 nt, Homo sapiens
  misc_RNA (1)...(19): siRNA sense strand
gaugauccagaauauagaa

SEQ ID NO: 428091 - RNA, 19 nt, Homo sapiens
  misc_RNA (1)...(19): siRNA sense strand
uccagaaagggacaaauua

SEQ ID NO: 428092 - RNA, 19 nt, Homo sapiens
  misc_RNA (1)...(19): siRNA sense strand
ggaaagauauagaaaagcu

SEQ ID NO: 428093 - RNA, 19 nt, Homo sapiens
  misc_RNA (1)...(19): siRNA sense strand
gaugagagcggcagagacu

SEQ ID NO: 428094 - RNA, 19 nt, Homo sapiens
  misc_RNA (1)...(19): siRNA sense strand
uagcgaacuuaaagaugaa

SEQ ID NO: 428095 - RNA, 19 nt, Homo sapiens
  misc_RNA (1)...(19): siRNA sense strand
aggaugaaccaaagauuaa

SEQ ID NO: 428096 - RNA, 19 nt, Homo sapiens
  misc_RNA (1)...(19): siRNA sense strand
gacaauaaaggucaggaau

SEQ ID NO: 428097 - RNA, 19 nt, Homo sapiens
  misc_RNA (1)...(19): siRNA sense strand
uaagcaggaucgcaacaag

SEQ ID NO: 428098 - RNA, 19 nt, Homo sapiens
  misc_RNA (1)...(19): siRNA sense strand
gauagcgaacuuaaagaug

SEQ ID NO: 428099 - RNA, 19 nt, Homo sapiens
  misc_RNA (1)...(19): siRNA sense strand
gagaagaagagaggaggaa

SEQ ID NO: 428100 - RNA, 19 nt, Homo sapiens
  misc_RNA (1)...(19): siRNA sense strand
agacacugcuagaggaaau

SEQ ID NO: 428101 - RNA, 19 nt, Homo sapiens
  misc_RNA (1)...(19): siRNA sense strand
ggacaaauuaaaggaugaa

SEQ ID NO: 428102 - RNA, 19 nt, Homo sapiens
  misc_RNA (1)...(19): siRNA sense strand
gaaguggucaagagagauc

SEQ ID NO: 428103 - RNA, 19 nt, Homo sapiens
  misc_RNA (1)...(19): siRNA sense strand
agacacacuucgggauaaa

SEQ ID NO: 428104 - RNA, 19 nt, Homo sapiens
  misc_RNA (1)...(19): siRNA sense strand
aagacacacuucgggauaa

SEQ ID NO: 428105 - RNA, 19 nt, Homo sapiens
  misc_RNA (1)...(19): siRNA sense strand
ggaacgggaauaugaacga

SEQ ID NO: 428106 - RNA, 19 nt, Homo sapiens
  misc_RNA (1)...(19): siRNA sense strand
gagaucgaauaagaaacaa

SEQ ID NO: 428107 - RNA, 19 nt, Homo sapiens
  misc_RNA (1)...(19): siRNA sense strand
gagcauacaucaacuuuaa

SEQ ID NO: 428108 - RNA, 19 nt, Homo sapiens
  misc_RNA (1)...(19): siRNA sense strand
caagagagaucgaauaaga

SEQ ID NO: 428109 - RNA, 19 nt, Homo sapiens
  misc_RNA (1)...(19): siRNA sense strand
ggagagaaauagaaagaaa

SEQ ID NO: 428110 - RNA, 19 nt, Homo sapiens
  misc_RNA (1)...(19): siRNA sense strand
caauaaaggucaggaauau

SEQ ID NO: 428111 - RNA, 19 nt, Homo sapiens
  misc_RNA (1)...(19): siRNA sense strand
gaaaggaggaggagagaaa

SEQ ID NO: 428112 - RNA, 19 nt, Homo sapiens
  misc_RNA (1)...(19): siRNA sense strand
gaagauuaccucccacuuu

SEQ ID NO: 428113 - RNA, 19 nt, Homo sapiens
  misc_RNA (1)...(19): siRNA sense strand
gaaagaaggcugaaaguac

SEQ ID NO: 428114 - RNA, 19 nt, Homo sapiens
  misc_RNA (1)...(19): siRNA sense strand
ggaauaucccgcuauagua

SEQ ID NO: 428115 - RNA, 19 nt, Homo sapiens
  misc_RNA (1)...(19): siRNA sense strand
gcgcauacuucgagaaaga

SEQ ID NO: 428116 - RNA, 19 nt, Homo sapiens
  misc_RNA (1)...(19): siRNA sense strand
ggaaagaaggcugaaagua

SEQ ID NO: 428117 - RNA, 19 nt, Homo sapiens
  misc_RNA (1)...(19): siRNA sense strand
gaaagugguauuagccaua

SEQ ID NO: 428118 - RNA, 19 nt, Homo sapiens
  misc_RNA (1)...(19): siRNA sense strand
caaagagaccugaagauga

SEQ ID NO: 428119 - RNA, 19 nt, Homo sapiens
  misc_RNA (1)...(19): siRNA sense strand
gaaaagagauaccaaaguc

SEQ ID NO: 428120 - RNA, 19 nt, Homo sapiens
  misc_RNA (1)...(19): siRNA sense strand
ucaggaauaucccgcuaua

SEQ ID NO: 428121 - RNA, 19 nt, Homo sapiens
  misc_RNA (1)...(19): siRNA sense strand
gaaaguacagaaucaauag

SEQ ID NO: 428122 - RNA, 19 nt, Homo sapiens
  misc_RNA (1)...(19): siRNA sense strand
gaaucucagugaugaaaga

SEQ ID NO: 428123 - RNA, 19 nt, Homo sapiens
  misc_RNA (1)...(19): siRNA sense strand
gaaauuggacaaagagaau

SEQ ID NO: 428124 - RNA, 19 nt, Homo sapiens
  misc_RNA (1)...(19): siRNA sense strand
gaagagaggaggaaaugga

SEQ ID NO: 428125 - RNA, 19 nt, Homo sapiens
  misc_RNA (1)...(19): siRNA sense strand
guccagcgaugcagcuuua

SEQ ID NO: 428126 - RNA, 19 nt, Homo sapiens
  misc_RNA (1)...(19): siRNA sense strand
gcaacaaggagaagaaaga

SEQ ID NO: 428127 - RNA, 19 nt, Homo sapiens
  misc_RNA (1)...(19): siRNA sense strand
aaagaaggcugaaaguaca

SEQ ID NO: 428128 - RNA, 19 nt, Homo sapiens
  misc_RNA (1)...(19): siRNA sense strand
ggaaaguuaugccacagau

SEQ ID NO: 428129 - RNA, 19 nt, Homo sapiens
  misc_RNA (1)...(19): siRNA sense strand
gaaggagcgcuaugagaaa

SEQ ID NO: 428130 - RNA, 19 nt, Homo sapiens
  misc_RNA (1)...(19): siRNA sense strand
aaagagaccugaagaugag

SEQ ID NO: 428131 - RNA, 19 nt, Homo sapiens
  misc_RNA (1)...(19): siRNA sense strand
aagauuaccucccacuuug

SEQ ID NO: 428132 - RNA, 19 nt, Homo sapiens
  misc_RNA (1)...(19): siRNA sense strand
ccagaaagggacaaauuaa

SEQ ID NO: 428133 - RNA, 19 nt, Homo sapiens
  misc_RNA (1)...(19): siRNA sense strand
ggaaauggaaagaagaaga

SEQ ID NO: 428134 - RNA, 19 nt, Homo sapiens
  misc_RNA (1)...(19): siRNA sense strand
gaaagaagaagagaaacga

SEQ ID NO: 428135 - RNA, 19 nt, Homo sapiens
  misc_RNA (1)...(19): siRNA sense strand
gaggagagaaauagaaaga

SEQ ID NO: 428136 - RNA, 19 nt, Homo sapiens
  misc_RNA (1)...(19): siRNA sense strand
gaaaguuaugccacagaua

SEQ ID NO: 428137 - RNA, 19 nt, Homo sapiens
  misc_RNA (1)...(19): siRNA sense strand
gaauaucccgcuauaguag

SEQ ID NO: 428138 - RNA, 19 nt, Homo sapiens
  misc_RNA (1)...(19): siRNA sense strand
gcagaaaggaagcaggaaa

SEQ ID NO: 428139 - RNA, 19 nt, Homo sapiens
  misc_RNA (1)...(19): siRNA sense strand
caccaagucuggagauuca

SEQ ID NO: 428140 - RNA, 19 nt, Homo sapiens
  misc_RNA (1)...(19): siRNA sense strand
ggucaagagagaucgaaua

SEQ ID NO: 428141 - RNA, 19 nt, Homo sapiens
  misc_RNA (1)...(19): siRNA sense strand
gaagauagacagaauucca

SEQ ID NO: 428142 - RNA, 19 nt, Homo sapiens
  misc_RNA (1)...(19): siRNA sense strand
gggaucgcuuugaugguua

SEQ ID NO: 428143 - RNA, 19 nt, Homo sapiens
  misc_RNA (1)...(19): siRNA sense strand
auagcgaacuuaaagauga

SEQ ID NO: 428144 - RNA, 19 nt, Homo sapiens
  misc_RNA (1)...(19): siRNA sense strand
acaauaaaggucaggaaua

SEQ ID NO: 428145 - RNA, 19 nt, Homo sapiens
  misc_RNA (1)...(19): siRNA sense strand
ucaauaggcagcucagaaa

SEQ ID NO: 428146 - RNA, 19 nt, Homo sapiens
  misc_RNA (1)...(19): siRNA sense strand
cgaugaugauccagaauau

SEQ ID NO: 428147 - RNA, 19 nt, Homo sapiens
  misc_RNA (1)...(19): siRNA sense strand
gcacaggccuaaggagaag

SEQ ID NO: 428148 - RNA, 19 nt, Homo sapiens
  misc_RNA (1)...(19): siRNA sense strand
ccaaagagaccugaagaug

SEQ ID NO: 428149 - RNA, 19 nt, Homo sapiens
  misc_RNA (1)...(19): siRNA sense strand
cagaaagggacaaauuaaa

SEQ ID NO: 428150 - RNA, 19 nt, Homo sapiens
  misc_RNA (1)...(19): siRNA sense strand
gaagaagagaggaggaaau

SEQ ID NO: 428151 - RNA, 19 nt, Homo sapiens
  misc_RNA (1)...(19): siRNA sense strand
uagaggaaauagaagcaaa

SEQ ID NO: 428152 - RNA, 19 nt, Homo sapiens
  misc_RNA (1)...(19): siRNA sense strand
gcaggaaagugguauuagc

SEQ ID NO: 428153 - RNA, 19 nt, Homo sapiens
  misc_RNA (1)...(19): siRNA sense strand
gaaagaagaaguggucaag

SEQ ID NO: 428154 - RNA, 19 nt, Homo sapiens
  misc_RNA (1)...(19): siRNA sense strand
gagcgcauacuucgagaaa

SEQ ID NO: 428155 - RNA, 19 nt, Homo sapiens
  misc_RNA (1)...(19): siRNA sense strand
ugccugagcaugauuauuu

SEQ ID NO: 428156 - RNA, 19 nt, Homo sapiens
  misc_RNA (1)...(19): siRNA sense strand
gucaagagagaucgaauaa

SEQ ID NO: 428157 - RNA, 19 nt, Homo sapiens
  misc_RNA (1)...(19): siRNA sense strand
gggacaaauuaaaggauga

SEQ ID NO: 428158 - RNA, 19 nt, Homo sapiens
  misc_RNA (1)...(19): siRNA sense strand
gaaagggacaaauuaaagg

SEQ ID NO: 428159 - RNA, 19 nt, Homo sapiens
  misc_RNA (1)...(19): siRNA sense strand
guucagggaucgcuuugau

SEQ ID NO: 428160 - RNA, 19 nt, Homo sapiens
  misc_RNA (1)...(19): siRNA sense strand
gaguuuguauccucauaug

SEQ ID NO: 428161 - RNA, 19 nt, Homo sapiens
  misc_RNA (1)...(19): siRNA sense strand
aggaacaucuucaaccuau

SEQ ID NO: 428162 - RNA, 19 nt, Homo sapiens
  misc_RNA (1)...(19): siRNA sense strand
agaaggagcgcuaugagaa

SEQ ID NO: 428163 - RNA, 19 nt, Homo sapiens
  misc_RNA (1)...(19): siRNA sense strand
gaucaggagcgcauacuuc

SEQ ID NO: 428164 - RNA, 19 nt, Homo sapiens
  misc_RNA (1)...(19): siRNA sense strand
aaggaugaaccaaagauua

SEQ ID NO: 428165 - RNA, 19 nt, Homo sapiens
  misc_RNA (1)...(19): siRNA sense strand
gaaauggaaagaagaagag

SEQ ID NO: 428166 - RNA, 19 nt, Homo sapiens
  misc_RNA (1)...(19): siRNA sense strand
gaggaaauggaaagaagaa

SEQ ID NO: 428167 - RNA, 19 nt, Homo sapiens
  misc_RNA (1)...(19): siRNA sense strand
aaaccaagaggacauuauu

SEQ ID NO: 428168 - RNA, 19 nt, Homo sapiens
  misc_RNA (1)...(19): siRNA sense strand
uaguagaauuugcaccuuu

SEQ ID NO: 428169 - RNA, 19 nt, Homo sapiens
  misc_RNA (1)...(19): siRNA sense strand
gaaaggaagcaggaaagug

SEQ ID NO: 428170 - RNA, 19 nt, Homo sapiens
  misc_RNA (1)...(19): siRNA sense strand
aaagacacacuucgggaua

SEQ ID NO: 428171 - RNA, 19 nt, Homo sapiens
  misc_RNA (1)...(19): siRNA sense strand
gaaagagccagugggcaaa

SEQ ID NO: 428172 - RNA, 19 nt, Homo sapiens
  misc_RNA (1)...(19): siRNA sense strand
gauccagaauauagaaagu

SEQ ID NO: 428173 - RNA, 19 nt, Homo sapiens
  misc_RNA (1)...(19): siRNA sense strand
guuuguauccucauaugua

SEQ ID NO: 428174 - RNA, 19 nt, Homo sapiens
  misc_RNA (1)...(19): siRNA sense strand
agacagaauuccagaaagg

SEQ ID NO: 428175 - RNA, 19 nt, Homo sapiens
  misc_RNA (1)...(19): siRNA sense strand
gcagagaaugagagaagaa

SEQ ID NO: 428176 - RNA, 19 nt, Homo sapiens
  misc_RNA (1)...(19): siRNA sense strand
ucgcuuugaugguuaugua

SEQ ID NO: 428177 - RNA, 19 nt, Homo sapiens
  misc_RNA (1)...(19): siRNA sense strand
aagaagaaguggucaagag

SEQ ID NO: 428178 - RNA, 19 nt, Homo sapiens
  misc_RNA (1)...(19): siRNA sense strand
gaugaugauccagaauaua

SEQ ID NO: 428179 - RNA, 19 nt, Homo sapiens
  misc_RNA (1)...(19): siRNA sense strand
uaucgaugaugauccagaa

SEQ ID NO: 428180 - RNA, 19 nt, Homo sapiens
  misc_RNA (1)...(19): siRNA sense strand
agagagaucgaauaagaaa

SEQ ID NO: 428181 - RNA, 19 nt, Homo sapiens
  misc_RNA (1)...(19): siRNA sense strand
caacaaggagaagaaagaa

SEQ ID NO: 428182 - RNA, 19 nt, Homo sapiens
  misc_RNA (1)...(19): siRNA sense strand
gaggaggagagaaauagaa

SEQ ID NO: 428183 - RNA, 19 nt, Homo sapiens
  misc_RNA (1)...(19): siRNA sense strand
aagaaguggucaagagaga

SEQ ID NO: 428184 - RNA, 19 nt, Homo sapiens
  misc_RNA (1)...(19): siRNA sense strand
gaacaucuucaaccuaugc

SEQ ID NO: 428185 - RNA, 19 nt, Homo sapiens
  misc_RNA (1)...(19): siRNA sense strand
gguuauguauuccuugaca

SEQ ID NO: 428186 - RNA, 19 nt, Homo sapiens
  misc_RNA (1)...(19): siRNA sense strand
caaauuaaaggaugaacca

SEQ ID NO: 428187 - RNA, 19 nt, Homo sapiens
  misc_RNA (1)...(19): siRNA sense strand
ggaggaaauggaaagaaga

SEQ ID NO: 428188 - RNA, 19 nt, Homo sapiens
  misc_RNA (1)...(19): siRNA sense strand
ugccacagauaaugagaaa

SEQ ID NO: 428189 - RNA, 19 nt, Homo sapiens
  misc_RNA (1)...(19): siRNA sense strand
cuaaugauacgaguuugua

SEQ ID NO: 428190 - RNA, 19 nt, Homo sapiens
  misc_RNA (1)...(19): siRNA sense strand
gaugauccagaauauagaa

SEQ ID NO: 428191 - RNA, 19 nt, Homo sapiens
  misc_RNA (1)...(19): siRNA sense strand
uccagaaagggacaaauua

SEQ ID NO: 428192 - RNA, 19 nt, Homo sapiens
  misc_RNA (1)...(19): siRNA sense strand
ggaaagauauagaaaagcu

SEQ ID NO: 428193 - RNA, 19 nt, Homo sapiens
  misc_RNA (1)...(19): siRNA sense strand
gaugagagcggcagagacu

SEQ ID NO: 428194 - RNA, 19 nt, Homo sapiens
  misc_RNA (1)...(19): siRNA sense strand
uagcgaacuuaaagaugaa

SEQ ID NO: 428195 - RNA, 19 nt, Homo sapiens
  misc_RNA (1)...(19): siRNA sense strand
aggaugaaccaaagauuaa

SEQ ID NO: 428196 - RNA, 19 nt, Homo sapiens
  misc_RNA (1)...(19): siRNA sense strand
gacaauaaaggucaggaau

SEQ ID NO: 428197 - RNA, 19 nt, Homo sapiens
  misc_RNA (1)...(19): siRNA sense strand
uaagcaggaucgcaacaag

SEQ ID NO: 428198 - RNA, 19 nt, Homo sapiens
  misc_RNA (1)...(19): siRNA sense strand
gauagcgaacuuaaagaug

SEQ ID NO: 428199 - RNA, 19 nt, Homo sapiens
  misc_RNA (1)...(19): siRNA sense strand
gagaagaagagaggaggaa

SEQ ID NO: 428200 - RNA, 19 nt, Homo sapiens
  misc_RNA (1)...(19): siRNA sense strand
agacacugcuagaggaaau

SEQ ID NO: 428201 - RNA, 19 nt, Homo sapiens
  misc_RNA (1)...(19): siRNA sense strand
ggacaaauuaaaggaugaa

SEQ ID NO: 428202 - RNA, 19 nt, Homo sapiens
  misc_RNA (1)...(19): siRNA sense strand
gaaguggucaagagagauc

SEQ ID NO: 428203 - RNA, 19 nt, Homo sapiens
  misc_RNA (1)...(19): siRNA sense strand
agacacacuucgggauaaa

SEQ ID NO: 428204 - RNA, 19 nt, Homo sapiens
  misc_RNA (1)...(19): siRNA sense strand
aagacacacuucgggauaa

SEQ ID NO: 428205 - RNA, 19 nt, Homo sapiens
  misc_RNA (1)...(19): siRNA sense strand
ggaacgggaauaugaacga

SEQ ID NO: 428206 - RNA, 19 nt, Homo sapiens
  misc_RNA (1)...(19): siRNA sense strand
gagaucgaauaagaaacaa

SEQ ID NO: 428207 - RNA, 19 nt, Homo sapiens
  misc_RNA (1)...(19): siRNA sense strand
ggauauaucuuccuugaca

SEQ ID NO: 428208 - RNA, 19 nt, Homo sapiens
  misc_RNA (1)...(19): siRNA sense strand
gaaaggaccuggccaagac

SEQ ID NO: 428209 - RNA, 19 nt, Homo sapiens
  misc_RNA (1)...(19): siRNA sense strand
gagaaagaaguaaggauua

SEQ ID NO: 428210 - RNA, 19 nt, Homo sapiens
  misc_RNA (1)...(19): siRNA sense strand
gaagaaaauugcagagaaa

SEQ ID NO: 428211 - RNA, 19 nt, Homo sapiens
  misc_RNA (1)...(19): siRNA sense strand
gcagagaauucgagaagag

SEQ ID NO: 428212 - RNA, 19 nt, Homo sapiens
  misc_RNA (1)...(19): siRNA sense strand
gaagagcgcagagguguga

SEQ ID NO: 428213 - RNA, 19 nt, Homo sapiens
  misc_RNA (1)...(19): siRNA sense strand
aaagauaccauguggauga

SEQ ID NO: 428214 - RNA, 19 nt, Homo sapiens
  misc_RNA (1)...(19): siRNA sense strand
gaagagaagaagaaagaug

SEQ ID NO: 428215 - RNA, 19 nt, Homo sapiens
  misc_RNA (1)...(19): siRNA sense strand
ccacaccucuuuuggaaua

SEQ ID NO: 428216 - RNA, 19 nt, Homo sapiens
  misc_RNA (1)...(19): siRNA sense strand
gcagaggugugacgacagu

SEQ ID NO: 428217 - RNA, 19 nt, Homo sapiens
  misc_RNA (1)...(19): siRNA sense strand
gaacggaggaggagagagu

SEQ ID NO: 428218 - RNA, 19 nt, Homo sapiens
  misc_RNA (1)...(19): siRNA sense strand
ggagagaguuagaaaagaa

SEQ ID NO: 428219 - RNA, 19 nt, Homo sapiens
  misc_RNA (1)...(19): siRNA sense strand
ggaaaggaccuggccaaga

SEQ ID NO: 428220 - RNA, 19 nt, Homo sapiens
  misc_RNA (1)...(19): siRNA sense strand
gagaggaaccaaccacaga

SEQ ID NO: 428221 - RNA, 19 nt, Homo sapiens
  misc_RNA (1)...(19): siRNA sense strand
gaaaagagcgacuggcaaa

SEQ ID NO: 428222 - RNA, 19 nt, Homo sapiens
  misc_RNA (1)...(19): siRNA sense strand
ggaaccaaccacagagaaa

SEQ ID NO: 428223 - RNA, 19 nt, Homo sapiens
  misc_RNA (1)...(19): siRNA sense strand
gaagaagaagagaagaaga

SEQ ID NO: 428224 - RNA, 19 nt, Homo sapiens
  misc_RNA (1)...(19): siRNA sense strand
aagaagagaagaagaaaga

SEQ ID NO: 428225 - RNA, 19 nt, Homo sapiens
  misc_RNA (1)...(19): siRNA sense strand
gagaagagaagcgagaaga

SEQ ID NO: 428226 - RNA, 19 nt, Homo sapiens
  misc_RNA (1)...(19): siRNA sense strand
gagggaagaggcagaguga

SEQ ID NO: 428227 - RNA, 19 nt, Homo sapiens
  misc_RNA (1)...(19): siRNA sense strand
gaagacaagagagcucauu

SEQ ID NO: 428228 - RNA, 19 nt, Homo sapiens
  misc_RNA (1)...(19): siRNA sense strand
gaagcugucggcccuagaa

SEQ ID NO: 428229 - RNA, 19 nt, Homo sapiens
  misc_RNA (1)...(19): siRNA sense strand
ccgccgaccugagucuuua

SEQ ID NO: 428230 - RNA, 19 nt, Homo sapiens
  misc_RNA (1)...(19): siRNA sense strand
gaaacaggaggaucugcaa

SEQ ID NO: 428231 - RNA, 19 nt, Homo sapiens
  misc_RNA (1)...(19): siRNA sense strand
agagaaagaaguaaggauu

SEQ ID NO: 428232 - RNA, 19 nt, Homo sapiens
  misc_RNA (1)...(19): siRNA sense strand
gaggagaggagauugauac

SEQ ID NO: 428233 - RNA, 19 nt, Homo sapiens
  misc_RNA (1)...(19): siRNA sense strand
gauccagaauauaagaagu

SEQ ID NO: 428234 - RNA, 19 nt, Homo sapiens
  misc_RNA (1)...(19): siRNA sense strand
gaagagaagcgagaagaac

SEQ ID NO: 428235 - RNA, 19 nt, Homo sapiens
  misc_RNA (1)...(19): siRNA sense strand
gaaaauugcagagaaagaa

SEQ ID NO: 428236 - RNA, 19 nt, Homo sapiens
  misc_RNA (1)...(19): siRNA sense strand
agacagauaaacagaagaa

SEQ ID NO: 428237 - RNA, 19 nt, Homo sapiens
  misc_RNA (1)...(19): siRNA sense strand
aagaagaagagaagaagaa

SEQ ID NO: 428238 - RNA, 19 nt, Homo sapiens
  misc_RNA (1)...(19): siRNA sense strand
agagacagauaaacagaag

SEQ ID NO: 428239 - RNA, 19 nt, Homo sapiens
  misc_RNA (1)...(19): siRNA sense strand
acaaagauaccauguggau

SEQ ID NO: 428240 - RNA, 19 nt, Homo sapiens
  misc_RNA (1)...(19): siRNA sense strand
uaucuuccuugacagcaaa

SEQ ID NO: 428241 - RNA, 19 nt, Homo sapiens
  misc_RNA (1)...(19): siRNA sense strand
acacagcggcagugauaaa

SEQ ID NO: 428242 - RNA, 19 nt, Homo sapiens
  misc_RNA (1)...(19): siRNA sense strand
gaagaagaaagaugcaaaa

SEQ ID NO: 428243 - RNA, 19 nt, Homo sapiens
  misc_RNA (1)...(19): siRNA sense strand
gaagaagagaagaagaaag

SEQ ID NO: 428244 - RNA, 19 nt, Homo sapiens
  misc_RNA (1)...(19): siRNA sense strand
gagugaggaugagcagaga

SEQ ID NO: 428245 - RNA, 19 nt, Homo sapiens
  misc_RNA (1)...(19): siRNA sense strand
gagcucauugcuagaagaa

SEQ ID NO: 428246 - RNA, 19 nt, Homo sapiens
  misc_RNA (1)...(19): siRNA sense strand
acagggauguggagagauc

SEQ ID NO: 428247 - RNA, 19 nt, Homo sapiens
  misc_RNA (1)...(19): siRNA sense strand
gaaagaaguaaggauuaag

SEQ ID NO: 428248 - RNA, 19 nt, Homo sapiens
  misc_RNA (1)...(19): siRNA sense strand
auggauauaucuuccuuga

SEQ ID NO: 428249 - RNA, 19 nt, Homo sapiens
  misc_RNA (1)...(19): siRNA sense strand
aagagcgacuggcaaacaa

SEQ ID NO: 428250 - RNA, 19 nt, Homo sapiens
  misc_RNA (1)...(19): siRNA sense strand
ucaagaacaagaaucugaa

SEQ ID NO: 428251 - RNA, 19 nt, Homo sapiens
  misc_RNA (1)...(19): siRNA sense strand
gcagagaaagaaguaagga

SEQ ID NO: 428252 - RNA, 19 nt, Homo sapiens
  misc_RNA (1)...(19): siRNA sense strand
aaagagacagauaaacaga

SEQ ID NO: 428253 - RNA, 19 nt, Homo sapiens
  misc_RNA (1)...(19): siRNA sense strand
agaagaagaaagaugcaaa

SEQ ID NO: 428254 - RNA, 19 nt, Homo sapiens
  misc_RNA (1)...(19): siRNA sense strand
ugauggauauaucuuccuu

SEQ ID NO: 428255 - RNA, 19 nt, Homo sapiens
  misc_RNA (1)...(19): siRNA sense strand
cagcggcagugauaaagag

SEQ ID NO: 428256 - RNA, 19 nt, Homo sapiens
  misc_RNA (1)...(19): siRNA sense strand
aaagaggagaggagauuga

SEQ ID NO: 428257 - RNA, 19 nt, Homo sapiens
  misc_RNA (1)...(19): siRNA sense strand
agaagaaaauugcagagaa

SEQ ID NO: 428258 - RNA, 19 nt, Homo sapiens
  misc_RNA (1)...(19): siRNA sense strand
ggaggaggagagaguuaga

SEQ ID NO: 428259 - RNA, 19 nt, Homo sapiens
  misc_RNA (1)...(19): siRNA sense strand
acaagagagcucauugcua

SEQ ID NO: 428260 - RNA, 19 nt, Homo sapiens
  misc_RNA (1)...(19): siRNA sense strand
gaaccaaccacagagaaac

SEQ ID NO: 428261 - RNA, 19 nt, Homo sapiens
  misc_RNA (1)...(19): siRNA sense strand
gaggaaccaaccacagaga

SEQ ID NO: 428262 - RNA, 19 nt, Homo sapiens
  misc_RNA (1)...(19): siRNA sense strand
cucaagagcauacauuaau

SEQ ID NO: 428263 - RNA, 19 nt, Homo sapiens
  misc_RNA (1)...(19): siRNA sense strand
caaccacagagaaaccaaa

SEQ ID NO: 428264 - RNA, 19 nt, Homo sapiens
  misc_RNA (1)...(19): siRNA sense strand
gagagcucauugcuagaag

SEQ ID NO: 428265 - RNA, 19 nt, Homo sapiens
  misc_RNA (1)...(19): siRNA sense strand
ggagguggcaagcaggaau

SEQ ID NO: 428266 - RNA, 19 nt, Homo sapiens
  misc_RNA (1)...(19): siRNA sense strand
cuacucaagagcauacauu

SEQ ID NO: 428267 - RNA, 19 nt, Homo sapiens
  misc_RNA (1)...(19): siRNA sense strand
gagaucguuuugauggaua

SEQ ID NO: 428268 - RNA, 19 nt, Homo sapiens
  misc_RNA (1)...(19): siRNA sense strand
aagaagaagaagagaagaa

SEQ ID NO: 428269 - RNA, 19 nt, Homo sapiens
  misc_RNA (1)...(19): siRNA sense strand
auaaagagcacagggaugu

SEQ ID NO: 428270 - RNA, 19 nt, Homo sapiens
  misc_RNA (1)...(19): siRNA sense strand
gcugucggcccuagaagug

SEQ ID NO: 428271 - RNA, 19 nt, Homo sapiens
  misc_RNA (1)...(19): siRNA sense strand
gagaagaagaaagaugcaa

SEQ ID NO: 428272 - RNA, 19 nt, Homo sapiens
  misc_RNA (1)...(19): siRNA sense strand
agaagaagagaagaagaaa

SEQ ID NO: 428273 - RNA, 19 nt, Homo sapiens
  misc_RNA (1)...(19): siRNA sense strand
agaagagaagcgagaagaa

SEQ ID NO: 428274 - RNA, 19 nt, Homo sapiens
  misc_RNA (1)...(19): siRNA sense strand
uacucaagagcauacauua

SEQ ID NO: 428275 - RNA, 19 nt, Homo sapiens
  misc_RNA (1)...(19): siRNA sense strand
acucaagagcauacauuaa

SEQ ID NO: 428276 - RNA, 19 nt, Homo sapiens
  misc_RNA (1)...(19): siRNA sense strand
ccuacuguguggaggaaga

SEQ ID NO: 428277 - RNA, 19 nt, Homo sapiens
  misc_RNA (1)...(19): siRNA sense strand
gaggaggagagaguuagaa

SEQ ID NO: 428278 - RNA, 19 nt, Homo sapiens
  misc_RNA (1)...(19): siRNA sense strand
gacaagagagcucauugcu

SEQ ID NO: 428279 - RNA, 19 nt, Homo sapiens
  misc_RNA (1)...(19): siRNA sense strand
aaagagcgacuggcaaaca

SEQ ID NO: 428280 - RNA, 19 nt, Homo sapiens
  misc_RNA (1)...(19): siRNA sense strand
ggagauggaggcgaagaca

SEQ ID NO: 428281 - RNA, 19 nt, Homo sapiens
  misc_RNA (1)...(19): siRNA sense strand
gagauggaggcgaagacaa

SEQ ID NO: 428282 - RNA, 19 nt, Homo sapiens
  misc_RNA (1)...(19): siRNA sense strand
gggaggccauggagagacu

SEQ ID NO: 428283 - RNA, 19 nt, Homo sapiens
  misc_RNA (1)...(19): siRNA sense strand
aagcagagaauucgagaag

SEQ ID NO: 428284 - RNA, 19 nt, Homo sapiens
  misc_RNA (1)...(19): siRNA sense strand
gaaccacaccucuuuugga

SEQ ID NO: 428285 - RNA, 19 nt, Homo sapiens
  misc_RNA (1)...(19): siRNA sense strand
acacgacuacuucgaguuc

SEQ ID NO: 428286 - RNA, 19 nt, Homo sapiens
  misc_RNA (1)...(19): siRNA sense strand
gagaucucaagaacaagaa

SEQ ID NO: 428287 - RNA, 19 nt, Homo sapiens
  misc_RNA (1)...(19): siRNA sense strand
agagaucucaagaacaaga

SEQ ID NO: 428288 - RNA, 19 nt, Homo sapiens
  misc_RNA (1)...(19): siRNA sense strand
gagaauucgagaagagaag

SEQ ID NO: 428289 - RNA, 19 nt, Homo sapiens
  misc_RNA (1)...(19): siRNA sense strand
cucaagaacaagaaucuga

SEQ ID NO: 428290 - RNA, 19 nt, Homo sapiens
  misc_RNA (1)...(19): siRNA sense strand
gaucucaagaacaagaauc

SEQ ID NO: 428291 - RNA, 19 nt, Homo sapiens
  misc_RNA (1)...(19): siRNA sense strand
ggagaggagauugauacug

SEQ ID NO: 428292 - RNA, 19 nt, Homo sapiens
  misc_RNA (1)...(19): siRNA sense strand
aaguaaggauuaagcuucu

SEQ ID NO: 428293 - RNA, 19 nt, Homo sapiens
  misc_RNA (1)...(19): siRNA sense strand
agagagcucauugcuagaa

SEQ ID NO: 428294 - RNA, 19 nt, Homo sapiens
  misc_RNA (1)...(19): siRNA sense strand
gaggagagaguuagaaaag

SEQ ID NO: 428295 - RNA, 19 nt, Homo sapiens
  misc_RNA (1)...(19): siRNA sense strand
gugaggaugagcagagaug

SEQ ID NO: 428296 - RNA, 19 nt, Homo sapiens
  misc_RNA (1)...(19): siRNA sense strand
agagcucauugcuagaaga

SEQ ID NO: 428297 - RNA, 19 nt, Homo sapiens
  misc_RNA (1)...(19): siRNA sense strand
gauggaggcgaagacaaga

SEQ ID NO: 428298 - RNA, 19 nt, Homo sapiens
  misc_RNA (1)...(19): siRNA sense strand
ggauauaucuuccuugaca

SEQ ID NO: 428299 - RNA, 19 nt, Homo sapiens
  misc_RNA (1)...(19): siRNA sense strand
gaaaggaccuggccaagac

SEQ ID NO: 428300 - RNA, 19 nt, Homo sapiens
  misc_RNA (1)...(19): siRNA sense strand
gagaaagaaguaaggauua

SEQ ID NO: 428301 - RNA, 19 nt, Homo sapiens
  misc_RNA (1)...(19): siRNA sense strand
gaagaaaauugcagagaaa

SEQ ID NO: 428302 - RNA, 19 nt, Homo sapiens
  misc_RNA (1)...(19): siRNA sense strand
gcagagaauucgagaagag

SEQ ID NO: 428303 - RNA, 19 nt, Homo sapiens
  misc_RNA (1)...(19): siRNA sense strand
gaagagcgcagagguguga

SEQ ID NO: 428304 - RNA, 19 nt, Homo sapiens
  misc_RNA (1)...(19): siRNA sense strand
aaagauaccauguggauga

SEQ ID NO: 428305 - RNA, 19 nt, Homo sapiens
  misc_RNA (1)...(19): siRNA sense strand
gaagagaagaagaaagaug

SEQ ID NO: 428306 - RNA, 19 nt, Homo sapiens
  misc_RNA (1)...(19): siRNA sense strand
ccacaccucuuuuggaaua

SEQ ID NO: 428307 - RNA, 19 nt, Homo sapiens
  misc_RNA (1)...(19): siRNA sense strand
gcagaggugugacgacagu

SEQ ID NO: 428308 - RNA, 19 nt, Homo sapiens
  misc_RNA (1)...(19): siRNA sense strand
gaacggaggaggagagagu

SEQ ID NO: 428309 - RNA, 19 nt, Homo sapiens
  misc_RNA (1)...(19): siRNA sense strand
ggagagaguuagaaaagaa

SEQ ID NO: 428310 - RNA, 19 nt, Homo sapiens
  misc_RNA (1)...(19): siRNA sense strand
ggaaaggaccuggccaaga

SEQ ID NO: 428311 - RNA, 19 nt, Homo sapiens
  misc_RNA (1)...(19): siRNA sense strand
gagaggaaccaaccacaga

SEQ ID NO: 428312 - RNA, 19 nt, Homo sapiens
  misc_RNA (1)...(19): siRNA sense strand
gaaaagagcgacuggcaaa

SEQ ID NO: 428313 - RNA, 19 nt, Homo sapiens
  misc_RNA (1)...(19): siRNA sense strand
ggaaccaaccacagagaaa

SEQ ID NO: 428314 - RNA, 19 nt, Homo sapiens
  misc_RNA (1)...(19): siRNA sense strand
gagaagagaagcgagaaga

SEQ ID NO: 428315 - RNA, 19 nt, Homo sapiens
  misc_RNA (1)...(19): siRNA sense strand
gagggaagaggcagaguga

SEQ ID NO: 428316 - RNA, 19 nt, Homo sapiens
  misc_RNA (1)...(19): siRNA sense strand
ccgccgaccugagucuuua

SEQ ID NO: 428317 - RNA, 19 nt, Homo sapiens
  misc_RNA (1)...(19): siRNA sense strand
gaagcugucggcccuagaa

SEQ ID NO: 428318 - RNA, 19 nt, Homo sapiens
  misc_RNA (1)...(19): siRNA sense strand
gaagacaagagagcucauu

SEQ ID NO: 428319 - RNA, 19 nt, Homo sapiens
  misc_RNA (1)...(19): siRNA sense strand
gaaacaggaggaucugcaa

SEQ ID NO: 428320 - RNA, 19 nt, Homo sapiens
  misc_RNA (1)...(19): siRNA sense strand
agagaaagaaguaaggauu

SEQ ID NO: 428321 - RNA, 19 nt, Homo sapiens
  misc_RNA (1)...(19): siRNA sense strand
gaggagaggagauugauac

SEQ ID NO: 428322 - RNA, 19 nt, Homo sapiens
  misc_RNA (1)...(19): siRNA sense strand
gauccagaauauaagaagu

SEQ ID NO: 428323 - RNA, 19 nt, Homo sapiens
  misc_RNA (1)...(19): siRNA sense strand
gaagagaagcgagaagaac

SEQ ID NO: 428324 - RNA, 19 nt, Homo sapiens
  misc_RNA (1)...(19): siRNA sense strand
gaaaauugcagagaaagaa

SEQ ID NO: 428325 - RNA, 19 nt, Homo sapiens
  misc_RNA (1)...(19): siRNA sense strand
agacagauaaacagaagaa

SEQ ID NO: 428326 - RNA, 19 nt, Homo sapiens
  misc_RNA (1)...(19): siRNA sense strand
agagacagauaaacagaag

SEQ ID NO: 428327 - RNA, 19 nt, Homo sapiens
  misc_RNA (1)...(19): siRNA sense strand
acaaagauaccauguggau

SEQ ID NO: 428328 - RNA, 19 nt, Homo sapiens
  misc_RNA (1)...(19): siRNA sense strand
uaucuuccuugacagcaaa

SEQ ID NO: 428329 - RNA, 19 nt, Homo sapiens
  misc_RNA (1)...(19): siRNA sense strand
acacagcggcagugauaaa

SEQ ID NO: 428330 - RNA, 19 nt, Homo sapiens
  misc_RNA (1)...(19): siRNA sense strand
gaagaagaaagaugcaaaa

SEQ ID NO: 428331 - RNA, 19 nt, Homo sapiens
  misc_RNA (1)...(19): siRNA sense strand
gagugaggaugagcagaga

SEQ ID NO: 428332 - RNA, 19 nt, Homo sapiens
  misc_RNA (1)...(19): siRNA sense strand
gagcucauugcuagaagaa

SEQ ID NO: 428333 - RNA, 19 nt, Homo sapiens
  misc_RNA (1)...(19): siRNA sense strand
acagggauguggagagauc

SEQ ID NO: 428334 - RNA, 19 nt, Homo sapiens
  misc_RNA (1)...(19): siRNA sense strand
gaaagaaguaaggauuaag

SEQ ID NO: 428335 - RNA, 19 nt, Homo sapiens
  misc_RNA (1)...(19): siRNA sense strand
auggauauaucuuccuuga

SEQ ID NO: 428336 - RNA, 19 nt, Homo sapiens
  misc_RNA (1)...(19): siRNA sense strand
aagagcgacuggcaaacaa

SEQ ID NO: 428337 - RNA, 19 nt, Homo sapiens
  misc_RNA (1)...(19): siRNA sense strand
ucaagaacaagaaucugaa

SEQ ID NO: 428338 - RNA, 19 nt, Homo sapiens
  misc_RNA (1)...(19): siRNA sense strand
gcagagaaagaaguaagga

SEQ ID NO: 428339 - RNA, 19 nt, Homo sapiens
  misc_RNA (1)...(19): siRNA sense strand
aaagagacagauaaacaga

SEQ ID NO: 428340 - RNA, 19 nt, Homo sapiens
  misc_RNA (1)...(19): siRNA sense strand
agaagaagaaagaugcaaa

SEQ ID NO: 428341 - RNA, 19 nt, Homo sapiens
  misc_RNA (1)...(19): siRNA sense strand
ugauggauauaucuuccuu

SEQ ID NO: 428342 - RNA, 19 nt, Homo sapiens
  misc_RNA (1)...(19): siRNA sense strand
cagcggcagugauaaagag

SEQ ID NO: 428343 - RNA, 19 nt, Homo sapiens
  misc_RNA (1)...(19): siRNA sense strand
aaagaggagaggagauuga

SEQ ID NO: 428344 - RNA, 19 nt, Homo sapiens
  misc_RNA (1)...(19): siRNA sense strand
agaagaaaauugcagagaa

SEQ ID NO: 428345 - RNA, 19 nt, Homo sapiens
  misc_RNA (1)...(19): siRNA sense strand
ggaggaggagagaguuaga

SEQ ID NO: 428346 - RNA, 19 nt, Homo sapiens
  misc_RNA (1)...(19): siRNA sense strand
acaagagagcucauugcua

SEQ ID NO: 428347 - RNA, 19 nt, Homo sapiens
  misc_RNA (1)...(19): siRNA sense strand
gaaccaaccacagagaaac

SEQ ID NO: 428348 - RNA, 19 nt, Homo sapiens
  misc_RNA (1)...(19): siRNA sense strand
gaggaaccaaccacagaga

SEQ ID NO: 428349 - RNA, 19 nt, Homo sapiens
  misc_RNA (1)...(19): siRNA sense strand
cucaagagcauacauuaau

SEQ ID NO: 428350 - RNA, 19 nt, Homo sapiens
  misc_RNA (1)...(19): siRNA sense strand
caaccacagagaaaccaaa

SEQ ID NO: 428351 - RNA, 19 nt, Homo sapiens
  misc_RNA (1)...(19): siRNA sense strand
gagagcucauugcuagaag

SEQ ID NO: 428352 - RNA, 19 nt, Homo sapiens
  misc_RNA (1)...(19): siRNA sense strand
gagaucguuuugauggaua

SEQ ID NO: 428353 - RNA, 19 nt, Homo sapiens
  misc_RNA (1)...(19): siRNA sense strand
ggagguggcaagcaggaau

SEQ ID NO: 428354 - RNA, 19 nt, Homo sapiens
  misc_RNA (1)...(19): siRNA sense strand
cuacucaagagcauacauu

SEQ ID NO: 428355 - RNA, 19 nt, Homo sapiens
  misc_RNA (1)...(19): siRNA sense strand
auaaagagcacagggaugu

SEQ ID NO: 428356 - RNA, 19 nt, Homo sapiens
  misc_RNA (1)...(19): siRNA sense strand
gcugucggcccuagaagug

SEQ ID NO: 428357 - RNA, 19 nt, Homo sapiens
  misc_RNA (1)...(19): siRNA sense strand
gagaagaagaaagaugcaa

SEQ ID NO: 428358 - RNA, 19 nt, Homo sapiens
  misc_RNA (1)...(19): siRNA sense strand
ccuacuguguggaggaaga

SEQ ID NO: 428359 - RNA, 19 nt, Homo sapiens
  misc_RNA (1)...(19): siRNA sense strand
uacucaagagcauacauua

SEQ ID NO: 428360 - RNA, 19 nt, Homo sapiens
  misc_RNA (1)...(19): siRNA sense strand
acucaagagcauacauuaa

SEQ ID NO: 428361 - RNA, 19 nt, Homo sapiens
  misc_RNA (1)...(19): siRNA sense strand
gaggaggagagaguuagaa

SEQ ID NO: 428362 - RNA, 19 nt, Homo sapiens
  misc_RNA (1)...(19): siRNA sense strand
agaagagaagcgagaagaa

SEQ ID NO: 428363 - RNA, 19 nt, Homo sapiens
  misc_RNA (1)...(19): siRNA sense strand
ggagauggaggcgaagaca

SEQ ID NO: 428364 - RNA, 19 nt, Homo sapiens
  misc_RNA (1)...(19): siRNA sense strand
aaagagcgacuggcaaaca

SEQ ID NO: 428365 - RNA, 19 nt, Homo sapiens
  misc_RNA (1)...(19): siRNA sense strand
gggaggccauggagagacu

SEQ ID NO: 428366 - RNA, 19 nt, Homo sapiens
  misc_RNA (1)...(19): siRNA sense strand
aagcagagaauucgagaag

SEQ ID NO: 428367 - RNA, 19 nt, Homo sapiens
  misc_RNA (1)...(19): siRNA sense strand
gaaccacaccucuuuugga

SEQ ID NO: 428368 - RNA, 19 nt, Homo sapiens
  misc_RNA (1)...(19): siRNA sense strand
gacaagagagcucauugcu

SEQ ID NO: 428369 - RNA, 19 nt, Homo sapiens
  misc_RNA (1)...(19): siRNA sense strand
gagauggaggcgaagacaa

SEQ ID NO: 428370 - RNA, 19 nt, Homo sapiens
  misc_RNA (1)...(19): siRNA sense strand
gagaucucaagaacaagaa

SEQ ID NO: 428371 - RNA, 19 nt, Homo sapiens
  misc_RNA (1)...(19): siRNA sense strand
acacgacuacuucgaguuc

SEQ ID NO: 428372 - RNA, 19 nt, Homo sapiens
  misc_RNA (1)...(19): siRNA sense strand
agagaucucaagaacaaga

SEQ ID NO: 428373 - RNA, 19 nt, Homo sapiens
  misc_RNA (1)...(19): siRNA sense strand
agagagcucauugcuagaa

SEQ ID NO: 428374 - RNA, 19 nt, Homo sapiens
  misc_RNA (1)...(19): siRNA sense strand
cucaagaacaagaaucuga

SEQ ID NO: 428375 - RNA, 19 nt, Homo sapiens
  misc_RNA (1)...(19): siRNA sense strand
gaucucaagaacaagaauc

SEQ ID NO: 428376 - RNA, 19 nt, Homo sapiens
  misc_RNA (1)...(19): siRNA sense strand
ggagaggagauugauacug

SEQ ID NO: 428377 - RNA, 19 nt, Homo sapiens
  misc_RNA (1)...(19): siRNA sense strand
aaguaaggauuaagcuucu

SEQ ID NO: 428378 - RNA, 19 nt, Homo sapiens
  misc_RNA (1)...(19): siRNA sense strand
gaggagagaguuagaaaag

SEQ ID NO: 428379 - RNA, 19 nt, Homo sapiens
  misc_RNA (1)...(19): siRNA sense strand
gagaauucgagaagagaag

SEQ ID NO: 428380 - RNA, 19 nt, Homo sapiens
  misc_RNA (1)...(19): siRNA sense strand
gugaggaugagcagagaug

SEQ ID NO: 428381 - RNA, 19 nt, Homo sapiens
  misc_RNA (1)...(19): siRNA sense strand
agagcucauugcuagaaga

SEQ ID NO: 428382 - RNA, 19 nt, Homo sapiens
  misc_RNA (1)...(19): siRNA sense strand
gauggaggcgaagacaaga

SEQ ID NO: 428383 - RNA, 19 nt, Homo sapiens
  misc_RNA (1)...(19): siRNA sense strand
ccgacgagcuggugcguuu

SEQ ID NO: 428384 - RNA, 19 nt, Homo sapiens
  misc_RNA (1)...(19): siRNA sense strand
gucaacagcaccuggagaa

SEQ ID NO: 428385 - RNA, 19 nt, Homo sapiens
  misc_RNA (1)...(19): siRNA sense strand
gcuacgaagcggucuccuu

SEQ ID NO: 428386 - RNA, 19 nt, Homo sapiens
  misc_RNA (1)...(19): siRNA sense strand
ccgacgagcuggugcguuu

SEQ ID NO: 428387 - RNA, 19 nt, Homo sapiens
  misc_RNA (1)...(19): siRNA sense strand
gucaacagcaccuggagaa

SEQ ID NO: 428388 - RNA, 19 nt, Homo sapiens
  misc_RNA (1)...(19): siRNA sense strand
gcuacgaagcggucuccuu

SEQ ID NO: 428389 - RNA, 19 nt, Homo sapiens
  misc_RNA (1)...(19): siRNA sense strand
ccgacgagcuggugcguuu

SEQ ID NO: 428390 - RNA, 19 nt, Homo sapiens
  misc_RNA (1)...(19): siRNA sense strand
gucaacagcaccuggagaa

SEQ ID NO: 428391 - RNA, 19 nt, Homo sapiens
  misc_RNA (1)...(19): siRNA sense strand
gcuacgaagcggucuccuu

SEQ ID NO: 428392 - RNA, 19 nt, Homo sapiens
  misc_RNA (1)...(19): siRNA sense strand
ccgacgagcuggugcguuu

SEQ ID NO: 428393 - RNA, 19 nt, Homo sapiens
  misc_RNA (1)...(19): siRNA sense strand
gucaacagcaccuggagaa

SEQ ID NO: 428394 - RNA, 19 nt, Homo sapiens
  misc_RNA (1)...(19): siRNA sense strand
gcuacgaagcggucuccuu

SEQ ID NO: 428395 - RNA, 19 nt, Homo sapiens
  misc_RNA (1)...(19): siRNA sense strand
ccgacgagcuggugcguuu

SEQ ID NO: 428396 - RNA, 19 nt, Homo sapiens
  misc_RNA (1)...(19): siRNA sense strand
gucaacagcaccuggagaa

SEQ ID NO: 428397 - RNA, 19 nt, Homo sapiens
  misc_RNA (1)...(19): siRNA sense strand
gcuacgaagcggucuccuu

SEQ ID NO: 428398 - RNA, 19 nt, Homo sapiens
  misc_RNA (1)...(19): siRNA sense strand
ccgacgagcuggugcguuu

SEQ ID NO: 428399 - RNA, 19 nt, Homo sapiens
  misc_RNA (1)...(19): siRNA sense strand
gucaacagcaccuggagaa

SEQ ID NO: 428400 - RNA, 19 nt, Homo sapiens
  misc_RNA (1)...(19): siRNA sense strand
gcuacgaagcggucuccuu

SEQ ID NO: 428401 - RNA, 19 nt, Homo sapiens
  misc_RNA (1)...(19): siRNA sense strand
ccgacgagcuggugcguuu

SEQ ID NO: 428402 - RNA, 19 nt, Homo sapiens
  misc_RNA (1)...(19): siRNA sense strand
gucaacagcaccuggagaa

SEQ ID NO: 428403 - RNA, 19 nt, Homo sapiens
  misc_RNA (1)...(19): siRNA sense strand
gcuacgaagcggucuccuu

SEQ ID NO: 428404 - RNA, 19 nt, Homo sapiens
  misc_RNA (1)...(19): siRNA sense strand
ccgacgagcuggugcguuu

SEQ ID NO: 428405 - RNA, 19 nt, Homo sapiens
  misc_RNA (1)...(19): siRNA sense strand
gucaacagcaccuggagaa

SEQ ID NO: 428406 - RNA, 19 nt, Homo sapiens
  misc_RNA (1)...(19): siRNA sense strand
gcuacgaagcggucuccuu

SEQ ID NO: 428407 - RNA, 19 nt, Homo sapiens
  misc_RNA (1)...(19): siRNA sense strand
gcgacgaacugagcuguaa

SEQ ID NO: 428408 - RNA, 19 nt, Homo sapiens
  misc_RNA (1)...(19): siRNA sense strand
gaaccagcccuuugucuuc

SEQ ID NO: 428409 - RNA, 19 nt, Homo sapiens
  misc_RNA (1)...(19): siRNA sense strand
gcacaggccaggucaucaa

SEQ ID NO: 428410 - RNA, 19 nt, Homo sapiens
  misc_RNA (1)...(19): siRNA sense strand
gaagaugggacagaguuug

SEQ ID NO: 428411 - RNA, 19 nt, Homo sapiens
  misc_RNA (1)...(19): siRNA sense strand
ggaagaugggacagaguuu

SEQ ID NO: 428412 - RNA, 19 nt, Homo sapiens
  misc_RNA (1)...(19): siRNA sense strand
gugcaacccugguguucga

SEQ ID NO: 428413 - RNA, 19 nt, Homo sapiens
  misc_RNA (1)...(19): siRNA sense strand
ggugaucccauccgagcua

SEQ ID NO: 428414 - RNA, 19 nt, Homo sapiens
  misc_RNA (1)...(19): siRNA sense strand
cauccgagcuaggguaugg

SEQ ID NO: 428415 - RNA, 19 nt, Homo sapiens
  misc_RNA (1)...(19): siRNA sense strand
aaauagagcgacgaacuga

SEQ ID NO: 428416 - RNA, 19 nt, Homo sapiens
  misc_RNA (1)...(19): siRNA sense strand
aagaugggacagaguuuga

SEQ ID NO: 428417 - RNA, 19 nt, Homo sapiens
  misc_RNA (1)...(19): siRNA sense strand
uggaagaugggacagaguu

SEQ ID NO: 428418 - RNA, 19 nt, Homo sapiens
  misc_RNA (1)...(19): siRNA sense strand
agaaccagcccuuugucuu

SEQ ID NO: 428419 - RNA, 19 nt, Homo sapiens
  misc_RNA (1)...(19): siRNA sense strand
gcaaaaggaagcugcagau

SEQ ID NO: 428420 - RNA, 19 nt, Homo sapiens
  misc_RNA (1)...(19): siRNA sense strand
gcgacgaacugagcuguaa

SEQ ID NO: 428421 - RNA, 19 nt, Homo sapiens
  misc_RNA (1)...(19): siRNA sense strand
gaaccagcccuuugucuuc

SEQ ID NO: 428422 - RNA, 19 nt, Homo sapiens
  misc_RNA (1)...(19): siRNA sense strand
gcacaggccaggucaucaa

SEQ ID NO: 428423 - RNA, 19 nt, Homo sapiens
  misc_RNA (1)...(19): siRNA sense strand
gaagaugggacagaguuug

SEQ ID NO: 428424 - RNA, 19 nt, Homo sapiens
  misc_RNA (1)...(19): siRNA sense strand
ggaagaugggacagaguuu

SEQ ID NO: 428425 - RNA, 19 nt, Homo sapiens
  misc_RNA (1)...(19): siRNA sense strand
gugcaacccugguguucga

SEQ ID NO: 428426 - RNA, 19 nt, Homo sapiens
  misc_RNA (1)...(19): siRNA sense strand
ggugaucccauccgagcua

SEQ ID NO: 428427 - RNA, 19 nt, Homo sapiens
  misc_RNA (1)...(19): siRNA sense strand
cauccgagcuaggguaugg

SEQ ID NO: 428428 - RNA, 19 nt, Homo sapiens
  misc_RNA (1)...(19): siRNA sense strand
aaauagagcgacgaacuga

SEQ ID NO: 428429 - RNA, 19 nt, Homo sapiens
  misc_RNA (1)...(19): siRNA sense strand
aagaugggacagaguuuga

SEQ ID NO: 428430 - RNA, 19 nt, Homo sapiens
  misc_RNA (1)...(19): siRNA sense strand
uggaagaugggacagaguu

SEQ ID NO: 428431 - RNA, 19 nt, Homo sapiens
  misc_RNA (1)...(19): siRNA sense strand
agaaccagcccuuugucuu

SEQ ID NO: 428432 - RNA, 19 nt, Homo sapiens
  misc_RNA (1)...(19): siRNA sense strand
gcaaaaggaagcugcagau

SEQ ID NO: 428433 - RNA, 19 nt, Homo sapiens
  misc_RNA (1)...(19): siRNA sense strand
gcggagaguucuguacuua

SEQ ID NO: 428434 - RNA, 19 nt, Homo sapiens
  misc_RNA (1)...(19): siRNA sense strand
ggauguggguucccucaaa

SEQ ID NO: 428435 - RNA, 19 nt, Homo sapiens
  misc_RNA (1)...(19): siRNA sense strand
gcguuuggguggccuuuga

SEQ ID NO: 428436 - RNA, 19 nt, Homo sapiens
  misc_RNA (1)...(19): siRNA sense strand
ggagaguucuguacuuacg

SEQ ID NO: 428437 - RNA, 19 nt, Homo sapiens
  misc_RNA (1)...(19): siRNA sense strand
gauguggguucccucaaag

SEQ ID NO: 428438 - RNA, 19 nt, Homo sapiens
  misc_RNA (1)...(19): siRNA sense strand
aguuugaccucguugauga

SEQ ID NO: 428439 - RNA, 19 nt, Homo sapiens
  misc_RNA (1)...(19): siRNA sense strand
uuccaaggcugcaaguuug

SEQ ID NO: 428440 - RNA, 19 nt, Homo sapiens
  misc_RNA (1)...(19): siRNA sense strand
cuaccgaggcuaccaguau

SEQ ID NO: 428441 - RNA, 19 nt, Homo sapiens
  misc_RNA (1)...(19): siRNA sense strand
gcaaguuugaccucguuga

SEQ ID NO: 428442 - RNA, 19 nt, Homo sapiens
  misc_RNA (1)...(19): siRNA sense strand
cuuccaaggcugcaaguuu

SEQ ID NO: 428443 - RNA, 19 nt, Homo sapiens
  misc_RNA (1)...(19): siRNA sense strand
ugaccucguugaugacuac

SEQ ID NO: 428444 - RNA, 19 nt, Homo sapiens
  misc_RNA (1)...(19): siRNA sense strand
gaggcuaccaguauguguu

SEQ ID NO: 428445 - RNA, 19 nt, Homo sapiens
  misc_RNA (1)...(19): siRNA sense strand
uaccgaggcuaccaguaug

SEQ ID NO: 428446 - RNA, 19 nt, Homo sapiens
  misc_RNA (1)...(19): siRNA sense strand
gcucugcgcgaaccacaau

SEQ ID NO: 428447 - RNA, 19 nt, Homo sapiens
  misc_RNA (1)...(19): siRNA sense strand
caaguuugaccucguugau

SEQ ID NO: 428448 - RNA, 19 nt, Homo sapiens
  misc_RNA (1)...(19): siRNA sense strand
cugcaaguuugaccucguu

SEQ ID NO: 428449 - RNA, 19 nt, Homo sapiens
  misc_RNA (1)...(19): siRNA sense strand
gcagcagccacaacagcaa

SEQ ID NO: 428450 - RNA, 19 nt, Homo sapiens
  misc_RNA (1)...(19): siRNA sense strand
ccagggacagcaguucauu

SEQ ID NO: 428451 - RNA, 19 nt, Homo sapiens
  misc_RNA (1)...(19): siRNA sense strand
gcggagaguucuguacuua

SEQ ID NO: 428452 - RNA, 19 nt, Homo sapiens
  misc_RNA (1)...(19): siRNA sense strand
ggauguggguucccucaaa

SEQ ID NO: 428453 - RNA, 19 nt, Homo sapiens
  misc_RNA (1)...(19): siRNA sense strand
gcguuuggguggccuuuga

SEQ ID NO: 428454 - RNA, 19 nt, Homo sapiens
  misc_RNA (1)...(19): siRNA sense strand
ggagaguucuguacuuacg

SEQ ID NO: 428455 - RNA, 19 nt, Homo sapiens
  misc_RNA (1)...(19): siRNA sense strand
gauguggguucccucaaag

SEQ ID NO: 428456 - RNA, 19 nt, Homo sapiens
  misc_RNA (1)...(19): siRNA sense strand
aguuugaccucguugauga

SEQ ID NO: 428457 - RNA, 19 nt, Homo sapiens
  misc_RNA (1)...(19): siRNA sense strand
uuccaaggcugcaaguuug

SEQ ID NO: 428458 - RNA, 19 nt, Homo sapiens
  misc_RNA (1)...(19): siRNA sense strand
cuaccgaggcuaccaguau

SEQ ID NO: 428459 - RNA, 19 nt, Homo sapiens
  misc_RNA (1)...(19): siRNA sense strand
gcaaguuugaccucguuga

SEQ ID NO: 428460 - RNA, 19 nt, Homo sapiens
  misc_RNA (1)...(19): siRNA sense strand
cuuccaaggcugcaaguuu

SEQ ID NO: 428461 - RNA, 19 nt, Homo sapiens
  misc_RNA (1)...(19): siRNA sense strand
ugaccucguugaugacuac

SEQ ID NO: 428462 - RNA, 19 nt, Homo sapiens
  misc_RNA (1)...(19): siRNA sense strand
gaggcuaccaguauguguu

SEQ ID NO: 428463 - RNA, 19 nt, Homo sapiens
  misc_RNA (1)...(19): siRNA sense strand
uaccgaggcuaccaguaug

SEQ ID NO: 428464 - RNA, 19 nt, Homo sapiens
  misc_RNA (1)...(19): siRNA sense strand
gcucugcgcgaaccacaau

SEQ ID NO: 428465 - RNA, 19 nt, Homo sapiens
  misc_RNA (1)...(19): siRNA sense strand
caaguuugaccucguugau

SEQ ID NO: 428466 - RNA, 19 nt, Homo sapiens
  misc_RNA (1)...(19): siRNA sense strand
cugcaaguuugaccucguu

SEQ ID NO: 428467 - RNA, 19 nt, Homo sapiens
  misc_RNA (1)...(19): siRNA sense strand
gcagcagccacaacagcaa

SEQ ID NO: 428468 - RNA, 19 nt, Homo sapiens
  misc_RNA (1)...(19): siRNA sense strand
ccagggacagcaguucauu

SEQ ID NO: 428469 - RNA, 19 nt, Homo sapiens
  misc_RNA (1)...(19): siRNA sense strand
gcggagaguucuguacuua

SEQ ID NO: 428470 - RNA, 19 nt, Homo sapiens
  misc_RNA (1)...(19): siRNA sense strand
ggauguggguucccucaaa

SEQ ID NO: 428471 - RNA, 19 nt, Homo sapiens
  misc_RNA (1)...(19): siRNA sense strand
gcguuuggguggccuuuga

SEQ ID NO: 428472 - RNA, 19 nt, Homo sapiens
  misc_RNA (1)...(19): siRNA sense strand
ggagaguucuguacuuacg

SEQ ID NO: 428473 - RNA, 19 nt, Homo sapiens
  misc_RNA (1)...(19): siRNA sense strand
gauguggguucccucaaag

SEQ ID NO: 428474 - RNA, 19 nt, Homo sapiens
  misc_RNA (1)...(19): siRNA sense strand
aguuugaccucguugauga

SEQ ID NO: 428475 - RNA, 19 nt, Homo sapiens
  misc_RNA (1)...(19): siRNA sense strand
uuccaaggcugcaaguuug

SEQ ID NO: 428476 - RNA, 19 nt, Homo sapiens
  misc_RNA (1)...(19): siRNA sense strand
cuaccgaggcuaccaguau

SEQ ID NO: 428477 - RNA, 19 nt, Homo sapiens
  misc_RNA (1)...(19): siRNA sense strand
gcaaguuugaccucguuga

SEQ ID NO: 428478 - RNA, 19 nt, Homo sapiens
  misc_RNA (1)...(19): siRNA sense strand
cuuccaaggcugcaaguuu

SEQ ID NO: 428479 - RNA, 19 nt, Homo sapiens
  misc_RNA (1)...(19): siRNA sense strand
ugaccucguugaugacuac

SEQ ID NO: 428480 - RNA, 19 nt, Homo sapiens
  misc_RNA (1)...(19): siRNA sense strand
gaggcuaccaguauguguu

SEQ ID NO: 428481 - RNA, 19 nt, Homo sapiens
  misc_RNA (1)...(19): siRNA sense strand
uaccgaggcuaccaguaug

SEQ ID NO: 428482 - RNA, 19 nt, Homo sapiens
  misc_RNA (1)...(19): siRNA sense strand
gcucugcgcgaaccacaau

SEQ ID NO: 428483 - RNA, 19 nt, Homo sapiens
  misc_RNA (1)...(19): siRNA sense strand
caaguuugaccucguugau

SEQ ID NO: 428484 - RNA, 19 nt, Homo sapiens
  misc_RNA (1)...(19): siRNA sense strand
cugcaaguuugaccucguu

SEQ ID NO: 428485 - RNA, 19 nt, Homo sapiens
  misc_RNA (1)...(19): siRNA sense strand
gcagcagccacaacagcaa

SEQ ID NO: 428486 - RNA, 19 nt, Homo sapiens
  misc_RNA (1)...(19): siRNA sense strand
ccagggacagcaguucauu

SEQ ID NO: 428487 - RNA, 19 nt, Homo sapiens
  misc_RNA (1)...(19): siRNA sense strand
gcggagaguucuguacuua

SEQ ID NO: 428488 - RNA, 19 nt, Homo sapiens
  misc_RNA (1)...(19): siRNA sense strand
ggauguggguucccucaaa

SEQ ID NO: 428489 - RNA, 19 nt, Homo sapiens
  misc_RNA (1)...(19): siRNA sense strand
gcguuuggguggccuuuga

SEQ ID NO: 428490 - RNA, 19 nt, Homo sapiens
  misc_RNA (1)...(19): siRNA sense strand
ggagaguucuguacuuacg

SEQ ID NO: 428491 - RNA, 19 nt, Homo sapiens
  misc_RNA (1)...(19): siRNA sense strand
gauguggguucccucaaag

SEQ ID NO: 428492 - RNA, 19 nt, Homo sapiens
  misc_RNA (1)...(19): siRNA sense strand
aguuugaccucguugauga

SEQ ID NO: 428493 - RNA, 19 nt, Homo sapiens
  misc_RNA (1)...(19): siRNA sense strand
uuccaaggcugcaaguuug

SEQ ID NO: 428494 - RNA, 19 nt, Homo sapiens
  misc_RNA (1)...(19): siRNA sense strand
cuaccgaggcuaccaguau

SEQ ID NO: 428495 - RNA, 19 nt, Homo sapiens
  misc_RNA (1)...(19): siRNA sense strand
gcaaguuugaccucguuga

SEQ ID NO: 428496 - RNA, 19 nt, Homo sapiens
  misc_RNA (1)...(19): siRNA sense strand
cuuccaaggcugcaaguuu

SEQ ID NO: 428497 - RNA, 19 nt, Homo sapiens
  misc_RNA (1)...(19): siRNA sense strand
ugaccucguugaugacuac

SEQ ID NO: 428498 - RNA, 19 nt, Homo sapiens
  misc_RNA (1)...(19): siRNA sense strand
gaggcuaccaguauguguu

SEQ ID NO: 428499 - RNA, 19 nt, Homo sapiens
  misc_RNA (1)...(19): siRNA sense strand
uaccgaggcuaccaguaug

SEQ ID NO: 428500 - RNA, 19 nt, Homo sapiens
  misc_RNA (1)...(19): siRNA sense strand
gcucugcgcgaaccacaau

SEQ ID NO: 428501 - RNA, 19 nt, Homo sapiens
  misc_RNA (1)...(19): siRNA sense strand
caaguuugaccucguugau

SEQ ID NO: 428502 - RNA, 19 nt, Homo sapiens
  misc_RNA (1)...(19): siRNA sense strand
cugcaaguuugaccucguu

SEQ ID NO: 428503 - RNA, 19 nt, Homo sapiens
  misc_RNA (1)...(19): siRNA sense strand
gcagcagccacaacagcaa

SEQ ID NO: 428504 - RNA, 19 nt, Homo sapiens
  misc_RNA (1)...(19): siRNA sense strand
ccagggacagcaguucauu

SEQ ID NO: 428505 - RNA, 19 nt, Homo sapiens
  misc_RNA (1)...(19): siRNA sense strand
gcggagaguucuguacuua

SEQ ID NO: 428506 - RNA, 19 nt, Homo sapiens
  misc_RNA (1)...(19): siRNA sense strand
ggauguggguucccucaaa

SEQ ID NO: 428507 - RNA, 19 nt, Homo sapiens
  misc_RNA (1)...(19): siRNA sense strand
gcguuuggguggccuuuga

SEQ ID NO: 428508 - RNA, 19 nt, Homo sapiens
  misc_RNA (1)...(19): siRNA sense strand
ggagaguucuguacuuacg

SEQ ID NO: 428509 - RNA, 19 nt, Homo sapiens
  misc_RNA (1)...(19): siRNA sense strand
gauguggguucccucaaag

SEQ ID NO: 428510 - RNA, 19 nt, Homo sapiens
  misc_RNA (1)...(19): siRNA sense strand
aguuugaccucguugauga

SEQ ID NO: 428511 - RNA, 19 nt, Homo sapiens
  misc_RNA (1)...(19): siRNA sense strand
uuccaaggcugcaaguuug

SEQ ID NO: 428512 - RNA, 19 nt, Homo sapiens
  misc_RNA (1)...(19): siRNA sense strand
cuaccgaggcuaccaguau

SEQ ID NO: 428513 - RNA, 19 nt, Homo sapiens
  misc_RNA (1)...(19): siRNA sense strand
gcaaguuugaccucguuga

SEQ ID NO: 428514 - RNA, 19 nt, Homo sapiens
  misc_RNA (1)...(19): siRNA sense strand
cuuccaaggcugcaaguuu

SEQ ID NO: 428515 - RNA, 19 nt, Homo sapiens
  misc_RNA (1)...(19): siRNA sense strand
ugaccucguugaugacuac

SEQ ID NO: 428516 - RNA, 19 nt, Homo sapiens
  misc_RNA (1)...(19): siRNA sense strand
gaggcuaccaguauguguu

SEQ ID NO: 428517 - RNA, 19 nt, Homo sapiens
  misc_RNA (1)...(19): siRNA sense strand
uaccgaggcuaccaguaug

SEQ ID NO: 428518 - RNA, 19 nt, Homo sapiens
  misc_RNA (1)...(19): siRNA sense strand
gcucugcgcgaaccacaau

SEQ ID NO: 428519 - RNA, 19 nt, Homo sapiens
  misc_RNA (1)...(19): siRNA sense strand
caaguuugaccucguugau

SEQ ID NO: 428520 - RNA, 19 nt, Homo sapiens
  misc_RNA (1)...(19): siRNA sense strand
cugcaaguuugaccucguu

SEQ ID NO: 428521 - RNA, 19 nt, Homo sapiens
  misc_RNA (1)...(19): siRNA sense strand
gcagcagccacaacagcaa

SEQ ID NO: 428522 - RNA, 19 nt, Homo sapiens
  misc_RNA (1)...(19): siRNA sense strand
ccagggacagcaguucauu

SEQ ID NO: 428523 - RNA, 19 nt, Homo sapiens
  misc_RNA (1)...(19): siRNA sense strand
gcggagaguucuguacuua

SEQ ID NO: 428524 - RNA, 19 nt, Homo sapiens
  misc_RNA (1)...(19): siRNA sense strand
ggauguggguucccucaaa

SEQ ID NO: 428525 - RNA, 19 nt, Homo sapiens
  misc_RNA (1)...(19): siRNA sense strand
gcguuuggguggccuuuga

SEQ ID NO: 428526 - RNA, 19 nt, Homo sapiens
  misc_RNA (1)...(19): siRNA sense strand
ggagaguucuguacuuacg

SEQ ID NO: 428527 - RNA, 19 nt, Homo sapiens
  misc_RNA (1)...(19): siRNA sense strand
gauguggguucccucaaag

SEQ ID NO: 428528 - RNA, 19 nt, Homo sapiens
  misc_RNA (1)...(19): siRNA sense strand
aguuugaccucguugauga

SEQ ID NO: 428529 - RNA, 19 nt, Homo sapiens
  misc_RNA (1)...(19): siRNA sense strand
uuccaaggcugcaaguuug

SEQ ID NO: 428530 - RNA, 19 nt, Homo sapiens
  misc_RNA (1)...(19): siRNA sense strand
cuaccgaggcuaccaguau

SEQ ID NO: 428531 - RNA, 19 nt, Homo sapiens
  misc_RNA (1)...(19): siRNA sense strand
gcaaguuugaccucguuga

SEQ ID NO: 428532 - RNA, 19 nt, Homo sapiens
  misc_RNA (1)...(19): siRNA sense strand
cuuccaaggcugcaaguuu

SEQ ID NO: 428533 - RNA, 19 nt, Homo sapiens
  misc_RNA (1)...(19): siRNA sense strand
ugaccucguugaugacuac

SEQ ID NO: 428534 - RNA, 19 nt, Homo sapiens
  misc_RNA (1)...(19): siRNA sense strand
gaggcuaccaguauguguu

SEQ ID NO: 428535 - RNA, 19 nt, Homo sapiens
  misc_RNA (1)...(19): siRNA sense strand
uaccgaggcuaccaguaug

SEQ ID NO: 428536 - RNA, 19 nt, Homo sapiens
  misc_RNA (1)...(19): siRNA sense strand
gcucugcgcgaaccacaau

SEQ ID NO: 428537 - RNA, 19 nt, Homo sapiens
  misc_RNA (1)...(19): siRNA sense strand
caaguuugaccucguugau

SEQ ID NO: 428538 - RNA, 19 nt, Homo sapiens
  misc_RNA (1)...(19): siRNA sense strand
cugcaaguuugaccucguu

SEQ ID NO: 428539 - RNA, 19 nt, Homo sapiens
  misc_RNA (1)...(19): siRNA sense strand
gcagcagccacaacagcaa

SEQ ID NO: 428540 - RNA, 19 nt, Homo sapiens
  misc_RNA (1)...(19): siRNA sense strand
ccagggacagcaguucauu

SEQ ID NO: 428541 - RNA, 19 nt, Homo sapiens
  misc_RNA (1)...(19): siRNA sense strand
gaaagucgccucaaagaua

SEQ ID NO: 428542 - RNA, 19 nt, Homo sapiens
  misc_RNA (1)...(19): siRNA sense strand
gaaagaaagucgccucaaa

SEQ ID NO: 428543 - RNA, 19 nt, Homo sapiens
  misc_RNA (1)...(19): siRNA sense strand
ggacagagccugagaaguu

SEQ ID NO: 428544 - RNA, 19 nt, Homo sapiens
  misc_RNA (1)...(19): siRNA sense strand
gaaugaaacgcucagauua

SEQ ID NO: 428545 - RNA, 19 nt, Homo sapiens
  misc_RNA (1)...(19): siRNA sense strand
gaaacaaagucccauaaag

SEQ ID NO: 428546 - RNA, 19 nt, Homo sapiens
  misc_RNA (1)...(19): siRNA sense strand
gaacuuggauucucucaac

SEQ ID NO: 428547 - RNA, 19 nt, Homo sapiens
  misc_RNA (1)...(19): siRNA sense strand
caaaagauguuacccauuu

SEQ ID NO: 428548 - RNA, 19 nt, Homo sapiens
  misc_RNA (1)...(19): siRNA sense strand
ggagauauguuggugagaa

SEQ ID NO: 428549 - RNA, 19 nt, Homo sapiens
  misc_RNA (1)...(19): siRNA sense strand
guagauuucuuucaacaga

SEQ ID NO: 428550 - RNA, 19 nt, Homo sapiens
  misc_RNA (1)...(19): siRNA sense strand
gaugaagaauggaagagaa

SEQ ID NO: 428551 - RNA, 19 nt, Homo sapiens
  misc_RNA (1)...(19): siRNA sense strand
gacagagaauguaaugaaa

SEQ ID NO: 428552 - RNA, 19 nt, Homo sapiens
  misc_RNA (1)...(19): siRNA sense strand
gaagagaauacgaacauug

SEQ ID NO: 428553 - RNA, 19 nt, Homo sapiens
  misc_RNA (1)...(19): siRNA sense strand
aaagucgccucaaagauaa

SEQ ID NO: 428554 - RNA, 19 nt, Homo sapiens
  misc_RNA (1)...(19): siRNA sense strand
ugaaaucaauggaguguuc

SEQ ID NO: 428555 - RNA, 19 nt, Homo sapiens
  misc_RNA (1)...(19): siRNA sense strand
ucacaaaccagaugccuuu

SEQ ID NO: 428556 - RNA, 19 nt, Homo sapiens
  misc_RNA (1)...(19): siRNA sense strand
guacuccucuauauuuaug

SEQ ID NO: 428557 - RNA, 19 nt, Homo sapiens
  misc_RNA (1)...(19): siRNA sense strand
ggaagagaauacgaacauu

SEQ ID NO: 428558 - RNA, 19 nt, Homo sapiens
  misc_RNA (1)...(19): siRNA sense strand
ugacagagaauguaaugaa

SEQ ID NO: 428559 - RNA, 19 nt, Homo sapiens
  misc_RNA (1)...(19): siRNA sense strand
gcacuuaagagaugggauu

SEQ ID NO: 428560 - RNA, 19 nt, Homo sapiens
  misc_RNA (1)...(19): siRNA sense strand
ggaucucauuccaaacuuu

SEQ ID NO: 428561 - RNA, 19 nt, Homo sapiens
  misc_RNA (1)...(19): siRNA sense strand
ucuaugcucuucaccauga

SEQ ID NO: 428562 - RNA, 19 nt, Homo sapiens
  misc_RNA (1)...(19): siRNA sense strand
gaguagauuucuuucaaca

SEQ ID NO: 428563 - RNA, 19 nt, Homo sapiens
  misc_RNA (1)...(19): siRNA sense strand
ucgaguagauuucuuucaa

SEQ ID NO: 428564 - RNA, 19 nt, Homo sapiens
  misc_RNA (1)...(19): siRNA sense strand
ugaaugaaacgcucagauu

SEQ ID NO: 428565 - RNA, 19 nt, Homo sapiens
  misc_RNA (1)...(19): siRNA sense strand
gagaauacgaacauugcua

SEQ ID NO: 428566 - RNA, 19 nt, Homo sapiens
  misc_RNA (1)...(19): siRNA sense strand
ccacugaaauuagacaauc

SEQ ID NO: 428567 - RNA, 19 nt, Homo sapiens
  misc_RNA (1)...(19): siRNA sense strand
ggaggagauugacgcaguu

SEQ ID NO: 428568 - RNA, 19 nt, Homo sapiens
  misc_RNA (1)...(19): siRNA sense strand
gaauggaagagaauacgaa

SEQ ID NO: 428569 - RNA, 19 nt, Homo sapiens
  misc_RNA (1)...(19): siRNA sense strand
caccuacgaugcccuggua

SEQ ID NO: 428570 - RNA, 19 nt, Homo sapiens
  misc_RNA (1)...(19): siRNA sense strand
gagaacagcaaguccauca

SEQ ID NO: 428571 - RNA, 19 nt, Homo sapiens
  misc_RNA (1)...(19): siRNA sense strand
gaagaugaagaauggaaga

SEQ ID NO: 428572 - RNA, 19 nt, Homo sapiens
  misc_RNA (1)...(19): siRNA sense strand
cuaaauaucgguuuguuuc

SEQ ID NO: 428573 - RNA, 19 nt, Homo sapiens
  misc_RNA (1)...(19): siRNA sense strand
ggagugaacuuggauucuc

SEQ ID NO: 428574 - RNA, 19 nt, Homo sapiens
  misc_RNA (1)...(19): siRNA sense strand
ccauaaagcucugucugau

SEQ ID NO: 428575 - RNA, 19 nt, Homo sapiens
  misc_RNA (1)...(19): siRNA sense strand
gaugaucgacucccagaau

SEQ ID NO: 428576 - RNA, 19 nt, Homo sapiens
  misc_RNA (1)...(19): siRNA sense strand
caaaccagaugccuuuagg

SEQ ID NO: 428577 - RNA, 19 nt, Homo sapiens
  misc_RNA (1)...(19): siRNA sense strand
gacaaucuaccaauucuuc

SEQ ID NO: 428578 - RNA, 19 nt, Homo sapiens
  misc_RNA (1)...(19): siRNA sense strand
guuacucugucuucacaaa

SEQ ID NO: 428579 - RNA, 19 nt, Homo sapiens
  misc_RNA (1)...(19): siRNA sense strand
gacagagccugagaaguuc

SEQ ID NO: 428580 - RNA, 19 nt, Homo sapiens
  misc_RNA (1)...(19): siRNA sense strand
ggagauugacgcaguuuua

SEQ ID NO: 428581 - RNA, 19 nt, Homo sapiens
  misc_RNA (1)...(19): siRNA sense strand
auaaagcucugucugaucu

SEQ ID NO: 428582 - RNA, 19 nt, Homo sapiens
  misc_RNA (1)...(19): siRNA sense strand
ggaaacauggguucuugug

SEQ ID NO: 428583 - RNA, 19 nt, Homo sapiens
  misc_RNA (1)...(19): siRNA sense strand
gaauguuacucugucuuca

SEQ ID NO: 428584 - RNA, 19 nt, Homo sapiens
  misc_RNA (1)...(19): siRNA sense strand
ccagucaauuaucaucauu

SEQ ID NO: 428585 - RNA, 19 nt, Homo sapiens
  misc_RNA (1)...(19): siRNA sense strand
gcaucgaguagauuucuuu

SEQ ID NO: 428586 - RNA, 19 nt, Homo sapiens
  misc_RNA (1)...(19): siRNA sense strand
ccacaagaucccuuucuga

SEQ ID NO: 428587 - RNA, 19 nt, Homo sapiens
  misc_RNA (1)...(19): siRNA sense strand
gcacauuauuuggagugaa

SEQ ID NO: 428588 - RNA, 19 nt, Homo sapiens
  misc_RNA (1)...(19): siRNA sense strand
gaacagcaaguccaucaac

SEQ ID NO: 428589 - RNA, 19 nt, Homo sapiens
  misc_RNA (1)...(19): siRNA sense strand
aaagaaacaaagucccaua

SEQ ID NO: 428590 - RNA, 19 nt, Homo sapiens
  misc_RNA (1)...(19): siRNA sense strand
ucccagaauuccaaagaaa

SEQ ID NO: 428591 - RNA, 19 nt, Homo sapiens
  misc_RNA (1)...(19): siRNA sense strand
cacaagaucccuuucugaa

SEQ ID NO: 428592 - RNA, 19 nt, Homo sapiens
  misc_RNA (1)...(19): siRNA sense strand
gagauauguuggugagaag

SEQ ID NO: 428593 - RNA, 19 nt, Homo sapiens
  misc_RNA (1)...(19): siRNA sense strand
augaaacgcucagauuauu

SEQ ID NO: 428594 - RNA, 19 nt, Homo sapiens
  misc_RNA (1)...(19): siRNA sense strand
ugucugaucuggagcuugu

SEQ ID NO: 428595 - RNA, 19 nt, Homo sapiens
  misc_RNA (1)...(19): siRNA sense strand
ugguacuccucuauauuua

SEQ ID NO: 428596 - RNA, 19 nt, Homo sapiens
  misc_RNA (1)...(19): siRNA sense strand
ucucaacaauccacaagau

SEQ ID NO: 428597 - RNA, 19 nt, Homo sapiens
  misc_RNA (1)...(19): siRNA sense strand
guucauucccaaaggguua

SEQ ID NO: 428598 - RNA, 19 nt, Homo sapiens
  misc_RNA (1)...(19): siRNA sense strand
ccaguuguuaguagaguua

SEQ ID NO: 428599 - RNA, 19 nt, Homo sapiens
  misc_RNA (1)...(19): siRNA sense strand
gaagaauggaagagaauac

SEQ ID NO: 428600 - RNA, 19 nt, Homo sapiens
  misc_RNA (1)...(19): siRNA sense strand
gcagugaugguuccaaucu

SEQ ID NO: 428601 - RNA, 19 nt, Homo sapiens
  misc_RNA (1)...(19): siRNA sense strand
agaaacaaagucccauaaa

SEQ ID NO: 428602 - RNA, 19 nt, Homo sapiens
  misc_RNA (1)...(19): siRNA sense strand
aaacaaagucccauaaagc

SEQ ID NO: 428603 - RNA, 19 nt, Homo sapiens
  misc_RNA (1)...(19): siRNA sense strand
ugaaagaauguuacucugu

SEQ ID NO: 428604 - RNA, 19 nt, Homo sapiens
  misc_RNA (1)...(19): siRNA sense strand
cuuaagagaugggauuaca

SEQ ID NO: 428605 - RNA, 19 nt, Homo sapiens
  misc_RNA (1)...(19): siRNA sense strand
uagcagugaugguuccaau

SEQ ID NO: 428606 - RNA, 19 nt, Homo sapiens
  misc_RNA (1)...(19): siRNA sense strand
ccaaaggguuagcagugau

SEQ ID NO: 428607 - RNA, 19 nt, Homo sapiens
  misc_RNA (1)...(19): siRNA sense strand
gcucagauuauucccaguu

SEQ ID NO: 428608 - RNA, 19 nt, Homo sapiens
  misc_RNA (1)...(19): siRNA sense strand
caccauggauguaaucacu

SEQ ID NO: 428609 - RNA, 19 nt, Homo sapiens
  misc_RNA (1)...(19): siRNA sense strand
cugguacuccucuauauuu

SEQ ID NO: 428610 - RNA, 19 nt, Homo sapiens
  misc_RNA (1)...(19): siRNA sense strand
uaagagaugggauuacaag

SEQ ID NO: 428611 - RNA, 19 nt, Homo sapiens
  misc_RNA (1)...(19): siRNA sense strand
cccaaaggguuagcaguga

SEQ ID NO: 428612 - RNA, 19 nt, Homo sapiens
  misc_RNA (1)...(19): siRNA sense strand
aagaaacaaagucccauaa

SEQ ID NO: 428613 - RNA, 19 nt, Homo sapiens
  misc_RNA (1)...(19): siRNA sense strand
gaaaggaugaaagaaaguc

SEQ ID NO: 428614 - RNA, 19 nt, Homo sapiens
  misc_RNA (1)...(19): siRNA sense strand
uugaaaggaugaaagaaag

SEQ ID NO: 428615 - RNA, 19 nt, Homo sapiens
  misc_RNA (1)...(19): siRNA sense strand
ccaauguggagauauguug

SEQ ID NO: 428616 - RNA, 19 nt, Homo sapiens
  misc_RNA (1)...(19): siRNA sense strand
aaugaaacgcucagauuau

SEQ ID NO: 428617 - RNA, 19 nt, Homo sapiens
  misc_RNA (1)...(19): siRNA sense strand
uggaguaccuugacauggu

SEQ ID NO: 428618 - RNA, 19 nt, Homo sapiens
  misc_RNA (1)...(19): siRNA sense strand
aagaaagucgccucaaaga

SEQ ID NO: 428619 - RNA, 19 nt, Homo sapiens
  misc_RNA (1)...(19): siRNA sense strand
aaagaaagucgccucaaag

SEQ ID NO: 428620 - RNA, 19 nt, Homo sapiens
  misc_RNA (1)...(19): siRNA sense strand
gagugaacuuggauucucu

SEQ ID NO: 428621 - RNA, 19 nt, Homo sapiens
  misc_RNA (1)...(19): siRNA sense strand
gguccaaugggauuucuga

SEQ ID NO: 428622 - RNA, 19 nt, Homo sapiens
  misc_RNA (1)...(19): siRNA sense strand
agugaugguuccaaucuau

SEQ ID NO: 428623 - RNA, 19 nt, Homo sapiens
  misc_RNA (1)...(19): siRNA sense strand
uuacgagagucugcaagaa

SEQ ID NO: 428624 - RNA, 19 nt, Homo sapiens
  misc_RNA (1)...(19): siRNA sense strand
gacaugguggugaaugaaa

SEQ ID NO: 428625 - RNA, 19 nt, Homo sapiens
  misc_RNA (1)...(19): siRNA sense strand
gauggaguaccuugacaug

SEQ ID NO: 428626 - RNA, 19 nt, Homo sapiens
  misc_RNA (1)...(19): siRNA sense strand
gaaacugcaggaggagauu

SEQ ID NO: 428627 - RNA, 19 nt, Homo sapiens
  misc_RNA (1)...(19): siRNA sense strand
ccauugaaaggaugaaaga

SEQ ID NO: 428628 - RNA, 19 nt, Homo sapiens
  misc_RNA (1)...(19): siRNA sense strand
ugaagaauggaagagaaua

SEQ ID NO: 428629 - RNA, 19 nt, Homo sapiens
  misc_RNA (1)...(19): siRNA sense strand
gccugguacuccucuauau

SEQ ID NO: 428630 - RNA, 19 nt, Homo sapiens
  misc_RNA (1)...(19): siRNA sense strand
cagauuauucccaguuguu

SEQ ID NO: 428631 - RNA, 19 nt, Homo sapiens
  misc_RNA (1)...(19): siRNA sense strand
ucacucuuuccauuucuua

SEQ ID NO: 428632 - RNA, 19 nt, Homo sapiens
  misc_RNA (1)...(19): siRNA sense strand
guuccaaucuaugcucuuc

SEQ ID NO: 428633 - RNA, 19 nt, Homo sapiens
  misc_RNA (1)...(19): siRNA sense strand
uuaagaagcugggaauucc

SEQ ID NO: 428634 - RNA, 19 nt, Homo sapiens
  misc_RNA (1)...(19): siRNA sense strand
cagugaugguuccaaucua

SEQ ID NO: 428635 - RNA, 19 nt, Homo sapiens
  misc_RNA (1)...(19): siRNA sense strand
cuuguggcccagucaauua

SEQ ID NO: 428636 - RNA, 19 nt, Homo sapiens
  misc_RNA (1)...(19): siRNA sense strand
agaauacgaacauugcuau

SEQ ID NO: 428637 - RNA, 19 nt, Homo sapiens
  misc_RNA (1)...(19): siRNA sense strand
aaucuaugcucuucaccau

SEQ ID NO: 428638 - RNA, 19 nt, Homo sapiens
  misc_RNA (1)...(19): siRNA sense strand
uacgagagucugcaagaaa

SEQ ID NO: 428639 - RNA, 19 nt, Homo sapiens
  misc_RNA (1)...(19): siRNA sense strand
ccagaauuccaaagaaaca

SEQ ID NO: 428640 - RNA, 19 nt, Homo sapiens
  misc_RNA (1)...(19): siRNA sense strand
ccucaaagauaaacaaaag

SEQ ID NO: 428641 - RNA, 19 nt, Homo sapiens
  misc_RNA (1)...(19): siRNA sense strand
gaaagucgccucaaagaua

SEQ ID NO: 428642 - RNA, 19 nt, Homo sapiens
  misc_RNA (1)...(19): siRNA sense strand
gaaagaaagucgccucaaa

SEQ ID NO: 428643 - RNA, 19 nt, Homo sapiens
  misc_RNA (1)...(19): siRNA sense strand
ggacagagccugagaaguu

SEQ ID NO: 428644 - RNA, 19 nt, Homo sapiens
  misc_RNA (1)...(19): siRNA sense strand
gaaugaaacgcucagauua

SEQ ID NO: 428645 - RNA, 19 nt, Homo sapiens
  misc_RNA (1)...(19): siRNA sense strand
gaaacaaagucccauaaag

SEQ ID NO: 428646 - RNA, 19 nt, Homo sapiens
  misc_RNA (1)...(19): siRNA sense strand
gaacuuggauucucucaac

SEQ ID NO: 428647 - RNA, 19 nt, Homo sapiens
  misc_RNA (1)...(19): siRNA sense strand
caaaagauguuacccauuu

SEQ ID NO: 428648 - RNA, 19 nt, Homo sapiens
  misc_RNA (1)...(19): siRNA sense strand
ggagauauguuggugagaa

SEQ ID NO: 428649 - RNA, 19 nt, Homo sapiens
  misc_RNA (1)...(19): siRNA sense strand
guagauuucuuucaacaga

SEQ ID NO: 428650 - RNA, 19 nt, Homo sapiens
  misc_RNA (1)...(19): siRNA sense strand
gaugaagaauggaagagaa

SEQ ID NO: 428651 - RNA, 19 nt, Homo sapiens
  misc_RNA (1)...(19): siRNA sense strand
gacagagaauguaaugaaa

SEQ ID NO: 428652 - RNA, 19 nt, Homo sapiens
  misc_RNA (1)...(19): siRNA sense strand
gaagagaauacgaacauug

SEQ ID NO: 428653 - RNA, 19 nt, Homo sapiens
  misc_RNA (1)...(19): siRNA sense strand
aaagucgccucaaagauaa

SEQ ID NO: 428654 - RNA, 19 nt, Homo sapiens
  misc_RNA (1)...(19): siRNA sense strand
ugaaaucaauggaguguuc

SEQ ID NO: 428655 - RNA, 19 nt, Homo sapiens
  misc_RNA (1)...(19): siRNA sense strand
ucacaaaccagaugccuuu

SEQ ID NO: 428656 - RNA, 19 nt, Homo sapiens
  misc_RNA (1)...(19): siRNA sense strand
guacuccucuauauuuaug

SEQ ID NO: 428657 - RNA, 19 nt, Homo sapiens
  misc_RNA (1)...(19): siRNA sense strand
ggaagagaauacgaacauu

SEQ ID NO: 428658 - RNA, 19 nt, Homo sapiens
  misc_RNA (1)...(19): siRNA sense strand
ugacagagaauguaaugaa

SEQ ID NO: 428659 - RNA, 19 nt, Homo sapiens
  misc_RNA (1)...(19): siRNA sense strand
gcacuuaagagaugggauu

SEQ ID NO: 428660 - RNA, 19 nt, Homo sapiens
  misc_RNA (1)...(19): siRNA sense strand
ggaucucauuccaaacuuu

SEQ ID NO: 428661 - RNA, 19 nt, Homo sapiens
  misc_RNA (1)...(19): siRNA sense strand
ucuaugcucuucaccauga

SEQ ID NO: 428662 - RNA, 19 nt, Homo sapiens
  misc_RNA (1)...(19): siRNA sense strand
gaguagauuucuuucaaca

SEQ ID NO: 428663 - RNA, 19 nt, Homo sapiens
  misc_RNA (1)...(19): siRNA sense strand
ucgaguagauuucuuucaa

SEQ ID NO: 428664 - RNA, 19 nt, Homo sapiens
  misc_RNA (1)...(19): siRNA sense strand
ugaaugaaacgcucagauu

SEQ ID NO: 428665 - RNA, 19 nt, Homo sapiens
  misc_RNA (1)...(19): siRNA sense strand
gagaauacgaacauugcua

SEQ ID NO: 428666 - RNA, 19 nt, Homo sapiens
  misc_RNA (1)...(19): siRNA sense strand
ccacugaaauuagacaauc

SEQ ID NO: 428667 - RNA, 19 nt, Homo sapiens
  misc_RNA (1)...(19): siRNA sense strand
ggaggagauugacgcaguu

SEQ ID NO: 428668 - RNA, 19 nt, Homo sapiens
  misc_RNA (1)...(19): siRNA sense strand
gaauggaagagaauacgaa

SEQ ID NO: 428669 - RNA, 19 nt, Homo sapiens
  misc_RNA (1)...(19): siRNA sense strand
caccuacgaugcccuggua

SEQ ID NO: 428670 - RNA, 19 nt, Homo sapiens
  misc_RNA (1)...(19): siRNA sense strand
gagaacagcaaguccauca

SEQ ID NO: 428671 - RNA, 19 nt, Homo sapiens
  misc_RNA (1)...(19): siRNA sense strand
gaagaugaagaauggaaga

SEQ ID NO: 428672 - RNA, 19 nt, Homo sapiens
  misc_RNA (1)...(19): siRNA sense strand
cuaaauaucgguuuguuuc

SEQ ID NO: 428673 - RNA, 19 nt, Homo sapiens
  misc_RNA (1)...(19): siRNA sense strand
ggagugaacuuggauucuc

SEQ ID NO: 428674 - RNA, 19 nt, Homo sapiens
  misc_RNA (1)...(19): siRNA sense strand
ccauaaagcucugucugau

SEQ ID NO: 428675 - RNA, 19 nt, Homo sapiens
  misc_RNA (1)...(19): siRNA sense strand
gaugaucgacucccagaau

SEQ ID NO: 428676 - RNA, 19 nt, Homo sapiens
  misc_RNA (1)...(19): siRNA sense strand
caaaccagaugccuuuagg

SEQ ID NO: 428677 - RNA, 19 nt, Homo sapiens
  misc_RNA (1)...(19): siRNA sense strand
gacaaucuaccaauucuuc

SEQ ID NO: 428678 - RNA, 19 nt, Homo sapiens
  misc_RNA (1)...(19): siRNA sense strand
guuacucugucuucacaaa

SEQ ID NO: 428679 - RNA, 19 nt, Homo sapiens
  misc_RNA (1)...(19): siRNA sense strand
gacagagccugagaaguuc

SEQ ID NO: 428680 - RNA, 19 nt, Homo sapiens
  misc_RNA (1)...(19): siRNA sense strand
ggagauugacgcaguuuua

SEQ ID NO: 428681 - RNA, 19 nt, Homo sapiens
  misc_RNA (1)...(19): siRNA sense strand
auaaagcucugucugaucu

SEQ ID NO: 428682 - RNA, 19 nt, Homo sapiens
  misc_RNA (1)...(19): siRNA sense strand
ggaaacauggguucuugug

SEQ ID NO: 428683 - RNA, 19 nt, Homo sapiens
  misc_RNA (1)...(19): siRNA sense strand
gaauguuacucugucuuca

SEQ ID NO: 428684 - RNA, 19 nt, Homo sapiens
  misc_RNA (1)...(19): siRNA sense strand
ccagucaauuaucaucauu

SEQ ID NO: 428685 - RNA, 19 nt, Homo sapiens
  misc_RNA (1)...(19): siRNA sense strand
gcaucgaguagauuucuuu

SEQ ID NO: 428686 - RNA, 19 nt, Homo sapiens
  misc_RNA (1)...(19): siRNA sense strand
ccacaagaucccuuucuga

SEQ ID NO: 428687 - RNA, 19 nt, Homo sapiens
  misc_RNA (1)...(19): siRNA sense strand
gcacauuauuuggagugaa

SEQ ID NO: 428688 - RNA, 19 nt, Homo sapiens
  misc_RNA (1)...(19): siRNA sense strand
gaacagcaaguccaucaac

SEQ ID NO: 428689 - RNA, 19 nt, Homo sapiens
  misc_RNA (1)...(19): siRNA sense strand
aaagaaacaaagucccaua

SEQ ID NO: 428690 - RNA, 19 nt, Homo sapiens
  misc_RNA (1)...(19): siRNA sense strand
ucccagaauuccaaagaaa

SEQ ID NO: 428691 - RNA, 19 nt, Homo sapiens
  misc_RNA (1)...(19): siRNA sense strand
cacaagaucccuuucugaa

SEQ ID NO: 428692 - RNA, 19 nt, Homo sapiens
  misc_RNA (1)...(19): siRNA sense strand
gagauauguuggugagaag

SEQ ID NO: 428693 - RNA, 19 nt, Homo sapiens
  misc_RNA (1)...(19): siRNA sense strand
augaaacgcucagauuauu

SEQ ID NO: 428694 - RNA, 19 nt, Homo sapiens
  misc_RNA (1)...(19): siRNA sense strand
ugucugaucuggagcuugu

SEQ ID NO: 428695 - RNA, 19 nt, Homo sapiens
  misc_RNA (1)...(19): siRNA sense strand
ugguacuccucuauauuua

SEQ ID NO: 428696 - RNA, 19 nt, Homo sapiens
  misc_RNA (1)...(19): siRNA sense strand
ucucaacaauccacaagau

SEQ ID NO: 428697 - RNA, 19 nt, Homo sapiens
  misc_RNA (1)...(19): siRNA sense strand
guucauucccaaaggguua

SEQ ID NO: 428698 - RNA, 19 nt, Homo sapiens
  misc_RNA (1)...(19): siRNA sense strand
ccaguuguuaguagaguua

SEQ ID NO: 428699 - RNA, 19 nt, Homo sapiens
  misc_RNA (1)...(19): siRNA sense strand
gaagaauggaagagaauac

SEQ ID NO: 428700 - RNA, 19 nt, Homo sapiens
  misc_RNA (1)...(19): siRNA sense strand
gcagugaugguuccaaucu

SEQ ID NO: 428701 - RNA, 19 nt, Homo sapiens
  misc_RNA (1)...(19): siRNA sense strand
agaaacaaagucccauaaa

SEQ ID NO: 428702 - RNA, 19 nt, Homo sapiens
  misc_RNA (1)...(19): siRNA sense strand
aaacaaagucccauaaagc

SEQ ID NO: 428703 - RNA, 19 nt, Homo sapiens
  misc_RNA (1)...(19): siRNA sense strand
ugaaagaauguuacucugu

SEQ ID NO: 428704 - RNA, 19 nt, Homo sapiens
  misc_RNA (1)...(19): siRNA sense strand
cuuaagagaugggauuaca

SEQ ID NO: 428705 - RNA, 19 nt, Homo sapiens
  misc_RNA (1)...(19): siRNA sense strand
uagcagugaugguuccaau

SEQ ID NO: 428706 - RNA, 19 nt, Homo sapiens
  misc_RNA (1)...(19): siRNA sense strand
ccaaaggguuagcagugau

SEQ ID NO: 428707 - RNA, 19 nt, Homo sapiens
  misc_RNA (1)...(19): siRNA sense strand
gcucagauuauucccaguu

SEQ ID NO: 428708 - RNA, 19 nt, Homo sapiens
  misc_RNA (1)...(19): siRNA sense strand
caccauggauguaaucacu

SEQ ID NO: 428709 - RNA, 19 nt, Homo sapiens
  misc_RNA (1)...(19): siRNA sense strand
cugguacuccucuauauuu

SEQ ID NO: 428710 - RNA, 19 nt, Homo sapiens
  misc_RNA (1)...(19): siRNA sense strand
uaagagaugggauuacaag

SEQ ID NO: 428711 - RNA, 19 nt, Homo sapiens
  misc_RNA (1)...(19): siRNA sense strand
cccaaaggguuagcaguga

SEQ ID NO: 428712 - RNA, 19 nt, Homo sapiens
  misc_RNA (1)...(19): siRNA sense strand
aagaaacaaagucccauaa

SEQ ID NO: 428713 - RNA, 19 nt, Homo sapiens
  misc_RNA (1)...(19): siRNA sense strand
gaaaggaugaaagaaaguc

SEQ ID NO: 428714 - RNA, 19 nt, Homo sapiens
  misc_RNA (1)...(19): siRNA sense strand
uugaaaggaugaaagaaag

SEQ ID NO: 428715 - RNA, 19 nt, Homo sapiens
  misc_RNA (1)...(19): siRNA sense strand
ccaauguggagauauguug

SEQ ID NO: 428716 - RNA, 19 nt, Homo sapiens
  misc_RNA (1)...(19): siRNA sense strand
aaugaaacgcucagauuau

SEQ ID NO: 428717 - RNA, 19 nt, Homo sapiens
  misc_RNA (1)...(19): siRNA sense strand
uggaguaccuugacauggu

SEQ ID NO: 428718 - RNA, 19 nt, Homo sapiens
  misc_RNA (1)...(19): siRNA sense strand
aagaaagucgccucaaaga

SEQ ID NO: 428719 - RNA, 19 nt, Homo sapiens
  misc_RNA (1)...(19): siRNA sense strand
aaagaaagucgccucaaag

SEQ ID NO: 428720 - RNA, 19 nt, Homo sapiens
  misc_RNA (1)...(19): siRNA sense strand
gagugaacuuggauucucu

SEQ ID NO: 428721 - RNA, 19 nt, Homo sapiens
  misc_RNA (1)...(19): siRNA sense strand
gguccaaugggauuucuga

SEQ ID NO: 428722 - RNA, 19 nt, Homo sapiens
  misc_RNA (1)...(19): siRNA sense strand
agugaugguuccaaucuau

SEQ ID NO: 428723 - RNA, 19 nt, Homo sapiens
  misc_RNA (1)...(19): siRNA sense strand
uuacgagagucugcaagaa

SEQ ID NO: 428724 - RNA, 19 nt, Homo sapiens
  misc_RNA (1)...(19): siRNA sense strand
gacaugguggugaaugaaa

SEQ ID NO: 428725 - RNA, 19 nt, Homo sapiens
  misc_RNA (1)...(19): siRNA sense strand
gauggaguaccuugacaug

SEQ ID NO: 428726 - RNA, 19 nt, Homo sapiens
  misc_RNA (1)...(19): siRNA sense strand
gaaacugcaggaggagauu

SEQ ID NO: 428727 - RNA, 19 nt, Homo sapiens
  misc_RNA (1)...(19): siRNA sense strand
ccauugaaaggaugaaaga

SEQ ID NO: 428728 - RNA, 19 nt, Homo sapiens
  misc_RNA (1)...(19): siRNA sense strand
ugaagaauggaagagaaua

SEQ ID NO: 428729 - RNA, 19 nt, Homo sapiens
  misc_RNA (1)...(19): siRNA sense strand
gccugguacuccucuauau

SEQ ID NO: 428730 - RNA, 19 nt, Homo sapiens
  misc_RNA (1)...(19): siRNA sense strand
cagauuauucccaguuguu

SEQ ID NO: 428731 - RNA, 19 nt, Homo sapiens
  misc_RNA (1)...(19): siRNA sense strand
ucacucuuuccauuucuua

SEQ ID NO: 428732 - RNA, 19 nt, Homo sapiens
  misc_RNA (1)...(19): siRNA sense strand
guuccaaucuaugcucuuc

SEQ ID NO: 428733 - RNA, 19 nt, Homo sapiens
  misc_RNA (1)...(19): siRNA sense strand
uuaagaagcugggaauucc

SEQ ID NO: 428734 - RNA, 19 nt, Homo sapiens
  misc_RNA (1)...(19): siRNA sense strand
cagugaugguuccaaucua

SEQ ID NO: 428735 - RNA, 19 nt, Homo sapiens
  misc_RNA (1)...(19): siRNA sense strand
cuuguggcccagucaauua

SEQ ID NO: 428736 - RNA, 19 nt, Homo sapiens
  misc_RNA (1)...(19): siRNA sense strand
agaauacgaacauugcuau

SEQ ID NO: 428737 - RNA, 19 nt, Homo sapiens
  misc_RNA (1)...(19): siRNA sense strand
aaucuaugcucuucaccau

SEQ ID NO: 428738 - RNA, 19 nt, Homo sapiens
  misc_RNA (1)...(19): siRNA sense strand
uacgagagucugcaagaaa

SEQ ID NO: 428739 - RNA, 19 nt, Homo sapiens
  misc_RNA (1)...(19): siRNA sense strand
ccagaauuccaaagaaaca

SEQ ID NO: 428740 - RNA, 19 nt, Homo sapiens
  misc_RNA (1)...(19): siRNA sense strand
ccucaaagauaaacaaaag

SEQ ID NO: 428741 - RNA, 19 nt, Homo sapiens
  misc_RNA (1)...(19): siRNA sense strand
gaaagucgccucaaagaua

SEQ ID NO: 428742 - RNA, 19 nt, Homo sapiens
  misc_RNA (1)...(19): siRNA sense strand
gaaagaaagucgccucaaa

SEQ ID NO: 428743 - RNA, 19 nt, Homo sapiens
  misc_RNA (1)...(19): siRNA sense strand
ggacagagccugagaaguu

SEQ ID NO: 428744 - RNA, 19 nt, Homo sapiens
  misc_RNA (1)...(19): siRNA sense strand
gaaugaaacgcucagauua

SEQ ID NO: 428745 - RNA, 19 nt, Homo sapiens
  misc_RNA (1)...(19): siRNA sense strand
gaaacaaagucccauaaag

SEQ ID NO: 428746 - RNA, 19 nt, Homo sapiens
  misc_RNA (1)...(19): siRNA sense strand
gaacuuggauucucucaac

SEQ ID NO: 428747 - RNA, 19 nt, Homo sapiens
  misc_RNA (1)...(19): siRNA sense strand
caaaagauguuacccauuu

SEQ ID NO: 428748 - RNA, 19 nt, Homo sapiens
  misc_RNA (1)...(19): siRNA sense strand
ggagauauguuggugagaa

SEQ ID NO: 428749 - RNA, 19 nt, Homo sapiens
  misc_RNA (1)...(19): siRNA sense strand
guagauuucuuucaacaga

SEQ ID NO: 428750 - RNA, 19 nt, Homo sapiens
  misc_RNA (1)...(19): siRNA sense strand
gaugaagaauggaagagaa

SEQ ID NO: 428751 - RNA, 19 nt, Homo sapiens
  misc_RNA (1)...(19): siRNA sense strand
gacagagaauguaaugaaa

SEQ ID NO: 428752 - RNA, 19 nt, Homo sapiens
  misc_RNA (1)...(19): siRNA sense strand
gaagagaauacgaacauug

SEQ ID NO: 428753 - RNA, 19 nt, Homo sapiens
  misc_RNA (1)...(19): siRNA sense strand
aaagucgccucaaagauaa

SEQ ID NO: 428754 - RNA, 19 nt, Homo sapiens
  misc_RNA (1)...(19): siRNA sense strand
ugaaaucaauggaguguuc

SEQ ID NO: 428755 - RNA, 19 nt, Homo sapiens
  misc_RNA (1)...(19): siRNA sense strand
ucacaaaccagaugccuuu

SEQ ID NO: 428756 - RNA, 19 nt, Homo sapiens
  misc_RNA (1)...(19): siRNA sense strand
guacuccucuauauuuaug

SEQ ID NO: 428757 - RNA, 19 nt, Homo sapiens
  misc_RNA (1)...(19): siRNA sense strand
ggaagagaauacgaacauu

SEQ ID NO: 428758 - RNA, 19 nt, Homo sapiens
  misc_RNA (1)...(19): siRNA sense strand
ugacagagaauguaaugaa

SEQ ID NO: 428759 - RNA, 19 nt, Homo sapiens
  misc_RNA (1)...(19): siRNA sense strand
ggaucucauuccaaacuuu

SEQ ID NO: 428760 - RNA, 19 nt, Homo sapiens
  misc_RNA (1)...(19): siRNA sense strand
ucuaugcucuucaccauga

SEQ ID NO: 428761 - RNA, 19 nt, Homo sapiens
  misc_RNA (1)...(19): siRNA sense strand
gaguagauuucuuucaaca

SEQ ID NO: 428762 - RNA, 19 nt, Homo sapiens
  misc_RNA (1)...(19): siRNA sense strand
ucgaguagauuucuuucaa

SEQ ID NO: 428763 - RNA, 19 nt, Homo sapiens
  misc_RNA (1)...(19): siRNA sense strand
ugaaugaaacgcucagauu

SEQ ID NO: 428764 - RNA, 19 nt, Homo sapiens
  misc_RNA (1)...(19): siRNA sense strand
gagaauacgaacauugcua

SEQ ID NO: 428765 - RNA, 19 nt, Homo sapiens
  misc_RNA (1)...(19): siRNA sense strand
ggaggagauugacgcaguu

SEQ ID NO: 428766 - RNA, 19 nt, Homo sapiens
  misc_RNA (1)...(19): siRNA sense strand
gaauggaagagaauacgaa

SEQ ID NO: 428767 - RNA, 19 nt, Homo sapiens
  misc_RNA (1)...(19): siRNA sense strand
caccuacgaugcccuggua

SEQ ID NO: 428768 - RNA, 19 nt, Homo sapiens
  misc_RNA (1)...(19): siRNA sense strand
gagaacagcaaguccauca

SEQ ID NO: 428769 - RNA, 19 nt, Homo sapiens
  misc_RNA (1)...(19): siRNA sense strand
gaagaugaagaauggaaga

SEQ ID NO: 428770 - RNA, 19 nt, Homo sapiens
  misc_RNA (1)...(19): siRNA sense strand
cuaaauaucgguuuguuuc

SEQ ID NO: 428771 - RNA, 19 nt, Homo sapiens
  misc_RNA (1)...(19): siRNA sense strand
ggagugaacuuggauucuc

SEQ ID NO: 428772 - RNA, 19 nt, Homo sapiens
  misc_RNA (1)...(19): siRNA sense strand
ccauaaagcucugucugau

SEQ ID NO: 428773 - RNA, 19 nt, Homo sapiens
  misc_RNA (1)...(19): siRNA sense strand
gaugaucgacucccagaau

SEQ ID NO: 428774 - RNA, 19 nt, Homo sapiens
  misc_RNA (1)...(19): siRNA sense strand
caaaccagaugccuuuagg

SEQ ID NO: 428775 - RNA, 19 nt, Homo sapiens
  misc_RNA (1)...(19): siRNA sense strand
guuacucugucuucacaaa

SEQ ID NO: 428776 - RNA, 19 nt, Homo sapiens
  misc_RNA (1)...(19): siRNA sense strand
gacagagccugagaaguuc

SEQ ID NO: 428777 - RNA, 19 nt, Homo sapiens
  misc_RNA (1)...(19): siRNA sense strand
ggagauugacgcaguuuua

SEQ ID NO: 428778 - RNA, 19 nt, Homo sapiens
  misc_RNA (1)...(19): siRNA sense strand
auaaagcucugucugaucu

SEQ ID NO: 428779 - RNA, 19 nt, Homo sapiens
  misc_RNA (1)...(19): siRNA sense strand
ggaaacauggguucuugug

SEQ ID NO: 428780 - RNA, 19 nt, Homo sapiens
  misc_RNA (1)...(19): siRNA sense strand
gaauguuacucugucuuca

SEQ ID NO: 428781 - RNA, 19 nt, Homo sapiens
  misc_RNA (1)...(19): siRNA sense strand
ccagucaauuaucaucauu

SEQ ID NO: 428782 - RNA, 19 nt, Homo sapiens
  misc_RNA (1)...(19): siRNA sense strand
gcaucgaguagauuucuuu

SEQ ID NO: 428783 - RNA, 19 nt, Homo sapiens
  misc_RNA (1)...(19): siRNA sense strand
ccacaagaucccuuucuga

SEQ ID NO: 428784 - RNA, 19 nt, Homo sapiens
  misc_RNA (1)...(19): siRNA sense strand
gcacauuauuuggagugaa

SEQ ID NO: 428785 - RNA, 19 nt, Homo sapiens
  misc_RNA (1)...(19): siRNA sense strand
gaacagcaaguccaucaac

SEQ ID NO: 428786 - RNA, 19 nt, Homo sapiens
  misc_RNA (1)...(19): siRNA sense strand
aaagaaacaaagucccaua

SEQ ID NO: 428787 - RNA, 19 nt, Homo sapiens
  misc_RNA (1)...(19): siRNA sense strand
ucccagaauuccaaagaaa

SEQ ID NO: 428788 - RNA, 19 nt, Homo sapiens
  misc_RNA (1)...(19): siRNA sense strand
cacaagaucccuuucugaa

SEQ ID NO: 428789 - RNA, 19 nt, Homo sapiens
  misc_RNA (1)...(19): siRNA sense strand
gagauauguuggugagaag

SEQ ID NO: 428790 - RNA, 19 nt, Homo sapiens
  misc_RNA (1)...(19): siRNA sense strand
augaaacgcucagauuauu

SEQ ID NO: 428791 - RNA, 19 nt, Homo sapiens
  misc_RNA (1)...(19): siRNA sense strand
ugucugaucuggagcuugu

SEQ ID NO: 428792 - RNA, 19 nt, Homo sapiens
  misc_RNA (1)...(19): siRNA sense strand
ugguacuccucuauauuua

SEQ ID NO: 428793 - RNA, 19 nt, Homo sapiens
  misc_RNA (1)...(19): siRNA sense strand
ucucaacaauccacaagau

SEQ ID NO: 428794 - RNA, 19 nt, Homo sapiens
  misc_RNA (1)...(19): siRNA sense strand
guucauucccaaaggguua

SEQ ID NO: 428795 - RNA, 19 nt, Homo sapiens
  misc_RNA (1)...(19): siRNA sense strand
ccaguuguuaguagaguua

SEQ ID NO: 428796 - RNA, 19 nt, Homo sapiens
  misc_RNA (1)...(19): siRNA sense strand
gaagaauggaagagaauac

SEQ ID NO: 428797 - RNA, 19 nt, Homo sapiens
  misc_RNA (1)...(19): siRNA sense strand
gcagugaugguuccaaucu

SEQ ID NO: 428798 - RNA, 19 nt, Homo sapiens
  misc_RNA (1)...(19): siRNA sense strand
agaaacaaagucccauaaa

SEQ ID NO: 428799 - RNA, 19 nt, Homo sapiens
  misc_RNA (1)...(19): siRNA sense strand
aaacaaagucccauaaagc

SEQ ID NO: 428800 - RNA, 19 nt, Homo sapiens
  misc_RNA (1)...(19): siRNA sense strand
ugaaagaauguuacucugu

SEQ ID NO: 428801 - RNA, 19 nt, Homo sapiens
  misc_RNA (1)...(19): siRNA sense strand
uagcagugaugguuccaau

SEQ ID NO: 428802 - RNA, 19 nt, Homo sapiens
  misc_RNA (1)...(19): siRNA sense strand
ccaaaggguuagcagugau

SEQ ID NO: 428803 - RNA, 19 nt, Homo sapiens
  misc_RNA (1)...(19): siRNA sense strand
gcucagauuauucccaguu

SEQ ID NO: 428804 - RNA, 19 nt, Homo sapiens
  misc_RNA (1)...(19): siRNA sense strand
caccauggauguaaucacu

SEQ ID NO: 428805 - RNA, 19 nt, Homo sapiens
  misc_RNA (1)...(19): siRNA sense strand
cugguacuccucuauauuu

SEQ ID NO: 428806 - RNA, 19 nt, Homo sapiens
  misc_RNA (1)...(19): siRNA sense strand
cccaaaggguuagcaguga

SEQ ID NO: 428807 - RNA, 19 nt, Homo sapiens
  misc_RNA (1)...(19): siRNA sense strand
aagaaacaaagucccauaa

SEQ ID NO: 428808 - RNA, 19 nt, Homo sapiens
  misc_RNA (1)...(19): siRNA sense strand
gaaaggaugaaagaaaguc

SEQ ID NO: 428809 - RNA, 19 nt, Homo sapiens
  misc_RNA (1)...(19): siRNA sense strand
uugaaaggaugaaagaaag

SEQ ID NO: 428810 - RNA, 19 nt, Homo sapiens
  misc_RNA (1)...(19): siRNA sense strand
ccaauguggagauauguug

SEQ ID NO: 428811 - RNA, 19 nt, Homo sapiens
  misc_RNA (1)...(19): siRNA sense strand
aaugaaacgcucagauuau

SEQ ID NO: 428812 - RNA, 19 nt, Homo sapiens
  misc_RNA (1)...(19): siRNA sense strand
uggaguaccuugacauggu

SEQ ID NO: 428813 - RNA, 19 nt, Homo sapiens
  misc_RNA (1)...(19): siRNA sense strand
aagaaagucgccucaaaga

SEQ ID NO: 428814 - RNA, 19 nt, Homo sapiens
  misc_RNA (1)...(19): siRNA sense strand
aaagaaagucgccucaaag

SEQ ID NO: 428815 - RNA, 19 nt, Homo sapiens
  misc_RNA (1)...(19): siRNA sense strand
gagugaacuuggauucucu

SEQ ID NO: 428816 - RNA, 19 nt, Homo sapiens
  misc_RNA (1)...(19): siRNA sense strand
gguccaaugggauuucuga

SEQ ID NO: 428817 - RNA, 19 nt, Homo sapiens
  misc_RNA (1)...(19): siRNA sense strand
agugaugguuccaaucuau

SEQ ID NO: 428818 - RNA, 19 nt, Homo sapiens
  misc_RNA (1)...(19): siRNA sense strand
uuacgagagucugcaagaa

SEQ ID NO: 428819 - RNA, 19 nt, Homo sapiens
  misc_RNA (1)...(19): siRNA sense strand
gacaugguggugaaugaaa

SEQ ID NO: 428820 - RNA, 19 nt, Homo sapiens
  misc_RNA (1)...(19): siRNA sense strand
gauggaguaccuugacaug

SEQ ID NO: 428821 - RNA, 19 nt, Homo sapiens
  misc_RNA (1)...(19): siRNA sense strand
gaaacugcaggaggagauu

SEQ ID NO: 428822 - RNA, 19 nt, Homo sapiens
  misc_RNA (1)...(19): siRNA sense strand
ccauugaaaggaugaaaga

SEQ ID NO: 428823 - RNA, 19 nt, Homo sapiens
  misc_RNA (1)...(19): siRNA sense strand
ugaagaauggaagagaaua

SEQ ID NO: 428824 - RNA, 19 nt, Homo sapiens
  misc_RNA (1)...(19): siRNA sense strand
gccugguacuccucuauau

SEQ ID NO: 428825 - RNA, 19 nt, Homo sapiens
  misc_RNA (1)...(19): siRNA sense strand
cagauuauucccaguuguu

SEQ ID NO: 428826 - RNA, 19 nt, Homo sapiens
  misc_RNA (1)...(19): siRNA sense strand
ucacucuuuccauuucuua

SEQ ID NO: 428827 - RNA, 19 nt, Homo sapiens
  misc_RNA (1)...(19): siRNA sense strand
guuccaaucuaugcucuuc

SEQ ID NO: 428828 - RNA, 19 nt, Homo sapiens
  misc_RNA (1)...(19): siRNA sense strand
cuuguggcccagucaauua

SEQ ID NO: 428829 - RNA, 19 nt, Homo sapiens
  misc_RNA (1)...(19): siRNA sense strand
cagugaugguuccaaucua

SEQ ID NO: 428830 - RNA, 19 nt, Homo sapiens
  misc_RNA (1)...(19): siRNA sense strand
uuaagaagcugggaauucc

SEQ ID NO: 428831 - RNA, 19 nt, Homo sapiens
  misc_RNA (1)...(19): siRNA sense strand
ugaaaagugccuuaaguuu

SEQ ID NO: 428832 - RNA, 19 nt, Homo sapiens
  misc_RNA (1)...(19): siRNA sense strand
aaucuaugcucuucaccau

SEQ ID NO: 428833 - RNA, 19 nt, Homo sapiens
  misc_RNA (1)...(19): siRNA sense strand
uacgagagucugcaagaaa

SEQ ID NO: 428834 - RNA, 19 nt, Homo sapiens
  misc_RNA (1)...(19): siRNA sense strand
ccagaauuccaaagaaaca

SEQ ID NO: 428835 - RNA, 19 nt, Homo sapiens
  misc_RNA (1)...(19): siRNA sense strand
ccucaaagauaaacaaaag

SEQ ID NO: 428836 - RNA, 19 nt, Homo sapiens
  misc_RNA (1)...(19): siRNA sense strand
agaauacgaacauugcuau

SEQ ID NO: 428837 - RNA, 19 nt, Homo sapiens
  misc_RNA (1)...(19): siRNA sense strand
gaaacgcucagauuauucc

SEQ ID NO: 428838 - RNA, 19 nt, Homo sapiens
  misc_RNA (1)...(19): siRNA sense strand
cgaguagauuucuuucaac

SEQ ID NO: 428839 - RNA, 19 nt, Homo sapiens
  misc_RNA (1)...(19): siRNA sense strand
cagauggaguaccuugaca

SEQ ID NO: 428840 - RNA, 19 nt, Homo sapiens
  misc_RNA (1)...(19): siRNA sense strand
auaaggcaccugucaccua

SEQ ID NO: 428841 - RNA, 19 nt, Homo sapiens
  misc_RNA (1)...(19): siRNA sense strand
gaaagucgccucaaagaua

SEQ ID NO: 428842 - RNA, 19 nt, Homo sapiens
  misc_RNA (1)...(19): siRNA sense strand
gaaagaaagucgccucaaa

SEQ ID NO: 428843 - RNA, 19 nt, Homo sapiens
  misc_RNA (1)...(19): siRNA sense strand
ggacagagccugagaaguu

SEQ ID NO: 428844 - RNA, 19 nt, Homo sapiens
  misc_RNA (1)...(19): siRNA sense strand
gaaugaaacgcucagauua

SEQ ID NO: 428845 - RNA, 19 nt, Homo sapiens
  misc_RNA (1)...(19): siRNA sense strand
gaaacaaagucccauaaag

SEQ ID NO: 428846 - RNA, 19 nt, Homo sapiens
  misc_RNA (1)...(19): siRNA sense strand
gaacuuggauucucucaac

SEQ ID NO: 428847 - RNA, 19 nt, Homo sapiens
  misc_RNA (1)...(19): siRNA sense strand
caaaagauguuacccauuu

SEQ ID NO: 428848 - RNA, 19 nt, Homo sapiens
  misc_RNA (1)...(19): siRNA sense strand
ggagauauguuggugagaa

SEQ ID NO: 428849 - RNA, 19 nt, Homo sapiens
  misc_RNA (1)...(19): siRNA sense strand
guagauuucuuucaacaga

SEQ ID NO: 428850 - RNA, 19 nt, Homo sapiens
  misc_RNA (1)...(19): siRNA sense strand
gaugaagaauggaagagaa

SEQ ID NO: 428851 - RNA, 19 nt, Homo sapiens
  misc_RNA (1)...(19): siRNA sense strand
gacagagaauguaaugaaa

SEQ ID NO: 428852 - RNA, 19 nt, Homo sapiens
  misc_RNA (1)...(19): siRNA sense strand
gaagagaauacgaacauug

SEQ ID NO: 428853 - RNA, 19 nt, Homo sapiens
  misc_RNA (1)...(19): siRNA sense strand
aaagucgccucaaagauaa

SEQ ID NO: 428854 - RNA, 19 nt, Homo sapiens
  misc_RNA (1)...(19): siRNA sense strand
ugaaaucaauggaguguuc

SEQ ID NO: 428855 - RNA, 19 nt, Homo sapiens
  misc_RNA (1)...(19): siRNA sense strand
ucacaaaccagaugccuuu

SEQ ID NO: 428856 - RNA, 19 nt, Homo sapiens
  misc_RNA (1)...(19): siRNA sense strand
guacuccucuauauuuaug

SEQ ID NO: 428857 - RNA, 19 nt, Homo sapiens
  misc_RNA (1)...(19): siRNA sense strand
ggaagagaauacgaacauu

SEQ ID NO: 428858 - RNA, 19 nt, Homo sapiens
  misc_RNA (1)...(19): siRNA sense strand
ugacagagaauguaaugaa

SEQ ID NO: 428859 - RNA, 19 nt, Homo sapiens
  misc_RNA (1)...(19): siRNA sense strand
gcacuuaagagaugggauu

SEQ ID NO: 428860 - RNA, 19 nt, Homo sapiens
  misc_RNA (1)...(19): siRNA sense strand
ggaucucauuccaaacuuu

SEQ ID NO: 428861 - RNA, 19 nt, Homo sapiens
  misc_RNA (1)...(19): siRNA sense strand
ucuaugcucuucaccauga

SEQ ID NO: 428862 - RNA, 19 nt, Homo sapiens
  misc_RNA (1)...(19): siRNA sense strand
gaguagauuucuuucaaca

SEQ ID NO: 428863 - RNA, 19 nt, Homo sapiens
  misc_RNA (1)...(19): siRNA sense strand
ucgaguagauuucuuucaa

SEQ ID NO: 428864 - RNA, 19 nt, Homo sapiens
  misc_RNA (1)...(19): siRNA sense strand
ugaaugaaacgcucagauu

SEQ ID NO: 428865 - RNA, 19 nt, Homo sapiens
  misc_RNA (1)...(19): siRNA sense strand
gagaauacgaacauugcua

SEQ ID NO: 428866 - RNA, 19 nt, Homo sapiens
  misc_RNA (1)...(19): siRNA sense strand
ccacugaaauuagacaauc

SEQ ID NO: 428867 - RNA, 19 nt, Homo sapiens
  misc_RNA (1)...(19): siRNA sense strand
ggaggagauugacgcaguu

SEQ ID NO: 428868 - RNA, 19 nt, Homo sapiens
  misc_RNA (1)...(19): siRNA sense strand
gaauggaagagaauacgaa

SEQ ID NO: 428869 - RNA, 19 nt, Homo sapiens
  misc_RNA (1)...(19): siRNA sense strand
caccuacgaugcccuggua

SEQ ID NO: 428870 - RNA, 19 nt, Homo sapiens
  misc_RNA (1)...(19): siRNA sense strand
gagaacagcaaguccauca

SEQ ID NO: 428871 - RNA, 19 nt, Homo sapiens
  misc_RNA (1)...(19): siRNA sense strand
gaagaugaagaauggaaga

SEQ ID NO: 428872 - RNA, 19 nt, Homo sapiens
  misc_RNA (1)...(19): siRNA sense strand
cuaaauaucgguuuguuuc

SEQ ID NO: 428873 - RNA, 19 nt, Homo sapiens
  misc_RNA (1)...(19): siRNA sense strand
ggagugaacuuggauucuc

SEQ ID NO: 428874 - RNA, 19 nt, Homo sapiens
  misc_RNA (1)...(19): siRNA sense strand
ccauaaagcucugucugau

SEQ ID NO: 428875 - RNA, 19 nt, Homo sapiens
  misc_RNA (1)...(19): siRNA sense strand
gaugaucgacucccagaau

SEQ ID NO: 428876 - RNA, 19 nt, Homo sapiens
  misc_RNA (1)...(19): siRNA sense strand
caaaccagaugccuuuagg

SEQ ID NO: 428877 - RNA, 19 nt, Homo sapiens
  misc_RNA (1)...(19): siRNA sense strand
gacaaucuaccaauucuuc

SEQ ID NO: 428878 - RNA, 19 nt, Homo sapiens
  misc_RNA (1)...(19): siRNA sense strand
guuacucugucuucacaaa

SEQ ID NO: 428879 - RNA, 19 nt, Homo sapiens
  misc_RNA (1)...(19): siRNA sense strand
gacagagccugagaaguuc

SEQ ID NO: 428880 - RNA, 19 nt, Homo sapiens
  misc_RNA (1)...(19): siRNA sense strand
ggagauugacgcaguuuua

SEQ ID NO: 428881 - RNA, 19 nt, Homo sapiens
  misc_RNA (1)...(19): siRNA sense strand
auaaagcucugucugaucu

SEQ ID NO: 428882 - RNA, 19 nt, Homo sapiens
  misc_RNA (1)...(19): siRNA sense strand
ggaaacauggguucuugug

SEQ ID NO: 428883 - RNA, 19 nt, Homo sapiens
  misc_RNA (1)...(19): siRNA sense strand
gaauguuacucugucuuca

SEQ ID NO: 428884 - RNA, 19 nt, Homo sapiens
  misc_RNA (1)...(19): siRNA sense strand
ccagucaauuaucaucauu

SEQ ID NO: 428885 - RNA, 19 nt, Homo sapiens
  misc_RNA (1)...(19): siRNA sense strand
gcaucgaguagauuucuuu

SEQ ID NO: 428886 - RNA, 19 nt, Homo sapiens
  misc_RNA (1)...(19): siRNA sense strand
ccacaagaucccuuucuga

SEQ ID NO: 428887 - RNA, 19 nt, Homo sapiens
  misc_RNA (1)...(19): siRNA sense strand
gcacauuauuuggagugaa

SEQ ID NO: 428888 - RNA, 19 nt, Homo sapiens
  misc_RNA (1)...(19): siRNA sense strand
gaacagcaaguccaucaac

SEQ ID NO: 428889 - RNA, 19 nt, Homo sapiens
  misc_RNA (1)...(19): siRNA sense strand
aaagaaacaaagucccaua

SEQ ID NO: 428890 - RNA, 19 nt, Homo sapiens
  misc_RNA (1)...(19): siRNA sense strand
ucccagaauuccaaagaaa

SEQ ID NO: 428891 - RNA, 19 nt, Homo sapiens
  misc_RNA (1)...(19): siRNA sense strand
cacaagaucccuuucugaa

SEQ ID NO: 428892 - RNA, 19 nt, Homo sapiens
  misc_RNA (1)...(19): siRNA sense strand
gagauauguuggugagaag

SEQ ID NO: 428893 - RNA, 19 nt, Homo sapiens
  misc_RNA (1)...(19): siRNA sense strand
augaaacgcucagauuauu

SEQ ID NO: 428894 - RNA, 19 nt, Homo sapiens
  misc_RNA (1)...(19): siRNA sense strand
ugucugaucuggagcuugu

SEQ ID NO: 428895 - RNA, 19 nt, Homo sapiens
  misc_RNA (1)...(19): siRNA sense strand
ugguacuccucuauauuua

SEQ ID NO: 428896 - RNA, 19 nt, Homo sapiens
  misc_RNA (1)...(19): siRNA sense strand
ucucaacaauccacaagau

SEQ ID NO: 428897 - RNA, 19 nt, Homo sapiens
  misc_RNA (1)...(19): siRNA sense strand
guucauucccaaaggguua

SEQ ID NO: 428898 - RNA, 19 nt, Homo sapiens
  misc_RNA (1)...(19): siRNA sense strand
ccaguuguuaguagaguua

SEQ ID NO: 428899 - RNA, 19 nt, Homo sapiens
  misc_RNA (1)...(19): siRNA sense strand
gaagaauggaagagaauac

SEQ ID NO: 428900 - RNA, 19 nt, Homo sapiens
  misc_RNA (1)...(19): siRNA sense strand
gcagugaugguuccaaucu

SEQ ID NO: 428901 - RNA, 19 nt, Homo sapiens
  misc_RNA (1)...(19): siRNA sense strand
agaaacaaagucccauaaa

SEQ ID NO: 428902 - RNA, 19 nt, Homo sapiens
  misc_RNA (1)...(19): siRNA sense strand
aaacaaagucccauaaagc

SEQ ID NO: 428903 - RNA, 19 nt, Homo sapiens
  misc_RNA (1)...(19): siRNA sense strand
ugaaagaauguuacucugu

SEQ ID NO: 428904 - RNA, 19 nt, Homo sapiens
  misc_RNA (1)...(19): siRNA sense strand
cuuaagagaugggauuaca

SEQ ID NO: 428905 - RNA, 19 nt, Homo sapiens
  misc_RNA (1)...(19): siRNA sense strand
uagcagugaugguuccaau

SEQ ID NO: 428906 - RNA, 19 nt, Homo sapiens
  misc_RNA (1)...(19): siRNA sense strand
ccaaaggguuagcagugau

SEQ ID NO: 428907 - RNA, 19 nt, Homo sapiens
  misc_RNA (1)...(19): siRNA sense strand
gcucagauuauucccaguu

SEQ ID NO: 428908 - RNA, 19 nt, Homo sapiens
  misc_RNA (1)...(19): siRNA sense strand
caccauggauguaaucacu

SEQ ID NO: 428909 - RNA, 19 nt, Homo sapiens
  misc_RNA (1)...(19): siRNA sense strand
cugguacuccucuauauuu

SEQ ID NO: 428910 - RNA, 19 nt, Homo sapiens
  misc_RNA (1)...(19): siRNA sense strand
uaagagaugggauuacaag

SEQ ID NO: 428911 - RNA, 19 nt, Homo sapiens
  misc_RNA (1)...(19): siRNA sense strand
cccaaaggguuagcaguga

SEQ ID NO: 428912 - RNA, 19 nt, Homo sapiens
  misc_RNA (1)...(19): siRNA sense strand
aagaaacaaagucccauaa

SEQ ID NO: 428913 - RNA, 19 nt, Homo sapiens
  misc_RNA (1)...(19): siRNA sense strand
gaaaggaugaaagaaaguc

SEQ ID NO: 428914 - RNA, 19 nt, Homo sapiens
  misc_RNA (1)...(19): siRNA sense strand
uugaaaggaugaaagaaag

SEQ ID NO: 428915 - RNA, 19 nt, Homo sapiens
  misc_RNA (1)...(19): siRNA sense strand
ccaauguggagauauguug

SEQ ID NO: 428916 - RNA, 19 nt, Homo sapiens
  misc_RNA (1)...(19): siRNA sense strand
aaugaaacgcucagauuau

SEQ ID NO: 428917 - RNA, 19 nt, Homo sapiens
  misc_RNA (1)...(19): siRNA sense strand
uggaguaccuugacauggu

SEQ ID NO: 428918 - RNA, 19 nt, Homo sapiens
  misc_RNA (1)...(19): siRNA sense strand
aagaaagucgccucaaaga

SEQ ID NO: 428919 - RNA, 19 nt, Homo sapiens
  misc_RNA (1)...(19): siRNA sense strand
aaagaaagucgccucaaag

SEQ ID NO: 428920 - RNA, 19 nt, Homo sapiens
  misc_RNA (1)...(19): siRNA sense strand
gagugaacuuggauucucu

SEQ ID NO: 428921 - RNA, 19 nt, Homo sapiens
  misc_RNA (1)...(19): siRNA sense strand
gguccaaugggauuucuga

SEQ ID NO: 428922 - RNA, 19 nt, Homo sapiens
  misc_RNA (1)...(19): siRNA sense strand
agugaugguuccaaucuau

SEQ ID NO: 428923 - RNA, 19 nt, Homo sapiens
  misc_RNA (1)...(19): siRNA sense strand
uuacgagagucugcaagaa

SEQ ID NO: 428924 - RNA, 19 nt, Homo sapiens
  misc_RNA (1)...(19): siRNA sense strand
gacaugguggugaaugaaa

SEQ ID NO: 428925 - RNA, 19 nt, Homo sapiens
  misc_RNA (1)...(19): siRNA sense strand
gauggaguaccuugacaug

SEQ ID NO: 428926 - RNA, 19 nt, Homo sapiens
  misc_RNA (1)...(19): siRNA sense strand
gaaacugcaggaggagauu

SEQ ID NO: 428927 - RNA, 19 nt, Homo sapiens
  misc_RNA (1)...(19): siRNA sense strand
ccauugaaaggaugaaaga

SEQ ID NO: 428928 - RNA, 19 nt, Homo sapiens
  misc_RNA (1)...(19): siRNA sense strand
ugaagaauggaagagaaua

SEQ ID NO: 428929 - RNA, 19 nt, Homo sapiens
  misc_RNA (1)...(19): siRNA sense strand
gccugguacuccucuauau

SEQ ID NO: 428930 - RNA, 19 nt, Homo sapiens
  misc_RNA (1)...(19): siRNA sense strand
cagauuauucccaguuguu

SEQ ID NO: 428931 - RNA, 19 nt, Homo sapiens
  misc_RNA (1)...(19): siRNA sense strand
ucacucuuuccauuucuua

SEQ ID NO: 428932 - RNA, 19 nt, Homo sapiens
  misc_RNA (1)...(19): siRNA sense strand
guuccaaucuaugcucuuc

SEQ ID NO: 428933 - RNA, 19 nt, Homo sapiens
  misc_RNA (1)...(19): siRNA sense strand
uuaagaagcugggaauucc

SEQ ID NO: 428934 - RNA, 19 nt, Homo sapiens
  misc_RNA (1)...(19): siRNA sense strand
cagugaugguuccaaucua

SEQ ID NO: 428935 - RNA, 19 nt, Homo sapiens
  misc_RNA (1)...(19): siRNA sense strand
cuuguggcccagucaauua

SEQ ID NO: 428936 - RNA, 19 nt, Homo sapiens
  misc_RNA (1)...(19): siRNA sense strand
agaauacgaacauugcuau

SEQ ID NO: 428937 - RNA, 19 nt, Homo sapiens
  misc_RNA (1)...(19): siRNA sense strand
aaucuaugcucuucaccau

SEQ ID NO: 428938 - RNA, 19 nt, Homo sapiens
  misc_RNA (1)...(19): siRNA sense strand
uacgagagucugcaagaaa

SEQ ID NO: 428939 - RNA, 19 nt, Homo sapiens
  misc_RNA (1)...(19): siRNA sense strand
ccagaauuccaaagaaaca

SEQ ID NO: 428940 - RNA, 19 nt, Homo sapiens
  misc_RNA (1)...(19): siRNA sense strand
ccucaaagauaaacaaaag

SEQ ID NO: 428941 - RNA, 19 nt, Homo sapiens
  misc_RNA (1)...(19): siRNA sense strand
gaaagucgccucaaagaua

SEQ ID NO: 428942 - RNA, 19 nt, Homo sapiens
  misc_RNA (1)...(19): siRNA sense strand
gaaagaaagucgccucaaa

SEQ ID NO: 428943 - RNA, 19 nt, Homo sapiens
  misc_RNA (1)...(19): siRNA sense strand
ggacagagccugagaaguu

SEQ ID NO: 428944 - RNA, 19 nt, Homo sapiens
  misc_RNA (1)...(19): siRNA sense strand
gaaugaaacgcucagauua

SEQ ID NO: 428945 - RNA, 19 nt, Homo sapiens
  misc_RNA (1)...(19): siRNA sense strand
gaaacaaagucccauaaag

SEQ ID NO: 428946 - RNA, 19 nt, Homo sapiens
  misc_RNA (1)...(19): siRNA sense strand
gaacuuggauucucucaac

SEQ ID NO: 428947 - RNA, 19 nt, Homo sapiens
  misc_RNA (1)...(19): siRNA sense strand
caaaagauguuacccauuu

SEQ ID NO: 428948 - RNA, 19 nt, Homo sapiens
  misc_RNA (1)...(19): siRNA sense strand
ggagauauguuggugagaa

SEQ ID NO: 428949 - RNA, 19 nt, Homo sapiens
  misc_RNA (1)...(19): siRNA sense strand
guagauuucuuucaacaga

SEQ ID NO: 428950 - RNA, 19 nt, Homo sapiens
  misc_RNA (1)...(19): siRNA sense strand
gaugaagaauggaagagaa

SEQ ID NO: 428951 - RNA, 19 nt, Homo sapiens
  misc_RNA (1)...(19): siRNA sense strand
gacagagaauguaaugaaa

SEQ ID NO: 428952 - RNA, 19 nt, Homo sapiens
  misc_RNA (1)...(19): siRNA sense strand
gaagagaauacgaacauug

SEQ ID NO: 428953 - RNA, 19 nt, Homo sapiens
  misc_RNA (1)...(19): siRNA sense strand
aaagucgccucaaagauaa

SEQ ID NO: 428954 - RNA, 19 nt, Homo sapiens
  misc_RNA (1)...(19): siRNA sense strand
ugaaaucaauggaguguuc

SEQ ID NO: 428955 - RNA, 19 nt, Homo sapiens
  misc_RNA (1)...(19): siRNA sense strand
ucacaaaccagaugccuuu

SEQ ID NO: 428956 - RNA, 19 nt, Homo sapiens
  misc_RNA (1)...(19): siRNA sense strand
guacuccucuauauuuaug

SEQ ID NO: 428957 - RNA, 19 nt, Homo sapiens
  misc_RNA (1)...(19): siRNA sense strand
ggaagagaauacgaacauu

SEQ ID NO: 428958 - RNA, 19 nt, Homo sapiens
  misc_RNA (1)...(19): siRNA sense strand
ugacagagaauguaaugaa

SEQ ID NO: 428959 - RNA, 19 nt, Homo sapiens
  misc_RNA (1)...(19): siRNA sense strand
gcacuuaagagaugggauu

SEQ ID NO: 428960 - RNA, 19 nt, Homo sapiens
  misc_RNA (1)...(19): siRNA sense strand
ggaucucauuccaaacuuu

SEQ ID NO: 428961 - RNA, 19 nt, Homo sapiens
  misc_RNA (1)...(19): siRNA sense strand
ucuaugcucuucaccauga

SEQ ID NO: 428962 - RNA, 19 nt, Homo sapiens
  misc_RNA (1)...(19): siRNA sense strand
gaguagauuucuuucaaca

SEQ ID NO: 428963 - RNA, 19 nt, Homo sapiens
  misc_RNA (1)...(19): siRNA sense strand
ucgaguagauuucuuucaa

SEQ ID NO: 428964 - RNA, 19 nt, Homo sapiens
  misc_RNA (1)...(19): siRNA sense strand
ugaaugaaacgcucagauu

SEQ ID NO: 428965 - RNA, 19 nt, Homo sapiens
  misc_RNA (1)...(19): siRNA sense strand
gagaauacgaacauugcua

SEQ ID NO: 428966 - RNA, 19 nt, Homo sapiens
  misc_RNA (1)...(19): siRNA sense strand
ccacugaaauuagacaauc

SEQ ID NO: 428967 - RNA, 19 nt, Homo sapiens
  misc_RNA (1)...(19): siRNA sense strand
ggaggagauugacgcaguu

SEQ ID NO: 428968 - RNA, 19 nt, Homo sapiens
  misc_RNA (1)...(19): siRNA sense strand
gaauggaagagaauacgaa

SEQ ID NO: 428969 - RNA, 19 nt, Homo sapiens
  misc_RNA (1)...(19): siRNA sense strand
caccuacgaugcccuggua

SEQ ID NO: 428970 - RNA, 19 nt, Homo sapiens
  misc_RNA (1)...(19): siRNA sense strand
gagaacagcaaguccauca

SEQ ID NO: 428971 - RNA, 19 nt, Homo sapiens
  misc_RNA (1)...(19): siRNA sense strand
gaagaugaagaauggaaga

SEQ ID NO: 428972 - RNA, 19 nt, Homo sapiens
  misc_RNA (1)...(19): siRNA sense strand
cuaaauaucgguuuguuuc

SEQ ID NO: 428973 - RNA, 19 nt, Homo sapiens
  misc_RNA (1)...(19): siRNA sense strand
ggagugaacuuggauucuc

SEQ ID NO: 428974 - RNA, 19 nt, Homo sapiens
  misc_RNA (1)...(19): siRNA sense strand
ccauaaagcucugucugau

SEQ ID NO: 428975 - RNA, 19 nt, Homo sapiens
  misc_RNA (1)...(19): siRNA sense strand
gaugaucgacucccagaau

SEQ ID NO: 428976 - RNA, 19 nt, Homo sapiens
  misc_RNA (1)...(19): siRNA sense strand
caaaccagaugccuuuagg

SEQ ID NO: 428977 - RNA, 19 nt, Homo sapiens
  misc_RNA (1)...(19): siRNA sense strand
gacaaucuaccaauucuuc

SEQ ID NO: 428978 - RNA, 19 nt, Homo sapiens
  misc_RNA (1)...(19): siRNA sense strand
guuacucugucuucacaaa

SEQ ID NO: 428979 - RNA, 19 nt, Homo sapiens
  misc_RNA (1)...(19): siRNA sense strand
gacagagccugagaaguuc

SEQ ID NO: 428980 - RNA, 19 nt, Homo sapiens
  misc_RNA (1)...(19): siRNA sense strand
ggagauugacgcaguuuua

SEQ ID NO: 428981 - RNA, 19 nt, Homo sapiens
  misc_RNA (1)...(19): siRNA sense strand
auaaagcucugucugaucu

SEQ ID NO: 428982 - RNA, 19 nt, Homo sapiens
  misc_RNA (1)...(19): siRNA sense strand
ggaaacauggguucuugug

SEQ ID NO: 428983 - RNA, 19 nt, Homo sapiens
  misc_RNA (1)...(19): siRNA sense strand
gaauguuacucugucuuca

SEQ ID NO: 428984 - RNA, 19 nt, Homo sapiens
  misc_RNA (1)...(19): siRNA sense strand
ccagucaauuaucaucauu

SEQ ID NO: 428985 - RNA, 19 nt, Homo sapiens
  misc_RNA (1)...(19): siRNA sense strand
gcaucgaguagauuucuuu

SEQ ID NO: 428986 - RNA, 19 nt, Homo sapiens
  misc_RNA (1)...(19): siRNA sense strand
ccacaagaucccuuucuga

SEQ ID NO: 428987 - RNA, 19 nt, Homo sapiens
  misc_RNA (1)...(19): siRNA sense strand
gcacauuauuuggagugaa

SEQ ID NO: 428988 - RNA, 19 nt, Homo sapiens
  misc_RNA (1)...(19): siRNA sense strand
gaacagcaaguccaucaac

SEQ ID NO: 428989 - RNA, 19 nt, Homo sapiens
  misc_RNA (1)...(19): siRNA sense strand
aaagaaacaaagucccaua

SEQ ID NO: 428990 - RNA, 19 nt, Homo sapiens
  misc_RNA (1)...(19): siRNA sense strand
ucccagaauuccaaagaaa

SEQ ID NO: 428991 - RNA, 19 nt, Homo sapiens
  misc_RNA (1)...(19): siRNA sense strand
cacaagaucccuuucugaa

SEQ ID NO: 428992 - RNA, 19 nt, Homo sapiens
  misc_RNA (1)...(19): siRNA sense strand
gagauauguuggugagaag

SEQ ID NO: 428993 - RNA, 19 nt, Homo sapiens
  misc_RNA (1)...(19): siRNA sense strand
augaaacgcucagauuauu

SEQ ID NO: 428994 - RNA, 19 nt, Homo sapiens
  misc_RNA (1)...(19): siRNA sense strand
ugucugaucuggagcuugu

SEQ ID NO: 428995 - RNA, 19 nt, Homo sapiens
  misc_RNA (1)...(19): siRNA sense strand
ugguacuccucuauauuua

SEQ ID NO: 428996 - RNA, 19 nt, Homo sapiens
  misc_RNA (1)...(19): siRNA sense strand
ucucaacaauccacaagau

SEQ ID NO: 428997 - RNA, 19 nt, Homo sapiens
  misc_RNA (1)...(19): siRNA sense strand
guucauucccaaaggguua

SEQ ID NO: 428998 - RNA, 19 nt, Homo sapiens
  misc_RNA (1)...(19): siRNA sense strand
ccaguuguuaguagaguua

SEQ ID NO: 428999 - RNA, 19 nt, Homo sapiens
  misc_RNA (1)...(19): siRNA sense strand
gaagaauggaagagaauac

SEQ ID NO: 429000 - RNA, 19 nt, Homo sapiens
  misc_RNA (1)...(19): siRNA sense strand
gcagugaugguuccaaucu

SEQ ID NO: 429001 - RNA, 19 nt, Homo sapiens
  misc_RNA (1)...(19): siRNA sense strand
agaaacaaagucccauaaa

SEQ ID NO: 429002 - RNA, 19 nt, Homo sapiens
  misc_RNA (1)...(19): siRNA sense strand
aaacaaagucccauaaagc

SEQ ID NO: 429003 - RNA, 19 nt, Homo sapiens
  misc_RNA (1)...(19): siRNA sense strand
ugaaagaauguuacucugu

SEQ ID NO: 429004 - RNA, 19 nt, Homo sapiens
  misc_RNA (1)...(19): siRNA sense strand
cuuaagagaugggauuaca

SEQ ID NO: 429005 - RNA, 19 nt, Homo sapiens
  misc_RNA (1)...(19): siRNA sense strand
uagcagugaugguuccaau

SEQ ID NO: 429006 - RNA, 19 nt, Homo sapiens
  misc_RNA (1)...(19): siRNA sense strand
ccaaaggguuagcagugau

SEQ ID NO: 429007 - RNA, 19 nt, Homo sapiens
  misc_RNA (1)...(19): siRNA sense strand
gcucagauuauucccaguu

SEQ ID NO: 429008 - RNA, 19 nt, Homo sapiens
  misc_RNA (1)...(19): siRNA sense strand
caccauggauguaaucacu

SEQ ID NO: 429009 - RNA, 19 nt, Homo sapiens
  misc_RNA (1)...(19): siRNA sense strand
cugguacuccucuauauuu

SEQ ID NO: 429010 - RNA, 19 nt, Homo sapiens
  misc_RNA (1)...(19): siRNA sense strand
uaagagaugggauuacaag

SEQ ID NO: 429011 - RNA, 19 nt, Homo sapiens
  misc_RNA (1)...(19): siRNA sense strand
cccaaaggguuagcaguga

SEQ ID NO: 429012 - RNA, 19 nt, Homo sapiens
  misc_RNA (1)...(19): siRNA sense strand
aagaaacaaagucccauaa

SEQ ID NO: 429013 - RNA, 19 nt, Homo sapiens
  misc_RNA (1)...(19): siRNA sense strand
gaaaggaugaaagaaaguc

SEQ ID NO: 429014 - RNA, 19 nt, Homo sapiens
  misc_RNA (1)...(19): siRNA sense strand
uugaaaggaugaaagaaag

SEQ ID NO: 429015 - RNA, 19 nt, Homo sapiens
  misc_RNA (1)...(19): siRNA sense strand
ccaauguggagauauguug

SEQ ID NO: 429016 - RNA, 19 nt, Homo sapiens
  misc_RNA (1)...(19): siRNA sense strand
aaugaaacgcucagauuau

SEQ ID NO: 429017 - RNA, 19 nt, Homo sapiens
  misc_RNA (1)...(19): siRNA sense strand
uggaguaccuugacauggu

SEQ ID NO: 429018 - RNA, 19 nt, Homo sapiens
  misc_RNA (1)...(19): siRNA sense strand
aagaaagucgccucaaaga

SEQ ID NO: 429019 - RNA, 19 nt, Homo sapiens
  misc_RNA (1)...(19): siRNA sense strand
aaagaaagucgccucaaag

SEQ ID NO: 429020 - RNA, 19 nt, Homo sapiens
  misc_RNA (1)...(19): siRNA sense strand
gagugaacuuggauucucu

SEQ ID NO: 429021 - RNA, 19 nt, Homo sapiens
  misc_RNA (1)...(19): siRNA sense strand
gguccaaugggauuucuga

SEQ ID NO: 429022 - RNA, 19 nt, Homo sapiens
  misc_RNA (1)...(19): siRNA sense strand
agugaugguuccaaucuau

SEQ ID NO: 429023 - RNA, 19 nt, Homo sapiens
  misc_RNA (1)...(19): siRNA sense strand
uuacgagagucugcaagaa

SEQ ID NO: 429024 - RNA, 19 nt, Homo sapiens
  misc_RNA (1)...(19): siRNA sense strand
gacaugguggugaaugaaa

SEQ ID NO: 429025 - RNA, 19 nt, Homo sapiens
  misc_RNA (1)...(19): siRNA sense strand
gauggaguaccuugacaug

SEQ ID NO: 429026 - RNA, 19 nt, Homo sapiens
  misc_RNA (1)...(19): siRNA sense strand
gaaacugcaggaggagauu

SEQ ID NO: 429027 - RNA, 19 nt, Homo sapiens
  misc_RNA (1)...(19): siRNA sense strand
ccauugaaaggaugaaaga

SEQ ID NO: 429028 - RNA, 19 nt, Homo sapiens
  misc_RNA (1)...(19): siRNA sense strand
ugaagaauggaagagaaua

SEQ ID NO: 429029 - RNA, 19 nt, Homo sapiens
  misc_RNA (1)...(19): siRNA sense strand
gccugguacuccucuauau

SEQ ID NO: 429030 - RNA, 19 nt, Homo sapiens
  misc_RNA (1)...(19): siRNA sense strand
cagauuauucccaguuguu

SEQ ID NO: 429031 - RNA, 19 nt, Homo sapiens
  misc_RNA (1)...(19): siRNA sense strand
ucacucuuuccauuucuua

SEQ ID NO: 429032 - RNA, 19 nt, Homo sapiens
  misc_RNA (1)...(19): siRNA sense strand
guuccaaucuaugcucuuc

SEQ ID NO: 429033 - RNA, 19 nt, Homo sapiens
  misc_RNA (1)...(19): siRNA sense strand
uuaagaagcugggaauucc

SEQ ID NO: 429034 - RNA, 19 nt, Homo sapiens
  misc_RNA (1)...(19): siRNA sense strand
cagugaugguuccaaucua

SEQ ID NO: 429035 - RNA, 19 nt, Homo sapiens
  misc_RNA (1)...(19): siRNA sense strand
cuuguggcccagucaauua

SEQ ID NO: 429036 - RNA, 19 nt, Homo sapiens
  misc_RNA (1)...(19): siRNA sense strand
agaauacgaacauugcuau

SEQ ID NO: 429037 - RNA, 19 nt, Homo sapiens
  misc_RNA (1)...(19): siRNA sense strand
aaucuaugcucuucaccau

SEQ ID NO: 429038 - RNA, 19 nt, Homo sapiens
  misc_RNA (1)...(19): siRNA sense strand
uacgagagucugcaagaaa

SEQ ID NO: 429039 - RNA, 19 nt, Homo sapiens
  misc_RNA (1)...(19): siRNA sense strand
ccagaauuccaaagaaaca

SEQ ID NO: 429040 - RNA, 19 nt, Homo sapiens
  misc_RNA (1)...(19): siRNA sense strand
ccucaaagauaaacaaaag

SEQ ID NO: 429041 - RNA, 19 nt, Homo sapiens
  misc_RNA (1)...(19): siRNA sense strand
gaaagucgccucaaagaua

SEQ ID NO: 429042 - RNA, 19 nt, Homo sapiens
  misc_RNA (1)...(19): siRNA sense strand
gaaagaaagucgccucaaa

SEQ ID NO: 429043 - RNA, 19 nt, Homo sapiens
  misc_RNA (1)...(19): siRNA sense strand
ggacagagccugagaaguu

SEQ ID NO: 429044 - RNA, 19 nt, Homo sapiens
  misc_RNA (1)...(19): siRNA sense strand
gaaugaaacgcucagauua

SEQ ID NO: 429045 - RNA, 19 nt, Homo sapiens
  misc_RNA (1)...(19): siRNA sense strand
gaaacaaagucccauaaag

SEQ ID NO: 429046 - RNA, 19 nt, Homo sapiens
  misc_RNA (1)...(19): siRNA sense strand
gaacuuggauucucucaac

SEQ ID NO: 429047 - RNA, 19 nt, Homo sapiens
  misc_RNA (1)...(19): siRNA sense strand
caaaagauguuacccauuu

SEQ ID NO: 429048 - RNA, 19 nt, Homo sapiens
  misc_RNA (1)...(19): siRNA sense strand
ggagauauguuggugagaa

SEQ ID NO: 429049 - RNA, 19 nt, Homo sapiens
  misc_RNA (1)...(19): siRNA sense strand
guagauuucuuucaacaga

SEQ ID NO: 429050 - RNA, 19 nt, Homo sapiens
  misc_RNA (1)...(19): siRNA sense strand
gaugaagaauggaagagaa

SEQ ID NO: 429051 - RNA, 19 nt, Homo sapiens
  misc_RNA (1)...(19): siRNA sense strand
gacagagaauguaaugaaa

SEQ ID NO: 429052 - RNA, 19 nt, Homo sapiens
  misc_RNA (1)...(19): siRNA sense strand
gaagagaauacgaacauug

SEQ ID NO: 429053 - RNA, 19 nt, Homo sapiens
  misc_RNA (1)...(19): siRNA sense strand
aaagucgccucaaagauaa

SEQ ID NO: 429054 - RNA, 19 nt, Homo sapiens
  misc_RNA (1)...(19): siRNA sense strand
ugaaaucaauggaguguuc

SEQ ID NO: 429055 - RNA, 19 nt, Homo sapiens
  misc_RNA (1)...(19): siRNA sense strand
ucacaaaccagaugccuuu

SEQ ID NO: 429056 - RNA, 19 nt, Homo sapiens
  misc_RNA (1)...(19): siRNA sense strand
guacuccucuauauuuaug

SEQ ID NO: 429057 - RNA, 19 nt, Homo sapiens
  misc_RNA (1)...(19): siRNA sense strand
ggaagagaauacgaacauu

SEQ ID NO: 429058 - RNA, 19 nt, Homo sapiens
  misc_RNA (1)...(19): siRNA sense strand
ugacagagaauguaaugaa

SEQ ID NO: 429059 - RNA, 19 nt, Homo sapiens
  misc_RNA (1)...(19): siRNA sense strand
ggaucucauuccaaacuuu

SEQ ID NO: 429060 - RNA, 19 nt, Homo sapiens
  misc_RNA (1)...(19): siRNA sense strand
ucuaugcucuucaccauga

SEQ ID NO: 429061 - RNA, 19 nt, Homo sapiens
  misc_RNA (1)...(19): siRNA sense strand
gaguagauuucuuucaaca

SEQ ID NO: 429062 - RNA, 19 nt, Homo sapiens
  misc_RNA (1)...(19): siRNA sense strand
ucgaguagauuucuuucaa

SEQ ID NO: 429063 - RNA, 19 nt, Homo sapiens
  misc_RNA (1)...(19): siRNA sense strand
ugaaugaaacgcucagauu

SEQ ID NO: 429064 - RNA, 19 nt, Homo sapiens
  misc_RNA (1)...(19): siRNA sense strand
gagaauacgaacauugcua

SEQ ID NO: 429065 - RNA, 19 nt, Homo sapiens
  misc_RNA (1)...(19): siRNA sense strand
ggaggagauugacgcaguu

SEQ ID NO: 429066 - RNA, 19 nt, Homo sapiens
  misc_RNA (1)...(19): siRNA sense strand
gaauggaagagaauacgaa

SEQ ID NO: 429067 - RNA, 19 nt, Homo sapiens
  misc_RNA (1)...(19): siRNA sense strand
caccuacgaugcccuggua

SEQ ID NO: 429068 - RNA, 19 nt, Homo sapiens
  misc_RNA (1)...(19): siRNA sense strand
gagaacagcaaguccauca

SEQ ID NO: 429069 - RNA, 19 nt, Homo sapiens
  misc_RNA (1)...(19): siRNA sense strand
gaagaugaagaauggaaga

SEQ ID NO: 429070 - RNA, 19 nt, Homo sapiens
  misc_RNA (1)...(19): siRNA sense strand
cuaaauaucgguuuguuuc

SEQ ID NO: 429071 - RNA, 19 nt, Homo sapiens
  misc_RNA (1)...(19): siRNA sense strand
ggagugaacuuggauucuc

SEQ ID NO: 429072 - RNA, 19 nt, Homo sapiens
  misc_RNA (1)...(19): siRNA sense strand
ccauaaagcucugucugau

SEQ ID NO: 429073 - RNA, 19 nt, Homo sapiens
  misc_RNA (1)...(19): siRNA sense strand
gaugaucgacucccagaau

SEQ ID NO: 429074 - RNA, 19 nt, Homo sapiens
  misc_RNA (1)...(19): siRNA sense strand
caaaccagaugccuuuagg

SEQ ID NO: 429075 - RNA, 19 nt, Homo sapiens
  misc_RNA (1)...(19): siRNA sense strand
guuacucugucuucacaaa

SEQ ID NO: 429076 - RNA, 19 nt, Homo sapiens
  misc_RNA (1)...(19): siRNA sense strand
gacagagccugagaaguuc

SEQ ID NO: 429077 - RNA, 19 nt, Homo sapiens
  misc_RNA (1)...(19): siRNA sense strand
ggagauugacgcaguuuua

SEQ ID NO: 429078 - RNA, 19 nt, Homo sapiens
  misc_RNA (1)...(19): siRNA sense strand
auaaagcucugucugaucu

SEQ ID NO: 429079 - RNA, 19 nt, Homo sapiens
  misc_RNA (1)...(19): siRNA sense strand
ggaaacauggguucuugug

SEQ ID NO: 429080 - RNA, 19 nt, Homo sapiens
  misc_RNA (1)...(19): siRNA sense strand
gaauguuacucugucuuca

SEQ ID NO: 429081 - RNA, 19 nt, Homo sapiens
  misc_RNA (1)...(19): siRNA sense strand
ccagucaauuaucaucauu

SEQ ID NO: 429082 - RNA, 19 nt, Homo sapiens
  misc_RNA (1)...(19): siRNA sense strand
gcaucgaguagauuucuuu

SEQ ID NO: 429083 - RNA, 19 nt, Homo sapiens
  misc_RNA (1)...(19): siRNA sense strand
ccacaagaucccuuucuga

SEQ ID NO: 429084 - RNA, 19 nt, Homo sapiens
  misc_RNA (1)...(19): siRNA sense strand
gcacauuauuuggagugaa

SEQ ID NO: 429085 - RNA, 19 nt, Homo sapiens
  misc_RNA (1)...(19): siRNA sense strand
gaacagcaaguccaucaac

SEQ ID NO: 429086 - RNA, 19 nt, Homo sapiens
  misc_RNA (1)...(19): siRNA sense strand
aaagaaacaaagucccaua

SEQ ID NO: 429087 - RNA, 19 nt, Homo sapiens
  misc_RNA (1)...(19): siRNA sense strand
ucccagaauuccaaagaaa

SEQ ID NO: 429088 - RNA, 19 nt, Homo sapiens
  misc_RNA (1)...(19): siRNA sense strand
cacaagaucccuuucugaa

SEQ ID NO: 429089 - RNA, 19 nt, Homo sapiens
  misc_RNA (1)...(19): siRNA sense strand
gagauauguuggugagaag

SEQ ID NO: 429090 - RNA, 19 nt, Homo sapiens
  misc_RNA (1)...(19): siRNA sense strand
augaaacgcucagauuauu

SEQ ID NO: 429091 - RNA, 19 nt, Homo sapiens
  misc_RNA (1)...(19): siRNA sense strand
ugucugaucuggagcuugu

SEQ ID NO: 429092 - RNA, 19 nt, Homo sapiens
  misc_RNA (1)...(19): siRNA sense strand
ugguacuccucuauauuua

SEQ ID NO: 429093 - RNA, 19 nt, Homo sapiens
  misc_RNA (1)...(19): siRNA sense strand
ucucaacaauccacaagau

SEQ ID NO: 429094 - RNA, 19 nt, Homo sapiens
  misc_RNA (1)...(19): siRNA sense strand
guucauucccaaaggguua

SEQ ID NO: 429095 - RNA, 19 nt, Homo sapiens
  misc_RNA (1)...(19): siRNA sense strand
ccaguuguuaguagaguua

SEQ ID NO: 429096 - RNA, 19 nt, Homo sapiens
  misc_RNA (1)...(19): siRNA sense strand
gaagaauggaagagaauac

SEQ ID NO: 429097 - RNA, 19 nt, Homo sapiens
  misc_RNA (1)...(19): siRNA sense strand
gcagugaugguuccaaucu

SEQ ID NO: 429098 - RNA, 19 nt, Homo sapiens
  misc_RNA (1)...(19): siRNA sense strand
agaaacaaagucccauaaa

SEQ ID NO: 429099 - RNA, 19 nt, Homo sapiens
  misc_RNA (1)...(19): siRNA sense strand
aaacaaagucccauaaagc

SEQ ID NO: 429100 - RNA, 19 nt, Homo sapiens
  misc_RNA (1)...(19): siRNA sense strand
ugaaagaauguuacucugu

SEQ ID NO: 429101 - RNA, 19 nt, Homo sapiens
  misc_RNA (1)...(19): siRNA sense strand
uagcagugaugguuccaau

SEQ ID NO: 429102 - RNA, 19 nt, Homo sapiens
  misc_RNA (1)...(19): siRNA sense strand
ccaaaggguuagcagugau

SEQ ID NO: 429103 - RNA, 19 nt, Homo sapiens
  misc_RNA (1)...(19): siRNA sense strand
gcucagauuauucccaguu

SEQ ID NO: 429104 - RNA, 19 nt, Homo sapiens
  misc_RNA (1)...(19): siRNA sense strand
caccauggauguaaucacu

SEQ ID NO: 429105 - RNA, 19 nt, Homo sapiens
  misc_RNA (1)...(19): siRNA sense strand
cugguacuccucuauauuu

SEQ ID NO: 429106 - RNA, 19 nt, Homo sapiens
  misc_RNA (1)...(19): siRNA sense strand
cccaaaggguuagcaguga

SEQ ID NO: 429107 - RNA, 19 nt, Homo sapiens
  misc_RNA (1)...(19): siRNA sense strand
aagaaacaaagucccauaa

SEQ ID NO: 429108 - RNA, 19 nt, Homo sapiens
  misc_RNA (1)...(19): siRNA sense strand
gaaaggaugaaagaaaguc

SEQ ID NO: 429109 - RNA, 19 nt, Homo sapiens
  misc_RNA (1)...(19): siRNA sense strand
uugaaaggaugaaagaaag

SEQ ID NO: 429110 - RNA, 19 nt, Homo sapiens
  misc_RNA (1)...(19): siRNA sense strand
ccaauguggagauauguug

SEQ ID NO: 429111 - RNA, 19 nt, Homo sapiens
  misc_RNA (1)...(19): siRNA sense strand
aaugaaacgcucagauuau

SEQ ID NO: 429112 - RNA, 19 nt, Homo sapiens
  misc_RNA (1)...(19): siRNA sense strand
uggaguaccuugacauggu

SEQ ID NO: 429113 - RNA, 19 nt, Homo sapiens
  misc_RNA (1)...(19): siRNA sense strand
aagaaagucgccucaaaga

SEQ ID NO: 429114 - RNA, 19 nt, Homo sapiens
  misc_RNA (1)...(19): siRNA sense strand
aaagaaagucgccucaaag

SEQ ID NO: 429115 - RNA, 19 nt, Homo sapiens
  misc_RNA (1)...(19): siRNA sense strand
gagugaacuuggauucucu

SEQ ID NO: 429116 - RNA, 19 nt, Homo sapiens
  misc_RNA (1)...(19): siRNA sense strand
gguccaaugggauuucuga

SEQ ID NO: 429117 - RNA, 19 nt, Homo sapiens
  misc_RNA (1)...(19): siRNA sense strand
agugaugguuccaaucuau

SEQ ID NO: 429118 - RNA, 19 nt, Homo sapiens
  misc_RNA (1)...(19): siRNA sense strand
uuacgagagucugcaagaa

SEQ ID NO: 429119 - RNA, 19 nt, Homo sapiens
  misc_RNA (1)...(19): siRNA sense strand
gacaugguggugaaugaaa

SEQ ID NO: 429120 - RNA, 19 nt, Homo sapiens
  misc_RNA (1)...(19): siRNA sense strand
gauggaguaccuugacaug

SEQ ID NO: 429121 - RNA, 19 nt, Homo sapiens
  misc_RNA (1)...(19): siRNA sense strand
gaaacugcaggaggagauu

SEQ ID NO: 429122 - RNA, 19 nt, Homo sapiens
  misc_RNA (1)...(19): siRNA sense strand
ccauugaaaggaugaaaga

SEQ ID NO: 429123 - RNA, 19 nt, Homo sapiens
  misc_RNA (1)...(19): siRNA sense strand
ugaagaauggaagagaaua

SEQ ID NO: 429124 - RNA, 19 nt, Homo sapiens
  misc_RNA (1)...(19): siRNA sense strand
gccugguacuccucuauau

SEQ ID NO: 429125 - RNA, 19 nt, Homo sapiens
  misc_RNA (1)...(19): siRNA sense strand
cagauuauucccaguuguu

SEQ ID NO: 429126 - RNA, 19 nt, Homo sapiens
  misc_RNA (1)...(19): siRNA sense strand
ucacucuuuccauuucuua

SEQ ID NO: 429127 - RNA, 19 nt, Homo sapiens
  misc_RNA (1)...(19): siRNA sense strand
guuccaaucuaugcucuuc

SEQ ID NO: 429128 - RNA, 19 nt, Homo sapiens
  misc_RNA (1)...(19): siRNA sense strand
cuuguggcccagucaauua

SEQ ID NO: 429129 - RNA, 19 nt, Homo sapiens
  misc_RNA (1)...(19): siRNA sense strand
cagugaugguuccaaucua

SEQ ID NO: 429130 - RNA, 19 nt, Homo sapiens
  misc_RNA (1)...(19): siRNA sense strand
uuaagaagcugggaauucc

SEQ ID NO: 429131 - RNA, 19 nt, Homo sapiens
  misc_RNA (1)...(19): siRNA sense strand
ugaaaagugccuuaaguuu

SEQ ID NO: 429132 - RNA, 19 nt, Homo sapiens
  misc_RNA (1)...(19): siRNA sense strand
aaucuaugcucuucaccau

SEQ ID NO: 429133 - RNA, 19 nt, Homo sapiens
  misc_RNA (1)...(19): siRNA sense strand
uacgagagucugcaagaaa

SEQ ID NO: 429134 - RNA, 19 nt, Homo sapiens
  misc_RNA (1)...(19): siRNA sense strand
ccagaauuccaaagaaaca

SEQ ID NO: 429135 - RNA, 19 nt, Homo sapiens
  misc_RNA (1)...(19): siRNA sense strand
ccucaaagauaaacaaaag

SEQ ID NO: 429136 - RNA, 19 nt, Homo sapiens
  misc_RNA (1)...(19): siRNA sense strand
agaauacgaacauugcuau

SEQ ID NO: 429137 - RNA, 19 nt, Homo sapiens
  misc_RNA (1)...(19): siRNA sense strand
gaaacgcucagauuauucc

SEQ ID NO: 429138 - RNA, 19 nt, Homo sapiens
  misc_RNA (1)...(19): siRNA sense strand
cgaguagauuucuuucaac

SEQ ID NO: 429139 - RNA, 19 nt, Homo sapiens
  misc_RNA (1)...(19): siRNA sense strand
cagauggaguaccuugaca

SEQ ID NO: 429140 - RNA, 19 nt, Homo sapiens
  misc_RNA (1)...(19): siRNA sense strand
auaaggcaccugucaccua

SEQ ID NO: 429141 - RNA, 19 nt, Homo sapiens
  misc_RNA (1)...(19): siRNA sense strand
gcauaaaggucaagaguua

SEQ ID NO: 429142 - RNA, 19 nt, Homo sapiens
  misc_RNA (1)...(19): siRNA sense strand
gaccuuacuugucauaaua

SEQ ID NO: 429143 - RNA, 19 nt, Homo sapiens
  misc_RNA (1)...(19): siRNA sense strand
uuaccaggauccuuuauua

SEQ ID NO: 429144 - RNA, 19 nt, Homo sapiens
  misc_RNA (1)...(19): siRNA sense strand
gaucgugcauucauggaua

SEQ ID NO: 429145 - RNA, 19 nt, Homo sapiens
  misc_RNA (1)...(19): siRNA sense strand
gaauugcucuuuacuaugg

SEQ ID NO: 429146 - RNA, 19 nt, Homo sapiens
  misc_RNA (1)...(19): siRNA sense strand
ucagcaagcucgaguuaaa

SEQ ID NO: 429147 - RNA, 19 nt, Homo sapiens
  misc_RNA (1)...(19): siRNA sense strand
caugaaagcugugguucua

SEQ ID NO: 429148 - RNA, 19 nt, Homo sapiens
  misc_RNA (1)...(19): siRNA sense strand
gauaugcuaggaaacauua

SEQ ID NO: 429149 - RNA, 19 nt, Homo sapiens
  misc_RNA (1)...(19): siRNA sense strand
gugaaucgcuacaucaaga

SEQ ID NO: 429150 - RNA, 19 nt, Homo sapiens
  misc_RNA (1)...(19): siRNA sense strand
ggaacaggaacugaaauua

SEQ ID NO: 429151 - RNA, 19 nt, Homo sapiens
  misc_RNA (1)...(19): siRNA sense strand
gaacaggaacugaaauuac

SEQ ID NO: 429152 - RNA, 19 nt, Homo sapiens
  misc_RNA (1)...(19): siRNA sense strand
gaagaugaaacaagaauag

SEQ ID NO: 429153 - RNA, 19 nt, Homo sapiens
  misc_RNA (1)...(19): siRNA sense strand
gauacaggaugaccaugaa

SEQ ID NO: 429154 - RNA, 19 nt, Homo sapiens
  misc_RNA (1)...(19): siRNA sense strand
uagaggaccuuacuuguca

SEQ ID NO: 429155 - RNA, 19 nt, Homo sapiens
  misc_RNA (1)...(19): siRNA sense strand
ggaccuuacuugucauaau

SEQ ID NO: 429156 - RNA, 19 nt, Homo sapiens
  misc_RNA (1)...(19): siRNA sense strand
auacaaauguuccuucaga

SEQ ID NO: 429157 - RNA, 19 nt, Homo sapiens
  misc_RNA (1)...(19): siRNA sense strand
aaaccuaaauuccaagaug

SEQ ID NO: 429158 - RNA, 19 nt, Homo sapiens
  misc_RNA (1)...(19): siRNA sense strand
uggaauugcucuuuacuau

SEQ ID NO: 429159 - RNA, 19 nt, Homo sapiens
  misc_RNA (1)...(19): siRNA sense strand
ggacaaaacuggguucaga

SEQ ID NO: 429160 - RNA, 19 nt, Homo sapiens
  misc_RNA (1)...(19): siRNA sense strand
gaucaacaacugccuaugu

SEQ ID NO: 429161 - RNA, 19 nt, Homo sapiens
  misc_RNA (1)...(19): siRNA sense strand
uaucacagaucaacaacug

SEQ ID NO: 429162 - RNA, 19 nt, Homo sapiens
  misc_RNA (1)...(19): siRNA sense strand
uaaagaaggcgaaauagag

SEQ ID NO: 429163 - RNA, 19 nt, Homo sapiens
  misc_RNA (1)...(19): siRNA sense strand
gaaggauccuauuguuucu

SEQ ID NO: 429164 - RNA, 19 nt, Homo sapiens
  misc_RNA (1)...(19): siRNA sense strand
ugaaagcugugguucuaau

SEQ ID NO: 429165 - RNA, 19 nt, Homo sapiens
  misc_RNA (1)...(19): siRNA sense strand
ucagaacucgucuucauuu

SEQ ID NO: 429166 - RNA, 19 nt, Homo sapiens
  misc_RNA (1)...(19): siRNA sense strand
gcagaauguuauacaguag

SEQ ID NO: 429167 - RNA, 19 nt, Homo sapiens
  misc_RNA (1)...(19): siRNA sense strand
gaucuacagcuuucacuau

SEQ ID NO: 429168 - RNA, 19 nt, Homo sapiens
  misc_RNA (1)...(19): siRNA sense strand
uacaguaggugaauuaugg

SEQ ID NO: 429169 - RNA, 19 nt, Homo sapiens
  misc_RNA (1)...(19): siRNA sense strand
ugcagaauguuauacagua

SEQ ID NO: 429170 - RNA, 19 nt, Homo sapiens
  misc_RNA (1)...(19): siRNA sense strand
ggauacaggaugaccauga

SEQ ID NO: 429171 - RNA, 19 nt, Homo sapiens
  misc_RNA (1)...(19): siRNA sense strand
ugaaggauccuauuguuuc

SEQ ID NO: 429172 - RNA, 19 nt, Homo sapiens
  misc_RNA (1)...(19): siRNA sense strand
caacuuggaauugcucuuu

SEQ ID NO: 429173 - RNA, 19 nt, Homo sapiens
  misc_RNA (1)...(19): siRNA sense strand
gaaugccagugguaaaaua

SEQ ID NO: 429174 - RNA, 19 nt, Homo sapiens
  misc_RNA (1)...(19): siRNA sense strand
uaaguggacauauucauga

SEQ ID NO: 429175 - RNA, 19 nt, Homo sapiens
  misc_RNA (1)...(19): siRNA sense strand
caucaaccaugcaucaaca

SEQ ID NO: 429176 - RNA, 19 nt, Homo sapiens
  misc_RNA (1)...(19): siRNA sense strand
ccaggauccuuuauuauac

SEQ ID NO: 429177 - RNA, 19 nt, Homo sapiens
  misc_RNA (1)...(19): siRNA sense strand
ggauauuucugcaacugau

SEQ ID NO: 429178 - RNA, 19 nt, Homo sapiens
  misc_RNA (1)...(19): siRNA sense strand
gaaagcugugguucuaauu

SEQ ID NO: 429179 - RNA, 19 nt, Homo sapiens
  misc_RNA (1)...(19): siRNA sense strand
ugccugcaauugugaguua

SEQ ID NO: 429180 - RNA, 19 nt, Homo sapiens
  misc_RNA (1)...(19): siRNA sense strand
agaguuauauucacagcaa

SEQ ID NO: 429181 - RNA, 19 nt, Homo sapiens
  misc_RNA (1)...(19): siRNA sense strand
gaaacuuaaggaugggaua

SEQ ID NO: 429182 - RNA, 19 nt, Homo sapiens
  misc_RNA (1)...(19): siRNA sense strand
cauuacagguucugaagau

SEQ ID NO: 429183 - RNA, 19 nt, Homo sapiens
  misc_RNA (1)...(19): siRNA sense strand
gaaauagaggaccuuacuu

SEQ ID NO: 429184 - RNA, 19 nt, Homo sapiens
  misc_RNA (1)...(19): siRNA sense strand
uccuacagauccugacuua

SEQ ID NO: 429185 - RNA, 19 nt, Homo sapiens
  misc_RNA (1)...(19): siRNA sense strand
uuaaugagcuaugugaauc

SEQ ID NO: 429186 - RNA, 19 nt, Homo sapiens
  misc_RNA (1)...(19): siRNA sense strand
gaacucgucuucauuuuac

SEQ ID NO: 429187 - RNA, 19 nt, Homo sapiens
  misc_RNA (1)...(19): siRNA sense strand
gaaacaagaauagauaugc

SEQ ID NO: 429188 - RNA, 19 nt, Homo sapiens
  misc_RNA (1)...(19): siRNA sense strand
aaauagaggaccuuacuug

SEQ ID NO: 429189 - RNA, 19 nt, Homo sapiens
  misc_RNA (1)...(19): siRNA sense strand
gauuagacgaguuguaaau

SEQ ID NO: 429190 - RNA, 19 nt, Homo sapiens
  misc_RNA (1)...(19): siRNA sense strand
cugccuauguuuauucgua

SEQ ID NO: 429191 - RNA, 19 nt, Homo sapiens
  misc_RNA (1)...(19): siRNA sense strand
gugcauucauggauauuuc

SEQ ID NO: 429192 - RNA, 19 nt, Homo sapiens
  misc_RNA (1)...(19): siRNA sense strand
ggaacgauccugcaucaac

SEQ ID NO: 429193 - RNA, 19 nt, Homo sapiens
  misc_RNA (1)...(19): siRNA sense strand
guacaguuugucuugauaa

SEQ ID NO: 429194 - RNA, 19 nt, Homo sapiens
  misc_RNA (1)...(19): siRNA sense strand
aagaugauaucguccuuuc

SEQ ID NO: 429195 - RNA, 19 nt, Homo sapiens
  misc_RNA (1)...(19): siRNA sense strand
aaaguuggaugugcuggaa

SEQ ID NO: 429196 - RNA, 19 nt, Homo sapiens
  misc_RNA (1)...(19): siRNA sense strand
ggaauugcucuuuacuaug

SEQ ID NO: 429197 - RNA, 19 nt, Homo sapiens
  misc_RNA (1)...(19): siRNA sense strand
accaggauccuuuauuaua

SEQ ID NO: 429198 - RNA, 19 nt, Homo sapiens
  misc_RNA (1)...(19): siRNA sense strand
ucaauacuauggaaugcau

SEQ ID NO: 429199 - RNA, 19 nt, Homo sapiens
  misc_RNA (1)...(19): siRNA sense strand
gucaagaguuauauucaca

SEQ ID NO: 429200 - RNA, 19 nt, Homo sapiens
  misc_RNA (1)...(19): siRNA sense strand
gcucuuuacuauggagaaa

SEQ ID NO: 429201 - RNA, 19 nt, Homo sapiens
  misc_RNA (1)...(19): siRNA sense strand
cuucagaacucgucuucau

SEQ ID NO: 429202 - RNA, 19 nt, Homo sapiens
  misc_RNA (1)...(19): siRNA sense strand
gaagaugauaucguccuuu

SEQ ID NO: 429203 - RNA, 19 nt, Homo sapiens
  misc_RNA (1)...(19): siRNA sense strand
gacgaguuguaaauaaugu

SEQ ID NO: 429204 - RNA, 19 nt, Homo sapiens
  misc_RNA (1)...(19): siRNA sense strand
ugacuuaccaccagguuau

SEQ ID NO: 429205 - RNA, 19 nt, Homo sapiens
  misc_RNA (1)...(19): siRNA sense strand
ggaacugaaauuaccauuc

SEQ ID NO: 429206 - RNA, 19 nt, Homo sapiens
  misc_RNA (1)...(19): siRNA sense strand
uauauucacagcaagauga

SEQ ID NO: 429207 - RNA, 19 nt, Homo sapiens
  misc_RNA (1)...(19): siRNA sense strand
cgaaauagaggaccuuacu

SEQ ID NO: 429208 - RNA, 19 nt, Homo sapiens
  misc_RNA (1)...(19): siRNA sense strand
caacugccuauguuuauuc

SEQ ID NO: 429209 - RNA, 19 nt, Homo sapiens
  misc_RNA (1)...(19): siRNA sense strand
cgucggaucuacagcuuuc

SEQ ID NO: 429210 - RNA, 19 nt, Homo sapiens
  misc_RNA (1)...(19): siRNA sense strand
gcugagaaagguuaucaau

SEQ ID NO: 429211 - RNA, 19 nt, Homo sapiens
  misc_RNA (1)...(19): siRNA sense strand
caagcucgaguuaaaguug

SEQ ID NO: 429212 - RNA, 19 nt, Homo sapiens
  misc_RNA (1)...(19): siRNA sense strand
uuaaagaaggcgaaauaga

SEQ ID NO: 429213 - RNA, 19 nt, Homo sapiens
  misc_RNA (1)...(19): siRNA sense strand
uguacaguuugucuugaua

SEQ ID NO: 429214 - RNA, 19 nt, Homo sapiens
  misc_RNA (1)...(19): siRNA sense strand
caggauccuuuauuauaca

SEQ ID NO: 429215 - RNA, 19 nt, Homo sapiens
  misc_RNA (1)...(19): siRNA sense strand
uuugaaggauccuauuguu

SEQ ID NO: 429216 - RNA, 19 nt, Homo sapiens
  misc_RNA (1)...(19): siRNA sense strand
cagguuaugugcagagucu

SEQ ID NO: 429217 - RNA, 19 nt, Homo sapiens
  misc_RNA (1)...(19): siRNA sense strand
ugggaacgauccugcauca

SEQ ID NO: 429218 - RNA, 19 nt, Homo sapiens
  misc_RNA (1)...(19): siRNA sense strand
ucaugggccugguccuuug

SEQ ID NO: 429219 - RNA, 19 nt, Homo sapiens
  misc_RNA (1)...(19): siRNA sense strand
ggucaagaguuauauucac

SEQ ID NO: 429220 - RNA, 19 nt, Homo sapiens
  misc_RNA (1)...(19): siRNA sense strand
cuaggaaacauuacagguu

SEQ ID NO: 429221 - RNA, 19 nt, Homo sapiens
  misc_RNA (1)...(19): siRNA sense strand
aaacggaaugccaguggua

SEQ ID NO: 429222 - RNA, 19 nt, Homo sapiens
  misc_RNA (1)...(19): siRNA sense strand
ugaagaugauaucguccuu

SEQ ID NO: 429223 - RNA, 19 nt, Homo sapiens
  misc_RNA (1)...(19): siRNA sense strand
aggcaacggugacuuucaa

SEQ ID NO: 429224 - RNA, 19 nt, Homo sapiens
  misc_RNA (1)...(19): siRNA sense strand
aagcacagacuuugaagga

SEQ ID NO: 429225 - RNA, 19 nt, Homo sapiens
  misc_RNA (1)...(19): siRNA sense strand
aaagauaugcuaggaaaca

SEQ ID NO: 429226 - RNA, 19 nt, Homo sapiens
  misc_RNA (1)...(19): siRNA sense strand
gcuggaacaggaacugaaa

SEQ ID NO: 429227 - RNA, 19 nt, Homo sapiens
  misc_RNA (1)...(19): siRNA sense strand
uacaaauguuccuucagaa

SEQ ID NO: 429228 - RNA, 19 nt, Homo sapiens
  misc_RNA (1)...(19): siRNA sense strand
cugauuuggugcugagaaa

SEQ ID NO: 429229 - RNA, 19 nt, Homo sapiens
  misc_RNA (1)...(19): siRNA sense strand
uacagguucugaagaugaa

SEQ ID NO: 429230 - RNA, 19 nt, Homo sapiens
  misc_RNA (1)...(19): siRNA sense strand
gaggaccuuacuugucaua

SEQ ID NO: 429231 - RNA, 19 nt, Homo sapiens
  misc_RNA (1)...(19): siRNA sense strand
acaacugccuauguuuauu

SEQ ID NO: 429232 - RNA, 19 nt, Homo sapiens
  misc_RNA (1)...(19): siRNA sense strand
cugauuagacgaguuguaa

SEQ ID NO: 429233 - RNA, 19 nt, Homo sapiens
  misc_RNA (1)...(19): siRNA sense strand
aaacauuacagguucugaa

SEQ ID NO: 429234 - RNA, 19 nt, Homo sapiens
  misc_RNA (1)...(19): siRNA sense strand
ggaucuacagcuuucacua

SEQ ID NO: 429235 - RNA, 19 nt, Homo sapiens
  misc_RNA (1)...(19): siRNA sense strand
gccuauguuuauucguaua

SEQ ID NO: 429236 - RNA, 19 nt, Homo sapiens
  misc_RNA (1)...(19): siRNA sense strand
guuauacaguaggugaauu

SEQ ID NO: 429237 - RNA, 19 nt, Homo sapiens
  misc_RNA (1)...(19): siRNA sense strand
agucauauguaacuccaau

SEQ ID NO: 429238 - RNA, 19 nt, Homo sapiens
  misc_RNA (1)...(19): siRNA sense strand
uuacagguucugaagauga

SEQ ID NO: 429239 - RNA, 19 nt, Homo sapiens
  misc_RNA (1)...(19): siRNA sense strand
aggaugggauacaggauga

SEQ ID NO: 429240 - RNA, 19 nt, Homo sapiens
  misc_RNA (1)...(19): siRNA sense strand
ggauccuauuguuucuaua

SEQ ID NO: 429241 - RNA, 19 nt, Homo sapiens
  misc_RNA (1)...(19): siRNA sense strand
gcauaaaggucaagaguua

SEQ ID NO: 429242 - RNA, 19 nt, Homo sapiens
  misc_RNA (1)...(19): siRNA sense strand
gaccuuacuugucauaaua

SEQ ID NO: 429243 - RNA, 19 nt, Homo sapiens
  misc_RNA (1)...(19): siRNA sense strand
uuaccaggauccuuuauua

SEQ ID NO: 429244 - RNA, 19 nt, Homo sapiens
  misc_RNA (1)...(19): siRNA sense strand
gaucgugcauucauggaua

SEQ ID NO: 429245 - RNA, 19 nt, Homo sapiens
  misc_RNA (1)...(19): siRNA sense strand
gaauugcucuuuacuaugg

SEQ ID NO: 429246 - RNA, 19 nt, Homo sapiens
  misc_RNA (1)...(19): siRNA sense strand
ucagcaagcucgaguuaaa

SEQ ID NO: 429247 - RNA, 19 nt, Homo sapiens
  misc_RNA (1)...(19): siRNA sense strand
caugaaagcugugguucua

SEQ ID NO: 429248 - RNA, 19 nt, Homo sapiens
  misc_RNA (1)...(19): siRNA sense strand
gauaugcuaggaaacauua

SEQ ID NO: 429249 - RNA, 19 nt, Homo sapiens
  misc_RNA (1)...(19): siRNA sense strand
gugaaucgcuacaucaaga

SEQ ID NO: 429250 - RNA, 19 nt, Homo sapiens
  misc_RNA (1)...(19): siRNA sense strand
ggaacaggaacugaaauua

SEQ ID NO: 429251 - RNA, 19 nt, Homo sapiens
  misc_RNA (1)...(19): siRNA sense strand
gaacaggaacugaaauuac

SEQ ID NO: 429252 - RNA, 19 nt, Homo sapiens
  misc_RNA (1)...(19): siRNA sense strand
gaagaugaaacaagaauag

SEQ ID NO: 429253 - RNA, 19 nt, Homo sapiens
  misc_RNA (1)...(19): siRNA sense strand
gauacaggaugaccaugaa

SEQ ID NO: 429254 - RNA, 19 nt, Homo sapiens
  misc_RNA (1)...(19): siRNA sense strand
uagaggaccuuacuuguca

SEQ ID NO: 429255 - RNA, 19 nt, Homo sapiens
  misc_RNA (1)...(19): siRNA sense strand
ggaccuuacuugucauaau

SEQ ID NO: 429256 - RNA, 19 nt, Homo sapiens
  misc_RNA (1)...(19): siRNA sense strand
auacaaauguuccuucaga

SEQ ID NO: 429257 - RNA, 19 nt, Homo sapiens
  misc_RNA (1)...(19): siRNA sense strand
aaaccuaaauuccaagaug

SEQ ID NO: 429258 - RNA, 19 nt, Homo sapiens
  misc_RNA (1)...(19): siRNA sense strand
uggaauugcucuuuacuau

SEQ ID NO: 429259 - RNA, 19 nt, Homo sapiens
  misc_RNA (1)...(19): siRNA sense strand
ggacaaaacuggguucaga

SEQ ID NO: 429260 - RNA, 19 nt, Homo sapiens
  misc_RNA (1)...(19): siRNA sense strand
gaucaacaacugccuaugu

SEQ ID NO: 429261 - RNA, 19 nt, Homo sapiens
  misc_RNA (1)...(19): siRNA sense strand
uaucacagaucaacaacug

SEQ ID NO: 429262 - RNA, 19 nt, Homo sapiens
  misc_RNA (1)...(19): siRNA sense strand
uaaagaaggcgaaauagag

SEQ ID NO: 429263 - RNA, 19 nt, Homo sapiens
  misc_RNA (1)...(19): siRNA sense strand
gaaggauccuauuguuucu

SEQ ID NO: 429264 - RNA, 19 nt, Homo sapiens
  misc_RNA (1)...(19): siRNA sense strand
ugaaagcugugguucuaau

SEQ ID NO: 429265 - RNA, 19 nt, Homo sapiens
  misc_RNA (1)...(19): siRNA sense strand
ucagaacucgucuucauuu

SEQ ID NO: 429266 - RNA, 19 nt, Homo sapiens
  misc_RNA (1)...(19): siRNA sense strand
gcagaauguuauacaguag

SEQ ID NO: 429267 - RNA, 19 nt, Homo sapiens
  misc_RNA (1)...(19): siRNA sense strand
gaucuacagcuuucacuau

SEQ ID NO: 429268 - RNA, 19 nt, Homo sapiens
  misc_RNA (1)...(19): siRNA sense strand
uacaguaggugaauuaugg

SEQ ID NO: 429269 - RNA, 19 nt, Homo sapiens
  misc_RNA (1)...(19): siRNA sense strand
ugcagaauguuauacagua

SEQ ID NO: 429270 - RNA, 19 nt, Homo sapiens
  misc_RNA (1)...(19): siRNA sense strand
ggauacaggaugaccauga

SEQ ID NO: 429271 - RNA, 19 nt, Homo sapiens
  misc_RNA (1)...(19): siRNA sense strand
ugaaggauccuauuguuuc

SEQ ID NO: 429272 - RNA, 19 nt, Homo sapiens
  misc_RNA (1)...(19): siRNA sense strand
caacuuggaauugcucuuu

SEQ ID NO: 429273 - RNA, 19 nt, Homo sapiens
  misc_RNA (1)...(19): siRNA sense strand
gaaugccagugguaaaaua

SEQ ID NO: 429274 - RNA, 19 nt, Homo sapiens
  misc_RNA (1)...(19): siRNA sense strand
uaaguggacauauucauga

SEQ ID NO: 429275 - RNA, 19 nt, Homo sapiens
  misc_RNA (1)...(19): siRNA sense strand
caucaaccaugcaucaaca

SEQ ID NO: 429276 - RNA, 19 nt, Homo sapiens
  misc_RNA (1)...(19): siRNA sense strand
ccaggauccuuuauuauac

SEQ ID NO: 429277 - RNA, 19 nt, Homo sapiens
  misc_RNA (1)...(19): siRNA sense strand
ggauauuucugcaacugau

SEQ ID NO: 429278 - RNA, 19 nt, Homo sapiens
  misc_RNA (1)...(19): siRNA sense strand
gaaagcugugguucuaauu

SEQ ID NO: 429279 - RNA, 19 nt, Homo sapiens
  misc_RNA (1)...(19): siRNA sense strand
ugccugcaauugugaguua

SEQ ID NO: 429280 - RNA, 19 nt, Homo sapiens
  misc_RNA (1)...(19): siRNA sense strand
agaguuauauucacagcaa

SEQ ID NO: 429281 - RNA, 19 nt, Homo sapiens
  misc_RNA (1)...(19): siRNA sense strand
gaaacuuaaggaugggaua

SEQ ID NO: 429282 - RNA, 19 nt, Homo sapiens
  misc_RNA (1)...(19): siRNA sense strand
cauuacagguucugaagau

SEQ ID NO: 429283 - RNA, 19 nt, Homo sapiens
  misc_RNA (1)...(19): siRNA sense strand
gaaauagaggaccuuacuu

SEQ ID NO: 429284 - RNA, 19 nt, Homo sapiens
  misc_RNA (1)...(19): siRNA sense strand
uccuacagauccugacuua

SEQ ID NO: 429285 - RNA, 19 nt, Homo sapiens
  misc_RNA (1)...(19): siRNA sense strand
uuaaugagcuaugugaauc

SEQ ID NO: 429286 - RNA, 19 nt, Homo sapiens
  misc_RNA (1)...(19): siRNA sense strand
gaacucgucuucauuuuac

SEQ ID NO: 429287 - RNA, 19 nt, Homo sapiens
  misc_RNA (1)...(19): siRNA sense strand
gaaacaagaauagauaugc

SEQ ID NO: 429288 - RNA, 19 nt, Homo sapiens
  misc_RNA (1)...(19): siRNA sense strand
aaauagaggaccuuacuug

SEQ ID NO: 429289 - RNA, 19 nt, Homo sapiens
  misc_RNA (1)...(19): siRNA sense strand
gauuagacgaguuguaaau

SEQ ID NO: 429290 - RNA, 19 nt, Homo sapiens
  misc_RNA (1)...(19): siRNA sense strand
cugccuauguuuauucgua

SEQ ID NO: 429291 - RNA, 19 nt, Homo sapiens
  misc_RNA (1)...(19): siRNA sense strand
gugcauucauggauauuuc

SEQ ID NO: 429292 - RNA, 19 nt, Homo sapiens
  misc_RNA (1)...(19): siRNA sense strand
ggaacgauccugcaucaac

SEQ ID NO: 429293 - RNA, 19 nt, Homo sapiens
  misc_RNA (1)...(19): siRNA sense strand
guacaguuugucuugauaa

SEQ ID NO: 429294 - RNA, 19 nt, Homo sapiens
  misc_RNA (1)...(19): siRNA sense strand
aagaugauaucguccuuuc

SEQ ID NO: 429295 - RNA, 19 nt, Homo sapiens
  misc_RNA (1)...(19): siRNA sense strand
aaaguuggaugugcuggaa

SEQ ID NO: 429296 - RNA, 19 nt, Homo sapiens
  misc_RNA (1)...(19): siRNA sense strand
ggaauugcucuuuacuaug

SEQ ID NO: 429297 - RNA, 19 nt, Homo sapiens
  misc_RNA (1)...(19): siRNA sense strand
accaggauccuuuauuaua

SEQ ID NO: 429298 - RNA, 19 nt, Homo sapiens
  misc_RNA (1)...(19): siRNA sense strand
ucaauacuauggaaugcau

SEQ ID NO: 429299 - RNA, 19 nt, Homo sapiens
  misc_RNA (1)...(19): siRNA sense strand
gucaagaguuauauucaca

SEQ ID NO: 429300 - RNA, 19 nt, Homo sapiens
  misc_RNA (1)...(19): siRNA sense strand
gcucuuuacuauggagaaa

SEQ ID NO: 429301 - RNA, 19 nt, Homo sapiens
  misc_RNA (1)...(19): siRNA sense strand
cuucagaacucgucuucau

SEQ ID NO: 429302 - RNA, 19 nt, Homo sapiens
  misc_RNA (1)...(19): siRNA sense strand
gaagaugauaucguccuuu

SEQ ID NO: 429303 - RNA, 19 nt, Homo sapiens
  misc_RNA (1)...(19): siRNA sense strand
gacgaguuguaaauaaugu

SEQ ID NO: 429304 - RNA, 19 nt, Homo sapiens
  misc_RNA (1)...(19): siRNA sense strand
ugacuuaccaccagguuau

SEQ ID NO: 429305 - RNA, 19 nt, Homo sapiens
  misc_RNA (1)...(19): siRNA sense strand
ggaacugaaauuaccauuc

SEQ ID NO: 429306 - RNA, 19 nt, Homo sapiens
  misc_RNA (1)...(19): siRNA sense strand
uauauucacagcaagauga

SEQ ID NO: 429307 - RNA, 19 nt, Homo sapiens
  misc_RNA (1)...(19): siRNA sense strand
cgaaauagaggaccuuacu

SEQ ID NO: 429308 - RNA, 19 nt, Homo sapiens
  misc_RNA (1)...(19): siRNA sense strand
caacugccuauguuuauuc

SEQ ID NO: 429309 - RNA, 19 nt, Homo sapiens
  misc_RNA (1)...(19): siRNA sense strand
cgucggaucuacagcuuuc

SEQ ID NO: 429310 - RNA, 19 nt, Homo sapiens
  misc_RNA (1)...(19): siRNA sense strand
gcugagaaagguuaucaau

SEQ ID NO: 429311 - RNA, 19 nt, Homo sapiens
  misc_RNA (1)...(19): siRNA sense strand
caagcucgaguuaaaguug

SEQ ID NO: 429312 - RNA, 19 nt, Homo sapiens
  misc_RNA (1)...(19): siRNA sense strand
uuaaagaaggcgaaauaga

SEQ ID NO: 429313 - RNA, 19 nt, Homo sapiens
  misc_RNA (1)...(19): siRNA sense strand
uguacaguuugucuugaua

SEQ ID NO: 429314 - RNA, 19 nt, Homo sapiens
  misc_RNA (1)...(19): siRNA sense strand
caggauccuuuauuauaca

SEQ ID NO: 429315 - RNA, 19 nt, Homo sapiens
  misc_RNA (1)...(19): siRNA sense strand
uuugaaggauccuauuguu

SEQ ID NO: 429316 - RNA, 19 nt, Homo sapiens
  misc_RNA (1)...(19): siRNA sense strand
cagguuaugugcagagucu

SEQ ID NO: 429317 - RNA, 19 nt, Homo sapiens
  misc_RNA (1)...(19): siRNA sense strand
ugggaacgauccugcauca

SEQ ID NO: 429318 - RNA, 19 nt, Homo sapiens
  misc_RNA (1)...(19): siRNA sense strand
ucaugggccugguccuuug

SEQ ID NO: 429319 - RNA, 19 nt, Homo sapiens
  misc_RNA (1)...(19): siRNA sense strand
ggucaagaguuauauucac

SEQ ID NO: 429320 - RNA, 19 nt, Homo sapiens
  misc_RNA (1)...(19): siRNA sense strand
cuaggaaacauuacagguu

SEQ ID NO: 429321 - RNA, 19 nt, Homo sapiens
  misc_RNA (1)...(19): siRNA sense strand
aaacggaaugccaguggua

SEQ ID NO: 429322 - RNA, 19 nt, Homo sapiens
  misc_RNA (1)...(19): siRNA sense strand
ugaagaugauaucguccuu

SEQ ID NO: 429323 - RNA, 19 nt, Homo sapiens
  misc_RNA (1)...(19): siRNA sense strand
aggcaacggugacuuucaa

SEQ ID NO: 429324 - RNA, 19 nt, Homo sapiens
  misc_RNA (1)...(19): siRNA sense strand
aagcacagacuuugaagga

SEQ ID NO: 429325 - RNA, 19 nt, Homo sapiens
  misc_RNA (1)...(19): siRNA sense strand
aaagauaugcuaggaaaca

SEQ ID NO: 429326 - RNA, 19 nt, Homo sapiens
  misc_RNA (1)...(19): siRNA sense strand
gcuggaacaggaacugaaa

SEQ ID NO: 429327 - RNA, 19 nt, Homo sapiens
  misc_RNA (1)...(19): siRNA sense strand
uacaaauguuccuucagaa

SEQ ID NO: 429328 - RNA, 19 nt, Homo sapiens
  misc_RNA (1)...(19): siRNA sense strand
cugauuuggugcugagaaa

SEQ ID NO: 429329 - RNA, 19 nt, Homo sapiens
  misc_RNA (1)...(19): siRNA sense strand
uacagguucugaagaugaa

SEQ ID NO: 429330 - RNA, 19 nt, Homo sapiens
  misc_RNA (1)...(19): siRNA sense strand
gaggaccuuacuugucaua

SEQ ID NO: 429331 - RNA, 19 nt, Homo sapiens
  misc_RNA (1)...(19): siRNA sense strand
acaacugccuauguuuauu

SEQ ID NO: 429332 - RNA, 19 nt, Homo sapiens
  misc_RNA (1)...(19): siRNA sense strand
cugauuagacgaguuguaa

SEQ ID NO: 429333 - RNA, 19 nt, Homo sapiens
  misc_RNA (1)...(19): siRNA sense strand
aaacauuacagguucugaa

SEQ ID NO: 429334 - RNA, 19 nt, Homo sapiens
  misc_RNA (1)...(19): siRNA sense strand
ggaucuacagcuuucacua

SEQ ID NO: 429335 - RNA, 19 nt, Homo sapiens
  misc_RNA (1)...(19): siRNA sense strand
gccuauguuuauucguaua

SEQ ID NO: 429336 - RNA, 19 nt, Homo sapiens
  misc_RNA (1)...(19): siRNA sense strand
guuauacaguaggugaauu

SEQ ID NO: 429337 - RNA, 19 nt, Homo sapiens
  misc_RNA (1)...(19): siRNA sense strand
agucauauguaacuccaau

SEQ ID NO: 429338 - RNA, 19 nt, Homo sapiens
  misc_RNA (1)...(19): siRNA sense strand
uuacagguucugaagauga

SEQ ID NO: 429339 - RNA, 19 nt, Homo sapiens
  misc_RNA (1)...(19): siRNA sense strand
aggaugggauacaggauga

SEQ ID NO: 429340 - RNA, 19 nt, Homo sapiens
  misc_RNA (1)...(19): siRNA sense strand
ggauccuauuguuucuaua

SEQ ID NO: 429341 - RNA, 19 nt, Homo sapiens
  misc_RNA (1)...(19): siRNA sense strand
gcauaaaggucaagaguua

SEQ ID NO: 429342 - RNA, 19 nt, Homo sapiens
  misc_RNA (1)...(19): siRNA sense strand
gaccuuacuugucauaaua

SEQ ID NO: 429343 - RNA, 19 nt, Homo sapiens
  misc_RNA (1)...(19): siRNA sense strand
uuaccaggauccuuuauua

SEQ ID NO: 429344 - RNA, 19 nt, Homo sapiens
  misc_RNA (1)...(19): siRNA sense strand
gaucgugcauucauggaua

SEQ ID NO: 429345 - RNA, 19 nt, Homo sapiens
  misc_RNA (1)...(19): siRNA sense strand
gaauugcucuuuacuaugg

SEQ ID NO: 429346 - RNA, 19 nt, Homo sapiens
  misc_RNA (1)...(19): siRNA sense strand
ucagcaagcucgaguuaaa

SEQ ID NO: 429347 - RNA, 19 nt, Homo sapiens
  misc_RNA (1)...(19): siRNA sense strand
caugaaagcugugguucua

SEQ ID NO: 429348 - RNA, 19 nt, Homo sapiens
  misc_RNA (1)...(19): siRNA sense strand
gauaugcuaggaaacauua

SEQ ID NO: 429349 - RNA, 19 nt, Homo sapiens
  misc_RNA (1)...(19): siRNA sense strand
gugaaucgcuacaucaaga

SEQ ID NO: 429350 - RNA, 19 nt, Homo sapiens
  misc_RNA (1)...(19): siRNA sense strand
ggaacaggaacugaaauua

SEQ ID NO: 429351 - RNA, 19 nt, Homo sapiens
  misc_RNA (1)...(19): siRNA sense strand
gaacaggaacugaaauuac

SEQ ID NO: 429352 - RNA, 19 nt, Homo sapiens
  misc_RNA (1)...(19): siRNA sense strand
gaagaugaaacaagaauag

SEQ ID NO: 429353 - RNA, 19 nt, Homo sapiens
  misc_RNA (1)...(19): siRNA sense strand
gauacaggaugaccaugaa

SEQ ID NO: 429354 - RNA, 19 nt, Homo sapiens
  misc_RNA (1)...(19): siRNA sense strand
uagaggaccuuacuuguca

SEQ ID NO: 429355 - RNA, 19 nt, Homo sapiens
  misc_RNA (1)...(19): siRNA sense strand
ggaccuuacuugucauaau

SEQ ID NO: 429356 - RNA, 19 nt, Homo sapiens
  misc_RNA (1)...(19): siRNA sense strand
auacaaauguuccuucaga

SEQ ID NO: 429357 - RNA, 19 nt, Homo sapiens
  misc_RNA (1)...(19): siRNA sense strand
aaaccuaaauuccaagaug

SEQ ID NO: 429358 - RNA, 19 nt, Homo sapiens
  misc_RNA (1)...(19): siRNA sense strand
uggaauugcucuuuacuau

SEQ ID NO: 429359 - RNA, 19 nt, Homo sapiens
  misc_RNA (1)...(19): siRNA sense strand
ggacaaaacuggguucaga

SEQ ID NO: 429360 - RNA, 19 nt, Homo sapiens
  misc_RNA (1)...(19): siRNA sense strand
gaucaacaacugccuaugu

SEQ ID NO: 429361 - RNA, 19 nt, Homo sapiens
  misc_RNA (1)...(19): siRNA sense strand
uaucacagaucaacaacug

SEQ ID NO: 429362 - RNA, 19 nt, Homo sapiens
  misc_RNA (1)...(19): siRNA sense strand
uaaagaaggcgaaauagag

SEQ ID NO: 429363 - RNA, 19 nt, Homo sapiens
  misc_RNA (1)...(19): siRNA sense strand
gaaggauccuauuguuucu

SEQ ID NO: 429364 - RNA, 19 nt, Homo sapiens
  misc_RNA (1)...(19): siRNA sense strand
ugaaagcugugguucuaau

SEQ ID NO: 429365 - RNA, 19 nt, Homo sapiens
  misc_RNA (1)...(19): siRNA sense strand
ucagaacucgucuucauuu

SEQ ID NO: 429366 - RNA, 19 nt, Homo sapiens
  misc_RNA (1)...(19): siRNA sense strand
gcagaauguuauacaguag

SEQ ID NO: 429367 - RNA, 19 nt, Homo sapiens
  misc_RNA (1)...(19): siRNA sense strand
gaucuacagcuuucacuau

SEQ ID NO: 429368 - RNA, 19 nt, Homo sapiens
  misc_RNA (1)...(19): siRNA sense strand
uacaguaggugaauuaugg

SEQ ID NO: 429369 - RNA, 19 nt, Homo sapiens
  misc_RNA (1)...(19): siRNA sense strand
ugcagaauguuauacagua

SEQ ID NO: 429370 - RNA, 19 nt, Homo sapiens
  misc_RNA (1)...(19): siRNA sense strand
ggauacaggaugaccauga

SEQ ID NO: 429371 - RNA, 19 nt, Homo sapiens
  misc_RNA (1)...(19): siRNA sense strand
ugaaggauccuauuguuuc

SEQ ID NO: 429372 - RNA, 19 nt, Homo sapiens
  misc_RNA (1)...(19): siRNA sense strand
caacuuggaauugcucuuu

SEQ ID NO: 429373 - RNA, 19 nt, Homo sapiens
  misc_RNA (1)...(19): siRNA sense strand
gaaugccagugguaaaaua

SEQ ID NO: 429374 - RNA, 19 nt, Homo sapiens
  misc_RNA (1)...(19): siRNA sense strand
uaaguggacauauucauga

SEQ ID NO: 429375 - RNA, 19 nt, Homo sapiens
  misc_RNA (1)...(19): siRNA sense strand
caucaaccaugcaucaaca

SEQ ID NO: 429376 - RNA, 19 nt, Homo sapiens
  misc_RNA (1)...(19): siRNA sense strand
ccaggauccuuuauuauac

SEQ ID NO: 429377 - RNA, 19 nt, Homo sapiens
  misc_RNA (1)...(19): siRNA sense strand
ggauauuucugcaacugau

SEQ ID NO: 429378 - RNA, 19 nt, Homo sapiens
  misc_RNA (1)...(19): siRNA sense strand
gaaagcugugguucuaauu

SEQ ID NO: 429379 - RNA, 19 nt, Homo sapiens
  misc_RNA (1)...(19): siRNA sense strand
ugccugcaauugugaguua

SEQ ID NO: 429380 - RNA, 19 nt, Homo sapiens
  misc_RNA (1)...(19): siRNA sense strand
agaguuauauucacagcaa

SEQ ID NO: 429381 - RNA, 19 nt, Homo sapiens
  misc_RNA (1)...(19): siRNA sense strand
gaaacuuaaggaugggaua

SEQ ID NO: 429382 - RNA, 19 nt, Homo sapiens
  misc_RNA (1)...(19): siRNA sense strand
cauuacagguucugaagau

SEQ ID NO: 429383 - RNA, 19 nt, Homo sapiens
  misc_RNA (1)...(19): siRNA sense strand
gaaauagaggaccuuacuu

SEQ ID NO: 429384 - RNA, 19 nt, Homo sapiens
  misc_RNA (1)...(19): siRNA sense strand
uccuacagauccugacuua

SEQ ID NO: 429385 - RNA, 19 nt, Homo sapiens
  misc_RNA (1)...(19): siRNA sense strand
uuaaugagcuaugugaauc

SEQ ID NO: 429386 - RNA, 19 nt, Homo sapiens
  misc_RNA (1)...(19): siRNA sense strand
gaacucgucuucauuuuac

SEQ ID NO: 429387 - RNA, 19 nt, Homo sapiens
  misc_RNA (1)...(19): siRNA sense strand
gaaacaagaauagauaugc

SEQ ID NO: 429388 - RNA, 19 nt, Homo sapiens
  misc_RNA (1)...(19): siRNA sense strand
aaauagaggaccuuacuug

SEQ ID NO: 429389 - RNA, 19 nt, Homo sapiens
  misc_RNA (1)...(19): siRNA sense strand
gauuagacgaguuguaaau

SEQ ID NO: 429390 - RNA, 19 nt, Homo sapiens
  misc_RNA (1)...(19): siRNA sense strand
cugccuauguuuauucgua

SEQ ID NO: 429391 - RNA, 19 nt, Homo sapiens
  misc_RNA (1)...(19): siRNA sense strand
gugcauucauggauauuuc

SEQ ID NO: 429392 - RNA, 19 nt, Homo sapiens
  misc_RNA (1)...(19): siRNA sense strand
ggaacgauccugcaucaac

SEQ ID NO: 429393 - RNA, 19 nt, Homo sapiens
  misc_RNA (1)...(19): siRNA sense strand
guacaguuugucuugauaa

SEQ ID NO: 429394 - RNA, 19 nt, Homo sapiens
  misc_RNA (1)...(19): siRNA sense strand
aagaugauaucguccuuuc

SEQ ID NO: 429395 - RNA, 19 nt, Homo sapiens
  misc_RNA (1)...(19): siRNA sense strand
aaaguuggaugugcuggaa

SEQ ID NO: 429396 - RNA, 19 nt, Homo sapiens
  misc_RNA (1)...(19): siRNA sense strand
ggaauugcucuuuacuaug

SEQ ID NO: 429397 - RNA, 19 nt, Homo sapiens
  misc_RNA (1)...(19): siRNA sense strand
accaggauccuuuauuaua

SEQ ID NO: 429398 - RNA, 19 nt, Homo sapiens
  misc_RNA (1)...(19): siRNA sense strand
ucaauacuauggaaugcau

SEQ ID NO: 429399 - RNA, 19 nt, Homo sapiens
  misc_RNA (1)...(19): siRNA sense strand
gucaagaguuauauucaca

SEQ ID NO: 429400 - RNA, 19 nt, Homo sapiens
  misc_RNA (1)...(19): siRNA sense strand
gcucuuuacuauggagaaa

SEQ ID NO: 429401 - RNA, 19 nt, Homo sapiens
  misc_RNA (1)...(19): siRNA sense strand
cuucagaacucgucuucau

SEQ ID NO: 429402 - RNA, 19 nt, Homo sapiens
  misc_RNA (1)...(19): siRNA sense strand
gaagaugauaucguccuuu

SEQ ID NO: 429403 - RNA, 19 nt, Homo sapiens
  misc_RNA (1)...(19): siRNA sense strand
gacgaguuguaaauaaugu

SEQ ID NO: 429404 - RNA, 19 nt, Homo sapiens
  misc_RNA (1)...(19): siRNA sense strand
ugacuuaccaccagguuau

SEQ ID NO: 429405 - RNA, 19 nt, Homo sapiens
  misc_RNA (1)...(19): siRNA sense strand
ggaacugaaauuaccauuc

SEQ ID NO: 429406 - RNA, 19 nt, Homo sapiens
  misc_RNA (1)...(19): siRNA sense strand
uauauucacagcaagauga

SEQ ID NO: 429407 - RNA, 19 nt, Homo sapiens
  misc_RNA (1)...(19): siRNA sense strand
cgaaauagaggaccuuacu

SEQ ID NO: 429408 - RNA, 19 nt, Homo sapiens
  misc_RNA (1)...(19): siRNA sense strand
caacugccuauguuuauuc

SEQ ID NO: 429409 - RNA, 19 nt, Homo sapiens
  misc_RNA (1)...(19): siRNA sense strand
cgucggaucuacagcuuuc

SEQ ID NO: 429410 - RNA, 19 nt, Homo sapiens
  misc_RNA (1)...(19): siRNA sense strand
gcugagaaagguuaucaau

SEQ ID NO: 429411 - RNA, 19 nt, Homo sapiens
  misc_RNA (1)...(19): siRNA sense strand
caagcucgaguuaaaguug

SEQ ID NO: 429412 - RNA, 19 nt, Homo sapiens
  misc_RNA (1)...(19): siRNA sense strand
uuaaagaaggcgaaauaga

SEQ ID NO: 429413 - RNA, 19 nt, Homo sapiens
  misc_RNA (1)...(19): siRNA sense strand
uguacaguuugucuugaua

SEQ ID NO: 429414 - RNA, 19 nt, Homo sapiens
  misc_RNA (1)...(19): siRNA sense strand
caggauccuuuauuauaca

SEQ ID NO: 429415 - RNA, 19 nt, Homo sapiens
  misc_RNA (1)...(19): siRNA sense strand
uuugaaggauccuauuguu

SEQ ID NO: 429416 - RNA, 19 nt, Homo sapiens
  misc_RNA (1)...(19): siRNA sense strand
cagguuaugugcagagucu

SEQ ID NO: 429417 - RNA, 19 nt, Homo sapiens
  misc_RNA (1)...(19): siRNA sense strand
ugggaacgauccugcauca

SEQ ID NO: 429418 - RNA, 19 nt, Homo sapiens
  misc_RNA (1)...(19): siRNA sense strand
ucaugggccugguccuuug

SEQ ID NO: 429419 - RNA, 19 nt, Homo sapiens
  misc_RNA (1)...(19): siRNA sense strand
ggucaagaguuauauucac

SEQ ID NO: 429420 - RNA, 19 nt, Homo sapiens
  misc_RNA (1)...(19): siRNA sense strand
cuaggaaacauuacagguu

SEQ ID NO: 429421 - RNA, 19 nt, Homo sapiens
  misc_RNA (1)...(19): siRNA sense strand
aaacggaaugccaguggua

SEQ ID NO: 429422 - RNA, 19 nt, Homo sapiens
  misc_RNA (1)...(19): siRNA sense strand
ugaagaugauaucguccuu

SEQ ID NO: 429423 - RNA, 19 nt, Homo sapiens
  misc_RNA (1)...(19): siRNA sense strand
aggcaacggugacuuucaa

SEQ ID NO: 429424 - RNA, 19 nt, Homo sapiens
  misc_RNA (1)...(19): siRNA sense strand
aagcacagacuuugaagga

SEQ ID NO: 429425 - RNA, 19 nt, Homo sapiens
  misc_RNA (1)...(19): siRNA sense strand
aaagauaugcuaggaaaca

SEQ ID NO: 429426 - RNA, 19 nt, Homo sapiens
  misc_RNA (1)...(19): siRNA sense strand
gcuggaacaggaacugaaa

SEQ ID NO: 429427 - RNA, 19 nt, Homo sapiens
  misc_RNA (1)...(19): siRNA sense strand
uacaaauguuccuucagaa

SEQ ID NO: 429428 - RNA, 19 nt, Homo sapiens
  misc_RNA (1)...(19): siRNA sense strand
cugauuuggugcugagaaa

SEQ ID NO: 429429 - RNA, 19 nt, Homo sapiens
  misc_RNA (1)...(19): siRNA sense strand
uacagguucugaagaugaa

SEQ ID NO: 429430 - RNA, 19 nt, Homo sapiens
  misc_RNA (1)...(19): siRNA sense strand
gaggaccuuacuugucaua

SEQ ID NO: 429431 - RNA, 19 nt, Homo sapiens
  misc_RNA (1)...(19): siRNA sense strand
acaacugccuauguuuauu

SEQ ID NO: 429432 - RNA, 19 nt, Homo sapiens
  misc_RNA (1)...(19): siRNA sense strand
cugauuagacgaguuguaa

SEQ ID NO: 429433 - RNA, 19 nt, Homo sapiens
  misc_RNA (1)...(19): siRNA sense strand
aaacauuacagguucugaa

SEQ ID NO: 429434 - RNA, 19 nt, Homo sapiens
  misc_RNA (1)...(19): siRNA sense strand
ggaucuacagcuuucacua

SEQ ID NO: 429435 - RNA, 19 nt, Homo sapiens
  misc_RNA (1)...(19): siRNA sense strand
gccuauguuuauucguaua

SEQ ID NO: 429436 - RNA, 19 nt, Homo sapiens
  misc_RNA (1)...(19): siRNA sense strand
guuauacaguaggugaauu

SEQ ID NO: 429437 - RNA, 19 nt, Homo sapiens
  misc_RNA (1)...(19): siRNA sense strand
agucauauguaacuccaau

SEQ ID NO: 429438 - RNA, 19 nt, Homo sapiens
  misc_RNA (1)...(19): siRNA sense strand
uuacagguucugaagauga

SEQ ID NO: 429439 - RNA, 19 nt, Homo sapiens
  misc_RNA (1)...(19): siRNA sense strand
aggaugggauacaggauga

SEQ ID NO: 429440 - RNA, 19 nt, Homo sapiens
  misc_RNA (1)...(19): siRNA sense strand
ggauccuauuguuucuaua

SEQ ID NO: 429441 - RNA, 19 nt, Homo sapiens
  misc_RNA (1)...(19): siRNA sense strand
gcauaaaggucaagaguua

SEQ ID NO: 429442 - RNA, 19 nt, Homo sapiens
  misc_RNA (1)...(19): siRNA sense strand
gaccuuacuugucauaaua

SEQ ID NO: 429443 - RNA, 19 nt, Homo sapiens
  misc_RNA (1)...(19): siRNA sense strand
uuaccaggauccuuuauua

SEQ ID NO: 429444 - RNA, 19 nt, Homo sapiens
  misc_RNA (1)...(19): siRNA sense strand
gaucgugcauucauggaua

SEQ ID NO: 429445 - RNA, 19 nt, Homo sapiens
  misc_RNA (1)...(19): siRNA sense strand
gaauugcucuuuacuaugg

SEQ ID NO: 429446 - RNA, 19 nt, Homo sapiens
  misc_RNA (1)...(19): siRNA sense strand
ucagcaagcucgaguuaaa

SEQ ID NO: 429447 - RNA, 19 nt, Homo sapiens
  misc_RNA (1)...(19): siRNA sense strand
caugaaagcugugguucua

SEQ ID NO: 429448 - RNA, 19 nt, Homo sapiens
  misc_RNA (1)...(19): siRNA sense strand
gauaugcuaggaaacauua

SEQ ID NO: 429449 - RNA, 19 nt, Homo sapiens
  misc_RNA (1)...(19): siRNA sense strand
gugaaucgcuacaucaaga

SEQ ID NO: 429450 - RNA, 19 nt, Homo sapiens
  misc_RNA (1)...(19): siRNA sense strand
ggaacaggaacugaaauua

SEQ ID NO: 429451 - RNA, 19 nt, Homo sapiens
  misc_RNA (1)...(19): siRNA sense strand
gaacaggaacugaaauuac

SEQ ID NO: 429452 - RNA, 19 nt, Homo sapiens
  misc_RNA (1)...(19): siRNA sense strand
gaagaugaaacaagaauag

SEQ ID NO: 429453 - RNA, 19 nt, Homo sapiens
  misc_RNA (1)...(19): siRNA sense strand
gauacaggaugaccaugaa

SEQ ID NO: 429454 - RNA, 19 nt, Homo sapiens
  misc_RNA (1)...(19): siRNA sense strand
uagaggaccuuacuuguca

SEQ ID NO: 429455 - RNA, 19 nt, Homo sapiens
  misc_RNA (1)...(19): siRNA sense strand
ggaccuuacuugucauaau

SEQ ID NO: 429456 - RNA, 19 nt, Homo sapiens
  misc_RNA (1)...(19): siRNA sense strand
auacaaauguuccuucaga

SEQ ID NO: 429457 - RNA, 19 nt, Homo sapiens
  misc_RNA (1)...(19): siRNA sense strand
aaaccuaaauuccaagaug

SEQ ID NO: 429458 - RNA, 19 nt, Homo sapiens
  misc_RNA (1)...(19): siRNA sense strand
uggaauugcucuuuacuau

SEQ ID NO: 429459 - RNA, 19 nt, Homo sapiens
  misc_RNA (1)...(19): siRNA sense strand
ggacaaaacuggguucaga

SEQ ID NO: 429460 - RNA, 19 nt, Homo sapiens
  misc_RNA (1)...(19): siRNA sense strand
gaucaacaacugccuaugu

SEQ ID NO: 429461 - RNA, 19 nt, Homo sapiens
  misc_RNA (1)...(19): siRNA sense strand
uaucacagaucaacaacug

SEQ ID NO: 429462 - RNA, 19 nt, Homo sapiens
  misc_RNA (1)...(19): siRNA sense strand
uaaagaaggcgaaauagag

SEQ ID NO: 429463 - RNA, 19 nt, Homo sapiens
  misc_RNA (1)...(19): siRNA sense strand
gaaggauccuauuguuucu

SEQ ID NO: 429464 - RNA, 19 nt, Homo sapiens
  misc_RNA (1)...(19): siRNA sense strand
ugaaagcugugguucuaau

SEQ ID NO: 429465 - RNA, 19 nt, Homo sapiens
  misc_RNA (1)...(19): siRNA sense strand
ucagaacucgucuucauuu

SEQ ID NO: 429466 - RNA, 19 nt, Homo sapiens
  misc_RNA (1)...(19): siRNA sense strand
gcagaauguuauacaguag

SEQ ID NO: 429467 - RNA, 19 nt, Homo sapiens
  misc_RNA (1)...(19): siRNA sense strand
gaucuacagcuuucacuau

SEQ ID NO: 429468 - RNA, 19 nt, Homo sapiens
  misc_RNA (1)...(19): siRNA sense strand
uacaguaggugaauuaugg

SEQ ID NO: 429469 - RNA, 19 nt, Homo sapiens
  misc_RNA (1)...(19): siRNA sense strand
ugcagaauguuauacagua

SEQ ID NO: 429470 - RNA, 19 nt, Homo sapiens
  misc_RNA (1)...(19): siRNA sense strand
ggauacaggaugaccauga

SEQ ID NO: 429471 - RNA, 19 nt, Homo sapiens
  misc_RNA (1)...(19): siRNA sense strand
ugaaggauccuauuguuuc

SEQ ID NO: 429472 - RNA, 19 nt, Homo sapiens
  misc_RNA (1)...(19): siRNA sense strand
caacuuggaauugcucuuu

SEQ ID NO: 429473 - RNA, 19 nt, Homo sapiens
  misc_RNA (1)...(19): siRNA sense strand
gaaugccagugguaaaaua

SEQ ID NO: 429474 - RNA, 19 nt, Homo sapiens
  misc_RNA (1)...(19): siRNA sense strand
uaaguggacauauucauga

SEQ ID NO: 429475 - RNA, 19 nt, Homo sapiens
  misc_RNA (1)...(19): siRNA sense strand
caucaaccaugcaucaaca

SEQ ID NO: 429476 - RNA, 19 nt, Homo sapiens
  misc_RNA (1)...(19): siRNA sense strand
ccaggauccuuuauuauac

SEQ ID NO: 429477 - RNA, 19 nt, Homo sapiens
  misc_RNA (1)...(19): siRNA sense strand
ggauauuucugcaacugau

SEQ ID NO: 429478 - RNA, 19 nt, Homo sapiens
  misc_RNA (1)...(19): siRNA sense strand
gaaagcugugguucuaauu

SEQ ID NO: 429479 - RNA, 19 nt, Homo sapiens
  misc_RNA (1)...(19): siRNA sense strand
ugccugcaauugugaguua

SEQ ID NO: 429480 - RNA, 19 nt, Homo sapiens
  misc_RNA (1)...(19): siRNA sense strand
agaguuauauucacagcaa

SEQ ID NO: 429481 - RNA, 19 nt, Homo sapiens
  misc_RNA (1)...(19): siRNA sense strand
gaaacuuaaggaugggaua

SEQ ID NO: 429482 - RNA, 19 nt, Homo sapiens
  misc_RNA (1)...(19): siRNA sense strand
cauuacagguucugaagau

SEQ ID NO: 429483 - RNA, 19 nt, Homo sapiens
  misc_RNA (1)...(19): siRNA sense strand
gaaauagaggaccuuacuu

SEQ ID NO: 429484 - RNA, 19 nt, Homo sapiens
  misc_RNA (1)...(19): siRNA sense strand
uccuacagauccugacuua

SEQ ID NO: 429485 - RNA, 19 nt, Homo sapiens
  misc_RNA (1)...(19): siRNA sense strand
uuaaugagcuaugugaauc

SEQ ID NO: 429486 - RNA, 19 nt, Homo sapiens
  misc_RNA (1)...(19): siRNA sense strand
gaacucgucuucauuuuac

SEQ ID NO: 429487 - RNA, 19 nt, Homo sapiens
  misc_RNA (1)...(19): siRNA sense strand
gaaacaagaauagauaugc

SEQ ID NO: 429488 - RNA, 19 nt, Homo sapiens
  misc_RNA (1)...(19): siRNA sense strand
aaauagaggaccuuacuug

SEQ ID NO: 429489 - RNA, 19 nt, Homo sapiens
  misc_RNA (1)...(19): siRNA sense strand
gauuagacgaguuguaaau

SEQ ID NO: 429490 - RNA, 19 nt, Homo sapiens
  misc_RNA (1)...(19): siRNA sense strand
cugccuauguuuauucgua

SEQ ID NO: 429491 - RNA, 19 nt, Homo sapiens
  misc_RNA (1)...(19): siRNA sense strand
gugcauucauggauauuuc

SEQ ID NO: 429492 - RNA, 19 nt, Homo sapiens
  misc_RNA (1)...(19): siRNA sense strand
ggaacgauccugcaucaac

SEQ ID NO: 429493 - RNA, 19 nt, Homo sapiens
  misc_RNA (1)...(19): siRNA sense strand
guacaguuugucuugauaa

SEQ ID NO: 429494 - RNA, 19 nt, Homo sapiens
  misc_RNA (1)...(19): siRNA sense strand
aagaugauaucguccuuuc

SEQ ID NO: 429495 - RNA, 19 nt, Homo sapiens
  misc_RNA (1)...(19): siRNA sense strand
aaaguuggaugugcuggaa

SEQ ID NO: 429496 - RNA, 19 nt, Homo sapiens
  misc_RNA (1)...(19): siRNA sense strand
ggaauugcucuuuacuaug

SEQ ID NO: 429497 - RNA, 19 nt, Homo sapiens
  misc_RNA (1)...(19): siRNA sense strand
accaggauccuuuauuaua

SEQ ID NO: 429498 - RNA, 19 nt, Homo sapiens
  misc_RNA (1)...(19): siRNA sense strand
ucaauacuauggaaugcau

SEQ ID NO: 429499 - RNA, 19 nt, Homo sapiens
  misc_RNA (1)...(19): siRNA sense strand
gucaagaguuauauucaca

SEQ ID NO: 429500 - RNA, 19 nt, Homo sapiens
  misc_RNA (1)...(19): siRNA sense strand
gcucuuuacuauggagaaa

SEQ ID NO: 429501 - RNA, 19 nt, Homo sapiens
  misc_RNA (1)...(19): siRNA sense strand
cuucagaacucgucuucau

SEQ ID NO: 429502 - RNA, 19 nt, Homo sapiens
  misc_RNA (1)...(19): siRNA sense strand
gaagaugauaucguccuuu

SEQ ID NO: 429503 - RNA, 19 nt, Homo sapiens
  misc_RNA (1)...(19): siRNA sense strand
gacgaguuguaaauaaugu

SEQ ID NO: 429504 - RNA, 19 nt, Homo sapiens
  misc_RNA (1)...(19): siRNA sense strand
ugacuuaccaccagguuau

SEQ ID NO: 429505 - RNA, 19 nt, Homo sapiens
  misc_RNA (1)...(19): siRNA sense strand
ggaacugaaauuaccauuc

SEQ ID NO: 429506 - RNA, 19 nt, Homo sapiens
  misc_RNA (1)...(19): siRNA sense strand
uauauucacagcaagauga

SEQ ID NO: 429507 - RNA, 19 nt, Homo sapiens
  misc_RNA (1)...(19): siRNA sense strand
cgaaauagaggaccuuacu

SEQ ID NO: 429508 - RNA, 19 nt, Homo sapiens
  misc_RNA (1)...(19): siRNA sense strand
caacugccuauguuuauuc

SEQ ID NO: 429509 - RNA, 19 nt, Homo sapiens
  misc_RNA (1)...(19): siRNA sense strand
cgucggaucuacagcuuuc

SEQ ID NO: 429510 - RNA, 19 nt, Homo sapiens
  misc_RNA (1)...(19): siRNA sense strand
gcugagaaagguuaucaau

SEQ ID NO: 429511 - RNA, 19 nt, Homo sapiens
  misc_RNA (1)...(19): siRNA sense strand
caagcucgaguuaaaguug

SEQ ID NO: 429512 - RNA, 19 nt, Homo sapiens
  misc_RNA (1)...(19): siRNA sense strand
uuaaagaaggcgaaauaga

SEQ ID NO: 429513 - RNA, 19 nt, Homo sapiens
  misc_RNA (1)...(19): siRNA sense strand
uguacaguuugucuugaua

SEQ ID NO: 429514 - RNA, 19 nt, Homo sapiens
  misc_RNA (1)...(19): siRNA sense strand
caggauccuuuauuauaca

SEQ ID NO: 429515 - RNA, 19 nt, Homo sapiens
  misc_RNA (1)...(19): siRNA sense strand
uuugaaggauccuauuguu

SEQ ID NO: 429516 - RNA, 19 nt, Homo sapiens
  misc_RNA (1)...(19): siRNA sense strand
cagguuaugugcagagucu

SEQ ID NO: 429517 - RNA, 19 nt, Homo sapiens
  misc_RNA (1)...(19): siRNA sense strand
ugggaacgauccugcauca

SEQ ID NO: 429518 - RNA, 19 nt, Homo sapiens
  misc_RNA (1)...(19): siRNA sense strand
ucaugggccugguccuuug

SEQ ID NO: 429519 - RNA, 19 nt, Homo sapiens
  misc_RNA (1)...(19): siRNA sense strand
ggucaagaguuauauucac

SEQ ID NO: 429520 - RNA, 19 nt, Homo sapiens
  misc_RNA (1)...(19): siRNA sense strand
cuaggaaacauuacagguu

SEQ ID NO: 429521 - RNA, 19 nt, Homo sapiens
  misc_RNA (1)...(19): siRNA sense strand
aaacggaaugccaguggua

SEQ ID NO: 429522 - RNA, 19 nt, Homo sapiens
  misc_RNA (1)...(19): siRNA sense strand
ugaagaugauaucguccuu

SEQ ID NO: 429523 - RNA, 19 nt, Homo sapiens
  misc_RNA (1)...(19): siRNA sense strand
aggcaacggugacuuucaa

SEQ ID NO: 429524 - RNA, 19 nt, Homo sapiens
  misc_RNA (1)...(19): siRNA sense strand
aagcacagacuuugaagga

SEQ ID NO: 429525 - RNA, 19 nt, Homo sapiens
  misc_RNA (1)...(19): siRNA sense strand
aaagauaugcuaggaaaca

SEQ ID NO: 429526 - RNA, 19 nt, Homo sapiens
  misc_RNA (1)...(19): siRNA sense strand
gcuggaacaggaacugaaa

SEQ ID NO: 429527 - RNA, 19 nt, Homo sapiens
  misc_RNA (1)...(19): siRNA sense strand
uacaaauguuccuucagaa

SEQ ID NO: 429528 - RNA, 19 nt, Homo sapiens
  misc_RNA (1)...(19): siRNA sense strand
cugauuuggugcugagaaa

SEQ ID NO: 429529 - RNA, 19 nt, Homo sapiens
  misc_RNA (1)...(19): siRNA sense strand
uacagguucugaagaugaa

SEQ ID NO: 429530 - RNA, 19 nt, Homo sapiens
  misc_RNA (1)...(19): siRNA sense strand
gaggaccuuacuugucaua

SEQ ID NO: 429531 - RNA, 19 nt, Homo sapiens
  misc_RNA (1)...(19): siRNA sense strand
acaacugccuauguuuauu

SEQ ID NO: 429532 - RNA, 19 nt, Homo sapiens
  misc_RNA (1)...(19): siRNA sense strand
cugauuagacgaguuguaa

SEQ ID NO: 429533 - RNA, 19 nt, Homo sapiens
  misc_RNA (1)...(19): siRNA sense strand
aaacauuacagguucugaa

SEQ ID NO: 429534 - RNA, 19 nt, Homo sapiens
  misc_RNA (1)...(19): siRNA sense strand
ggaucuacagcuuucacua

SEQ ID NO: 429535 - RNA, 19 nt, Homo sapiens
  misc_RNA (1)...(19): siRNA sense strand
gccuauguuuauucguaua

SEQ ID NO: 429536 - RNA, 19 nt, Homo sapiens
  misc_RNA (1)...(19): siRNA sense strand
guuauacaguaggugaauu

SEQ ID NO: 429537 - RNA, 19 nt, Homo sapiens
  misc_RNA (1)...(19): siRNA sense strand
agucauauguaacuccaau

SEQ ID NO: 429538 - RNA, 19 nt, Homo sapiens
  misc_RNA (1)...(19): siRNA sense strand
uuacagguucugaagauga

SEQ ID NO: 429539 - RNA, 19 nt, Homo sapiens
  misc_RNA (1)...(19): siRNA sense strand
aggaugggauacaggauga

SEQ ID NO: 429540 - RNA, 19 nt, Homo sapiens
  misc_RNA (1)...(19): siRNA sense strand
ggauccuauuguuucuaua

SEQ ID NO: 429541 - RNA, 19 nt, Homo sapiens
  misc_RNA (1)...(19): siRNA sense strand
gcauaaaggucaagaguua

SEQ ID NO: 429542 - RNA, 19 nt, Homo sapiens
  misc_RNA (1)...(19): siRNA sense strand
gaccuuacuugucauaaua

SEQ ID NO: 429543 - RNA, 19 nt, Homo sapiens
  misc_RNA (1)...(19): siRNA sense strand
uuaccaggauccuuuauua

SEQ ID NO: 429544 - RNA, 19 nt, Homo sapiens
  misc_RNA (1)...(19): siRNA sense strand
gaucgugcauucauggaua

SEQ ID NO: 429545 - RNA, 19 nt, Homo sapiens
  misc_RNA (1)...(19): siRNA sense strand
gaauugcucuuuacuaugg

SEQ ID NO: 429546 - RNA, 19 nt, Homo sapiens
  misc_RNA (1)...(19): siRNA sense strand
ucagcaagcucgaguuaaa

SEQ ID NO: 429547 - RNA, 19 nt, Homo sapiens
  misc_RNA (1)...(19): siRNA sense strand
caugaaagcugugguucua

SEQ ID NO: 429548 - RNA, 19 nt, Homo sapiens
  misc_RNA (1)...(19): siRNA sense strand
gauaugcuaggaaacauua

SEQ ID NO: 429549 - RNA, 19 nt, Homo sapiens
  misc_RNA (1)...(19): siRNA sense strand
gugaaucgcuacaucaaga

SEQ ID NO: 429550 - RNA, 19 nt, Homo sapiens
  misc_RNA (1)...(19): siRNA sense strand
ggaacaggaacugaaauua

SEQ ID NO: 429551 - RNA, 19 nt, Homo sapiens
  misc_RNA (1)...(19): siRNA sense strand
gaacaggaacugaaauuac

SEQ ID NO: 429552 - RNA, 19 nt, Homo sapiens
  misc_RNA (1)...(19): siRNA sense strand
gaagaugaaacaagaauag

SEQ ID NO: 429553 - RNA, 19 nt, Homo sapiens
  misc_RNA (1)...(19): siRNA sense strand
gauacaggaugaccaugaa

SEQ ID NO: 429554 - RNA, 19 nt, Homo sapiens
  misc_RNA (1)...(19): siRNA sense strand
uagaggaccuuacuuguca

SEQ ID NO: 429555 - RNA, 19 nt, Homo sapiens
  misc_RNA (1)...(19): siRNA sense strand
ggaccuuacuugucauaau

SEQ ID NO: 429556 - RNA, 19 nt, Homo sapiens
  misc_RNA (1)...(19): siRNA sense strand
auacaaauguuccuucaga

SEQ ID NO: 429557 - RNA, 19 nt, Homo sapiens
  misc_RNA (1)...(19): siRNA sense strand
aaaccuaaauuccaagaug

SEQ ID NO: 429558 - RNA, 19 nt, Homo sapiens
  misc_RNA (1)...(19): siRNA sense strand
uggaauugcucuuuacuau

SEQ ID NO: 429559 - RNA, 19 nt, Homo sapiens
  misc_RNA (1)...(19): siRNA sense strand
ggacaaaacuggguucaga

SEQ ID NO: 429560 - RNA, 19 nt, Homo sapiens
  misc_RNA (1)...(19): siRNA sense strand
gaucaacaacugccuaugu

SEQ ID NO: 429561 - RNA, 19 nt, Homo sapiens
  misc_RNA (1)...(19): siRNA sense strand
uaucacagaucaacaacug

SEQ ID NO: 429562 - RNA, 19 nt, Homo sapiens
  misc_RNA (1)...(19): siRNA sense strand
uaaagaaggcgaaauagag

SEQ ID NO: 429563 - RNA, 19 nt, Homo sapiens
  misc_RNA (1)...(19): siRNA sense strand
gaaggauccuauuguuucu

SEQ ID NO: 429564 - RNA, 19 nt, Homo sapiens
  misc_RNA (1)...(19): siRNA sense strand
ugaaagcugugguucuaau

SEQ ID NO: 429565 - RNA, 19 nt, Homo sapiens
  misc_RNA (1)...(19): siRNA sense strand
ucagaacucgucuucauuu

SEQ ID NO: 429566 - RNA, 19 nt, Homo sapiens
  misc_RNA (1)...(19): siRNA sense strand
gcagaauguuauacaguag

SEQ ID NO: 429567 - RNA, 19 nt, Homo sapiens
  misc_RNA (1)...(19): siRNA sense strand
gaucuacagcuuucacuau

SEQ ID NO: 429568 - RNA, 19 nt, Homo sapiens
  misc_RNA (1)...(19): siRNA sense strand
uacaguaggugaauuaugg

SEQ ID NO: 429569 - RNA, 19 nt, Homo sapiens
  misc_RNA (1)...(19): siRNA sense strand
ugcagaauguuauacagua

SEQ ID NO: 429570 - RNA, 19 nt, Homo sapiens
  misc_RNA (1)...(19): siRNA sense strand
ggauacaggaugaccauga

SEQ ID NO: 429571 - RNA, 19 nt, Homo sapiens
  misc_RNA (1)...(19): siRNA sense strand
ugaaggauccuauuguuuc

SEQ ID NO: 429572 - RNA, 19 nt, Homo sapiens
  misc_RNA (1)...(19): siRNA sense strand
caacuuggaauugcucuuu

SEQ ID NO: 429573 - RNA, 19 nt, Homo sapiens
  misc_RNA (1)...(19): siRNA sense strand
gaaugccagugguaaaaua

SEQ ID NO: 429574 - RNA, 19 nt, Homo sapiens
  misc_RNA (1)...(19): siRNA sense strand
uaaguggacauauucauga

SEQ ID NO: 429575 - RNA, 19 nt, Homo sapiens
  misc_RNA (1)...(19): siRNA sense strand
caucaaccaugcaucaaca

SEQ ID NO: 429576 - RNA, 19 nt, Homo sapiens
  misc_RNA (1)...(19): siRNA sense strand
ccaggauccuuuauuauac

SEQ ID NO: 429577 - RNA, 19 nt, Homo sapiens
  misc_RNA (1)...(19): siRNA sense strand
ggauauuucugcaacugau

SEQ ID NO: 429578 - RNA, 19 nt, Homo sapiens
  misc_RNA (1)...(19): siRNA sense strand
gaaagcugugguucuaauu

SEQ ID NO: 429579 - RNA, 19 nt, Homo sapiens
  misc_RNA (1)...(19): siRNA sense strand
ugccugcaauugugaguua

SEQ ID NO: 429580 - RNA, 19 nt, Homo sapiens
  misc_RNA (1)...(19): siRNA sense strand
agaguuauauucacagcaa

SEQ ID NO: 429581 - RNA, 19 nt, Homo sapiens
  misc_RNA (1)...(19): siRNA sense strand
gaaacuuaaggaugggaua

SEQ ID NO: 429582 - RNA, 19 nt, Homo sapiens
  misc_RNA (1)...(19): siRNA sense strand
cauuacagguucugaagau

SEQ ID NO: 429583 - RNA, 19 nt, Homo sapiens
  misc_RNA (1)...(19): siRNA sense strand
gaaauagaggaccuuacuu

SEQ ID NO: 429584 - RNA, 19 nt, Homo sapiens
  misc_RNA (1)...(19): siRNA sense strand
uccuacagauccugacuua

SEQ ID NO: 429585 - RNA, 19 nt, Homo sapiens
  misc_RNA (1)...(19): siRNA sense strand
uuaaugagcuaugugaauc

SEQ ID NO: 429586 - RNA, 19 nt, Homo sapiens
  misc_RNA (1)...(19): siRNA sense strand
gaacucgucuucauuuuac

SEQ ID NO: 429587 - RNA, 19 nt, Homo sapiens
  misc_RNA (1)...(19): siRNA sense strand
gaaacaagaauagauaugc

SEQ ID NO: 429588 - RNA, 19 nt, Homo sapiens
  misc_RNA (1)...(19): siRNA sense strand
aaauagaggaccuuacuug

SEQ ID NO: 429589 - RNA, 19 nt, Homo sapiens
  misc_RNA (1)...(19): siRNA sense strand
gauuagacgaguuguaaau

SEQ ID NO: 429590 - RNA, 19 nt, Homo sapiens
  misc_RNA (1)...(19): siRNA sense strand
cugccuauguuuauucgua

SEQ ID NO: 429591 - RNA, 19 nt, Homo sapiens
  misc_RNA (1)...(19): siRNA sense strand
gugcauucauggauauuuc

SEQ ID NO: 429592 - RNA, 19 nt, Homo sapiens
  misc_RNA (1)...(19): siRNA sense strand
ggaacgauccugcaucaac

SEQ ID NO: 429593 - RNA, 19 nt, Homo sapiens
  misc_RNA (1)...(19): siRNA sense strand
guacaguuugucuugauaa

SEQ ID NO: 429594 - RNA, 19 nt, Homo sapiens
  misc_RNA (1)...(19): siRNA sense strand
aagaugauaucguccuuuc

SEQ ID NO: 429595 - RNA, 19 nt, Homo sapiens
  misc_RNA (1)...(19): siRNA sense strand
aaaguuggaugugcuggaa

SEQ ID NO: 429596 - RNA, 19 nt, Homo sapiens
  misc_RNA (1)...(19): siRNA sense strand
ggaauugcucuuuacuaug

SEQ ID NO: 429597 - RNA, 19 nt, Homo sapiens
  misc_RNA (1)...(19): siRNA sense strand
accaggauccuuuauuaua

SEQ ID NO: 429598 - RNA, 19 nt, Homo sapiens
  misc_RNA (1)...(19): siRNA sense strand
ucaauacuauggaaugcau

SEQ ID NO: 429599 - RNA, 19 nt, Homo sapiens
  misc_RNA (1)...(19): siRNA sense strand
gucaagaguuauauucaca

SEQ ID NO: 429600 - RNA, 19 nt, Homo sapiens
  misc_RNA (1)...(19): siRNA sense strand
gcucuuuacuauggagaaa

SEQ ID NO: 429601 - RNA, 19 nt, Homo sapiens
  misc_RNA (1)...(19): siRNA sense strand
cuucagaacucgucuucau

SEQ ID NO: 429602 - RNA, 19 nt, Homo sapiens
  misc_RNA (1)...(19): siRNA sense strand
gaagaugauaucguccuuu

SEQ ID NO: 429603 - RNA, 19 nt, Homo sapiens
  misc_RNA (1)...(19): siRNA sense strand
gacgaguuguaaauaaugu

SEQ ID NO: 429604 - RNA, 19 nt, Homo sapiens
  misc_RNA (1)...(19): siRNA sense strand
ugacuuaccaccagguuau

SEQ ID NO: 429605 - RNA, 19 nt, Homo sapiens
  misc_RNA (1)...(19): siRNA sense strand
ggaacugaaauuaccauuc

SEQ ID NO: 429606 - RNA, 19 nt, Homo sapiens
  misc_RNA (1)...(19): siRNA sense strand
uauauucacagcaagauga

SEQ ID NO: 429607 - RNA, 19 nt, Homo sapiens
  misc_RNA (1)...(19): siRNA sense strand
cgaaauagaggaccuuacu

SEQ ID NO: 429608 - RNA, 19 nt, Homo sapiens
  misc_RNA (1)...(19): siRNA sense strand
caacugccuauguuuauuc

SEQ ID NO: 429609 - RNA, 19 nt, Homo sapiens
  misc_RNA (1)...(19): siRNA sense strand
cgucggaucuacagcuuuc

SEQ ID NO: 429610 - RNA, 19 nt, Homo sapiens
  misc_RNA (1)...(19): siRNA sense strand
gcugagaaagguuaucaau

SEQ ID NO: 429611 - RNA, 19 nt, Homo sapiens
  misc_RNA (1)...(19): siRNA sense strand
caagcucgaguuaaaguug

SEQ ID NO: 429612 - RNA, 19 nt, Homo sapiens
  misc_RNA (1)...(19): siRNA sense strand
uuaaagaaggcgaaauaga

SEQ ID NO: 429613 - RNA, 19 nt, Homo sapiens
  misc_RNA (1)...(19): siRNA sense strand
uguacaguuugucuugaua

SEQ ID NO: 429614 - RNA, 19 nt, Homo sapiens
  misc_RNA (1)...(19): siRNA sense strand
caggauccuuuauuauaca

SEQ ID NO: 429615 - RNA, 19 nt, Homo sapiens
  misc_RNA (1)...(19): siRNA sense strand
uuugaaggauccuauuguu

SEQ ID NO: 429616 - RNA, 19 nt, Homo sapiens
  misc_RNA (1)...(19): siRNA sense strand
cagguuaugugcagagucu

SEQ ID NO: 429617 - RNA, 19 nt, Homo sapiens
  misc_RNA (1)...(19): siRNA sense strand
ugggaacgauccugcauca

SEQ ID NO: 429618 - RNA, 19 nt, Homo sapiens
  misc_RNA (1)...(19): siRNA sense strand
ucaugggccugguccuuug

SEQ ID NO: 429619 - RNA, 19 nt, Homo sapiens
  misc_RNA (1)...(19): siRNA sense strand
ggucaagaguuauauucac

SEQ ID NO: 429620 - RNA, 19 nt, Homo sapiens
  misc_RNA (1)...(19): siRNA sense strand
cuaggaaacauuacagguu

SEQ ID NO: 429621 - RNA, 19 nt, Homo sapiens
  misc_RNA (1)...(19): siRNA sense strand
aaacggaaugccaguggua

SEQ ID NO: 429622 - RNA, 19 nt, Homo sapiens
  misc_RNA (1)...(19): siRNA sense strand
ugaagaugauaucguccuu

SEQ ID NO: 429623 - RNA, 19 nt, Homo sapiens
  misc_RNA (1)...(19): siRNA sense strand
aggcaacggugacuuucaa

SEQ ID NO: 429624 - RNA, 19 nt, Homo sapiens
  misc_RNA (1)...(19): siRNA sense strand
aagcacagacuuugaagga

SEQ ID NO: 429625 - RNA, 19 nt, Homo sapiens
  misc_RNA (1)...(19): siRNA sense strand
aaagauaugcuaggaaaca

SEQ ID NO: 429626 - RNA, 19 nt, Homo sapiens
  misc_RNA (1)...(19): siRNA sense strand
gcuggaacaggaacugaaa

SEQ ID NO: 429627 - RNA, 19 nt, Homo sapiens
  misc_RNA (1)...(19): siRNA sense strand
uacaaauguuccuucagaa

SEQ ID NO: 429628 - RNA, 19 nt, Homo sapiens
  misc_RNA (1)...(19): siRNA sense strand
cugauuuggugcugagaaa

SEQ ID NO: 429629 - RNA, 19 nt, Homo sapiens
  misc_RNA (1)...(19): siRNA sense strand
uacagguucugaagaugaa

SEQ ID NO: 429630 - RNA, 19 nt, Homo sapiens
  misc_RNA (1)...(19): siRNA sense strand
gaggaccuuacuugucaua

SEQ ID NO: 429631 - RNA, 19 nt, Homo sapiens
  misc_RNA (1)...(19): siRNA sense strand
acaacugccuauguuuauu

SEQ ID NO: 429632 - RNA, 19 nt, Homo sapiens
  misc_RNA (1)...(19): siRNA sense strand
cugauuagacgaguuguaa

SEQ ID NO: 429633 - RNA, 19 nt, Homo sapiens
  misc_RNA (1)...(19): siRNA sense strand
aaacauuacagguucugaa

SEQ ID NO: 429634 - RNA, 19 nt, Homo sapiens
  misc_RNA (1)...(19): siRNA sense strand
ggaucuacagcuuucacua

SEQ ID NO: 429635 - RNA, 19 nt, Homo sapiens
  misc_RNA (1)...(19): siRNA sense strand
gccuauguuuauucguaua

SEQ ID NO: 429636 - RNA, 19 nt, Homo sapiens
  misc_RNA (1)...(19): siRNA sense strand
guuauacaguaggugaauu

SEQ ID NO: 429637 - RNA, 19 nt, Homo sapiens
  misc_RNA (1)...(19): siRNA sense strand
agucauauguaacuccaau

SEQ ID NO: 429638 - RNA, 19 nt, Homo sapiens
  misc_RNA (1)...(19): siRNA sense strand
uuacagguucugaagauga

SEQ ID NO: 429639 - RNA, 19 nt, Homo sapiens
  misc_RNA (1)...(19): siRNA sense strand
aggaugggauacaggauga

SEQ ID NO: 429640 - RNA, 19 nt, Homo sapiens
  misc_RNA (1)...(19): siRNA sense strand
ggauccuauuguuucuaua

SEQ ID NO: 429641 - RNA, 19 nt, Homo sapiens
  misc_RNA (1)...(19): siRNA sense strand
gugaaugucucuagucgua

SEQ ID NO: 429642 - RNA, 19 nt, Homo sapiens
  misc_RNA (1)...(19): siRNA sense strand
uaaaguggaugaacggaaa

SEQ ID NO: 429643 - RNA, 19 nt, Homo sapiens
  misc_RNA (1)...(19): siRNA sense strand
ggaaauggcaguucgaugu

SEQ ID NO: 429644 - RNA, 19 nt, Homo sapiens
  misc_RNA (1)...(19): siRNA sense strand
gcacauagcaccgcaguug

SEQ ID NO: 429645 - RNA, 19 nt, Homo sapiens
  misc_RNA (1)...(19): siRNA sense strand
gaaagaagacaucaacaca

SEQ ID NO: 429646 - RNA, 19 nt, Homo sapiens
  misc_RNA (1)...(19): siRNA sense strand
gagcacuccuucaacaauu

SEQ ID NO: 429647 - RNA, 19 nt, Homo sapiens
  misc_RNA (1)...(19): siRNA sense strand
aagaagacaucaacacaaa

SEQ ID NO: 429648 - RNA, 19 nt, Homo sapiens
  misc_RNA (1)...(19): siRNA sense strand
gaaguuggccaugaucuuu

SEQ ID NO: 429649 - RNA, 19 nt, Homo sapiens
  misc_RNA (1)...(19): siRNA sense strand
cacaagaucuacauacaga

SEQ ID NO: 429650 - RNA, 19 nt, Homo sapiens
  misc_RNA (1)...(19): siRNA sense strand
ccauggagaugaaagaaga

SEQ ID NO: 429651 - RNA, 19 nt, Homo sapiens
  misc_RNA (1)...(19): siRNA sense strand
gagagaggaucuugagaag

SEQ ID NO: 429652 - RNA, 19 nt, Homo sapiens
  misc_RNA (1)...(19): siRNA sense strand
guguguggcuguuauguuu

SEQ ID NO: 429653 - RNA, 19 nt, Homo sapiens
  misc_RNA (1)...(19): siRNA sense strand
uggaggagcuacaggcaua

SEQ ID NO: 429654 - RNA, 19 nt, Homo sapiens
  misc_RNA (1)...(19): siRNA sense strand
gcaaugaugaacucuacua

SEQ ID NO: 429655 - RNA, 19 nt, Homo sapiens
  misc_RNA (1)...(19): siRNA sense strand
gaugaacucuacuaucagu

SEQ ID NO: 429656 - RNA, 19 nt, Homo sapiens
  misc_RNA (1)...(19): siRNA sense strand
gaaugucucuagucguaug

SEQ ID NO: 429657 - RNA, 19 nt, Homo sapiens
  misc_RNA (1)...(19): siRNA sense strand
ucacugcccuggcugacua

SEQ ID NO: 429658 - RNA, 19 nt, Homo sapiens
  misc_RNA (1)...(19): siRNA sense strand
ggguggcccucaaauauau

SEQ ID NO: 429659 - RNA, 19 nt, Homo sapiens
  misc_RNA (1)...(19): siRNA sense strand
ugacaggugugaaugugaa

SEQ ID NO: 429660 - RNA, 19 nt, Homo sapiens
  misc_RNA (1)...(19): siRNA sense strand
ggaacaugcugcugagucu

SEQ ID NO: 429661 - RNA, 19 nt, Homo sapiens
  misc_RNA (1)...(19): siRNA sense strand
gugguucucuguucccuaa

SEQ ID NO: 429662 - RNA, 19 nt, Homo sapiens
  misc_RNA (1)...(19): siRNA sense strand
gaaaagaucaagacgauug

SEQ ID NO: 429663 - RNA, 19 nt, Homo sapiens
  misc_RNA (1)...(19): siRNA sense strand
ugacaacuaugaccuacug

SEQ ID NO: 429664 - RNA, 19 nt, Homo sapiens
  misc_RNA (1)...(19): siRNA sense strand
caacuuaaccguggugaug

SEQ ID NO: 429665 - RNA, 19 nt, Homo sapiens
  misc_RNA (1)...(19): siRNA sense strand
gaugugugguccaaugaug

SEQ ID NO: 429666 - RNA, 19 nt, Homo sapiens
  misc_RNA (1)...(19): siRNA sense strand
ggagaugaccaccuacuuc

SEQ ID NO: 429667 - RNA, 19 nt, Homo sapiens
  misc_RNA (1)...(19): siRNA sense strand
ucaacaauuuccagaugaa

SEQ ID NO: 429668 - RNA, 19 nt, Homo sapiens
  misc_RNA (1)...(19): siRNA sense strand
ccacaucacucgggcaaca

SEQ ID NO: 429669 - RNA, 19 nt, Homo sapiens
  misc_RNA (1)...(19): siRNA sense strand
ucaaugagcacuccuucaa

SEQ ID NO: 429670 - RNA, 19 nt, Homo sapiens
  misc_RNA (1)...(19): siRNA sense strand
ggaggcugcugcauaacau

SEQ ID NO: 429671 - RNA, 19 nt, Homo sapiens
  misc_RNA (1)...(19): siRNA sense strand
gcagcucggugccaaugug

SEQ ID NO: 429672 - RNA, 19 nt, Homo sapiens
  misc_RNA (1)...(19): siRNA sense strand
caccgcaguuggcaucuuu

SEQ ID NO: 429673 - RNA, 19 nt, Homo sapiens
  misc_RNA (1)...(19): siRNA sense strand
guccuuggcuugcggaaau

SEQ ID NO: 429674 - RNA, 19 nt, Homo sapiens
  misc_RNA (1)...(19): siRNA sense strand
gaaauggcaguucgaugug

SEQ ID NO: 429675 - RNA, 19 nt, Homo sapiens
  misc_RNA (1)...(19): siRNA sense strand
gaucuuggccuggcaacuu

SEQ ID NO: 429676 - RNA, 19 nt, Homo sapiens
  misc_RNA (1)...(19): siRNA sense strand
caccaucuuugacaacuau

SEQ ID NO: 429677 - RNA, 19 nt, Homo sapiens
  misc_RNA (1)...(19): siRNA sense strand
aggaugagguggaugaguu

SEQ ID NO: 429678 - RNA, 19 nt, Homo sapiens
  misc_RNA (1)...(19): siRNA sense strand
gugcugaucugugcugugu

SEQ ID NO: 429679 - RNA, 19 nt, Homo sapiens
  misc_RNA (1)...(19): siRNA sense strand
caagcuggcugcggagaau

SEQ ID NO: 429680 - RNA, 19 nt, Homo sapiens
  misc_RNA (1)...(19): siRNA sense strand
gcuguguacuccugugguu

SEQ ID NO: 429681 - RNA, 19 nt, Homo sapiens
  misc_RNA (1)...(19): siRNA sense strand
ccaccuacuuccucaaugg

SEQ ID NO: 429682 - RNA, 19 nt, Homo sapiens
  misc_RNA (1)...(19): siRNA sense strand
gaacacagugaaugucucu

SEQ ID NO: 429683 - RNA, 19 nt, Homo sapiens
  misc_RNA (1)...(19): siRNA sense strand
cuucaacaauuuccagaug

SEQ ID NO: 429684 - RNA, 19 nt, Homo sapiens
  misc_RNA (1)...(19): siRNA sense strand
cgagaucaucgcugacuuu

SEQ ID NO: 429685 - RNA, 19 nt, Homo sapiens
  misc_RNA (1)...(19): siRNA sense strand
ggaaguuggccaugaucuu

SEQ ID NO: 429686 - RNA, 19 nt, Homo sapiens
  misc_RNA (1)...(19): siRNA sense strand
uacagaagcaugacaaugu

SEQ ID NO: 429687 - RNA, 19 nt, Homo sapiens
  misc_RNA (1)...(19): siRNA sense strand
gcugaucugugcuguguac

SEQ ID NO: 429688 - RNA, 19 nt, Homo sapiens
  misc_RNA (1)...(19): siRNA sense strand
gggcaacacugcaguaccu

SEQ ID NO: 429689 - RNA, 19 nt, Homo sapiens
  misc_RNA (1)...(19): siRNA sense strand
gacccugaaugagcucuuu

SEQ ID NO: 429690 - RNA, 19 nt, Homo sapiens
  misc_RNA (1)...(19): siRNA sense strand
aaugagcacuccuucaaca

SEQ ID NO: 429691 - RNA, 19 nt, Homo sapiens
  misc_RNA (1)...(19): siRNA sense strand
ggugacaggugugaaugug

SEQ ID NO: 429692 - RNA, 19 nt, Homo sapiens
  misc_RNA (1)...(19): siRNA sense strand
gugaguguguggcuguuau

SEQ ID NO: 429693 - RNA, 19 nt, Homo sapiens
  misc_RNA (1)...(19): siRNA sense strand
caacuaugaccuacugcuu

SEQ ID NO: 429694 - RNA, 19 nt, Homo sapiens
  misc_RNA (1)...(19): siRNA sense strand
ccaccaucuuugacaacua

SEQ ID NO: 429695 - RNA, 19 nt, Homo sapiens
  misc_RNA (1)...(19): siRNA sense strand
gcccucagccugccuaugu

SEQ ID NO: 429696 - RNA, 19 nt, Homo sapiens
  misc_RNA (1)...(19): siRNA sense strand
agagagaggaucuugagaa

SEQ ID NO: 429697 - RNA, 19 nt, Homo sapiens
  misc_RNA (1)...(19): siRNA sense strand
aaagaagacaucaacacaa

SEQ ID NO: 429698 - RNA, 19 nt, Homo sapiens
  misc_RNA (1)...(19): siRNA sense strand
cauccuguuugcagacauu

SEQ ID NO: 429699 - RNA, 19 nt, Homo sapiens
  misc_RNA (1)...(19): siRNA sense strand
ucauccagcuucucaucuu

SEQ ID NO: 429700 - RNA, 19 nt, Homo sapiens
  misc_RNA (1)...(19): siRNA sense strand
caacacugcaguaccugaa

SEQ ID NO: 429701 - RNA, 19 nt, Homo sapiens
  misc_RNA (1)...(19): siRNA sense strand
gcgcaacgcguaccucaag

SEQ ID NO: 429702 - RNA, 19 nt, Homo sapiens
  misc_RNA (1)...(19): siRNA sense strand
gaagauugggcugaacaug

SEQ ID NO: 429703 - RNA, 19 nt, Homo sapiens
  misc_RNA (1)...(19): siRNA sense strand
accggaggcugcugcauaa

SEQ ID NO: 429704 - RNA, 19 nt, Homo sapiens
  misc_RNA (1)...(19): siRNA sense strand
guccauggcuuggcuucuu

SEQ ID NO: 429705 - RNA, 19 nt, Homo sapiens
  misc_RNA (1)...(19): siRNA sense strand
caaugucagcauccuguuu

SEQ ID NO: 429706 - RNA, 19 nt, Homo sapiens
  misc_RNA (1)...(19): siRNA sense strand
ugacuuugaugagauuauc

SEQ ID NO: 429707 - RNA, 19 nt, Homo sapiens
  misc_RNA (1)...(19): siRNA sense strand
ccgcaaugaugaacucuac

SEQ ID NO: 429708 - RNA, 19 nt, Homo sapiens
  misc_RNA (1)...(19): siRNA sense strand
gcaccgcaguuggcaucuu

SEQ ID NO: 429709 - RNA, 19 nt, Homo sapiens
  misc_RNA (1)...(19): siRNA sense strand
cagaugggcauugaugauu

SEQ ID NO: 429710 - RNA, 19 nt, Homo sapiens
  misc_RNA (1)...(19): siRNA sense strand
caccuugcauuugaucuug

SEQ ID NO: 429711 - RNA, 19 nt, Homo sapiens
  misc_RNA (1)...(19): siRNA sense strand
gggagaaggaggagaugga

SEQ ID NO: 429712 - RNA, 19 nt, Homo sapiens
  misc_RNA (1)...(19): siRNA sense strand
cauugaugauuccagcaaa

SEQ ID NO: 429713 - RNA, 19 nt, Homo sapiens
  misc_RNA (1)...(19): siRNA sense strand
gcauugaugauuccagcaa

SEQ ID NO: 429714 - RNA, 19 nt, Homo sapiens
  misc_RNA (1)...(19): siRNA sense strand
gugccaaugugcugcuguu

SEQ ID NO: 429715 - RNA, 19 nt, Homo sapiens
  misc_RNA (1)...(19): siRNA sense strand
caagaucuacauacagaag

SEQ ID NO: 429716 - RNA, 19 nt, Homo sapiens
  misc_RNA (1)...(19): siRNA sense strand
gcucggaagccacaguaug

SEQ ID NO: 429717 - RNA, 19 nt, Homo sapiens
  misc_RNA (1)...(19): siRNA sense strand
gagaucaucgcugacuuug

SEQ ID NO: 429718 - RNA, 19 nt, Homo sapiens
  misc_RNA (1)...(19): siRNA sense strand
gagcuggaggcaaacaaug

SEQ ID NO: 429719 - RNA, 19 nt, Homo sapiens
  misc_RNA (1)...(19): siRNA sense strand
agcagcacauugagacuuu

SEQ ID NO: 429720 - RNA, 19 nt, Homo sapiens
  misc_RNA (1)...(19): siRNA sense strand
gagcagcacauugagacuu

SEQ ID NO: 429721 - RNA, 19 nt, Homo sapiens
  misc_RNA (1)...(19): siRNA sense strand
gcacguugccauggagaug

SEQ ID NO: 429722 - RNA, 19 nt, Homo sapiens
  misc_RNA (1)...(19): siRNA sense strand
cagccaccaucuuugacaa

SEQ ID NO: 429723 - RNA, 19 nt, Homo sapiens
  misc_RNA (1)...(19): siRNA sense strand
ggccaugaucuuugucuug

SEQ ID NO: 429724 - RNA, 19 nt, Homo sapiens
  misc_RNA (1)...(19): siRNA sense strand
ccaaugugcugcuguuccu

SEQ ID NO: 429725 - RNA, 19 nt, Homo sapiens
  misc_RNA (1)...(19): siRNA sense strand
ggagcuggaggcaaacaau

SEQ ID NO: 429726 - RNA, 19 nt, Homo sapiens
  misc_RNA (1)...(19): siRNA sense strand
aaccggaggcugcugcaua

SEQ ID NO: 429727 - RNA, 19 nt, Homo sapiens
  misc_RNA (1)...(19): siRNA sense strand
uguguuuacuucugccauu

SEQ ID NO: 429728 - RNA, 19 nt, Homo sapiens
  misc_RNA (1)...(19): siRNA sense strand
ccagagagaggaucuugag

SEQ ID NO: 429729 - RNA, 19 nt, Homo sapiens
  misc_RNA (1)...(19): siRNA sense strand
gcccuguguucuuugucua

SEQ ID NO: 429730 - RNA, 19 nt, Homo sapiens
  misc_RNA (1)...(19): siRNA sense strand
agaugggcauugaugauuc

SEQ ID NO: 429731 - RNA, 19 nt, Homo sapiens
  misc_RNA (1)...(19): siRNA sense strand
gcaacgcguaccucaagga

SEQ ID NO: 429732 - RNA, 19 nt, Homo sapiens
  misc_RNA (1)...(19): siRNA sense strand
gcgcaggagcuggucauga

SEQ ID NO: 429733 - RNA, 19 nt, Homo sapiens
  misc_RNA (1)...(19): siRNA sense strand
gggagaugaccaccuacuu

SEQ ID NO: 429734 - RNA, 19 nt, Homo sapiens
  misc_RNA (1)...(19): siRNA sense strand
gaagccacaguaugacauc

SEQ ID NO: 429735 - RNA, 19 nt, Homo sapiens
  misc_RNA (1)...(19): siRNA sense strand
ggaagccacaguaugacau

SEQ ID NO: 429736 - RNA, 19 nt, Homo sapiens
  misc_RNA (1)...(19): siRNA sense strand
agaugaagauugggcugaa

SEQ ID NO: 429737 - RNA, 19 nt, Homo sapiens
  misc_RNA (1)...(19): siRNA sense strand
caaugaugaacucuacuau

SEQ ID NO: 429738 - RNA, 19 nt, Homo sapiens
  misc_RNA (1)...(19): siRNA sense strand
cauccagcuucucaucuuc

SEQ ID NO: 429739 - RNA, 19 nt, Homo sapiens
  misc_RNA (1)...(19): siRNA sense strand
gaugauuccagcaaagaca

SEQ ID NO: 429740 - RNA, 19 nt, Homo sapiens
  misc_RNA (1)...(19): siRNA sense strand
gcugguacgugaggugaca

SEQ ID NO: 429741 - RNA, 19 nt, Homo sapiens
  misc_RNA (1)...(19): siRNA sense strand
gugaaugucucuagucgua

SEQ ID NO: 429742 - RNA, 19 nt, Homo sapiens
  misc_RNA (1)...(19): siRNA sense strand
uaaaguggaugaacggaaa

SEQ ID NO: 429743 - RNA, 19 nt, Homo sapiens
  misc_RNA (1)...(19): siRNA sense strand
ggaaauggcaguucgaugu

SEQ ID NO: 429744 - RNA, 19 nt, Homo sapiens
  misc_RNA (1)...(19): siRNA sense strand
gcacauagcaccgcaguug

SEQ ID NO: 429745 - RNA, 19 nt, Homo sapiens
  misc_RNA (1)...(19): siRNA sense strand
gaaagaagacaucaacaca

SEQ ID NO: 429746 - RNA, 19 nt, Homo sapiens
  misc_RNA (1)...(19): siRNA sense strand
gagcacuccuucaacaauu

SEQ ID NO: 429747 - RNA, 19 nt, Homo sapiens
  misc_RNA (1)...(19): siRNA sense strand
aagaagacaucaacacaaa

SEQ ID NO: 429748 - RNA, 19 nt, Homo sapiens
  misc_RNA (1)...(19): siRNA sense strand
gaaguuggccaugaucuuu

SEQ ID NO: 429749 - RNA, 19 nt, Homo sapiens
  misc_RNA (1)...(19): siRNA sense strand
cacaagaucuacauacaga

SEQ ID NO: 429750 - RNA, 19 nt, Homo sapiens
  misc_RNA (1)...(19): siRNA sense strand
ccauggagaugaaagaaga

SEQ ID NO: 429751 - RNA, 19 nt, Homo sapiens
  misc_RNA (1)...(19): siRNA sense strand
gagagaggaucuugagaag

SEQ ID NO: 429752 - RNA, 19 nt, Homo sapiens
  misc_RNA (1)...(19): siRNA sense strand
guguguggcuguuauguuu

SEQ ID NO: 429753 - RNA, 19 nt, Homo sapiens
  misc_RNA (1)...(19): siRNA sense strand
uggaggagcuacaggcaua

SEQ ID NO: 429754 - RNA, 19 nt, Homo sapiens
  misc_RNA (1)...(19): siRNA sense strand
gcaaugaugaacucuacua

SEQ ID NO: 429755 - RNA, 19 nt, Homo sapiens
  misc_RNA (1)...(19): siRNA sense strand
gaugaacucuacuaucagu

SEQ ID NO: 429756 - RNA, 19 nt, Homo sapiens
  misc_RNA (1)...(19): siRNA sense strand
gaaugucucuagucguaug

SEQ ID NO: 429757 - RNA, 19 nt, Homo sapiens
  misc_RNA (1)...(19): siRNA sense strand
ucacugcccuggcugacua

SEQ ID NO: 429758 - RNA, 19 nt, Homo sapiens
  misc_RNA (1)...(19): siRNA sense strand
ggguggcccucaaauauau

SEQ ID NO: 429759 - RNA, 19 nt, Homo sapiens
  misc_RNA (1)...(19): siRNA sense strand
ugacaggugugaaugugaa

SEQ ID NO: 429760 - RNA, 19 nt, Homo sapiens
  misc_RNA (1)...(19): siRNA sense strand
ggaacaugcugcugagucu

SEQ ID NO: 429761 - RNA, 19 nt, Homo sapiens
  misc_RNA (1)...(19): siRNA sense strand
gugguucucuguucccuaa

SEQ ID NO: 429762 - RNA, 19 nt, Homo sapiens
  misc_RNA (1)...(19): siRNA sense strand
gaaaagaucaagacgauug

SEQ ID NO: 429763 - RNA, 19 nt, Homo sapiens
  misc_RNA (1)...(19): siRNA sense strand
ugacaacuaugaccuacug

SEQ ID NO: 429764 - RNA, 19 nt, Homo sapiens
  misc_RNA (1)...(19): siRNA sense strand
caacuuaaccguggugaug

SEQ ID NO: 429765 - RNA, 19 nt, Homo sapiens
  misc_RNA (1)...(19): siRNA sense strand
gaugugugguccaaugaug

SEQ ID NO: 429766 - RNA, 19 nt, Homo sapiens
  misc_RNA (1)...(19): siRNA sense strand
ggagaugaccaccuacuuc

SEQ ID NO: 429767 - RNA, 19 nt, Homo sapiens
  misc_RNA (1)...(19): siRNA sense strand
ucaacaauuuccagaugaa

SEQ ID NO: 429768 - RNA, 19 nt, Homo sapiens
  misc_RNA (1)...(19): siRNA sense strand
ccacaucacucgggcaaca

SEQ ID NO: 429769 - RNA, 19 nt, Homo sapiens
  misc_RNA (1)...(19): siRNA sense strand
ucaaugagcacuccuucaa

SEQ ID NO: 429770 - RNA, 19 nt, Homo sapiens
  misc_RNA (1)...(19): siRNA sense strand
ggaggcugcugcauaacau

SEQ ID NO: 429771 - RNA, 19 nt, Homo sapiens
  misc_RNA (1)...(19): siRNA sense strand
gcagcucggugccaaugug

SEQ ID NO: 429772 - RNA, 19 nt, Homo sapiens
  misc_RNA (1)...(19): siRNA sense strand
caccgcaguuggcaucuuu

SEQ ID NO: 429773 - RNA, 19 nt, Homo sapiens
  misc_RNA (1)...(19): siRNA sense strand
guccuuggcuugcggaaau

SEQ ID NO: 429774 - RNA, 19 nt, Homo sapiens
  misc_RNA (1)...(19): siRNA sense strand
gaaauggcaguucgaugug

SEQ ID NO: 429775 - RNA, 19 nt, Homo sapiens
  misc_RNA (1)...(19): siRNA sense strand
gaucuuggccuggcaacuu

SEQ ID NO: 429776 - RNA, 19 nt, Homo sapiens
  misc_RNA (1)...(19): siRNA sense strand
caccaucuuugacaacuau

SEQ ID NO: 429777 - RNA, 19 nt, Homo sapiens
  misc_RNA (1)...(19): siRNA sense strand
aggaugagguggaugaguu

SEQ ID NO: 429778 - RNA, 19 nt, Homo sapiens
  misc_RNA (1)...(19): siRNA sense strand
gugcugaucugugcugugu

SEQ ID NO: 429779 - RNA, 19 nt, Homo sapiens
  misc_RNA (1)...(19): siRNA sense strand
caagcuggcugcggagaau

SEQ ID NO: 429780 - RNA, 19 nt, Homo sapiens
  misc_RNA (1)...(19): siRNA sense strand
gcuguguacuccugugguu

SEQ ID NO: 429781 - RNA, 19 nt, Homo sapiens
  misc_RNA (1)...(19): siRNA sense strand
ccaccuacuuccucaaugg

SEQ ID NO: 429782 - RNA, 19 nt, Homo sapiens
  misc_RNA (1)...(19): siRNA sense strand
gaacacagugaaugucucu

SEQ ID NO: 429783 - RNA, 19 nt, Homo sapiens
  misc_RNA (1)...(19): siRNA sense strand
cuucaacaauuuccagaug

SEQ ID NO: 429784 - RNA, 19 nt, Homo sapiens
  misc_RNA (1)...(19): siRNA sense strand
cgagaucaucgcugacuuu

SEQ ID NO: 429785 - RNA, 19 nt, Homo sapiens
  misc_RNA (1)...(19): siRNA sense strand
ggaaguuggccaugaucuu

SEQ ID NO: 429786 - RNA, 19 nt, Homo sapiens
  misc_RNA (1)...(19): siRNA sense strand
uacagaagcaugacaaugu

SEQ ID NO: 429787 - RNA, 19 nt, Homo sapiens
  misc_RNA (1)...(19): siRNA sense strand
gcugaucugugcuguguac

SEQ ID NO: 429788 - RNA, 19 nt, Homo sapiens
  misc_RNA (1)...(19): siRNA sense strand
gggcaacacugcaguaccu

SEQ ID NO: 429789 - RNA, 19 nt, Homo sapiens
  misc_RNA (1)...(19): siRNA sense strand
gacccugaaugagcucuuu

SEQ ID NO: 429790 - RNA, 19 nt, Homo sapiens
  misc_RNA (1)...(19): siRNA sense strand
aaugagcacuccuucaaca

SEQ ID NO: 429791 - RNA, 19 nt, Homo sapiens
  misc_RNA (1)...(19): siRNA sense strand
ggugacaggugugaaugug

SEQ ID NO: 429792 - RNA, 19 nt, Homo sapiens
  misc_RNA (1)...(19): siRNA sense strand
gugaguguguggcuguuau

SEQ ID NO: 429793 - RNA, 19 nt, Homo sapiens
  misc_RNA (1)...(19): siRNA sense strand
caacuaugaccuacugcuu

SEQ ID NO: 429794 - RNA, 19 nt, Homo sapiens
  misc_RNA (1)...(19): siRNA sense strand
ccaccaucuuugacaacua

SEQ ID NO: 429795 - RNA, 19 nt, Homo sapiens
  misc_RNA (1)...(19): siRNA sense strand
gcccucagccugccuaugu

SEQ ID NO: 429796 - RNA, 19 nt, Homo sapiens
  misc_RNA (1)...(19): siRNA sense strand
agagagaggaucuugagaa

SEQ ID NO: 429797 - RNA, 19 nt, Homo sapiens
  misc_RNA (1)...(19): siRNA sense strand
aaagaagacaucaacacaa

SEQ ID NO: 429798 - RNA, 19 nt, Homo sapiens
  misc_RNA (1)...(19): siRNA sense strand
cauccuguuugcagacauu

SEQ ID NO: 429799 - RNA, 19 nt, Homo sapiens
  misc_RNA (1)...(19): siRNA sense strand
ucauccagcuucucaucuu

SEQ ID NO: 429800 - RNA, 19 nt, Homo sapiens
  misc_RNA (1)...(19): siRNA sense strand
caacacugcaguaccugaa

SEQ ID NO: 429801 - RNA, 19 nt, Homo sapiens
  misc_RNA (1)...(19): siRNA sense strand
gcgcaacgcguaccucaag

SEQ ID NO: 429802 - RNA, 19 nt, Homo sapiens
  misc_RNA (1)...(19): siRNA sense strand
gaagauugggcugaacaug

SEQ ID NO: 429803 - RNA, 19 nt, Homo sapiens
  misc_RNA (1)...(19): siRNA sense strand
accggaggcugcugcauaa

SEQ ID NO: 429804 - RNA, 19 nt, Homo sapiens
  misc_RNA (1)...(19): siRNA sense strand
guccauggcuuggcuucuu

SEQ ID NO: 429805 - RNA, 19 nt, Homo sapiens
  misc_RNA (1)...(19): siRNA sense strand
caaugucagcauccuguuu

SEQ ID NO: 429806 - RNA, 19 nt, Homo sapiens
  misc_RNA (1)...(19): siRNA sense strand
ugacuuugaugagauuauc

SEQ ID NO: 429807 - RNA, 19 nt, Homo sapiens
  misc_RNA (1)...(19): siRNA sense strand
ccgcaaugaugaacucuac

SEQ ID NO: 429808 - RNA, 19 nt, Homo sapiens
  misc_RNA (1)...(19): siRNA sense strand
gcaccgcaguuggcaucuu

SEQ ID NO: 429809 - RNA, 19 nt, Homo sapiens
  misc_RNA (1)...(19): siRNA sense strand
cagaugggcauugaugauu

SEQ ID NO: 429810 - RNA, 19 nt, Homo sapiens
  misc_RNA (1)...(19): siRNA sense strand
caccuugcauuugaucuug

SEQ ID NO: 429811 - RNA, 19 nt, Homo sapiens
  misc_RNA (1)...(19): siRNA sense strand
gggagaaggaggagaugga

SEQ ID NO: 429812 - RNA, 19 nt, Homo sapiens
  misc_RNA (1)...(19): siRNA sense strand
cauugaugauuccagcaaa

SEQ ID NO: 429813 - RNA, 19 nt, Homo sapiens
  misc_RNA (1)...(19): siRNA sense strand
gcauugaugauuccagcaa

SEQ ID NO: 429814 - RNA, 19 nt, Homo sapiens
  misc_RNA (1)...(19): siRNA sense strand
gugccaaugugcugcuguu

SEQ ID NO: 429815 - RNA, 19 nt, Homo sapiens
  misc_RNA (1)...(19): siRNA sense strand
caagaucuacauacagaag

SEQ ID NO: 429816 - RNA, 19 nt, Homo sapiens
  misc_RNA (1)...(19): siRNA sense strand
gcucggaagccacaguaug

SEQ ID NO: 429817 - RNA, 19 nt, Homo sapiens
  misc_RNA (1)...(19): siRNA sense strand
gagaucaucgcugacuuug

SEQ ID NO: 429818 - RNA, 19 nt, Homo sapiens
  misc_RNA (1)...(19): siRNA sense strand
gagcuggaggcaaacaaug

SEQ ID NO: 429819 - RNA, 19 nt, Homo sapiens
  misc_RNA (1)...(19): siRNA sense strand
agcagcacauugagacuuu

SEQ ID NO: 429820 - RNA, 19 nt, Homo sapiens
  misc_RNA (1)...(19): siRNA sense strand
gagcagcacauugagacuu

SEQ ID NO: 429821 - RNA, 19 nt, Homo sapiens
  misc_RNA (1)...(19): siRNA sense strand
gcacguugccauggagaug

SEQ ID NO: 429822 - RNA, 19 nt, Homo sapiens
  misc_RNA (1)...(19): siRNA sense strand
cagccaccaucuuugacaa

SEQ ID NO: 429823 - RNA, 19 nt, Homo sapiens
  misc_RNA (1)...(19): siRNA sense strand
ggccaugaucuuugucuug

SEQ ID NO: 429824 - RNA, 19 nt, Homo sapiens
  misc_RNA (1)...(19): siRNA sense strand
ccaaugugcugcuguuccu

SEQ ID NO: 429825 - RNA, 19 nt, Homo sapiens
  misc_RNA (1)...(19): siRNA sense strand
ggagcuggaggcaaacaau

SEQ ID NO: 429826 - RNA, 19 nt, Homo sapiens
  misc_RNA (1)...(19): siRNA sense strand
aaccggaggcugcugcaua

SEQ ID NO: 429827 - RNA, 19 nt, Homo sapiens
  misc_RNA (1)...(19): siRNA sense strand
uguguuuacuucugccauu

SEQ ID NO: 429828 - RNA, 19 nt, Homo sapiens
  misc_RNA (1)...(19): siRNA sense strand
ccagagagaggaucuugag

SEQ ID NO: 429829 - RNA, 19 nt, Homo sapiens
  misc_RNA (1)...(19): siRNA sense strand
gcccuguguucuuugucua

SEQ ID NO: 429830 - RNA, 19 nt, Homo sapiens
  misc_RNA (1)...(19): siRNA sense strand
agaugggcauugaugauuc

SEQ ID NO: 429831 - RNA, 19 nt, Homo sapiens
  misc_RNA (1)...(19): siRNA sense strand
gcaacgcguaccucaagga

SEQ ID NO: 429832 - RNA, 19 nt, Homo sapiens
  misc_RNA (1)...(19): siRNA sense strand
gcgcaggagcuggucauga

SEQ ID NO: 429833 - RNA, 19 nt, Homo sapiens
  misc_RNA (1)...(19): siRNA sense strand
gggagaugaccaccuacuu

SEQ ID NO: 429834 - RNA, 19 nt, Homo sapiens
  misc_RNA (1)...(19): siRNA sense strand
gaagccacaguaugacauc

SEQ ID NO: 429835 - RNA, 19 nt, Homo sapiens
  misc_RNA (1)...(19): siRNA sense strand
ggaagccacaguaugacau

SEQ ID NO: 429836 - RNA, 19 nt, Homo sapiens
  misc_RNA (1)...(19): siRNA sense strand
agaugaagauugggcugaa

SEQ ID NO: 429837 - RNA, 19 nt, Homo sapiens
  misc_RNA (1)...(19): siRNA sense strand
caaugaugaacucuacuau

SEQ ID NO: 429838 - RNA, 19 nt, Homo sapiens
  misc_RNA (1)...(19): siRNA sense strand
cauccagcuucucaucuuc

SEQ ID NO: 429839 - RNA, 19 nt, Homo sapiens
  misc_RNA (1)...(19): siRNA sense strand
gaugauuccagcaaagaca

SEQ ID NO: 429840 - RNA, 19 nt, Homo sapiens
  misc_RNA (1)...(19): siRNA sense strand
gcugguacgugaggugaca

SEQ ID NO: 429841 - RNA, 19 nt, Homo sapiens
  misc_RNA (1)...(19): siRNA sense strand
ugaaugagaugaacgauga

SEQ ID NO: 429842 - RNA, 19 nt, Homo sapiens
  misc_RNA (1)...(19): siRNA sense strand
gcaggaggcuacagauauu

SEQ ID NO: 429843 - RNA, 19 nt, Homo sapiens
  misc_RNA (1)...(19): siRNA sense strand
gaagaucgagagacaguua

SEQ ID NO: 429844 - RNA, 19 nt, Homo sapiens
  misc_RNA (1)...(19): siRNA sense strand
agaagucacucaagauuaa

SEQ ID NO: 429845 - RNA, 19 nt, Homo sapiens
  misc_RNA (1)...(19): siRNA sense strand
gaaagaaggagaaagaguu

SEQ ID NO: 429846 - RNA, 19 nt, Homo sapiens
  misc_RNA (1)...(19): siRNA sense strand
gcucaugccucgucucauu

SEQ ID NO: 429847 - RNA, 19 nt, Homo sapiens
  misc_RNA (1)...(19): siRNA sense strand
gaagaagucacucaagauu

SEQ ID NO: 429848 - RNA, 19 nt, Homo sapiens
  misc_RNA (1)...(19): siRNA sense strand
ggacagugcugccaaggau

SEQ ID NO: 429849 - RNA, 19 nt, Homo sapiens
  misc_RNA (1)...(19): siRNA sense strand
gcagagagcaccauugaug

SEQ ID NO: 429850 - RNA, 19 nt, Homo sapiens
  misc_RNA (1)...(19): siRNA sense strand
uaaaagagcuggagaaaca

SEQ ID NO: 429851 - RNA, 19 nt, Homo sapiens
  misc_RNA (1)...(19): siRNA sense strand
ucgagaagcucaaggauga

SEQ ID NO: 429852 - RNA, 19 nt, Homo sapiens
  misc_RNA (1)...(19): siRNA sense strand
gaaacgggcagaagacaaa

SEQ ID NO: 429853 - RNA, 19 nt, Homo sapiens
  misc_RNA (1)...(19): siRNA sense strand
gaacuaaagcagcgucuga

SEQ ID NO: 429854 - RNA, 19 nt, Homo sapiens
  misc_RNA (1)...(19): siRNA sense strand
gagagacaguuauuaagga

SEQ ID NO: 429855 - RNA, 19 nt, Homo sapiens
  misc_RNA (1)...(19): siRNA sense strand
gaagacaaagcaaagcuaa

SEQ ID NO: 429856 - RNA, 19 nt, Homo sapiens
  misc_RNA (1)...(19): siRNA sense strand
ccaaggccaucaaguacua

SEQ ID NO: 429857 - RNA, 19 nt, Homo sapiens
  misc_RNA (1)...(19): siRNA sense strand
acaaggagauggcugaaga

SEQ ID NO: 429858 - RNA, 19 nt, Homo sapiens
  misc_RNA (1)...(19): siRNA sense strand
gcaaguggcucagcuuaag

SEQ ID NO: 429859 - RNA, 19 nt, Homo sapiens
  misc_RNA (1)...(19): siRNA sense strand
caugagcgcuccuuggauu

SEQ ID NO: 429860 - RNA, 19 nt, Homo sapiens
  misc_RNA (1)...(19): siRNA sense strand
cgagcucacuacugacuua

SEQ ID NO: 429861 - RNA, 19 nt, Homo sapiens
  misc_RNA (1)...(19): siRNA sense strand
gcacaaggaucagcuggau

SEQ ID NO: 429862 - RNA, 19 nt, Homo sapiens
  misc_RNA (1)...(19): siRNA sense strand
aaagugaccuucucaugug

SEQ ID NO: 429863 - RNA, 19 nt, Homo sapiens
  misc_RNA (1)...(19): siRNA sense strand
gaagagaagggcucagaug

SEQ ID NO: 429864 - RNA, 19 nt, Homo sapiens
  misc_RNA (1)...(19): siRNA sense strand
uugcaaagcuaucccauga

SEQ ID NO: 429865 - RNA, 19 nt, Homo sapiens
  misc_RNA (1)...(19): siRNA sense strand
gcaaaggaacgcuauaugg

SEQ ID NO: 429866 - RNA, 19 nt, Homo sapiens
  misc_RNA (1)...(19): siRNA sense strand
gcaaagugaccuucucaug

SEQ ID NO: 429867 - RNA, 19 nt, Homo sapiens
  misc_RNA (1)...(19): siRNA sense strand
ggaugagacugucaaugug

SEQ ID NO: 429868 - RNA, 19 nt, Homo sapiens
  misc_RNA (1)...(19): siRNA sense strand
uggacgagcucacuacuga

SEQ ID NO: 429869 - RNA, 19 nt, Homo sapiens
  misc_RNA (1)...(19): siRNA sense strand
caaagugaccuucucaugu

SEQ ID NO: 429870 - RNA, 19 nt, Homo sapiens
  misc_RNA (1)...(19): siRNA sense strand
ucaccaaggccaucaagua

SEQ ID NO: 429871 - RNA, 19 nt, Homo sapiens
  misc_RNA (1)...(19): siRNA sense strand
caaaggaacgcuauaugga

SEQ ID NO: 429872 - RNA, 19 nt, Homo sapiens
  misc_RNA (1)...(19): siRNA sense strand
gaucgagagacaguuauua

SEQ ID NO: 429873 - RNA, 19 nt, Homo sapiens
  misc_RNA (1)...(19): siRNA sense strand
gcaguguggauguguauaa

SEQ ID NO: 429874 - RNA, 19 nt, Homo sapiens
  misc_RNA (1)...(19): siRNA sense strand
ccagagaccuuugacuuca

SEQ ID NO: 429875 - RNA, 19 nt, Homo sapiens
  misc_RNA (1)...(19): siRNA sense strand
gcagagaaggcagaacuaa

SEQ ID NO: 429876 - RNA, 19 nt, Homo sapiens
  misc_RNA (1)...(19): siRNA sense strand
uggcauugcuggugaagaa

SEQ ID NO: 429877 - RNA, 19 nt, Homo sapiens
  misc_RNA (1)...(19): siRNA sense strand
gaaccaagagcuggaaguu

SEQ ID NO: 429878 - RNA, 19 nt, Homo sapiens
  misc_RNA (1)...(19): siRNA sense strand
gcagugacauccgccaguu

SEQ ID NO: 429879 - RNA, 19 nt, Homo sapiens
  misc_RNA (1)...(19): siRNA sense strand
ggaagcaggcccaggagaa

SEQ ID NO: 429880 - RNA, 19 nt, Homo sapiens
  misc_RNA (1)...(19): siRNA sense strand
acgaugagcugcaggagaa

SEQ ID NO: 429881 - RNA, 19 nt, Homo sapiens
  misc_RNA (1)...(19): siRNA sense strand
gaaacuucaugcagugaca

SEQ ID NO: 429882 - RNA, 19 nt, Homo sapiens
  misc_RNA (1)...(19): siRNA sense strand
cuagagacccugagacuga

SEQ ID NO: 429883 - RNA, 19 nt, Homo sapiens
  misc_RNA (1)...(19): siRNA sense strand
cuggagcgcuguaucguaa

SEQ ID NO: 429884 - RNA, 19 nt, Homo sapiens
  misc_RNA (1)...(19): siRNA sense strand
gaaacuagagacccugaga

SEQ ID NO: 429885 - RNA, 19 nt, Homo sapiens
  misc_RNA (1)...(19): siRNA sense strand
gaacuaagugagaacuguu

SEQ ID NO: 429886 - RNA, 19 nt, Homo sapiens
  misc_RNA (1)...(19): siRNA sense strand
gaaagaguuugaggagaca

SEQ ID NO: 429887 - RNA, 19 nt, Homo sapiens
  misc_RNA (1)...(19): siRNA sense strand
ccaaggcaauugagaugga

SEQ ID NO: 429888 - RNA, 19 nt, Homo sapiens
  misc_RNA (1)...(19): siRNA sense strand
gcaacauccucaucaguac

SEQ ID NO: 429889 - RNA, 19 nt, Homo sapiens
  misc_RNA (1)...(19): siRNA sense strand
ucauugaacugcugcacaa

SEQ ID NO: 429890 - RNA, 19 nt, Homo sapiens
  misc_RNA (1)...(19): siRNA sense strand
aggcugagauugaagagaa

SEQ ID NO: 429891 - RNA, 19 nt, Homo sapiens
  misc_RNA (1)...(19): siRNA sense strand
agacaguuauuaaggaguu

SEQ ID NO: 429892 - RNA, 19 nt, Homo sapiens
  misc_RNA (1)...(19): siRNA sense strand
gaaugcacgugagacagaa

SEQ ID NO: 429893 - RNA, 19 nt, Homo sapiens
  misc_RNA (1)...(19): siRNA sense strand
guguggauguguauaagaa

SEQ ID NO: 429894 - RNA, 19 nt, Homo sapiens
  misc_RNA (1)...(19): siRNA sense strand
ccacugacuuugccaccuu

SEQ ID NO: 429895 - RNA, 19 nt, Homo sapiens
  misc_RNA (1)...(19): siRNA sense strand
ggagcgcuguaucguaaga

SEQ ID NO: 429896 - RNA, 19 nt, Homo sapiens
  misc_RNA (1)...(19): siRNA sense strand
uuaaggaguugaagaaguc

SEQ ID NO: 429897 - RNA, 19 nt, Homo sapiens
  misc_RNA (1)...(19): siRNA sense strand
ugacagaucggaaccugaa

SEQ ID NO: 429898 - RNA, 19 nt, Homo sapiens
  misc_RNA (1)...(19): siRNA sense strand
aaagaaggagaaagaguuu

SEQ ID NO: 429899 - RNA, 19 nt, Homo sapiens
  misc_RNA (1)...(19): siRNA sense strand
uggaggaacuggcuuucaa

SEQ ID NO: 429900 - RNA, 19 nt, Homo sapiens
  misc_RNA (1)...(19): siRNA sense strand
gggcaggaggcuacagaua

SEQ ID NO: 429901 - RNA, 19 nt, Homo sapiens
  misc_RNA (1)...(19): siRNA sense strand
gagcaugcccucucucagu

SEQ ID NO: 429902 - RNA, 19 nt, Homo sapiens
  misc_RNA (1)...(19): siRNA sense strand
ggagacgguugcagacuac

SEQ ID NO: 429903 - RNA, 19 nt, Homo sapiens
  misc_RNA (1)...(19): siRNA sense strand
gaaccugaaucuggaagag

SEQ ID NO: 429904 - RNA, 19 nt, Homo sapiens
  misc_RNA (1)...(19): siRNA sense strand
gaucuuucuuccucagaga

SEQ ID NO: 429905 - RNA, 19 nt, Homo sapiens
  misc_RNA (1)...(19): siRNA sense strand
gggcagaagacaaagcaaa

SEQ ID NO: 429906 - RNA, 19 nt, Homo sapiens
  misc_RNA (1)...(19): siRNA sense strand
ggaggaacuggcuuucaaa

SEQ ID NO: 429907 - RNA, 19 nt, Homo sapiens
  misc_RNA (1)...(19): siRNA sense strand
acaaggaucagcuggauga

SEQ ID NO: 429908 - RNA, 19 nt, Homo sapiens
  misc_RNA (1)...(19): siRNA sense strand
accaagagcuggaaguugu

SEQ ID NO: 429909 - RNA, 19 nt, Homo sapiens
  misc_RNA (1)...(19): siRNA sense strand
ucucccagcuccagcauga

SEQ ID NO: 429910 - RNA, 19 nt, Homo sapiens
  misc_RNA (1)...(19): siRNA sense strand
aagaagucacucaagauua

SEQ ID NO: 429911 - RNA, 19 nt, Homo sapiens
  misc_RNA (1)...(19): siRNA sense strand
ggcaggaggcuacagauau

SEQ ID NO: 429912 - RNA, 19 nt, Homo sapiens
  misc_RNA (1)...(19): siRNA sense strand
gaaagugggcagccuguac

SEQ ID NO: 429913 - RNA, 19 nt, Homo sapiens
  misc_RNA (1)...(19): siRNA sense strand
gagcuaagccaggcagaga

SEQ ID NO: 429914 - RNA, 19 nt, Homo sapiens
  misc_RNA (1)...(19): siRNA sense strand
cagagaagcaggagcaugu

SEQ ID NO: 429915 - RNA, 19 nt, Homo sapiens
  misc_RNA (1)...(19): siRNA sense strand
gcaccgacagcccgaaaga

SEQ ID NO: 429916 - RNA, 19 nt, Homo sapiens
  misc_RNA (1)...(19): siRNA sense strand
caagcgagcagaucuaugg

SEQ ID NO: 429917 - RNA, 19 nt, Homo sapiens
  misc_RNA (1)...(19): siRNA sense strand
uggaagcgaugaaugagau

SEQ ID NO: 429918 - RNA, 19 nt, Homo sapiens
  misc_RNA (1)...(19): siRNA sense strand
gcugaaggccuggguuuga

SEQ ID NO: 429919 - RNA, 19 nt, Homo sapiens
  misc_RNA (1)...(19): siRNA sense strand
ugauacugcugaugccauu

SEQ ID NO: 429920 - RNA, 19 nt, Homo sapiens
  misc_RNA (1)...(19): siRNA sense strand
gcauccaccuugccgaaca

SEQ ID NO: 429921 - RNA, 19 nt, Homo sapiens
  misc_RNA (1)...(19): siRNA sense strand
ggagaaugcacgugagaca

SEQ ID NO: 429922 - RNA, 19 nt, Homo sapiens
  misc_RNA (1)...(19): siRNA sense strand
gcucacuacugacuuagag

SEQ ID NO: 429923 - RNA, 19 nt, Homo sapiens
  misc_RNA (1)...(19): siRNA sense strand
cagagaaggcagaacuaaa

SEQ ID NO: 429924 - RNA, 19 nt, Homo sapiens
  misc_RNA (1)...(19): siRNA sense strand
gaagaaccaagagcuggaa

SEQ ID NO: 429925 - RNA, 19 nt, Homo sapiens
  misc_RNA (1)...(19): siRNA sense strand
ugaacuaagugagaacugu

SEQ ID NO: 429926 - RNA, 19 nt, Homo sapiens
  misc_RNA (1)...(19): siRNA sense strand
ucaaguuugcugagacuaa

SEQ ID NO: 429927 - RNA, 19 nt, Homo sapiens
  misc_RNA (1)...(19): siRNA sense strand
aggaggcgcuggaggcaaa

SEQ ID NO: 429928 - RNA, 19 nt, Homo sapiens
  misc_RNA (1)...(19): siRNA sense strand
acagucgccucaucuccua

SEQ ID NO: 429929 - RNA, 19 nt, Homo sapiens
  misc_RNA (1)...(19): siRNA sense strand
gcacacacacgcacguagu

SEQ ID NO: 429930 - RNA, 19 nt, Homo sapiens
  misc_RNA (1)...(19): siRNA sense strand
caagggagcccagaugaag

SEQ ID NO: 429931 - RNA, 19 nt, Homo sapiens
  misc_RNA (1)...(19): siRNA sense strand
agaaggagaaagaguuuga

SEQ ID NO: 429932 - RNA, 19 nt, Homo sapiens
  misc_RNA (1)...(19): siRNA sense strand
uggaugagacugucaaugu

SEQ ID NO: 429933 - RNA, 19 nt, Homo sapiens
  misc_RNA (1)...(19): siRNA sense strand
caaggcaauugagauggaa

SEQ ID NO: 429934 - RNA, 19 nt, Homo sapiens
  misc_RNA (1)...(19): siRNA sense strand
cagcagaccaucaagaagu

SEQ ID NO: 429935 - RNA, 19 nt, Homo sapiens
  misc_RNA (1)...(19): siRNA sense strand
caaggaggcgagaaaggaa

SEQ ID NO: 429936 - RNA, 19 nt, Homo sapiens
  misc_RNA (1)...(19): siRNA sense strand
gagaagcaggagcauguga

SEQ ID NO: 429937 - RNA, 19 nt, Homo sapiens
  misc_RNA (1)...(19): siRNA sense strand
uggaggagauggcugauac

SEQ ID NO: 429938 - RNA, 19 nt, Homo sapiens
  misc_RNA (1)...(19): siRNA sense strand
ccugaggacuguacuaugc

SEQ ID NO: 429939 - RNA, 19 nt, Homo sapiens
  misc_RNA (1)...(19): siRNA sense strand
ggaugacacagucuacaug

SEQ ID NO: 429940 - RNA, 19 nt, Homo sapiens
  misc_RNA (1)...(19): siRNA sense strand
ggagcuaagugaggccaau

SEQ ID NO: 429941 - RNA, 19 nt, Homo sapiens
  misc_RNA (1)...(19): siRNA sense strand
ugaaugagaugaacgauga

SEQ ID NO: 429942 - RNA, 19 nt, Homo sapiens
  misc_RNA (1)...(19): siRNA sense strand
gcaggaggcuacagauauu

SEQ ID NO: 429943 - RNA, 19 nt, Homo sapiens
  misc_RNA (1)...(19): siRNA sense strand
gaagaucgagagacaguua

SEQ ID NO: 429944 - RNA, 19 nt, Homo sapiens
  misc_RNA (1)...(19): siRNA sense strand
agaagucacucaagauuaa

SEQ ID NO: 429945 - RNA, 19 nt, Homo sapiens
  misc_RNA (1)...(19): siRNA sense strand
gaaagaaggagaaagaguu

SEQ ID NO: 429946 - RNA, 19 nt, Homo sapiens
  misc_RNA (1)...(19): siRNA sense strand
gcucaugccucgucucauu

SEQ ID NO: 429947 - RNA, 19 nt, Homo sapiens
  misc_RNA (1)...(19): siRNA sense strand
gaagaagucacucaagauu

SEQ ID NO: 429948 - RNA, 19 nt, Homo sapiens
  misc_RNA (1)...(19): siRNA sense strand
ggacagugcugccaaggau

SEQ ID NO: 429949 - RNA, 19 nt, Homo sapiens
  misc_RNA (1)...(19): siRNA sense strand
gcagagagcaccauugaug

SEQ ID NO: 429950 - RNA, 19 nt, Homo sapiens
  misc_RNA (1)...(19): siRNA sense strand
uaaaagagcuggagaaaca

SEQ ID NO: 429951 - RNA, 19 nt, Homo sapiens
  misc_RNA (1)...(19): siRNA sense strand
ucgagaagcucaaggauga

SEQ ID NO: 429952 - RNA, 19 nt, Homo sapiens
  misc_RNA (1)...(19): siRNA sense strand
gaaacgggcagaagacaaa

SEQ ID NO: 429953 - RNA, 19 nt, Homo sapiens
  misc_RNA (1)...(19): siRNA sense strand
gaacuaaagcagcgucuga

SEQ ID NO: 429954 - RNA, 19 nt, Homo sapiens
  misc_RNA (1)...(19): siRNA sense strand
gagagacaguuauuaagga

SEQ ID NO: 429955 - RNA, 19 nt, Homo sapiens
  misc_RNA (1)...(19): siRNA sense strand
gaagacaaagcaaagcuaa

SEQ ID NO: 429956 - RNA, 19 nt, Homo sapiens
  misc_RNA (1)...(19): siRNA sense strand
ccaaggccaucaaguacua

SEQ ID NO: 429957 - RNA, 19 nt, Homo sapiens
  misc_RNA (1)...(19): siRNA sense strand
acaaggagauggcugaaga

SEQ ID NO: 429958 - RNA, 19 nt, Homo sapiens
  misc_RNA (1)...(19): siRNA sense strand
gcaaguggcucagcuuaag

SEQ ID NO: 429959 - RNA, 19 nt, Homo sapiens
  misc_RNA (1)...(19): siRNA sense strand
caugagcgcuccuuggauu

SEQ ID NO: 429960 - RNA, 19 nt, Homo sapiens
  misc_RNA (1)...(19): siRNA sense strand
cgagcucacuacugacuua

SEQ ID NO: 429961 - RNA, 19 nt, Homo sapiens
  misc_RNA (1)...(19): siRNA sense strand
gcacaaggaucagcuggau

SEQ ID NO: 429962 - RNA, 19 nt, Homo sapiens
  misc_RNA (1)...(19): siRNA sense strand
aaagugaccuucucaugug

SEQ ID NO: 429963 - RNA, 19 nt, Homo sapiens
  misc_RNA (1)...(19): siRNA sense strand
gaagagaagggcucagaug

SEQ ID NO: 429964 - RNA, 19 nt, Homo sapiens
  misc_RNA (1)...(19): siRNA sense strand
uugcaaagcuaucccauga

SEQ ID NO: 429965 - RNA, 19 nt, Homo sapiens
  misc_RNA (1)...(19): siRNA sense strand
gcaaaggaacgcuauaugg

SEQ ID NO: 429966 - RNA, 19 nt, Homo sapiens
  misc_RNA (1)...(19): siRNA sense strand
gcaaagugaccuucucaug

SEQ ID NO: 429967 - RNA, 19 nt, Homo sapiens
  misc_RNA (1)...(19): siRNA sense strand
ggaugagacugucaaugug

SEQ ID NO: 429968 - RNA, 19 nt, Homo sapiens
  misc_RNA (1)...(19): siRNA sense strand
uggacgagcucacuacuga

SEQ ID NO: 429969 - RNA, 19 nt, Homo sapiens
  misc_RNA (1)...(19): siRNA sense strand
caaagugaccuucucaugu

SEQ ID NO: 429970 - RNA, 19 nt, Homo sapiens
  misc_RNA (1)...(19): siRNA sense strand
ucaccaaggccaucaagua

SEQ ID NO: 429971 - RNA, 19 nt, Homo sapiens
  misc_RNA (1)...(19): siRNA sense strand
caaaggaacgcuauaugga

SEQ ID NO: 429972 - RNA, 19 nt, Homo sapiens
  misc_RNA (1)...(19): siRNA sense strand
gaucgagagacaguuauua

SEQ ID NO: 429973 - RNA, 19 nt, Homo sapiens
  misc_RNA (1)...(19): siRNA sense strand
gcaguguggauguguauaa

SEQ ID NO: 429974 - RNA, 19 nt, Homo sapiens
  misc_RNA (1)...(19): siRNA sense strand
ccagagaccuuugacuuca

SEQ ID NO: 429975 - RNA, 19 nt, Homo sapiens
  misc_RNA (1)...(19): siRNA sense strand
gcagagaaggcagaacuaa

SEQ ID NO: 429976 - RNA, 19 nt, Homo sapiens
  misc_RNA (1)...(19): siRNA sense strand
uggcauugcuggugaagaa

SEQ ID NO: 429977 - RNA, 19 nt, Homo sapiens
  misc_RNA (1)...(19): siRNA sense strand
gaaccaagagcuggaaguu

SEQ ID NO: 429978 - RNA, 19 nt, Homo sapiens
  misc_RNA (1)...(19): siRNA sense strand
gcagugacauccgccaguu

SEQ ID NO: 429979 - RNA, 19 nt, Homo sapiens
  misc_RNA (1)...(19): siRNA sense strand
ggaagcaggcccaggagaa

SEQ ID NO: 429980 - RNA, 19 nt, Homo sapiens
  misc_RNA (1)...(19): siRNA sense strand
acgaugagcugcaggagaa

SEQ ID NO: 429981 - RNA, 19 nt, Homo sapiens
  misc_RNA (1)...(19): siRNA sense strand
gaaacuucaugcagugaca

SEQ ID NO: 429982 - RNA, 19 nt, Homo sapiens
  misc_RNA (1)...(19): siRNA sense strand
cuagagacccugagacuga

SEQ ID NO: 429983 - RNA, 19 nt, Homo sapiens
  misc_RNA (1)...(19): siRNA sense strand
cuggagcgcuguaucguaa

SEQ ID NO: 429984 - RNA, 19 nt, Homo sapiens
  misc_RNA (1)...(19): siRNA sense strand
gaaacuagagacccugaga

SEQ ID NO: 429985 - RNA, 19 nt, Homo sapiens
  misc_RNA (1)...(19): siRNA sense strand
gaacuaagugagaacuguu

SEQ ID NO: 429986 - RNA, 19 nt, Homo sapiens
  misc_RNA (1)...(19): siRNA sense strand
gaaagaguuugaggagaca

SEQ ID NO: 429987 - RNA, 19 nt, Homo sapiens
  misc_RNA (1)...(19): siRNA sense strand
ccaaggcaauugagaugga

SEQ ID NO: 429988 - RNA, 19 nt, Homo sapiens
  misc_RNA (1)...(19): siRNA sense strand
gcaacauccucaucaguac

SEQ ID NO: 429989 - RNA, 19 nt, Homo sapiens
  misc_RNA (1)...(19): siRNA sense strand
ucauugaacugcugcacaa

SEQ ID NO: 429990 - RNA, 19 nt, Homo sapiens
  misc_RNA (1)...(19): siRNA sense strand
aggcugagauugaagagaa

SEQ ID NO: 429991 - RNA, 19 nt, Homo sapiens
  misc_RNA (1)...(19): siRNA sense strand
agacaguuauuaaggaguu

SEQ ID NO: 429992 - RNA, 19 nt, Homo sapiens
  misc_RNA (1)...(19): siRNA sense strand
gaaugcacgugagacagaa

SEQ ID NO: 429993 - RNA, 19 nt, Homo sapiens
  misc_RNA (1)...(19): siRNA sense strand
guguggauguguauaagaa

SEQ ID NO: 429994 - RNA, 19 nt, Homo sapiens
  misc_RNA (1)...(19): siRNA sense strand
ccacugacuuugccaccuu

SEQ ID NO: 429995 - RNA, 19 nt, Homo sapiens
  misc_RNA (1)...(19): siRNA sense strand
ggagcgcuguaucguaaga

SEQ ID NO: 429996 - RNA, 19 nt, Homo sapiens
  misc_RNA (1)...(19): siRNA sense strand
uuaaggaguugaagaaguc

SEQ ID NO: 429997 - RNA, 19 nt, Homo sapiens
  misc_RNA (1)...(19): siRNA sense strand
ugacagaucggaaccugaa

SEQ ID NO: 429998 - RNA, 19 nt, Homo sapiens
  misc_RNA (1)...(19): siRNA sense strand
aaagaaggagaaagaguuu

SEQ ID NO: 429999 - RNA, 19 nt, Homo sapiens
  misc_RNA (1)...(19): siRNA sense strand
uggaggaacuggcuuucaa

SEQ ID NO: 430000 - RNA, 19 nt, Homo sapiens
  misc_RNA (1)...(19): siRNA sense strand
gggcaggaggcuacagaua

SEQ ID NO: 430001 - RNA, 19 nt, Homo sapiens
  misc_RNA (1)...(19): siRNA sense strand
gagcaugcccucucucagu

SEQ ID NO: 430002 - RNA, 19 nt, Homo sapiens
  misc_RNA (1)...(19): siRNA sense strand
ggagacgguugcagacuac

SEQ ID NO: 430003 - RNA, 19 nt, Homo sapiens
  misc_RNA (1)...(19): siRNA sense strand
gaaccugaaucuggaagag

SEQ ID NO: 430004 - RNA, 19 nt, Homo sapiens
  misc_RNA (1)...(19): siRNA sense strand
gaucuuucuuccucagaga

SEQ ID NO: 430005 - RNA, 19 nt, Homo sapiens
  misc_RNA (1)...(19): siRNA sense strand
gggcagaagacaaagcaaa

SEQ ID NO: 430006 - RNA, 19 nt, Homo sapiens
  misc_RNA (1)...(19): siRNA sense strand
ggaggaacuggcuuucaaa

SEQ ID NO: 430007 - RNA, 19 nt, Homo sapiens
  misc_RNA (1)...(19): siRNA sense strand
acaaggaucagcuggauga

SEQ ID NO: 430008 - RNA, 19 nt, Homo sapiens
  misc_RNA (1)...(19): siRNA sense strand
accaagagcuggaaguugu

SEQ ID NO: 430009 - RNA, 19 nt, Homo sapiens
  misc_RNA (1)...(19): siRNA sense strand
ucucccagcuccagcauga

SEQ ID NO: 430010 - RNA, 19 nt, Homo sapiens
  misc_RNA (1)...(19): siRNA sense strand
aagaagucacucaagauua

SEQ ID NO: 430011 - RNA, 19 nt, Homo sapiens
  misc_RNA (1)...(19): siRNA sense strand
ggcaggaggcuacagauau

SEQ ID NO: 430012 - RNA, 19 nt, Homo sapiens
  misc_RNA (1)...(19): siRNA sense strand
gaaagugggcagccuguac

SEQ ID NO: 430013 - RNA, 19 nt, Homo sapiens
  misc_RNA (1)...(19): siRNA sense strand
gagcuaagccaggcagaga

SEQ ID NO: 430014 - RNA, 19 nt, Homo sapiens
  misc_RNA (1)...(19): siRNA sense strand
cagagaagcaggagcaugu

SEQ ID NO: 430015 - RNA, 19 nt, Homo sapiens
  misc_RNA (1)...(19): siRNA sense strand
gcaccgacagcccgaaaga

SEQ ID NO: 430016 - RNA, 19 nt, Homo sapiens
  misc_RNA (1)...(19): siRNA sense strand
caagcgagcagaucuaugg

SEQ ID NO: 430017 - RNA, 19 nt, Homo sapiens
  misc_RNA (1)...(19): siRNA sense strand
uggaagcgaugaaugagau

SEQ ID NO: 430018 - RNA, 19 nt, Homo sapiens
  misc_RNA (1)...(19): siRNA sense strand
gcugaaggccuggguuuga

SEQ ID NO: 430019 - RNA, 19 nt, Homo sapiens
  misc_RNA (1)...(19): siRNA sense strand
ugauacugcugaugccauu

SEQ ID NO: 430020 - RNA, 19 nt, Homo sapiens
  misc_RNA (1)...(19): siRNA sense strand
gcauccaccuugccgaaca

SEQ ID NO: 430021 - RNA, 19 nt, Homo sapiens
  misc_RNA (1)...(19): siRNA sense strand
ggagaaugcacgugagaca

SEQ ID NO: 430022 - RNA, 19 nt, Homo sapiens
  misc_RNA (1)...(19): siRNA sense strand
gcucacuacugacuuagag

SEQ ID NO: 430023 - RNA, 19 nt, Homo sapiens
  misc_RNA (1)...(19): siRNA sense strand
cagagaaggcagaacuaaa

SEQ ID NO: 430024 - RNA, 19 nt, Homo sapiens
  misc_RNA (1)...(19): siRNA sense strand
gaagaaccaagagcuggaa

SEQ ID NO: 430025 - RNA, 19 nt, Homo sapiens
  misc_RNA (1)...(19): siRNA sense strand
ugaacuaagugagaacugu

SEQ ID NO: 430026 - RNA, 19 nt, Homo sapiens
  misc_RNA (1)...(19): siRNA sense strand
ucaaguuugcugagacuaa

SEQ ID NO: 430027 - RNA, 19 nt, Homo sapiens
  misc_RNA (1)...(19): siRNA sense strand
aggaggcgcuggaggcaaa

SEQ ID NO: 430028 - RNA, 19 nt, Homo sapiens
  misc_RNA (1)...(19): siRNA sense strand
acagucgccucaucuccua

SEQ ID NO: 430029 - RNA, 19 nt, Homo sapiens
  misc_RNA (1)...(19): siRNA sense strand
gcacacacacgcacguagu

SEQ ID NO: 430030 - RNA, 19 nt, Homo sapiens
  misc_RNA (1)...(19): siRNA sense strand
caagggagcccagaugaag

SEQ ID NO: 430031 - RNA, 19 nt, Homo sapiens
  misc_RNA (1)...(19): siRNA sense strand
agaaggagaaagaguuuga

SEQ ID NO: 430032 - RNA, 19 nt, Homo sapiens
  misc_RNA (1)...(19): siRNA sense strand
uggaugagacugucaaugu

SEQ ID NO: 430033 - RNA, 19 nt, Homo sapiens
  misc_RNA (1)...(19): siRNA sense strand
caaggcaauugagauggaa

SEQ ID NO: 430034 - RNA, 19 nt, Homo sapiens
  misc_RNA (1)...(19): siRNA sense strand
cagcagaccaucaagaagu

SEQ ID NO: 430035 - RNA, 19 nt, Homo sapiens
  misc_RNA (1)...(19): siRNA sense strand
caaggaggcgagaaaggaa

SEQ ID NO: 430036 - RNA, 19 nt, Homo sapiens
  misc_RNA (1)...(19): siRNA sense strand
gagaagcaggagcauguga

SEQ ID NO: 430037 - RNA, 19 nt, Homo sapiens
  misc_RNA (1)...(19): siRNA sense strand
uggaggagauggcugauac

SEQ ID NO: 430038 - RNA, 19 nt, Homo sapiens
  misc_RNA (1)...(19): siRNA sense strand
ccugaggacuguacuaugc

SEQ ID NO: 430039 - RNA, 19 nt, Homo sapiens
  misc_RNA (1)...(19): siRNA sense strand
ggaugacacagucuacaug

SEQ ID NO: 430040 - RNA, 19 nt, Homo sapiens
  misc_RNA (1)...(19): siRNA sense strand
ggagcuaagugaggccaau

SEQ ID NO: 430041 - RNA, 19 nt, Homo sapiens
  misc_RNA (1)...(19): siRNA sense strand
ggccaacacugucaaguuu

SEQ ID NO: 430042 - RNA, 19 nt, Homo sapiens
  misc_RNA (1)...(19): siRNA sense strand
gaauacggguccaucaauc

SEQ ID NO: 430043 - RNA, 19 nt, Homo sapiens
  misc_RNA (1)...(19): siRNA sense strand
gcaggagcaucgcauugga

SEQ ID NO: 430044 - RNA, 19 nt, Homo sapiens
  misc_RNA (1)...(19): siRNA sense strand
caucugacaagggaaauua

SEQ ID NO: 430045 - RNA, 19 nt, Homo sapiens
  misc_RNA (1)...(19): siRNA sense strand
gcaccauacuggaccaaca

SEQ ID NO: 430046 - RNA, 19 nt, Homo sapiens
  misc_RNA (1)...(19): siRNA sense strand
gcacuggagccucauuaug

SEQ ID NO: 430047 - RNA, 19 nt, Homo sapiens
  misc_RNA (1)...(19): siRNA sense strand
aaaguguggucccaucuga

SEQ ID NO: 430048 - RNA, 19 nt, Homo sapiens
  misc_RNA (1)...(19): siRNA sense strand
cauuggaggcuacaaggua

SEQ ID NO: 430049 - RNA, 19 nt, Homo sapiens
  misc_RNA (1)...(19): siRNA sense strand
aguugaggauaccacauua

SEQ ID NO: 430050 - RNA, 19 nt, Homo sapiens
  misc_RNA (1)...(19): siRNA sense strand
gaaaguguggucccaucug

SEQ ID NO: 430051 - RNA, 19 nt, Homo sapiens
  misc_RNA (1)...(19): siRNA sense strand
cagcacuggagccucauua

SEQ ID NO: 430052 - RNA, 19 nt, Homo sapiens
  misc_RNA (1)...(19): siRNA sense strand
ggaacccaaugccaaccau

SEQ ID NO: 430053 - RNA, 19 nt, Homo sapiens
  misc_RNA (1)...(19): siRNA sense strand
ugaauacggguccaucaau

SEQ ID NO: 430054 - RNA, 19 nt, Homo sapiens
  misc_RNA (1)...(19): siRNA sense strand
acacguaccaccuggaugu

SEQ ID NO: 430055 - RNA, 19 nt, Homo sapiens
  misc_RNA (1)...(19): siRNA sense strand
ucugacaagggaaauuaua

SEQ ID NO: 430056 - RNA, 19 nt, Homo sapiens
  misc_RNA (1)...(19): siRNA sense strand
cauacuggaccaacacaga

SEQ ID NO: 430057 - RNA, 19 nt, Homo sapiens
  misc_RNA (1)...(19): siRNA sense strand
ccaacacugucaaguuucg

SEQ ID NO: 430058 - RNA, 19 nt, Homo sapiens
  misc_RNA (1)...(19): siRNA sense strand
gaggcuacaagguacgaaa

SEQ ID NO: 430059 - RNA, 19 nt, Homo sapiens
  misc_RNA (1)...(19): siRNA sense strand
cguaccaccuggauguugu

SEQ ID NO: 430060 - RNA, 19 nt, Homo sapiens
  misc_RNA (1)...(19): siRNA sense strand
ucaguuuaguugaggauac

SEQ ID NO: 430061 - RNA, 19 nt, Homo sapiens
  misc_RNA (1)...(19): siRNA sense strand
ggaaaguguggucccaucu

SEQ ID NO: 430062 - RNA, 19 nt, Homo sapiens
  misc_RNA (1)...(19): siRNA sense strand
uaguugaggauaccacauu

SEQ ID NO: 430063 - RNA, 19 nt, Homo sapiens
  misc_RNA (1)...(19): siRNA sense strand
gcuacaagguacgaaacca

SEQ ID NO: 430064 - RNA, 19 nt, Homo sapiens
  misc_RNA (1)...(19): siRNA sense strand
cacuggagccucauuaugg

SEQ ID NO: 430065 - RNA, 19 nt, Homo sapiens
  misc_RNA (1)...(19): siRNA sense strand
cggccaacacugucaaguu

SEQ ID NO: 430066 - RNA, 19 nt, Homo sapiens
  misc_RNA (1)...(19): siRNA sense strand
acuggagccucauuaugga

SEQ ID NO: 430067 - RNA, 19 nt, Homo sapiens
  misc_RNA (1)...(19): siRNA sense strand
uaagcaggagcaucgcauu

SEQ ID NO: 430068 - RNA, 19 nt, Homo sapiens
  misc_RNA (1)...(19): siRNA sense strand
ggagccucauuauggaaag

SEQ ID NO: 430069 - RNA, 19 nt, Homo sapiens
  misc_RNA (1)...(19): siRNA sense strand
ggccaacacugucaaguuu

SEQ ID NO: 430070 - RNA, 19 nt, Homo sapiens
  misc_RNA (1)...(19): siRNA sense strand
gaauacggguccaucaauc

SEQ ID NO: 430071 - RNA, 19 nt, Homo sapiens
  misc_RNA (1)...(19): siRNA sense strand
gcaggagcaucgcauugga

SEQ ID NO: 430072 - RNA, 19 nt, Homo sapiens
  misc_RNA (1)...(19): siRNA sense strand
caucugacaagggaaauua

SEQ ID NO: 430073 - RNA, 19 nt, Homo sapiens
  misc_RNA (1)...(19): siRNA sense strand
gcaccauacuggaccaaca

SEQ ID NO: 430074 - RNA, 19 nt, Homo sapiens
  misc_RNA (1)...(19): siRNA sense strand
gcacuggagccucauuaug

SEQ ID NO: 430075 - RNA, 19 nt, Homo sapiens
  misc_RNA (1)...(19): siRNA sense strand
aaaguguggucccaucuga

SEQ ID NO: 430076 - RNA, 19 nt, Homo sapiens
  misc_RNA (1)...(19): siRNA sense strand
cauuggaggcuacaaggua

SEQ ID NO: 430077 - RNA, 19 nt, Homo sapiens
  misc_RNA (1)...(19): siRNA sense strand
aguugaggauaccacauua

SEQ ID NO: 430078 - RNA, 19 nt, Homo sapiens
  misc_RNA (1)...(19): siRNA sense strand
gaaaguguggucccaucug

SEQ ID NO: 430079 - RNA, 19 nt, Homo sapiens
  misc_RNA (1)...(19): siRNA sense strand
cagcacuggagccucauua

SEQ ID NO: 430080 - RNA, 19 nt, Homo sapiens
  misc_RNA (1)...(19): siRNA sense strand
ggaacccaaugccaaccau

SEQ ID NO: 430081 - RNA, 19 nt, Homo sapiens
  misc_RNA (1)...(19): siRNA sense strand
ugaauacggguccaucaau

SEQ ID NO: 430082 - RNA, 19 nt, Homo sapiens
  misc_RNA (1)...(19): siRNA sense strand
acacguaccaccuggaugu

SEQ ID NO: 430083 - RNA, 19 nt, Homo sapiens
  misc_RNA (1)...(19): siRNA sense strand
ucugacaagggaaauuaua

SEQ ID NO: 430084 - RNA, 19 nt, Homo sapiens
  misc_RNA (1)...(19): siRNA sense strand
cauacuggaccaacacaga

SEQ ID NO: 430085 - RNA, 19 nt, Homo sapiens
  misc_RNA (1)...(19): siRNA sense strand
ccaacacugucaaguuucg

SEQ ID NO: 430086 - RNA, 19 nt, Homo sapiens
  misc_RNA (1)...(19): siRNA sense strand
gaggcuacaagguacgaaa

SEQ ID NO: 430087 - RNA, 19 nt, Homo sapiens
  misc_RNA (1)...(19): siRNA sense strand
cguaccaccuggauguugu

SEQ ID NO: 430088 - RNA, 19 nt, Homo sapiens
  misc_RNA (1)...(19): siRNA sense strand
ucaguuuaguugaggauac

SEQ ID NO: 430089 - RNA, 19 nt, Homo sapiens
  misc_RNA (1)...(19): siRNA sense strand
ggaaaguguggucccaucu

SEQ ID NO: 430090 - RNA, 19 nt, Homo sapiens
  misc_RNA (1)...(19): siRNA sense strand
uaguugaggauaccacauu

SEQ ID NO: 430091 - RNA, 19 nt, Homo sapiens
  misc_RNA (1)...(19): siRNA sense strand
gcuacaagguacgaaacca

SEQ ID NO: 430092 - RNA, 19 nt, Homo sapiens
  misc_RNA (1)...(19): siRNA sense strand
cacuggagccucauuaugg

SEQ ID NO: 430093 - RNA, 19 nt, Homo sapiens
  misc_RNA (1)...(19): siRNA sense strand
cggccaacacugucaaguu

SEQ ID NO: 430094 - RNA, 19 nt, Homo sapiens
  misc_RNA (1)...(19): siRNA sense strand
acuggagccucauuaugga

SEQ ID NO: 430095 - RNA, 19 nt, Homo sapiens
  misc_RNA (1)...(19): siRNA sense strand
uaagcaggagcaucgcauu

SEQ ID NO: 430096 - RNA, 19 nt, Homo sapiens
  misc_RNA (1)...(19): siRNA sense strand
ggagccucauuauggaaag

SEQ ID NO: 430097 - RNA, 19 nt, Homo sapiens
  misc_RNA (1)...(19): siRNA sense strand
ggccaacacugucaaguuu

SEQ ID NO: 430098 - RNA, 19 nt, Homo sapiens
  misc_RNA (1)...(19): siRNA sense strand
gaauacggguccaucaauc

SEQ ID NO: 430099 - RNA, 19 nt, Homo sapiens
  misc_RNA (1)...(19): siRNA sense strand
gcaggagcaucgcauugga

SEQ ID NO: 430100 - RNA, 19 nt, Homo sapiens
  misc_RNA (1)...(19): siRNA sense strand
caucugacaagggaaauua

SEQ ID NO: 430101 - RNA, 19 nt, Homo sapiens
  misc_RNA (1)...(19): siRNA sense strand
gcaccauacuggaccaaca

SEQ ID NO: 430102 - RNA, 19 nt, Homo sapiens
  misc_RNA (1)...(19): siRNA sense strand
gcacuggagccucauuaug

SEQ ID NO: 430103 - RNA, 19 nt, Homo sapiens
  misc_RNA (1)...(19): siRNA sense strand
aaaguguggucccaucuga

SEQ ID NO: 430104 - RNA, 19 nt, Homo sapiens
  misc_RNA (1)...(19): siRNA sense strand
cauuggaggcuacaaggua

SEQ ID NO: 430105 - RNA, 19 nt, Homo sapiens
  misc_RNA (1)...(19): siRNA sense strand
aguugaggauaccacauua

SEQ ID NO: 430106 - RNA, 19 nt, Homo sapiens
  misc_RNA (1)...(19): siRNA sense strand
gaaaguguggucccaucug

SEQ ID NO: 430107 - RNA, 19 nt, Homo sapiens
  misc_RNA (1)...(19): siRNA sense strand
cagcacuggagccucauua

SEQ ID NO: 430108 - RNA, 19 nt, Homo sapiens
  misc_RNA (1)...(19): siRNA sense strand
ggaacccaaugccaaccau

SEQ ID NO: 430109 - RNA, 19 nt, Homo sapiens
  misc_RNA (1)...(19): siRNA sense strand
ugaauacggguccaucaau

SEQ ID NO: 430110 - RNA, 19 nt, Homo sapiens
  misc_RNA (1)...(19): siRNA sense strand
acacguaccaccuggaugu

SEQ ID NO: 430111 - RNA, 19 nt, Homo sapiens
  misc_RNA (1)...(19): siRNA sense strand
ucugacaagggaaauuaua

SEQ ID NO: 430112 - RNA, 19 nt, Homo sapiens
  misc_RNA (1)...(19): siRNA sense strand
cauacuggaccaacacaga

SEQ ID NO: 430113 - RNA, 19 nt, Homo sapiens
  misc_RNA (1)...(19): siRNA sense strand
ccaacacugucaaguuucg

SEQ ID NO: 430114 - RNA, 19 nt, Homo sapiens
  misc_RNA (1)...(19): siRNA sense strand
gaggcuacaagguacgaaa

SEQ ID NO: 430115 - RNA, 19 nt, Homo sapiens
  misc_RNA (1)...(19): siRNA sense strand
cguaccaccuggauguugu

SEQ ID NO: 430116 - RNA, 19 nt, Homo sapiens
  misc_RNA (1)...(19): siRNA sense strand
ucaguuuaguugaggauac

SEQ ID NO: 430117 - RNA, 19 nt, Homo sapiens
  misc_RNA (1)...(19): siRNA sense strand
ggaaaguguggucccaucu

SEQ ID NO: 430118 - RNA, 19 nt, Homo sapiens
  misc_RNA (1)...(19): siRNA sense strand
uaguugaggauaccacauu

SEQ ID NO: 430119 - RNA, 19 nt, Homo sapiens
  misc_RNA (1)...(19): siRNA sense strand
gcuacaagguacgaaacca

SEQ ID NO: 430120 - RNA, 19 nt, Homo sapiens
  misc_RNA (1)...(19): siRNA sense strand
cacuggagccucauuaugg

SEQ ID NO: 430121 - RNA, 19 nt, Homo sapiens
  misc_RNA (1)...(19): siRNA sense strand
cggccaacacugucaaguu

SEQ ID NO: 430122 - RNA, 19 nt, Homo sapiens
  misc_RNA (1)...(19): siRNA sense strand
acuggagccucauuaugga

SEQ ID NO: 430123 - RNA, 19 nt, Homo sapiens
  misc_RNA (1)...(19): siRNA sense strand
uaagcaggagcaucgcauu

SEQ ID NO: 430124 - RNA, 19 nt, Homo sapiens
  misc_RNA (1)...(19): siRNA sense strand
ggagccucauuauggaaag

SEQ ID NO: 430125 - RNA, 19 nt, Homo sapiens
  misc_RNA (1)...(19): siRNA sense strand
ggccaacacugucaaguuu

SEQ ID NO: 430126 - RNA, 19 nt, Homo sapiens
  misc_RNA (1)...(19): siRNA sense strand
gaauacggguccaucaauc

SEQ ID NO: 430127 - RNA, 19 nt, Homo sapiens
  misc_RNA (1)...(19): siRNA sense strand
gcaggagcaucgcauugga

SEQ ID NO: 430128 - RNA, 19 nt, Homo sapiens
  misc_RNA (1)...(19): siRNA sense strand
caucugacaagggaaauua

SEQ ID NO: 430129 - RNA, 19 nt, Homo sapiens
  misc_RNA (1)...(19): siRNA sense strand
gcaccauacuggaccaaca

SEQ ID NO: 430130 - RNA, 19 nt, Homo sapiens
  misc_RNA (1)...(19): siRNA sense strand
gcacuggagccucauuaug

SEQ ID NO: 430131 - RNA, 19 nt, Homo sapiens
  misc_RNA (1)...(19): siRNA sense strand
aaaguguggucccaucuga

SEQ ID NO: 430132 - RNA, 19 nt, Homo sapiens
  misc_RNA (1)...(19): siRNA sense strand
cauuggaggcuacaaggua

SEQ ID NO: 430133 - RNA, 19 nt, Homo sapiens
  misc_RNA (1)...(19): siRNA sense strand
aguugaggauaccacauua

SEQ ID NO: 430134 - RNA, 19 nt, Homo sapiens
  misc_RNA (1)...(19): siRNA sense strand
gaaaguguggucccaucug

SEQ ID NO: 430135 - RNA, 19 nt, Homo sapiens
  misc_RNA (1)...(19): siRNA sense strand
cagcacuggagccucauua

SEQ ID NO: 430136 - RNA, 19 nt, Homo sapiens
  misc_RNA (1)...(19): siRNA sense strand
ggaacccaaugccaaccau

SEQ ID NO: 430137 - RNA, 19 nt, Homo sapiens
  misc_RNA (1)...(19): siRNA sense strand
ugaauacggguccaucaau

SEQ ID NO: 430138 - RNA, 19 nt, Homo sapiens
  misc_RNA (1)...(19): siRNA sense strand
acacguaccaccuggaugu

SEQ ID NO: 430139 - RNA, 19 nt, Homo sapiens
  misc_RNA (1)...(19): siRNA sense strand
ucugacaagggaaauuaua

SEQ ID NO: 430140 - RNA, 19 nt, Homo sapiens
  misc_RNA (1)...(19): siRNA sense strand
cauacuggaccaacacaga

SEQ ID NO: 430141 - RNA, 19 nt, Homo sapiens
  misc_RNA (1)...(19): siRNA sense strand
ccaacacugucaaguuucg

SEQ ID NO: 430142 - RNA, 19 nt, Homo sapiens
  misc_RNA (1)...(19): siRNA sense strand
gaggcuacaagguacgaaa

SEQ ID NO: 430143 - RNA, 19 nt, Homo sapiens
  misc_RNA (1)...(19): siRNA sense strand
cguaccaccuggauguugu

SEQ ID NO: 430144 - RNA, 19 nt, Homo sapiens
  misc_RNA (1)...(19): siRNA sense strand
ucaguuuaguugaggauac

SEQ ID NO: 430145 - RNA, 19 nt, Homo sapiens
  misc_RNA (1)...(19): siRNA sense strand
ggaaaguguggucccaucu

SEQ ID NO: 430146 - RNA, 19 nt, Homo sapiens
  misc_RNA (1)...(19): siRNA sense strand
uaguugaggauaccacauu

SEQ ID NO: 430147 - RNA, 19 nt, Homo sapiens
  misc_RNA (1)...(19): siRNA sense strand
gcuacaagguacgaaacca

SEQ ID NO: 430148 - RNA, 19 nt, Homo sapiens
  misc_RNA (1)...(19): siRNA sense strand
cacuggagccucauuaugg

SEQ ID NO: 430149 - RNA, 19 nt, Homo sapiens
  misc_RNA (1)...(19): siRNA sense strand
cggccaacacugucaaguu

SEQ ID NO: 430150 - RNA, 19 nt, Homo sapiens
  misc_RNA (1)...(19): siRNA sense strand
acuggagccucauuaugga

SEQ ID NO: 430151 - RNA, 19 nt, Homo sapiens
  misc_RNA (1)...(19): siRNA sense strand
uaagcaggagcaucgcauu

SEQ ID NO: 430152 - RNA, 19 nt, Homo sapiens
  misc_RNA (1)...(19): siRNA sense strand
ggagccucauuauggaaag

SEQ ID NO: 430153 - RNA, 19 nt, Homo sapiens
  misc_RNA (1)...(19): siRNA sense strand
ggccaacacugucaaguuu

SEQ ID NO: 430154 - RNA, 19 nt, Homo sapiens
  misc_RNA (1)...(19): siRNA sense strand
gaauacggguccaucaauc

SEQ ID NO: 430155 - RNA, 19 nt, Homo sapiens
  misc_RNA (1)...(19): siRNA sense strand
gcaggagcaucgcauugga

SEQ ID NO: 430156 - RNA, 19 nt, Homo sapiens
  misc_RNA (1)...(19): siRNA sense strand
caucugacaagggaaauua

SEQ ID NO: 430157 - RNA, 19 nt, Homo sapiens
  misc_RNA (1)...(19): siRNA sense strand
gcaccauacuggaccaaca

SEQ ID NO: 430158 - RNA, 19 nt, Homo sapiens
  misc_RNA (1)...(19): siRNA sense strand
gcacuggagccucauuaug

SEQ ID NO: 430159 - RNA, 19 nt, Homo sapiens
  misc_RNA (1)...(19): siRNA sense strand
aaaguguggucccaucuga

SEQ ID NO: 430160 - RNA, 19 nt, Homo sapiens
  misc_RNA (1)...(19): siRNA sense strand
cauuggaggcuacaaggua

SEQ ID NO: 430161 - RNA, 19 nt, Homo sapiens
  misc_RNA (1)...(19): siRNA sense strand
aguugaggauaccacauua

SEQ ID NO: 430162 - RNA, 19 nt, Homo sapiens
  misc_RNA (1)...(19): siRNA sense strand
gaaaguguggucccaucug

SEQ ID NO: 430163 - RNA, 19 nt, Homo sapiens
  misc_RNA (1)...(19): siRNA sense strand
cagcacuggagccucauua

SEQ ID NO: 430164 - RNA, 19 nt, Homo sapiens
  misc_RNA (1)...(19): siRNA sense strand
ggaacccaaugccaaccau

SEQ ID NO: 430165 - RNA, 19 nt, Homo sapiens
  misc_RNA (1)...(19): siRNA sense strand
ugaauacggguccaucaau

SEQ ID NO: 430166 - RNA, 19 nt, Homo sapiens
  misc_RNA (1)...(19): siRNA sense strand
acacguaccaccuggaugu

SEQ ID NO: 430167 - RNA, 19 nt, Homo sapiens
  misc_RNA (1)...(19): siRNA sense strand
ucugacaagggaaauuaua

SEQ ID NO: 430168 - RNA, 19 nt, Homo sapiens
  misc_RNA (1)...(19): siRNA sense strand
cauacuggaccaacacaga

SEQ ID NO: 430169 - RNA, 19 nt, Homo sapiens
  misc_RNA (1)...(19): siRNA sense strand
ccaacacugucaaguuucg

SEQ ID NO: 430170 - RNA, 19 nt, Homo sapiens
  misc_RNA (1)...(19): siRNA sense strand
gaggcuacaagguacgaaa

SEQ ID NO: 430171 - RNA, 19 nt, Homo sapiens
  misc_RNA (1)...(19): siRNA sense strand
cguaccaccuggauguugu

SEQ ID NO: 430172 - RNA, 19 nt, Homo sapiens
  misc_RNA (1)...(19): siRNA sense strand
ucaguuuaguugaggauac

SEQ ID NO: 430173 - RNA, 19 nt, Homo sapiens
  misc_RNA (1)...(19): siRNA sense strand
ggaaaguguggucccaucu

SEQ ID NO: 430174 - RNA, 19 nt, Homo sapiens
  misc_RNA (1)...(19): siRNA sense strand
uaguugaggauaccacauu

SEQ ID NO: 430175 - RNA, 19 nt, Homo sapiens
  misc_RNA (1)...(19): siRNA sense strand
gcuacaagguacgaaacca

SEQ ID NO: 430176 - RNA, 19 nt, Homo sapiens
  misc_RNA (1)...(19): siRNA sense strand
cacuggagccucauuaugg

SEQ ID NO: 430177 - RNA, 19 nt, Homo sapiens
  misc_RNA (1)...(19): siRNA sense strand
cggccaacacugucaaguu

SEQ ID NO: 430178 - RNA, 19 nt, Homo sapiens
  misc_RNA (1)...(19): siRNA sense strand
acuggagccucauuaugga

SEQ ID NO: 430179 - RNA, 19 nt, Homo sapiens
  misc_RNA (1)...(19): siRNA sense strand
uaagcaggagcaucgcauu

SEQ ID NO: 430180 - RNA, 19 nt, Homo sapiens
  misc_RNA (1)...(19): siRNA sense strand
ggagccucauuauggaaag

SEQ ID NO: 430181 - RNA, 19 nt, Homo sapiens
  misc_RNA (1)...(19): siRNA sense strand
ggccaacacugucaaguuu

SEQ ID NO: 430182 - RNA, 19 nt, Homo sapiens
  misc_RNA (1)...(19): siRNA sense strand
gaauacggguccaucaauc

SEQ ID NO: 430183 - RNA, 19 nt, Homo sapiens
  misc_RNA (1)...(19): siRNA sense strand
gcaggagcaucgcauugga

SEQ ID NO: 430184 - RNA, 19 nt, Homo sapiens
  misc_RNA (1)...(19): siRNA sense strand
caucugacaagggaaauua

SEQ ID NO: 430185 - RNA, 19 nt, Homo sapiens
  misc_RNA (1)...(19): siRNA sense strand
gcaccauacuggaccaaca

SEQ ID NO: 430186 - RNA, 19 nt, Homo sapiens
  misc_RNA (1)...(19): siRNA sense strand
gcacuggagccucauuaug

SEQ ID NO: 430187 - RNA, 19 nt, Homo sapiens
  misc_RNA (1)...(19): siRNA sense strand
aaaguguggucccaucuga

SEQ ID NO: 430188 - RNA, 19 nt, Homo sapiens
  misc_RNA (1)...(19): siRNA sense strand
cauuggaggcuacaaggua

SEQ ID NO: 430189 - RNA, 19 nt, Homo sapiens
  misc_RNA (1)...(19): siRNA sense strand
aguugaggauaccacauua

SEQ ID NO: 430190 - RNA, 19 nt, Homo sapiens
  misc_RNA (1)...(19): siRNA sense strand
gaaaguguggucccaucug

SEQ ID NO: 430191 - RNA, 19 nt, Homo sapiens
  misc_RNA (1)...(19): siRNA sense strand
cagcacuggagccucauua

SEQ ID NO: 430192 - RNA, 19 nt, Homo sapiens
  misc_RNA (1)...(19): siRNA sense strand
ggaacccaaugccaaccau

SEQ ID NO: 430193 - RNA, 19 nt, Homo sapiens
  misc_RNA (1)...(19): siRNA sense strand
ugaauacggguccaucaau

SEQ ID NO: 430194 - RNA, 19 nt, Homo sapiens
  misc_RNA (1)...(19): siRNA sense strand
acacguaccaccuggaugu

SEQ ID NO: 430195 - RNA, 19 nt, Homo sapiens
  misc_RNA (1)...(19): siRNA sense strand
ucugacaagggaaauuaua

SEQ ID NO: 430196 - RNA, 19 nt, Homo sapiens
  misc_RNA (1)...(19): siRNA sense strand
cauacuggaccaacacaga

SEQ ID NO: 430197 - RNA, 19 nt, Homo sapiens
  misc_RNA (1)...(19): siRNA sense strand
ccaacacugucaaguuucg

SEQ ID NO: 430198 - RNA, 19 nt, Homo sapiens
  misc_RNA (1)...(19): siRNA sense strand
gaggcuacaagguacgaaa

SEQ ID NO: 430199 - RNA, 19 nt, Homo sapiens
  misc_RNA (1)...(19): siRNA sense strand
cguaccaccuggauguugu

SEQ ID NO: 430200 - RNA, 19 nt, Homo sapiens
  misc_RNA (1)...(19): siRNA sense strand
ucaguuuaguugaggauac

SEQ ID NO: 430201 - RNA, 19 nt, Homo sapiens
  misc_RNA (1)...(19): siRNA sense strand
ggaaaguguggucccaucu

SEQ ID NO: 430202 - RNA, 19 nt, Homo sapiens
  misc_RNA (1)...(19): siRNA sense strand
uaguugaggauaccacauu

SEQ ID NO: 430203 - RNA, 19 nt, Homo sapiens
  misc_RNA (1)...(19): siRNA sense strand
gcuacaagguacgaaacca

SEQ ID NO: 430204 - RNA, 19 nt, Homo sapiens
  misc_RNA (1)...(19): siRNA sense strand
cacuggagccucauuaugg

SEQ ID NO: 430205 - RNA, 19 nt, Homo sapiens
  misc_RNA (1)...(19): siRNA sense strand
cggccaacacugucaaguu

SEQ ID NO: 430206 - RNA, 19 nt, Homo sapiens
  misc_RNA (1)...(19): siRNA sense strand
acuggagccucauuaugga

SEQ ID NO: 430207 - RNA, 19 nt, Homo sapiens
  misc_RNA (1)...(19): siRNA sense strand
uaagcaggagcaucgcauu

SEQ ID NO: 430208 - RNA, 19 nt, Homo sapiens
  misc_RNA (1)...(19): siRNA sense strand
ggagccucauuauggaaag

SEQ ID NO: 430209 - RNA, 19 nt, Homo sapiens
  misc_RNA (1)...(19): siRNA sense strand
ggccaacacugucaaguuu

SEQ ID NO: 430210 - RNA, 19 nt, Homo sapiens
  misc_RNA (1)...(19): siRNA sense strand
gaauacggguccaucaauc

SEQ ID NO: 430211 - RNA, 19 nt, Homo sapiens
  misc_RNA (1)...(19): siRNA sense strand
gcaggagcaucgcauugga

SEQ ID NO: 430212 - RNA, 19 nt, Homo sapiens
  misc_RNA (1)...(19): siRNA sense strand
caucugacaagggaaauua

SEQ ID NO: 430213 - RNA, 19 nt, Homo sapiens
  misc_RNA (1)...(19): siRNA sense strand
gcaccauacuggaccaaca

SEQ ID NO: 430214 - RNA, 19 nt, Homo sapiens
  misc_RNA (1)...(19): siRNA sense strand
gcacuggagccucauuaug

SEQ ID NO: 430215 - RNA, 19 nt, Homo sapiens
  misc_RNA (1)...(19): siRNA sense strand
aaaguguggucccaucuga

SEQ ID NO: 430216 - RNA, 19 nt, Homo sapiens
  misc_RNA (1)...(19): siRNA sense strand
cauuggaggcuacaaggua

SEQ ID NO: 430217 - RNA, 19 nt, Homo sapiens
  misc_RNA (1)...(19): siRNA sense strand
aguugaggauaccacauua

SEQ ID NO: 430218 - RNA, 19 nt, Homo sapiens
  misc_RNA (1)...(19): siRNA sense strand
gaaaguguggucccaucug

SEQ ID NO: 430219 - RNA, 19 nt, Homo sapiens
  misc_RNA (1)...(19): siRNA sense strand
cagcacuggagccucauua

SEQ ID NO: 430220 - RNA, 19 nt, Homo sapiens
  misc_RNA (1)...(19): siRNA sense strand
ggaacccaaugccaaccau

SEQ ID NO: 430221 - RNA, 19 nt, Homo sapiens
  misc_RNA (1)...(19): siRNA sense strand
ugaauacggguccaucaau

SEQ ID NO: 430222 - RNA, 19 nt, Homo sapiens
  misc_RNA (1)...(19): siRNA sense strand
acacguaccaccuggaugu

SEQ ID NO: 430223 - RNA, 19 nt, Homo sapiens
  misc_RNA (1)...(19): siRNA sense strand
ucugacaagggaaauuaua

SEQ ID NO: 430224 - RNA, 19 nt, Homo sapiens
  misc_RNA (1)...(19): siRNA sense strand
cauacuggaccaacacaga

SEQ ID NO: 430225 - RNA, 19 nt, Homo sapiens
  misc_RNA (1)...(19): siRNA sense strand
ccaacacugucaaguuucg

SEQ ID NO: 430226 - RNA, 19 nt, Homo sapiens
  misc_RNA (1)...(19): siRNA sense strand
gaggcuacaagguacgaaa

SEQ ID NO: 430227 - RNA, 19 nt, Homo sapiens
  misc_RNA (1)...(19): siRNA sense strand
cguaccaccuggauguugu

SEQ ID NO: 430228 - RNA, 19 nt, Homo sapiens
  misc_RNA (1)...(19): siRNA sense strand
ucaguuuaguugaggauac

SEQ ID NO: 430229 - RNA, 19 nt, Homo sapiens
  misc_RNA (1)...(19): siRNA sense strand
ggaaaguguggucccaucu

SEQ ID NO: 430230 - RNA, 19 nt, Homo sapiens
  misc_RNA (1)...(19): siRNA sense strand
uaguugaggauaccacauu

SEQ ID NO: 430231 - RNA, 19 nt, Homo sapiens
  misc_RNA (1)...(19): siRNA sense strand
gcuacaagguacgaaacca

SEQ ID NO: 430232 - RNA, 19 nt, Homo sapiens
  misc_RNA (1)...(19): siRNA sense strand
cacuggagccucauuaugg

SEQ ID NO: 430233 - RNA, 19 nt, Homo sapiens
  misc_RNA (1)...(19): siRNA sense strand
cggccaacacugucaaguu

SEQ ID NO: 430234 - RNA, 19 nt, Homo sapiens
  misc_RNA (1)...(19): siRNA sense strand
acuggagccucauuaugga

SEQ ID NO: 430235 - RNA, 19 nt, Homo sapiens
  misc_RNA (1)...(19): siRNA sense strand
uaagcaggagcaucgcauu

SEQ ID NO: 430236 - RNA, 19 nt, Homo sapiens
  misc_RNA (1)...(19): siRNA sense strand
ggagccucauuauggaaag

SEQ ID NO: 430237 - RNA, 19 nt, Homo sapiens
  misc_RNA (1)...(19): siRNA sense strand
ggccaacacugucaaguuu

SEQ ID NO: 430238 - RNA, 19 nt, Homo sapiens
  misc_RNA (1)...(19): siRNA sense strand
gaauacggguccaucaauc

SEQ ID NO: 430239 - RNA, 19 nt, Homo sapiens
  misc_RNA (1)...(19): siRNA sense strand
gcaggagcaucgcauugga

SEQ ID NO: 430240 - RNA, 19 nt, Homo sapiens
  misc_RNA (1)...(19): siRNA sense strand
caucugacaagggaaauua

SEQ ID NO: 430241 - RNA, 19 nt, Homo sapiens
  misc_RNA (1)...(19): siRNA sense strand
gcaccauacuggaccaaca

SEQ ID NO: 430242 - RNA, 19 nt, Homo sapiens
  misc_RNA (1)...(19): siRNA sense strand
gcacuggagccucauuaug

SEQ ID NO: 430243 - RNA, 19 nt, Homo sapiens
  misc_RNA (1)...(19): siRNA sense strand
aaaguguggucccaucuga

SEQ ID NO: 430244 - RNA, 19 nt, Homo sapiens
  misc_RNA (1)...(19): siRNA sense strand
cauuggaggcuacaaggua

SEQ ID NO: 430245 - RNA, 19 nt, Homo sapiens
  misc_RNA (1)...(19): siRNA sense strand
aguugaggauaccacauua

SEQ ID NO: 430246 - RNA, 19 nt, Homo sapiens
  misc_RNA (1)...(19): siRNA sense strand
gaaaguguggucccaucug

SEQ ID NO: 430247 - RNA, 19 nt, Homo sapiens
  misc_RNA (1)...(19): siRNA sense strand
cagcacuggagccucauua

SEQ ID NO: 430248 - RNA, 19 nt, Homo sapiens
  misc_RNA (1)...(19): siRNA sense strand
ggaacccaaugccaaccau

SEQ ID NO: 430249 - RNA, 19 nt, Homo sapiens
  misc_RNA (1)...(19): siRNA sense strand
ugaauacggguccaucaau

SEQ ID NO: 430250 - RNA, 19 nt, Homo sapiens
  misc_RNA (1)...(19): siRNA sense strand
acacguaccaccuggaugu

SEQ ID NO: 430251 - RNA, 19 nt, Homo sapiens
  misc_RNA (1)...(19): siRNA sense strand
ucugacaagggaaauuaua

SEQ ID NO: 430252 - RNA, 19 nt, Homo sapiens
  misc_RNA (1)...(19): siRNA sense strand
cauacuggaccaacacaga

SEQ ID NO: 430253 - RNA, 19 nt, Homo sapiens
  misc_RNA (1)...(19): siRNA sense strand
ccaacacugucaaguuucg

SEQ ID NO: 430254 - RNA, 19 nt, Homo sapiens
  misc_RNA (1)...(19): siRNA sense strand
gaggcuacaagguacgaaa

SEQ ID NO: 430255 - RNA, 19 nt, Homo sapiens
  misc_RNA (1)...(19): siRNA sense strand
cguaccaccuggauguugu

SEQ ID NO: 430256 - RNA, 19 nt, Homo sapiens
  misc_RNA (1)...(19): siRNA sense strand
ucaguuuaguugaggauac

SEQ ID NO: 430257 - RNA, 19 nt, Homo sapiens
  misc_RNA (1)...(19): siRNA sense strand
ggaaaguguggucccaucu

SEQ ID NO: 430258 - RNA, 19 nt, Homo sapiens
  misc_RNA (1)...(19): siRNA sense strand
uaguugaggauaccacauu

SEQ ID NO: 430259 - RNA, 19 nt, Homo sapiens
  misc_RNA (1)...(19): siRNA sense strand
gcuacaagguacgaaacca

SEQ ID NO: 430260 - RNA, 19 nt, Homo sapiens
  misc_RNA (1)...(19): siRNA sense strand
cacuggagccucauuaugg

SEQ ID NO: 430261 - RNA, 19 nt, Homo sapiens
  misc_RNA (1)...(19): siRNA sense strand
cggccaacacugucaaguu

SEQ ID NO: 430262 - RNA, 19 nt, Homo sapiens
  misc_RNA (1)...(19): siRNA sense strand
acuggagccucauuaugga

SEQ ID NO: 430263 - RNA, 19 nt, Homo sapiens
  misc_RNA (1)...(19): siRNA sense strand
uaagcaggagcaucgcauu

SEQ ID NO: 430264 - RNA, 19 nt, Homo sapiens
  misc_RNA (1)...(19): siRNA sense strand
ggagccucauuauggaaag

SEQ ID NO: 430265 - RNA, 19 nt, Homo sapiens
  misc_RNA (1)...(19): siRNA sense strand
ggccaacacugucaaguuu

SEQ ID NO: 430266 - RNA, 19 nt, Homo sapiens
  misc_RNA (1)...(19): siRNA sense strand
gaauacggguccaucaauc

SEQ ID NO: 430267 - RNA, 19 nt, Homo sapiens
  misc_RNA (1)...(19): siRNA sense strand
gcaggagcaucgcauugga

SEQ ID NO: 430268 - RNA, 19 nt, Homo sapiens
  misc_RNA (1)...(19): siRNA sense strand
caucugacaagggaaauua

SEQ ID NO: 430269 - RNA, 19 nt, Homo sapiens
  misc_RNA (1)...(19): siRNA sense strand
gcaccauacuggaccaaca

SEQ ID NO: 430270 - RNA, 19 nt, Homo sapiens
  misc_RNA (1)...(19): siRNA sense strand
gcacuggagccucauuaug

SEQ ID NO: 430271 - RNA, 19 nt, Homo sapiens
  misc_RNA (1)...(19): siRNA sense strand
aaaguguggucccaucuga

SEQ ID NO: 430272 - RNA, 19 nt, Homo sapiens
  misc_RNA (1)...(19): siRNA sense strand
cauuggaggcuacaaggua

SEQ ID NO: 430273 - RNA, 19 nt, Homo sapiens
  misc_RNA (1)...(19): siRNA sense strand
aguugaggauaccacauua

SEQ ID NO: 430274 - RNA, 19 nt, Homo sapiens
  misc_RNA (1)...(19): siRNA sense strand
gaaaguguggucccaucug

SEQ ID NO: 430275 - RNA, 19 nt, Homo sapiens
  misc_RNA (1)...(19): siRNA sense strand
cagcacuggagccucauua

SEQ ID NO: 430276 - RNA, 19 nt, Homo sapiens
  misc_RNA (1)...(19): siRNA sense strand
ggaacccaaugccaaccau

SEQ ID NO: 430277 - RNA, 19 nt, Homo sapiens
  misc_RNA (1)...(19): siRNA sense strand
ugaauacggguccaucaau

SEQ ID NO: 430278 - RNA, 19 nt, Homo sapiens
  misc_RNA (1)...(19): siRNA sense strand
acacguaccaccuggaugu

SEQ ID NO: 430279 - RNA, 19 nt, Homo sapiens
  misc_RNA (1)...(19): siRNA sense strand
ucugacaagggaaauuaua

SEQ ID NO: 430280 - RNA, 19 nt, Homo sapiens
  misc_RNA (1)...(19): siRNA sense strand
cauacuggaccaacacaga

SEQ ID NO: 430281 - RNA, 19 nt, Homo sapiens
  misc_RNA (1)...(19): siRNA sense strand
ccaacacugucaaguuucg

SEQ ID NO: 430282 - RNA, 19 nt, Homo sapiens
  misc_RNA (1)...(19): siRNA sense strand
gaggcuacaagguacgaaa

SEQ ID NO: 430283 - RNA, 19 nt, Homo sapiens
  misc_RNA (1)...(19): siRNA sense strand
cguaccaccuggauguugu

SEQ ID NO: 430284 - RNA, 19 nt, Homo sapiens
  misc_RNA (1)...(19): siRNA sense strand
ucaguuuaguugaggauac

SEQ ID NO: 430285 - RNA, 19 nt, Homo sapiens
  misc_RNA (1)...(19): siRNA sense strand
ggaaaguguggucccaucu

SEQ ID NO: 430286 - RNA, 19 nt, Homo sapiens
  misc_RNA (1)...(19): siRNA sense strand
uaguugaggauaccacauu

SEQ ID NO: 430287 - RNA, 19 nt, Homo sapiens
  misc_RNA (1)...(19): siRNA sense strand
gcuacaagguacgaaacca

SEQ ID NO: 430288 - RNA, 19 nt, Homo sapiens
  misc_RNA (1)...(19): siRNA sense strand
cacuggagccucauuaugg

SEQ ID NO: 430289 - RNA, 19 nt, Homo sapiens
  misc_RNA (1)...(19): siRNA sense strand
cggccaacacugucaaguu

SEQ ID NO: 430290 - RNA, 19 nt, Homo sapiens
  misc_RNA (1)...(19): siRNA sense strand
acuggagccucauuaugga

SEQ ID NO: 430291 - RNA, 19 nt, Homo sapiens
  misc_RNA (1)...(19): siRNA sense strand
uaagcaggagcaucgcauu

SEQ ID NO: 430292 - RNA, 19 nt, Homo sapiens
  misc_RNA (1)...(19): siRNA sense strand
ggagccucauuauggaaag

SEQ ID NO: 430293 - RNA, 19 nt, Homo sapiens
  misc_RNA (1)...(19): siRNA sense strand
ggccaacacugucaaguuu

SEQ ID NO: 430294 - RNA, 19 nt, Homo sapiens
  misc_RNA (1)...(19): siRNA sense strand
gaauacggguccaucaauc

SEQ ID NO: 430295 - RNA, 19 nt, Homo sapiens
  misc_RNA (1)...(19): siRNA sense strand
gcaggagcaucgcauugga

SEQ ID NO: 430296 - RNA, 19 nt, Homo sapiens
  misc_RNA (1)...(19): siRNA sense strand
caucugacaagggaaauua

SEQ ID NO: 430297 - RNA, 19 nt, Homo sapiens
  misc_RNA (1)...(19): siRNA sense strand
gcaccauacuggaccaaca

SEQ ID NO: 430298 - RNA, 19 nt, Homo sapiens
  misc_RNA (1)...(19): siRNA sense strand
gcacuggagccucauuaug

SEQ ID NO: 430299 - RNA, 19 nt, Homo sapiens
  misc_RNA (1)...(19): siRNA sense strand
aaaguguggucccaucuga

SEQ ID NO: 430300 - RNA, 19 nt, Homo sapiens
  misc_RNA (1)...(19): siRNA sense strand
cauuggaggcuacaaggua

SEQ ID NO: 430301 - RNA, 19 nt, Homo sapiens
  misc_RNA (1)...(19): siRNA sense strand
aguugaggauaccacauua

SEQ ID NO: 430302 - RNA, 19 nt, Homo sapiens
  misc_RNA (1)...(19): siRNA sense strand
gaaaguguggucccaucug

SEQ ID NO: 430303 - RNA, 19 nt, Homo sapiens
  misc_RNA (1)...(19): siRNA sense strand
cagcacuggagccucauua

SEQ ID NO: 430304 - RNA, 19 nt, Homo sapiens
  misc_RNA (1)...(19): siRNA sense strand
ggaacccaaugccaaccau

SEQ ID NO: 430305 - RNA, 19 nt, Homo sapiens
  misc_RNA (1)...(19): siRNA sense strand
ugaauacggguccaucaau

SEQ ID NO: 430306 - RNA, 19 nt, Homo sapiens
  misc_RNA (1)...(19): siRNA sense strand
acacguaccaccuggaugu

SEQ ID NO: 430307 - RNA, 19 nt, Homo sapiens
  misc_RNA (1)...(19): siRNA sense strand
ucugacaagggaaauuaua

SEQ ID NO: 430308 - RNA, 19 nt, Homo sapiens
  misc_RNA (1)...(19): siRNA sense strand
cauacuggaccaacacaga

SEQ ID NO: 430309 - RNA, 19 nt, Homo sapiens
  misc_RNA (1)...(19): siRNA sense strand
ccaacacugucaaguuucg

SEQ ID NO: 430310 - RNA, 19 nt, Homo sapiens
  misc_RNA (1)...(19): siRNA sense strand
gaggcuacaagguacgaaa

SEQ ID NO: 430311 - RNA, 19 nt, Homo sapiens
  misc_RNA (1)...(19): siRNA sense strand
cguaccaccuggauguugu

SEQ ID NO: 430312 - RNA, 19 nt, Homo sapiens
  misc_RNA (1)...(19): siRNA sense strand
ucaguuuaguugaggauac

SEQ ID NO: 430313 - RNA, 19 nt, Homo sapiens
  misc_RNA (1)...(19): siRNA sense strand
ggaaaguguggucccaucu

SEQ ID NO: 430314 - RNA, 19 nt, Homo sapiens
  misc_RNA (1)...(19): siRNA sense strand
uaguugaggauaccacauu

SEQ ID NO: 430315 - RNA, 19 nt, Homo sapiens
  misc_RNA (1)...(19): siRNA sense strand
gcuacaagguacgaaacca

SEQ ID NO: 430316 - RNA, 19 nt, Homo sapiens
  misc_RNA (1)...(19): siRNA sense strand
cacuggagccucauuaugg

SEQ ID NO: 430317 - RNA, 19 nt, Homo sapiens
  misc_RNA (1)...(19): siRNA sense strand
cggccaacacugucaaguu

SEQ ID NO: 430318 - RNA, 19 nt, Homo sapiens
  misc_RNA (1)...(19): siRNA sense strand
acuggagccucauuaugga

SEQ ID NO: 430319 - RNA, 19 nt, Homo sapiens
  misc_RNA (1)...(19): siRNA sense strand
uaagcaggagcaucgcauu

SEQ ID NO: 430320 - RNA, 19 nt, Homo sapiens
  misc_RNA (1)...(19): siRNA sense strand
ggagccucauuauggaaag

SEQ ID NO: 430321 - RNA, 19 nt, Homo sapiens
  misc_RNA (1)...(19): siRNA sense strand
ggccaacacugucaaguuu

SEQ ID NO: 430322 - RNA, 19 nt, Homo sapiens
  misc_RNA (1)...(19): siRNA sense strand
gaauacggguccaucaauc

SEQ ID NO: 430323 - RNA, 19 nt, Homo sapiens
  misc_RNA (1)...(19): siRNA sense strand
gcaggagcaucgcauugga

SEQ ID NO: 430324 - RNA, 19 nt, Homo sapiens
  misc_RNA (1)...(19): siRNA sense strand
caucugacaagggaaauua

SEQ ID NO: 430325 - RNA, 19 nt, Homo sapiens
  misc_RNA (1)...(19): siRNA sense strand
gcaccauacuggaccaaca

SEQ ID NO: 430326 - RNA, 19 nt, Homo sapiens
  misc_RNA (1)...(19): siRNA sense strand
gcacuggagccucauuaug

SEQ ID NO: 430327 - RNA, 19 nt, Homo sapiens
  misc_RNA (1)...(19): siRNA sense strand
aaaguguggucccaucuga

SEQ ID NO: 430328 - RNA, 19 nt, Homo sapiens
  misc_RNA (1)...(19): siRNA sense strand
cauuggaggcuacaaggua

SEQ ID NO: 430329 - RNA, 19 nt, Homo sapiens
  misc_RNA (1)...(19): siRNA sense strand
aguugaggauaccacauua

SEQ ID NO: 430330 - RNA, 19 nt, Homo sapiens
  misc_RNA (1)...(19): siRNA sense strand
gaaaguguggucccaucug

SEQ ID NO: 430331 - RNA, 19 nt, Homo sapiens
  misc_RNA (1)...(19): siRNA sense strand
cagcacuggagccucauua

SEQ ID NO: 430332 - RNA, 19 nt, Homo sapiens
  misc_RNA (1)...(19): siRNA sense strand
ggaacccaaugccaaccau

SEQ ID NO: 430333 - RNA, 19 nt, Homo sapiens
  misc_RNA (1)...(19): siRNA sense strand
ugaauacggguccaucaau

SEQ ID NO: 430334 - RNA, 19 nt, Homo sapiens
  misc_RNA (1)...(19): siRNA sense strand
acacguaccaccuggaugu

SEQ ID NO: 430335 - RNA, 19 nt, Homo sapiens
  misc_RNA (1)...(19): siRNA sense strand
ucugacaagggaaauuaua

SEQ ID NO: 430336 - RNA, 19 nt, Homo sapiens
  misc_RNA (1)...(19): siRNA sense strand
cauacuggaccaacacaga

SEQ ID NO: 430337 - RNA, 19 nt, Homo sapiens
  misc_RNA (1)...(19): siRNA sense strand
ccaacacugucaaguuucg

SEQ ID NO: 430338 - RNA, 19 nt, Homo sapiens
  misc_RNA (1)...(19): siRNA sense strand
gaggcuacaagguacgaaa

SEQ ID NO: 430339 - RNA, 19 nt, Homo sapiens
  misc_RNA (1)...(19): siRNA sense strand
cguaccaccuggauguugu

SEQ ID NO: 430340 - RNA, 19 nt, Homo sapiens
  misc_RNA (1)...(19): siRNA sense strand
ucaguuuaguugaggauac

SEQ ID NO: 430341 - RNA, 19 nt, Homo sapiens
  misc_RNA (1)...(19): siRNA sense strand
ggaaaguguggucccaucu

SEQ ID NO: 430342 - RNA, 19 nt, Homo sapiens
  misc_RNA (1)...(19): siRNA sense strand
uaguugaggauaccacauu

SEQ ID NO: 430343 - RNA, 19 nt, Homo sapiens
  misc_RNA (1)...(19): siRNA sense strand
gcuacaagguacgaaacca

SEQ ID NO: 430344 - RNA, 19 nt, Homo sapiens
  misc_RNA (1)...(19): siRNA sense strand
cacuggagccucauuaugg

SEQ ID NO: 430345 - RNA, 19 nt, Homo sapiens
  misc_RNA (1)...(19): siRNA sense strand
cggccaacacugucaaguu

SEQ ID NO: 430346 - RNA, 19 nt, Homo sapiens
  misc_RNA (1)...(19): siRNA sense strand
acuggagccucauuaugga

SEQ ID NO: 430347 - RNA, 19 nt, Homo sapiens
  misc_RNA (1)...(19): siRNA sense strand
uaagcaggagcaucgcauu

SEQ ID NO: 430348 - RNA, 19 nt, Homo sapiens
  misc_RNA (1)...(19): siRNA sense strand
ggagccucauuauggaaag

SEQ ID NO: 430349 - RNA, 19 nt, Homo sapiens
  misc_RNA (1)...(19): siRNA sense strand
ggccaacacugucaaguuu

SEQ ID NO: 430350 - RNA, 19 nt, Homo sapiens
  misc_RNA (1)...(19): siRNA sense strand
gaauacggguccaucaauc

SEQ ID NO: 430351 - RNA, 19 nt, Homo sapiens
  misc_RNA (1)...(19): siRNA sense strand
gcaggagcaucgcauugga

SEQ ID NO: 430352 - RNA, 19 nt, Homo sapiens
  misc_RNA (1)...(19): siRNA sense strand
caucugacaagggaaauua

SEQ ID NO: 430353 - RNA, 19 nt, Homo sapiens
  misc_RNA (1)...(19): siRNA sense strand
gcaccauacuggaccaaca

SEQ ID NO: 430354 - RNA, 19 nt, Homo sapiens
  misc_RNA (1)...(19): siRNA sense strand
gcacuggagccucauuaug

SEQ ID NO: 430355 - RNA, 19 nt, Homo sapiens
  misc_RNA (1)...(19): siRNA sense strand
aaaguguggucccaucuga

SEQ ID NO: 430356 - RNA, 19 nt, Homo sapiens
  misc_RNA (1)...(19): siRNA sense strand
cauuggaggcuacaaggua

SEQ ID NO: 430357 - RNA, 19 nt, Homo sapiens
  misc_RNA (1)...(19): siRNA sense strand
aguugaggauaccacauua

SEQ ID NO: 430358 - RNA, 19 nt, Homo sapiens
  misc_RNA (1)...(19): siRNA sense strand
gaaaguguggucccaucug

SEQ ID NO: 430359 - RNA, 19 nt, Homo sapiens
  misc_RNA (1)...(19): siRNA sense strand
cagcacuggagccucauua

SEQ ID NO: 430360 - RNA, 19 nt, Homo sapiens
  misc_RNA (1)...(19): siRNA sense strand
ggaacccaaugccaaccau

SEQ ID NO: 430361 - RNA, 19 nt, Homo sapiens
  misc_RNA (1)...(19): siRNA sense strand
ugaauacggguccaucaau

SEQ ID NO: 430362 - RNA, 19 nt, Homo sapiens
  misc_RNA (1)...(19): siRNA sense strand
acacguaccaccuggaugu

SEQ ID NO: 430363 - RNA, 19 nt, Homo sapiens
  misc_RNA (1)...(19): siRNA sense strand
ucugacaagggaaauuaua

SEQ ID NO: 430364 - RNA, 19 nt, Homo sapiens
  misc_RNA (1)...(19): siRNA sense strand
cauacuggaccaacacaga

SEQ ID NO: 430365 - RNA, 19 nt, Homo sapiens
  misc_RNA (1)...(19): siRNA sense strand
ccaacacugucaaguuucg

SEQ ID NO: 430366 - RNA, 19 nt, Homo sapiens
  misc_RNA (1)...(19): siRNA sense strand
gaggcuacaagguacgaaa

SEQ ID NO: 430367 - RNA, 19 nt, Homo sapiens
  misc_RNA (1)...(19): siRNA sense strand
cguaccaccuggauguugu

SEQ ID NO: 430368 - RNA, 19 nt, Homo sapiens
  misc_RNA (1)...(19): siRNA sense strand
ucaguuuaguugaggauac

SEQ ID NO: 430369 - RNA, 19 nt, Homo sapiens
  misc_RNA (1)...(19): siRNA sense strand
ggaaaguguggucccaucu

SEQ ID NO: 430370 - RNA, 19 nt, Homo sapiens
  misc_RNA (1)...(19): siRNA sense strand
uaguugaggauaccacauu

SEQ ID NO: 430371 - RNA, 19 nt, Homo sapiens
  misc_RNA (1)...(19): siRNA sense strand
gcuacaagguacgaaacca

SEQ ID NO: 430372 - RNA, 19 nt, Homo sapiens
  misc_RNA (1)...(19): siRNA sense strand
cacuggagccucauuaugg

SEQ ID NO: 430373 - RNA, 19 nt, Homo sapiens
  misc_RNA (1)...(19): siRNA sense strand
cggccaacacugucaaguu

SEQ ID NO: 430374 - RNA, 19 nt, Homo sapiens
  misc_RNA (1)...(19): siRNA sense strand
acuggagccucauuaugga

SEQ ID NO: 430375 - RNA, 19 nt, Homo sapiens
  misc_RNA (1)...(19): siRNA sense strand
uaagcaggagcaucgcauu

SEQ ID NO: 430376 - RNA, 19 nt, Homo sapiens
  misc_RNA (1)...(19): siRNA sense strand
ggagccucauuauggaaag

SEQ ID NO: 430377 - RNA, 19 nt, Homo sapiens
  misc_RNA (1)...(19): siRNA sense strand
ggccaacacugucaaguuu

SEQ ID NO: 430378 - RNA, 19 nt, Homo sapiens
  misc_RNA (1)...(19): siRNA sense strand
gaauacggguccaucaauc

SEQ ID NO: 430379 - RNA, 19 nt, Homo sapiens
  misc_RNA (1)...(19): siRNA sense strand
gcaggagcaucgcauugga

SEQ ID NO: 430380 - RNA, 19 nt, Homo sapiens
  misc_RNA (1)...(19): siRNA sense strand
caucugacaagggaaauua

SEQ ID NO: 430381 - RNA, 19 nt, Homo sapiens
  misc_RNA (1)...(19): siRNA sense strand
gcaccauacuggaccaaca

SEQ ID NO: 430382 - RNA, 19 nt, Homo sapiens
  misc_RNA (1)...(19): siRNA sense strand
gcacuggagccucauuaug

SEQ ID NO: 430383 - RNA, 19 nt, Homo sapiens
  misc_RNA (1)...(19): siRNA sense strand
aaaguguggucccaucuga

SEQ ID NO: 430384 - RNA, 19 nt, Homo sapiens
  misc_RNA (1)...(19): siRNA sense strand
cauuggaggcuacaaggua

SEQ ID NO: 430385 - RNA, 19 nt, Homo sapiens
  misc_RNA (1)...(19): siRNA sense strand
aguugaggauaccacauua

SEQ ID NO: 430386 - RNA, 19 nt, Homo sapiens
  misc_RNA (1)...(19): siRNA sense strand
gaaaguguggucccaucug

SEQ ID NO: 430387 - RNA, 19 nt, Homo sapiens
  misc_RNA (1)...(19): siRNA sense strand
cagcacuggagccucauua

SEQ ID NO: 430388 - RNA, 19 nt, Homo sapiens
  misc_RNA (1)...(19): siRNA sense strand
ggaacccaaugccaaccau

SEQ ID NO: 430389 - RNA, 19 nt, Homo sapiens
  misc_RNA (1)...(19): siRNA sense strand
ugaauacggguccaucaau

SEQ ID NO: 430390 - RNA, 19 nt, Homo sapiens
  misc_RNA (1)...(19): siRNA sense strand
acacguaccaccuggaugu

SEQ ID NO: 430391 - RNA, 19 nt, Homo sapiens
  misc_RNA (1)...(19): siRNA sense strand
ucugacaagggaaauuaua

SEQ ID NO: 430392 - RNA, 19 nt, Homo sapiens
  misc_RNA (1)...(19): siRNA sense strand
cauacuggaccaacacaga

SEQ ID NO: 430393 - RNA, 19 nt, Homo sapiens
  misc_RNA (1)...(19): siRNA sense strand
ccaacacugucaaguuucg

SEQ ID NO: 430394 - RNA, 19 nt, Homo sapiens
  misc_RNA (1)...(19): siRNA sense strand
gaggcuacaagguacgaaa

SEQ ID NO: 430395 - RNA, 19 nt, Homo sapiens
  misc_RNA (1)...(19): siRNA sense strand
cguaccaccuggauguugu

SEQ ID NO: 430396 - RNA, 19 nt, Homo sapiens
  misc_RNA (1)...(19): siRNA sense strand
ucaguuuaguugaggauac

SEQ ID NO: 430397 - RNA, 19 nt, Homo sapiens
  misc_RNA (1)...(19): siRNA sense strand
ggaaaguguggucccaucu

SEQ ID NO: 430398 - RNA, 19 nt, Homo sapiens
  misc_RNA (1)...(19): siRNA sense strand
uaguugaggauaccacauu

SEQ ID NO: 430399 - RNA, 19 nt, Homo sapiens
  misc_RNA (1)...(19): siRNA sense strand
gcuacaagguacgaaacca

SEQ ID NO: 430400 - RNA, 19 nt, Homo sapiens
  misc_RNA (1)...(19): siRNA sense strand
cacuggagccucauuaugg

SEQ ID NO: 430401 - RNA, 19 nt, Homo sapiens
  misc_RNA (1)...(19): siRNA sense strand
cggccaacacugucaaguu

SEQ ID NO: 430402 - RNA, 19 nt, Homo sapiens
  misc_RNA (1)...(19): siRNA sense strand
acuggagccucauuaugga

SEQ ID NO: 430403 - RNA, 19 nt, Homo sapiens
  misc_RNA (1)...(19): siRNA sense strand
uaagcaggagcaucgcauu

SEQ ID NO: 430404 - RNA, 19 nt, Homo sapiens
  misc_RNA (1)...(19): siRNA sense strand
ggagccucauuauggaaag

SEQ ID NO: 430405 - RNA, 19 nt, Homo sapiens
  misc_RNA (1)...(19): siRNA sense strand
ggccaacacugucaaguuu

SEQ ID NO: 430406 - RNA, 19 nt, Homo sapiens
  misc_RNA (1)...(19): siRNA sense strand
gaauacggguccaucaauc

SEQ ID NO: 430407 - RNA, 19 nt, Homo sapiens
  misc_RNA (1)...(19): siRNA sense strand
gcaggagcaucgcauugga

SEQ ID NO: 430408 - RNA, 19 nt, Homo sapiens
  misc_RNA (1)...(19): siRNA sense strand
caucugacaagggaaauua

SEQ ID NO: 430409 - RNA, 19 nt, Homo sapiens
  misc_RNA (1)...(19): siRNA sense strand
gcaccauacuggaccaaca

SEQ ID NO: 430410 - RNA, 19 nt, Homo sapiens
  misc_RNA (1)...(19): siRNA sense strand
gcacuggagccucauuaug

SEQ ID NO: 430411 - RNA, 19 nt, Homo sapiens
  misc_RNA (1)...(19): siRNA sense strand
aaaguguggucccaucuga

SEQ ID NO: 430412 - RNA, 19 nt, Homo sapiens
  misc_RNA (1)...(19): siRNA sense strand
cauuggaggcuacaaggua

SEQ ID NO: 430413 - RNA, 19 nt, Homo sapiens
  misc_RNA (1)...(19): siRNA sense strand
aguugaggauaccacauua

SEQ ID NO: 430414 - RNA, 19 nt, Homo sapiens
  misc_RNA (1)...(19): siRNA sense strand
gaaaguguggucccaucug

SEQ ID NO: 430415 - RNA, 19 nt, Homo sapiens
  misc_RNA (1)...(19): siRNA sense strand
cagcacuggagccucauua

SEQ ID NO: 430416 - RNA, 19 nt, Homo sapiens
  misc_RNA (1)...(19): siRNA sense strand
ggaacccaaugccaaccau

SEQ ID NO: 430417 - RNA, 19 nt, Homo sapiens
  misc_RNA (1)...(19): siRNA sense strand
ugaauacggguccaucaau

SEQ ID NO: 430418 - RNA, 19 nt, Homo sapiens
  misc_RNA (1)...(19): siRNA sense strand
acacguaccaccuggaugu

SEQ ID NO: 430419 - RNA, 19 nt, Homo sapiens
  misc_RNA (1)...(19): siRNA sense strand
ucugacaagggaaauuaua

SEQ ID NO: 430420 - RNA, 19 nt, Homo sapiens
  misc_RNA (1)...(19): siRNA sense strand
cauacuggaccaacacaga

SEQ ID NO: 430421 - RNA, 19 nt, Homo sapiens
  misc_RNA (1)...(19): siRNA sense strand
ccaacacugucaaguuucg

SEQ ID NO: 430422 - RNA, 19 nt, Homo sapiens
  misc_RNA (1)...(19): siRNA sense strand
gaggcuacaagguacgaaa

SEQ ID NO: 430423 - RNA, 19 nt, Homo sapiens
  misc_RNA (1)...(19): siRNA sense strand
cguaccaccuggauguugu

SEQ ID NO: 430424 - RNA, 19 nt, Homo sapiens
  misc_RNA (1)...(19): siRNA sense strand
ucaguuuaguugaggauac

SEQ ID NO: 430425 - RNA, 19 nt, Homo sapiens
  misc_RNA (1)...(19): siRNA sense strand
ggaaaguguggucccaucu

SEQ ID NO: 430426 - RNA, 19 nt, Homo sapiens
  misc_RNA (1)...(19): siRNA sense strand
uaguugaggauaccacauu

SEQ ID NO: 430427 - RNA, 19 nt, Homo sapiens
  misc_RNA (1)...(19): siRNA sense strand
gcuacaagguacgaaacca

SEQ ID NO: 430428 - RNA, 19 nt, Homo sapiens
  misc_RNA (1)...(19): siRNA sense strand
cacuggagccucauuaugg

SEQ ID NO: 430429 - RNA, 19 nt, Homo sapiens
  misc_RNA (1)...(19): siRNA sense strand
cggccaacacugucaaguu

SEQ ID NO: 430430 - RNA, 19 nt, Homo sapiens
  misc_RNA (1)...(19): siRNA sense strand
acuggagccucauuaugga

SEQ ID NO: 430431 - RNA, 19 nt, Homo sapiens
  misc_RNA (1)...(19): siRNA sense strand
uaagcaggagcaucgcauu

SEQ ID NO: 430432 - RNA, 19 nt, Homo sapiens
  misc_RNA (1)...(19): siRNA sense strand
ggagccucauuauggaaag

SEQ ID NO: 430433 - RNA, 19 nt, Homo sapiens
  misc_RNA (1)...(19): siRNA sense strand
ggccaacacugucaaguuu

SEQ ID NO: 430434 - RNA, 19 nt, Homo sapiens
  misc_RNA (1)...(19): siRNA sense strand
gaauacggguccaucaauc

SEQ ID NO: 430435 - RNA, 19 nt, Homo sapiens
  misc_RNA (1)...(19): siRNA sense strand
gcaggagcaucgcauugga

SEQ ID NO: 430436 - RNA, 19 nt, Homo sapiens
  misc_RNA (1)...(19): siRNA sense strand
caucugacaagggaaauua

SEQ ID NO: 430437 - RNA, 19 nt, Homo sapiens
  misc_RNA (1)...(19): siRNA sense strand
gcaccauacuggaccaaca

SEQ ID NO: 430438 - RNA, 19 nt, Homo sapiens
  misc_RNA (1)...(19): siRNA sense strand
gcacuggagccucauuaug

SEQ ID NO: 430439 - RNA, 19 nt, Homo sapiens
  misc_RNA (1)...(19): siRNA sense strand
aaaguguggucccaucuga

SEQ ID NO: 430440 - RNA, 19 nt, Homo sapiens
  misc_RNA (1)...(19): siRNA sense strand
cauuggaggcuacaaggua

SEQ ID NO: 430441 - RNA, 19 nt, Homo sapiens
  misc_RNA (1)...(19): siRNA sense strand
aguugaggauaccacauua

SEQ ID NO: 430442 - RNA, 19 nt, Homo sapiens
  misc_RNA (1)...(19): siRNA sense strand
gaaaguguggucccaucug

SEQ ID NO: 430443 - RNA, 19 nt, Homo sapiens
  misc_RNA (1)...(19): siRNA sense strand
cagcacuggagccucauua

SEQ ID NO: 430444 - RNA, 19 nt, Homo sapiens
  misc_RNA (1)...(19): siRNA sense strand
ggaacccaaugccaaccau

SEQ ID NO: 430445 - RNA, 19 nt, Homo sapiens
  misc_RNA (1)...(19): siRNA sense strand
ugaauacggguccaucaau

SEQ ID NO: 430446 - RNA, 19 nt, Homo sapiens
  misc_RNA (1)...(19): siRNA sense strand
acacguaccaccuggaugu

SEQ ID NO: 430447 - RNA, 19 nt, Homo sapiens
  misc_RNA (1)...(19): siRNA sense strand
ucugacaagggaaauuaua

SEQ ID NO: 430448 - RNA, 19 nt, Homo sapiens
  misc_RNA (1)...(19): siRNA sense strand
cauacuggaccaacacaga

SEQ ID NO: 430449 - RNA, 19 nt, Homo sapiens
  misc_RNA (1)...(19): siRNA sense strand
ccaacacugucaaguuucg

SEQ ID NO: 430450 - RNA, 19 nt, Homo sapiens
  misc_RNA (1)...(19): siRNA sense strand
gaggcuacaagguacgaaa

SEQ ID NO: 430451 - RNA, 19 nt, Homo sapiens
  misc_RNA (1)...(19): siRNA sense strand
cguaccaccuggauguugu

SEQ ID NO: 430452 - RNA, 19 nt, Homo sapiens
  misc_RNA (1)...(19): siRNA sense strand
ucaguuuaguugaggauac

SEQ ID NO: 430453 - RNA, 19 nt, Homo sapiens
  misc_RNA (1)...(19): siRNA sense strand
ggaaaguguggucccaucu

SEQ ID NO: 430454 - RNA, 19 nt, Homo sapiens
  misc_RNA (1)...(19): siRNA sense strand
uaguugaggauaccacauu

SEQ ID NO: 430455 - RNA, 19 nt, Homo sapiens
  misc_RNA (1)...(19): siRNA sense strand
gcuacaagguacgaaacca

SEQ ID NO: 430456 - RNA, 19 nt, Homo sapiens
  misc_RNA (1)...(19): siRNA sense strand
cacuggagccucauuaugg

SEQ ID NO: 430457 - RNA, 19 nt, Homo sapiens
  misc_RNA (1)...(19): siRNA sense strand
cggccaacacugucaaguu

SEQ ID NO: 430458 - RNA, 19 nt, Homo sapiens
  misc_RNA (1)...(19): siRNA sense strand
acuggagccucauuaugga

SEQ ID NO: 430459 - RNA, 19 nt, Homo sapiens
  misc_RNA (1)...(19): siRNA sense strand
uaagcaggagcaucgcauu

SEQ ID NO: 430460 - RNA, 19 nt, Homo sapiens
  misc_RNA (1)...(19): siRNA sense strand
ggagccucauuauggaaag

SEQ ID NO: 430461 - RNA, 19 nt, Homo sapiens
  misc_RNA (1)...(19): siRNA sense strand
ggccaacacugucaaguuu

SEQ ID NO: 430462 - RNA, 19 nt, Homo sapiens
  misc_RNA (1)...(19): siRNA sense strand
gaauacggguccaucaauc

SEQ ID NO: 430463 - RNA, 19 nt, Homo sapiens
  misc_RNA (1)...(19): siRNA sense strand
gcaggagcaucgcauugga

SEQ ID NO: 430464 - RNA, 19 nt, Homo sapiens
  misc_RNA (1)...(19): siRNA sense strand
caucugacaagggaaauua

SEQ ID NO: 430465 - RNA, 19 nt, Homo sapiens
  misc_RNA (1)...(19): siRNA sense strand
gcaccauacuggaccaaca

SEQ ID NO: 430466 - RNA, 19 nt, Homo sapiens
  misc_RNA (1)...(19): siRNA sense strand
gcacuggagccucauuaug

SEQ ID NO: 430467 - RNA, 19 nt, Homo sapiens
  misc_RNA (1)...(19): siRNA sense strand
aaaguguggucccaucuga

SEQ ID NO: 430468 - RNA, 19 nt, Homo sapiens
  misc_RNA (1)...(19): siRNA sense strand
cauuggaggcuacaaggua

SEQ ID NO: 430469 - RNA, 19 nt, Homo sapiens
  misc_RNA (1)...(19): siRNA sense strand
aguugaggauaccacauua

SEQ ID NO: 430470 - RNA, 19 nt, Homo sapiens
  misc_RNA (1)...(19): siRNA sense strand
gaaaguguggucccaucug

SEQ ID NO: 430471 - RNA, 19 nt, Homo sapiens
  misc_RNA (1)...(19): siRNA sense strand
cagcacuggagccucauua

SEQ ID NO: 430472 - RNA, 19 nt, Homo sapiens
  misc_RNA (1)...(19): siRNA sense strand
ggaacccaaugccaaccau

SEQ ID NO: 430473 - RNA, 19 nt, Homo sapiens
  misc_RNA (1)...(19): siRNA sense strand
ugaauacggguccaucaau

SEQ ID NO: 430474 - RNA, 19 nt, Homo sapiens
  misc_RNA (1)...(19): siRNA sense strand
acacguaccaccuggaugu

SEQ ID NO: 430475 - RNA, 19 nt, Homo sapiens
  misc_RNA (1)...(19): siRNA sense strand
ucugacaagggaaauuaua

SEQ ID NO: 430476 - RNA, 19 nt, Homo sapiens
  misc_RNA (1)...(19): siRNA sense strand
cauacuggaccaacacaga

SEQ ID NO: 430477 - RNA, 19 nt, Homo sapiens
  misc_RNA (1)...(19): siRNA sense strand
ccaacacugucaaguuucg

SEQ ID NO: 430478 - RNA, 19 nt, Homo sapiens
  misc_RNA (1)...(19): siRNA sense strand
gaggcuacaagguacgaaa

SEQ ID NO: 430479 - RNA, 19 nt, Homo sapiens
  misc_RNA (1)...(19): siRNA sense strand
cguaccaccuggauguugu

SEQ ID NO: 430480 - RNA, 19 nt, Homo sapiens
  misc_RNA (1)...(19): siRNA sense strand
ucaguuuaguugaggauac

SEQ ID NO: 430481 - RNA, 19 nt, Homo sapiens
  misc_RNA (1)...(19): siRNA sense strand
ggaaaguguggucccaucu

SEQ ID NO: 430482 - RNA, 19 nt, Homo sapiens
  misc_RNA (1)...(19): siRNA sense strand
uaguugaggauaccacauu

SEQ ID NO: 430483 - RNA, 19 nt, Homo sapiens
  misc_RNA (1)...(19): siRNA sense strand
gcuacaagguacgaaacca

SEQ ID NO: 430484 - RNA, 19 nt, Homo sapiens
  misc_RNA (1)...(19): siRNA sense strand
cacuggagccucauuaugg

SEQ ID NO: 430485 - RNA, 19 nt, Homo sapiens
  misc_RNA (1)...(19): siRNA sense strand
cggccaacacugucaaguu

SEQ ID NO: 430486 - RNA, 19 nt, Homo sapiens
  misc_RNA (1)...(19): siRNA sense strand
acuggagccucauuaugga

SEQ ID NO: 430487 - RNA, 19 nt, Homo sapiens
  misc_RNA (1)...(19): siRNA sense strand
uaagcaggagcaucgcauu

SEQ ID NO: 430488 - RNA, 19 nt, Homo sapiens
  misc_RNA (1)...(19): siRNA sense strand
ggagccucauuauggaaag

SEQ ID NO: 430489 - RNA, 19 nt, Homo sapiens
  misc_RNA (1)...(19): siRNA sense strand
ggccaacacugucaaguuu

SEQ ID NO: 430490 - RNA, 19 nt, Homo sapiens
  misc_RNA (1)...(19): siRNA sense strand
gaauacggguccaucaauc

SEQ ID NO: 430491 - RNA, 19 nt, Homo sapiens
  misc_RNA (1)...(19): siRNA sense strand
gcaggagcaucgcauugga

SEQ ID NO: 430492 - RNA, 19 nt, Homo sapiens
  misc_RNA (1)...(19): siRNA sense strand
caucugacaagggaaauua

SEQ ID NO: 430493 - RNA, 19 nt, Homo sapiens
  misc_RNA (1)...(19): siRNA sense strand
gcaccauacuggaccaaca

SEQ ID NO: 430494 - RNA, 19 nt, Homo sapiens
  misc_RNA (1)...(19): siRNA sense strand
gcacuggagccucauuaug

SEQ ID NO: 430495 - RNA, 19 nt, Homo sapiens
  misc_RNA (1)...(19): siRNA sense strand
aaaguguggucccaucuga

SEQ ID NO: 430496 - RNA, 19 nt, Homo sapiens
  misc_RNA (1)...(19): siRNA sense strand
cauuggaggcuacaaggua

SEQ ID NO: 430497 - RNA, 19 nt, Homo sapiens
  misc_RNA (1)...(19): siRNA sense strand
aguugaggauaccacauua

SEQ ID NO: 430498 - RNA, 19 nt, Homo sapiens
  misc_RNA (1)...(19): siRNA sense strand
gaaaguguggucccaucug

SEQ ID NO: 430499 - RNA, 19 nt, Homo sapiens
  misc_RNA (1)...(19): siRNA sense strand
cagcacuggagccucauua

SEQ ID NO: 430500 - RNA, 19 nt, Homo sapiens
  misc_RNA (1)...(19): siRNA sense strand
ggaacccaaugccaaccau

SEQ ID NO: 430501 - RNA, 19 nt, Homo sapiens
  misc_RNA (1)...(19): siRNA sense strand
ugaauacggguccaucaau

SEQ ID NO: 430502 - RNA, 19 nt, Homo sapiens
  misc_RNA (1)...(19): siRNA sense strand
acacguaccaccuggaugu

SEQ ID NO: 430503 - RNA, 19 nt, Homo sapiens
  misc_RNA (1)...(19): siRNA sense strand
ucugacaagggaaauuaua

SEQ ID NO: 430504 - RNA, 19 nt, Homo sapiens
  misc_RNA (1)...(19): siRNA sense strand
cauacuggaccaacacaga

SEQ ID NO: 430505 - RNA, 19 nt, Homo sapiens
  misc_RNA (1)...(19): siRNA sense strand
ccaacacugucaaguuucg

SEQ ID NO: 430506 - RNA, 19 nt, Homo sapiens
  misc_RNA (1)...(19): siRNA sense strand
gaggcuacaagguacgaaa

SEQ ID NO: 430507 - RNA, 19 nt, Homo sapiens
  misc_RNA (1)...(19): siRNA sense strand
cguaccaccuggauguugu

SEQ ID NO: 430508 - RNA, 19 nt, Homo sapiens
  misc_RNA (1)...(19): siRNA sense strand
ucaguuuaguugaggauac

SEQ ID NO: 430509 - RNA, 19 nt, Homo sapiens
  misc_RNA (1)...(19): siRNA sense strand
ggaaaguguggucccaucu

SEQ ID NO: 430510 - RNA, 19 nt, Homo sapiens
  misc_RNA (1)...(19): siRNA sense strand
uaguugaggauaccacauu

SEQ ID NO: 430511 - RNA, 19 nt, Homo sapiens
  misc_RNA (1)...(19): siRNA sense strand
gcuacaagguacgaaacca

SEQ ID NO: 430512 - RNA, 19 nt, Homo sapiens
  misc_RNA (1)...(19): siRNA sense strand
cacuggagccucauuaugg

SEQ ID NO: 430513 - RNA, 19 nt, Homo sapiens
  misc_RNA (1)...(19): siRNA sense strand
cggccaacacugucaaguu

SEQ ID NO: 430514 - RNA, 19 nt, Homo sapiens
  misc_RNA (1)...(19): siRNA sense strand
acuggagccucauuaugga

SEQ ID NO: 430515 - RNA, 19 nt, Homo sapiens
  misc_RNA (1)...(19): siRNA sense strand
uaagcaggagcaucgcauu

SEQ ID NO: 430516 - RNA, 19 nt, Homo sapiens
  misc_RNA (1)...(19): siRNA sense strand
ggagccucauuauggaaag

SEQ ID NO: 430517 - RNA, 19 nt, Homo sapiens
  misc_RNA (1)...(19): siRNA sense strand
ggccaacacugucaaguuu

SEQ ID NO: 430518 - RNA, 19 nt, Homo sapiens
  misc_RNA (1)...(19): siRNA sense strand
gaauacggguccaucaauc

SEQ ID NO: 430519 - RNA, 19 nt, Homo sapiens
  misc_RNA (1)...(19): siRNA sense strand
gcaggagcaucgcauugga

SEQ ID NO: 430520 - RNA, 19 nt, Homo sapiens
  misc_RNA (1)...(19): siRNA sense strand
caucugacaagggaaauua

SEQ ID NO: 430521 - RNA, 19 nt, Homo sapiens
  misc_RNA (1)...(19): siRNA sense strand
gcaccauacuggaccaaca

SEQ ID NO: 430522 - RNA, 19 nt, Homo sapiens
  misc_RNA (1)...(19): siRNA sense strand
gcacuggagccucauuaug

SEQ ID NO: 430523 - RNA, 19 nt, Homo sapiens
  misc_RNA (1)...(19): siRNA sense strand
aaaguguggucccaucuga

SEQ ID NO: 430524 - RNA, 19 nt, Homo sapiens
  misc_RNA (1)...(19): siRNA sense strand
cauuggaggcuacaaggua

SEQ ID NO: 430525 - RNA, 19 nt, Homo sapiens
  misc_RNA (1)...(19): siRNA sense strand
aguugaggauaccacauua

SEQ ID NO: 430526 - RNA, 19 nt, Homo sapiens
  misc_RNA (1)...(19): siRNA sense strand
gaaaguguggucccaucug

SEQ ID NO: 430527 - RNA, 19 nt, Homo sapiens
  misc_RNA (1)...(19): siRNA sense strand
cagcacuggagccucauua

SEQ ID NO: 430528 - RNA, 19 nt, Homo sapiens
  misc_RNA (1)...(19): siRNA sense strand
ggaacccaaugccaaccau

SEQ ID NO: 430529 - RNA, 19 nt, Homo sapiens
  misc_RNA (1)...(19): siRNA sense strand
ugaauacggguccaucaau

SEQ ID NO: 430530 - RNA, 19 nt, Homo sapiens
  misc_RNA (1)...(19): siRNA sense strand
acacguaccaccuggaugu

SEQ ID NO: 430531 - RNA, 19 nt, Homo sapiens
  misc_RNA (1)...(19): siRNA sense strand
ucugacaagggaaauuaua

SEQ ID NO: 430532 - RNA, 19 nt, Homo sapiens
  misc_RNA (1)...(19): siRNA sense strand
cauacuggaccaacacaga

SEQ ID NO: 430533 - RNA, 19 nt, Homo sapiens
  misc_RNA (1)...(19): siRNA sense strand
ccaacacugucaaguuucg

SEQ ID NO: 430534 - RNA, 19 nt, Homo sapiens
  misc_RNA (1)...(19): siRNA sense strand
gaggcuacaagguacgaaa

SEQ ID NO: 430535 - RNA, 19 nt, Homo sapiens
  misc_RNA (1)...(19): siRNA sense strand
cguaccaccuggauguugu

SEQ ID NO: 430536 - RNA, 19 nt, Homo sapiens
  misc_RNA (1)...(19): siRNA sense strand
ucaguuuaguugaggauac

SEQ ID NO: 430537 - RNA, 19 nt, Homo sapiens
  misc_RNA (1)...(19): siRNA sense strand
ggaaaguguggucccaucu

SEQ ID NO: 430538 - RNA, 19 nt, Homo sapiens
  misc_RNA (1)...(19): siRNA sense strand
uaguugaggauaccacauu

SEQ ID NO: 430539 - RNA, 19 nt, Homo sapiens
  misc_RNA (1)...(19): siRNA sense strand
gcuacaagguacgaaacca

SEQ ID NO: 430540 - RNA, 19 nt, Homo sapiens
  misc_RNA (1)...(19): siRNA sense strand
cacuggagccucauuaugg

SEQ ID NO: 430541 - RNA, 19 nt, Homo sapiens
  misc_RNA (1)...(19): siRNA sense strand
cggccaacacugucaaguu

SEQ ID NO: 430542 - RNA, 19 nt, Homo sapiens
  misc_RNA (1)...(19): siRNA sense strand
acuggagccucauuaugga

SEQ ID NO: 430543 - RNA, 19 nt, Homo sapiens
  misc_RNA (1)...(19): siRNA sense strand
uaagcaggagcaucgcauu

SEQ ID NO: 430544 - RNA, 19 nt, Homo sapiens
  misc_RNA (1)...(19): siRNA sense strand
ggagccucauuauggaaag

SEQ ID NO: 430545 - RNA, 19 nt, Homo sapiens
  misc_RNA (1)...(19): siRNA sense strand
ggccaacacugucaaguuu

SEQ ID NO: 430546 - RNA, 19 nt, Homo sapiens
  misc_RNA (1)...(19): siRNA sense strand
gaauacggguccaucaauc

SEQ ID NO: 430547 - RNA, 19 nt, Homo sapiens
  misc_RNA (1)...(19): siRNA sense strand
gcaggagcaucgcauugga

SEQ ID NO: 430548 - RNA, 19 nt, Homo sapiens
  misc_RNA (1)...(19): siRNA sense strand
caucugacaagggaaauua

SEQ ID NO: 430549 - RNA, 19 nt, Homo sapiens
  misc_RNA (1)...(19): siRNA sense strand
gcaccauacuggaccaaca

SEQ ID NO: 430550 - RNA, 19 nt, Homo sapiens
  misc_RNA (1)...(19): siRNA sense strand
gcacuggagccucauuaug

SEQ ID NO: 430551 - RNA, 19 nt, Homo sapiens
  misc_RNA (1)...(19): siRNA sense strand
aaaguguggucccaucuga

SEQ ID NO: 430552 - RNA, 19 nt, Homo sapiens
  misc_RNA (1)...(19): siRNA sense strand
cauuggaggcuacaaggua

SEQ ID NO: 430553 - RNA, 19 nt, Homo sapiens
  misc_RNA (1)...(19): siRNA sense strand
aguugaggauaccacauua

SEQ ID NO: 430554 - RNA, 19 nt, Homo sapiens
  misc_RNA (1)...(19): siRNA sense strand
gaaaguguggucccaucug

SEQ ID NO: 430555 - RNA, 19 nt, Homo sapiens
  misc_RNA (1)...(19): siRNA sense strand
cagcacuggagccucauua

SEQ ID NO: 430556 - RNA, 19 nt, Homo sapiens
  misc_RNA (1)...(19): siRNA sense strand
ggaacccaaugccaaccau

SEQ ID NO: 430557 - RNA, 19 nt, Homo sapiens
  misc_RNA (1)...(19): siRNA sense strand
ugaauacggguccaucaau

SEQ ID NO: 430558 - RNA, 19 nt, Homo sapiens
  misc_RNA (1)...(19): siRNA sense strand
acacguaccaccuggaugu

SEQ ID NO: 430559 - RNA, 19 nt, Homo sapiens
  misc_RNA (1)...(19): siRNA sense strand
ucugacaagggaaauuaua

SEQ ID NO: 430560 - RNA, 19 nt, Homo sapiens
  misc_RNA (1)...(19): siRNA sense strand
cauacuggaccaacacaga

SEQ ID NO: 430561 - RNA, 19 nt, Homo sapiens
  misc_RNA (1)...(19): siRNA sense strand
ccaacacugucaaguuucg

SEQ ID NO: 430562 - RNA, 19 nt, Homo sapiens
  misc_RNA (1)...(19): siRNA sense strand
gaggcuacaagguacgaaa

SEQ ID NO: 430563 - RNA, 19 nt, Homo sapiens
  misc_RNA (1)...(19): siRNA sense strand
cguaccaccuggauguugu

SEQ ID NO: 430564 - RNA, 19 nt, Homo sapiens
  misc_RNA (1)...(19): siRNA sense strand
ucaguuuaguugaggauac

SEQ ID NO: 430565 - RNA, 19 nt, Homo sapiens
  misc_RNA (1)...(19): siRNA sense strand
ggaaaguguggucccaucu

SEQ ID NO: 430566 - RNA, 19 nt, Homo sapiens
  misc_RNA (1)...(19): siRNA sense strand
uaguugaggauaccacauu

SEQ ID NO: 430567 - RNA, 19 nt, Homo sapiens
  misc_RNA (1)...(19): siRNA sense strand
gcuacaagguacgaaacca

SEQ ID NO: 430568 - RNA, 19 nt, Homo sapiens
  misc_RNA (1)...(19): siRNA sense strand
cacuggagccucauuaugg

SEQ ID NO: 430569 - RNA, 19 nt, Homo sapiens
  misc_RNA (1)...(19): siRNA sense strand
cggccaacacugucaaguu

SEQ ID NO: 430570 - RNA, 19 nt, Homo sapiens
  misc_RNA (1)...(19): siRNA sense strand
acuggagccucauuaugga

SEQ ID NO: 430571 - RNA, 19 nt, Homo sapiens
  misc_RNA (1)...(19): siRNA sense strand
uaagcaggagcaucgcauu

SEQ ID NO: 430572 - RNA, 19 nt, Homo sapiens
  misc_RNA (1)...(19): siRNA sense strand
ggagccucauuauggaaag

SEQ ID NO: 430573 - RNA, 19 nt, Homo sapiens
  misc_RNA (1)...(19): siRNA sense strand
ggccaacacugucaaguuu

SEQ ID NO: 430574 - RNA, 19 nt, Homo sapiens
  misc_RNA (1)...(19): siRNA sense strand
gaauacggguccaucaauc

SEQ ID NO: 430575 - RNA, 19 nt, Homo sapiens
  misc_RNA (1)...(19): siRNA sense strand
gcaggagcaucgcauugga

SEQ ID NO: 430576 - RNA, 19 nt, Homo sapiens
  misc_RNA (1)...(19): siRNA sense strand
caucugacaagggaaauua

SEQ ID NO: 430577 - RNA, 19 nt, Homo sapiens
  misc_RNA (1)...(19): siRNA sense strand
gcaccauacuggaccaaca

SEQ ID NO: 430578 - RNA, 19 nt, Homo sapiens
  misc_RNA (1)...(19): siRNA sense strand
gcacuggagccucauuaug

SEQ ID NO: 430579 - RNA, 19 nt, Homo sapiens
  misc_RNA (1)...(19): siRNA sense strand
aaaguguggucccaucuga

SEQ ID NO: 430580 - RNA, 19 nt, Homo sapiens
  misc_RNA (1)...(19): siRNA sense strand
cauuggaggcuacaaggua

SEQ ID NO: 430581 - RNA, 19 nt, Homo sapiens
  misc_RNA (1)...(19): siRNA sense strand
aguugaggauaccacauua

SEQ ID NO: 430582 - RNA, 19 nt, Homo sapiens
  misc_RNA (1)...(19): siRNA sense strand
gaaaguguggucccaucug

SEQ ID NO: 430583 - RNA, 19 nt, Homo sapiens
  misc_RNA (1)...(19): siRNA sense strand
cagcacuggagccucauua

SEQ ID NO: 430584 - RNA, 19 nt, Homo sapiens
  misc_RNA (1)...(19): siRNA sense strand
ggaacccaaugccaaccau

SEQ ID NO: 430585 - RNA, 19 nt, Homo sapiens
  misc_RNA (1)...(19): siRNA sense strand
ugaauacggguccaucaau

SEQ ID NO: 430586 - RNA, 19 nt, Homo sapiens
  misc_RNA (1)...(19): siRNA sense strand
acacguaccaccuggaugu

SEQ ID NO: 430587 - RNA, 19 nt, Homo sapiens
  misc_RNA (1)...(19): siRNA sense strand
ucugacaagggaaauuaua

SEQ ID NO: 430588 - RNA, 19 nt, Homo sapiens
  misc_RNA (1)...(19): siRNA sense strand
cauacuggaccaacacaga

SEQ ID NO: 430589 - RNA, 19 nt, Homo sapiens
  misc_RNA (1)...(19): siRNA sense strand
ccaacacugucaaguuucg

SEQ ID NO: 430590 - RNA, 19 nt, Homo sapiens
  misc_RNA (1)...(19): siRNA sense strand
gaggcuacaagguacgaaa

SEQ ID NO: 430591 - RNA, 19 nt, Homo sapiens
  misc_RNA (1)...(19): siRNA sense strand
cguaccaccuggauguugu

SEQ ID NO: 430592 - RNA, 19 nt, Homo sapiens
  misc_RNA (1)...(19): siRNA sense strand
ucaguuuaguugaggauac

SEQ ID NO: 430593 - RNA, 19 nt, Homo sapiens
  misc_RNA (1)...(19): siRNA sense strand
ggaaaguguggucccaucu

SEQ ID NO: 430594 - RNA, 19 nt, Homo sapiens
  misc_RNA (1)...(19): siRNA sense strand
uaguugaggauaccacauu

SEQ ID NO: 430595 - RNA, 19 nt, Homo sapiens
  misc_RNA (1)...(19): siRNA sense strand
gcuacaagguacgaaacca

SEQ ID NO: 430596 - RNA, 19 nt, Homo sapiens
  misc_RNA (1)...(19): siRNA sense strand
cacuggagccucauuaugg

SEQ ID NO: 430597 - RNA, 19 nt, Homo sapiens
  misc_RNA (1)...(19): siRNA sense strand
cggccaacacugucaaguu

SEQ ID NO: 430598 - RNA, 19 nt, Homo sapiens
  misc_RNA (1)...(19): siRNA sense strand
acuggagccucauuaugga

SEQ ID NO: 430599 - RNA, 19 nt, Homo sapiens
  misc_RNA (1)...(19): siRNA sense strand
uaagcaggagcaucgcauu

SEQ ID NO: 430600 - RNA, 19 nt, Homo sapiens
  misc_RNA (1)...(19): siRNA sense strand
ggagccucauuauggaaag

SEQ ID NO: 430601 - RNA, 19 nt, Homo sapiens
  misc_RNA (1)...(19): siRNA sense strand
ggccaacacugucaaguuu

SEQ ID NO: 430602 - RNA, 19 nt, Homo sapiens
  misc_RNA (1)...(19): siRNA sense strand
gaauacggguccaucaauc

SEQ ID NO: 430603 - RNA, 19 nt, Homo sapiens
  misc_RNA (1)...(19): siRNA sense strand
gcaggagcaucgcauugga

SEQ ID NO: 430604 - RNA, 19 nt, Homo sapiens
  misc_RNA (1)...(19): siRNA sense strand
caucugacaagggaaauua

SEQ ID NO: 430605 - RNA, 19 nt, Homo sapiens
  misc_RNA (1)...(19): siRNA sense strand
gcaccauacuggaccaaca

SEQ ID NO: 430606 - RNA, 19 nt, Homo sapiens
  misc_RNA (1)...(19): siRNA sense strand
gcacuggagccucauuaug

SEQ ID NO: 430607 - RNA, 19 nt, Homo sapiens
  misc_RNA (1)...(19): siRNA sense strand
aaaguguggucccaucuga

SEQ ID NO: 430608 - RNA, 19 nt, Homo sapiens
  misc_RNA (1)...(19): siRNA sense strand
cauuggaggcuacaaggua

SEQ ID NO: 430609 - RNA, 19 nt, Homo sapiens
  misc_RNA (1)...(19): siRNA sense strand
aguugaggauaccacauua

SEQ ID NO: 430610 - RNA, 19 nt, Homo sapiens
  misc_RNA (1)...(19): siRNA sense strand
gaaaguguggucccaucug

SEQ ID NO: 430611 - RNA, 19 nt, Homo sapiens
  misc_RNA (1)...(19): siRNA sense strand
cagcacuggagccucauua

SEQ ID NO: 430612 - RNA, 19 nt, Homo sapiens
  misc_RNA (1)...(19): siRNA sense strand
ggaacccaaugccaaccau

SEQ ID NO: 430613 - RNA, 19 nt, Homo sapiens
  misc_RNA (1)...(19): siRNA sense strand
ugaauacggguccaucaau

SEQ ID NO: 430614 - RNA, 19 nt, Homo sapiens
  misc_RNA (1)...(19): siRNA sense strand
acacguaccaccuggaugu

SEQ ID NO: 430615 - RNA, 19 nt, Homo sapiens
  misc_RNA (1)...(19): siRNA sense strand
ucugacaagggaaauuaua

SEQ ID NO: 430616 - RNA, 19 nt, Homo sapiens
  misc_RNA (1)...(19): siRNA sense strand
cauacuggaccaacacaga

SEQ ID NO: 430617 - RNA, 19 nt, Homo sapiens
  misc_RNA (1)...(19): siRNA sense strand
ccaacacugucaaguuucg

SEQ ID NO: 430618 - RNA, 19 nt, Homo sapiens
  misc_RNA (1)...(19): siRNA sense strand
gaggcuacaagguacgaaa

SEQ ID NO: 430619 - RNA, 19 nt, Homo sapiens
  misc_RNA (1)...(19): siRNA sense strand
cguaccaccuggauguugu

SEQ ID NO: 430620 - RNA, 19 nt, Homo sapiens
  misc_RNA (1)...(19): siRNA sense strand
ucaguuuaguugaggauac

SEQ ID NO: 430621 - RNA, 19 nt, Homo sapiens
  misc_RNA (1)...(19): siRNA sense strand
ggaaaguguggucccaucu

SEQ ID NO: 430622 - RNA, 19 nt, Homo sapiens
  misc_RNA (1)...(19): siRNA sense strand
uaguugaggauaccacauu

SEQ ID NO: 430623 - RNA, 19 nt, Homo sapiens
  misc_RNA (1)...(19): siRNA sense strand
gcuacaagguacgaaacca

SEQ ID NO: 430624 - RNA, 19 nt, Homo sapiens
  misc_RNA (1)...(19): siRNA sense strand
cacuggagccucauuaugg

SEQ ID NO: 430625 - RNA, 19 nt, Homo sapiens
  misc_RNA (1)...(19): siRNA sense strand
cggccaacacugucaaguu

SEQ ID NO: 430626 - RNA, 19 nt, Homo sapiens
  misc_RNA (1)...(19): siRNA sense strand
acuggagccucauuaugga

SEQ ID NO: 430627 - RNA, 19 nt, Homo sapiens
  misc_RNA (1)...(19): siRNA sense strand
uaagcaggagcaucgcauu

SEQ ID NO: 430628 - RNA, 19 nt, Homo sapiens
  misc_RNA (1)...(19): siRNA sense strand
ggagccucauuauggaaag

SEQ ID NO: 430629 - RNA, 19 nt, Homo sapiens
  misc_RNA (1)...(19): siRNA sense strand
ggccaacacugucaaguuu

SEQ ID NO: 430630 - RNA, 19 nt, Homo sapiens
  misc_RNA (1)...(19): siRNA sense strand
gaauacggguccaucaauc

SEQ ID NO: 430631 - RNA, 19 nt, Homo sapiens
  misc_RNA (1)...(19): siRNA sense strand
gcaggagcaucgcauugga

SEQ ID NO: 430632 - RNA, 19 nt, Homo sapiens
  misc_RNA (1)...(19): siRNA sense strand
caucugacaagggaaauua

SEQ ID NO: 430633 - RNA, 19 nt, Homo sapiens
  misc_RNA (1)...(19): siRNA sense strand
gcaccauacuggaccaaca

SEQ ID NO: 430634 - RNA, 19 nt, Homo sapiens
  misc_RNA (1)...(19): siRNA sense strand
gcacuggagccucauuaug

SEQ ID NO: 430635 - RNA, 19 nt, Homo sapiens
  misc_RNA (1)...(19): siRNA sense strand
aaaguguggucccaucuga

SEQ ID NO: 430636 - RNA, 19 nt, Homo sapiens
  misc_RNA (1)...(19): siRNA sense strand
cauuggaggcuacaaggua

SEQ ID NO: 430637 - RNA, 19 nt, Homo sapiens
  misc_RNA (1)...(19): siRNA sense strand
aguugaggauaccacauua

SEQ ID NO: 430638 - RNA, 19 nt, Homo sapiens
  misc_RNA (1)...(19): siRNA sense strand
gaaaguguggucccaucug

SEQ ID NO: 430639 - RNA, 19 nt, Homo sapiens
  misc_RNA (1)...(19): siRNA sense strand
cagcacuggagccucauua

SEQ ID NO: 430640 - RNA, 19 nt, Homo sapiens
  misc_RNA (1)...(19): siRNA sense strand
ggaacccaaugccaaccau

SEQ ID NO: 430641 - RNA, 19 nt, Homo sapiens
  misc_RNA (1)...(19): siRNA sense strand
ugaauacggguccaucaau

SEQ ID NO: 430642 - RNA, 19 nt, Homo sapiens
  misc_RNA (1)...(19): siRNA sense strand
acacguaccaccuggaugu

SEQ ID NO: 430643 - RNA, 19 nt, Homo sapiens
  misc_RNA (1)...(19): siRNA sense strand
ucugacaagggaaauuaua

SEQ ID NO: 430644 - RNA, 19 nt, Homo sapiens
  misc_RNA (1)...(19): siRNA sense strand
cauacuggaccaacacaga

SEQ ID NO: 430645 - RNA, 19 nt, Homo sapiens
  misc_RNA (1)...(19): siRNA sense strand
ccaacacugucaaguuucg

SEQ ID NO: 430646 - RNA, 19 nt, Homo sapiens
  misc_RNA (1)...(19): siRNA sense strand
gaggcuacaagguacgaaa

SEQ ID NO: 430647 - RNA, 19 nt, Homo sapiens
  misc_RNA (1)...(19): siRNA sense strand
cguaccaccuggauguugu

SEQ ID NO: 430648 - RNA, 19 nt, Homo sapiens
  misc_RNA (1)...(19): siRNA sense strand
ucaguuuaguugaggauac

SEQ ID NO: 430649 - RNA, 19 nt, Homo sapiens
  misc_RNA (1)...(19): siRNA sense strand
ggaaaguguggucccaucu

SEQ ID NO: 430650 - RNA, 19 nt, Homo sapiens
  misc_RNA (1)...(19): siRNA sense strand
uaguugaggauaccacauu

SEQ ID NO: 430651 - RNA, 19 nt, Homo sapiens
  misc_RNA (1)...(19): siRNA sense strand
gcuacaagguacgaaacca

SEQ ID NO: 430652 - RNA, 19 nt, Homo sapiens
  misc_RNA (1)...(19): siRNA sense strand
cacuggagccucauuaugg

SEQ ID NO: 430653 - RNA, 19 nt, Homo sapiens
  misc_RNA (1)...(19): siRNA sense strand
cggccaacacugucaaguu

SEQ ID NO: 430654 - RNA, 19 nt, Homo sapiens
  misc_RNA (1)...(19): siRNA sense strand
acuggagccucauuaugga

SEQ ID NO: 430655 - RNA, 19 nt, Homo sapiens
  misc_RNA (1)...(19): siRNA sense strand
uaagcaggagcaucgcauu

SEQ ID NO: 430656 - RNA, 19 nt, Homo sapiens
  misc_RNA (1)...(19): siRNA sense strand
ggagccucauuauggaaag

SEQ ID NO: 430657 - RNA, 19 nt, Homo sapiens
  misc_RNA (1)...(19): siRNA sense strand
ggccaacacugucaaguuu

SEQ ID NO: 430658 - RNA, 19 nt, Homo sapiens
  misc_RNA (1)...(19): siRNA sense strand
gaauacggguccaucaauc

SEQ ID NO: 430659 - RNA, 19 nt, Homo sapiens
  misc_RNA (1)...(19): siRNA sense strand
gcaggagcaucgcauugga

SEQ ID NO: 430660 - RNA, 19 nt, Homo sapiens
  misc_RNA (1)...(19): siRNA sense strand
caucugacaagggaaauua

SEQ ID NO: 430661 - RNA, 19 nt, Homo sapiens
  misc_RNA (1)...(19): siRNA sense strand
gcaccauacuggaccaaca

SEQ ID NO: 430662 - RNA, 19 nt, Homo sapiens
  misc_RNA (1)...(19): siRNA sense strand
gcacuggagccucauuaug

SEQ ID NO: 430663 - RNA, 19 nt, Homo sapiens
  misc_RNA (1)...(19): siRNA sense strand
aaaguguggucccaucuga

SEQ ID NO: 430664 - RNA, 19 nt, Homo sapiens
  misc_RNA (1)...(19): siRNA sense strand
cauuggaggcuacaaggua

SEQ ID NO: 430665 - RNA, 19 nt, Homo sapiens
  misc_RNA (1)...(19): siRNA sense strand
aguugaggauaccacauua

SEQ ID NO: 430666 - RNA, 19 nt, Homo sapiens
  misc_RNA (1)...(19): siRNA sense strand
gaaaguguggucccaucug

SEQ ID NO: 430667 - RNA, 19 nt, Homo sapiens
  misc_RNA (1)...(19): siRNA sense strand
cagcacuggagccucauua

SEQ ID NO: 430668 - RNA, 19 nt, Homo sapiens
  misc_RNA (1)...(19): siRNA sense strand
ggaacccaaugccaaccau

SEQ ID NO: 430669 - RNA, 19 nt, Homo sapiens
  misc_RNA (1)...(19): siRNA sense strand
ugaauacggguccaucaau

SEQ ID NO: 430670 - RNA, 19 nt, Homo sapiens
  misc_RNA (1)...(19): siRNA sense strand
acacguaccaccuggaugu

SEQ ID NO: 430671 - RNA, 19 nt, Homo sapiens
  misc_RNA (1)...(19): siRNA sense strand
ucugacaagggaaauuaua

SEQ ID NO: 430672 - RNA, 19 nt, Homo sapiens
  misc_RNA (1)...(19): siRNA sense strand
cauacuggaccaacacaga

SEQ ID NO: 430673 - RNA, 19 nt, Homo sapiens
  misc_RNA (1)...(19): siRNA sense strand
ccaacacugucaaguuucg

SEQ ID NO: 430674 - RNA, 19 nt, Homo sapiens
  misc_RNA (1)...(19): siRNA sense strand
gaggcuacaagguacgaaa

SEQ ID NO: 430675 - RNA, 19 nt, Homo sapiens
  misc_RNA (1)...(19): siRNA sense strand
cguaccaccuggauguugu

SEQ ID NO: 430676 - RNA, 19 nt, Homo sapiens
  misc_RNA (1)...(19): siRNA sense strand
ucaguuuaguugaggauac

SEQ ID NO: 430677 - RNA, 19 nt, Homo sapiens
  misc_RNA (1)...(19): siRNA sense strand
ggaaaguguggucccaucu

SEQ ID NO: 430678 - RNA, 19 nt, Homo sapiens
  misc_RNA (1)...(19): siRNA sense strand
uaguugaggauaccacauu

SEQ ID NO: 430679 - RNA, 19 nt, Homo sapiens
  misc_RNA (1)...(19): siRNA sense strand
gcuacaagguacgaaacca

SEQ ID NO: 430680 - RNA, 19 nt, Homo sapiens
  misc_RNA (1)...(19): siRNA sense strand
cacuggagccucauuaugg

SEQ ID NO: 430681 - RNA, 19 nt, Homo sapiens
  misc_RNA (1)...(19): siRNA sense strand
cggccaacacugucaaguu

SEQ ID NO: 430682 - RNA, 19 nt, Homo sapiens
  misc_RNA (1)...(19): siRNA sense strand
acuggagccucauuaugga

SEQ ID NO: 430683 - RNA, 19 nt, Homo sapiens
  misc_RNA (1)...(19): siRNA sense strand
uaagcaggagcaucgcauu

SEQ ID NO: 430684 - RNA, 19 nt, Homo sapiens
  misc_RNA (1)...(19): siRNA sense strand
ggagccucauuauggaaag

SEQ ID NO: 430685 - RNA, 19 nt, Homo sapiens
  misc_RNA (1)...(19): siRNA sense strand
ggccaacacugucaaguuu

SEQ ID NO: 430686 - RNA, 19 nt, Homo sapiens
  misc_RNA (1)...(19): siRNA sense strand
gaauacggguccaucaauc

SEQ ID NO: 430687 - RNA, 19 nt, Homo sapiens
  misc_RNA (1)...(19): siRNA sense strand
gcaggagcaucgcauugga

SEQ ID NO: 430688 - RNA, 19 nt, Homo sapiens
  misc_RNA (1)...(19): siRNA sense strand
caucugacaagggaaauua

SEQ ID NO: 430689 - RNA, 19 nt, Homo sapiens
  misc_RNA (1)...(19): siRNA sense strand
gcaccauacuggaccaaca

SEQ ID NO: 430690 - RNA, 19 nt, Homo sapiens
  misc_RNA (1)...(19): siRNA sense strand
gcacuggagccucauuaug

SEQ ID NO: 430691 - RNA, 19 nt, Homo sapiens
  misc_RNA (1)...(19): siRNA sense strand
aaaguguggucccaucuga

SEQ ID NO: 430692 - RNA, 19 nt, Homo sapiens
  misc_RNA (1)...(19): siRNA sense strand
cauuggaggcuacaaggua

SEQ ID NO: 430693 - RNA, 19 nt, Homo sapiens
  misc_RNA (1)...(19): siRNA sense strand
aguugaggauaccacauua

SEQ ID NO: 430694 - RNA, 19 nt, Homo sapiens
  misc_RNA (1)...(19): siRNA sense strand
gaaaguguggucccaucug

SEQ ID NO: 430695 - RNA, 19 nt, Homo sapiens
  misc_RNA (1)...(19): siRNA sense strand
cagcacuggagccucauua

SEQ ID NO: 430696 - RNA, 19 nt, Homo sapiens
  misc_RNA (1)...(19): siRNA sense strand
ggaacccaaugccaaccau

SEQ ID NO: 430697 - RNA, 19 nt, Homo sapiens
  misc_RNA (1)...(19): siRNA sense strand
ugaauacggguccaucaau

SEQ ID NO: 430698 - RNA, 19 nt, Homo sapiens
  misc_RNA (1)...(19): siRNA sense strand
acacguaccaccuggaugu

SEQ ID NO: 430699 - RNA, 19 nt, Homo sapiens
  misc_RNA (1)...(19): siRNA sense strand
ucugacaagggaaauuaua

SEQ ID NO: 430700 - RNA, 19 nt, Homo sapiens
  misc_RNA (1)...(19): siRNA sense strand
cauacuggaccaacacaga

SEQ ID NO: 430701 - RNA, 19 nt, Homo sapiens
  misc_RNA (1)...(19): siRNA sense strand
ccaacacugucaaguuucg

SEQ ID NO: 430702 - RNA, 19 nt, Homo sapiens
  misc_RNA (1)...(19): siRNA sense strand
gaggcuacaagguacgaaa

SEQ ID NO: 430703 - RNA, 19 nt, Homo sapiens
  misc_RNA (1)...(19): siRNA sense strand
cguaccaccuggauguugu

SEQ ID NO: 430704 - RNA, 19 nt, Homo sapiens
  misc_RNA (1)...(19): siRNA sense strand
ucaguuuaguugaggauac

SEQ ID NO: 430705 - RNA, 19 nt, Homo sapiens
  misc_RNA (1)...(19): siRNA sense strand
ggaaaguguggucccaucu

SEQ ID NO: 430706 - RNA, 19 nt, Homo sapiens
  misc_RNA (1)...(19): siRNA sense strand
uaguugaggauaccacauu

SEQ ID NO: 430707 - RNA, 19 nt, Homo sapiens
  misc_RNA (1)...(19): siRNA sense strand
gcuacaagguacgaaacca

SEQ ID NO: 430708 - RNA, 19 nt, Homo sapiens
  misc_RNA (1)...(19): siRNA sense strand
cacuggagccucauuaugg

SEQ ID NO: 430709 - RNA, 19 nt, Homo sapiens
  misc_RNA (1)...(19): siRNA sense strand
cggccaacacugucaaguu

SEQ ID NO: 430710 - RNA, 19 nt, Homo sapiens
  misc_RNA (1)...(19): siRNA sense strand
acuggagccucauuaugga

SEQ ID NO: 430711 - RNA, 19 nt, Homo sapiens
  misc_RNA (1)...(19): siRNA sense strand
uaagcaggagcaucgcauu

SEQ ID NO: 430712 - RNA, 19 nt, Homo sapiens
  misc_RNA (1)...(19): siRNA sense strand
ggagccucauuauggaaag

SEQ ID NO: 430713 - RNA, 19 nt, Homo sapiens
  misc_RNA (1)...(19): siRNA sense strand
ggccaacacugucaaguuu

SEQ ID NO: 430714 - RNA, 19 nt, Homo sapiens
  misc_RNA (1)...(19): siRNA sense strand
gaauacggguccaucaauc

SEQ ID NO: 430715 - RNA, 19 nt, Homo sapiens
  misc_RNA (1)...(19): siRNA sense strand
gcaggagcaucgcauugga

SEQ ID NO: 430716 - RNA, 19 nt, Homo sapiens
  misc_RNA (1)...(19): siRNA sense strand
caucugacaagggaaauua

SEQ ID NO: 430717 - RNA, 19 nt, Homo sapiens
  misc_RNA (1)...(19): siRNA sense strand
gcaccauacuggaccaaca

SEQ ID NO: 430718 - RNA, 19 nt, Homo sapiens
  misc_RNA (1)...(19): siRNA sense strand
gcacuggagccucauuaug

SEQ ID NO: 430719 - RNA, 19 nt, Homo sapiens
  misc_RNA (1)...(19): siRNA sense strand
aaaguguggucccaucuga

SEQ ID NO: 430720 - RNA, 19 nt, Homo sapiens
  misc_RNA (1)...(19): siRNA sense strand
cauuggaggcuacaaggua

SEQ ID NO: 430721 - RNA, 19 nt, Homo sapiens
  misc_RNA (1)...(19): siRNA sense strand
aguugaggauaccacauua

SEQ ID NO: 430722 - RNA, 19 nt, Homo sapiens
  misc_RNA (1)...(19): siRNA sense strand
gaaaguguggucccaucug

SEQ ID NO: 430723 - RNA, 19 nt, Homo sapiens
  misc_RNA (1)...(19): siRNA sense strand
cagcacuggagccucauua

SEQ ID NO: 430724 - RNA, 19 nt, Homo sapiens
  misc_RNA (1)...(19): siRNA sense strand
ggaacccaaugccaaccau

SEQ ID NO: 430725 - RNA, 19 nt, Homo sapiens
  misc_RNA (1)...(19): siRNA sense strand
ugaauacggguccaucaau

SEQ ID NO: 430726 - RNA, 19 nt, Homo sapiens
  misc_RNA (1)...(19): siRNA sense strand
acacguaccaccuggaugu

SEQ ID NO: 430727 - RNA, 19 nt, Homo sapiens
  misc_RNA (1)...(19): siRNA sense strand
ucugacaagggaaauuaua

SEQ ID NO: 430728 - RNA, 19 nt, Homo sapiens
  misc_RNA (1)...(19): siRNA sense strand
cauacuggaccaacacaga

SEQ ID NO: 430729 - RNA, 19 nt, Homo sapiens
  misc_RNA (1)...(19): siRNA sense strand
ccaacacugucaaguuucg

SEQ ID NO: 430730 - RNA, 19 nt, Homo sapiens
  misc_RNA (1)...(19): siRNA sense strand
gaggcuacaagguacgaaa

SEQ ID NO: 430731 - RNA, 19 nt, Homo sapiens
  misc_RNA (1)...(19): siRNA sense strand
cguaccaccuggauguugu

SEQ ID NO: 430732 - RNA, 19 nt, Homo sapiens
  misc_RNA (1)...(19): siRNA sense strand
ucaguuuaguugaggauac

SEQ ID NO: 430733 - RNA, 19 nt, Homo sapiens
  misc_RNA (1)...(19): siRNA sense strand
ggaaaguguggucccaucu

SEQ ID NO: 430734 - RNA, 19 nt, Homo sapiens
  misc_RNA (1)...(19): siRNA sense strand
uaguugaggauaccacauu

SEQ ID NO: 430735 - RNA, 19 nt, Homo sapiens
  misc_RNA (1)...(19): siRNA sense strand
gcuacaagguacgaaacca

SEQ ID NO: 430736 - RNA, 19 nt, Homo sapiens
  misc_RNA (1)...(19): siRNA sense strand
cacuggagccucauuaugg

SEQ ID NO: 430737 - RNA, 19 nt, Homo sapiens
  misc_RNA (1)...(19): siRNA sense strand
cggccaacacugucaaguu

SEQ ID NO: 430738 - RNA, 19 nt, Homo sapiens
  misc_RNA (1)...(19): siRNA sense strand
acuggagccucauuaugga

SEQ ID NO: 430739 - RNA, 19 nt, Homo sapiens
  misc_RNA (1)...(19): siRNA sense strand
uaagcaggagcaucgcauu

SEQ ID NO: 430740 - RNA, 19 nt, Homo sapiens
  misc_RNA (1)...(19): siRNA sense strand
ggagccucauuauggaaag

SEQ ID NO: 430741 - RNA, 19 nt, Homo sapiens
  misc_RNA (1)...(19): siRNA sense strand
ggccaacacugucaaguuu

SEQ ID NO: 430742 - RNA, 19 nt, Homo sapiens
  misc_RNA (1)...(19): siRNA sense strand
gaauacggguccaucaauc

SEQ ID NO: 430743 - RNA, 19 nt, Homo sapiens
  misc_RNA (1)...(19): siRNA sense strand
gcaggagcaucgcauugga

SEQ ID NO: 430744 - RNA, 19 nt, Homo sapiens
  misc_RNA (1)...(19): siRNA sense strand
caucugacaagggaaauua

SEQ ID NO: 430745 - RNA, 19 nt, Homo sapiens
  misc_RNA (1)...(19): siRNA sense strand
gcaccauacuggaccaaca

SEQ ID NO: 430746 - RNA, 19 nt, Homo sapiens
  misc_RNA (1)...(19): siRNA sense strand
gcacuggagccucauuaug

SEQ ID NO: 430747 - RNA, 19 nt, Homo sapiens
  misc_RNA (1)...(19): siRNA sense strand
aaaguguggucccaucuga

SEQ ID NO: 430748 - RNA, 19 nt, Homo sapiens
  misc_RNA (1)...(19): siRNA sense strand
cauuggaggcuacaaggua

SEQ ID NO: 430749 - RNA, 19 nt, Homo sapiens
  misc_RNA (1)...(19): siRNA sense strand
aguugaggauaccacauua

SEQ ID NO: 430750 - RNA, 19 nt, Homo sapiens
  misc_RNA (1)...(19): siRNA sense strand
gaaaguguggucccaucug

SEQ ID NO: 430751 - RNA, 19 nt, Homo sapiens
  misc_RNA (1)...(19): siRNA sense strand
cagcacuggagccucauua

SEQ ID NO: 430752 - RNA, 19 nt, Homo sapiens
  misc_RNA (1)...(19): siRNA sense strand
ggaacccaaugccaaccau

SEQ ID NO: 430753 - RNA, 19 nt, Homo sapiens
  misc_RNA (1)...(19): siRNA sense strand
ugaauacggguccaucaau

SEQ ID NO: 430754 - RNA, 19 nt, Homo sapiens
  misc_RNA (1)...(19): siRNA sense strand
acacguaccaccuggaugu

SEQ ID NO: 430755 - RNA, 19 nt, Homo sapiens
  misc_RNA (1)...(19): siRNA sense strand
ucugacaagggaaauuaua

SEQ ID NO: 430756 - RNA, 19 nt, Homo sapiens
  misc_RNA (1)...(19): siRNA sense strand
cauacuggaccaacacaga

SEQ ID NO: 430757 - RNA, 19 nt, Homo sapiens
  misc_RNA (1)...(19): siRNA sense strand
ccaacacugucaaguuucg

SEQ ID NO: 430758 - RNA, 19 nt, Homo sapiens
  misc_RNA (1)...(19): siRNA sense strand
gaggcuacaagguacgaaa

SEQ ID NO: 430759 - RNA, 19 nt, Homo sapiens
  misc_RNA (1)...(19): siRNA sense strand
cguaccaccuggauguugu

SEQ ID NO: 430760 - RNA, 19 nt, Homo sapiens
  misc_RNA (1)...(19): siRNA sense strand
ucaguuuaguugaggauac

SEQ ID NO: 430761 - RNA, 19 nt, Homo sapiens
  misc_RNA (1)...(19): siRNA sense strand
ggaaaguguggucccaucu

SEQ ID NO: 430762 - RNA, 19 nt, Homo sapiens
  misc_RNA (1)...(19): siRNA sense strand
uaguugaggauaccacauu

SEQ ID NO: 430763 - RNA, 19 nt, Homo sapiens
  misc_RNA (1)...(19): siRNA sense strand
gcuacaagguacgaaacca

SEQ ID NO: 430764 - RNA, 19 nt, Homo sapiens
  misc_RNA (1)...(19): siRNA sense strand
cacuggagccucauuaugg

SEQ ID NO: 430765 - RNA, 19 nt, Homo sapiens
  misc_RNA (1)...(19): siRNA sense strand
cggccaacacugucaaguu

SEQ ID NO: 430766 - RNA, 19 nt, Homo sapiens
  misc_RNA (1)...(19): siRNA sense strand
acuggagccucauuaugga

SEQ ID NO: 430767 - RNA, 19 nt, Homo sapiens
  misc_RNA (1)...(19): siRNA sense strand
uaagcaggagcaucgcauu

SEQ ID NO: 430768 - RNA, 19 nt, Homo sapiens
  misc_RNA (1)...(19): siRNA sense strand
ggagccucauuauggaaag

SEQ ID NO: 430769 - RNA, 19 nt, Homo sapiens
  misc_RNA (1)...(19): siRNA sense strand
ggccaacacugucaaguuu

SEQ ID NO: 430770 - RNA, 19 nt, Homo sapiens
  misc_RNA (1)...(19): siRNA sense strand
gaauacggguccaucaauc

SEQ ID NO: 430771 - RNA, 19 nt, Homo sapiens
  misc_RNA (1)...(19): siRNA sense strand
gcaggagcaucgcauugga

SEQ ID NO: 430772 - RNA, 19 nt, Homo sapiens
  misc_RNA (1)...(19): siRNA sense strand
caucugacaagggaaauua

SEQ ID NO: 430773 - RNA, 19 nt, Homo sapiens
  misc_RNA (1)...(19): siRNA sense strand
gcaccauacuggaccaaca

SEQ ID NO: 430774 - RNA, 19 nt, Homo sapiens
  misc_RNA (1)...(19): siRNA sense strand
gcacuggagccucauuaug

SEQ ID NO: 430775 - RNA, 19 nt, Homo sapiens
  misc_RNA (1)...(19): siRNA sense strand
aaaguguggucccaucuga

SEQ ID NO: 430776 - RNA, 19 nt, Homo sapiens
  misc_RNA (1)...(19): siRNA sense strand
cauuggaggcuacaaggua

SEQ ID NO: 430777 - RNA, 19 nt, Homo sapiens
  misc_RNA (1)...(19): siRNA sense strand
aguugaggauaccacauua

SEQ ID NO: 430778 - RNA, 19 nt, Homo sapiens
  misc_RNA (1)...(19): siRNA sense strand
gaaaguguggucccaucug

SEQ ID NO: 430779 - RNA, 19 nt, Homo sapiens
  misc_RNA (1)...(19): siRNA sense strand
cagcacuggagccucauua

SEQ ID NO: 430780 - RNA, 19 nt, Homo sapiens
  misc_RNA (1)...(19): siRNA sense strand
ggaacccaaugccaaccau

SEQ ID NO: 430781 - RNA, 19 nt, Homo sapiens
  misc_RNA (1)...(19): siRNA sense strand
ugaauacggguccaucaau

SEQ ID NO: 430782 - RNA, 19 nt, Homo sapiens
  misc_RNA (1)...(19): siRNA sense strand
acacguaccaccuggaugu

SEQ ID NO: 430783 - RNA, 19 nt, Homo sapiens
  misc_RNA (1)...(19): siRNA sense strand
ucugacaagggaaauuaua

SEQ ID NO: 430784 - RNA, 19 nt, Homo sapiens
  misc_RNA (1)...(19): siRNA sense strand
cauacuggaccaacacaga

SEQ ID NO: 430785 - RNA, 19 nt, Homo sapiens
  misc_RNA (1)...(19): siRNA sense strand
ccaacacugucaaguuucg

SEQ ID NO: 430786 - RNA, 19 nt, Homo sapiens
  misc_RNA (1)...(19): siRNA sense strand
gaggcuacaagguacgaaa

SEQ ID NO: 430787 - RNA, 19 nt, Homo sapiens
  misc_RNA (1)...(19): siRNA sense strand
cguaccaccuggauguugu

SEQ ID NO: 430788 - RNA, 19 nt, Homo sapiens
  misc_RNA (1)...(19): siRNA sense strand
ucaguuuaguugaggauac

SEQ ID NO: 430789 - RNA, 19 nt, Homo sapiens
  misc_RNA (1)...(19): siRNA sense strand
ggaaaguguggucccaucu

SEQ ID NO: 430790 - RNA, 19 nt, Homo sapiens
  misc_RNA (1)...(19): siRNA sense strand
uaguugaggauaccacauu

SEQ ID NO: 430791 - RNA, 19 nt, Homo sapiens
  misc_RNA (1)...(19): siRNA sense strand
gcuacaagguacgaaacca

SEQ ID NO: 430792 - RNA, 19 nt, Homo sapiens
  misc_RNA (1)...(19): siRNA sense strand
cacuggagccucauuaugg

SEQ ID NO: 430793 - RNA, 19 nt, Homo sapiens
  misc_RNA (1)...(19): siRNA sense strand
cggccaacacugucaaguu

SEQ ID NO: 430794 - RNA, 19 nt, Homo sapiens
  misc_RNA (1)...(19): siRNA sense strand
acuggagccucauuaugga

SEQ ID NO: 430795 - RNA, 19 nt, Homo sapiens
  misc_RNA (1)...(19): siRNA sense strand
uaagcaggagcaucgcauu

SEQ ID NO: 430796 - RNA, 19 nt, Homo sapiens
  misc_RNA (1)...(19): siRNA sense strand
ggagccucauuauggaaag

SEQ ID NO: 430797 - RNA, 19 nt, Homo sapiens
  misc_RNA (1)...(19): siRNA sense strand
ggccaacacugucaaguuu

SEQ ID NO: 430798 - RNA, 19 nt, Homo sapiens
  misc_RNA (1)...(19): siRNA sense strand
gaauacggguccaucaauc

SEQ ID NO: 430799 - RNA, 19 nt, Homo sapiens
  misc_RNA (1)...(19): siRNA sense strand
gcaggagcaucgcauugga

SEQ ID NO: 430800 - RNA, 19 nt, Homo sapiens
  misc_RNA (1)...(19): siRNA sense strand
caucugacaagggaaauua

SEQ ID NO: 430801 - RNA, 19 nt, Homo sapiens
  misc_RNA (1)...(19): siRNA sense strand
gcaccauacuggaccaaca

SEQ ID NO: 430802 - RNA, 19 nt, Homo sapiens
  misc_RNA (1)...(19): siRNA sense strand
gcacuggagccucauuaug

SEQ ID NO: 430803 - RNA, 19 nt, Homo sapiens
  misc_RNA (1)...(19): siRNA sense strand
aaaguguggucccaucuga

SEQ ID NO: 430804 - RNA, 19 nt, Homo sapiens
  misc_RNA (1)...(19): siRNA sense strand
cauuggaggcuacaaggua

SEQ ID NO: 430805 - RNA, 19 nt, Homo sapiens
  misc_RNA (1)...(19): siRNA sense strand
aguugaggauaccacauua

SEQ ID NO: 430806 - RNA, 19 nt, Homo sapiens
  misc_RNA (1)...(19): siRNA sense strand
gaaaguguggucccaucug

SEQ ID NO: 430807 - RNA, 19 nt, Homo sapiens
  misc_RNA (1)...(19): siRNA sense strand
cagcacuggagccucauua

SEQ ID NO: 430808 - RNA, 19 nt, Homo sapiens
  misc_RNA (1)...(19): siRNA sense strand
ggaacccaaugccaaccau

SEQ ID NO: 430809 - RNA, 19 nt, Homo sapiens
  misc_RNA (1)...(19): siRNA sense strand
ugaauacggguccaucaau

SEQ ID NO: 430810 - RNA, 19 nt, Homo sapiens
  misc_RNA (1)...(19): siRNA sense strand
acacguaccaccuggaugu

SEQ ID NO: 430811 - RNA, 19 nt, Homo sapiens
  misc_RNA (1)...(19): siRNA sense strand
ucugacaagggaaauuaua

SEQ ID NO: 430812 - RNA, 19 nt, Homo sapiens
  misc_RNA (1)...(19): siRNA sense strand
cauacuggaccaacacaga

SEQ ID NO: 430813 - RNA, 19 nt, Homo sapiens
  misc_RNA (1)...(19): siRNA sense strand
ccaacacugucaaguuucg

SEQ ID NO: 430814 - RNA, 19 nt, Homo sapiens
  misc_RNA (1)...(19): siRNA sense strand
gaggcuacaagguacgaaa

SEQ ID NO: 430815 - RNA, 19 nt, Homo sapiens
  misc_RNA (1)...(19): siRNA sense strand
cguaccaccuggauguugu

SEQ ID NO: 430816 - RNA, 19 nt, Homo sapiens
  misc_RNA (1)...(19): siRNA sense strand
ucaguuuaguugaggauac

SEQ ID NO: 430817 - RNA, 19 nt, Homo sapiens
  misc_RNA (1)...(19): siRNA sense strand
ggaaaguguggucccaucu

SEQ ID NO: 430818 - RNA, 19 nt, Homo sapiens
  misc_RNA (1)...(19): siRNA sense strand
uaguugaggauaccacauu

SEQ ID NO: 430819 - RNA, 19 nt, Homo sapiens
  misc_RNA (1)...(19): siRNA sense strand
gcuacaagguacgaaacca

SEQ ID NO: 430820 - RNA, 19 nt, Homo sapiens
  misc_RNA (1)...(19): siRNA sense strand
cacuggagccucauuaugg

SEQ ID NO: 430821 - RNA, 19 nt, Homo sapiens
  misc_RNA (1)...(19): siRNA sense strand
cggccaacacugucaaguu

SEQ ID NO: 430822 - RNA, 19 nt, Homo sapiens
  misc_RNA (1)...(19): siRNA sense strand
acuggagccucauuaugga

SEQ ID NO: 430823 - RNA, 19 nt, Homo sapiens
  misc_RNA (1)...(19): siRNA sense strand
uaagcaggagcaucgcauu

SEQ ID NO: 430824 - RNA, 19 nt, Homo sapiens
  misc_RNA (1)...(19): siRNA sense strand
ggagccucauuauggaaag

SEQ ID NO: 430825 - RNA, 19 nt, Homo sapiens
  misc_RNA (1)...(19): siRNA sense strand
ggccaacacugucaaguuu

SEQ ID NO: 430826 - RNA, 19 nt, Homo sapiens
  misc_RNA (1)...(19): siRNA sense strand
gaauacggguccaucaauc

SEQ ID NO: 430827 - RNA, 19 nt, Homo sapiens
  misc_RNA (1)...(19): siRNA sense strand
gcaggagcaucgcauugga

SEQ ID NO: 430828 - RNA, 19 nt, Homo sapiens
  misc_RNA (1)...(19): siRNA sense strand
caucugacaagggaaauua

SEQ ID NO: 430829 - RNA, 19 nt, Homo sapiens
  misc_RNA (1)...(19): siRNA sense strand
gcaccauacuggaccaaca

SEQ ID NO: 430830 - RNA, 19 nt, Homo sapiens
  misc_RNA (1)...(19): siRNA sense strand
gcacuggagccucauuaug

SEQ ID NO: 430831 - RNA, 19 nt, Homo sapiens
  misc_RNA (1)...(19): siRNA sense strand
aaaguguggucccaucuga

SEQ ID NO: 430832 - RNA, 19 nt, Homo sapiens
  misc_RNA (1)...(19): siRNA sense strand
cauuggaggcuacaaggua

SEQ ID NO: 430833 - RNA, 19 nt, Homo sapiens
  misc_RNA (1)...(19): siRNA sense strand
aguugaggauaccacauua

SEQ ID NO: 430834 - RNA, 19 nt, Homo sapiens
  misc_RNA (1)...(19): siRNA sense strand
gaaaguguggucccaucug

SEQ ID NO: 430835 - RNA, 19 nt, Homo sapiens
  misc_RNA (1)...(19): siRNA sense strand
cagcacuggagccucauua

SEQ ID NO: 430836 - RNA, 19 nt, Homo sapiens
  misc_RNA (1)...(19): siRNA sense strand
ggaacccaaugccaaccau

SEQ ID NO: 430837 - RNA, 19 nt, Homo sapiens
  misc_RNA (1)...(19): siRNA sense strand
ugaauacggguccaucaau

SEQ ID NO: 430838 - RNA, 19 nt, Homo sapiens
  misc_RNA (1)...(19): siRNA sense strand
acacguaccaccuggaugu

SEQ ID NO: 430839 - RNA, 19 nt, Homo sapiens
  misc_RNA (1)...(19): siRNA sense strand
ucugacaagggaaauuaua

SEQ ID NO: 430840 - RNA, 19 nt, Homo sapiens
  misc_RNA (1)...(19): siRNA sense strand
cauacuggaccaacacaga

SEQ ID NO: 430841 - RNA, 19 nt, Homo sapiens
  misc_RNA (1)...(19): siRNA sense strand
ccaacacugucaaguuucg

SEQ ID NO: 430842 - RNA, 19 nt, Homo sapiens
  misc_RNA (1)...(19): siRNA sense strand
gaggcuacaagguacgaaa

SEQ ID NO: 430843 - RNA, 19 nt, Homo sapiens
  misc_RNA (1)...(19): siRNA sense strand
cguaccaccuggauguugu

SEQ ID NO: 430844 - RNA, 19 nt, Homo sapiens
  misc_RNA (1)...(19): siRNA sense strand
ucaguuuaguugaggauac

SEQ ID NO: 430845 - RNA, 19 nt, Homo sapiens
  misc_RNA (1)...(19): siRNA sense strand
ggaaaguguggucccaucu

SEQ ID NO: 430846 - RNA, 19 nt, Homo sapiens
  misc_RNA (1)...(19): siRNA sense strand
uaguugaggauaccacauu

SEQ ID NO: 430847 - RNA, 19 nt, Homo sapiens
  misc_RNA (1)...(19): siRNA sense strand
gcuacaagguacgaaacca

SEQ ID NO: 430848 - RNA, 19 nt, Homo sapiens
  misc_RNA (1)...(19): siRNA sense strand
cacuggagccucauuaugg

SEQ ID NO: 430849 - RNA, 19 nt, Homo sapiens
  misc_RNA (1)...(19): siRNA sense strand
cggccaacacugucaaguu

SEQ ID NO: 430850 - RNA, 19 nt, Homo sapiens
  misc_RNA (1)...(19): siRNA sense strand
acuggagccucauuaugga

SEQ ID NO: 430851 - RNA, 19 nt, Homo sapiens
  misc_RNA (1)...(19): siRNA sense strand
uaagcaggagcaucgcauu

SEQ ID NO: 430852 - RNA, 19 nt, Homo sapiens
  misc_RNA (1)...(19): siRNA sense strand
ggagccucauuauggaaag

SEQ ID NO: 430853 - RNA, 19 nt, Homo sapiens
  misc_RNA (1)...(19): siRNA sense strand
ggccaacacugucaaguuu

SEQ ID NO: 430854 - RNA, 19 nt, Homo sapiens
  misc_RNA (1)...(19): siRNA sense strand
gaauacggguccaucaauc

SEQ ID NO: 430855 - RNA, 19 nt, Homo sapiens
  misc_RNA (1)...(19): siRNA sense strand
gcaggagcaucgcauugga

SEQ ID NO: 430856 - RNA, 19 nt, Homo sapiens
  misc_RNA (1)...(19): siRNA sense strand
caucugacaagggaaauua

SEQ ID NO: 430857 - RNA, 19 nt, Homo sapiens
  misc_RNA (1)...(19): siRNA sense strand
gcaccauacuggaccaaca

SEQ ID NO: 430858 - RNA, 19 nt, Homo sapiens
  misc_RNA (1)...(19): siRNA sense strand
gcacuggagccucauuaug

SEQ ID NO: 430859 - RNA, 19 nt, Homo sapiens
  misc_RNA (1)...(19): siRNA sense strand
aaaguguggucccaucuga

SEQ ID NO: 430860 - RNA, 19 nt, Homo sapiens
  misc_RNA (1)...(19): siRNA sense strand
cauuggaggcuacaaggua

SEQ ID NO: 430861 - RNA, 19 nt, Homo sapiens
  misc_RNA (1)...(19): siRNA sense strand
aguugaggauaccacauua

SEQ ID NO: 430862 - RNA, 19 nt, Homo sapiens
  misc_RNA (1)...(19): siRNA sense strand
gaaaguguggucccaucug

SEQ ID NO: 430863 - RNA, 19 nt, Homo sapiens
  misc_RNA (1)...(19): siRNA sense strand
cagcacuggagccucauua

SEQ ID NO: 430864 - RNA, 19 nt, Homo sapiens
  misc_RNA (1)...(19): siRNA sense strand
ggaacccaaugccaaccau

SEQ ID NO: 430865 - RNA, 19 nt, Homo sapiens
  misc_RNA (1)...(19): siRNA sense strand
ugaauacggguccaucaau

SEQ ID NO: 430866 - RNA, 19 nt, Homo sapiens
  misc_RNA (1)...(19): siRNA sense strand
acacguaccaccuggaugu

SEQ ID NO: 430867 - RNA, 19 nt, Homo sapiens
  misc_RNA (1)...(19): siRNA sense strand
ucugacaagggaaauuaua

SEQ ID NO: 430868 - RNA, 19 nt, Homo sapiens
  misc_RNA (1)...(19): siRNA sense strand
cauacuggaccaacacaga

SEQ ID NO: 430869 - RNA, 19 nt, Homo sapiens
  misc_RNA (1)...(19): siRNA sense strand
ccaacacugucaaguuucg

SEQ ID NO: 430870 - RNA, 19 nt, Homo sapiens
  misc_RNA (1)...(19): siRNA sense strand
gaggcuacaagguacgaaa

SEQ ID NO: 430871 - RNA, 19 nt, Homo sapiens
  misc_RNA (1)...(19): siRNA sense strand
cguaccaccuggauguugu

SEQ ID NO: 430872 - RNA, 19 nt, Homo sapiens
  misc_RNA (1)...(19): siRNA sense strand
ucaguuuaguugaggauac

SEQ ID NO: 430873 - RNA, 19 nt, Homo sapiens
  misc_RNA (1)...(19): siRNA sense strand
ggaaaguguggucccaucu

SEQ ID NO: 430874 - RNA, 19 nt, Homo sapiens
  misc_RNA (1)...(19): siRNA sense strand
uaguugaggauaccacauu

SEQ ID NO: 430875 - RNA, 19 nt, Homo sapiens
  misc_RNA (1)...(19): siRNA sense strand
gcuacaagguacgaaacca

SEQ ID NO: 430876 - RNA, 19 nt, Homo sapiens
  misc_RNA (1)...(19): siRNA sense strand
cacuggagccucauuaugg

SEQ ID NO: 430877 - RNA, 19 nt, Homo sapiens
  misc_RNA (1)...(19): siRNA sense strand
cggccaacacugucaaguu

SEQ ID NO: 430878 - RNA, 19 nt, Homo sapiens
  misc_RNA (1)...(19): siRNA sense strand
acuggagccucauuaugga

SEQ ID NO: 430879 - RNA, 19 nt, Homo sapiens
  misc_RNA (1)...(19): siRNA sense strand
uaagcaggagcaucgcauu

SEQ ID NO: 430880 - RNA, 19 nt, Homo sapiens
  misc_RNA (1)...(19): siRNA sense strand
ggagccucauuauggaaag

SEQ ID NO: 430881 - RNA, 19 nt, Homo sapiens
  misc_RNA (1)...(19): siRNA sense strand
ggccaacacugucaaguuu

SEQ ID NO: 430882 - RNA, 19 nt, Homo sapiens
  misc_RNA (1)...(19): siRNA sense strand
gaauacggguccaucaauc

SEQ ID NO: 430883 - RNA, 19 nt, Homo sapiens
  misc_RNA (1)...(19): siRNA sense strand
gcaggagcaucgcauugga

SEQ ID NO: 430884 - RNA, 19 nt, Homo sapiens
  misc_RNA (1)...(19): siRNA sense strand
caucugacaagggaaauua

SEQ ID NO: 430885 - RNA, 19 nt, Homo sapiens
  misc_RNA (1)...(19): siRNA sense strand
gcaccauacuggaccaaca

SEQ ID NO: 430886 - RNA, 19 nt, Homo sapiens
  misc_RNA (1)...(19): siRNA sense strand
gcacuggagccucauuaug

SEQ ID NO: 430887 - RNA, 19 nt, Homo sapiens
  misc_RNA (1)...(19): siRNA sense strand
aaaguguggucccaucuga

SEQ ID NO: 430888 - RNA, 19 nt, Homo sapiens
  misc_RNA (1)...(19): siRNA sense strand
cauuggaggcuacaaggua

SEQ ID NO: 430889 - RNA, 19 nt, Homo sapiens
  misc_RNA (1)...(19): siRNA sense strand
aguugaggauaccacauua

SEQ ID NO: 430890 - RNA, 19 nt, Homo sapiens
  misc_RNA (1)...(19): siRNA sense strand
gaaaguguggucccaucug

SEQ ID NO: 430891 - RNA, 19 nt, Homo sapiens
  misc_RNA (1)...(19): siRNA sense strand
cagcacuggagccucauua

SEQ ID NO: 430892 - RNA, 19 nt, Homo sapiens
  misc_RNA (1)...(19): siRNA sense strand
ggaacccaaugccaaccau

SEQ ID NO: 430893 - RNA, 19 nt, Homo sapiens
  misc_RNA (1)...(19): siRNA sense strand
ugaauacggguccaucaau

SEQ ID NO: 430894 - RNA, 19 nt, Homo sapiens
  misc_RNA (1)...(19): siRNA sense strand
acacguaccaccuggaugu

SEQ ID NO: 430895 - RNA, 19 nt, Homo sapiens
  misc_RNA (1)...(19): siRNA sense strand
ucugacaagggaaauuaua

SEQ ID NO: 430896 - RNA, 19 nt, Homo sapiens
  misc_RNA (1)...(19): siRNA sense strand
cauacuggaccaacacaga

SEQ ID NO: 430897 - RNA, 19 nt, Homo sapiens
  misc_RNA (1)...(19): siRNA sense strand
ccaacacugucaaguuucg

SEQ ID NO: 430898 - RNA, 19 nt, Homo sapiens
  misc_RNA (1)...(19): siRNA sense strand
gaggcuacaagguacgaaa

SEQ ID NO: 430899 - RNA, 19 nt, Homo sapiens
  misc_RNA (1)...(19): siRNA sense strand
cguaccaccuggauguugu

SEQ ID NO: 430900 - RNA, 19 nt, Homo sapiens
  misc_RNA (1)...(19): siRNA sense strand
ucaguuuaguugaggauac

SEQ ID NO: 430901 - RNA, 19 nt, Homo sapiens
  misc_RNA (1)...(19): siRNA sense strand
ggaaaguguggucccaucu

SEQ ID NO: 430902 - RNA, 19 nt, Homo sapiens
  misc_RNA (1)...(19): siRNA sense strand
uaguugaggauaccacauu

SEQ ID NO: 430903 - RNA, 19 nt, Homo sapiens
  misc_RNA (1)...(19): siRNA sense strand
gcuacaagguacgaaacca

SEQ ID NO: 430904 - RNA, 19 nt, Homo sapiens
  misc_RNA (1)...(19): siRNA sense strand
cacuggagccucauuaugg

SEQ ID NO: 430905 - RNA, 19 nt, Homo sapiens
  misc_RNA (1)...(19): siRNA sense strand
cggccaacacugucaaguu

SEQ ID NO: 430906 - RNA, 19 nt, Homo sapiens
  misc_RNA (1)...(19): siRNA sense strand
acuggagccucauuaugga

SEQ ID NO: 430907 - RNA, 19 nt, Homo sapiens
  misc_RNA (1)...(19): siRNA sense strand
uaagcaggagcaucgcauu

SEQ ID NO: 430908 - RNA, 19 nt, Homo sapiens
  misc_RNA (1)...(19): siRNA sense strand
ggagccucauuauggaaag

SEQ ID NO: 430909 - RNA, 19 nt, Homo sapiens
  misc_RNA (1)...(19): siRNA sense strand
ggccaacacugucaaguuu

SEQ ID NO: 430910 - RNA, 19 nt, Homo sapiens
  misc_RNA (1)...(19): siRNA sense strand
gaauacggguccaucaauc

SEQ ID NO: 430911 - RNA, 19 nt, Homo sapiens
  misc_RNA (1)...(19): siRNA sense strand
gcaggagcaucgcauugga

SEQ ID NO: 430912 - RNA, 19 nt, Homo sapiens
  misc_RNA (1)...(19): siRNA sense strand
caucugacaagggaaauua

SEQ ID NO: 430913 - RNA, 19 nt, Homo sapiens
  misc_RNA (1)...(19): siRNA sense strand
gcaccauacuggaccaaca

SEQ ID NO: 430914 - RNA, 19 nt, Homo sapiens
  misc_RNA (1)...(19): siRNA sense strand
gcacuggagccucauuaug

SEQ ID NO: 430915 - RNA, 19 nt, Homo sapiens
  misc_RNA (1)...(19): siRNA sense strand
aaaguguggucccaucuga

SEQ ID NO: 430916 - RNA, 19 nt, Homo sapiens
  misc_RNA (1)...(19): siRNA sense strand
cauuggaggcuacaaggua

SEQ ID NO: 430917 - RNA, 19 nt, Homo sapiens
  misc_RNA (1)...(19): siRNA sense strand
aguugaggauaccacauua

SEQ ID NO: 430918 - RNA, 19 nt, Homo sapiens
  misc_RNA (1)...(19): siRNA sense strand
gaaaguguggucccaucug

SEQ ID NO: 430919 - RNA, 19 nt, Homo sapiens
  misc_RNA (1)...(19): siRNA sense strand
cagcacuggagccucauua

SEQ ID NO: 430920 - RNA, 19 nt, Homo sapiens
  misc_RNA (1)...(19): siRNA sense strand
ggaacccaaugccaaccau

SEQ ID NO: 430921 - RNA, 19 nt, Homo sapiens
  misc_RNA (1)...(19): siRNA sense strand
ugaauacggguccaucaau

SEQ ID NO: 430922 - RNA, 19 nt, Homo sapiens
  misc_RNA (1)...(19): siRNA sense strand
acacguaccaccuggaugu

SEQ ID NO: 430923 - RNA, 19 nt, Homo sapiens
  misc_RNA (1)...(19): siRNA sense strand
ucugacaagggaaauuaua

SEQ ID NO: 430924 - RNA, 19 nt, Homo sapiens
  misc_RNA (1)...(19): siRNA sense strand
cauacuggaccaacacaga

SEQ ID NO: 430925 - RNA, 19 nt, Homo sapiens
  misc_RNA (1)...(19): siRNA sense strand
ccaacacugucaaguuucg

SEQ ID NO: 430926 - RNA, 19 nt, Homo sapiens
  misc_RNA (1)...(19): siRNA sense strand
gaggcuacaagguacgaaa

SEQ ID NO: 430927 - RNA, 19 nt, Homo sapiens
  misc_RNA (1)...(19): siRNA sense strand
cguaccaccuggauguugu

SEQ ID NO: 430928 - RNA, 19 nt, Homo sapiens
  misc_RNA (1)...(19): siRNA sense strand
ucaguuuaguugaggauac

SEQ ID NO: 430929 - RNA, 19 nt, Homo sapiens
  misc_RNA (1)...(19): siRNA sense strand
ggaaaguguggucccaucu

SEQ ID NO: 430930 - RNA, 19 nt, Homo sapiens
  misc_RNA (1)...(19): siRNA sense strand
uaguugaggauaccacauu

SEQ ID NO: 430931 - RNA, 19 nt, Homo sapiens
  misc_RNA (1)...(19): siRNA sense strand
gcuacaagguacgaaacca

SEQ ID NO: 430932 - RNA, 19 nt, Homo sapiens
  misc_RNA (1)...(19): siRNA sense strand
cacuggagccucauuaugg

SEQ ID NO: 430933 - RNA, 19 nt, Homo sapiens
  misc_RNA (1)...(19): siRNA sense strand
cggccaacacugucaaguu

SEQ ID NO: 430934 - RNA, 19 nt, Homo sapiens
  misc_RNA (1)...(19): siRNA sense strand
acuggagccucauuaugga

SEQ ID NO: 430935 - RNA, 19 nt, Homo sapiens
  misc_RNA (1)...(19): siRNA sense strand
uaagcaggagcaucgcauu

SEQ ID NO: 430936 - RNA, 19 nt, Homo sapiens
  misc_RNA (1)...(19): siRNA sense strand
ggagccucauuauggaaag

SEQ ID NO: 430937 - RNA, 19 nt, Homo sapiens
  misc_RNA (1)...(19): siRNA sense strand
ggccaacacugucaaguuu

SEQ ID NO: 430938 - RNA, 19 nt, Homo sapiens
  misc_RNA (1)...(19): siRNA sense strand
gaauacggguccaucaauc

SEQ ID NO: 430939 - RNA, 19 nt, Homo sapiens
  misc_RNA (1)...(19): siRNA sense strand
gcaggagcaucgcauugga

SEQ ID NO: 430940 - RNA, 19 nt, Homo sapiens
  misc_RNA (1)...(19): siRNA sense strand
caucugacaagggaaauua

SEQ ID NO: 430941 - RNA, 19 nt, Homo sapiens
  misc_RNA (1)...(19): siRNA sense strand
gcaccauacuggaccaaca

SEQ ID NO: 430942 - RNA, 19 nt, Homo sapiens
  misc_RNA (1)...(19): siRNA sense strand
gcacuggagccucauuaug

SEQ ID NO: 430943 - RNA, 19 nt, Homo sapiens
  misc_RNA (1)...(19): siRNA sense strand
aaaguguggucccaucuga

SEQ ID NO: 430944 - RNA, 19 nt, Homo sapiens
  misc_RNA (1)...(19): siRNA sense strand
cauuggaggcuacaaggua

SEQ ID NO: 430945 - RNA, 19 nt, Homo sapiens
  misc_RNA (1)...(19): siRNA sense strand
aguugaggauaccacauua

SEQ ID NO: 430946 - RNA, 19 nt, Homo sapiens
  misc_RNA (1)...(19): siRNA sense strand
gaaaguguggucccaucug

SEQ ID NO: 430947 - RNA, 19 nt, Homo sapiens
  misc_RNA (1)...(19): siRNA sense strand
cagcacuggagccucauua

SEQ ID NO: 430948 - RNA, 19 nt, Homo sapiens
  misc_RNA (1)...(19): siRNA sense strand
ggaacccaaugccaaccau

SEQ ID NO: 430949 - RNA, 19 nt, Homo sapiens
  misc_RNA (1)...(19): siRNA sense strand
ugaauacggguccaucaau

SEQ ID NO: 430950 - RNA, 19 nt, Homo sapiens
  misc_RNA (1)...(19): siRNA sense strand
acacguaccaccuggaugu

SEQ ID NO: 430951 - RNA, 19 nt, Homo sapiens
  misc_RNA (1)...(19): siRNA sense strand
ucugacaagggaaauuaua

SEQ ID NO: 430952 - RNA, 19 nt, Homo sapiens
  misc_RNA (1)...(19): siRNA sense strand
cauacuggaccaacacaga

SEQ ID NO: 430953 - RNA, 19 nt, Homo sapiens
  misc_RNA (1)...(19): siRNA sense strand
ccaacacugucaaguuucg

SEQ ID NO: 430954 - RNA, 19 nt, Homo sapiens
  misc_RNA (1)...(19): siRNA sense strand
gaggcuacaagguacgaaa

SEQ ID NO: 430955 - RNA, 19 nt, Homo sapiens
  misc_RNA (1)...(19): siRNA sense strand
cguaccaccuggauguugu

SEQ ID NO: 430956 - RNA, 19 nt, Homo sapiens
  misc_RNA (1)...(19): siRNA sense strand
ucaguuuaguugaggauac

SEQ ID NO: 430957 - RNA, 19 nt, Homo sapiens
  misc_RNA (1)...(19): siRNA sense strand
ggaaaguguggucccaucu

SEQ ID NO: 430958 - RNA, 19 nt, Homo sapiens
  misc_RNA (1)...(19): siRNA sense strand
uaguugaggauaccacauu

SEQ ID NO: 430959 - RNA, 19 nt, Homo sapiens
  misc_RNA (1)...(19): siRNA sense strand
gcuacaagguacgaaacca

SEQ ID NO: 430960 - RNA, 19 nt, Homo sapiens
  misc_RNA (1)...(19): siRNA sense strand
cacuggagccucauuaugg

SEQ ID NO: 430961 - RNA, 19 nt, Homo sapiens
  misc_RNA (1)...(19): siRNA sense strand
cggccaacacugucaaguu

SEQ ID NO: 430962 - RNA, 19 nt, Homo sapiens
  misc_RNA (1)...(19): siRNA sense strand
acuggagccucauuaugga

SEQ ID NO: 430963 - RNA, 19 nt, Homo sapiens
  misc_RNA (1)...(19): siRNA sense strand
uaagcaggagcaucgcauu

SEQ ID NO: 430964 - RNA, 19 nt, Homo sapiens
  misc_RNA (1)...(19): siRNA sense strand
ggagccucauuauggaaag

SEQ ID NO: 430965 - RNA, 19 nt, Homo sapiens
  misc_RNA (1)...(19): siRNA sense strand
ggccaacacugucaaguuu

SEQ ID NO: 430966 - RNA, 19 nt, Homo sapiens
  misc_RNA (1)...(19): siRNA sense strand
gaauacggguccaucaauc

SEQ ID NO: 430967 - RNA, 19 nt, Homo sapiens
  misc_RNA (1)...(19): siRNA sense strand
gcaggagcaucgcauugga

SEQ ID NO: 430968 - RNA, 19 nt, Homo sapiens
  misc_RNA (1)...(19): siRNA sense strand
caucugacaagggaaauua

SEQ ID NO: 430969 - RNA, 19 nt, Homo sapiens
  misc_RNA (1)...(19): siRNA sense strand
gcaccauacuggaccaaca

SEQ ID NO: 430970 - RNA, 19 nt, Homo sapiens
  misc_RNA (1)...(19): siRNA sense strand
gcacuggagccucauuaug

SEQ ID NO: 430971 - RNA, 19 nt, Homo sapiens
  misc_RNA (1)...(19): siRNA sense strand
aaaguguggucccaucuga

SEQ ID NO: 430972 - RNA, 19 nt, Homo sapiens
  misc_RNA (1)...(19): siRNA sense strand
cauuggaggcuacaaggua

SEQ ID NO: 430973 - RNA, 19 nt, Homo sapiens
  misc_RNA (1)...(19): siRNA sense strand
aguugaggauaccacauua

SEQ ID NO: 430974 - RNA, 19 nt, Homo sapiens
  misc_RNA (1)...(19): siRNA sense strand
gaaaguguggucccaucug

SEQ ID NO: 430975 - RNA, 19 nt, Homo sapiens
  misc_RNA (1)...(19): siRNA sense strand
cagcacuggagccucauua

SEQ ID NO: 430976 - RNA, 19 nt, Homo sapiens
  misc_RNA (1)...(19): siRNA sense strand
ggaacccaaugccaaccau

SEQ ID NO: 430977 - RNA, 19 nt, Homo sapiens
  misc_RNA (1)...(19): siRNA sense strand
ugaauacggguccaucaau

SEQ ID NO: 430978 - RNA, 19 nt, Homo sapiens
  misc_RNA (1)...(19): siRNA sense strand
acacguaccaccuggaugu

SEQ ID NO: 430979 - RNA, 19 nt, Homo sapiens
  misc_RNA (1)...(19): siRNA sense strand
ucugacaagggaaauuaua

SEQ ID NO: 430980 - RNA, 19 nt, Homo sapiens
  misc_RNA (1)...(19): siRNA sense strand
cauacuggaccaacacaga

SEQ ID NO: 430981 - RNA, 19 nt, Homo sapiens
  misc_RNA (1)...(19): siRNA sense strand
ccaacacugucaaguuucg

SEQ ID NO: 430982 - RNA, 19 nt, Homo sapiens
  misc_RNA (1)...(19): siRNA sense strand
gaggcuacaagguacgaaa

SEQ ID NO: 430983 - RNA, 19 nt, Homo sapiens
  misc_RNA (1)...(19): siRNA sense strand
cguaccaccuggauguugu

SEQ ID NO: 430984 - RNA, 19 nt, Homo sapiens
  misc_RNA (1)...(19): siRNA sense strand
ucaguuuaguugaggauac

SEQ ID NO: 430985 - RNA, 19 nt, Homo sapiens
  misc_RNA (1)...(19): siRNA sense strand
ggaaaguguggucccaucu

SEQ ID NO: 430986 - RNA, 19 nt, Homo sapiens
  misc_RNA (1)...(19): siRNA sense strand
uaguugaggauaccacauu

SEQ ID NO: 430987 - RNA, 19 nt, Homo sapiens
  misc_RNA (1)...(19): siRNA sense strand
gcuacaagguacgaaacca

SEQ ID NO: 430988 - RNA, 19 nt, Homo sapiens
  misc_RNA (1)...(19): siRNA sense strand
cacuggagccucauuaugg

SEQ ID NO: 430989 - RNA, 19 nt, Homo sapiens
  misc_RNA (1)...(19): siRNA sense strand
cggccaacacugucaaguu

SEQ ID NO: 430990 - RNA, 19 nt, Homo sapiens
  misc_RNA (1)...(19): siRNA sense strand
acuggagccucauuaugga

SEQ ID NO: 430991 - RNA, 19 nt, Homo sapiens
  misc_RNA (1)...(19): siRNA sense strand
uaagcaggagcaucgcauu

SEQ ID NO: 430992 - RNA, 19 nt, Homo sapiens
  misc_RNA (1)...(19): siRNA sense strand
ggagccucauuauggaaag

SEQ ID NO: 430993 - RNA, 19 nt, Homo sapiens
  misc_RNA (1)...(19): siRNA sense strand
ggccaacacugucaaguuu

SEQ ID NO: 430994 - RNA, 19 nt, Homo sapiens
  misc_RNA (1)...(19): siRNA sense strand
gaauacggguccaucaauc

SEQ ID NO: 430995 - RNA, 19 nt, Homo sapiens
  misc_RNA (1)...(19): siRNA sense strand
gcaggagcaucgcauugga

SEQ ID NO: 430996 - RNA, 19 nt, Homo sapiens
  misc_RNA (1)...(19): siRNA sense strand
caucugacaagggaaauua

SEQ ID NO: 430997 - RNA, 19 nt, Homo sapiens
  misc_RNA (1)...(19): siRNA sense strand
gcaccauacuggaccaaca

SEQ ID NO: 430998 - RNA, 19 nt, Homo sapiens
  misc_RNA (1)...(19): siRNA sense strand
gcacuggagccucauuaug

SEQ ID NO: 430999 - RNA, 19 nt, Homo sapiens
  misc_RNA (1)...(19): siRNA sense strand
aaaguguggucccaucuga

SEQ ID NO: 431000 - RNA, 19 nt, Homo sapiens
  misc_RNA (1)...(19): siRNA sense strand
cauuggaggcuacaaggua

SEQ ID NO: 431001 - RNA, 19 nt, Homo sapiens
  misc_RNA (1)...(19): siRNA sense strand
aguugaggauaccacauua

SEQ ID NO: 431002 - RNA, 19 nt, Homo sapiens
  misc_RNA (1)...(19): siRNA sense strand
gaaaguguggucccaucug

SEQ ID NO: 431003 - RNA, 19 nt, Homo sapiens
  misc_RNA (1)...(19): siRNA sense strand
cagcacuggagccucauua

SEQ ID NO: 431004 - RNA, 19 nt, Homo sapiens
  misc_RNA (1)...(19): siRNA sense strand
ggaacccaaugccaaccau

SEQ ID NO: 431005 - RNA, 19 nt, Homo sapiens
  misc_RNA (1)...(19): siRNA sense strand
ugaauacggguccaucaau

SEQ ID NO: 431006 - RNA, 19 nt, Homo sapiens
  misc_RNA (1)...(19): siRNA sense strand
acacguaccaccuggaugu

SEQ ID NO: 431007 - RNA, 19 nt, Homo sapiens
  misc_RNA (1)...(19): siRNA sense strand
ucugacaagggaaauuaua

SEQ ID NO: 431008 - RNA, 19 nt, Homo sapiens
  misc_RNA (1)...(19): siRNA sense strand
cauacuggaccaacacaga

SEQ ID NO: 431009 - RNA, 19 nt, Homo sapiens
  misc_RNA (1)...(19): siRNA sense strand
ccaacacugucaaguuucg

SEQ ID NO: 431010 - RNA, 19 nt, Homo sapiens
  misc_RNA (1)...(19): siRNA sense strand
gaggcuacaagguacgaaa

SEQ ID NO: 431011 - RNA, 19 nt, Homo sapiens
  misc_RNA (1)...(19): siRNA sense strand
cguaccaccuggauguugu

SEQ ID NO: 431012 - RNA, 19 nt, Homo sapiens
  misc_RNA (1)...(19): siRNA sense strand
ucaguuuaguugaggauac

SEQ ID NO: 431013 - RNA, 19 nt, Homo sapiens
  misc_RNA (1)...(19): siRNA sense strand
ggaaaguguggucccaucu

SEQ ID NO: 431014 - RNA, 19 nt, Homo sapiens
  misc_RNA (1)...(19): siRNA sense strand
uaguugaggauaccacauu

SEQ ID NO: 431015 - RNA, 19 nt, Homo sapiens
  misc_RNA (1)...(19): siRNA sense strand
gcuacaagguacgaaacca

SEQ ID NO: 431016 - RNA, 19 nt, Homo sapiens
  misc_RNA (1)...(19): siRNA sense strand
cacuggagccucauuaugg

SEQ ID NO: 431017 - RNA, 19 nt, Homo sapiens
  misc_RNA (1)...(19): siRNA sense strand
cggccaacacugucaaguu

SEQ ID NO: 431018 - RNA, 19 nt, Homo sapiens
  misc_RNA (1)...(19): siRNA sense strand
acuggagccucauuaugga

SEQ ID NO: 431019 - RNA, 19 nt, Homo sapiens
  misc_RNA (1)...(19): siRNA sense strand
uaagcaggagcaucgcauu

SEQ ID NO: 431020 - RNA, 19 nt, Homo sapiens
  misc_RNA (1)...(19): siRNA sense strand
ggagccucauuauggaaag

SEQ ID NO: 431021 - RNA, 19 nt, Homo sapiens
  misc_RNA (1)...(19): siRNA sense strand
ggccaacacugucaaguuu

SEQ ID NO: 431022 - RNA, 19 nt, Homo sapiens
  misc_RNA (1)...(19): siRNA sense strand
gaauacggguccaucaauc

SEQ ID NO: 431023 - RNA, 19 nt, Homo sapiens
  misc_RNA (1)...(19): siRNA sense strand
gcaggagcaucgcauugga

SEQ ID NO: 431024 - RNA, 19 nt, Homo sapiens
  misc_RNA (1)...(19): siRNA sense strand
caucugacaagggaaauua

SEQ ID NO: 431025 - RNA, 19 nt, Homo sapiens
  misc_RNA (1)...(19): siRNA sense strand
gcaccauacuggaccaaca

SEQ ID NO: 431026 - RNA, 19 nt, Homo sapiens
  misc_RNA (1)...(19): siRNA sense strand
gcacuggagccucauuaug

SEQ ID NO: 431027 - RNA, 19 nt, Homo sapiens
  misc_RNA (1)...(19): siRNA sense strand
aaaguguggucccaucuga

SEQ ID NO: 431028 - RNA, 19 nt, Homo sapiens
  misc_RNA (1)...(19): siRNA sense strand
cauuggaggcuacaaggua

SEQ ID NO: 431029 - RNA, 19 nt, Homo sapiens
  misc_RNA (1)...(19): siRNA sense strand
aguugaggauaccacauua

SEQ ID NO: 431030 - RNA, 19 nt, Homo sapiens
  misc_RNA (1)...(19): siRNA sense strand
gaaaguguggucccaucug

SEQ ID NO: 431031 - RNA, 19 nt, Homo sapiens
  misc_RNA (1)...(19): siRNA sense strand
cagcacuggagccucauua

SEQ ID NO: 431032 - RNA, 19 nt, Homo sapiens
  misc_RNA (1)...(19): siRNA sense strand
ggaacccaaugccaaccau

SEQ ID NO: 431033 - RNA, 19 nt, Homo sapiens
  misc_RNA (1)...(19): siRNA sense strand
ugaauacggguccaucaau

SEQ ID NO: 431034 - RNA, 19 nt, Homo sapiens
  misc_RNA (1)...(19): siRNA sense strand
acacguaccaccuggaugu

SEQ ID NO: 431035 - RNA, 19 nt, Homo sapiens
  misc_RNA (1)...(19): siRNA sense strand
ucugacaagggaaauuaua

SEQ ID NO: 431036 - RNA, 19 nt, Homo sapiens
  misc_RNA (1)...(19): siRNA sense strand
cauacuggaccaacacaga

SEQ ID NO: 431037 - RNA, 19 nt, Homo sapiens
  misc_RNA (1)...(19): siRNA sense strand
ccaacacugucaaguuucg

SEQ ID NO: 431038 - RNA, 19 nt, Homo sapiens
  misc_RNA (1)...(19): siRNA sense strand
gaggcuacaagguacgaaa

SEQ ID NO: 431039 - RNA, 19 nt, Homo sapiens
  misc_RNA (1)...(19): siRNA sense strand
cguaccaccuggauguugu

SEQ ID NO: 431040 - RNA, 19 nt, Homo sapiens
  misc_RNA (1)...(19): siRNA sense strand
ucaguuuaguugaggauac

SEQ ID NO: 431041 - RNA, 19 nt, Homo sapiens
  misc_RNA (1)...(19): siRNA sense strand
ggaaaguguggucccaucu

SEQ ID NO: 431042 - RNA, 19 nt, Homo sapiens
  misc_RNA (1)...(19): siRNA sense strand
uaguugaggauaccacauu

SEQ ID NO: 431043 - RNA, 19 nt, Homo sapiens
  misc_RNA (1)...(19): siRNA sense strand
gcuacaagguacgaaacca

SEQ ID NO: 431044 - RNA, 19 nt, Homo sapiens
  misc_RNA (1)...(19): siRNA sense strand
cacuggagccucauuaugg

SEQ ID NO: 431045 - RNA, 19 nt, Homo sapiens
  misc_RNA (1)...(19): siRNA sense strand
cggccaacacugucaaguu

SEQ ID NO: 431046 - RNA, 19 nt, Homo sapiens
  misc_RNA (1)...(19): siRNA sense strand
acuggagccucauuaugga

SEQ ID NO: 431047 - RNA, 19 nt, Homo sapiens
  misc_RNA (1)...(19): siRNA sense strand
uaagcaggagcaucgcauu

SEQ ID NO: 431048 - RNA, 19 nt, Homo sapiens
  misc_RNA (1)...(19): siRNA sense strand
ggagccucauuauggaaag

SEQ ID NO: 431049 - RNA, 19 nt, Homo sapiens
  misc_RNA (1)...(19): siRNA sense strand
ggccaacacugucaaguuu

SEQ ID NO: 431050 - RNA, 19 nt, Homo sapiens
  misc_RNA (1)...(19): siRNA sense strand
gaauacggguccaucaauc

SEQ ID NO: 431051 - RNA, 19 nt, Homo sapiens
  misc_RNA (1)...(19): siRNA sense strand
gcaggagcaucgcauugga

SEQ ID NO: 431052 - RNA, 19 nt, Homo sapiens
  misc_RNA (1)...(19): siRNA sense strand
caucugacaagggaaauua

SEQ ID NO: 431053 - RNA, 19 nt, Homo sapiens
  misc_RNA (1)...(19): siRNA sense strand
gcaccauacuggaccaaca

SEQ ID NO: 431054 - RNA, 19 nt, Homo sapiens
  misc_RNA (1)...(19): siRNA sense strand
gcacuggagccucauuaug

SEQ ID NO: 431055 - RNA, 19 nt, Homo sapiens
  misc_RNA (1)...(19): siRNA sense strand
aaaguguggucccaucuga

SEQ ID NO: 431056 - RNA, 19 nt, Homo sapiens
  misc_RNA (1)...(19): siRNA sense strand
cauuggaggcuacaaggua

SEQ ID NO: 431057 - RNA, 19 nt, Homo sapiens
  misc_RNA (1)...(19): siRNA sense strand
aguugaggauaccacauua

SEQ ID NO: 431058 - RNA, 19 nt, Homo sapiens
  misc_RNA (1)...(19): siRNA sense strand
gaaaguguggucccaucug

SEQ ID NO: 431059 - RNA, 19 nt, Homo sapiens
  misc_RNA (1)...(19): siRNA sense strand
cagcacuggagccucauua

SEQ ID NO: 431060 - RNA, 19 nt, Homo sapiens
  misc_RNA (1)...(19): siRNA sense strand
ggaacccaaugccaaccau

SEQ ID NO: 431061 - RNA, 19 nt, Homo sapiens
  misc_RNA (1)...(19): siRNA sense strand
ugaauacggguccaucaau

SEQ ID NO: 431062 - RNA, 19 nt, Homo sapiens
  misc_RNA (1)...(19): siRNA sense strand
acacguaccaccuggaugu

SEQ ID NO: 431063 - RNA, 19 nt, Homo sapiens
  misc_RNA (1)...(19): siRNA sense strand
ucugacaagggaaauuaua

SEQ ID NO: 431064 - RNA, 19 nt, Homo sapiens
  misc_RNA (1)...(19): siRNA sense strand
cauacuggaccaacacaga

SEQ ID NO: 431065 - RNA, 19 nt, Homo sapiens
  misc_RNA (1)...(19): siRNA sense strand
ccaacacugucaaguuucg

SEQ ID NO: 431066 - RNA, 19 nt, Homo sapiens
  misc_RNA (1)...(19): siRNA sense strand
gaggcuacaagguacgaaa

SEQ ID NO: 431067 - RNA, 19 nt, Homo sapiens
  misc_RNA (1)...(19): siRNA sense strand
cguaccaccuggauguugu

SEQ ID NO: 431068 - RNA, 19 nt, Homo sapiens
  misc_RNA (1)...(19): siRNA sense strand
ucaguuuaguugaggauac

SEQ ID NO: 431069 - RNA, 19 nt, Homo sapiens
  misc_RNA (1)...(19): siRNA sense strand
ggaaaguguggucccaucu

SEQ ID NO: 431070 - RNA, 19 nt, Homo sapiens
  misc_RNA (1)...(19): siRNA sense strand
uaguugaggauaccacauu

SEQ ID NO: 431071 - RNA, 19 nt, Homo sapiens
  misc_RNA (1)...(19): siRNA sense strand
gcuacaagguacgaaacca

SEQ ID NO: 431072 - RNA, 19 nt, Homo sapiens
  misc_RNA (1)...(19): siRNA sense strand
cacuggagccucauuaugg

SEQ ID NO: 431073 - RNA, 19 nt, Homo sapiens
  misc_RNA (1)...(19): siRNA sense strand
cggccaacacugucaaguu

SEQ ID NO: 431074 - RNA, 19 nt, Homo sapiens
  misc_RNA (1)...(19): siRNA sense strand
acuggagccucauuaugga

SEQ ID NO: 431075 - RNA, 19 nt, Homo sapiens
  misc_RNA (1)...(19): siRNA sense strand
uaagcaggagcaucgcauu

SEQ ID NO: 431076 - RNA, 19 nt, Homo sapiens
  misc_RNA (1)...(19): siRNA sense strand
ggagccucauuauggaaag

SEQ ID NO: 431077 - RNA, 19 nt, Homo sapiens
  misc_RNA (1)...(19): siRNA sense strand
ggccaacacugucaaguuu

SEQ ID NO: 431078 - RNA, 19 nt, Homo sapiens
  misc_RNA (1)...(19): siRNA sense strand
gaauacggguccaucaauc

SEQ ID NO: 431079 - RNA, 19 nt, Homo sapiens
  misc_RNA (1)...(19): siRNA sense strand
gcaggagcaucgcauugga

SEQ ID NO: 431080 - RNA, 19 nt, Homo sapiens
  misc_RNA (1)...(19): siRNA sense strand
caucugacaagggaaauua

SEQ ID NO: 431081 - RNA, 19 nt, Homo sapiens
  misc_RNA (1)...(19): siRNA sense strand
gcaccauacuggaccaaca

SEQ ID NO: 431082 - RNA, 19 nt, Homo sapiens
  misc_RNA (1)...(19): siRNA sense strand
gcacuggagccucauuaug

SEQ ID NO: 431083 - RNA, 19 nt, Homo sapiens
  misc_RNA (1)...(19): siRNA sense strand
aaaguguggucccaucuga

SEQ ID NO: 431084 - RNA, 19 nt, Homo sapiens
  misc_RNA (1)...(19): siRNA sense strand
cauuggaggcuacaaggua

SEQ ID NO: 431085 - RNA, 19 nt, Homo sapiens
  misc_RNA (1)...(19): siRNA sense strand
aguugaggauaccacauua

SEQ ID NO: 431086 - RNA, 19 nt, Homo sapiens
  misc_RNA (1)...(19): siRNA sense strand
gaaaguguggucccaucug

SEQ ID NO: 431087 - RNA, 19 nt, Homo sapiens
  misc_RNA (1)...(19): siRNA sense strand
cagcacuggagccucauua

SEQ ID NO: 431088 - RNA, 19 nt, Homo sapiens
  misc_RNA (1)...(19): siRNA sense strand
ggaacccaaugccaaccau

SEQ ID NO: 431089 - RNA, 19 nt, Homo sapiens
  misc_RNA (1)...(19): siRNA sense strand
ugaauacggguccaucaau

SEQ ID NO: 431090 - RNA, 19 nt, Homo sapiens
  misc_RNA (1)...(19): siRNA sense strand
acacguaccaccuggaugu

SEQ ID NO: 431091 - RNA, 19 nt, Homo sapiens
  misc_RNA (1)...(19): siRNA sense strand
ucugacaagggaaauuaua

SEQ ID NO: 431092 - RNA, 19 nt, Homo sapiens
  misc_RNA (1)...(19): siRNA sense strand
cauacuggaccaacacaga

SEQ ID NO: 431093 - RNA, 19 nt, Homo sapiens
  misc_RNA (1)...(19): siRNA sense strand
ccaacacugucaaguuucg

SEQ ID NO: 431094 - RNA, 19 nt, Homo sapiens
  misc_RNA (1)...(19): siRNA sense strand
gaggcuacaagguacgaaa

SEQ ID NO: 431095 - RNA, 19 nt, Homo sapiens
  misc_RNA (1)...(19): siRNA sense strand
cguaccaccuggauguugu

SEQ ID NO: 431096 - RNA, 19 nt, Homo sapiens
  misc_RNA (1)...(19): siRNA sense strand
ucaguuuaguugaggauac

SEQ ID NO: 431097 - RNA, 19 nt, Homo sapiens
  misc_RNA (1)...(19): siRNA sense strand
ggaaaguguggucccaucu

SEQ ID NO: 431098 - RNA, 19 nt, Homo sapiens
  misc_RNA (1)...(19): siRNA sense strand
uaguugaggauaccacauu

SEQ ID NO: 431099 - RNA, 19 nt, Homo sapiens
  misc_RNA (1)...(19): siRNA sense strand
gcuacaagguacgaaacca

SEQ ID NO: 431100 - RNA, 19 nt, Homo sapiens
  misc_RNA (1)...(19): siRNA sense strand
cacuggagccucauuaugg

SEQ ID NO: 431101 - RNA, 19 nt, Homo sapiens
  misc_RNA (1)...(19): siRNA sense strand
cggccaacacugucaaguu

SEQ ID NO: 431102 - RNA, 19 nt, Homo sapiens
  misc_RNA (1)...(19): siRNA sense strand
acuggagccucauuaugga

SEQ ID NO: 431103 - RNA, 19 nt, Homo sapiens
  misc_RNA (1)...(19): siRNA sense strand
uaagcaggagcaucgcauu

SEQ ID NO: 431104 - RNA, 19 nt, Homo sapiens
  misc_RNA (1)...(19): siRNA sense strand
ggagccucauuauggaaag

SEQ ID NO: 431105 - RNA, 19 nt, Homo sapiens
  misc_RNA (1)...(19): siRNA sense strand
ggccaacacugucaaguuu

SEQ ID NO: 431106 - RNA, 19 nt, Homo sapiens
  misc_RNA (1)...(19): siRNA sense strand
gaauacggguccaucaauc

SEQ ID NO: 431107 - RNA, 19 nt, Homo sapiens
  misc_RNA (1)...(19): siRNA sense strand
gcaggagcaucgcauugga

SEQ ID NO: 431108 - RNA, 19 nt, Homo sapiens
  misc_RNA (1)...(19): siRNA sense strand
caucugacaagggaaauua

SEQ ID NO: 431109 - RNA, 19 nt, Homo sapiens
  misc_RNA (1)...(19): siRNA sense strand
gcaccauacuggaccaaca

SEQ ID NO: 431110 - RNA, 19 nt, Homo sapiens
  misc_RNA (1)...(19): siRNA sense strand
gcacuggagccucauuaug

SEQ ID NO: 431111 - RNA, 19 nt, Homo sapiens
  misc_RNA (1)...(19): siRNA sense strand
aaaguguggucccaucuga

SEQ ID NO: 431112 - RNA, 19 nt, Homo sapiens
  misc_RNA (1)...(19): siRNA sense strand
cauuggaggcuacaaggua

SEQ ID NO: 431113 - RNA, 19 nt, Homo sapiens
  misc_RNA (1)...(19): siRNA sense strand
aguugaggauaccacauua

SEQ ID NO: 431114 - RNA, 19 nt, Homo sapiens
  misc_RNA (1)...(19): siRNA sense strand
gaaaguguggucccaucug

SEQ ID NO: 431115 - RNA, 19 nt, Homo sapiens
  misc_RNA (1)...(19): siRNA sense strand
cagcacuggagccucauua

SEQ ID NO: 431116 - RNA, 19 nt, Homo sapiens
  misc_RNA (1)...(19): siRNA sense strand
ggaacccaaugccaaccau

SEQ ID NO: 431117 - RNA, 19 nt, Homo sapiens
  misc_RNA (1)...(19): siRNA sense strand
ugaauacggguccaucaau

SEQ ID NO: 431118 - RNA, 19 nt, Homo sapiens
  misc_RNA (1)...(19): siRNA sense strand
acacguaccaccuggaugu

SEQ ID NO: 431119 - RNA, 19 nt, Homo sapiens
  misc_RNA (1)...(19): siRNA sense strand
ucugacaagggaaauuaua

SEQ ID NO: 431120 - RNA, 19 nt, Homo sapiens
  misc_RNA (1)...(19): siRNA sense strand
cauacuggaccaacacaga

SEQ ID NO: 431121 - RNA, 19 nt, Homo sapiens
  misc_RNA (1)...(19): siRNA sense strand
ccaacacugucaaguuucg

SEQ ID NO: 431122 - RNA, 19 nt, Homo sapiens
  misc_RNA (1)...(19): siRNA sense strand
gaggcuacaagguacgaaa

SEQ ID NO: 431123 - RNA, 19 nt, Homo sapiens
  misc_RNA (1)...(19): siRNA sense strand
cguaccaccuggauguugu

SEQ ID NO: 431124 - RNA, 19 nt, Homo sapiens
  misc_RNA (1)...(19): siRNA sense strand
ucaguuuaguugaggauac

SEQ ID NO: 431125 - RNA, 19 nt, Homo sapiens
  misc_RNA (1)...(19): siRNA sense strand
ggaaaguguggucccaucu

SEQ ID NO: 431126 - RNA, 19 nt, Homo sapiens
  misc_RNA (1)...(19): siRNA sense strand
uaguugaggauaccacauu

SEQ ID NO: 431127 - RNA, 19 nt, Homo sapiens
  misc_RNA (1)...(19): siRNA sense strand
gcuacaagguacgaaacca

SEQ ID NO: 431128 - RNA, 19 nt, Homo sapiens
  misc_RNA (1)...(19): siRNA sense strand
cacuggagccucauuaugg

SEQ ID NO: 431129 - RNA, 19 nt, Homo sapiens
  misc_RNA (1)...(19): siRNA sense strand
cggccaacacugucaaguu

SEQ ID NO: 431130 - RNA, 19 nt, Homo sapiens
  misc_RNA (1)...(19): siRNA sense strand
acuggagccucauuaugga

SEQ ID NO: 431131 - RNA, 19 nt, Homo sapiens
  misc_RNA (1)...(19): siRNA sense strand
uaagcaggagcaucgcauu

SEQ ID NO: 431132 - RNA, 19 nt, Homo sapiens
  misc_RNA (1)...(19): siRNA sense strand
ggagccucauuauggaaag

SEQ ID NO: 431133 - RNA, 19 nt, Homo sapiens
  misc_RNA (1)...(19): siRNA sense strand
ggccaacacugucaaguuu

SEQ ID NO: 431134 - RNA, 19 nt, Homo sapiens
  misc_RNA (1)...(19): siRNA sense strand
gaauacggguccaucaauc

SEQ ID NO: 431135 - RNA, 19 nt, Homo sapiens
  misc_RNA (1)...(19): siRNA sense strand
gcaggagcaucgcauugga

SEQ ID NO: 431136 - RNA, 19 nt, Homo sapiens
  misc_RNA (1)...(19): siRNA sense strand
caucugacaagggaaauua

SEQ ID NO: 431137 - RNA, 19 nt, Homo sapiens
  misc_RNA (1)...(19): siRNA sense strand
gcaccauacuggaccaaca

SEQ ID NO: 431138 - RNA, 19 nt, Homo sapiens
  misc_RNA (1)...(19): siRNA sense strand
gcacuggagccucauuaug

SEQ ID NO: 431139 - RNA, 19 nt, Homo sapiens
  misc_RNA (1)...(19): siRNA sense strand
aaaguguggucccaucuga

SEQ ID NO: 431140 - RNA, 19 nt, Homo sapiens
  misc_RNA (1)...(19): siRNA sense strand
cauuggaggcuacaaggua

SEQ ID NO: 431141 - RNA, 19 nt, Homo sapiens
  misc_RNA (1)...(19): siRNA sense strand
aguugaggauaccacauua

SEQ ID NO: 431142 - RNA, 19 nt, Homo sapiens
  misc_RNA (1)...(19): siRNA sense strand
gaaaguguggucccaucug

SEQ ID NO: 431143 - RNA, 19 nt, Homo sapiens
  misc_RNA (1)...(19): siRNA sense strand
cagcacuggagccucauua

SEQ ID NO: 431144 - RNA, 19 nt, Homo sapiens
  misc_RNA (1)...(19): siRNA sense strand
ggaacccaaugccaaccau

SEQ ID NO: 431145 - RNA, 19 nt, Homo sapiens
  misc_RNA (1)...(19): siRNA sense strand
ugaauacggguccaucaau

SEQ ID NO: 431146 - RNA, 19 nt, Homo sapiens
  misc_RNA (1)...(19): siRNA sense strand
acacguaccaccuggaugu

SEQ ID NO: 431147 - RNA, 19 nt, Homo sapiens
  misc_RNA (1)...(19): siRNA sense strand
ucugacaagggaaauuaua

SEQ ID NO: 431148 - RNA, 19 nt, Homo sapiens
  misc_RNA (1)...(19): siRNA sense strand
cauacuggaccaacacaga

SEQ ID NO: 431149 - RNA, 19 nt, Homo sapiens
  misc_RNA (1)...(19): siRNA sense strand
ccaacacugucaaguuucg

SEQ ID NO: 431150 - RNA, 19 nt, Homo sapiens
  misc_RNA (1)...(19): siRNA sense strand
gaggcuacaagguacgaaa

SEQ ID NO: 431151 - RNA, 19 nt, Homo sapiens
  misc_RNA (1)...(19): siRNA sense strand
cguaccaccuggauguugu

SEQ ID NO: 431152 - RNA, 19 nt, Homo sapiens
  misc_RNA (1)...(19): siRNA sense strand
ucaguuuaguugaggauac

SEQ ID NO: 431153 - RNA, 19 nt, Homo sapiens
  misc_RNA (1)...(19): siRNA sense strand
ggaaaguguggucccaucu

SEQ ID NO: 431154 - RNA, 19 nt, Homo sapiens
  misc_RNA (1)...(19): siRNA sense strand
uaguugaggauaccacauu

SEQ ID NO: 431155 - RNA, 19 nt, Homo sapiens
  misc_RNA (1)...(19): siRNA sense strand
gcuacaagguacgaaacca

SEQ ID NO: 431156 - RNA, 19 nt, Homo sapiens
  misc_RNA (1)...(19): siRNA sense strand
cacuggagccucauuaugg

SEQ ID NO: 431157 - RNA, 19 nt, Homo sapiens
  misc_RNA (1)...(19): siRNA sense strand
cggccaacacugucaaguu

SEQ ID NO: 431158 - RNA, 19 nt, Homo sapiens
  misc_RNA (1)...(19): siRNA sense strand
acuggagccucauuaugga

SEQ ID NO: 431159 - RNA, 19 nt, Homo sapiens
  misc_RNA (1)...(19): siRNA sense strand
uaagcaggagcaucgcauu

SEQ ID NO: 431160 - RNA, 19 nt, Homo sapiens
  misc_RNA (1)...(19): siRNA sense strand
ggagccucauuauggaaag

SEQ ID NO: 431161 - RNA, 19 nt, Homo sapiens
  misc_RNA (1)...(19): siRNA sense strand
ggccaacacugucaaguuu

SEQ ID NO: 431162 - RNA, 19 nt, Homo sapiens
  misc_RNA (1)...(19): siRNA sense strand
gaauacggguccaucaauc

SEQ ID NO: 431163 - RNA, 19 nt, Homo sapiens
  misc_RNA (1)...(19): siRNA sense strand
gcaggagcaucgcauugga

SEQ ID NO: 431164 - RNA, 19 nt, Homo sapiens
  misc_RNA (1)...(19): siRNA sense strand
caucugacaagggaaauua

SEQ ID NO: 431165 - RNA, 19 nt, Homo sapiens
  misc_RNA (1)...(19): siRNA sense strand
gcaccauacuggaccaaca

SEQ ID NO: 431166 - RNA, 19 nt, Homo sapiens
  misc_RNA (1)...(19): siRNA sense strand
gcacuggagccucauuaug

SEQ ID NO: 431167 - RNA, 19 nt, Homo sapiens
  misc_RNA (1)...(19): siRNA sense strand
aaaguguggucccaucuga

SEQ ID NO: 431168 - RNA, 19 nt, Homo sapiens
  misc_RNA (1)...(19): siRNA sense strand
cauuggaggcuacaaggua

SEQ ID NO: 431169 - RNA, 19 nt, Homo sapiens
  misc_RNA (1)...(19): siRNA sense strand
aguugaggauaccacauua

SEQ ID NO: 431170 - RNA, 19 nt, Homo sapiens
  misc_RNA (1)...(19): siRNA sense strand
gaaaguguggucccaucug

SEQ ID NO: 431171 - RNA, 19 nt, Homo sapiens
  misc_RNA (1)...(19): siRNA sense strand
cagcacuggagccucauua

SEQ ID NO: 431172 - RNA, 19 nt, Homo sapiens
  misc_RNA (1)...(19): siRNA sense strand
ggaacccaaugccaaccau

SEQ ID NO: 431173 - RNA, 19 nt, Homo sapiens
  misc_RNA (1)...(19): siRNA sense strand
ugaauacggguccaucaau

SEQ ID NO: 431174 - RNA, 19 nt, Homo sapiens
  misc_RNA (1)...(19): siRNA sense strand
acacguaccaccuggaugu

SEQ ID NO: 431175 - RNA, 19 nt, Homo sapiens
  misc_RNA (1)...(19): siRNA sense strand
ucugacaagggaaauuaua

SEQ ID NO: 431176 - RNA, 19 nt, Homo sapiens
  misc_RNA (1)...(19): siRNA sense strand
cauacuggaccaacacaga

SEQ ID NO: 431177 - RNA, 19 nt, Homo sapiens
  misc_RNA (1)...(19): siRNA sense strand
ccaacacugucaaguuucg

SEQ ID NO: 431178 - RNA, 19 nt, Homo sapiens
  misc_RNA (1)...(19): siRNA sense strand
gaggcuacaagguacgaaa

SEQ ID NO: 431179 - RNA, 19 nt, Homo sapiens
  misc_RNA (1)...(19): siRNA sense strand
cguaccaccuggauguugu

SEQ ID NO: 431180 - RNA, 19 nt, Homo sapiens
  misc_RNA (1)...(19): siRNA sense strand
ucaguuuaguugaggauac

SEQ ID NO: 431181 - RNA, 19 nt, Homo sapiens
  misc_RNA (1)...(19): siRNA sense strand
ggaaaguguggucccaucu

SEQ ID NO: 431182 - RNA, 19 nt, Homo sapiens
  misc_RNA (1)...(19): siRNA sense strand
uaguugaggauaccacauu

SEQ ID NO: 431183 - RNA, 19 nt, Homo sapiens
  misc_RNA (1)...(19): siRNA sense strand
gcuacaagguacgaaacca

SEQ ID NO: 431184 - RNA, 19 nt, Homo sapiens
  misc_RNA (1)...(19): siRNA sense strand
cacuggagccucauuaugg

SEQ ID NO: 431185 - RNA, 19 nt, Homo sapiens
  misc_RNA (1)...(19): siRNA sense strand
cggccaacacugucaaguu

SEQ ID NO: 431186 - RNA, 19 nt, Homo sapiens
  misc_RNA (1)...(19): siRNA sense strand
acuggagccucauuaugga

SEQ ID NO: 431187 - RNA, 19 nt, Homo sapiens
  misc_RNA (1)...(19): siRNA sense strand
uaagcaggagcaucgcauu

SEQ ID NO: 431188 - RNA, 19 nt, Homo sapiens
  misc_RNA (1)...(19): siRNA sense strand
ggagccucauuauggaaag

SEQ ID NO: 431189 - RNA, 19 nt, Homo sapiens
  misc_RNA (1)...(19): siRNA sense strand
ggccaacacugucaaguuu

SEQ ID NO: 431190 - RNA, 19 nt, Homo sapiens
  misc_RNA (1)...(19): siRNA sense strand
gaauacggguccaucaauc

SEQ ID NO: 431191 - RNA, 19 nt, Homo sapiens
  misc_RNA (1)...(19): siRNA sense strand
gcaggagcaucgcauugga

SEQ ID NO: 431192 - RNA, 19 nt, Homo sapiens
  misc_RNA (1)...(19): siRNA sense strand
caucugacaagggaaauua

SEQ ID NO: 431193 - RNA, 19 nt, Homo sapiens
  misc_RNA (1)...(19): siRNA sense strand
gcaccauacuggaccaaca

SEQ ID NO: 431194 - RNA, 19 nt, Homo sapiens
  misc_RNA (1)...(19): siRNA sense strand
gcacuggagccucauuaug

SEQ ID NO: 431195 - RNA, 19 nt, Homo sapiens
  misc_RNA (1)...(19): siRNA sense strand
aaaguguggucccaucuga

SEQ ID NO: 431196 - RNA, 19 nt, Homo sapiens
  misc_RNA (1)...(19): siRNA sense strand
cauuggaggcuacaaggua

SEQ ID NO: 431197 - RNA, 19 nt, Homo sapiens
  misc_RNA (1)...(19): siRNA sense strand
aguugaggauaccacauua

SEQ ID NO: 431198 - RNA, 19 nt, Homo sapiens
  misc_RNA (1)...(19): siRNA sense strand
gaaaguguggucccaucug

SEQ ID NO: 431199 - RNA, 19 nt, Homo sapiens
  misc_RNA (1)...(19): siRNA sense strand
cagcacuggagccucauua

SEQ ID NO: 431200 - RNA, 19 nt, Homo sapiens
  misc_RNA (1)...(19): siRNA sense strand
ggaacccaaugccaaccau

SEQ ID NO: 431201 - RNA, 19 nt, Homo sapiens
  misc_RNA (1)...(19): siRNA sense strand
ugaauacggguccaucaau

SEQ ID NO: 431202 - RNA, 19 nt, Homo sapiens
  misc_RNA (1)...(19): siRNA sense strand
acacguaccaccuggaugu

SEQ ID NO: 431203 - RNA, 19 nt, Homo sapiens
  misc_RNA (1)...(19): siRNA sense strand
ucugacaagggaaauuaua

SEQ ID NO: 431204 - RNA, 19 nt, Homo sapiens
  misc_RNA (1)...(19): siRNA sense strand
cauacuggaccaacacaga

SEQ ID NO: 431205 - RNA, 19 nt, Homo sapiens
  misc_RNA (1)...(19): siRNA sense strand
ccaacacugucaaguuucg

SEQ ID NO: 431206 - RNA, 19 nt, Homo sapiens
  misc_RNA (1)...(19): siRNA sense strand
gaggcuacaagguacgaaa

SEQ ID NO: 431207 - RNA, 19 nt, Homo sapiens
  misc_RNA (1)...(19): siRNA sense strand
cguaccaccuggauguugu

SEQ ID NO: 431208 - RNA, 19 nt, Homo sapiens
  misc_RNA (1)...(19): siRNA sense strand
ucaguuuaguugaggauac

SEQ ID NO: 431209 - RNA, 19 nt, Homo sapiens
  misc_RNA (1)...(19): siRNA sense strand
ggaaaguguggucccaucu

SEQ ID NO: 431210 - RNA, 19 nt, Homo sapiens
  misc_RNA (1)...(19): siRNA sense strand
uaguugaggauaccacauu

SEQ ID NO: 431211 - RNA, 19 nt, Homo sapiens
  misc_RNA (1)...(19): siRNA sense strand
gcuacaagguacgaaacca

SEQ ID NO: 431212 - RNA, 19 nt, Homo sapiens
  misc_RNA (1)...(19): siRNA sense strand
cacuggagccucauuaugg

SEQ ID NO: 431213 - RNA, 19 nt, Homo sapiens
  misc_RNA (1)...(19): siRNA sense strand
cggccaacacugucaaguu

SEQ ID NO: 431214 - RNA, 19 nt, Homo sapiens
  misc_RNA (1)...(19): siRNA sense strand
acuggagccucauuaugga

SEQ ID NO: 431215 - RNA, 19 nt, Homo sapiens
  misc_RNA (1)...(19): siRNA sense strand
uaagcaggagcaucgcauu

SEQ ID NO: 431216 - RNA, 19 nt, Homo sapiens
  misc_RNA (1)...(19): siRNA sense strand
ggagccucauuauggaaag

SEQ ID NO: 431217 - RNA, 19 nt, Homo sapiens
  misc_RNA (1)...(19): siRNA sense strand
ggccaacacugucaaguuu

SEQ ID NO: 431218 - RNA, 19 nt, Homo sapiens
  misc_RNA (1)...(19): siRNA sense strand
gaauacggguccaucaauc

SEQ ID NO: 431219 - RNA, 19 nt, Homo sapiens
  misc_RNA (1)...(19): siRNA sense strand
gcaggagcaucgcauugga

SEQ ID NO: 431220 - RNA, 19 nt, Homo sapiens
  misc_RNA (1)...(19): siRNA sense strand
caucugacaagggaaauua

SEQ ID NO: 431221 - RNA, 19 nt, Homo sapiens
  misc_RNA (1)...(19): siRNA sense strand
gcaccauacuggaccaaca

SEQ ID NO: 431222 - RNA, 19 nt, Homo sapiens
  misc_RNA (1)...(19): siRNA sense strand
gcacuggagccucauuaug

SEQ ID NO: 431223 - RNA, 19 nt, Homo sapiens
  misc_RNA (1)...(19): siRNA sense strand
aaaguguggucccaucuga

SEQ ID NO: 431224 - RNA, 19 nt, Homo sapiens
  misc_RNA (1)...(19): siRNA sense strand
cauuggaggcuacaaggua

SEQ ID NO: 431225 - RNA, 19 nt, Homo sapiens
  misc_RNA (1)...(19): siRNA sense strand
aguugaggauaccacauua

SEQ ID NO: 431226 - RNA, 19 nt, Homo sapiens
  misc_RNA (1)...(19): siRNA sense strand
gaaaguguggucccaucug

SEQ ID NO: 431227 - RNA, 19 nt, Homo sapiens
  misc_RNA (1)...(19): siRNA sense strand
cagcacuggagccucauua

SEQ ID NO: 431228 - RNA, 19 nt, Homo sapiens
  misc_RNA (1)...(19): siRNA sense strand
ggaacccaaugccaaccau

SEQ ID NO: 431229 - RNA, 19 nt, Homo sapiens
  misc_RNA (1)...(19): siRNA sense strand
ugaauacggguccaucaau

SEQ ID NO: 431230 - RNA, 19 nt, Homo sapiens
  misc_RNA (1)...(19): siRNA sense strand
acacguaccaccuggaugu

SEQ ID NO: 431231 - RNA, 19 nt, Homo sapiens
  misc_RNA (1)...(19): siRNA sense strand
ucugacaagggaaauuaua

SEQ ID NO: 431232 - RNA, 19 nt, Homo sapiens
  misc_RNA (1)...(19): siRNA sense strand
cauacuggaccaacacaga

SEQ ID NO: 431233 - RNA, 19 nt, Homo sapiens
  misc_RNA (1)...(19): siRNA sense strand
ccaacacugucaaguuucg

SEQ ID NO: 431234 - RNA, 19 nt, Homo sapiens
  misc_RNA (1)...(19): siRNA sense strand
gaggcuacaagguacgaaa

SEQ ID NO: 431235 - RNA, 19 nt, Homo sapiens
  misc_RNA (1)...(19): siRNA sense strand
cguaccaccuggauguugu

SEQ ID NO: 431236 - RNA, 19 nt, Homo sapiens
  misc_RNA (1)...(19): siRNA sense strand
ucaguuuaguugaggauac

SEQ ID NO: 431237 - RNA, 19 nt, Homo sapiens
  misc_RNA (1)...(19): siRNA sense strand
ggaaaguguggucccaucu

SEQ ID NO: 431238 - RNA, 19 nt, Homo sapiens
  misc_RNA (1)...(19): siRNA sense strand
uaguugaggauaccacauu

SEQ ID NO: 431239 - RNA, 19 nt, Homo sapiens
  misc_RNA (1)...(19): siRNA sense strand
gcuacaagguacgaaacca

SEQ ID NO: 431240 - RNA, 19 nt, Homo sapiens
  misc_RNA (1)...(19): siRNA sense strand
cacuggagccucauuaugg

SEQ ID NO: 431241 - RNA, 19 nt, Homo sapiens
  misc_RNA (1)...(19): siRNA sense strand
cggccaacacugucaaguu

SEQ ID NO: 431242 - RNA, 19 nt, Homo sapiens
  misc_RNA (1)...(19): siRNA sense strand
acuggagccucauuaugga

SEQ ID NO: 431243 - RNA, 19 nt, Homo sapiens
  misc_RNA (1)...(19): siRNA sense strand
uaagcaggagcaucgcauu

SEQ ID NO: 431244 - RNA, 19 nt, Homo sapiens
  misc_RNA (1)...(19): siRNA sense strand
ggagccucauuauggaaag

SEQ ID NO: 431245 - RNA, 19 nt, Homo sapiens
  misc_RNA (1)...(19): siRNA sense strand
ggccaacacugucaaguuu

SEQ ID NO: 431246 - RNA, 19 nt, Homo sapiens
  misc_RNA (1)...(19): siRNA sense strand
gaauacggguccaucaauc

SEQ ID NO: 431247 - RNA, 19 nt, Homo sapiens
  misc_RNA (1)...(19): siRNA sense strand
gcaggagcaucgcauugga

SEQ ID NO: 431248 - RNA, 19 nt, Homo sapiens
  misc_RNA (1)...(19): siRNA sense strand
caucugacaagggaaauua

SEQ ID NO: 431249 - RNA, 19 nt, Homo sapiens
  misc_RNA (1)...(19): siRNA sense strand
gcaccauacuggaccaaca

SEQ ID NO: 431250 - RNA, 19 nt, Homo sapiens
  misc_RNA (1)...(19): siRNA sense strand
gcacuggagccucauuaug

SEQ ID NO: 431251 - RNA, 19 nt, Homo sapiens
  misc_RNA (1)...(19): siRNA sense strand
aaaguguggucccaucuga

SEQ ID NO: 431252 - RNA, 19 nt, Homo sapiens
  misc_RNA (1)...(19): siRNA sense strand
cauuggaggcuacaaggua

SEQ ID NO: 431253 - RNA, 19 nt, Homo sapiens
  misc_RNA (1)...(19): siRNA sense strand
aguugaggauaccacauua

SEQ ID NO: 431254 - RNA, 19 nt, Homo sapiens
  misc_RNA (1)...(19): siRNA sense strand
gaaaguguggucccaucug

SEQ ID NO: 431255 - RNA, 19 nt, Homo sapiens
  misc_RNA (1)...(19): siRNA sense strand
cagcacuggagccucauua

SEQ ID NO: 431256 - RNA, 19 nt, Homo sapiens
  misc_RNA (1)...(19): siRNA sense strand
ggaacccaaugccaaccau

SEQ ID NO: 431257 - RNA, 19 nt, Homo sapiens
  misc_RNA (1)...(19): siRNA sense strand
ugaauacggguccaucaau

SEQ ID NO: 431258 - RNA, 19 nt, Homo sapiens
  misc_RNA (1)...(19): siRNA sense strand
acacguaccaccuggaugu

SEQ ID NO: 431259 - RNA, 19 nt, Homo sapiens
  misc_RNA (1)...(19): siRNA sense strand
ucugacaagggaaauuaua

SEQ ID NO: 431260 - RNA, 19 nt, Homo sapiens
  misc_RNA (1)...(19): siRNA sense strand
cauacuggaccaacacaga

SEQ ID NO: 431261 - RNA, 19 nt, Homo sapiens
  misc_RNA (1)...(19): siRNA sense strand
ccaacacugucaaguuucg

SEQ ID NO: 431262 - RNA, 19 nt, Homo sapiens
  misc_RNA (1)...(19): siRNA sense strand
gaggcuacaagguacgaaa

SEQ ID NO: 431263 - RNA, 19 nt, Homo sapiens
  misc_RNA (1)...(19): siRNA sense strand
cguaccaccuggauguugu

SEQ ID NO: 431264 - RNA, 19 nt, Homo sapiens
  misc_RNA (1)...(19): siRNA sense strand
ucaguuuaguugaggauac

SEQ ID NO: 431265 - RNA, 19 nt, Homo sapiens
  misc_RNA (1)...(19): siRNA sense strand
ggaaaguguggucccaucu

SEQ ID NO: 431266 - RNA, 19 nt, Homo sapiens
  misc_RNA (1)...(19): siRNA sense strand
uaguugaggauaccacauu

SEQ ID NO: 431267 - RNA, 19 nt, Homo sapiens
  misc_RNA (1)...(19): siRNA sense strand
gcuacaagguacgaaacca

SEQ ID NO: 431268 - RNA, 19 nt, Homo sapiens
  misc_RNA (1)...(19): siRNA sense strand
cacuggagccucauuaugg

SEQ ID NO: 431269 - RNA, 19 nt, Homo sapiens
  misc_RNA (1)...(19): siRNA sense strand
cggccaacacugucaaguu

SEQ ID NO: 431270 - RNA, 19 nt, Homo sapiens
  misc_RNA (1)...(19): siRNA sense strand
acuggagccucauuaugga

SEQ ID NO: 431271 - RNA, 19 nt, Homo sapiens
  misc_RNA (1)...(19): siRNA sense strand
uaagcaggagcaucgcauu

SEQ ID NO: 431272 - RNA, 19 nt, Homo sapiens
  misc_RNA (1)...(19): siRNA sense strand
ggagccucauuauggaaag

SEQ ID NO: 431273 - RNA, 19 nt, Homo sapiens
  misc_RNA (1)...(19): siRNA sense strand
ggccaacacugucaaguuu

SEQ ID NO: 431274 - RNA, 19 nt, Homo sapiens
  misc_RNA (1)...(19): siRNA sense strand
gaauacggguccaucaauc

SEQ ID NO: 431275 - RNA, 19 nt, Homo sapiens
  misc_RNA (1)...(19): siRNA sense strand
gcaggagcaucgcauugga

SEQ ID NO: 431276 - RNA, 19 nt, Homo sapiens
  misc_RNA (1)...(19): siRNA sense strand
caucugacaagggaaauua

SEQ ID NO: 431277 - RNA, 19 nt, Homo sapiens
  misc_RNA (1)...(19): siRNA sense strand
gcaccauacuggaccaaca

SEQ ID NO: 431278 - RNA, 19 nt, Homo sapiens
  misc_RNA (1)...(19): siRNA sense strand
gcacuggagccucauuaug

SEQ ID NO: 431279 - RNA, 19 nt, Homo sapiens
  misc_RNA (1)...(19): siRNA sense strand
aaaguguggucccaucuga

SEQ ID NO: 431280 - RNA, 19 nt, Homo sapiens
  misc_RNA (1)...(19): siRNA sense strand
cauuggaggcuacaaggua

SEQ ID NO: 431281 - RNA, 19 nt, Homo sapiens
  misc_RNA (1)...(19): siRNA sense strand
aguugaggauaccacauua

SEQ ID NO: 431282 - RNA, 19 nt, Homo sapiens
  misc_RNA (1)...(19): siRNA sense strand
gaaaguguggucccaucug

SEQ ID NO: 431283 - RNA, 19 nt, Homo sapiens
  misc_RNA (1)...(19): siRNA sense strand
cagcacuggagccucauua

SEQ ID NO: 431284 - RNA, 19 nt, Homo sapiens
  misc_RNA (1)...(19): siRNA sense strand
ggaacccaaugccaaccau

SEQ ID NO: 431285 - RNA, 19 nt, Homo sapiens
  misc_RNA (1)...(19): siRNA sense strand
ugaauacggguccaucaau

SEQ ID NO: 431286 - RNA, 19 nt, Homo sapiens
  misc_RNA (1)...(19): siRNA sense strand
acacguaccaccuggaugu

SEQ ID NO: 431287 - RNA, 19 nt, Homo sapiens
  misc_RNA (1)...(19): siRNA sense strand
ucugacaagggaaauuaua

SEQ ID NO: 431288 - RNA, 19 nt, Homo sapiens
  misc_RNA (1)...(19): siRNA sense strand
cauacuggaccaacacaga

SEQ ID NO: 431289 - RNA, 19 nt, Homo sapiens
  misc_RNA (1)...(19): siRNA sense strand
ccaacacugucaaguuucg

SEQ ID NO: 431290 - RNA, 19 nt, Homo sapiens
  misc_RNA (1)...(19): siRNA sense strand
gaggcuacaagguacgaaa

SEQ ID NO: 431291 - RNA, 19 nt, Homo sapiens
  misc_RNA (1)...(19): siRNA sense strand
cguaccaccuggauguugu

SEQ ID NO: 431292 - RNA, 19 nt, Homo sapiens
  misc_RNA (1)...(19): siRNA sense strand
ucaguuuaguugaggauac

SEQ ID NO: 431293 - RNA, 19 nt, Homo sapiens
  misc_RNA (1)...(19): siRNA sense strand
ggaaaguguggucccaucu

SEQ ID NO: 431294 - RNA, 19 nt, Homo sapiens
  misc_RNA (1)...(19): siRNA sense strand
uaguugaggauaccacauu

SEQ ID NO: 431295 - RNA, 19 nt, Homo sapiens
  misc_RNA (1)...(19): siRNA sense strand
gcuacaagguacgaaacca

SEQ ID NO: 431296 - RNA, 19 nt, Homo sapiens
  misc_RNA (1)...(19): siRNA sense strand
cacuggagccucauuaugg

SEQ ID NO: 431297 - RNA, 19 nt, Homo sapiens
  misc_RNA (1)...(19): siRNA sense strand
cggccaacacugucaaguu

SEQ ID NO: 431298 - RNA, 19 nt, Homo sapiens
  misc_RNA (1)...(19): siRNA sense strand
acuggagccucauuaugga

SEQ ID NO: 431299 - RNA, 19 nt, Homo sapiens
  misc_RNA (1)...(19): siRNA sense strand
uaagcaggagcaucgcauu

SEQ ID NO: 431300 - RNA, 19 nt, Homo sapiens
  misc_RNA (1)...(19): siRNA sense strand
ggagccucauuauggaaag

SEQ ID NO: 431301 - RNA, 19 nt, Homo sapiens
  misc_RNA (1)...(19): siRNA sense strand
ggccaacacugucaaguuu

SEQ ID NO: 431302 - RNA, 19 nt, Homo sapiens
  misc_RNA (1)...(19): siRNA sense strand
gaauacggguccaucaauc

SEQ ID NO: 431303 - RNA, 19 nt, Homo sapiens
  misc_RNA (1)...(19): siRNA sense strand
gcaggagcaucgcauugga

SEQ ID NO: 431304 - RNA, 19 nt, Homo sapiens
  misc_RNA (1)...(19): siRNA sense strand
caucugacaagggaaauua

SEQ ID NO: 431305 - RNA, 19 nt, Homo sapiens
  misc_RNA (1)...(19): siRNA sense strand
gcaccauacuggaccaaca

SEQ ID NO: 431306 - RNA, 19 nt, Homo sapiens
  misc_RNA (1)...(19): siRNA sense strand
gcacuggagccucauuaug

SEQ ID NO: 431307 - RNA, 19 nt, Homo sapiens
  misc_RNA (1)...(19): siRNA sense strand
aaaguguggucccaucuga

SEQ ID NO: 431308 - RNA, 19 nt, Homo sapiens
  misc_RNA (1)...(19): siRNA sense strand
cauuggaggcuacaaggua

SEQ ID NO: 431309 - RNA, 19 nt, Homo sapiens
  misc_RNA (1)...(19): siRNA sense strand
aguugaggauaccacauua

SEQ ID NO: 431310 - RNA, 19 nt, Homo sapiens
  misc_RNA (1)...(19): siRNA sense strand
gaaaguguggucccaucug

SEQ ID NO: 431311 - RNA, 19 nt, Homo sapiens
  misc_RNA (1)...(19): siRNA sense strand
cagcacuggagccucauua

SEQ ID NO: 431312 - RNA, 19 nt, Homo sapiens
  misc_RNA (1)...(19): siRNA sense strand
ggaacccaaugccaaccau

SEQ ID NO: 431313 - RNA, 19 nt, Homo sapiens
  misc_RNA (1)...(19): siRNA sense strand
ugaauacggguccaucaau

SEQ ID NO: 431314 - RNA, 19 nt, Homo sapiens
  misc_RNA (1)...(19): siRNA sense strand
acacguaccaccuggaugu

SEQ ID NO: 431315 - RNA, 19 nt, Homo sapiens
  misc_RNA (1)...(19): siRNA sense strand
ucugacaagggaaauuaua

SEQ ID NO: 431316 - RNA, 19 nt, Homo sapiens
  misc_RNA (1)...(19): siRNA sense strand
cauacuggaccaacacaga

SEQ ID NO: 431317 - RNA, 19 nt, Homo sapiens
  misc_RNA (1)...(19): siRNA sense strand
ccaacacugucaaguuucg

SEQ ID NO: 431318 - RNA, 19 nt, Homo sapiens
  misc_RNA (1)...(19): siRNA sense strand
gaggcuacaagguacgaaa

SEQ ID NO: 431319 - RNA, 19 nt, Homo sapiens
  misc_RNA (1)...(19): siRNA sense strand
cguaccaccuggauguugu

SEQ ID NO: 431320 - RNA, 19 nt, Homo sapiens
  misc_RNA (1)...(19): siRNA sense strand
ucaguuuaguugaggauac

SEQ ID NO: 431321 - RNA, 19 nt, Homo sapiens
  misc_RNA (1)...(19): siRNA sense strand
ggaaaguguggucccaucu

SEQ ID NO: 431322 - RNA, 19 nt, Homo sapiens
  misc_RNA (1)...(19): siRNA sense strand
uaguugaggauaccacauu

SEQ ID NO: 431323 - RNA, 19 nt, Homo sapiens
  misc_RNA (1)...(19): siRNA sense strand
gcuacaagguacgaaacca

SEQ ID NO: 431324 - RNA, 19 nt, Homo sapiens
  misc_RNA (1)...(19): siRNA sense strand
cacuggagccucauuaugg

SEQ ID NO: 431325 - RNA, 19 nt, Homo sapiens
  misc_RNA (1)...(19): siRNA sense strand
cggccaacacugucaaguu

SEQ ID NO: 431326 - RNA, 19 nt, Homo sapiens
  misc_RNA (1)...(19): siRNA sense strand
acuggagccucauuaugga

SEQ ID NO: 431327 - RNA, 19 nt, Homo sapiens
  misc_RNA (1)...(19): siRNA sense strand
uaagcaggagcaucgcauu

SEQ ID NO: 431328 - RNA, 19 nt, Homo sapiens
  misc_RNA (1)...(19): siRNA sense strand
ggagccucauuauggaaag

SEQ ID NO: 431329 - RNA, 19 nt, Homo sapiens
  misc_RNA (1)...(19): siRNA sense strand
ggccaacacugucaaguuu

SEQ ID NO: 431330 - RNA, 19 nt, Homo sapiens
  misc_RNA (1)...(19): siRNA sense strand
gaauacggguccaucaauc

SEQ ID NO: 431331 - RNA, 19 nt, Homo sapiens
  misc_RNA (1)...(19): siRNA sense strand
gcaggagcaucgcauugga

SEQ ID NO: 431332 - RNA, 19 nt, Homo sapiens
  misc_RNA (1)...(19): siRNA sense strand
caucugacaagggaaauua

SEQ ID NO: 431333 - RNA, 19 nt, Homo sapiens
  misc_RNA (1)...(19): siRNA sense strand
gcaccauacuggaccaaca

SEQ ID NO: 431334 - RNA, 19 nt, Homo sapiens
  misc_RNA (1)...(19): siRNA sense strand
gcacuggagccucauuaug

SEQ ID NO: 431335 - RNA, 19 nt, Homo sapiens
  misc_RNA (1)...(19): siRNA sense strand
aaaguguggucccaucuga

SEQ ID NO: 431336 - RNA, 19 nt, Homo sapiens
  misc_RNA (1)...(19): siRNA sense strand
cauuggaggcuacaaggua

SEQ ID NO: 431337 - RNA, 19 nt, Homo sapiens
  misc_RNA (1)...(19): siRNA sense strand
aguugaggauaccacauua

SEQ ID NO: 431338 - RNA, 19 nt, Homo sapiens
  misc_RNA (1)...(19): siRNA sense strand
gaaaguguggucccaucug

SEQ ID NO: 431339 - RNA, 19 nt, Homo sapiens
  misc_RNA (1)...(19): siRNA sense strand
cagcacuggagccucauua

SEQ ID NO: 431340 - RNA, 19 nt, Homo sapiens
  misc_RNA (1)...(19): siRNA sense strand
ggaacccaaugccaaccau

SEQ ID NO: 431341 - RNA, 19 nt, Homo sapiens
  misc_RNA (1)...(19): siRNA sense strand
ugaauacggguccaucaau

SEQ ID NO: 431342 - RNA, 19 nt, Homo sapiens
  misc_RNA (1)...(19): siRNA sense strand
acacguaccaccuggaugu

SEQ ID NO: 431343 - RNA, 19 nt, Homo sapiens
  misc_RNA (1)...(19): siRNA sense strand
ucugacaagggaaauuaua

SEQ ID NO: 431344 - RNA, 19 nt, Homo sapiens
  misc_RNA (1)...(19): siRNA sense strand
cauacuggaccaacacaga

SEQ ID NO: 431345 - RNA, 19 nt, Homo sapiens
  misc_RNA (1)...(19): siRNA sense strand
ccaacacugucaaguuucg

SEQ ID NO: 431346 - RNA, 19 nt, Homo sapiens
  misc_RNA (1)...(19): siRNA sense strand
gaggcuacaagguacgaaa

SEQ ID NO: 431347 - RNA, 19 nt, Homo sapiens
  misc_RNA (1)...(19): siRNA sense strand
cguaccaccuggauguugu

SEQ ID NO: 431348 - RNA, 19 nt, Homo sapiens
  misc_RNA (1)...(19): siRNA sense strand
ucaguuuaguugaggauac

SEQ ID NO: 431349 - RNA, 19 nt, Homo sapiens
  misc_RNA (1)...(19): siRNA sense strand
ggaaaguguggucccaucu

SEQ ID NO: 431350 - RNA, 19 nt, Homo sapiens
  misc_RNA (1)...(19): siRNA sense strand
uaguugaggauaccacauu

SEQ ID NO: 431351 - RNA, 19 nt, Homo sapiens
  misc_RNA (1)...(19): siRNA sense strand
gcuacaagguacgaaacca

SEQ ID NO: 431352 - RNA, 19 nt, Homo sapiens
  misc_RNA (1)...(19): siRNA sense strand
cacuggagccucauuaugg

SEQ ID NO: 431353 - RNA, 19 nt, Homo sapiens
  misc_RNA (1)...(19): siRNA sense strand
cggccaacacugucaaguu

SEQ ID NO: 431354 - RNA, 19 nt, Homo sapiens
  misc_RNA (1)...(19): siRNA sense strand
acuggagccucauuaugga

SEQ ID NO: 431355 - RNA, 19 nt, Homo sapiens
  misc_RNA (1)...(19): siRNA sense strand
uaagcaggagcaucgcauu

SEQ ID NO: 431356 - RNA, 19 nt, Homo sapiens
  misc_RNA (1)...(19): siRNA sense strand
ggagccucauuauggaaag

SEQ ID NO: 431357 - RNA, 19 nt, Homo sapiens
  misc_RNA (1)...(19): siRNA sense strand
ggccaacacugucaaguuu

SEQ ID NO: 431358 - RNA, 19 nt, Homo sapiens
  misc_RNA (1)...(19): siRNA sense strand
gaauacggguccaucaauc

SEQ ID NO: 431359 - RNA, 19 nt, Homo sapiens
  misc_RNA (1)...(19): siRNA sense strand
gcaggagcaucgcauugga

SEQ ID NO: 431360 - RNA, 19 nt, Homo sapiens
  misc_RNA (1)...(19): siRNA sense strand
caucugacaagggaaauua

SEQ ID NO: 431361 - RNA, 19 nt, Homo sapiens
  misc_RNA (1)...(19): siRNA sense strand
gcaccauacuggaccaaca

SEQ ID NO: 431362 - RNA, 19 nt, Homo sapiens
  misc_RNA (1)...(19): siRNA sense strand
gcacuggagccucauuaug

SEQ ID NO: 431363 - RNA, 19 nt, Homo sapiens
  misc_RNA (1)...(19): siRNA sense strand
aaaguguggucccaucuga

SEQ ID NO: 431364 - RNA, 19 nt, Homo sapiens
  misc_RNA (1)...(19): siRNA sense strand
cauuggaggcuacaaggua

SEQ ID NO: 431365 - RNA, 19 nt, Homo sapiens
  misc_RNA (1)...(19): siRNA sense strand
aguugaggauaccacauua

SEQ ID NO: 431366 - RNA, 19 nt, Homo sapiens
  misc_RNA (1)...(19): siRNA sense strand
gaaaguguggucccaucug

SEQ ID NO: 431367 - RNA, 19 nt, Homo sapiens
  misc_RNA (1)...(19): siRNA sense strand
cagcacuggagccucauua

SEQ ID NO: 431368 - RNA, 19 nt, Homo sapiens
  misc_RNA (1)...(19): siRNA sense strand
ggaacccaaugccaaccau

SEQ ID NO: 431369 - RNA, 19 nt, Homo sapiens
  misc_RNA (1)...(19): siRNA sense strand
ugaauacggguccaucaau

SEQ ID NO: 431370 - RNA, 19 nt, Homo sapiens
  misc_RNA (1)...(19): siRNA sense strand
acacguaccaccuggaugu

SEQ ID NO: 431371 - RNA, 19 nt, Homo sapiens
  misc_RNA (1)...(19): siRNA sense strand
ucugacaagggaaauuaua

SEQ ID NO: 431372 - RNA, 19 nt, Homo sapiens
  misc_RNA (1)...(19): siRNA sense strand
cauacuggaccaacacaga

SEQ ID NO: 431373 - RNA, 19 nt, Homo sapiens
  misc_RNA (1)...(19): siRNA sense strand
ccaacacugucaaguuucg

SEQ ID NO: 431374 - RNA, 19 nt, Homo sapiens
  misc_RNA (1)...(19): siRNA sense strand
gaggcuacaagguacgaaa

SEQ ID NO: 431375 - RNA, 19 nt, Homo sapiens
  misc_RNA (1)...(19): siRNA sense strand
cguaccaccuggauguugu

SEQ ID NO: 431376 - RNA, 19 nt, Homo sapiens
  misc_RNA (1)...(19): siRNA sense strand
ucaguuuaguugaggauac

SEQ ID NO: 431377 - RNA, 19 nt, Homo sapiens
  misc_RNA (1)...(19): siRNA sense strand
ggaaaguguggucccaucu

SEQ ID NO: 431378 - RNA, 19 nt, Homo sapiens
  misc_RNA (1)...(19): siRNA sense strand
uaguugaggauaccacauu

SEQ ID NO: 431379 - RNA, 19 nt, Homo sapiens
  misc_RNA (1)...(19): siRNA sense strand
gcuacaagguacgaaacca

SEQ ID NO: 431380 - RNA, 19 nt, Homo sapiens
  misc_RNA (1)...(19): siRNA sense strand
cacuggagccucauuaugg

SEQ ID NO: 431381 - RNA, 19 nt, Homo sapiens
  misc_RNA (1)...(19): siRNA sense strand
cggccaacacugucaaguu

SEQ ID NO: 431382 - RNA, 19 nt, Homo sapiens
  misc_RNA (1)...(19): siRNA sense strand
acuggagccucauuaugga

SEQ ID NO: 431383 - RNA, 19 nt, Homo sapiens
  misc_RNA (1)...(19): siRNA sense strand
uaagcaggagcaucgcauu

SEQ ID NO: 431384 - RNA, 19 nt, Homo sapiens
  misc_RNA (1)...(19): siRNA sense strand
ggagccucauuauggaaag

SEQ ID NO: 431385 - RNA, 19 nt, Homo sapiens
  misc_RNA (1)...(19): siRNA sense strand
ggccaacacugucaaguuu

SEQ ID NO: 431386 - RNA, 19 nt, Homo sapiens
  misc_RNA (1)...(19): siRNA sense strand
gaauacggguccaucaauc

SEQ ID NO: 431387 - RNA, 19 nt, Homo sapiens
  misc_RNA (1)...(19): siRNA sense strand
gcaggagcaucgcauugga

SEQ ID NO: 431388 - RNA, 19 nt, Homo sapiens
  misc_RNA (1)...(19): siRNA sense strand
caucugacaagggaaauua

SEQ ID NO: 431389 - RNA, 19 nt, Homo sapiens
  misc_RNA (1)...(19): siRNA sense strand
gcaccauacuggaccaaca

SEQ ID NO: 431390 - RNA, 19 nt, Homo sapiens
  misc_RNA (1)...(19): siRNA sense strand
gcacuggagccucauuaug

SEQ ID NO: 431391 - RNA, 19 nt, Homo sapiens
  misc_RNA (1)...(19): siRNA sense strand
aaaguguggucccaucuga

SEQ ID NO: 431392 - RNA, 19 nt, Homo sapiens
  misc_RNA (1)...(19): siRNA sense strand
cauuggaggcuacaaggua

SEQ ID NO: 431393 - RNA, 19 nt, Homo sapiens
  misc_RNA (1)...(19): siRNA sense strand
aguugaggauaccacauua

SEQ ID NO: 431394 - RNA, 19 nt, Homo sapiens
  misc_RNA (1)...(19): siRNA sense strand
gaaaguguggucccaucug

SEQ ID NO: 431395 - RNA, 19 nt, Homo sapiens
  misc_RNA (1)...(19): siRNA sense strand
cagcacuggagccucauua

SEQ ID NO: 431396 - RNA, 19 nt, Homo sapiens
  misc_RNA (1)...(19): siRNA sense strand
ggaacccaaugccaaccau

SEQ ID NO: 431397 - RNA, 19 nt, Homo sapiens
  misc_RNA (1)...(19): siRNA sense strand
ugaauacggguccaucaau

SEQ ID NO: 431398 - RNA, 19 nt, Homo sapiens
  misc_RNA (1)...(19): siRNA sense strand
acacguaccaccuggaugu

SEQ ID NO: 431399 - RNA, 19 nt, Homo sapiens
  misc_RNA (1)...(19): siRNA sense strand
ucugacaagggaaauuaua

SEQ ID NO: 431400 - RNA, 19 nt, Homo sapiens
  misc_RNA (1)...(19): siRNA sense strand
cauacuggaccaacacaga

SEQ ID NO: 431401 - RNA, 19 nt, Homo sapiens
  misc_RNA (1)...(19): siRNA sense strand
ccaacacugucaaguuucg

SEQ ID NO: 431402 - RNA, 19 nt, Homo sapiens
  misc_RNA (1)...(19): siRNA sense strand
gaggcuacaagguacgaaa

SEQ ID NO: 431403 - RNA, 19 nt, Homo sapiens
  misc_RNA (1)...(19): siRNA sense strand
cguaccaccuggauguugu

SEQ ID NO: 431404 - RNA, 19 nt, Homo sapiens
  misc_RNA (1)...(19): siRNA sense strand
ucaguuuaguugaggauac

SEQ ID NO: 431405 - RNA, 19 nt, Homo sapiens
  misc_RNA (1)...(19): siRNA sense strand
ggaaaguguggucccaucu

SEQ ID NO: 431406 - RNA, 19 nt, Homo sapiens
  misc_RNA (1)...(19): siRNA sense strand
uaguugaggauaccacauu

SEQ ID NO: 431407 - RNA, 19 nt, Homo sapiens
  misc_RNA (1)...(19): siRNA sense strand
gcuacaagguacgaaacca

SEQ ID NO: 431408 - RNA, 19 nt, Homo sapiens
  misc_RNA (1)...(19): siRNA sense strand
cacuggagccucauuaugg

SEQ ID NO: 431409 - RNA, 19 nt, Homo sapiens
  misc_RNA (1)...(19): siRNA sense strand
cggccaacacugucaaguu

SEQ ID NO: 431410 - RNA, 19 nt, Homo sapiens
  misc_RNA (1)...(19): siRNA sense strand
acuggagccucauuaugga

SEQ ID NO: 431411 - RNA, 19 nt, Homo sapiens
  misc_RNA (1)...(19): siRNA sense strand
uaagcaggagcaucgcauu

SEQ ID NO: 431412 - RNA, 19 nt, Homo sapiens
  misc_RNA (1)...(19): siRNA sense strand
ggagccucauuauggaaag

SEQ ID NO: 431413 - RNA, 19 nt, Homo sapiens
  misc_RNA (1)...(19): siRNA sense strand
ggccaacacugucaaguuu

SEQ ID NO: 431414 - RNA, 19 nt, Homo sapiens
  misc_RNA (1)...(19): siRNA sense strand
gaauacggguccaucaauc

SEQ ID NO: 431415 - RNA, 19 nt, Homo sapiens
  misc_RNA (1)...(19): siRNA sense strand
gcaggagcaucgcauugga

SEQ ID NO: 431416 - RNA, 19 nt, Homo sapiens
  misc_RNA (1)...(19): siRNA sense strand
caucugacaagggaaauua

SEQ ID NO: 431417 - RNA, 19 nt, Homo sapiens
  misc_RNA (1)...(19): siRNA sense strand
gcaccauacuggaccaaca

SEQ ID NO: 431418 - RNA, 19 nt, Homo sapiens
  misc_RNA (1)...(19): siRNA sense strand
gcacuggagccucauuaug

SEQ ID NO: 431419 - RNA, 19 nt, Homo sapiens
  misc_RNA (1)...(19): siRNA sense strand
aaaguguggucccaucuga

SEQ ID NO: 431420 - RNA, 19 nt, Homo sapiens
  misc_RNA (1)...(19): siRNA sense strand
cauuggaggcuacaaggua

SEQ ID NO: 431421 - RNA, 19 nt, Homo sapiens
  misc_RNA (1)...(19): siRNA sense strand
aguugaggauaccacauua

SEQ ID NO: 431422 - RNA, 19 nt, Homo sapiens
  misc_RNA (1)...(19): siRNA sense strand
gaaaguguggucccaucug

SEQ ID NO: 431423 - RNA, 19 nt, Homo sapiens
  misc_RNA (1)...(19): siRNA sense strand
cagcacuggagccucauua

SEQ ID NO: 431424 - RNA, 19 nt, Homo sapiens
  misc_RNA (1)...(19): siRNA sense strand
ggaacccaaugccaaccau

SEQ ID NO: 431425 - RNA, 19 nt, Homo sapiens
  misc_RNA (1)...(19): siRNA sense strand
ugaauacggguccaucaau

SEQ ID NO: 431426 - RNA, 19 nt, Homo sapiens
  misc_RNA (1)...(19): siRNA sense strand
acacguaccaccuggaugu

SEQ ID NO: 431427 - RNA, 19 nt, Homo sapiens
  misc_RNA (1)...(19): siRNA sense strand
ucugacaagggaaauuaua

SEQ ID NO: 431428 - RNA, 19 nt, Homo sapiens
  misc_RNA (1)...(19): siRNA sense strand
cauacuggaccaacacaga

SEQ ID NO: 431429 - RNA, 19 nt, Homo sapiens
  misc_RNA (1)...(19): siRNA sense strand
ccaacacugucaaguuucg

SEQ ID NO: 431430 - RNA, 19 nt, Homo sapiens
  misc_RNA (1)...(19): siRNA sense strand
gaggcuacaagguacgaaa

SEQ ID NO: 431431 - RNA, 19 nt, Homo sapiens
  misc_RNA (1)...(19): siRNA sense strand
cguaccaccuggauguugu

SEQ ID NO: 431432 - RNA, 19 nt, Homo sapiens
  misc_RNA (1)...(19): siRNA sense strand
ucaguuuaguugaggauac

SEQ ID NO: 431433 - RNA, 19 nt, Homo sapiens
  misc_RNA (1)...(19): siRNA sense strand
ggaaaguguggucccaucu

SEQ ID NO: 431434 - RNA, 19 nt, Homo sapiens
  misc_RNA (1)...(19): siRNA sense strand
uaguugaggauaccacauu

SEQ ID NO: 431435 - RNA, 19 nt, Homo sapiens
  misc_RNA (1)...(19): siRNA sense strand
gcuacaagguacgaaacca

SEQ ID NO: 431436 - RNA, 19 nt, Homo sapiens
  misc_RNA (1)...(19): siRNA sense strand
cacuggagccucauuaugg

SEQ ID NO: 431437 - RNA, 19 nt, Homo sapiens
  misc_RNA (1)...(19): siRNA sense strand
cggccaacacugucaaguu

SEQ ID NO: 431438 - RNA, 19 nt, Homo sapiens
  misc_RNA (1)...(19): siRNA sense strand
acuggagccucauuaugga

SEQ ID NO: 431439 - RNA, 19 nt, Homo sapiens
  misc_RNA (1)...(19): siRNA sense strand
uaagcaggagcaucgcauu

SEQ ID NO: 431440 - RNA, 19 nt, Homo sapiens
  misc_RNA (1)...(19): siRNA sense strand
ggagccucauuauggaaag

SEQ ID NO: 431441 - RNA, 19 nt, Homo sapiens
  misc_RNA (1)...(19): siRNA sense strand
ggccaacacugucaaguuu

SEQ ID NO: 431442 - RNA, 19 nt, Homo sapiens
  misc_RNA (1)...(19): siRNA sense strand
gaauacggguccaucaauc

SEQ ID NO: 431443 - RNA, 19 nt, Homo sapiens
  misc_RNA (1)...(19): siRNA sense strand
gcaggagcaucgcauugga

SEQ ID NO: 431444 - RNA, 19 nt, Homo sapiens
  misc_RNA (1)...(19): siRNA sense strand
caucugacaagggaaauua

SEQ ID NO: 431445 - RNA, 19 nt, Homo sapiens
  misc_RNA (1)...(19): siRNA sense strand
gcaccauacuggaccaaca

SEQ ID NO: 431446 - RNA, 19 nt, Homo sapiens
  misc_RNA (1)...(19): siRNA sense strand
gcacuggagccucauuaug

SEQ ID NO: 431447 - RNA, 19 nt, Homo sapiens
  misc_RNA (1)...(19): siRNA sense strand
aaaguguggucccaucuga

SEQ ID NO: 431448 - RNA, 19 nt, Homo sapiens
  misc_RNA (1)...(19): siRNA sense strand
cauuggaggcuacaaggua

SEQ ID NO: 431449 - RNA, 19 nt, Homo sapiens
  misc_RNA (1)...(19): siRNA sense strand
aguugaggauaccacauua

SEQ ID NO: 431450 - RNA, 19 nt, Homo sapiens
  misc_RNA (1)...(19): siRNA sense strand
gaaaguguggucccaucug

SEQ ID NO: 431451 - RNA, 19 nt, Homo sapiens
  misc_RNA (1)...(19): siRNA sense strand
cagcacuggagccucauua

SEQ ID NO: 431452 - RNA, 19 nt, Homo sapiens
  misc_RNA (1)...(19): siRNA sense strand
ggaacccaaugccaaccau

SEQ ID NO: 431453 - RNA, 19 nt, Homo sapiens
  misc_RNA (1)...(19): siRNA sense strand
ugaauacggguccaucaau

SEQ ID NO: 431454 - RNA, 19 nt, Homo sapiens
  misc_RNA (1)...(19): siRNA sense strand
acacguaccaccuggaugu

SEQ ID NO: 431455 - RNA, 19 nt, Homo sapiens
  misc_RNA (1)...(19): siRNA sense strand
ucugacaagggaaauuaua

SEQ ID NO: 431456 - RNA, 19 nt, Homo sapiens
  misc_RNA (1)...(19): siRNA sense strand
cauacuggaccaacacaga

SEQ ID NO: 431457 - RNA, 19 nt, Homo sapiens
  misc_RNA (1)...(19): siRNA sense strand
ccaacacugucaaguuucg

SEQ ID NO: 431458 - RNA, 19 nt, Homo sapiens
  misc_RNA (1)...(19): siRNA sense strand
gaggcuacaagguacgaaa

SEQ ID NO: 431459 - RNA, 19 nt, Homo sapiens
  misc_RNA (1)...(19): siRNA sense strand
cguaccaccuggauguugu

SEQ ID NO: 431460 - RNA, 19 nt, Homo sapiens
  misc_RNA (1)...(19): siRNA sense strand
ucaguuuaguugaggauac

SEQ ID NO: 431461 - RNA, 19 nt, Homo sapiens
  misc_RNA (1)...(19): siRNA sense strand
ggaaaguguggucccaucu

SEQ ID NO: 431462 - RNA, 19 nt, Homo sapiens
  misc_RNA (1)...(19): siRNA sense strand
uaguugaggauaccacauu

SEQ ID NO: 431463 - RNA, 19 nt, Homo sapiens
  misc_RNA (1)...(19): siRNA sense strand
gcuacaagguacgaaacca

SEQ ID NO: 431464 - RNA, 19 nt, Homo sapiens
  misc_RNA (1)...(19): siRNA sense strand
cacuggagccucauuaugg

SEQ ID NO: 431465 - RNA, 19 nt, Homo sapiens
  misc_RNA (1)...(19): siRNA sense strand
cggccaacacugucaaguu

SEQ ID NO: 431466 - RNA, 19 nt, Homo sapiens
  misc_RNA (1)...(19): siRNA sense strand
acuggagccucauuaugga

SEQ ID NO: 431467 - RNA, 19 nt, Homo sapiens
  misc_RNA (1)...(19): siRNA sense strand
uaagcaggagcaucgcauu

SEQ ID NO: 431468 - RNA, 19 nt, Homo sapiens
  misc_RNA (1)...(19): siRNA sense strand
ggagccucauuauggaaag

SEQ ID NO: 431469 - RNA, 19 nt, Homo sapiens
  misc_RNA (1)...(19): siRNA sense strand
ggccaacacugucaaguuu

SEQ ID NO: 431470 - RNA, 19 nt, Homo sapiens
  misc_RNA (1)...(19): siRNA sense strand
gaauacggguccaucaauc

SEQ ID NO: 431471 - RNA, 19 nt, Homo sapiens
  misc_RNA (1)...(19): siRNA sense strand
gcaggagcaucgcauugga

SEQ ID NO: 431472 - RNA, 19 nt, Homo sapiens
  misc_RNA (1)...(19): siRNA sense strand
caucugacaagggaaauua

SEQ ID NO: 431473 - RNA, 19 nt, Homo sapiens
  misc_RNA (1)...(19): siRNA sense strand
gcaccauacuggaccaaca

SEQ ID NO: 431474 - RNA, 19 nt, Homo sapiens
  misc_RNA (1)...(19): siRNA sense strand
gcacuggagccucauuaug

SEQ ID NO: 431475 - RNA, 19 nt, Homo sapiens
  misc_RNA (1)...(19): siRNA sense strand
aaaguguggucccaucuga

SEQ ID NO: 431476 - RNA, 19 nt, Homo sapiens
  misc_RNA (1)...(19): siRNA sense strand
cauuggaggcuacaaggua

SEQ ID NO: 431477 - RNA, 19 nt, Homo sapiens
  misc_RNA (1)...(19): siRNA sense strand
aguugaggauaccacauua

SEQ ID NO: 431478 - RNA, 19 nt, Homo sapiens
  misc_RNA (1)...(19): siRNA sense strand
gaaaguguggucccaucug

SEQ ID NO: 431479 - RNA, 19 nt, Homo sapiens
  misc_RNA (1)...(19): siRNA sense strand
cagcacuggagccucauua

SEQ ID NO: 431480 - RNA, 19 nt, Homo sapiens
  misc_RNA (1)...(19): siRNA sense strand
ggaacccaaugccaaccau

SEQ ID NO: 431481 - RNA, 19 nt, Homo sapiens
  misc_RNA (1)...(19): siRNA sense strand
ugaauacggguccaucaau

SEQ ID NO: 431482 - RNA, 19 nt, Homo sapiens
  misc_RNA (1)...(19): siRNA sense strand
acacguaccaccuggaugu

SEQ ID NO: 431483 - RNA, 19 nt, Homo sapiens
  misc_RNA (1)...(19): siRNA sense strand
ucugacaagggaaauuaua

SEQ ID NO: 431484 - RNA, 19 nt, Homo sapiens
  misc_RNA (1)...(19): siRNA sense strand
cauacuggaccaacacaga

SEQ ID NO: 431485 - RNA, 19 nt, Homo sapiens
  misc_RNA (1)...(19): siRNA sense strand
ccaacacugucaaguuucg

SEQ ID NO: 431486 - RNA, 19 nt, Homo sapiens
  misc_RNA (1)...(19): siRNA sense strand
gaggcuacaagguacgaaa

SEQ ID NO: 431487 - RNA, 19 nt, Homo sapiens
  misc_RNA (1)...(19): siRNA sense strand
cguaccaccuggauguugu

SEQ ID NO: 431488 - RNA, 19 nt, Homo sapiens
  misc_RNA (1)...(19): siRNA sense strand
ucaguuuaguugaggauac

SEQ ID NO: 431489 - RNA, 19 nt, Homo sapiens
  misc_RNA (1)...(19): siRNA sense strand
ggaaaguguggucccaucu

SEQ ID NO: 431490 - RNA, 19 nt, Homo sapiens
  misc_RNA (1)...(19): siRNA sense strand
uaguugaggauaccacauu

SEQ ID NO: 431491 - RNA, 19 nt, Homo sapiens
  misc_RNA (1)...(19): siRNA sense strand
gcuacaagguacgaaacca

SEQ ID NO: 431492 - RNA, 19 nt, Homo sapiens
  misc_RNA (1)...(19): siRNA sense strand
cacuggagccucauuaugg

SEQ ID NO: 431493 - RNA, 19 nt, Homo sapiens
  misc_RNA (1)...(19): siRNA sense strand
cggccaacacugucaaguu

SEQ ID NO: 431494 - RNA, 19 nt, Homo sapiens
  misc_RNA (1)...(19): siRNA sense strand
acuggagccucauuaugga

SEQ ID NO: 431495 - RNA, 19 nt, Homo sapiens
  misc_RNA (1)...(19): siRNA sense strand
uaagcaggagcaucgcauu

SEQ ID NO: 431496 - RNA, 19 nt, Homo sapiens
  misc_RNA (1)...(19): siRNA sense strand
ggagccucauuauggaaag

SEQ ID NO: 431497 - RNA, 19 nt, Homo sapiens
  misc_RNA (1)...(19): siRNA sense strand
gaugugcacucauuucgaa

SEQ ID NO: 431498 - RNA, 19 nt, Homo sapiens
  misc_RNA (1)...(19): siRNA sense strand
gaagagcacccacuguuug

SEQ ID NO: 431499 - RNA, 19 nt, Homo sapiens
  misc_RNA (1)...(19): siRNA sense strand
gaauaugccuacgugcuaa

SEQ ID NO: 431500 - RNA, 19 nt, Homo sapiens
  misc_RNA (1)...(19): siRNA sense strand
gcagugaccucccaaacca

SEQ ID NO: 431501 - RNA, 19 nt, Homo sapiens
  misc_RNA (1)...(19): siRNA sense strand
ggacuggucugagcuauac

SEQ ID NO: 431502 - RNA, 19 nt, Homo sapiens
  misc_RNA (1)...(19): siRNA sense strand
guaauggagggaagaauuu

SEQ ID NO: 431503 - RNA, 19 nt, Homo sapiens
  misc_RNA (1)...(19): siRNA sense strand
uggcuaugguggccuguua

SEQ ID NO: 431504 - RNA, 19 nt, Homo sapiens
  misc_RNA (1)...(19): siRNA sense strand
gacuggaugugcacucauu

SEQ ID NO: 431505 - RNA, 19 nt, Homo sapiens
  misc_RNA (1)...(19): siRNA sense strand
cgaagagcacccacuguuu

SEQ ID NO: 431506 - RNA, 19 nt, Homo sapiens
  misc_RNA (1)...(19): siRNA sense strand
aagcacaaguggcgaauca

SEQ ID NO: 431507 - RNA, 19 nt, Homo sapiens
  misc_RNA (1)...(19): siRNA sense strand
cagccugccuggucacuga

SEQ ID NO: 431508 - RNA, 19 nt, Homo sapiens
  misc_RNA (1)...(19): siRNA sense strand
gagccacgaugacccaaag

SEQ ID NO: 431509 - RNA, 19 nt, Homo sapiens
  misc_RNA (1)...(19): siRNA sense strand
gaauuucccagccaucuuc

SEQ ID NO: 431510 - RNA, 19 nt, Homo sapiens
  misc_RNA (1)...(19): siRNA sense strand
gcacaaguggcgaaucauc

SEQ ID NO: 431511 - RNA, 19 nt, Homo sapiens
  misc_RNA (1)...(19): siRNA sense strand
guucuucgcuccacucacu

SEQ ID NO: 431512 - RNA, 19 nt, Homo sapiens
  misc_RNA (1)...(19): siRNA sense strand
cacgaugacccaaaggaua

SEQ ID NO: 431513 - RNA, 19 nt, Homo sapiens
  misc_RNA (1)...(19): siRNA sense strand
agaauaugccuacgugcua

SEQ ID NO: 431514 - RNA, 19 nt, Homo sapiens
  misc_RNA (1)...(19): siRNA sense strand
cguaauggagggaagaauu

SEQ ID NO: 431515 - RNA, 19 nt, Homo sapiens
  misc_RNA (1)...(19): siRNA sense strand
uggaggaccugagugaaga

SEQ ID NO: 431516 - RNA, 19 nt, Homo sapiens
  misc_RNA (1)...(19): siRNA sense strand
ggacaucuaggcaccucaa

SEQ ID NO: 431517 - RNA, 19 nt, Homo sapiens
  misc_RNA (1)...(19): siRNA sense strand
acgaugacccaaaggauaa

SEQ ID NO: 431518 - RNA, 19 nt, Homo sapiens
  misc_RNA (1)...(19): siRNA sense strand
caaguggaguuugcagaca

SEQ ID NO: 431519 - RNA, 19 nt, Homo sapiens
  misc_RNA (1)...(19): siRNA sense strand
cccaaaggauaagaaagaa

SEQ ID NO: 431520 - RNA, 19 nt, Homo sapiens
  misc_RNA (1)...(19): siRNA sense strand
ccaaaggauaagaaagaaa

SEQ ID NO: 431521 - RNA, 19 nt, Homo sapiens
  misc_RNA (1)...(19): siRNA sense strand
ucgaagagcacccacuguu

SEQ ID NO: 431522 - RNA, 19 nt, Homo sapiens
  misc_RNA (1)...(19): siRNA sense strand
gaaaguucuacguaaugga

SEQ ID NO: 431523 - RNA, 19 nt, Homo sapiens
  misc_RNA (1)...(19): siRNA sense strand
gagcuacacgacuggaugu

SEQ ID NO: 431524 - RNA, 19 nt, Homo sapiens
  misc_RNA (1)...(19): siRNA sense strand
aguggaguuugcagacaua

SEQ ID NO: 431525 - RNA, 19 nt, Homo sapiens
  misc_RNA (1)...(19): siRNA sense strand
caucuaggcaccucaacug

SEQ ID NO: 431526 - RNA, 19 nt, Homo sapiens
  misc_RNA (1)...(19): siRNA sense strand
acccaaaggauaagaaaga

SEQ ID NO: 431527 - RNA, 19 nt, Homo sapiens
  misc_RNA (1)...(19): siRNA sense strand
gauggacuggucugagcua

SEQ ID NO: 431528 - RNA, 19 nt, Homo sapiens
  misc_RNA (1)...(19): siRNA sense strand
ugacccaaaggauaagaaa

SEQ ID NO: 431529 - RNA, 19 nt, Homo sapiens
  misc_RNA (1)...(19): siRNA sense strand
ccgaugugcuggagcuaca

SEQ ID NO: 431530 - RNA, 19 nt, Homo sapiens
  misc_RNA (1)...(19): siRNA sense strand
uguauaccauaaccgaugu

SEQ ID NO: 431531 - RNA, 19 nt, Homo sapiens
  misc_RNA (1)...(19): siRNA sense strand
caucagucccacccugcua

SEQ ID NO: 431532 - RNA, 19 nt, Homo sapiens
  misc_RNA (1)...(19): siRNA sense strand
gcuauacccagaguucuuc

SEQ ID NO: 431533 - RNA, 19 nt, Homo sapiens
  misc_RNA (1)...(19): siRNA sense strand
aagagcacccacuguuuga

SEQ ID NO: 431534 - RNA, 19 nt, Homo sapiens
  misc_RNA (1)...(19): siRNA sense strand
ugagcuauacccagaguuc

SEQ ID NO: 431535 - RNA, 19 nt, Homo sapiens
  misc_RNA (1)...(19): siRNA sense strand
cacaaguggcgaaucauca

SEQ ID NO: 431536 - RNA, 19 nt, Homo sapiens
  misc_RNA (1)...(19): siRNA sense strand
ggaugugcacucauuucga

SEQ ID NO: 431537 - RNA, 19 nt, Homo sapiens
  misc_RNA (1)...(19): siRNA sense strand
ccacgaugacccaaaggau

SEQ ID NO: 431538 - RNA, 19 nt, Homo sapiens
  misc_RNA (1)...(19): siRNA sense strand
gaugugcacucauuucgaa

SEQ ID NO: 431539 - RNA, 19 nt, Homo sapiens
  misc_RNA (1)...(19): siRNA sense strand
gaagagcacccacuguuug

SEQ ID NO: 431540 - RNA, 19 nt, Homo sapiens
  misc_RNA (1)...(19): siRNA sense strand
gaauaugccuacgugcuaa

SEQ ID NO: 431541 - RNA, 19 nt, Homo sapiens
  misc_RNA (1)...(19): siRNA sense strand
ggacuggucugagcuauac

SEQ ID NO: 431542 - RNA, 19 nt, Homo sapiens
  misc_RNA (1)...(19): siRNA sense strand
uggcuaugguggccuguua

SEQ ID NO: 431543 - RNA, 19 nt, Homo sapiens
  misc_RNA (1)...(19): siRNA sense strand
gacuggaugugcacucauu

SEQ ID NO: 431544 - RNA, 19 nt, Homo sapiens
  misc_RNA (1)...(19): siRNA sense strand
cgaagagcacccacuguuu

SEQ ID NO: 431545 - RNA, 19 nt, Homo sapiens
  misc_RNA (1)...(19): siRNA sense strand
aagcacaaguggcgaauca

SEQ ID NO: 431546 - RNA, 19 nt, Homo sapiens
  misc_RNA (1)...(19): siRNA sense strand
gagccacgaugacccaaag

SEQ ID NO: 431547 - RNA, 19 nt, Homo sapiens
  misc_RNA (1)...(19): siRNA sense strand
gcacaaguggcgaaucauc

SEQ ID NO: 431548 - RNA, 19 nt, Homo sapiens
  misc_RNA (1)...(19): siRNA sense strand
guucuucgcuccacucacu

SEQ ID NO: 431549 - RNA, 19 nt, Homo sapiens
  misc_RNA (1)...(19): siRNA sense strand
cacgaugacccaaaggaua

SEQ ID NO: 431550 - RNA, 19 nt, Homo sapiens
  misc_RNA (1)...(19): siRNA sense strand
agaauaugccuacgugcua

SEQ ID NO: 431551 - RNA, 19 nt, Homo sapiens
  misc_RNA (1)...(19): siRNA sense strand
acgaugacccaaaggauaa

SEQ ID NO: 431552 - RNA, 19 nt, Homo sapiens
  misc_RNA (1)...(19): siRNA sense strand
caaguggaguuugcagaca

SEQ ID NO: 431553 - RNA, 19 nt, Homo sapiens
  misc_RNA (1)...(19): siRNA sense strand
cccaaaggauaagaaagaa

SEQ ID NO: 431554 - RNA, 19 nt, Homo sapiens
  misc_RNA (1)...(19): siRNA sense strand
ccaaaggauaagaaagaaa

SEQ ID NO: 431555 - RNA, 19 nt, Homo sapiens
  misc_RNA (1)...(19): siRNA sense strand
ucgaagagcacccacuguu

SEQ ID NO: 431556 - RNA, 19 nt, Homo sapiens
  misc_RNA (1)...(19): siRNA sense strand
gagcuacacgacuggaugu

SEQ ID NO: 431557 - RNA, 19 nt, Homo sapiens
  misc_RNA (1)...(19): siRNA sense strand
aguggaguuugcagacaua

SEQ ID NO: 431558 - RNA, 19 nt, Homo sapiens
  misc_RNA (1)...(19): siRNA sense strand
acccaaaggauaagaaaga

SEQ ID NO: 431559 - RNA, 19 nt, Homo sapiens
  misc_RNA (1)...(19): siRNA sense strand
gauggacuggucugagcua

SEQ ID NO: 431560 - RNA, 19 nt, Homo sapiens
  misc_RNA (1)...(19): siRNA sense strand
ugacccaaaggauaagaaa

SEQ ID NO: 431561 - RNA, 19 nt, Homo sapiens
  misc_RNA (1)...(19): siRNA sense strand
ccgaugugcuggagcuaca

SEQ ID NO: 431562 - RNA, 19 nt, Homo sapiens
  misc_RNA (1)...(19): siRNA sense strand
uguauaccauaaccgaugu

SEQ ID NO: 431563 - RNA, 19 nt, Homo sapiens
  misc_RNA (1)...(19): siRNA sense strand
ugagcuauacccagaguuc

SEQ ID NO: 431564 - RNA, 19 nt, Homo sapiens
  misc_RNA (1)...(19): siRNA sense strand
aagagcacccacuguuuga

SEQ ID NO: 431565 - RNA, 19 nt, Homo sapiens
  misc_RNA (1)...(19): siRNA sense strand
gcuauacccagaguucuuc

SEQ ID NO: 431566 - RNA, 19 nt, Homo sapiens
  misc_RNA (1)...(19): siRNA sense strand
caucagucccacccugcua

SEQ ID NO: 431567 - RNA, 19 nt, Homo sapiens
  misc_RNA (1)...(19): siRNA sense strand
ccacgaugacccaaaggau

SEQ ID NO: 431568 - RNA, 19 nt, Homo sapiens
  misc_RNA (1)...(19): siRNA sense strand
ggaugugcacucauuucga

SEQ ID NO: 431569 - RNA, 19 nt, Homo sapiens
  misc_RNA (1)...(19): siRNA sense strand
cacaaguggcgaaucauca

SEQ ID NO: 431570 - RNA, 19 nt, Homo sapiens
  misc_RNA (1)...(19): siRNA sense strand
gaugugcacucauuucgaa

SEQ ID NO: 431571 - RNA, 19 nt, Homo sapiens
  misc_RNA (1)...(19): siRNA sense strand
gaagagcacccacuguuug

SEQ ID NO: 431572 - RNA, 19 nt, Homo sapiens
  misc_RNA (1)...(19): siRNA sense strand
gaauaugccuacgugcuaa

SEQ ID NO: 431573 - RNA, 19 nt, Homo sapiens
  misc_RNA (1)...(19): siRNA sense strand
gcagugaccucccaaacca

SEQ ID NO: 431574 - RNA, 19 nt, Homo sapiens
  misc_RNA (1)...(19): siRNA sense strand
ggacuggucugagcuauac

SEQ ID NO: 431575 - RNA, 19 nt, Homo sapiens
  misc_RNA (1)...(19): siRNA sense strand
guaauggagggaagaauuu

SEQ ID NO: 431576 - RNA, 19 nt, Homo sapiens
  misc_RNA (1)...(19): siRNA sense strand
uggcuaugguggccuguua

SEQ ID NO: 431577 - RNA, 19 nt, Homo sapiens
  misc_RNA (1)...(19): siRNA sense strand
gacuggaugugcacucauu

SEQ ID NO: 431578 - RNA, 19 nt, Homo sapiens
  misc_RNA (1)...(19): siRNA sense strand
cgaagagcacccacuguuu

SEQ ID NO: 431579 - RNA, 19 nt, Homo sapiens
  misc_RNA (1)...(19): siRNA sense strand
aagcacaaguggcgaauca

SEQ ID NO: 431580 - RNA, 19 nt, Homo sapiens
  misc_RNA (1)...(19): siRNA sense strand
cagccugccuggucacuga

SEQ ID NO: 431581 - RNA, 19 nt, Homo sapiens
  misc_RNA (1)...(19): siRNA sense strand
gagccacgaugacccaaag

SEQ ID NO: 431582 - RNA, 19 nt, Homo sapiens
  misc_RNA (1)...(19): siRNA sense strand
gaauuucccagccaucuuc

SEQ ID NO: 431583 - RNA, 19 nt, Homo sapiens
  misc_RNA (1)...(19): siRNA sense strand
gcacaaguggcgaaucauc

SEQ ID NO: 431584 - RNA, 19 nt, Homo sapiens
  misc_RNA (1)...(19): siRNA sense strand
guucuucgcuccacucacu

SEQ ID NO: 431585 - RNA, 19 nt, Homo sapiens
  misc_RNA (1)...(19): siRNA sense strand
cacgaugacccaaaggaua

SEQ ID NO: 431586 - RNA, 19 nt, Homo sapiens
  misc_RNA (1)...(19): siRNA sense strand
agaauaugccuacgugcua

SEQ ID NO: 431587 - RNA, 19 nt, Homo sapiens
  misc_RNA (1)...(19): siRNA sense strand
cguaauggagggaagaauu

SEQ ID NO: 431588 - RNA, 19 nt, Homo sapiens
  misc_RNA (1)...(19): siRNA sense strand
uggaggaccugagugaaga

SEQ ID NO: 431589 - RNA, 19 nt, Homo sapiens
  misc_RNA (1)...(19): siRNA sense strand
ggacaucuaggcaccucaa

SEQ ID NO: 431590 - RNA, 19 nt, Homo sapiens
  misc_RNA (1)...(19): siRNA sense strand
acgaugacccaaaggauaa

SEQ ID NO: 431591 - RNA, 19 nt, Homo sapiens
  misc_RNA (1)...(19): siRNA sense strand
caaguggaguuugcagaca

SEQ ID NO: 431592 - RNA, 19 nt, Homo sapiens
  misc_RNA (1)...(19): siRNA sense strand
cccaaaggauaagaaagaa

SEQ ID NO: 431593 - RNA, 19 nt, Homo sapiens
  misc_RNA (1)...(19): siRNA sense strand
ccaaaggauaagaaagaaa

SEQ ID NO: 431594 - RNA, 19 nt, Homo sapiens
  misc_RNA (1)...(19): siRNA sense strand
ucgaagagcacccacuguu

SEQ ID NO: 431595 - RNA, 19 nt, Homo sapiens
  misc_RNA (1)...(19): siRNA sense strand
gaaaguucuacguaaugga

SEQ ID NO: 431596 - RNA, 19 nt, Homo sapiens
  misc_RNA (1)...(19): siRNA sense strand
gagcuacacgacuggaugu

SEQ ID NO: 431597 - RNA, 19 nt, Homo sapiens
  misc_RNA (1)...(19): siRNA sense strand
aguggaguuugcagacaua

SEQ ID NO: 431598 - RNA, 19 nt, Homo sapiens
  misc_RNA (1)...(19): siRNA sense strand
caucuaggcaccucaacug

SEQ ID NO: 431599 - RNA, 19 nt, Homo sapiens
  misc_RNA (1)...(19): siRNA sense strand
acccaaaggauaagaaaga

SEQ ID NO: 431600 - RNA, 19 nt, Homo sapiens
  misc_RNA (1)...(19): siRNA sense strand
gauggacuggucugagcua

SEQ ID NO: 431601 - RNA, 19 nt, Homo sapiens
  misc_RNA (1)...(19): siRNA sense strand
ugacccaaaggauaagaaa

SEQ ID NO: 431602 - RNA, 19 nt, Homo sapiens
  misc_RNA (1)...(19): siRNA sense strand
ccgaugugcuggagcuaca

SEQ ID NO: 431603 - RNA, 19 nt, Homo sapiens
  misc_RNA (1)...(19): siRNA sense strand
uguauaccauaaccgaugu

SEQ ID NO: 431604 - RNA, 19 nt, Homo sapiens
  misc_RNA (1)...(19): siRNA sense strand
caucagucccacccugcua

SEQ ID NO: 431605 - RNA, 19 nt, Homo sapiens
  misc_RNA (1)...(19): siRNA sense strand
gcuauacccagaguucuuc

SEQ ID NO: 431606 - RNA, 19 nt, Homo sapiens
  misc_RNA (1)...(19): siRNA sense strand
aagagcacccacuguuuga

SEQ ID NO: 431607 - RNA, 19 nt, Homo sapiens
  misc_RNA (1)...(19): siRNA sense strand
ugagcuauacccagaguuc

SEQ ID NO: 431608 - RNA, 19 nt, Homo sapiens
  misc_RNA (1)...(19): siRNA sense strand
cacaaguggcgaaucauca

SEQ ID NO: 431609 - RNA, 19 nt, Homo sapiens
  misc_RNA (1)...(19): siRNA sense strand
ggaugugcacucauuucga

SEQ ID NO: 431610 - RNA, 19 nt, Homo sapiens
  misc_RNA (1)...(19): siRNA sense strand
ccacgaugacccaaaggau

SEQ ID NO: 431611 - RNA, 19 nt, Homo sapiens
  misc_RNA (1)...(19): siRNA sense strand
gaugugcacucauuucgaa

SEQ ID NO: 431612 - RNA, 19 nt, Homo sapiens
  misc_RNA (1)...(19): siRNA sense strand
gaagagcacccacuguuug

SEQ ID NO: 431613 - RNA, 19 nt, Homo sapiens
  misc_RNA (1)...(19): siRNA sense strand
gaauaugccuacgugcuaa

SEQ ID NO: 431614 - RNA, 19 nt, Homo sapiens
  misc_RNA (1)...(19): siRNA sense strand
ggacuggucugagcuauac

SEQ ID NO: 431615 - RNA, 19 nt, Homo sapiens
  misc_RNA (1)...(19): siRNA sense strand
uggcuaugguggccuguua

SEQ ID NO: 431616 - RNA, 19 nt, Homo sapiens
  misc_RNA (1)...(19): siRNA sense strand
gacuggaugugcacucauu

SEQ ID NO: 431617 - RNA, 19 nt, Homo sapiens
  misc_RNA (1)...(19): siRNA sense strand
cgaagagcacccacuguuu

SEQ ID NO: 431618 - RNA, 19 nt, Homo sapiens
  misc_RNA (1)...(19): siRNA sense strand
aagcacaaguggcgaauca

SEQ ID NO: 431619 - RNA, 19 nt, Homo sapiens
  misc_RNA (1)...(19): siRNA sense strand
gagccacgaugacccaaag

SEQ ID NO: 431620 - RNA, 19 nt, Homo sapiens
  misc_RNA (1)...(19): siRNA sense strand
gcacaaguggcgaaucauc

SEQ ID NO: 431621 - RNA, 19 nt, Homo sapiens
  misc_RNA (1)...(19): siRNA sense strand
guucuucgcuccacucacu

SEQ ID NO: 431622 - RNA, 19 nt, Homo sapiens
  misc_RNA (1)...(19): siRNA sense strand
cacgaugacccaaaggaua

SEQ ID NO: 431623 - RNA, 19 nt, Homo sapiens
  misc_RNA (1)...(19): siRNA sense strand
agaauaugccuacgugcua

SEQ ID NO: 431624 - RNA, 19 nt, Homo sapiens
  misc_RNA (1)...(19): siRNA sense strand
acgaugacccaaaggauaa

SEQ ID NO: 431625 - RNA, 19 nt, Homo sapiens
  misc_RNA (1)...(19): siRNA sense strand
caaguggaguuugcagaca

SEQ ID NO: 431626 - RNA, 19 nt, Homo sapiens
  misc_RNA (1)...(19): siRNA sense strand
cccaaaggauaagaaagaa

SEQ ID NO: 431627 - RNA, 19 nt, Homo sapiens
  misc_RNA (1)...(19): siRNA sense strand
ccaaaggauaagaaagaaa

SEQ ID NO: 431628 - RNA, 19 nt, Homo sapiens
  misc_RNA (1)...(19): siRNA sense strand
ucgaagagcacccacuguu

SEQ ID NO: 431629 - RNA, 19 nt, Homo sapiens
  misc_RNA (1)...(19): siRNA sense strand
gagcuacacgacuggaugu

SEQ ID NO: 431630 - RNA, 19 nt, Homo sapiens
  misc_RNA (1)...(19): siRNA sense strand
aguggaguuugcagacaua

SEQ ID NO: 431631 - RNA, 19 nt, Homo sapiens
  misc_RNA (1)...(19): siRNA sense strand
acccaaaggauaagaaaga

SEQ ID NO: 431632 - RNA, 19 nt, Homo sapiens
  misc_RNA (1)...(19): siRNA sense strand
gauggacuggucugagcua

SEQ ID NO: 431633 - RNA, 19 nt, Homo sapiens
  misc_RNA (1)...(19): siRNA sense strand
ugacccaaaggauaagaaa

SEQ ID NO: 431634 - RNA, 19 nt, Homo sapiens
  misc_RNA (1)...(19): siRNA sense strand
ccgaugugcuggagcuaca

SEQ ID NO: 431635 - RNA, 19 nt, Homo sapiens
  misc_RNA (1)...(19): siRNA sense strand
uguauaccauaaccgaugu

SEQ ID NO: 431636 - RNA, 19 nt, Homo sapiens
  misc_RNA (1)...(19): siRNA sense strand
ugagcuauacccagaguuc

SEQ ID NO: 431637 - RNA, 19 nt, Homo sapiens
  misc_RNA (1)...(19): siRNA sense strand
aagagcacccacuguuuga

SEQ ID NO: 431638 - RNA, 19 nt, Homo sapiens
  misc_RNA (1)...(19): siRNA sense strand
gcuauacccagaguucuuc

SEQ ID NO: 431639 - RNA, 19 nt, Homo sapiens
  misc_RNA (1)...(19): siRNA sense strand
caucagucccacccugcua

SEQ ID NO: 431640 - RNA, 19 nt, Homo sapiens
  misc_RNA (1)...(19): siRNA sense strand
ccacgaugacccaaaggau

SEQ ID NO: 431641 - RNA, 19 nt, Homo sapiens
  misc_RNA (1)...(19): siRNA sense strand
ggaugugcacucauuucga

SEQ ID NO: 431642 - RNA, 19 nt, Homo sapiens
  misc_RNA (1)...(19): siRNA sense strand
cacaaguggcgaaucauca

SEQ ID NO: 431643 - RNA, 19 nt, Homo sapiens
  misc_RNA (1)...(19): siRNA sense strand
ccaaauaccagucauauaa

SEQ ID NO: 431644 - RNA, 19 nt, Homo sapiens
  misc_RNA (1)...(19): siRNA sense strand
caagacaggcuuauaauuu

SEQ ID NO: 431645 - RNA, 19 nt, Homo sapiens
  misc_RNA (1)...(19): siRNA sense strand
gcaaccaccucaacucauu

SEQ ID NO: 431646 - RNA, 19 nt, Homo sapiens
  misc_RNA (1)...(19): siRNA sense strand
gaagagccaccgccuguua

SEQ ID NO: 431647 - RNA, 19 nt, Homo sapiens
  misc_RNA (1)...(19): siRNA sense strand
guaugaaacucaaaccaaa

SEQ ID NO: 431648 - RNA, 19 nt, Homo sapiens
  misc_RNA (1)...(19): siRNA sense strand
ccacugagguugugccaaa

SEQ ID NO: 431649 - RNA, 19 nt, Homo sapiens
  misc_RNA (1)...(19): siRNA sense strand
uaacaugucuccaguugug

SEQ ID NO: 431650 - RNA, 19 nt, Homo sapiens
  misc_RNA (1)...(19): siRNA sense strand
gaucugugcugaauacuca

SEQ ID NO: 431651 - RNA, 19 nt, Homo sapiens
  misc_RNA (1)...(19): siRNA sense strand
gagaauaucauguccaguu

SEQ ID NO: 431652 - RNA, 19 nt, Homo sapiens
  misc_RNA (1)...(19): siRNA sense strand
caacaaagggaauugguaa

SEQ ID NO: 431653 - RNA, 19 nt, Homo sapiens
  misc_RNA (1)...(19): siRNA sense strand
aaacugugauuccaaagaa

SEQ ID NO: 431654 - RNA, 19 nt, Homo sapiens
  misc_RNA (1)...(19): siRNA sense strand
gggcaagacaggcuuauaa

SEQ ID NO: 431655 - RNA, 19 nt, Homo sapiens
  misc_RNA (1)...(19): siRNA sense strand
ggauuucucuuucucuuuc

SEQ ID NO: 431656 - RNA, 19 nt, Homo sapiens
  misc_RNA (1)...(19): siRNA sense strand
gaagcaacaucugguucua

SEQ ID NO: 431657 - RNA, 19 nt, Homo sapiens
  misc_RNA (1)...(19): siRNA sense strand
caagaucugugcugaauac

SEQ ID NO: 431658 - RNA, 19 nt, Homo sapiens
  misc_RNA (1)...(19): siRNA sense strand
caaauuagaaccagaggaa

SEQ ID NO: 431659 - RNA, 19 nt, Homo sapiens
  misc_RNA (1)...(19): siRNA sense strand
gcaagacaggcuuauaauu

SEQ ID NO: 431660 - RNA, 19 nt, Homo sapiens
  misc_RNA (1)...(19): siRNA sense strand
ccaauacuaucuucuguuc

SEQ ID NO: 431661 - RNA, 19 nt, Homo sapiens
  misc_RNA (1)...(19): siRNA sense strand
guacccagcuacaacagaa

SEQ ID NO: 431662 - RNA, 19 nt, Homo sapiens
  misc_RNA (1)...(19): siRNA sense strand
guauaaaggucauaaacag

SEQ ID NO: 431663 - RNA, 19 nt, Homo sapiens
  misc_RNA (1)...(19): siRNA sense strand
aaagggaauugguaacaaa

SEQ ID NO: 431664 - RNA, 19 nt, Homo sapiens
  misc_RNA (1)...(19): siRNA sense strand
gaggaugccuuugauaaca

SEQ ID NO: 431665 - RNA, 19 nt, Homo sapiens
  misc_RNA (1)...(19): siRNA sense strand
gaaauccacugagguugug

SEQ ID NO: 431666 - RNA, 19 nt, Homo sapiens
  misc_RNA (1)...(19): siRNA sense strand
cacaagaggugcccgagaa

SEQ ID NO: 431667 - RNA, 19 nt, Homo sapiens
  misc_RNA (1)...(19): siRNA sense strand
caagugagcacacgaaauc

SEQ ID NO: 431668 - RNA, 19 nt, Homo sapiens
  misc_RNA (1)...(19): siRNA sense strand
ccacugguguuaaguuuca

SEQ ID NO: 431669 - RNA, 19 nt, Homo sapiens
  misc_RNA (1)...(19): siRNA sense strand
gggaagaaccaguacuaaa

SEQ ID NO: 431670 - RNA, 19 nt, Homo sapiens
  misc_RNA (1)...(19): siRNA sense strand
caaagggaauugguaacaa

SEQ ID NO: 431671 - RNA, 19 nt, Homo sapiens
  misc_RNA (1)...(19): siRNA sense strand
cacaagaccacaugaaauu

SEQ ID NO: 431672 - RNA, 19 nt, Homo sapiens
  misc_RNA (1)...(19): siRNA sense strand
gaagaaagaauagaacagu

SEQ ID NO: 431673 - RNA, 19 nt, Homo sapiens
  misc_RNA (1)...(19): siRNA sense strand
uggcucaccugaaauuaaa

SEQ ID NO: 431674 - RNA, 19 nt, Homo sapiens
  misc_RNA (1)...(19): siRNA sense strand
guggagaccuuuuaaauga

SEQ ID NO: 431675 - RNA, 19 nt, Homo sapiens
  misc_RNA (1)...(19): siRNA sense strand
ggagcagguugaaacaguu

SEQ ID NO: 431676 - RNA, 19 nt, Homo sapiens
  misc_RNA (1)...(19): siRNA sense strand
agaauaucauguccaguuu

SEQ ID NO: 431677 - RNA, 19 nt, Homo sapiens
  misc_RNA (1)...(19): siRNA sense strand
ggaagaaccaguacuaaaa

SEQ ID NO: 431678 - RNA, 19 nt, Homo sapiens
  misc_RNA (1)...(19): siRNA sense strand
ugagaggguugacacugua

SEQ ID NO: 431679 - RNA, 19 nt, Homo sapiens
  misc_RNA (1)...(19): siRNA sense strand
gaucaugggaaacacaauu

SEQ ID NO: 431680 - RNA, 19 nt, Homo sapiens
  misc_RNA (1)...(19): siRNA sense strand
gcagaaguguaacaugucu

SEQ ID NO: 431681 - RNA, 19 nt, Homo sapiens
  misc_RNA (1)...(19): siRNA sense strand
caaaauagaccaaaugaga

SEQ ID NO: 431682 - RNA, 19 nt, Homo sapiens
  misc_RNA (1)...(19): siRNA sense strand
gggaauuguuugagucuuc

SEQ ID NO: 431683 - RNA, 19 nt, Homo sapiens
  misc_RNA (1)...(19): siRNA sense strand
gauaacaacagugacauug

SEQ ID NO: 431684 - RNA, 19 nt, Homo sapiens
  misc_RNA (1)...(19): siRNA sense strand
gaagacuggauuacagaaa

SEQ ID NO: 431685 - RNA, 19 nt, Homo sapiens
  misc_RNA (1)...(19): siRNA sense strand
aagacaggcuuauaauuuc

SEQ ID NO: 431686 - RNA, 19 nt, Homo sapiens
  misc_RNA (1)...(19): siRNA sense strand
guacugaaauucggagaca

SEQ ID NO: 431687 - RNA, 19 nt, Homo sapiens
  misc_RNA (1)...(19): siRNA sense strand
ggguauccaucaucaauca

SEQ ID NO: 431688 - RNA, 19 nt, Homo sapiens
  misc_RNA (1)...(19): siRNA sense strand
ugacauugcugaagauggu

SEQ ID NO: 431689 - RNA, 19 nt, Homo sapiens
  misc_RNA (1)...(19): siRNA sense strand
caucaucaaucagugugua

SEQ ID NO: 431690 - RNA, 19 nt, Homo sapiens
  misc_RNA (1)...(19): siRNA sense strand
gguugacacuguaucagaa

SEQ ID NO: 431691 - RNA, 19 nt, Homo sapiens
  misc_RNA (1)...(19): siRNA sense strand
gaagagcgcaagucacaca

SEQ ID NO: 431692 - RNA, 19 nt, Homo sapiens
  misc_RNA (1)...(19): siRNA sense strand
gaauggcagggaauuguuu

SEQ ID NO: 431693 - RNA, 19 nt, Homo sapiens
  misc_RNA (1)...(19): siRNA sense strand
aagacuggcucaccugaaa

SEQ ID NO: 431694 - RNA, 19 nt, Homo sapiens
  misc_RNA (1)...(19): siRNA sense strand
ccagucauauaaucaguau

SEQ ID NO: 431695 - RNA, 19 nt, Homo sapiens
  misc_RNA (1)...(19): siRNA sense strand
acagugacauugcugaaga

SEQ ID NO: 431696 - RNA, 19 nt, Homo sapiens
  misc_RNA (1)...(19): siRNA sense strand
uguaacaugucuccaguug

SEQ ID NO: 431697 - RNA, 19 nt, Homo sapiens
  misc_RNA (1)...(19): siRNA sense strand
gaacgugcucagugggaua

SEQ ID NO: 431698 - RNA, 19 nt, Homo sapiens
  misc_RNA (1)...(19): siRNA sense strand
acaaagggagccuggauuu

SEQ ID NO: 431699 - RNA, 19 nt, Homo sapiens
  misc_RNA (1)...(19): siRNA sense strand
uaacaacagugacauugcu

SEQ ID NO: 431700 - RNA, 19 nt, Homo sapiens
  misc_RNA (1)...(19): siRNA sense strand
gaaaagaagcaacagagaa

SEQ ID NO: 431701 - RNA, 19 nt, Homo sapiens
  misc_RNA (1)...(19): siRNA sense strand
gcacaaagggagccuggau

SEQ ID NO: 431702 - RNA, 19 nt, Homo sapiens
  misc_RNA (1)...(19): siRNA sense strand
caagaggugcccgagaaua

SEQ ID NO: 431703 - RNA, 19 nt, Homo sapiens
  misc_RNA (1)...(19): siRNA sense strand
gaacaaaauagaccaaaug

SEQ ID NO: 431704 - RNA, 19 nt, Homo sapiens
  misc_RNA (1)...(19): siRNA sense strand
gcaaucacucugagaaaca

SEQ ID NO: 431705 - RNA, 19 nt, Homo sapiens
  misc_RNA (1)...(19): siRNA sense strand
ccacaugaaauucuggaaa

SEQ ID NO: 431706 - RNA, 19 nt, Homo sapiens
  misc_RNA (1)...(19): siRNA sense strand
aaagaguguugccuccaaa

SEQ ID NO: 431707 - RNA, 19 nt, Homo sapiens
  misc_RNA (1)...(19): siRNA sense strand
ucagugggauauuggcauu

SEQ ID NO: 431708 - RNA, 19 nt, Homo sapiens
  misc_RNA (1)...(19): siRNA sense strand
guccacugguguuaaguuu

SEQ ID NO: 431709 - RNA, 19 nt, Homo sapiens
  misc_RNA (1)...(19): siRNA sense strand
acacaaaauccccaaauua

SEQ ID NO: 431710 - RNA, 19 nt, Homo sapiens
  misc_RNA (1)...(19): siRNA sense strand
gagaguauaaaggucauaa

SEQ ID NO: 431711 - RNA, 19 nt, Homo sapiens
  misc_RNA (1)...(19): siRNA sense strand
gaaaucaaagcaugaaagc

SEQ ID NO: 431712 - RNA, 19 nt, Homo sapiens
  misc_RNA (1)...(19): siRNA sense strand
uugcagaaguguaacaugu

SEQ ID NO: 431713 - RNA, 19 nt, Homo sapiens
  misc_RNA (1)...(19): siRNA sense strand
gcuugagguucauacuaaa

SEQ ID NO: 431714 - RNA, 19 nt, Homo sapiens
  misc_RNA (1)...(19): siRNA sense strand
aaaccaaauaccagucaua

SEQ ID NO: 431715 - RNA, 19 nt, Homo sapiens
  misc_RNA (1)...(19): siRNA sense strand
caccaaaccagagaaauga

SEQ ID NO: 431716 - RNA, 19 nt, Homo sapiens
  misc_RNA (1)...(19): siRNA sense strand
caaaauccccaaauuagaa

SEQ ID NO: 431717 - RNA, 19 nt, Homo sapiens
  misc_RNA (1)...(19): siRNA sense strand
gcagcaaggcuuucaguac

SEQ ID NO: 431718 - RNA, 19 nt, Homo sapiens
  misc_RNA (1)...(19): siRNA sense strand
caaacugugauuccaaaga

SEQ ID NO: 431719 - RNA, 19 nt, Homo sapiens
  misc_RNA (1)...(19): siRNA sense strand
caacgcagaguguaucauc

SEQ ID NO: 431720 - RNA, 19 nt, Homo sapiens
  misc_RNA (1)...(19): siRNA sense strand
ccaaaccagagaaaugaaa

SEQ ID NO: 431721 - RNA, 19 nt, Homo sapiens
  misc_RNA (1)...(19): siRNA sense strand
ucaacaaagggaauuggua

SEQ ID NO: 431722 - RNA, 19 nt, Homo sapiens
  misc_RNA (1)...(19): siRNA sense strand
ugcaagggaucaugggaaa

SEQ ID NO: 431723 - RNA, 19 nt, Homo sapiens
  misc_RNA (1)...(19): siRNA sense strand
caaucacucugagaaacaa

SEQ ID NO: 431724 - RNA, 19 nt, Homo sapiens
  misc_RNA (1)...(19): siRNA sense strand
ucaggaggaugccuuugau

SEQ ID NO: 431725 - RNA, 19 nt, Homo sapiens
  misc_RNA (1)...(19): siRNA sense strand
ucaaucaguguguaugaaa

SEQ ID NO: 431726 - RNA, 19 nt, Homo sapiens
  misc_RNA (1)...(19): siRNA sense strand
agagaaauccacugagguu

SEQ ID NO: 431727 - RNA, 19 nt, Homo sapiens
  misc_RNA (1)...(19): siRNA sense strand
gagagggcguggguucaug

SEQ ID NO: 431728 - RNA, 19 nt, Homo sapiens
  misc_RNA (1)...(19): siRNA sense strand
gagcgcaagucacacaaaa

SEQ ID NO: 431729 - RNA, 19 nt, Homo sapiens
  misc_RNA (1)...(19): siRNA sense strand
gcaagugagcacacgaaau

SEQ ID NO: 431730 - RNA, 19 nt, Homo sapiens
  misc_RNA (1)...(19): siRNA sense strand
gaagacuggcucaccugaa

SEQ ID NO: 431731 - RNA, 19 nt, Homo sapiens
  misc_RNA (1)...(19): siRNA sense strand
ccuaaugggucagccaaug

SEQ ID NO: 431732 - RNA, 19 nt, Homo sapiens
  misc_RNA (1)...(19): siRNA sense strand
caacagugacauugcugaa

SEQ ID NO: 431733 - RNA, 19 nt, Homo sapiens
  misc_RNA (1)...(19): siRNA sense strand
uguaucaucuccugaagca

SEQ ID NO: 431734 - RNA, 19 nt, Homo sapiens
  misc_RNA (1)...(19): siRNA sense strand
ccauuacgaugcacaaagg

SEQ ID NO: 431735 - RNA, 19 nt, Homo sapiens
  misc_RNA (1)...(19): siRNA sense strand
gcagagaaagcauugaaaa

SEQ ID NO: 431736 - RNA, 19 nt, Homo sapiens
  misc_RNA (1)...(19): siRNA sense strand
aaacacaagaccacaugaa

SEQ ID NO: 431737 - RNA, 19 nt, Homo sapiens
  misc_RNA (1)...(19): siRNA sense strand
caauggcuuuggugcaguu

SEQ ID NO: 431738 - RNA, 19 nt, Homo sapiens
  misc_RNA (1)...(19): siRNA sense strand
uauccuugguggccuugua

SEQ ID NO: 431739 - RNA, 19 nt, Homo sapiens
  misc_RNA (1)...(19): siRNA sense strand
acucucaaguacugaaauu

SEQ ID NO: 431740 - RNA, 19 nt, Homo sapiens
  misc_RNA (1)...(19): siRNA sense strand
ccaaacaagccagcaauca

SEQ ID NO: 431741 - RNA, 19 nt, Homo sapiens
  misc_RNA (1)...(19): siRNA sense strand
gggcguggguucaugaaaa

SEQ ID NO: 431742 - RNA, 19 nt, Homo sapiens
  misc_RNA (1)...(19): siRNA sense strand
agcuugagguucauacuaa

SEQ ID NO: 431743 - RNA, 19 nt, Homo sapiens
  misc_RNA (1)...(19): siRNA sense strand
ccaaauaccagucauauaa

SEQ ID NO: 431744 - RNA, 19 nt, Homo sapiens
  misc_RNA (1)...(19): siRNA sense strand
caagacaggcuuauaauuu

SEQ ID NO: 431745 - RNA, 19 nt, Homo sapiens
  misc_RNA (1)...(19): siRNA sense strand
gcaaccaccucaacucauu

SEQ ID NO: 431746 - RNA, 19 nt, Homo sapiens
  misc_RNA (1)...(19): siRNA sense strand
gaagagccaccgccuguua

SEQ ID NO: 431747 - RNA, 19 nt, Homo sapiens
  misc_RNA (1)...(19): siRNA sense strand
guaugaaacucaaaccaaa

SEQ ID NO: 431748 - RNA, 19 nt, Homo sapiens
  misc_RNA (1)...(19): siRNA sense strand
ccacugagguugugccaaa

SEQ ID NO: 431749 - RNA, 19 nt, Homo sapiens
  misc_RNA (1)...(19): siRNA sense strand
uaacaugucuccaguugug

SEQ ID NO: 431750 - RNA, 19 nt, Homo sapiens
  misc_RNA (1)...(19): siRNA sense strand
gaucugugcugaauacuca

SEQ ID NO: 431751 - RNA, 19 nt, Homo sapiens
  misc_RNA (1)...(19): siRNA sense strand
gagaauaucauguccaguu

SEQ ID NO: 431752 - RNA, 19 nt, Homo sapiens
  misc_RNA (1)...(19): siRNA sense strand
caacaaagggaauugguaa

SEQ ID NO: 431753 - RNA, 19 nt, Homo sapiens
  misc_RNA (1)...(19): siRNA sense strand
aaacugugauuccaaagaa

SEQ ID NO: 431754 - RNA, 19 nt, Homo sapiens
  misc_RNA (1)...(19): siRNA sense strand
gggcaagacaggcuuauaa

SEQ ID NO: 431755 - RNA, 19 nt, Homo sapiens
  misc_RNA (1)...(19): siRNA sense strand
ggauuucucuuucucuuuc

SEQ ID NO: 431756 - RNA, 19 nt, Homo sapiens
  misc_RNA (1)...(19): siRNA sense strand
gaagcaacaucugguucua

SEQ ID NO: 431757 - RNA, 19 nt, Homo sapiens
  misc_RNA (1)...(19): siRNA sense strand
caagaucugugcugaauac

SEQ ID NO: 431758 - RNA, 19 nt, Homo sapiens
  misc_RNA (1)...(19): siRNA sense strand
caaauuagaaccagaggaa

SEQ ID NO: 431759 - RNA, 19 nt, Homo sapiens
  misc_RNA (1)...(19): siRNA sense strand
gcaagacaggcuuauaauu

SEQ ID NO: 431760 - RNA, 19 nt, Homo sapiens
  misc_RNA (1)...(19): siRNA sense strand
ccaauacuaucuucuguuc

SEQ ID NO: 431761 - RNA, 19 nt, Homo sapiens
  misc_RNA (1)...(19): siRNA sense strand
guacccagcuacaacagaa

SEQ ID NO: 431762 - RNA, 19 nt, Homo sapiens
  misc_RNA (1)...(19): siRNA sense strand
guauaaaggucauaaacag

SEQ ID NO: 431763 - RNA, 19 nt, Homo sapiens
  misc_RNA (1)...(19): siRNA sense strand
aaagggaauugguaacaaa

SEQ ID NO: 431764 - RNA, 19 nt, Homo sapiens
  misc_RNA (1)...(19): siRNA sense strand
gaggaugccuuugauaaca

SEQ ID NO: 431765 - RNA, 19 nt, Homo sapiens
  misc_RNA (1)...(19): siRNA sense strand
gaaauccacugagguugug

SEQ ID NO: 431766 - RNA, 19 nt, Homo sapiens
  misc_RNA (1)...(19): siRNA sense strand
cacaagaggugcccgagaa

SEQ ID NO: 431767 - RNA, 19 nt, Homo sapiens
  misc_RNA (1)...(19): siRNA sense strand
caagugagcacacgaaauc

SEQ ID NO: 431768 - RNA, 19 nt, Homo sapiens
  misc_RNA (1)...(19): siRNA sense strand
ccacugguguuaaguuuca

SEQ ID NO: 431769 - RNA, 19 nt, Homo sapiens
  misc_RNA (1)...(19): siRNA sense strand
gggaagaaccaguacuaaa

SEQ ID NO: 431770 - RNA, 19 nt, Homo sapiens
  misc_RNA (1)...(19): siRNA sense strand
caaagggaauugguaacaa

SEQ ID NO: 431771 - RNA, 19 nt, Homo sapiens
  misc_RNA (1)...(19): siRNA sense strand
cacaagaccacaugaaauu

SEQ ID NO: 431772 - RNA, 19 nt, Homo sapiens
  misc_RNA (1)...(19): siRNA sense strand
gaagaaagaauagaacagu

SEQ ID NO: 431773 - RNA, 19 nt, Homo sapiens
  misc_RNA (1)...(19): siRNA sense strand
uggcucaccugaaauuaaa

SEQ ID NO: 431774 - RNA, 19 nt, Homo sapiens
  misc_RNA (1)...(19): siRNA sense strand
guggagaccuuuuaaauga

SEQ ID NO: 431775 - RNA, 19 nt, Homo sapiens
  misc_RNA (1)...(19): siRNA sense strand
ggagcagguugaaacaguu

SEQ ID NO: 431776 - RNA, 19 nt, Homo sapiens
  misc_RNA (1)...(19): siRNA sense strand
agaauaucauguccaguuu

SEQ ID NO: 431777 - RNA, 19 nt, Homo sapiens
  misc_RNA (1)...(19): siRNA sense strand
ggaagaaccaguacuaaaa

SEQ ID NO: 431778 - RNA, 19 nt, Homo sapiens
  misc_RNA (1)...(19): siRNA sense strand
ugagaggguugacacugua

SEQ ID NO: 431779 - RNA, 19 nt, Homo sapiens
  misc_RNA (1)...(19): siRNA sense strand
gaucaugggaaacacaauu

SEQ ID NO: 431780 - RNA, 19 nt, Homo sapiens
  misc_RNA (1)...(19): siRNA sense strand
gcagaaguguaacaugucu

SEQ ID NO: 431781 - RNA, 19 nt, Homo sapiens
  misc_RNA (1)...(19): siRNA sense strand
caaaauagaccaaaugaga

SEQ ID NO: 431782 - RNA, 19 nt, Homo sapiens
  misc_RNA (1)...(19): siRNA sense strand
gggaauuguuugagucuuc

SEQ ID NO: 431783 - RNA, 19 nt, Homo sapiens
  misc_RNA (1)...(19): siRNA sense strand
gauaacaacagugacauug

SEQ ID NO: 431784 - RNA, 19 nt, Homo sapiens
  misc_RNA (1)...(19): siRNA sense strand
gaagacuggauuacagaaa

SEQ ID NO: 431785 - RNA, 19 nt, Homo sapiens
  misc_RNA (1)...(19): siRNA sense strand
aagacaggcuuauaauuuc

SEQ ID NO: 431786 - RNA, 19 nt, Homo sapiens
  misc_RNA (1)...(19): siRNA sense strand
guacugaaauucggagaca

SEQ ID NO: 431787 - RNA, 19 nt, Homo sapiens
  misc_RNA (1)...(19): siRNA sense strand
ggguauccaucaucaauca

SEQ ID NO: 431788 - RNA, 19 nt, Homo sapiens
  misc_RNA (1)...(19): siRNA sense strand
ugacauugcugaagauggu

SEQ ID NO: 431789 - RNA, 19 nt, Homo sapiens
  misc_RNA (1)...(19): siRNA sense strand
caucaucaaucagugugua

SEQ ID NO: 431790 - RNA, 19 nt, Homo sapiens
  misc_RNA (1)...(19): siRNA sense strand
gguugacacuguaucagaa

SEQ ID NO: 431791 - RNA, 19 nt, Homo sapiens
  misc_RNA (1)...(19): siRNA sense strand
gaagagcgcaagucacaca

SEQ ID NO: 431792 - RNA, 19 nt, Homo sapiens
  misc_RNA (1)...(19): siRNA sense strand
gaauggcagggaauuguuu

SEQ ID NO: 431793 - RNA, 19 nt, Homo sapiens
  misc_RNA (1)...(19): siRNA sense strand
aagacuggcucaccugaaa

SEQ ID NO: 431794 - RNA, 19 nt, Homo sapiens
  misc_RNA (1)...(19): siRNA sense strand
ccagucauauaaucaguau

SEQ ID NO: 431795 - RNA, 19 nt, Homo sapiens
  misc_RNA (1)...(19): siRNA sense strand
acagugacauugcugaaga

SEQ ID NO: 431796 - RNA, 19 nt, Homo sapiens
  misc_RNA (1)...(19): siRNA sense strand
uguaacaugucuccaguug

SEQ ID NO: 431797 - RNA, 19 nt, Homo sapiens
  misc_RNA (1)...(19): siRNA sense strand
gaacgugcucagugggaua

SEQ ID NO: 431798 - RNA, 19 nt, Homo sapiens
  misc_RNA (1)...(19): siRNA sense strand
acaaagggagccuggauuu

SEQ ID NO: 431799 - RNA, 19 nt, Homo sapiens
  misc_RNA (1)...(19): siRNA sense strand
uaacaacagugacauugcu

SEQ ID NO: 431800 - RNA, 19 nt, Homo sapiens
  misc_RNA (1)...(19): siRNA sense strand
gaaaagaagcaacagagaa

SEQ ID NO: 431801 - RNA, 19 nt, Homo sapiens
  misc_RNA (1)...(19): siRNA sense strand
gcacaaagggagccuggau

SEQ ID NO: 431802 - RNA, 19 nt, Homo sapiens
  misc_RNA (1)...(19): siRNA sense strand
caagaggugcccgagaaua

SEQ ID NO: 431803 - RNA, 19 nt, Homo sapiens
  misc_RNA (1)...(19): siRNA sense strand
gaacaaaauagaccaaaug

SEQ ID NO: 431804 - RNA, 19 nt, Homo sapiens
  misc_RNA (1)...(19): siRNA sense strand
gcaaucacucugagaaaca

SEQ ID NO: 431805 - RNA, 19 nt, Homo sapiens
  misc_RNA (1)...(19): siRNA sense strand
ccacaugaaauucuggaaa

SEQ ID NO: 431806 - RNA, 19 nt, Homo sapiens
  misc_RNA (1)...(19): siRNA sense strand
aaagaguguugccuccaaa

SEQ ID NO: 431807 - RNA, 19 nt, Homo sapiens
  misc_RNA (1)...(19): siRNA sense strand
ucagugggauauuggcauu

SEQ ID NO: 431808 - RNA, 19 nt, Homo sapiens
  misc_RNA (1)...(19): siRNA sense strand
guccacugguguuaaguuu

SEQ ID NO: 431809 - RNA, 19 nt, Homo sapiens
  misc_RNA (1)...(19): siRNA sense strand
acacaaaauccccaaauua

SEQ ID NO: 431810 - RNA, 19 nt, Homo sapiens
  misc_RNA (1)...(19): siRNA sense strand
gagaguauaaaggucauaa

SEQ ID NO: 431811 - RNA, 19 nt, Homo sapiens
  misc_RNA (1)...(19): siRNA sense strand
gaaaucaaagcaugaaagc

SEQ ID NO: 431812 - RNA, 19 nt, Homo sapiens
  misc_RNA (1)...(19): siRNA sense strand
uugcagaaguguaacaugu

SEQ ID NO: 431813 - RNA, 19 nt, Homo sapiens
  misc_RNA (1)...(19): siRNA sense strand
gcuugagguucauacuaaa

SEQ ID NO: 431814 - RNA, 19 nt, Homo sapiens
  misc_RNA (1)...(19): siRNA sense strand
aaaccaaauaccagucaua

SEQ ID NO: 431815 - RNA, 19 nt, Homo sapiens
  misc_RNA (1)...(19): siRNA sense strand
caccaaaccagagaaauga

SEQ ID NO: 431816 - RNA, 19 nt, Homo sapiens
  misc_RNA (1)...(19): siRNA sense strand
caaaauccccaaauuagaa

SEQ ID NO: 431817 - RNA, 19 nt, Homo sapiens
  misc_RNA (1)...(19): siRNA sense strand
gcagcaaggcuuucaguac

SEQ ID NO: 431818 - RNA, 19 nt, Homo sapiens
  misc_RNA (1)...(19): siRNA sense strand
caaacugugauuccaaaga

SEQ ID NO: 431819 - RNA, 19 nt, Homo sapiens
  misc_RNA (1)...(19): siRNA sense strand
caacgcagaguguaucauc

SEQ ID NO: 431820 - RNA, 19 nt, Homo sapiens
  misc_RNA (1)...(19): siRNA sense strand
ccaaaccagagaaaugaaa

SEQ ID NO: 431821 - RNA, 19 nt, Homo sapiens
  misc_RNA (1)...(19): siRNA sense strand
ucaacaaagggaauuggua

SEQ ID NO: 431822 - RNA, 19 nt, Homo sapiens
  misc_RNA (1)...(19): siRNA sense strand
ugcaagggaucaugggaaa

SEQ ID NO: 431823 - RNA, 19 nt, Homo sapiens
  misc_RNA (1)...(19): siRNA sense strand
caaucacucugagaaacaa

SEQ ID NO: 431824 - RNA, 19 nt, Homo sapiens
  misc_RNA (1)...(19): siRNA sense strand
ucaggaggaugccuuugau

SEQ ID NO: 431825 - RNA, 19 nt, Homo sapiens
  misc_RNA (1)...(19): siRNA sense strand
ucaaucaguguguaugaaa

SEQ ID NO: 431826 - RNA, 19 nt, Homo sapiens
  misc_RNA (1)...(19): siRNA sense strand
agagaaauccacugagguu

SEQ ID NO: 431827 - RNA, 19 nt, Homo sapiens
  misc_RNA (1)...(19): siRNA sense strand
gagagggcguggguucaug

SEQ ID NO: 431828 - RNA, 19 nt, Homo sapiens
  misc_RNA (1)...(19): siRNA sense strand
gagcgcaagucacacaaaa

SEQ ID NO: 431829 - RNA, 19 nt, Homo sapiens
  misc_RNA (1)...(19): siRNA sense strand
gcaagugagcacacgaaau

SEQ ID NO: 431830 - RNA, 19 nt, Homo sapiens
  misc_RNA (1)...(19): siRNA sense strand
gaagacuggcucaccugaa

SEQ ID NO: 431831 - RNA, 19 nt, Homo sapiens
  misc_RNA (1)...(19): siRNA sense strand
ccuaaugggucagccaaug

SEQ ID NO: 431832 - RNA, 19 nt, Homo sapiens
  misc_RNA (1)...(19): siRNA sense strand
caacagugacauugcugaa

SEQ ID NO: 431833 - RNA, 19 nt, Homo sapiens
  misc_RNA (1)...(19): siRNA sense strand
uguaucaucuccugaagca

SEQ ID NO: 431834 - RNA, 19 nt, Homo sapiens
  misc_RNA (1)...(19): siRNA sense strand
ccauuacgaugcacaaagg

SEQ ID NO: 431835 - RNA, 19 nt, Homo sapiens
  misc_RNA (1)...(19): siRNA sense strand
gcagagaaagcauugaaaa

SEQ ID NO: 431836 - RNA, 19 nt, Homo sapiens
  misc_RNA (1)...(19): siRNA sense strand
aaacacaagaccacaugaa

SEQ ID NO: 431837 - RNA, 19 nt, Homo sapiens
  misc_RNA (1)...(19): siRNA sense strand
caauggcuuuggugcaguu

SEQ ID NO: 431838 - RNA, 19 nt, Homo sapiens
  misc_RNA (1)...(19): siRNA sense strand
uauccuugguggccuugua

SEQ ID NO: 431839 - RNA, 19 nt, Homo sapiens
  misc_RNA (1)...(19): siRNA sense strand
acucucaaguacugaaauu

SEQ ID NO: 431840 - RNA, 19 nt, Homo sapiens
  misc_RNA (1)...(19): siRNA sense strand
ccaaacaagccagcaauca

SEQ ID NO: 431841 - RNA, 19 nt, Homo sapiens
  misc_RNA (1)...(19): siRNA sense strand
gggcguggguucaugaaaa

SEQ ID NO: 431842 - RNA, 19 nt, Homo sapiens
  misc_RNA (1)...(19): siRNA sense strand
agcuugagguucauacuaa

SEQ ID NO: 431843 - RNA, 19 nt, Homo sapiens
  misc_RNA (1)...(19): siRNA sense strand
gcaaauaccuccucuacga

SEQ ID NO: 431844 - RNA, 19 nt, Homo sapiens
  misc_RNA (1)...(19): siRNA sense strand
ggacugaucuccucuacaa

SEQ ID NO: 431845 - RNA, 19 nt, Homo sapiens
  misc_RNA (1)...(19): siRNA sense strand
gaagaugaguuccaaauca

SEQ ID NO: 431846 - RNA, 19 nt, Homo sapiens
  misc_RNA (1)...(19): siRNA sense strand
ggcaagaaauguccucaua

SEQ ID NO: 431847 - RNA, 19 nt, Homo sapiens
  misc_RNA (1)...(19): siRNA sense strand
ggaacaacgugcugcgaua

SEQ ID NO: 431848 - RNA, 19 nt, Homo sapiens
  misc_RNA (1)...(19): siRNA sense strand
gcacagcccuggacaucaa

SEQ ID NO: 431849 - RNA, 19 nt, Homo sapiens
  misc_RNA (1)...(19): siRNA sense strand
gaaccauacuucauuggaa

SEQ ID NO: 431850 - RNA, 19 nt, Homo sapiens
  misc_RNA (1)...(19): siRNA sense strand
gagagggccugcauugauu

SEQ ID NO: 431851 - RNA, 19 nt, Homo sapiens
  misc_RNA (1)...(19): siRNA sense strand
ggaacgaggucauguacga

SEQ ID NO: 431852 - RNA, 19 nt, Homo sapiens
  misc_RNA (1)...(19): siRNA sense strand
ugacugaguuugggaauaa

SEQ ID NO: 431853 - RNA, 19 nt, Homo sapiens
  misc_RNA (1)...(19): siRNA sense strand
gaagaaguaugaauuccau

SEQ ID NO: 431854 - RNA, 19 nt, Homo sapiens
  misc_RNA (1)...(19): siRNA sense strand
gaaagauugucgaggcaaa

SEQ ID NO: 431855 - RNA, 19 nt, Homo sapiens
  misc_RNA (1)...(19): siRNA sense strand
ggaugcagguguuugguaa

SEQ ID NO: 431856 - RNA, 19 nt, Homo sapiens
  misc_RNA (1)...(19): siRNA sense strand
ccacaaaggcuccuacuug

SEQ ID NO: 431857 - RNA, 19 nt, Homo sapiens
  misc_RNA (1)...(19): siRNA sense strand
gaaacuugcccuacagaaa

SEQ ID NO: 431858 - RNA, 19 nt, Homo sapiens
  misc_RNA (1)...(19): siRNA sense strand
gaacuacacccuccugaau

SEQ ID NO: 431859 - RNA, 19 nt, Homo sapiens
  misc_RNA (1)...(19): siRNA sense strand
gcggucggauucauuauaa

SEQ ID NO: 431860 - RNA, 19 nt, Homo sapiens
  misc_RNA (1)...(19): siRNA sense strand
gggcuucuguugcuuauga

SEQ ID NO: 431861 - RNA, 19 nt, Homo sapiens
  misc_RNA (1)...(19): siRNA sense strand
cacaaaggcuccuacuuga

SEQ ID NO: 431862 - RNA, 19 nt, Homo sapiens
  misc_RNA (1)...(19): siRNA sense strand
cgaauggccucccuuugaa

SEQ ID NO: 431863 - RNA, 19 nt, Homo sapiens
  misc_RNA (1)...(19): siRNA sense strand
ccaccaacuucgauacuuu

SEQ ID NO: 431864 - RNA, 19 nt, Homo sapiens
  misc_RNA (1)...(19): siRNA sense strand
acaagaugauggaggaaua

SEQ ID NO: 431865 - RNA, 19 nt, Homo sapiens
  misc_RNA (1)...(19): siRNA sense strand
gaaaagacaucaacacgau

SEQ ID NO: 431866 - RNA, 19 nt, Homo sapiens
  misc_RNA (1)...(19): siRNA sense strand
ggagaaccaccauaaagaa

SEQ ID NO: 431867 - RNA, 19 nt, Homo sapiens
  misc_RNA (1)...(19): siRNA sense strand
ugaaagagcaacagaagaa

SEQ ID NO: 431868 - RNA, 19 nt, Homo sapiens
  misc_RNA (1)...(19): siRNA sense strand
gcagagaaccagaggagaa

SEQ ID NO: 431869 - RNA, 19 nt, Homo sapiens
  misc_RNA (1)...(19): siRNA sense strand
ccaaaucacugagcacaau

SEQ ID NO: 431870 - RNA, 19 nt, Homo sapiens
  misc_RNA (1)...(19): siRNA sense strand
caagaaauguccucauagg

SEQ ID NO: 431871 - RNA, 19 nt, Homo sapiens
  misc_RNA (1)...(19): siRNA sense strand
ccaaggagguggcagaagu

SEQ ID NO: 431872 - RNA, 19 nt, Homo sapiens
  misc_RNA (1)...(19): siRNA sense strand
ggacagugaugaagaugag

SEQ ID NO: 431873 - RNA, 19 nt, Homo sapiens
  misc_RNA (1)...(19): siRNA sense strand
ggaaugucauggacuuugu

SEQ ID NO: 431874 - RNA, 19 nt, Homo sapiens
  misc_RNA (1)...(19): siRNA sense strand
ggaauauucucgacuucau

SEQ ID NO: 431875 - RNA, 19 nt, Homo sapiens
  misc_RNA (1)...(19): siRNA sense strand
guuacgagcccucagguua

SEQ ID NO: 431876 - RNA, 19 nt, Homo sapiens
  misc_RNA (1)...(19): siRNA sense strand
gcagaggcaucccuuugau

SEQ ID NO: 431877 - RNA, 19 nt, Homo sapiens
  misc_RNA (1)...(19): siRNA sense strand
caggagauguuccagaaga

SEQ ID NO: 431878 - RNA, 19 nt, Homo sapiens
  misc_RNA (1)...(19): siRNA sense strand
gcacugacgaguccaaaga

SEQ ID NO: 431879 - RNA, 19 nt, Homo sapiens
  misc_RNA (1)...(19): siRNA sense strand
aaagacaucaacacgauua

SEQ ID NO: 431880 - RNA, 19 nt, Homo sapiens
  misc_RNA (1)...(19): siRNA sense strand
gcagaucggccuccuccua

SEQ ID NO: 431881 - RNA, 19 nt, Homo sapiens
  misc_RNA (1)...(19): siRNA sense strand
ggacagaccugagcaugac

SEQ ID NO: 431882 - RNA, 19 nt, Homo sapiens
  misc_RNA (1)...(19): siRNA sense strand
ucacugagcacaauaacuu

SEQ ID NO: 431883 - RNA, 19 nt, Homo sapiens
  misc_RNA (1)...(19): siRNA sense strand
gaauauucucgacuucaua

SEQ ID NO: 431884 - RNA, 19 nt, Homo sapiens
  misc_RNA (1)...(19): siRNA sense strand
gaacaucuucgacuuugug

SEQ ID NO: 431885 - RNA, 19 nt, Homo sapiens
  misc_RNA (1)...(19): siRNA sense strand
gagaaccaccauaaagaaa

SEQ ID NO: 431886 - RNA, 19 nt, Homo sapiens
  misc_RNA (1)...(19): siRNA sense strand
gggaaaccgugugauaaga

SEQ ID NO: 431887 - RNA, 19 nt, Homo sapiens
  misc_RNA (1)...(19): siRNA sense strand
ugaauuccauuacgacaau

SEQ ID NO: 431888 - RNA, 19 nt, Homo sapiens
  misc_RNA (1)...(19): siRNA sense strand
gagcagaggcaucccuuug

SEQ ID NO: 431889 - RNA, 19 nt, Homo sapiens
  misc_RNA (1)...(19): siRNA sense strand
ggaccgcuaugcccaggaa

SEQ ID NO: 431890 - RNA, 19 nt, Homo sapiens
  misc_RNA (1)...(19): siRNA sense strand
ccacagguccucaagcauu

SEQ ID NO: 431891 - RNA, 19 nt, Homo sapiens
  misc_RNA (1)...(19): siRNA sense strand
uuucgaggcuggaauuaaa

SEQ ID NO: 431892 - RNA, 19 nt, Homo sapiens
  misc_RNA (1)...(19): siRNA sense strand
ggaaaccgugugauaagaa

SEQ ID NO: 431893 - RNA, 19 nt, Homo sapiens
  misc_RNA (1)...(19): siRNA sense strand
ggaauaacuucaucaaccu

SEQ ID NO: 431894 - RNA, 19 nt, Homo sapiens
  misc_RNA (1)...(19): siRNA sense strand
gggaggcccuguauaacga

SEQ ID NO: 431895 - RNA, 19 nt, Homo sapiens
  misc_RNA (1)...(19): siRNA sense strand
caucugggcugucauaaaa

SEQ ID NO: 431896 - RNA, 19 nt, Homo sapiens
  misc_RNA (1)...(19): siRNA sense strand
aggaauggcuggaauguca

SEQ ID NO: 431897 - RNA, 19 nt, Homo sapiens
  misc_RNA (1)...(19): siRNA sense strand
cagaggauauugacaacau

SEQ ID NO: 431898 - RNA, 19 nt, Homo sapiens
  misc_RNA (1)...(19): siRNA sense strand
agaacugccucacgguuaa

SEQ ID NO: 431899 - RNA, 19 nt, Homo sapiens
  misc_RNA (1)...(19): siRNA sense strand
guccugaagucgaucauga

SEQ ID NO: 431900 - RNA, 19 nt, Homo sapiens
  misc_RNA (1)...(19): siRNA sense strand
gaucuacgcagccaugaug

SEQ ID NO: 431901 - RNA, 19 nt, Homo sapiens
  misc_RNA (1)...(19): siRNA sense strand
cccaggagcucaccaagga

SEQ ID NO: 431902 - RNA, 19 nt, Homo sapiens
  misc_RNA (1)...(19): siRNA sense strand
guacugggcaucucucaga

SEQ ID NO: 431903 - RNA, 19 nt, Homo sapiens
  misc_RNA (1)...(19): siRNA sense strand
gaagacaacguggugagaa

SEQ ID NO: 431904 - RNA, 19 nt, Homo sapiens
  misc_RNA (1)...(19): siRNA sense strand
gaucggccuccuccuauuu

SEQ ID NO: 431905 - RNA, 19 nt, Homo sapiens
  misc_RNA (1)...(19): siRNA sense strand
gcagcgaaccagaaacuug

SEQ ID NO: 431906 - RNA, 19 nt, Homo sapiens
  misc_RNA (1)...(19): siRNA sense strand
gcuggaaugucauggacuu

SEQ ID NO: 431907 - RNA, 19 nt, Homo sapiens
  misc_RNA (1)...(19): siRNA sense strand
ccgaauggccucccuuuga

SEQ ID NO: 431908 - RNA, 19 nt, Homo sapiens
  misc_RNA (1)...(19): siRNA sense strand
ggacgaggacagugaugaa

SEQ ID NO: 431909 - RNA, 19 nt, Homo sapiens
  misc_RNA (1)...(19): siRNA sense strand
cagaacugccucacgguua

SEQ ID NO: 431910 - RNA, 19 nt, Homo sapiens
  misc_RNA (1)...(19): siRNA sense strand
gggaguggaagaaguauga

SEQ ID NO: 431911 - RNA, 19 nt, Homo sapiens
  misc_RNA (1)...(19): siRNA sense strand
ggucaucugggcugucaua

SEQ ID NO: 431912 - RNA, 19 nt, Homo sapiens
  misc_RNA (1)...(19): siRNA sense strand
ugucuggaaucccaaguuu

SEQ ID NO: 431913 - RNA, 19 nt, Homo sapiens
  misc_RNA (1)...(19): siRNA sense strand
gcacauggaguccggaaca

SEQ ID NO: 431914 - RNA, 19 nt, Homo sapiens
  misc_RNA (1)...(19): siRNA sense strand
cuucaucuaugccaucauu

SEQ ID NO: 431915 - RNA, 19 nt, Homo sapiens
  misc_RNA (1)...(19): siRNA sense strand
ugacgaguccaaagaguuu

SEQ ID NO: 431916 - RNA, 19 nt, Homo sapiens
  misc_RNA (1)...(19): siRNA sense strand
gcgauacuuugacuacguu

SEQ ID NO: 431917 - RNA, 19 nt, Homo sapiens
  misc_RNA (1)...(19): siRNA sense strand
gaucuccucuacaauagca

SEQ ID NO: 431918 - RNA, 19 nt, Homo sapiens
  misc_RNA (1)...(19): siRNA sense strand
acagaaccauacuucauug

SEQ ID NO: 431919 - RNA, 19 nt, Homo sapiens
  misc_RNA (1)...(19): siRNA sense strand
ugacaacaccguccacuuc

SEQ ID NO: 431920 - RNA, 19 nt, Homo sapiens
  misc_RNA (1)...(19): siRNA sense strand
gcucguuucugaugcugaa

SEQ ID NO: 431921 - RNA, 19 nt, Homo sapiens
  misc_RNA (1)...(19): siRNA sense strand
gcaucagggugccuacuuc

SEQ ID NO: 431922 - RNA, 19 nt, Homo sapiens
  misc_RNA (1)...(19): siRNA sense strand
gcaacaacaacaccaacaa

SEQ ID NO: 431923 - RNA, 19 nt, Homo sapiens
  misc_RNA (1)...(19): siRNA sense strand
gccgggaggcccuguauaa

SEQ ID NO: 431924 - RNA, 19 nt, Homo sapiens
  misc_RNA (1)...(19): siRNA sense strand
ggacuccucccaccaacuu

SEQ ID NO: 431925 - RNA, 19 nt, Homo sapiens
  misc_RNA (1)...(19): siRNA sense strand
ggaacugguuguacuucau

SEQ ID NO: 431926 - RNA, 19 nt, Homo sapiens
  misc_RNA (1)...(19): siRNA sense strand
gcaaucauaggguuagaau

SEQ ID NO: 431927 - RNA, 19 nt, Homo sapiens
  misc_RNA (1)...(19): siRNA sense strand
ccaaugggaccaaauguca

SEQ ID NO: 431928 - RNA, 19 nt, Homo sapiens
  misc_RNA (1)...(19): siRNA sense strand
cccaggagauguuccagaa

SEQ ID NO: 431929 - RNA, 19 nt, Homo sapiens
  misc_RNA (1)...(19): siRNA sense strand
gcaagaaauguccucauag

SEQ ID NO: 431930 - RNA, 19 nt, Homo sapiens
  misc_RNA (1)...(19): siRNA sense strand
gaaaccgugugauaagaac

SEQ ID NO: 431931 - RNA, 19 nt, Homo sapiens
  misc_RNA (1)...(19): siRNA sense strand
ggaauacagccuggagaaa

SEQ ID NO: 431932 - RNA, 19 nt, Homo sapiens
  misc_RNA (1)...(19): siRNA sense strand
gacaucaacacgauuaaau

SEQ ID NO: 431933 - RNA, 19 nt, Homo sapiens
  misc_RNA (1)...(19): siRNA sense strand
cgugaccucuggaauauuc

SEQ ID NO: 431934 - RNA, 19 nt, Homo sapiens
  misc_RNA (1)...(19): siRNA sense strand
gaagaaggaggaggaggaa

SEQ ID NO: 431935 - RNA, 19 nt, Homo sapiens
  misc_RNA (1)...(19): siRNA sense strand
ccaguuuaauuucgaugaa

SEQ ID NO: 431936 - RNA, 19 nt, Homo sapiens
  misc_RNA (1)...(19): siRNA sense strand
caagacagauuugcucaac

SEQ ID NO: 431937 - RNA, 19 nt, Homo sapiens
  misc_RNA (1)...(19): siRNA sense strand
cagcuaagacugccaggaa

SEQ ID NO: 431938 - RNA, 19 nt, Homo sapiens
  misc_RNA (1)...(19): siRNA sense strand
cccgacgccuggacgauua

SEQ ID NO: 431939 - RNA, 19 nt, Homo sapiens
  misc_RNA (1)...(19): siRNA sense strand
gcgggaaaccgugugauaa

SEQ ID NO: 431940 - RNA, 19 nt, Homo sapiens
  misc_RNA (1)...(19): siRNA sense strand
cgaggacagugaugaagau

SEQ ID NO: 431941 - RNA, 19 nt, Homo sapiens
  misc_RNA (1)...(19): siRNA sense strand
gaaugugugcugaaaguca

SEQ ID NO: 431942 - RNA, 19 nt, Homo sapiens
  misc_RNA (1)...(19): siRNA sense strand
gagauggugaucaagauga

SEQ ID NO: 431943 - RNA, 19 nt, Homo sapiens
  misc_RNA (1)...(19): siRNA sense strand
gcaaauaccuccucuacga

SEQ ID NO: 431944 - RNA, 19 nt, Homo sapiens
  misc_RNA (1)...(19): siRNA sense strand
ggacugaucuccucuacaa

SEQ ID NO: 431945 - RNA, 19 nt, Homo sapiens
  misc_RNA (1)...(19): siRNA sense strand
gaagaugaguuccaaauca

SEQ ID NO: 431946 - RNA, 19 nt, Homo sapiens
  misc_RNA (1)...(19): siRNA sense strand
ggcaagaaauguccucaua

SEQ ID NO: 431947 - RNA, 19 nt, Homo sapiens
  misc_RNA (1)...(19): siRNA sense strand
ggaacaacgugcugcgaua

SEQ ID NO: 431948 - RNA, 19 nt, Homo sapiens
  misc_RNA (1)...(19): siRNA sense strand
gcacagcccuggacaucaa

SEQ ID NO: 431949 - RNA, 19 nt, Homo sapiens
  misc_RNA (1)...(19): siRNA sense strand
gaaccauacuucauuggaa

SEQ ID NO: 431950 - RNA, 19 nt, Homo sapiens
  misc_RNA (1)...(19): siRNA sense strand
gagagggccugcauugauu

SEQ ID NO: 431951 - RNA, 19 nt, Homo sapiens
  misc_RNA (1)...(19): siRNA sense strand
ggaacgaggucauguacga

SEQ ID NO: 431952 - RNA, 19 nt, Homo sapiens
  misc_RNA (1)...(19): siRNA sense strand
ugacugaguuugggaauaa

SEQ ID NO: 431953 - RNA, 19 nt, Homo sapiens
  misc_RNA (1)...(19): siRNA sense strand
gaagaaguaugaauuccau

SEQ ID NO: 431954 - RNA, 19 nt, Homo sapiens
  misc_RNA (1)...(19): siRNA sense strand
gaaagauugucgaggcaaa

SEQ ID NO: 431955 - RNA, 19 nt, Homo sapiens
  misc_RNA (1)...(19): siRNA sense strand
ggaugcagguguuugguaa

SEQ ID NO: 431956 - RNA, 19 nt, Homo sapiens
  misc_RNA (1)...(19): siRNA sense strand
ccacaaaggcuccuacuug

SEQ ID NO: 431957 - RNA, 19 nt, Homo sapiens
  misc_RNA (1)...(19): siRNA sense strand
gaaacuugcccuacagaaa

SEQ ID NO: 431958 - RNA, 19 nt, Homo sapiens
  misc_RNA (1)...(19): siRNA sense strand
gaacuacacccuccugaau

SEQ ID NO: 431959 - RNA, 19 nt, Homo sapiens
  misc_RNA (1)...(19): siRNA sense strand
gcggucggauucauuauaa

SEQ ID NO: 431960 - RNA, 19 nt, Homo sapiens
  misc_RNA (1)...(19): siRNA sense strand
gggcuucuguugcuuauga

SEQ ID NO: 431961 - RNA, 19 nt, Homo sapiens
  misc_RNA (1)...(19): siRNA sense strand
cacaaaggcuccuacuuga

SEQ ID NO: 431962 - RNA, 19 nt, Homo sapiens
  misc_RNA (1)...(19): siRNA sense strand
cgaauggccucccuuugaa

SEQ ID NO: 431963 - RNA, 19 nt, Homo sapiens
  misc_RNA (1)...(19): siRNA sense strand
ggaauaaccucaguaccau

SEQ ID NO: 431964 - RNA, 19 nt, Homo sapiens
  misc_RNA (1)...(19): siRNA sense strand
ccaccaacuucgauacuuu

SEQ ID NO: 431965 - RNA, 19 nt, Homo sapiens
  misc_RNA (1)...(19): siRNA sense strand
acaagaugauggaggaaua

SEQ ID NO: 431966 - RNA, 19 nt, Homo sapiens
  misc_RNA (1)...(19): siRNA sense strand
gaaaagacaucaacacgau

SEQ ID NO: 431967 - RNA, 19 nt, Homo sapiens
  misc_RNA (1)...(19): siRNA sense strand
ggagaaccaccauaaagaa

SEQ ID NO: 431968 - RNA, 19 nt, Homo sapiens
  misc_RNA (1)...(19): siRNA sense strand
ugaaagagcaacagaagaa

SEQ ID NO: 431969 - RNA, 19 nt, Homo sapiens
  misc_RNA (1)...(19): siRNA sense strand
gcagagaaccagaggagaa

SEQ ID NO: 431970 - RNA, 19 nt, Homo sapiens
  misc_RNA (1)...(19): siRNA sense strand
ccaaaucacugagcacaau

SEQ ID NO: 431971 - RNA, 19 nt, Homo sapiens
  misc_RNA (1)...(19): siRNA sense strand
caagaaauguccucauagg

SEQ ID NO: 431972 - RNA, 19 nt, Homo sapiens
  misc_RNA (1)...(19): siRNA sense strand
ccaaggagguggcagaagu

SEQ ID NO: 431973 - RNA, 19 nt, Homo sapiens
  misc_RNA (1)...(19): siRNA sense strand
ggacagugaugaagaugag

SEQ ID NO: 431974 - RNA, 19 nt, Homo sapiens
  misc_RNA (1)...(19): siRNA sense strand
ggaaugucauggacuuugu

SEQ ID NO: 431975 - RNA, 19 nt, Homo sapiens
  misc_RNA (1)...(19): siRNA sense strand
ggaauauucucgacuucau

SEQ ID NO: 431976 - RNA, 19 nt, Homo sapiens
  misc_RNA (1)...(19): siRNA sense strand
guuacgagcccucagguua

SEQ ID NO: 431977 - RNA, 19 nt, Homo sapiens
  misc_RNA (1)...(19): siRNA sense strand
gcagaggcaucccuuugau

SEQ ID NO: 431978 - RNA, 19 nt, Homo sapiens
  misc_RNA (1)...(19): siRNA sense strand
caggagauguuccagaaga

SEQ ID NO: 431979 - RNA, 19 nt, Homo sapiens
  misc_RNA (1)...(19): siRNA sense strand
gcacugacgaguccaaaga

SEQ ID NO: 431980 - RNA, 19 nt, Homo sapiens
  misc_RNA (1)...(19): siRNA sense strand
aaagacaucaacacgauua

SEQ ID NO: 431981 - RNA, 19 nt, Homo sapiens
  misc_RNA (1)...(19): siRNA sense strand
gcagaucggccuccuccua

SEQ ID NO: 431982 - RNA, 19 nt, Homo sapiens
  misc_RNA (1)...(19): siRNA sense strand
ggacagaccugagcaugac

SEQ ID NO: 431983 - RNA, 19 nt, Homo sapiens
  misc_RNA (1)...(19): siRNA sense strand
ucacugagcacaauaacuu

SEQ ID NO: 431984 - RNA, 19 nt, Homo sapiens
  misc_RNA (1)...(19): siRNA sense strand
gaauauucucgacuucaua

SEQ ID NO: 431985 - RNA, 19 nt, Homo sapiens
  misc_RNA (1)...(19): siRNA sense strand
gaacaucuucgacuuugug

SEQ ID NO: 431986 - RNA, 19 nt, Homo sapiens
  misc_RNA (1)...(19): siRNA sense strand
gagaaccaccauaaagaaa

SEQ ID NO: 431987 - RNA, 19 nt, Homo sapiens
  misc_RNA (1)...(19): siRNA sense strand
gggaaaccgugugauaaga

SEQ ID NO: 431988 - RNA, 19 nt, Homo sapiens
  misc_RNA (1)...(19): siRNA sense strand
ugaauuccauuacgacaau

SEQ ID NO: 431989 - RNA, 19 nt, Homo sapiens
  misc_RNA (1)...(19): siRNA sense strand
gagcagaggcaucccuuug

SEQ ID NO: 431990 - RNA, 19 nt, Homo sapiens
  misc_RNA (1)...(19): siRNA sense strand
ggaccgcuaugcccaggaa

SEQ ID NO: 431991 - RNA, 19 nt, Homo sapiens
  misc_RNA (1)...(19): siRNA sense strand
ccacagguccucaagcauu

SEQ ID NO: 431992 - RNA, 19 nt, Homo sapiens
  misc_RNA (1)...(19): siRNA sense strand
uuucgaggcuggaauuaaa

SEQ ID NO: 431993 - RNA, 19 nt, Homo sapiens
  misc_RNA (1)...(19): siRNA sense strand
ggaaaccgugugauaagaa

SEQ ID NO: 431994 - RNA, 19 nt, Homo sapiens
  misc_RNA (1)...(19): siRNA sense strand
ggaauaacuucaucaaccu

SEQ ID NO: 431995 - RNA, 19 nt, Homo sapiens
  misc_RNA (1)...(19): siRNA sense strand
gggaggcccuguauaacga

SEQ ID NO: 431996 - RNA, 19 nt, Homo sapiens
  misc_RNA (1)...(19): siRNA sense strand
caucugggcugucauaaaa

SEQ ID NO: 431997 - RNA, 19 nt, Homo sapiens
  misc_RNA (1)...(19): siRNA sense strand
aggaauggcuggaauguca

SEQ ID NO: 431998 - RNA, 19 nt, Homo sapiens
  misc_RNA (1)...(19): siRNA sense strand
cagaggauauugacaacau

SEQ ID NO: 431999 - RNA, 19 nt, Homo sapiens
  misc_RNA (1)...(19): siRNA sense strand
ggccacacguguccuauuc

SEQ ID NO: 432000 - RNA, 19 nt, Homo sapiens
  misc_RNA (1)...(19): siRNA sense strand
agaacugccucacgguuaa

SEQ ID NO: 432001 - RNA, 19 nt, Homo sapiens
  misc_RNA (1)...(19): siRNA sense strand
guccugaagucgaucauga

SEQ ID NO: 432002 - RNA, 19 nt, Homo sapiens
  misc_RNA (1)...(19): siRNA sense strand
gaucuacgcagccaugaug

SEQ ID NO: 432003 - RNA, 19 nt, Homo sapiens
  misc_RNA (1)...(19): siRNA sense strand
gaagacaacguggugagaa

SEQ ID NO: 432004 - RNA, 19 nt, Homo sapiens
  misc_RNA (1)...(19): siRNA sense strand
cccaggagcucaccaagga

SEQ ID NO: 432005 - RNA, 19 nt, Homo sapiens
  misc_RNA (1)...(19): siRNA sense strand
guacugggcaucucucaga

SEQ ID NO: 432006 - RNA, 19 nt, Homo sapiens
  misc_RNA (1)...(19): siRNA sense strand
gaucggccuccuccuauuu

SEQ ID NO: 432007 - RNA, 19 nt, Homo sapiens
  misc_RNA (1)...(19): siRNA sense strand
gcagcgaaccagaaacuug

SEQ ID NO: 432008 - RNA, 19 nt, Homo sapiens
  misc_RNA (1)...(19): siRNA sense strand
gcuggaaugucauggacuu

SEQ ID NO: 432009 - RNA, 19 nt, Homo sapiens
  misc_RNA (1)...(19): siRNA sense strand
gggaauaaccucaguacca

SEQ ID NO: 432010 - RNA, 19 nt, Homo sapiens
  misc_RNA (1)...(19): siRNA sense strand
cagaacugccucacgguua

SEQ ID NO: 432011 - RNA, 19 nt, Homo sapiens
  misc_RNA (1)...(19): siRNA sense strand
ggacgaggacagugaugaa

SEQ ID NO: 432012 - RNA, 19 nt, Homo sapiens
  misc_RNA (1)...(19): siRNA sense strand
gggaguggaagaaguauga

SEQ ID NO: 432013 - RNA, 19 nt, Homo sapiens
  misc_RNA (1)...(19): siRNA sense strand
ccgaauggccucccuuuga

SEQ ID NO: 432014 - RNA, 19 nt, Homo sapiens
  misc_RNA (1)...(19): siRNA sense strand
ggucaucugggcugucaua

SEQ ID NO: 432015 - RNA, 19 nt, Homo sapiens
  misc_RNA (1)...(19): siRNA sense strand
ugucuggaaucccaaguuu

SEQ ID NO: 432016 - RNA, 19 nt, Homo sapiens
  misc_RNA (1)...(19): siRNA sense strand
gcacauggaguccggaaca

SEQ ID NO: 432017 - RNA, 19 nt, Homo sapiens
  misc_RNA (1)...(19): siRNA sense strand
cuucaucuaugccaucauu

SEQ ID NO: 432018 - RNA, 19 nt, Homo sapiens
  misc_RNA (1)...(19): siRNA sense strand
ugacgaguccaaagaguuu

SEQ ID NO: 432019 - RNA, 19 nt, Homo sapiens
  misc_RNA (1)...(19): siRNA sense strand
gcgauacuuugacuacguu

SEQ ID NO: 432020 - RNA, 19 nt, Homo sapiens
  misc_RNA (1)...(19): siRNA sense strand
ggccaucgcuguggacaau

SEQ ID NO: 432021 - RNA, 19 nt, Homo sapiens
  misc_RNA (1)...(19): siRNA sense strand
gaucuccucuacaauagca

SEQ ID NO: 432022 - RNA, 19 nt, Homo sapiens
  misc_RNA (1)...(19): siRNA sense strand
acagaaccauacuucauug

SEQ ID NO: 432023 - RNA, 19 nt, Homo sapiens
  misc_RNA (1)...(19): siRNA sense strand
ugacaacaccguccacuuc

SEQ ID NO: 432024 - RNA, 19 nt, Homo sapiens
  misc_RNA (1)...(19): siRNA sense strand
gcucguuucugaugcugaa

SEQ ID NO: 432025 - RNA, 19 nt, Homo sapiens
  misc_RNA (1)...(19): siRNA sense strand
gcaucagggugccuacuuc

SEQ ID NO: 432026 - RNA, 19 nt, Homo sapiens
  misc_RNA (1)...(19): siRNA sense strand
gcaacaacaacaccaacaa

SEQ ID NO: 432027 - RNA, 19 nt, Homo sapiens
  misc_RNA (1)...(19): siRNA sense strand
gccgggaggcccuguauaa

SEQ ID NO: 432028 - RNA, 19 nt, Homo sapiens
  misc_RNA (1)...(19): siRNA sense strand
ggacuccucccaccaacuu

SEQ ID NO: 432029 - RNA, 19 nt, Homo sapiens
  misc_RNA (1)...(19): siRNA sense strand
ggaacugguuguacuucau

SEQ ID NO: 432030 - RNA, 19 nt, Homo sapiens
  misc_RNA (1)...(19): siRNA sense strand
gcaaucauaggguuagaau

SEQ ID NO: 432031 - RNA, 19 nt, Homo sapiens
  misc_RNA (1)...(19): siRNA sense strand
ccaaugggaccaaauguca

SEQ ID NO: 432032 - RNA, 19 nt, Homo sapiens
  misc_RNA (1)...(19): siRNA sense strand
cccaggagauguuccagaa

SEQ ID NO: 432033 - RNA, 19 nt, Homo sapiens
  misc_RNA (1)...(19): siRNA sense strand
gcaagaaauguccucauag

SEQ ID NO: 432034 - RNA, 19 nt, Homo sapiens
  misc_RNA (1)...(19): siRNA sense strand
gaaaccgugugauaagaac

SEQ ID NO: 432035 - RNA, 19 nt, Homo sapiens
  misc_RNA (1)...(19): siRNA sense strand
ggaauacagccuggagaaa

SEQ ID NO: 432036 - RNA, 19 nt, Homo sapiens
  misc_RNA (1)...(19): siRNA sense strand
gacaucaacacgauuaaau

SEQ ID NO: 432037 - RNA, 19 nt, Homo sapiens
  misc_RNA (1)...(19): siRNA sense strand
cgugaccucuggaauauuc

SEQ ID NO: 432038 - RNA, 19 nt, Homo sapiens
  misc_RNA (1)...(19): siRNA sense strand
gaagaaggaggaggaggaa

SEQ ID NO: 432039 - RNA, 19 nt, Homo sapiens
  misc_RNA (1)...(19): siRNA sense strand
ccaguuuaauuucgaugaa

SEQ ID NO: 432040 - RNA, 19 nt, Homo sapiens
  misc_RNA (1)...(19): siRNA sense strand
caagacagauuugcucaac

SEQ ID NO: 432041 - RNA, 19 nt, Homo sapiens
  misc_RNA (1)...(19): siRNA sense strand
gcgggaaaccgugugauaa

SEQ ID NO: 432042 - RNA, 19 nt, Homo sapiens
  misc_RNA (1)...(19): siRNA sense strand
cccgacgccuggacgauua

SEQ ID NO: 432043 - RNA, 19 nt, Homo sapiens
  misc_RNA (1)...(19): siRNA sense strand
ggacugaaguggugauuga

SEQ ID NO: 432044 - RNA, 19 nt, Homo sapiens
  misc_RNA (1)...(19): siRNA sense strand
gaagaaguaugccaaugaa

SEQ ID NO: 432045 - RNA, 19 nt, Homo sapiens
  misc_RNA (1)...(19): siRNA sense strand
ggagugaaauuucugaaga

SEQ ID NO: 432046 - RNA, 19 nt, Homo sapiens
  misc_RNA (1)...(19): siRNA sense strand
cacaucagcuucaagguua

SEQ ID NO: 432047 - RNA, 19 nt, Homo sapiens
  misc_RNA (1)...(19): siRNA sense strand
gaauacaguucaugccauu

SEQ ID NO: 432048 - RNA, 19 nt, Homo sapiens
  misc_RNA (1)...(19): siRNA sense strand
ccacugacauuccuauuau

SEQ ID NO: 432049 - RNA, 19 nt, Homo sapiens
  misc_RNA (1)...(19): siRNA sense strand
agaaggaccugcgcacuua

SEQ ID NO: 432050 - RNA, 19 nt, Homo sapiens
  misc_RNA (1)...(19): siRNA sense strand
gggaagaccugacaauuac

SEQ ID NO: 432051 - RNA, 19 nt, Homo sapiens
  misc_RNA (1)...(19): siRNA sense strand
ggccauaccuauaccauga

SEQ ID NO: 432052 - RNA, 19 nt, Homo sapiens
  misc_RNA (1)...(19): siRNA sense strand
gaagauacacugagcuugu

SEQ ID NO: 432053 - RNA, 19 nt, Homo sapiens
  misc_RNA (1)...(19): siRNA sense strand
uaacggagaucuggucuuc

SEQ ID NO: 432054 - RNA, 19 nt, Homo sapiens
  misc_RNA (1)...(19): siRNA sense strand
ggacuuccaccuauauuga

SEQ ID NO: 432055 - RNA, 19 nt, Homo sapiens
  misc_RNA (1)...(19): siRNA sense strand
caaagcugcuaggcuguua

SEQ ID NO: 432056 - RNA, 19 nt, Homo sapiens
  misc_RNA (1)...(19): siRNA sense strand
gaucuggucuucucuuucu

SEQ ID NO: 432057 - RNA, 19 nt, Homo sapiens
  misc_RNA (1)...(19): siRNA sense strand
gaggagaaguacaagcuau

SEQ ID NO: 432058 - RNA, 19 nt, Homo sapiens
  misc_RNA (1)...(19): siRNA sense strand
gcacaguguuucugagcaa

SEQ ID NO: 432059 - RNA, 19 nt, Homo sapiens
  misc_RNA (1)...(19): siRNA sense strand
ggugauugaugacuuguug

SEQ ID NO: 432060 - RNA, 19 nt, Homo sapiens
  misc_RNA (1)...(19): siRNA sense strand
ccacuuccaugaaugaguu

SEQ ID NO: 432061 - RNA, 19 nt, Homo sapiens
  misc_RNA (1)...(19): siRNA sense strand
ucaggaggcugcuauaaca

SEQ ID NO: 432062 - RNA, 19 nt, Homo sapiens
  misc_RNA (1)...(19): siRNA sense strand
ggaaugcucugcuggaaaa

SEQ ID NO: 432063 - RNA, 19 nt, Homo sapiens
  misc_RNA (1)...(19): siRNA sense strand
ggagaugaaccgcaaauuc

SEQ ID NO: 432064 - RNA, 19 nt, Homo sapiens
  misc_RNA (1)...(19): siRNA sense strand
gagaagaaguaugccaaug

SEQ ID NO: 432065 - RNA, 19 nt, Homo sapiens
  misc_RNA (1)...(19): siRNA sense strand
ggacuucacgggcacauug

SEQ ID NO: 432066 - RNA, 19 nt, Homo sapiens
  misc_RNA (1)...(19): siRNA sense strand
ugggaagaccugacaauua

SEQ ID NO: 432067 - RNA, 19 nt, Homo sapiens
  misc_RNA (1)...(19): siRNA sense strand
ggaacugacucuggacaug

SEQ ID NO: 432068 - RNA, 19 nt, Homo sapiens
  misc_RNA (1)...(19): siRNA sense strand
gcacauuggcugaaacugu

SEQ ID NO: 432069 - RNA, 19 nt, Homo sapiens
  misc_RNA (1)...(19): siRNA sense strand
gcugggacuuccaccuaua

SEQ ID NO: 432070 - RNA, 19 nt, Homo sapiens
  misc_RNA (1)...(19): siRNA sense strand
caaagacaauucccaacca

SEQ ID NO: 432071 - RNA, 19 nt, Homo sapiens
  misc_RNA (1)...(19): siRNA sense strand
cugaggaccuggagaagaa

SEQ ID NO: 432072 - RNA, 19 nt, Homo sapiens
  misc_RNA (1)...(19): siRNA sense strand
gaagaagggcaacuaugug

SEQ ID NO: 432073 - RNA, 19 nt, Homo sapiens
  misc_RNA (1)...(19): siRNA sense strand
gcacaaggucauuauguca

SEQ ID NO: 432074 - RNA, 19 nt, Homo sapiens
  misc_RNA (1)...(19): siRNA sense strand
gaagaguggcagcaacuga

SEQ ID NO: 432075 - RNA, 19 nt, Homo sapiens
  misc_RNA (1)...(19): siRNA sense strand
cacauuggcugaaacuguu

SEQ ID NO: 432076 - RNA, 19 nt, Homo sapiens
  misc_RNA (1)...(19): siRNA sense strand
gaagcaggaaugcaucaaa

SEQ ID NO: 432077 - RNA, 19 nt, Homo sapiens
  misc_RNA (1)...(19): siRNA sense strand
agacaauucccaaccauaa

SEQ ID NO: 432078 - RNA, 19 nt, Homo sapiens
  misc_RNA (1)...(19): siRNA sense strand
guauaugguucgccugaga

SEQ ID NO: 432079 - RNA, 19 nt, Homo sapiens
  misc_RNA (1)...(19): siRNA sense strand
gcugggauauuucacuuuc

SEQ ID NO: 432080 - RNA, 19 nt, Homo sapiens
  misc_RNA (1)...(19): siRNA sense strand
gcuggacuguggaugauga

SEQ ID NO: 432081 - RNA, 19 nt, Homo sapiens
  misc_RNA (1)...(19): siRNA sense strand
ggucugaucugcuguucca

SEQ ID NO: 432082 - RNA, 19 nt, Homo sapiens
  misc_RNA (1)...(19): siRNA sense strand
ggauauuucacuuucguuu

SEQ ID NO: 432083 - RNA, 19 nt, Homo sapiens
  misc_RNA (1)...(19): siRNA sense strand
ccuauaccaugacugauau

SEQ ID NO: 432084 - RNA, 19 nt, Homo sapiens
  misc_RNA (1)...(19): siRNA sense strand
uaagaagggugguccaacu

SEQ ID NO: 432085 - RNA, 19 nt, Homo sapiens
  misc_RNA (1)...(19): siRNA sense strand
ugaagaagggcaacuaugu

SEQ ID NO: 432086 - RNA, 19 nt, Homo sapiens
  misc_RNA (1)...(19): siRNA sense strand
gggcacaagccaaugguuu

SEQ ID NO: 432087 - RNA, 19 nt, Homo sapiens
  misc_RNA (1)...(19): siRNA sense strand
ggcugaaacuguugacaug

SEQ ID NO: 432088 - RNA, 19 nt, Homo sapiens
  misc_RNA (1)...(19): siRNA sense strand
gugcugagaagguguauau

SEQ ID NO: 432089 - RNA, 19 nt, Homo sapiens
  misc_RNA (1)...(19): siRNA sense strand
ccacaucagcuucaagguu

SEQ ID NO: 432090 - RNA, 19 nt, Homo sapiens
  misc_RNA (1)...(19): siRNA sense strand
gaaacuguaaacccauauu

SEQ ID NO: 432091 - RNA, 19 nt, Homo sapiens
  misc_RNA (1)...(19): siRNA sense strand
agaagaaguaugccaauga

SEQ ID NO: 432092 - RNA, 19 nt, Homo sapiens
  misc_RNA (1)...(19): siRNA sense strand
uuacucagaucacuguuca

SEQ ID NO: 432093 - RNA, 19 nt, Homo sapiens
  misc_RNA (1)...(19): siRNA sense strand
gaagggcaacuaugugcuu

SEQ ID NO: 432094 - RNA, 19 nt, Homo sapiens
  misc_RNA (1)...(19): siRNA sense strand
gaaauaccaggaacugaag

SEQ ID NO: 432095 - RNA, 19 nt, Homo sapiens
  misc_RNA (1)...(19): siRNA sense strand
guucaggagucucauugga

SEQ ID NO: 432096 - RNA, 19 nt, Homo sapiens
  misc_RNA (1)...(19): siRNA sense strand
agaaauaccaggaacugaa

SEQ ID NO: 432097 - RNA, 19 nt, Homo sapiens
  misc_RNA (1)...(19): siRNA sense strand
gcucguggcuacccgaaag

SEQ ID NO: 432098 - RNA, 19 nt, Homo sapiens
  misc_RNA (1)...(19): siRNA sense strand
gaucugcuguuccauugag

SEQ ID NO: 432099 - RNA, 19 nt, Homo sapiens
  misc_RNA (1)...(19): siRNA sense strand
cuggaaaggugguguggaa

SEQ ID NO: 432100 - RNA, 19 nt, Homo sapiens
  misc_RNA (1)...(19): siRNA sense strand
cugaaguggugauugauga

SEQ ID NO: 432101 - RNA, 19 nt, Homo sapiens
  misc_RNA (1)...(19): siRNA sense strand
gaaguaugccaaugaaacu

SEQ ID NO: 432102 - RNA, 19 nt, Homo sapiens
  misc_RNA (1)...(19): siRNA sense strand
cugaaugucugccgcaaug

SEQ ID NO: 432103 - RNA, 19 nt, Homo sapiens
  misc_RNA (1)...(19): siRNA sense strand
guaugccaaugaaacugua

SEQ ID NO: 432104 - RNA, 19 nt, Homo sapiens
  misc_RNA (1)...(19): siRNA sense strand
cagaaggaccacugacauu

SEQ ID NO: 432105 - RNA, 19 nt, Homo sapiens
  misc_RNA (1)...(19): siRNA sense strand
gccgugaucugaagucucu

SEQ ID NO: 432106 - RNA, 19 nt, Homo sapiens
  misc_RNA (1)...(19): siRNA sense strand
gaaaggugguguggaaacg

SEQ ID NO: 432107 - RNA, 19 nt, Homo sapiens
  misc_RNA (1)...(19): siRNA sense strand
cgacugccgugaucugaag

SEQ ID NO: 432108 - RNA, 19 nt, Homo sapiens
  misc_RNA (1)...(19): siRNA sense strand
caucaaagacagcagacuu

SEQ ID NO: 432109 - RNA, 19 nt, Homo sapiens
  misc_RNA (1)...(19): siRNA sense strand
gcaaugugaacaacccuau

SEQ ID NO: 432110 - RNA, 19 nt, Homo sapiens
  misc_RNA (1)...(19): siRNA sense strand
gagugaaauuucugaagag

SEQ ID NO: 432111 - RNA, 19 nt, Homo sapiens
  misc_RNA (1)...(19): siRNA sense strand
uuucugugauccaacauuu

SEQ ID NO: 432112 - RNA, 19 nt, Homo sapiens
  misc_RNA (1)...(19): siRNA sense strand
gaugcuggacuguggauga

SEQ ID NO: 432113 - RNA, 19 nt, Homo sapiens
  misc_RNA (1)...(19): siRNA sense strand
ggcacaaggucauuauguc

SEQ ID NO: 432114 - RNA, 19 nt, Homo sapiens
  misc_RNA (1)...(19): siRNA sense strand
ggagaaguacaagcuauuc

SEQ ID NO: 432115 - RNA, 19 nt, Homo sapiens
  misc_RNA (1)...(19): siRNA sense strand
ggagaagaaguaugccaau

SEQ ID NO: 432116 - RNA, 19 nt, Homo sapiens
  misc_RNA (1)...(19): siRNA sense strand
gagaugaaccgcaaauucc

SEQ ID NO: 432117 - RNA, 19 nt, Homo sapiens
  misc_RNA (1)...(19): siRNA sense strand
gggcacaaggucauuaugu

SEQ ID NO: 432118 - RNA, 19 nt, Homo sapiens
  misc_RNA (1)...(19): siRNA sense strand
gcucaggaggcugcuauaa

SEQ ID NO: 432119 - RNA, 19 nt, Homo sapiens
  misc_RNA (1)...(19): siRNA sense strand
gcugaagggccauaccuau

SEQ ID NO: 432120 - RNA, 19 nt, Homo sapiens
  misc_RNA (1)...(19): siRNA sense strand
gcaaagcugcuaggcuguu

SEQ ID NO: 432121 - RNA, 19 nt, Homo sapiens
  misc_RNA (1)...(19): siRNA sense strand
gaagaccugacaauuacau

SEQ ID NO: 432122 - RNA, 19 nt, Homo sapiens
  misc_RNA (1)...(19): siRNA sense strand
gaugggcacaaggucauua

SEQ ID NO: 432123 - RNA, 19 nt, Homo sapiens
  misc_RNA (1)...(19): siRNA sense strand
aaugugaacaacccuauuu

SEQ ID NO: 432124 - RNA, 19 nt, Homo sapiens
  misc_RNA (1)...(19): siRNA sense strand
cugaagggccauaccuaua

SEQ ID NO: 432125 - RNA, 19 nt, Homo sapiens
  misc_RNA (1)...(19): siRNA sense strand
gcagaaaggaagauacacu

SEQ ID NO: 432126 - RNA, 19 nt, Homo sapiens
  misc_RNA (1)...(19): siRNA sense strand
aagauacacugagcuuguu

SEQ ID NO: 432127 - RNA, 19 nt, Homo sapiens
  misc_RNA (1)...(19): siRNA sense strand
ggaggagcaagaaguugaa

SEQ ID NO: 432128 - RNA, 19 nt, Homo sapiens
  misc_RNA (1)...(19): siRNA sense strand
ccaaucaggaggagcaaga

SEQ ID NO: 432129 - RNA, 19 nt, Homo sapiens
  misc_RNA (1)...(19): siRNA sense strand
guacaagcuauucggagaa

SEQ ID NO: 432130 - RNA, 19 nt, Homo sapiens
  misc_RNA (1)...(19): siRNA sense strand
gagucucauuggacaaaga

SEQ ID NO: 432131 - RNA, 19 nt, Homo sapiens
  misc_RNA (1)...(19): siRNA sense strand
cacugacauuccuauuaua

SEQ ID NO: 432132 - RNA, 19 nt, Homo sapiens
  misc_RNA (1)...(19): siRNA sense strand
ccagaagaauacaguucau

SEQ ID NO: 432133 - RNA, 19 nt, Homo sapiens
  misc_RNA (1)...(19): siRNA sense strand
gugauaccuuccugcagaa

SEQ ID NO: 432134 - RNA, 19 nt, Homo sapiens
  misc_RNA (1)...(19): siRNA sense strand
aagcaggaaugcaucaaag

SEQ ID NO: 432135 - RNA, 19 nt, Homo sapiens
  misc_RNA (1)...(19): siRNA sense strand
ggaugagcuuggaggacuu

SEQ ID NO: 432136 - RNA, 19 nt, Homo sapiens
  misc_RNA (1)...(19): siRNA sense strand
gauggagaguuuuggauga

SEQ ID NO: 432137 - RNA, 19 nt, Homo sapiens
  misc_RNA (1)...(19): siRNA sense strand
gcugagaagguguauaugg

SEQ ID NO: 432138 - RNA, 19 nt, Homo sapiens
  misc_RNA (1)...(19): siRNA sense strand
caguguuucugagcaagua

SEQ ID NO: 432139 - RNA, 19 nt, Homo sapiens
  misc_RNA (1)...(19): siRNA sense strand
cagaaggaccugcgcacuu

SEQ ID NO: 432140 - RNA, 19 nt, Homo sapiens
  misc_RNA (1)...(19): siRNA sense strand
gaaugucugccgcaaugug

SEQ ID NO: 432141 - RNA, 19 nt, Homo sapiens
  misc_RNA (1)...(19): siRNA sense strand
augaaacuguaaacccaua

SEQ ID NO: 432142 - RNA, 19 nt, Homo sapiens
  misc_RNA (1)...(19): siRNA sense strand
ggaaaggugguguggaaac

SEQ ID NO: 432143 - RNA, 19 nt, Homo sapiens
  misc_RNA (1)...(19): siRNA sense strand
gaaccaagauuacuuucua

SEQ ID NO: 432144 - RNA, 19 nt, Homo sapiens
  misc_RNA (1)...(19): siRNA sense strand
gugcagauuuccacacaua

SEQ ID NO: 432145 - RNA, 19 nt, Homo sapiens
  misc_RNA (1)...(19): siRNA sense strand
ggaggcaccugggcuguuu

SEQ ID NO: 432146 - RNA, 19 nt, Homo sapiens
  misc_RNA (1)...(19): siRNA sense strand
ucuaugagcuacccaacua

SEQ ID NO: 432147 - RNA, 19 nt, Homo sapiens
  misc_RNA (1)...(19): siRNA sense strand
gcaccugggcuguuuauga

SEQ ID NO: 432148 - RNA, 19 nt, Homo sapiens
  misc_RNA (1)...(19): siRNA sense strand
caacuuugcuggguacaug

SEQ ID NO: 432149 - RNA, 19 nt, Homo sapiens
  misc_RNA (1)...(19): siRNA sense strand
caccugggcuguuuaugaa

SEQ ID NO: 432150 - RNA, 19 nt, Homo sapiens
  misc_RNA (1)...(19): siRNA sense strand
ggcaguaccuccuggacaa

SEQ ID NO: 432151 - RNA, 19 nt, Homo sapiens
  misc_RNA (1)...(19): siRNA sense strand
cgagagauccacuccugua

SEQ ID NO: 432152 - RNA, 19 nt, Homo sapiens
  misc_RNA (1)...(19): siRNA sense strand
gagauccacuccuguaagg

SEQ ID NO: 432153 - RNA, 19 nt, Homo sapiens
  misc_RNA (1)...(19): siRNA sense strand
ccaagauuacuuucuauga

SEQ ID NO: 432154 - RNA, 19 nt, Homo sapiens
  misc_RNA (1)...(19): siRNA sense strand
gcuggagggugucuggauu

SEQ ID NO: 432155 - RNA, 19 nt, Homo sapiens
  misc_RNA (1)...(19): siRNA sense strand
gagaguacccugaauacca

SEQ ID NO: 432156 - RNA, 19 nt, Homo sapiens
  misc_RNA (1)...(19): siRNA sense strand
gagagauccacuccuguaa

SEQ ID NO: 432157 - RNA, 19 nt, Homo sapiens
  misc_RNA (1)...(19): siRNA sense strand
ugacugugauugcgacugu

SEQ ID NO: 432158 - RNA, 19 nt, Homo sapiens
  misc_RNA (1)...(19): siRNA sense strand
ggaggccaguauaagauuc

SEQ ID NO: 432159 - RNA, 19 nt, Homo sapiens
  misc_RNA (1)...(19): siRNA sense strand
gauugcgacugugcagauu

SEQ ID NO: 432160 - RNA, 19 nt, Homo sapiens
  misc_RNA (1)...(19): siRNA sense strand
agauugcccuuccaucaug

SEQ ID NO: 432161 - RNA, 19 nt, Homo sapiens
  misc_RNA (1)...(19): siRNA sense strand
ggucagauguaugaaacca

SEQ ID NO: 432162 - RNA, 19 nt, Homo sapiens
  misc_RNA (1)...(19): siRNA sense strand
uuaguggucagauguauga

SEQ ID NO: 432163 - RNA, 19 nt, Homo sapiens
  misc_RNA (1)...(19): siRNA sense strand
caauuucacaugcgagaga

SEQ ID NO: 432164 - RNA, 19 nt, Homo sapiens
  misc_RNA (1)...(19): siRNA sense strand
guaugaaaccaccgaagau

SEQ ID NO: 432165 - RNA, 19 nt, Homo sapiens
  misc_RNA (1)...(19): siRNA sense strand
gauuuccacacauaccuaa

SEQ ID NO: 432166 - RNA, 19 nt, Homo sapiens
  misc_RNA (1)...(19): siRNA sense strand
uaugaaaccaccgaagauu

SEQ ID NO: 432167 - RNA, 19 nt, Homo sapiens
  misc_RNA (1)...(19): siRNA sense strand
cuaguggaggccaguauaa

SEQ ID NO: 432168 - RNA, 19 nt, Homo sapiens
  misc_RNA (1)...(19): siRNA sense strand
guggucagauguaugaaac

SEQ ID NO: 432169 - RNA, 19 nt, Homo sapiens
  misc_RNA (1)...(19): siRNA sense strand
aaacuggaaccaagauuac

SEQ ID NO: 432170 - RNA, 19 nt, Homo sapiens
  misc_RNA (1)...(19): siRNA sense strand
ccuaguggaggccaguaua

SEQ ID NO: 432171 - RNA, 19 nt, Homo sapiens
  misc_RNA (1)...(19): siRNA sense strand
gggagaguacccugaauac

SEQ ID NO: 432172 - RNA, 19 nt, Homo sapiens
  misc_RNA (1)...(19): siRNA sense strand
uguaugaaaccaccgaaga

SEQ ID NO: 432173 - RNA, 19 nt, Homo sapiens
  misc_RNA (1)...(19): siRNA sense strand
ggaaccaagauuacuuucu

SEQ ID NO: 432174 - RNA, 19 nt, Homo sapiens
  misc_RNA (1)...(19): siRNA sense strand
aaaacuggaaccaagauua

SEQ ID NO: 432175 - RNA, 19 nt, Homo sapiens
  misc_RNA (1)...(19): siRNA sense strand
ugaaaccaccgaagauugc

SEQ ID NO: 432176 - RNA, 19 nt, Homo sapiens
  misc_RNA (1)...(19): siRNA sense strand
ucgcugcaacuccauuaaa

SEQ ID NO: 432177 - RNA, 19 nt, Homo sapiens
  misc_RNA (1)...(19): siRNA sense strand
gagggugucuggauuuucu

SEQ ID NO: 432178 - RNA, 19 nt, Homo sapiens
  misc_RNA (1)...(19): siRNA sense strand
gauucagaucuuugagaaa

SEQ ID NO: 432179 - RNA, 19 nt, Homo sapiens
  misc_RNA (1)...(19): siRNA sense strand
gccaguauaagauucagau

SEQ ID NO: 432180 - RNA, 19 nt, Homo sapiens
  misc_RNA (1)...(19): siRNA sense strand
guggaggccaguauaagau

SEQ ID NO: 432181 - RNA, 19 nt, Homo sapiens
  misc_RNA (1)...(19): siRNA sense strand
cugcaacuccauuaaagug

SEQ ID NO: 432182 - RNA, 19 nt, Homo sapiens
  misc_RNA (1)...(19): siRNA sense strand
ccugggcuguuuaugaaag

SEQ ID NO: 432183 - RNA, 19 nt, Homo sapiens
  misc_RNA (1)...(19): siRNA sense strand
ggagggagaugcagcuuua

SEQ ID NO: 432184 - RNA, 19 nt, Homo sapiens
  misc_RNA (1)...(19): siRNA sense strand
gaacagagcacguuuaaag

SEQ ID NO: 432185 - RNA, 19 nt, Homo sapiens
  misc_RNA (1)...(19): siRNA sense strand
gaaccuauauccaucauca

SEQ ID NO: 432186 - RNA, 19 nt, Homo sapiens
  misc_RNA (1)...(19): siRNA sense strand
gaagaaugauguaaaugug

SEQ ID NO: 432187 - RNA, 19 nt, Homo sapiens
  misc_RNA (1)...(19): siRNA sense strand
gcaaagaagucucuagaac

SEQ ID NO: 432188 - RNA, 19 nt, Homo sapiens
  misc_RNA (1)...(19): siRNA sense strand
ucaagaauguucagaagaa

SEQ ID NO: 432189 - RNA, 19 nt, Homo sapiens
  misc_RNA (1)...(19): siRNA sense strand
ccaaauaauuccacugcua

SEQ ID NO: 432190 - RNA, 19 nt, Homo sapiens
  misc_RNA (1)...(19): siRNA sense strand
gaacuucuucauccuauaa

SEQ ID NO: 432191 - RNA, 19 nt, Homo sapiens
  misc_RNA (1)...(19): siRNA sense strand
gaacagaaaccagaugaug

SEQ ID NO: 432192 - RNA, 19 nt, Homo sapiens
  misc_RNA (1)...(19): siRNA sense strand
gaucaagaauguucagaag

SEQ ID NO: 432193 - RNA, 19 nt, Homo sapiens
  misc_RNA (1)...(19): siRNA sense strand
caacuggucugauguaggu

SEQ ID NO: 432194 - RNA, 19 nt, Homo sapiens
  misc_RNA (1)...(19): siRNA sense strand
ggagaggauuacaauuuga

SEQ ID NO: 432195 - RNA, 19 nt, Homo sapiens
  misc_RNA (1)...(19): siRNA sense strand
gcacaguauuauugucaaa

SEQ ID NO: 432196 - RNA, 19 nt, Homo sapiens
  misc_RNA (1)...(19): siRNA sense strand
ucaaacagaaucucaagua

SEQ ID NO: 432197 - RNA, 19 nt, Homo sapiens
  misc_RNA (1)...(19): siRNA sense strand
cagaugaugcacaguauua

SEQ ID NO: 432198 - RNA, 19 nt, Homo sapiens
  misc_RNA (1)...(19): siRNA sense strand
ccacugcuaugcugagaaa

SEQ ID NO: 432199 - RNA, 19 nt, Homo sapiens
  misc_RNA (1)...(19): siRNA sense strand
guaaagaaccuauauccau

SEQ ID NO: 432200 - RNA, 19 nt, Homo sapiens
  misc_RNA (1)...(19): siRNA sense strand
gaauuacuguguugcuguu

SEQ ID NO: 432201 - RNA, 19 nt, Homo sapiens
  misc_RNA (1)...(19): siRNA sense strand
caaacagaaucucaaguag

SEQ ID NO: 432202 - RNA, 19 nt, Homo sapiens
  misc_RNA (1)...(19): siRNA sense strand
ugacugguaucaaacagaa

SEQ ID NO: 432203 - RNA, 19 nt, Homo sapiens
  misc_RNA (1)...(19): siRNA sense strand
gaagugaaacgugccauga

SEQ ID NO: 432204 - RNA, 19 nt, Homo sapiens
  misc_RNA (1)...(19): siRNA sense strand
uaaauugguuggugagauc

SEQ ID NO: 432205 - RNA, 19 nt, Homo sapiens
  misc_RNA (1)...(19): siRNA sense strand
ggaacuucuucauccuaua

SEQ ID NO: 432206 - RNA, 19 nt, Homo sapiens
  misc_RNA (1)...(19): siRNA sense strand
aaagaagucucuagaacuc

SEQ ID NO: 432207 - RNA, 19 nt, Homo sapiens
  misc_RNA (1)...(19): siRNA sense strand
caaauaauuccacugcuau

SEQ ID NO: 432208 - RNA, 19 nt, Homo sapiens
  misc_RNA (1)...(19): siRNA sense strand
agaugcagcuuuaaacaga

SEQ ID NO: 432209 - RNA, 19 nt, Homo sapiens
  misc_RNA (1)...(19): siRNA sense strand
cagaacagagcacguuuaa

SEQ ID NO: 432210 - RNA, 19 nt, Homo sapiens
  misc_RNA (1)...(19): siRNA sense strand
uggagaggauuacaauuug

SEQ ID NO: 432211 - RNA, 19 nt, Homo sapiens
  misc_RNA (1)...(19): siRNA sense strand
cuagaacucaauccaaaua

SEQ ID NO: 432212 - RNA, 19 nt, Homo sapiens
  misc_RNA (1)...(19): siRNA sense strand
acagagcacguuuaaagua

SEQ ID NO: 432213 - RNA, 19 nt, Homo sapiens
  misc_RNA (1)...(19): siRNA sense strand
aaguaugacugguaucaaa

SEQ ID NO: 432214 - RNA, 19 nt, Homo sapiens
  misc_RNA (1)...(19): siRNA sense strand
agaguugucugcuuugguu

SEQ ID NO: 432215 - RNA, 19 nt, Homo sapiens
  misc_RNA (1)...(19): siRNA sense strand
gccaugaacaaauccuuua

SEQ ID NO: 432216 - RNA, 19 nt, Homo sapiens
  misc_RNA (1)...(19): siRNA sense strand
gaauaugugaauaccauga

SEQ ID NO: 432217 - RNA, 19 nt, Homo sapiens
  misc_RNA (1)...(19): siRNA sense strand
gagaugugccuacgccaaa

SEQ ID NO: 432218 - RNA, 19 nt, Homo sapiens
  misc_RNA (1)...(19): siRNA sense strand
uaauuucagugucuggauu

SEQ ID NO: 432219 - RNA, 19 nt, Homo sapiens
  misc_RNA (1)...(19): siRNA sense strand
aaucaaguaugacugguau

SEQ ID NO: 432220 - RNA, 19 nt, Homo sapiens
  misc_RNA (1)...(19): siRNA sense strand
gaugaugcacaguauuauu

SEQ ID NO: 432221 - RNA, 19 nt, Homo sapiens
  misc_RNA (1)...(19): siRNA sense strand
ccagaacagagcacguuua

SEQ ID NO: 432222 - RNA, 19 nt, Homo sapiens
  misc_RNA (1)...(19): siRNA sense strand
ggagaugcagcuuuaaaca

SEQ ID NO: 432223 - RNA, 19 nt, Homo sapiens
  misc_RNA (1)...(19): siRNA sense strand
gagcacguuuaaaguacuu

SEQ ID NO: 432224 - RNA, 19 nt, Homo sapiens
  misc_RNA (1)...(19): siRNA sense strand
ugacuaaggcuuuggaaca

SEQ ID NO: 432225 - RNA, 19 nt, Homo sapiens
  misc_RNA (1)...(19): siRNA sense strand
cugaugauauggaauggaa

SEQ ID NO: 432226 - RNA, 19 nt, Homo sapiens
  misc_RNA (1)...(19): siRNA sense strand
gaaacgugccaugaacaaa

SEQ ID NO: 432227 - RNA, 19 nt, Homo sapiens
  misc_RNA (1)...(19): siRNA sense strand
caaagagcuuauugucaca

SEQ ID NO: 432228 - RNA, 19 nt, Homo sapiens
  misc_RNA (1)...(19): siRNA sense strand
gagaggauuacaauuugaa

SEQ ID NO: 432229 - RNA, 19 nt, Homo sapiens
  misc_RNA (1)...(19): siRNA sense strand
cuggagaggauuacaauuu

SEQ ID NO: 432230 - RNA, 19 nt, Homo sapiens
  misc_RNA (1)...(19): siRNA sense strand
caagaauguucagaagaau

SEQ ID NO: 432231 - RNA, 19 nt, Homo sapiens
  misc_RNA (1)...(19): siRNA sense strand
gaaucucaaguagucauua

SEQ ID NO: 432232 - RNA, 19 nt, Homo sapiens
  misc_RNA (1)...(19): siRNA sense strand
aacagaaucucaaguaguc

SEQ ID NO: 432233 - RNA, 19 nt, Homo sapiens
  misc_RNA (1)...(19): siRNA sense strand
caaagaagucucuagaacu

SEQ ID NO: 432234 - RNA, 19 nt, Homo sapiens
  misc_RNA (1)...(19): siRNA sense strand
caucaucuccuuauacaag

SEQ ID NO: 432235 - RNA, 19 nt, Homo sapiens
  misc_RNA (1)...(19): siRNA sense strand
cugcugcccuagaaacuuu

SEQ ID NO: 432236 - RNA, 19 nt, Homo sapiens
  misc_RNA (1)...(19): siRNA sense strand
ggauuacaauuugaaacug

SEQ ID NO: 432237 - RNA, 19 nt, Homo sapiens
  misc_RNA (1)...(19): siRNA sense strand
cuaaggcuuuggaacagaa

SEQ ID NO: 432238 - RNA, 19 nt, Homo sapiens
  misc_RNA (1)...(19): siRNA sense strand
ucaauccuccugaugauau

SEQ ID NO: 432239 - RNA, 19 nt, Homo sapiens
  misc_RNA (1)...(19): siRNA sense strand
ccuagaaacuuuuacagaa

SEQ ID NO: 432240 - RNA, 19 nt, Homo sapiens
  misc_RNA (1)...(19): siRNA sense strand
cagagcacguuuaaaguac

SEQ ID NO: 432241 - RNA, 19 nt, Homo sapiens
  misc_RNA (1)...(19): siRNA sense strand
gaugcuaauuucagugucu

SEQ ID NO: 432242 - RNA, 19 nt, Homo sapiens
  misc_RNA (1)...(19): siRNA sense strand
uuggugagaucaaagaaga

SEQ ID NO: 432243 - RNA, 19 nt, Homo sapiens
  misc_RNA (1)...(19): siRNA sense strand
ccaucaucaucuccuuaua

SEQ ID NO: 432244 - RNA, 19 nt, Homo sapiens
  misc_RNA (1)...(19): siRNA sense strand
gaaacuggaacuucuucau

SEQ ID NO: 432245 - RNA, 19 nt, Homo sapiens
  misc_RNA (1)...(19): siRNA sense strand
agaagucucuagaacucaa

SEQ ID NO: 432246 - RNA, 19 nt, Homo sapiens
  misc_RNA (1)...(19): siRNA sense strand
ugagaucaaagaagaagaa

SEQ ID NO: 432247 - RNA, 19 nt, Homo sapiens
  misc_RNA (1)...(19): siRNA sense strand
agaauguucagaagaauga

SEQ ID NO: 432248 - RNA, 19 nt, Homo sapiens
  misc_RNA (1)...(19): siRNA sense strand
ggagcugacuaaggcuuug

SEQ ID NO: 432249 - RNA, 19 nt, Homo sapiens
  misc_RNA (1)...(19): siRNA sense strand
gcagauguaaagaaccuau

SEQ ID NO: 432250 - RNA, 19 nt, Homo sapiens
  misc_RNA (1)...(19): siRNA sense strand
aaacgugccaugaacaaau

SEQ ID NO: 432251 - RNA, 19 nt, Homo sapiens
  misc_RNA (1)...(19): siRNA sense strand
cucuagaacucaauccaaa

SEQ ID NO: 432252 - RNA, 19 nt, Homo sapiens
  misc_RNA (1)...(19): siRNA sense strand
gaucaaagaagaagaaaag

SEQ ID NO: 432253 - RNA, 19 nt, Homo sapiens
  misc_RNA (1)...(19): siRNA sense strand
uagugcagaugcuaauuuc

SEQ ID NO: 432254 - RNA, 19 nt, Homo sapiens
  misc_RNA (1)...(19): siRNA sense strand
aggaauaugugaauaccau

SEQ ID NO: 432255 - RNA, 19 nt, Homo sapiens
  misc_RNA (1)...(19): siRNA sense strand
acacuuaugaucaagaaug

SEQ ID NO: 432256 - RNA, 19 nt, Homo sapiens
  misc_RNA (1)...(19): siRNA sense strand
gauuauuucagcagaucua

SEQ ID NO: 432257 - RNA, 19 nt, Homo sapiens
  misc_RNA (1)...(19): siRNA sense strand
aaacagaaucucaaguagu

SEQ ID NO: 432258 - RNA, 19 nt, Homo sapiens
  misc_RNA (1)...(19): siRNA sense strand
cguagcagauguaaagaac

SEQ ID NO: 432259 - RNA, 19 nt, Homo sapiens
  misc_RNA (1)...(19): siRNA sense strand
cagauuauuucagcagauc

SEQ ID NO: 432260 - RNA, 19 nt, Homo sapiens
  misc_RNA (1)...(19): siRNA sense strand
gcucagaauggcucagaau

SEQ ID NO: 432261 - RNA, 19 nt, Homo sapiens
  misc_RNA (1)...(19): siRNA sense strand
ugaaacgugccaugaacaa

SEQ ID NO: 432262 - RNA, 19 nt, Homo sapiens
  misc_RNA (1)...(19): siRNA sense strand
acaauucguagcagaugua

SEQ ID NO: 432263 - RNA, 19 nt, Homo sapiens
  misc_RNA (1)...(19): siRNA sense strand
uggaacuucuucauccuau

SEQ ID NO: 432264 - RNA, 19 nt, Homo sapiens
  misc_RNA (1)...(19): siRNA sense strand
aaacuggaacuucuucauc

SEQ ID NO: 432265 - RNA, 19 nt, Homo sapiens
  misc_RNA (1)...(19): siRNA sense strand
guucagaagaaugauguaa

SEQ ID NO: 432266 - RNA, 19 nt, Homo sapiens
  misc_RNA (1)...(19): siRNA sense strand
guugucugcuuugguuaaa

SEQ ID NO: 432267 - RNA, 19 nt, Homo sapiens
  misc_RNA (1)...(19): siRNA sense strand
gaugcagcuuuaaacagau

SEQ ID NO: 432268 - RNA, 19 nt, Homo sapiens
  misc_RNA (1)...(19): siRNA sense strand
gacuaaggcuuuggaacag

SEQ ID NO: 432269 - RNA, 19 nt, Homo sapiens
  misc_RNA (1)...(19): siRNA sense strand
cuaugcugcugcccuagaa

SEQ ID NO: 432270 - RNA, 19 nt, Homo sapiens
  misc_RNA (1)...(19): siRNA sense strand
gguaucaaacagaaucuca

SEQ ID NO: 432271 - RNA, 19 nt, Homo sapiens
  misc_RNA (1)...(19): siRNA sense strand
gauagugcagaugcuaauu

SEQ ID NO: 432272 - RNA, 19 nt, Homo sapiens
  misc_RNA (1)...(19): siRNA sense strand
augaacaaauccuuuaugg

SEQ ID NO: 432273 - RNA, 19 nt, Homo sapiens
  misc_RNA (1)...(19): siRNA sense strand
uauuucagcagaucuauuc

SEQ ID NO: 432274 - RNA, 19 nt, Homo sapiens
  misc_RNA (1)...(19): siRNA sense strand
gagaugcagcuuuaaacag

SEQ ID NO: 432275 - RNA, 19 nt, Homo sapiens
  misc_RNA (1)...(19): siRNA sense strand
caucaucaucuccuuauac

SEQ ID NO: 432276 - RNA, 19 nt, Homo sapiens
  misc_RNA (1)...(19): siRNA sense strand
gagcuuauugucacauucu

SEQ ID NO: 432277 - RNA, 19 nt, Homo sapiens
  misc_RNA (1)...(19): siRNA sense strand
ucaaguaugacugguauca

SEQ ID NO: 432278 - RNA, 19 nt, Homo sapiens
  misc_RNA (1)...(19): siRNA sense strand
gucaagaagcucagaaugg

SEQ ID NO: 432279 - RNA, 19 nt, Homo sapiens
  misc_RNA (1)...(19): siRNA sense strand
cacuuaugaucaagaaugu

SEQ ID NO: 432280 - RNA, 19 nt, Homo sapiens
  misc_RNA (1)...(19): siRNA sense strand
caauccuccugaugauaug

SEQ ID NO: 432281 - RNA, 19 nt, Homo sapiens
  misc_RNA (1)...(19): siRNA sense strand
agaugguucugaugaagug

SEQ ID NO: 432282 - RNA, 19 nt, Homo sapiens
  misc_RNA (1)...(19): siRNA sense strand
uagcagauguaaagaaccu

SEQ ID NO: 432283 - RNA, 19 nt, Homo sapiens
  misc_RNA (1)...(19): siRNA sense strand
gaaauggcaucaaauggua

SEQ ID NO: 432284 - RNA, 19 nt, Homo sapiens
  misc_RNA (1)...(19): siRNA sense strand
gcucauagccuuugacaga

SEQ ID NO: 432285 - RNA, 19 nt, Homo sapiens
  misc_RNA (1)...(19): siRNA sense strand
caaauacgaucuugagcaa

SEQ ID NO: 432286 - RNA, 19 nt, Homo sapiens
  misc_RNA (1)...(19): siRNA sense strand
ggcaucaaaugguaaauaa

SEQ ID NO: 432287 - RNA, 19 nt, Homo sapiens
  misc_RNA (1)...(19): siRNA sense strand
gggcugaaauggcaucaaa

SEQ ID NO: 432288 - RNA, 19 nt, Homo sapiens
  misc_RNA (1)...(19): siRNA sense strand
guauggaucccuuaauaua

SEQ ID NO: 432289 - RNA, 19 nt, Homo sapiens
  misc_RNA (1)...(19): siRNA sense strand
gcaacaccaucgucuguga

SEQ ID NO: 432290 - RNA, 19 nt, Homo sapiens
  misc_RNA (1)...(19): siRNA sense strand
caauaagacugacuguaga

SEQ ID NO: 432291 - RNA, 19 nt, Homo sapiens
  misc_RNA (1)...(19): siRNA sense strand
ugucguggcugucuucuuu

SEQ ID NO: 432292 - RNA, 19 nt, Homo sapiens
  misc_RNA (1)...(19): siRNA sense strand
caucagaccuuugagaaau

SEQ ID NO: 432293 - RNA, 19 nt, Homo sapiens
  misc_RNA (1)...(19): siRNA sense strand
caacuaacauuuguaugga

SEQ ID NO: 432294 - RNA, 19 nt, Homo sapiens
  misc_RNA (1)...(19): siRNA sense strand
cagagacacucggauagua

SEQ ID NO: 432295 - RNA, 19 nt, Homo sapiens
  misc_RNA (1)...(19): siRNA sense strand
gcauccugcugaauacuuu

SEQ ID NO: 432296 - RNA, 19 nt, Homo sapiens
  misc_RNA (1)...(19): siRNA sense strand
gcaacuaacauuuguaugg

SEQ ID NO: 432297 - RNA, 19 nt, Homo sapiens
  misc_RNA (1)...(19): siRNA sense strand
gcuggaaggcaaaguauuu

SEQ ID NO: 432298 - RNA, 19 nt, Homo sapiens
  misc_RNA (1)...(19): siRNA sense strand
aaagugugcuuccuuaaag

SEQ ID NO: 432299 - RNA, 19 nt, Homo sapiens
  misc_RNA (1)...(19): siRNA sense strand
cagaaaagcuaccauguau

SEQ ID NO: 432300 - RNA, 19 nt, Homo sapiens
  misc_RNA (1)...(19): siRNA sense strand
uuguauggaucccuuaaua

SEQ ID NO: 432301 - RNA, 19 nt, Homo sapiens
  misc_RNA (1)...(19): siRNA sense strand
gagaaagaccacagcauca

SEQ ID NO: 432302 - RNA, 19 nt, Homo sapiens
  misc_RNA (1)...(19): siRNA sense strand
acaauaagacugacuguag

SEQ ID NO: 432303 - RNA, 19 nt, Homo sapiens
  misc_RNA (1)...(19): siRNA sense strand
gacagacaacauaaccuua

SEQ ID NO: 432304 - RNA, 19 nt, Homo sapiens
  misc_RNA (1)...(19): siRNA sense strand
ugacacucaugcuuccuuu

SEQ ID NO: 432305 - RNA, 19 nt, Homo sapiens
  misc_RNA (1)...(19): siRNA sense strand
acagucaaaccaacaauaa

SEQ ID NO: 432306 - RNA, 19 nt, Homo sapiens
  misc_RNA (1)...(19): siRNA sense strand
gcugaaauggcaucaaaug

SEQ ID NO: 432307 - RNA, 19 nt, Homo sapiens
  misc_RNA (1)...(19): siRNA sense strand
gaucaucagaccuuugaga

SEQ ID NO: 432308 - RNA, 19 nt, Homo sapiens
  misc_RNA (1)...(19): siRNA sense strand
gaugcaaggcuucaacaga

SEQ ID NO: 432309 - RNA, 19 nt, Homo sapiens
  misc_RNA (1)...(19): siRNA sense strand
ggcagcaacuaacauuugu

SEQ ID NO: 432310 - RNA, 19 nt, Homo sapiens
  misc_RNA (1)...(19): siRNA sense strand
ucauagccuuugacagauu

SEQ ID NO: 432311 - RNA, 19 nt, Homo sapiens
  misc_RNA (1)...(19): siRNA sense strand
aauacgaucuugagcaaca

SEQ ID NO: 432312 - RNA, 19 nt, Homo sapiens
  misc_RNA (1)...(19): siRNA sense strand
gaacaccacagugaugcaa

SEQ ID NO: 432313 - RNA, 19 nt, Homo sapiens
  misc_RNA (1)...(19): siRNA sense strand
gaaagaccacagcaucaag

SEQ ID NO: 432314 - RNA, 19 nt, Homo sapiens
  misc_RNA (1)...(19): siRNA sense strand
aaaccaacaauaagacuga

SEQ ID NO: 432315 - RNA, 19 nt, Homo sapiens
  misc_RNA (1)...(19): siRNA sense strand
guggccgacuugauaauga

SEQ ID NO: 432316 - RNA, 19 nt, Homo sapiens
  misc_RNA (1)...(19): siRNA sense strand
gauaguacagcugguauuc

SEQ ID NO: 432317 - RNA, 19 nt, Homo sapiens
  misc_RNA (1)...(19): siRNA sense strand
ugaaauggcaucaaauggu

SEQ ID NO: 432318 - RNA, 19 nt, Homo sapiens
  misc_RNA (1)...(19): siRNA sense strand
cagcaacuaacauuuguau

SEQ ID NO: 432319 - RNA, 19 nt, Homo sapiens
  misc_RNA (1)...(19): siRNA sense strand
acucaugcuuccuuucaaa

SEQ ID NO: 432320 - RNA, 19 nt, Homo sapiens
  misc_RNA (1)...(19): siRNA sense strand
ucaagaucaucagaccuuu

SEQ ID NO: 432321 - RNA, 19 nt, Homo sapiens
  misc_RNA (1)...(19): siRNA sense strand
ugacagauuccucaagauc

SEQ ID NO: 432322 - RNA, 19 nt, Homo sapiens
  misc_RNA (1)...(19): siRNA sense strand
augcaaggcuucaacagau

SEQ ID NO: 432323 - RNA, 19 nt, Homo sapiens
  misc_RNA (1)...(19): siRNA sense strand
ucagaccuuugagaaauau

SEQ ID NO: 432324 - RNA, 19 nt, Homo sapiens
  misc_RNA (1)...(19): siRNA sense strand
ggauaguacagcugguauu

SEQ ID NO: 432325 - RNA, 19 nt, Homo sapiens
  misc_RNA (1)...(19): siRNA sense strand
aaagcuggaaggcaaagua

SEQ ID NO: 432326 - RNA, 19 nt, Homo sapiens
  misc_RNA (1)...(19): siRNA sense strand
gagcaacaaggaagcaaca

SEQ ID NO: 432327 - RNA, 19 nt, Homo sapiens
  misc_RNA (1)...(19): siRNA sense strand
gacagauuccucaagauca

SEQ ID NO: 432328 - RNA, 19 nt, Homo sapiens
  misc_RNA (1)...(19): siRNA sense strand
uuuaugagaccauguaugu

SEQ ID NO: 432329 - RNA, 19 nt, Homo sapiens
  misc_RNA (1)...(19): siRNA sense strand
agacagacaacauaaccuu

SEQ ID NO: 432330 - RNA, 19 nt, Homo sapiens
  misc_RNA (1)...(19): siRNA sense strand
gcagucagacagacaacau

SEQ ID NO: 432331 - RNA, 19 nt, Homo sapiens
  misc_RNA (1)...(19): siRNA sense strand
gcagcaacuaacauuugua

SEQ ID NO: 432332 - RNA, 19 nt, Homo sapiens
  misc_RNA (1)...(19): siRNA sense strand
agucaaaccaacaauaaga

SEQ ID NO: 432333 - RNA, 19 nt, Homo sapiens
  misc_RNA (1)...(19): siRNA sense strand
guggcugucuucuuugugu

SEQ ID NO: 432334 - RNA, 19 nt, Homo sapiens
  misc_RNA (1)...(19): siRNA sense strand
ccauauacucacagucaaa

SEQ ID NO: 432335 - RNA, 19 nt, Homo sapiens
  misc_RNA (1)...(19): siRNA sense strand
gaaaagcuaccauguaugc

SEQ ID NO: 432336 - RNA, 19 nt, Homo sapiens
  misc_RNA (1)...(19): siRNA sense strand
cacagucaaaccaacaaua

SEQ ID NO: 432337 - RNA, 19 nt, Homo sapiens
  misc_RNA (1)...(19): siRNA sense strand
acacuuugguggccgacuu

SEQ ID NO: 432338 - RNA, 19 nt, Homo sapiens
  misc_RNA (1)...(19): siRNA sense strand
acagauuccucaagaucau

SEQ ID NO: 432339 - RNA, 19 nt, Homo sapiens
  misc_RNA (1)...(19): siRNA sense strand
cauagccuuugacagauuc

SEQ ID NO: 432340 - RNA, 19 nt, Homo sapiens
  misc_RNA (1)...(19): siRNA sense strand
uuugguggccgacuugaua

SEQ ID NO: 432341 - RNA, 19 nt, Homo sapiens
  misc_RNA (1)...(19): siRNA sense strand
caagaucaucagaccuuug

SEQ ID NO: 432342 - RNA, 19 nt, Homo sapiens
  misc_RNA (1)...(19): siRNA sense strand
uggcagcaacuaacauuug

SEQ ID NO: 432343 - RNA, 19 nt, Homo sapiens
  misc_RNA (1)...(19): siRNA sense strand
uggcaucaaaugguaaaua

SEQ ID NO: 432344 - RNA, 19 nt, Homo sapiens
  misc_RNA (1)...(19): siRNA sense strand
aagaucaucagaccuuuga

SEQ ID NO: 432345 - RNA, 19 nt, Homo sapiens
  misc_RNA (1)...(19): siRNA sense strand
ucaucucccugccaaauac

SEQ ID NO: 432346 - RNA, 19 nt, Homo sapiens
  misc_RNA (1)...(19): siRNA sense strand
caacaccaucgucugugaa

SEQ ID NO: 432347 - RNA, 19 nt, Homo sapiens
  misc_RNA (1)...(19): siRNA sense strand
aucagaccuuugagaaaua

SEQ ID NO: 432348 - RNA, 19 nt, Homo sapiens
  misc_RNA (1)...(19): siRNA sense strand
gaaaaucauagcagucaga

SEQ ID NO: 432349 - RNA, 19 nt, Homo sapiens
  misc_RNA (1)...(19): siRNA sense strand
gcuaaagaaacaacucucu

SEQ ID NO: 432350 - RNA, 19 nt, Homo sapiens
  misc_RNA (1)...(19): siRNA sense strand
ugaccggcauccugcugaa

SEQ ID NO: 432351 - RNA, 19 nt, Homo sapiens
  misc_RNA (1)...(19): siRNA sense strand
ucaucagaccuuugagaaa

SEQ ID NO: 432352 - RNA, 19 nt, Homo sapiens
  misc_RNA (1)...(19): siRNA sense strand
agucagacagacaacauaa

SEQ ID NO: 432353 - RNA, 19 nt, Homo sapiens
  misc_RNA (1)...(19): siRNA sense strand
agaaagaccacagcaucaa

SEQ ID NO: 432354 - RNA, 19 nt, Homo sapiens
  misc_RNA (1)...(19): siRNA sense strand
aaagcuaccauguaugcaa

SEQ ID NO: 432355 - RNA, 19 nt, Homo sapiens
  misc_RNA (1)...(19): siRNA sense strand
caacaauaagacugacugu

SEQ ID NO: 432356 - RNA, 19 nt, Homo sapiens
  misc_RNA (1)...(19): siRNA sense strand
acacucaugcuuccuuuca

SEQ ID NO: 432357 - RNA, 19 nt, Homo sapiens
  misc_RNA (1)...(19): siRNA sense strand
auggaucccuuaauauaca

SEQ ID NO: 432358 - RNA, 19 nt, Homo sapiens
  misc_RNA (1)...(19): siRNA sense strand
uauccuaaugcuuguguuu

SEQ ID NO: 432359 - RNA, 19 nt, Homo sapiens
  misc_RNA (1)...(19): siRNA sense strand
ucucaaucuucaucugguu

SEQ ID NO: 432360 - RNA, 19 nt, Homo sapiens
  misc_RNA (1)...(19): siRNA sense strand
ucccagcccucuacacagu

SEQ ID NO: 432361 - RNA, 19 nt, Homo sapiens
  misc_RNA (1)...(19): siRNA sense strand
ccuccaccuucaucaucua

SEQ ID NO: 432362 - RNA, 19 nt, Homo sapiens
  misc_RNA (1)...(19): siRNA sense strand
cagacaacauaaccuuagg

SEQ ID NO: 432363 - RNA, 19 nt, Homo sapiens
  misc_RNA (1)...(19): siRNA sense strand
acagacaacauaaccuuag

SEQ ID NO: 432364 - RNA, 19 nt, Homo sapiens
  misc_RNA (1)...(19): siRNA sense strand
ugccagaguuccauauacu

SEQ ID NO: 432365 - RNA, 19 nt, Homo sapiens
  misc_RNA (1)...(19): siRNA sense strand
cugaauacuuuggcucugu

SEQ ID NO: 432366 - RNA, 19 nt, Homo sapiens
  misc_RNA (1)...(19): siRNA sense strand
uccuaaugcuuguguuuua

SEQ ID NO: 432367 - RNA, 19 nt, Homo sapiens
  misc_RNA (1)...(19): siRNA sense strand
cagucagacagacaacaua

SEQ ID NO: 432368 - RNA, 19 nt, Homo sapiens
  misc_RNA (1)...(19): siRNA sense strand
uguauggaucccuuaauau

SEQ ID NO: 432369 - RNA, 19 nt, Homo sapiens
  misc_RNA (1)...(19): siRNA sense strand
gcaaggcuucaacagaucu

SEQ ID NO: 432370 - RNA, 19 nt, Homo sapiens
  misc_RNA (1)...(19): siRNA sense strand
gcucuguggguguuuguuc

SEQ ID NO: 432371 - RNA, 19 nt, Homo sapiens
  misc_RNA (1)...(19): siRNA sense strand
acagaaaagcuaccaugua

SEQ ID NO: 432372 - RNA, 19 nt, Homo sapiens
  misc_RNA (1)...(19): siRNA sense strand
gagacacucggauaguaca

SEQ ID NO: 432373 - RNA, 19 nt, Homo sapiens
  misc_RNA (1)...(19): siRNA sense strand
gacuugauaaugacacuca

SEQ ID NO: 432374 - RNA, 19 nt, Homo sapiens
  misc_RNA (1)...(19): siRNA sense strand
cuucaucaucuaccucaaa

SEQ ID NO: 432375 - RNA, 19 nt, Homo sapiens
  misc_RNA (1)...(19): siRNA sense strand
gguauucccagcccucuac

SEQ ID NO: 432376 - RNA, 19 nt, Homo sapiens
  misc_RNA (1)...(19): siRNA sense strand
aagcaacaccaucgucugu

SEQ ID NO: 432377 - RNA, 19 nt, Homo sapiens
  misc_RNA (1)...(19): siRNA sense strand
aaaacggucucaaucuuca

SEQ ID NO: 432378 - RNA, 19 nt, Homo sapiens
  misc_RNA (1)...(19): siRNA sense strand
gaaauggcaucaaauggua

SEQ ID NO: 432379 - RNA, 19 nt, Homo sapiens
  misc_RNA (1)...(19): siRNA sense strand
gcucauagccuuugacaga

SEQ ID NO: 432380 - RNA, 19 nt, Homo sapiens
  misc_RNA (1)...(19): siRNA sense strand
caaauacgaucuugagcaa

SEQ ID NO: 432381 - RNA, 19 nt, Homo sapiens
  misc_RNA (1)...(19): siRNA sense strand
ggcaucaaaugguaaauaa

SEQ ID NO: 432382 - RNA, 19 nt, Homo sapiens
  misc_RNA (1)...(19): siRNA sense strand
gggcugaaauggcaucaaa

SEQ ID NO: 432383 - RNA, 19 nt, Homo sapiens
  misc_RNA (1)...(19): siRNA sense strand
guauggaucccuuaauaua

SEQ ID NO: 432384 - RNA, 19 nt, Homo sapiens
  misc_RNA (1)...(19): siRNA sense strand
gcaacaccaucgucuguga

SEQ ID NO: 432385 - RNA, 19 nt, Homo sapiens
  misc_RNA (1)...(19): siRNA sense strand
caauaagacugacuguaga

SEQ ID NO: 432386 - RNA, 19 nt, Homo sapiens
  misc_RNA (1)...(19): siRNA sense strand
ugucguggcugucuucuuu

SEQ ID NO: 432387 - RNA, 19 nt, Homo sapiens
  misc_RNA (1)...(19): siRNA sense strand
caucagaccuuugagaaau

SEQ ID NO: 432388 - RNA, 19 nt, Homo sapiens
  misc_RNA (1)...(19): siRNA sense strand
caacuaacauuuguaugga

SEQ ID NO: 432389 - RNA, 19 nt, Homo sapiens
  misc_RNA (1)...(19): siRNA sense strand
cagagacacucggauagua

SEQ ID NO: 432390 - RNA, 19 nt, Homo sapiens
  misc_RNA (1)...(19): siRNA sense strand
gcauccugcugaauacuuu

SEQ ID NO: 432391 - RNA, 19 nt, Homo sapiens
  misc_RNA (1)...(19): siRNA sense strand
gcaacuaacauuuguaugg

SEQ ID NO: 432392 - RNA, 19 nt, Homo sapiens
  misc_RNA (1)...(19): siRNA sense strand
gcuggaaggcaaaguauuu

SEQ ID NO: 432393 - RNA, 19 nt, Homo sapiens
  misc_RNA (1)...(19): siRNA sense strand
aaagugugcuuccuuaaag

SEQ ID NO: 432394 - RNA, 19 nt, Homo sapiens
  misc_RNA (1)...(19): siRNA sense strand
cagaaaagcuaccauguau

SEQ ID NO: 432395 - RNA, 19 nt, Homo sapiens
  misc_RNA (1)...(19): siRNA sense strand
uuguauggaucccuuaaua

SEQ ID NO: 432396 - RNA, 19 nt, Homo sapiens
  misc_RNA (1)...(19): siRNA sense strand
gagaaagaccacagcauca

SEQ ID NO: 432397 - RNA, 19 nt, Homo sapiens
  misc_RNA (1)...(19): siRNA sense strand
acaauaagacugacuguag

SEQ ID NO: 432398 - RNA, 19 nt, Homo sapiens
  misc_RNA (1)...(19): siRNA sense strand
gacagacaacauaaccuua

SEQ ID NO: 432399 - RNA, 19 nt, Homo sapiens
  misc_RNA (1)...(19): siRNA sense strand
ugacacucaugcuuccuuu

SEQ ID NO: 432400 - RNA, 19 nt, Homo sapiens
  misc_RNA (1)...(19): siRNA sense strand
acagucaaaccaacaauaa

SEQ ID NO: 432401 - RNA, 19 nt, Homo sapiens
  misc_RNA (1)...(19): siRNA sense strand
gcugaaauggcaucaaaug

SEQ ID NO: 432402 - RNA, 19 nt, Homo sapiens
  misc_RNA (1)...(19): siRNA sense strand
gaucaucagaccuuugaga

SEQ ID NO: 432403 - RNA, 19 nt, Homo sapiens
  misc_RNA (1)...(19): siRNA sense strand
gaugcaaggcuucaacaga

SEQ ID NO: 432404 - RNA, 19 nt, Homo sapiens
  misc_RNA (1)...(19): siRNA sense strand
ggcagcaacuaacauuugu

SEQ ID NO: 432405 - RNA, 19 nt, Homo sapiens
  misc_RNA (1)...(19): siRNA sense strand
ucauagccuuugacagauu

SEQ ID NO: 432406 - RNA, 19 nt, Homo sapiens
  misc_RNA (1)...(19): siRNA sense strand
aauacgaucuugagcaaca

SEQ ID NO: 432407 - RNA, 19 nt, Homo sapiens
  misc_RNA (1)...(19): siRNA sense strand
gaacaccacagugaugcaa

SEQ ID NO: 432408 - RNA, 19 nt, Homo sapiens
  misc_RNA (1)...(19): siRNA sense strand
gaaagaccacagcaucaag

SEQ ID NO: 432409 - RNA, 19 nt, Homo sapiens
  misc_RNA (1)...(19): siRNA sense strand
aaaccaacaauaagacuga

SEQ ID NO: 432410 - RNA, 19 nt, Homo sapiens
  misc_RNA (1)...(19): siRNA sense strand
guggccgacuugauaauga

SEQ ID NO: 432411 - RNA, 19 nt, Homo sapiens
  misc_RNA (1)...(19): siRNA sense strand
gauaguacagcugguauuc

SEQ ID NO: 432412 - RNA, 19 nt, Homo sapiens
  misc_RNA (1)...(19): siRNA sense strand
ugaaauggcaucaaauggu

SEQ ID NO: 432413 - RNA, 19 nt, Homo sapiens
  misc_RNA (1)...(19): siRNA sense strand
cagcaacuaacauuuguau

SEQ ID NO: 432414 - RNA, 19 nt, Homo sapiens
  misc_RNA (1)...(19): siRNA sense strand
acucaugcuuccuuucaaa

SEQ ID NO: 432415 - RNA, 19 nt, Homo sapiens
  misc_RNA (1)...(19): siRNA sense strand
ucaagaucaucagaccuuu

SEQ ID NO: 432416 - RNA, 19 nt, Homo sapiens
  misc_RNA (1)...(19): siRNA sense strand
ugacagauuccucaagauc

SEQ ID NO: 432417 - RNA, 19 nt, Homo sapiens
  misc_RNA (1)...(19): siRNA sense strand
augcaaggcuucaacagau

SEQ ID NO: 432418 - RNA, 19 nt, Homo sapiens
  misc_RNA (1)...(19): siRNA sense strand
ucagaccuuugagaaauau

SEQ ID NO: 432419 - RNA, 19 nt, Homo sapiens
  misc_RNA (1)...(19): siRNA sense strand
ggauaguacagcugguauu

SEQ ID NO: 432420 - RNA, 19 nt, Homo sapiens
  misc_RNA (1)...(19): siRNA sense strand
aaagcuggaaggcaaagua

SEQ ID NO: 432421 - RNA, 19 nt, Homo sapiens
  misc_RNA (1)...(19): siRNA sense strand
gagcaacaaggaagcaaca

SEQ ID NO: 432422 - RNA, 19 nt, Homo sapiens
  misc_RNA (1)...(19): siRNA sense strand
gacagauuccucaagauca

SEQ ID NO: 432423 - RNA, 19 nt, Homo sapiens
  misc_RNA (1)...(19): siRNA sense strand
uuuaugagaccauguaugu

SEQ ID NO: 432424 - RNA, 19 nt, Homo sapiens
  misc_RNA (1)...(19): siRNA sense strand
agacagacaacauaaccuu

SEQ ID NO: 432425 - RNA, 19 nt, Homo sapiens
  misc_RNA (1)...(19): siRNA sense strand
gcagucagacagacaacau

SEQ ID NO: 432426 - RNA, 19 nt, Homo sapiens
  misc_RNA (1)...(19): siRNA sense strand
gcagcaacuaacauuugua

SEQ ID NO: 432427 - RNA, 19 nt, Homo sapiens
  misc_RNA (1)...(19): siRNA sense strand
agucaaaccaacaauaaga

SEQ ID NO: 432428 - RNA, 19 nt, Homo sapiens
  misc_RNA (1)...(19): siRNA sense strand
guggcugucuucuuugugu

SEQ ID NO: 432429 - RNA, 19 nt, Homo sapiens
  misc_RNA (1)...(19): siRNA sense strand
ccauauacucacagucaaa

SEQ ID NO: 432430 - RNA, 19 nt, Homo sapiens
  misc_RNA (1)...(19): siRNA sense strand
gaaaagcuaccauguaugc

SEQ ID NO: 432431 - RNA, 19 nt, Homo sapiens
  misc_RNA (1)...(19): siRNA sense strand
cacagucaaaccaacaaua

SEQ ID NO: 432432 - RNA, 19 nt, Homo sapiens
  misc_RNA (1)...(19): siRNA sense strand
acacuuugguggccgacuu

SEQ ID NO: 432433 - RNA, 19 nt, Homo sapiens
  misc_RNA (1)...(19): siRNA sense strand
acagauuccucaagaucau

SEQ ID NO: 432434 - RNA, 19 nt, Homo sapiens
  misc_RNA (1)...(19): siRNA sense strand
cauagccuuugacagauuc

SEQ ID NO: 432435 - RNA, 19 nt, Homo sapiens
  misc_RNA (1)...(19): siRNA sense strand
uuugguggccgacuugaua

SEQ ID NO: 432436 - RNA, 19 nt, Homo sapiens
  misc_RNA (1)...(19): siRNA sense strand
caagaucaucagaccuuug

SEQ ID NO: 432437 - RNA, 19 nt, Homo sapiens
  misc_RNA (1)...(19): siRNA sense strand
uggcagcaacuaacauuug

SEQ ID NO: 432438 - RNA, 19 nt, Homo sapiens
  misc_RNA (1)...(19): siRNA sense strand
uggcaucaaaugguaaaua

SEQ ID NO: 432439 - RNA, 19 nt, Homo sapiens
  misc_RNA (1)...(19): siRNA sense strand
aagaucaucagaccuuuga

SEQ ID NO: 432440 - RNA, 19 nt, Homo sapiens
  misc_RNA (1)...(19): siRNA sense strand
ucaucucccugccaaauac

SEQ ID NO: 432441 - RNA, 19 nt, Homo sapiens
  misc_RNA (1)...(19): siRNA sense strand
caacaccaucgucugugaa

SEQ ID NO: 432442 - RNA, 19 nt, Homo sapiens
  misc_RNA (1)...(19): siRNA sense strand
aucagaccuuugagaaaua

SEQ ID NO: 432443 - RNA, 19 nt, Homo sapiens
  misc_RNA (1)...(19): siRNA sense strand
gaaaaucauagcagucaga

SEQ ID NO: 432444 - RNA, 19 nt, Homo sapiens
  misc_RNA (1)...(19): siRNA sense strand
gcuaaagaaacaacucucu

SEQ ID NO: 432445 - RNA, 19 nt, Homo sapiens
  misc_RNA (1)...(19): siRNA sense strand
ugaccggcauccugcugaa

SEQ ID NO: 432446 - RNA, 19 nt, Homo sapiens
  misc_RNA (1)...(19): siRNA sense strand
ucaucagaccuuugagaaa

SEQ ID NO: 432447 - RNA, 19 nt, Homo sapiens
  misc_RNA (1)...(19): siRNA sense strand
agucagacagacaacauaa

SEQ ID NO: 432448 - RNA, 19 nt, Homo sapiens
  misc_RNA (1)...(19): siRNA sense strand
agaaagaccacagcaucaa

SEQ ID NO: 432449 - RNA, 19 nt, Homo sapiens
  misc_RNA (1)...(19): siRNA sense strand
aaagcuaccauguaugcaa

SEQ ID NO: 432450 - RNA, 19 nt, Homo sapiens
  misc_RNA (1)...(19): siRNA sense strand
caacaauaagacugacugu

SEQ ID NO: 432451 - RNA, 19 nt, Homo sapiens
  misc_RNA (1)...(19): siRNA sense strand
acacucaugcuuccuuuca

SEQ ID NO: 432452 - RNA, 19 nt, Homo sapiens
  misc_RNA (1)...(19): siRNA sense strand
auggaucccuuaauauaca

SEQ ID NO: 432453 - RNA, 19 nt, Homo sapiens
  misc_RNA (1)...(19): siRNA sense strand
uauccuaaugcuuguguuu

SEQ ID NO: 432454 - RNA, 19 nt, Homo sapiens
  misc_RNA (1)...(19): siRNA sense strand
ucucaaucuucaucugguu

SEQ ID NO: 432455 - RNA, 19 nt, Homo sapiens
  misc_RNA (1)...(19): siRNA sense strand
ucccagcccucuacacagu

SEQ ID NO: 432456 - RNA, 19 nt, Homo sapiens
  misc_RNA (1)...(19): siRNA sense strand
ccuccaccuucaucaucua

SEQ ID NO: 432457 - RNA, 19 nt, Homo sapiens
  misc_RNA (1)...(19): siRNA sense strand
cagacaacauaaccuuagg

SEQ ID NO: 432458 - RNA, 19 nt, Homo sapiens
  misc_RNA (1)...(19): siRNA sense strand
acagacaacauaaccuuag

SEQ ID NO: 432459 - RNA, 19 nt, Homo sapiens
  misc_RNA (1)...(19): siRNA sense strand
ugccagaguuccauauacu

SEQ ID NO: 432460 - RNA, 19 nt, Homo sapiens
  misc_RNA (1)...(19): siRNA sense strand
cugaauacuuuggcucugu

SEQ ID NO: 432461 - RNA, 19 nt, Homo sapiens
  misc_RNA (1)...(19): siRNA sense strand
uccuaaugcuuguguuuua

SEQ ID NO: 432462 - RNA, 19 nt, Homo sapiens
  misc_RNA (1)...(19): siRNA sense strand
cagucagacagacaacaua

SEQ ID NO: 432463 - RNA, 19 nt, Homo sapiens
  misc_RNA (1)...(19): siRNA sense strand
uguauggaucccuuaauau

SEQ ID NO: 432464 - RNA, 19 nt, Homo sapiens
  misc_RNA (1)...(19): siRNA sense strand
gcaaggcuucaacagaucu

SEQ ID NO: 432465 - RNA, 19 nt, Homo sapiens
  misc_RNA (1)...(19): siRNA sense strand
gcucuguggguguuuguuc

SEQ ID NO: 432466 - RNA, 19 nt, Homo sapiens
  misc_RNA (1)...(19): siRNA sense strand
acagaaaagcuaccaugua

SEQ ID NO: 432467 - RNA, 19 nt, Homo sapiens
  misc_RNA (1)...(19): siRNA sense strand
gagacacucggauaguaca

SEQ ID NO: 432468 - RNA, 19 nt, Homo sapiens
  misc_RNA (1)...(19): siRNA sense strand
gacuugauaaugacacuca

SEQ ID NO: 432469 - RNA, 19 nt, Homo sapiens
  misc_RNA (1)...(19): siRNA sense strand
cuucaucaucuaccucaaa

SEQ ID NO: 432470 - RNA, 19 nt, Homo sapiens
  misc_RNA (1)...(19): siRNA sense strand
gguauucccagcccucuac

SEQ ID NO: 432471 - RNA, 19 nt, Homo sapiens
  misc_RNA (1)...(19): siRNA sense strand
aagcaacaccaucgucugu

SEQ ID NO: 432472 - RNA, 19 nt, Homo sapiens
  misc_RNA (1)...(19): siRNA sense strand
aaaacggucucaaucuuca

SEQ ID NO: 432473 - RNA, 19 nt, Homo sapiens
  misc_RNA (1)...(19): siRNA sense strand
gcaagaagcuuuaaauuga

SEQ ID NO: 432474 - RNA, 19 nt, Homo sapiens
  misc_RNA (1)...(19): siRNA sense strand
gaacccgacuguaguauua

SEQ ID NO: 432475 - RNA, 19 nt, Homo sapiens
  misc_RNA (1)...(19): siRNA sense strand
gaacagcuguauagcauuu

SEQ ID NO: 432476 - RNA, 19 nt, Homo sapiens
  misc_RNA (1)...(19): siRNA sense strand
gauggaagcagaagaauua

SEQ ID NO: 432477 - RNA, 19 nt, Homo sapiens
  misc_RNA (1)...(19): siRNA sense strand
ggacucugaucauaaguua

SEQ ID NO: 432478 - RNA, 19 nt, Homo sapiens
  misc_RNA (1)...(19): siRNA sense strand
caaagaggacuucuauuua

SEQ ID NO: 432479 - RNA, 19 nt, Homo sapiens
  misc_RNA (1)...(19): siRNA sense strand
cuaaggagcucuacccaua

SEQ ID NO: 432480 - RNA, 19 nt, Homo sapiens
  misc_RNA (1)...(19): siRNA sense strand
gaucauaaguuaccaucaa

SEQ ID NO: 432481 - RNA, 19 nt, Homo sapiens
  misc_RNA (1)...(19): siRNA sense strand
gaaaccggauguucuagaa

SEQ ID NO: 432482 - RNA, 19 nt, Homo sapiens
  misc_RNA (1)...(19): siRNA sense strand
caagaaagcugggcaaagu

SEQ ID NO: 432483 - RNA, 19 nt, Homo sapiens
  misc_RNA (1)...(19): siRNA sense strand
gaaggaaucuugaaaauca

SEQ ID NO: 432484 - RNA, 19 nt, Homo sapiens
  misc_RNA (1)...(19): siRNA sense strand
uaacagaagcugacuauga

SEQ ID NO: 432485 - RNA, 19 nt, Homo sapiens
  misc_RNA (1)...(19): siRNA sense strand
ggagauagaaugcacuuaa

SEQ ID NO: 432486 - RNA, 19 nt, Homo sapiens
  misc_RNA (1)...(19): siRNA sense strand
guucagaaaugcucagaaa

SEQ ID NO: 432487 - RNA, 19 nt, Homo sapiens
  misc_RNA (1)...(19): siRNA sense strand
gcacaaggacgauaaacuu

SEQ ID NO: 432488 - RNA, 19 nt, Homo sapiens
  misc_RNA (1)...(19): siRNA sense strand
acaaagaggacuucuauuu

SEQ ID NO: 432489 - RNA, 19 nt, Homo sapiens
  misc_RNA (1)...(19): siRNA sense strand
cuaaagacauugaggaaga

SEQ ID NO: 432490 - RNA, 19 nt, Homo sapiens
  misc_RNA (1)...(19): siRNA sense strand
ggugauccuuugcauauaa

SEQ ID NO: 432491 - RNA, 19 nt, Homo sapiens
  misc_RNA (1)...(19): siRNA sense strand
gaauuucucuaccauaaca

SEQ ID NO: 432492 - RNA, 19 nt, Homo sapiens
  misc_RNA (1)...(19): siRNA sense strand
gguuuaggaugcaaauaua

SEQ ID NO: 432493 - RNA, 19 nt, Homo sapiens
  misc_RNA (1)...(19): siRNA sense strand
cauauuggaucucugcuuu

SEQ ID NO: 432494 - RNA, 19 nt, Homo sapiens
  misc_RNA (1)...(19): siRNA sense strand
gaagaucaagucaaacaaa

SEQ ID NO: 432495 - RNA, 19 nt, Homo sapiens
  misc_RNA (1)...(19): siRNA sense strand
gaaaugcucagaaaucaau

SEQ ID NO: 432496 - RNA, 19 nt, Homo sapiens
  misc_RNA (1)...(19): siRNA sense strand
ucaaacaaauggacauaga

SEQ ID NO: 432497 - RNA, 19 nt, Homo sapiens
  misc_RNA (1)...(19): siRNA sense strand
ggucaacucuucuacaaag

SEQ ID NO: 432498 - RNA, 19 nt, Homo sapiens
  misc_RNA (1)...(19): siRNA sense strand
guacagaugguaaugcuuu

SEQ ID NO: 432499 - RNA, 19 nt, Homo sapiens
  misc_RNA (1)...(19): siRNA sense strand
ggaaggaacccgacuguag

SEQ ID NO: 432500 - RNA, 19 nt, Homo sapiens
  misc_RNA (1)...(19): siRNA sense strand
gggacaaacuagugaagaa

SEQ ID NO: 432501 - RNA, 19 nt, Homo sapiens
  misc_RNA (1)...(19): siRNA sense strand
gaugacaaggaaagaauua

SEQ ID NO: 432502 - RNA, 19 nt, Homo sapiens
  misc_RNA (1)...(19): siRNA sense strand
caaagaagaaccauccaaa

SEQ ID NO: 432503 - RNA, 19 nt, Homo sapiens
  misc_RNA (1)...(19): siRNA sense strand
uggaauuucucuaccauaa

SEQ ID NO: 432504 - RNA, 19 nt, Homo sapiens
  misc_RNA (1)...(19): siRNA sense strand
gaagcugacuaugauuuga

SEQ ID NO: 432505 - RNA, 19 nt, Homo sapiens
  misc_RNA (1)...(19): siRNA sense strand
ugaaacaucucaagcucaa

SEQ ID NO: 432506 - RNA, 19 nt, Homo sapiens
  misc_RNA (1)...(19): siRNA sense strand
gcucagaaaucaaucacau

SEQ ID NO: 432507 - RNA, 19 nt, Homo sapiens
  misc_RNA (1)...(19): siRNA sense strand
cagaaaugcucagaaauca

SEQ ID NO: 432508 - RNA, 19 nt, Homo sapiens
  misc_RNA (1)...(19): siRNA sense strand
gauagaaugcacuuaagaa

SEQ ID NO: 432509 - RNA, 19 nt, Homo sapiens
  misc_RNA (1)...(19): siRNA sense strand
ugaaguauauguagaaagg

SEQ ID NO: 432510 - RNA, 19 nt, Homo sapiens
  misc_RNA (1)...(19): siRNA sense strand
ggagauuuguuaauugaag

SEQ ID NO: 432511 - RNA, 19 nt, Homo sapiens
  misc_RNA (1)...(19): siRNA sense strand
gaauguaauugaggaccua

SEQ ID NO: 432512 - RNA, 19 nt, Homo sapiens
  misc_RNA (1)...(19): siRNA sense strand
gugaagaagugaauguaau

SEQ ID NO: 432513 - RNA, 19 nt, Homo sapiens
  misc_RNA (1)...(19): siRNA sense strand
ucacaugaaugcccauaau

SEQ ID NO: 432514 - RNA, 19 nt, Homo sapiens
  misc_RNA (1)...(19): siRNA sense strand
gcaagaaguucagggagau

SEQ ID NO: 432515 - RNA, 19 nt, Homo sapiens
  misc_RNA (1)...(19): siRNA sense strand
ggcaaagucugcaaaugga

SEQ ID NO: 432516 - RNA, 19 nt, Homo sapiens
  misc_RNA (1)...(19): siRNA sense strand
auaaaggccuaaagacauu

SEQ ID NO: 432517 - RNA, 19 nt, Homo sapiens
  misc_RNA (1)...(19): siRNA sense strand
gugaacagcuguauagcau

SEQ ID NO: 432518 - RNA, 19 nt, Homo sapiens
  misc_RNA (1)...(19): siRNA sense strand
gagauagaaugcacuuaag

SEQ ID NO: 432519 - RNA, 19 nt, Homo sapiens
  misc_RNA (1)...(19): siRNA sense strand
cuucuaaacucucuucaga

SEQ ID NO: 432520 - RNA, 19 nt, Homo sapiens
  misc_RNA (1)...(19): siRNA sense strand
caagaacccuuccaaaaga

SEQ ID NO: 432521 - RNA, 19 nt, Homo sapiens
  misc_RNA (1)...(19): siRNA sense strand
gaugaccaguaucuuuauu

SEQ ID NO: 432522 - RNA, 19 nt, Homo sapiens
  misc_RNA (1)...(19): siRNA sense strand
gcuggagauuuguuaauug

SEQ ID NO: 432523 - RNA, 19 nt, Homo sapiens
  misc_RNA (1)...(19): siRNA sense strand
gaugaugcacugcuuacua

SEQ ID NO: 432524 - RNA, 19 nt, Homo sapiens
  misc_RNA (1)...(19): siRNA sense strand
uagcauuuguuacacagua

SEQ ID NO: 432525 - RNA, 19 nt, Homo sapiens
  misc_RNA (1)...(19): siRNA sense strand
gggcccaucuuuaucuuug

SEQ ID NO: 432526 - RNA, 19 nt, Homo sapiens
  misc_RNA (1)...(19): siRNA sense strand
cuuaaccgcugacacaauu

SEQ ID NO: 432527 - RNA, 19 nt, Homo sapiens
  misc_RNA (1)...(19): siRNA sense strand
ggacaaauccagcuugcau

SEQ ID NO: 432528 - RNA, 19 nt, Homo sapiens
  misc_RNA (1)...(19): siRNA sense strand
gaaggaacccgacuguagu

SEQ ID NO: 432529 - RNA, 19 nt, Homo sapiens
  misc_RNA (1)...(19): siRNA sense strand
acaaggaugugaagaguag

SEQ ID NO: 432530 - RNA, 19 nt, Homo sapiens
  misc_RNA (1)...(19): siRNA sense strand
acacaaagaggacuucuau

SEQ ID NO: 432531 - RNA, 19 nt, Homo sapiens
  misc_RNA (1)...(19): siRNA sense strand
ucggauaucuccugugaug

SEQ ID NO: 432532 - RNA, 19 nt, Homo sapiens
  misc_RNA (1)...(19): siRNA sense strand
uguauaggguucagaaaug

SEQ ID NO: 432533 - RNA, 19 nt, Homo sapiens
  misc_RNA (1)...(19): siRNA sense strand
aaggaggcuucuugaguua

SEQ ID NO: 432534 - RNA, 19 nt, Homo sapiens
  misc_RNA (1)...(19): siRNA sense strand
gaagaaccauccaaaauac

SEQ ID NO: 432535 - RNA, 19 nt, Homo sapiens
  misc_RNA (1)...(19): siRNA sense strand
ggccacauuugaagucauu

SEQ ID NO: 432536 - RNA, 19 nt, Homo sapiens
  misc_RNA (1)...(19): siRNA sense strand
gcauuuauacguucucuuc

SEQ ID NO: 432537 - RNA, 19 nt, Homo sapiens
  misc_RNA (1)...(19): siRNA sense strand
caaaagaauuacaggauga

SEQ ID NO: 432538 - RNA, 19 nt, Homo sapiens
  misc_RNA (1)...(19): siRNA sense strand
ggacaggaauagcaaagcu

SEQ ID NO: 432539 - RNA, 19 nt, Homo sapiens
  misc_RNA (1)...(19): siRNA sense strand
gcaccuguguugugauagu

SEQ ID NO: 432540 - RNA, 19 nt, Homo sapiens
  misc_RNA (1)...(19): siRNA sense strand
guaguaaacaugacaagau

SEQ ID NO: 432541 - RNA, 19 nt, Homo sapiens
  misc_RNA (1)...(19): siRNA sense strand
caaacgaagggacaaacua

SEQ ID NO: 432542 - RNA, 19 nt, Homo sapiens
  misc_RNA (1)...(19): siRNA sense strand
gaaaucaaucacaugaaug

SEQ ID NO: 432543 - RNA, 19 nt, Homo sapiens
  misc_RNA (1)...(19): siRNA sense strand
ucagaaaucaaucacauga

SEQ ID NO: 432544 - RNA, 19 nt, Homo sapiens
  misc_RNA (1)...(19): siRNA sense strand
ugaagaacuuaaugugguu

SEQ ID NO: 432545 - RNA, 19 nt, Homo sapiens
  misc_RNA (1)...(19): siRNA sense strand
gaagaagugaauguaauug

SEQ ID NO: 432546 - RNA, 19 nt, Homo sapiens
  misc_RNA (1)...(19): siRNA sense strand
aacagaagcugacuaugau

SEQ ID NO: 432547 - RNA, 19 nt, Homo sapiens
  misc_RNA (1)...(19): siRNA sense strand
gccaccagcuggaaaggaa

SEQ ID NO: 432548 - RNA, 19 nt, Homo sapiens
  misc_RNA (1)...(19): siRNA sense strand
uaguaaacaugacaagaug

SEQ ID NO: 432549 - RNA, 19 nt, Homo sapiens
  misc_RNA (1)...(19): siRNA sense strand
ggcuggagauuuguuaauu

SEQ ID NO: 432550 - RNA, 19 nt, Homo sapiens
  misc_RNA (1)...(19): siRNA sense strand
agaaaaggcugguuugcua

SEQ ID NO: 432551 - RNA, 19 nt, Homo sapiens
  misc_RNA (1)...(19): siRNA sense strand
caagaagcuuuaaauugag

SEQ ID NO: 432552 - RNA, 19 nt, Homo sapiens
  misc_RNA (1)...(19): siRNA sense strand
gacgauaaacuucgaaauc

SEQ ID NO: 432553 - RNA, 19 nt, Homo sapiens
  misc_RNA (1)...(19): siRNA sense strand
uggaugaccaguaucuuua

SEQ ID NO: 432554 - RNA, 19 nt, Homo sapiens
  misc_RNA (1)...(19): siRNA sense strand
cggaguggaugaccaguau

SEQ ID NO: 432555 - RNA, 19 nt, Homo sapiens
  misc_RNA (1)...(19): siRNA sense strand
ggauaucuccugugaugga

SEQ ID NO: 432556 - RNA, 19 nt, Homo sapiens
  misc_RNA (1)...(19): siRNA sense strand
caugaaugcccauaauuug

SEQ ID NO: 432557 - RNA, 19 nt, Homo sapiens
  misc_RNA (1)...(19): siRNA sense strand
gaaaacaucagcuugaaga

SEQ ID NO: 432558 - RNA, 19 nt, Homo sapiens
  misc_RNA (1)...(19): siRNA sense strand
gaggguguauuaagucaag

SEQ ID NO: 432559 - RNA, 19 nt, Homo sapiens
  misc_RNA (1)...(19): siRNA sense strand
uggcaccuguguugugaua

SEQ ID NO: 432560 - RNA, 19 nt, Homo sapiens
  misc_RNA (1)...(19): siRNA sense strand
ggacauagaaaauagcuuu

SEQ ID NO: 432561 - RNA, 19 nt, Homo sapiens
  misc_RNA (1)...(19): siRNA sense strand
gcacaaugguucaaaaugg

SEQ ID NO: 432562 - RNA, 19 nt, Homo sapiens
  misc_RNA (1)...(19): siRNA sense strand
gggcaaagucugcaaaugg

SEQ ID NO: 432563 - RNA, 19 nt, Homo sapiens
  misc_RNA (1)...(19): siRNA sense strand
cagaagcugacuaugauuu

SEQ ID NO: 432564 - RNA, 19 nt, Homo sapiens
  misc_RNA (1)...(19): siRNA sense strand
caaggacgauaaacuucga

SEQ ID NO: 432565 - RNA, 19 nt, Homo sapiens
  misc_RNA (1)...(19): siRNA sense strand
ggaagcagaagaauuaacu

SEQ ID NO: 432566 - RNA, 19 nt, Homo sapiens
  misc_RNA (1)...(19): siRNA sense strand
gaucaagucaaacaaaugg

SEQ ID NO: 432567 - RNA, 19 nt, Homo sapiens
  misc_RNA (1)...(19): siRNA sense strand
uaauuuggccuuggucuuu

SEQ ID NO: 432568 - RNA, 19 nt, Homo sapiens
  misc_RNA (1)...(19): siRNA sense strand
ucagaaaugcucagaaauc

SEQ ID NO: 432569 - RNA, 19 nt, Homo sapiens
  misc_RNA (1)...(19): siRNA sense strand
augaugcacugcuuacuaa

SEQ ID NO: 432570 - RNA, 19 nt, Homo sapiens
  misc_RNA (1)...(19): siRNA sense strand
gaugcaagaagcuuuaaau

SEQ ID NO: 432571 - RNA, 19 nt, Homo sapiens
  misc_RNA (1)...(19): siRNA sense strand
gacaagauguuuucucuca

SEQ ID NO: 432572 - RNA, 19 nt, Homo sapiens
  misc_RNA (1)...(19): siRNA sense strand
cauaaaggccuaaagacau

SEQ ID NO: 432573 - RNA, 19 nt, Homo sapiens
  misc_RNA (1)...(19): siRNA sense strand
gcaagaagcuuuaaauuga

SEQ ID NO: 432574 - RNA, 19 nt, Homo sapiens
  misc_RNA (1)...(19): siRNA sense strand
gaacccgacuguaguauua

SEQ ID NO: 432575 - RNA, 19 nt, Homo sapiens
  misc_RNA (1)...(19): siRNA sense strand
gaacagcuguauagcauuu

SEQ ID NO: 432576 - RNA, 19 nt, Homo sapiens
  misc_RNA (1)...(19): siRNA sense strand
gauggaagcagaagaauua

SEQ ID NO: 432577 - RNA, 19 nt, Homo sapiens
  misc_RNA (1)...(19): siRNA sense strand
ggacucugaucauaaguua

SEQ ID NO: 432578 - RNA, 19 nt, Homo sapiens
  misc_RNA (1)...(19): siRNA sense strand
caaagaggacuucuauuua

SEQ ID NO: 432579 - RNA, 19 nt, Homo sapiens
  misc_RNA (1)...(19): siRNA sense strand
cuaaggagcucuacccaua

SEQ ID NO: 432580 - RNA, 19 nt, Homo sapiens
  misc_RNA (1)...(19): siRNA sense strand
gaucauaaguuaccaucaa

SEQ ID NO: 432581 - RNA, 19 nt, Homo sapiens
  misc_RNA (1)...(19): siRNA sense strand
caagaaagcugggcaaagu

SEQ ID NO: 432582 - RNA, 19 nt, Homo sapiens
  misc_RNA (1)...(19): siRNA sense strand
gaaggaaucuugaaaauca

SEQ ID NO: 432583 - RNA, 19 nt, Homo sapiens
  misc_RNA (1)...(19): siRNA sense strand
uaacagaagcugacuauga

SEQ ID NO: 432584 - RNA, 19 nt, Homo sapiens
  misc_RNA (1)...(19): siRNA sense strand
ggagauagaaugcacuuaa

SEQ ID NO: 432585 - RNA, 19 nt, Homo sapiens
  misc_RNA (1)...(19): siRNA sense strand
guucagaaaugcucagaaa

SEQ ID NO: 432586 - RNA, 19 nt, Homo sapiens
  misc_RNA (1)...(19): siRNA sense strand
gcacaaggacgauaaacuu

SEQ ID NO: 432587 - RNA, 19 nt, Homo sapiens
  misc_RNA (1)...(19): siRNA sense strand
acaaagaggacuucuauuu

SEQ ID NO: 432588 - RNA, 19 nt, Homo sapiens
  misc_RNA (1)...(19): siRNA sense strand
cuaaagacauugaggaaga

SEQ ID NO: 432589 - RNA, 19 nt, Homo sapiens
  misc_RNA (1)...(19): siRNA sense strand
ggugauccuuugcauauaa

SEQ ID NO: 432590 - RNA, 19 nt, Homo sapiens
  misc_RNA (1)...(19): siRNA sense strand
gaauuucucuaccauaaca

SEQ ID NO: 432591 - RNA, 19 nt, Homo sapiens
  misc_RNA (1)...(19): siRNA sense strand
gguuuaggaugcaaauaua

SEQ ID NO: 432592 - RNA, 19 nt, Homo sapiens
  misc_RNA (1)...(19): siRNA sense strand
cauauuggaucucugcuuu

SEQ ID NO: 432593 - RNA, 19 nt, Homo sapiens
  misc_RNA (1)...(19): siRNA sense strand
gaagaucaagucaaacaaa

SEQ ID NO: 432594 - RNA, 19 nt, Homo sapiens
  misc_RNA (1)...(19): siRNA sense strand
gaaaugcucagaaaucaau

SEQ ID NO: 432595 - RNA, 19 nt, Homo sapiens
  misc_RNA (1)...(19): siRNA sense strand
ucaaacaaauggacauaga

SEQ ID NO: 432596 - RNA, 19 nt, Homo sapiens
  misc_RNA (1)...(19): siRNA sense strand
ggucaacucuucuacaaag

SEQ ID NO: 432597 - RNA, 19 nt, Homo sapiens
  misc_RNA (1)...(19): siRNA sense strand
guacagaugguaaugcuuu

SEQ ID NO: 432598 - RNA, 19 nt, Homo sapiens
  misc_RNA (1)...(19): siRNA sense strand
ggaaggaacccgacuguag

SEQ ID NO: 432599 - RNA, 19 nt, Homo sapiens
  misc_RNA (1)...(19): siRNA sense strand
gggacaaacuagugaagaa

SEQ ID NO: 432600 - RNA, 19 nt, Homo sapiens
  misc_RNA (1)...(19): siRNA sense strand
gaugacaaggaaagaauua

SEQ ID NO: 432601 - RNA, 19 nt, Homo sapiens
  misc_RNA (1)...(19): siRNA sense strand
caaagaagaaccauccaaa

SEQ ID NO: 432602 - RNA, 19 nt, Homo sapiens
  misc_RNA (1)...(19): siRNA sense strand
uggaauuucucuaccauaa

SEQ ID NO: 432603 - RNA, 19 nt, Homo sapiens
  misc_RNA (1)...(19): siRNA sense strand
gaagcugacuaugauuuga

SEQ ID NO: 432604 - RNA, 19 nt, Homo sapiens
  misc_RNA (1)...(19): siRNA sense strand
ugaaacaucucaagcucaa

SEQ ID NO: 432605 - RNA, 19 nt, Homo sapiens
  misc_RNA (1)...(19): siRNA sense strand
gcucagaaaucaaucacau

SEQ ID NO: 432606 - RNA, 19 nt, Homo sapiens
  misc_RNA (1)...(19): siRNA sense strand
cagaaaugcucagaaauca

SEQ ID NO: 432607 - RNA, 19 nt, Homo sapiens
  misc_RNA (1)...(19): siRNA sense strand
gauagaaugcacuuaagaa

SEQ ID NO: 432608 - RNA, 19 nt, Homo sapiens
  misc_RNA (1)...(19): siRNA sense strand
ugaaguauauguagaaagg

SEQ ID NO: 432609 - RNA, 19 nt, Homo sapiens
  misc_RNA (1)...(19): siRNA sense strand
ggagauuuguuaauugaag

SEQ ID NO: 432610 - RNA, 19 nt, Homo sapiens
  misc_RNA (1)...(19): siRNA sense strand
gaauguaauugaggaccua

SEQ ID NO: 432611 - RNA, 19 nt, Homo sapiens
  misc_RNA (1)...(19): siRNA sense strand
gugaagaagugaauguaau

SEQ ID NO: 432612 - RNA, 19 nt, Homo sapiens
  misc_RNA (1)...(19): siRNA sense strand
ucacaugaaugcccauaau

SEQ ID NO: 432613 - RNA, 19 nt, Homo sapiens
  misc_RNA (1)...(19): siRNA sense strand
gcaagaaguucagggagau

SEQ ID NO: 432614 - RNA, 19 nt, Homo sapiens
  misc_RNA (1)...(19): siRNA sense strand
gagauagaaugcacuuaag

SEQ ID NO: 432615 - RNA, 19 nt, Homo sapiens
  misc_RNA (1)...(19): siRNA sense strand
auaaaggccuaaagacauu

SEQ ID NO: 432616 - RNA, 19 nt, Homo sapiens
  misc_RNA (1)...(19): siRNA sense strand
ggcaaagucugcaaaugga

SEQ ID NO: 432617 - RNA, 19 nt, Homo sapiens
  misc_RNA (1)...(19): siRNA sense strand
gugaacagcuguauagcau

SEQ ID NO: 432618 - RNA, 19 nt, Homo sapiens
  misc_RNA (1)...(19): siRNA sense strand
cuucuaaacucucuucaga

SEQ ID NO: 432619 - RNA, 19 nt, Homo sapiens
  misc_RNA (1)...(19): siRNA sense strand
caagaacccuuccaaaaga

SEQ ID NO: 432620 - RNA, 19 nt, Homo sapiens
  misc_RNA (1)...(19): siRNA sense strand
gaugaccaguaucuuuauu

SEQ ID NO: 432621 - RNA, 19 nt, Homo sapiens
  misc_RNA (1)...(19): siRNA sense strand
gcuggagauuuguuaauug

SEQ ID NO: 432622 - RNA, 19 nt, Homo sapiens
  misc_RNA (1)...(19): siRNA sense strand
gaugaugcacugcuuacua

SEQ ID NO: 432623 - RNA, 19 nt, Homo sapiens
  misc_RNA (1)...(19): siRNA sense strand
uagcauuuguuacacagua

SEQ ID NO: 432624 - RNA, 19 nt, Homo sapiens
  misc_RNA (1)...(19): siRNA sense strand
gggcccaucuuuaucuuug

SEQ ID NO: 432625 - RNA, 19 nt, Homo sapiens
  misc_RNA (1)...(19): siRNA sense strand
cuuaaccgcugacacaauu

SEQ ID NO: 432626 - RNA, 19 nt, Homo sapiens
  misc_RNA (1)...(19): siRNA sense strand
ggacaaauccagcuugcau

SEQ ID NO: 432627 - RNA, 19 nt, Homo sapiens
  misc_RNA (1)...(19): siRNA sense strand
gaaggaacccgacuguagu

SEQ ID NO: 432628 - RNA, 19 nt, Homo sapiens
  misc_RNA (1)...(19): siRNA sense strand
acaaggaugugaagaguag

SEQ ID NO: 432629 - RNA, 19 nt, Homo sapiens
  misc_RNA (1)...(19): siRNA sense strand
acacaaagaggacuucuau

SEQ ID NO: 432630 - RNA, 19 nt, Homo sapiens
  misc_RNA (1)...(19): siRNA sense strand
ucggauaucuccugugaug

SEQ ID NO: 432631 - RNA, 19 nt, Homo sapiens
  misc_RNA (1)...(19): siRNA sense strand
uguauaggguucagaaaug

SEQ ID NO: 432632 - RNA, 19 nt, Homo sapiens
  misc_RNA (1)...(19): siRNA sense strand
aaggaggcuucuugaguua

SEQ ID NO: 432633 - RNA, 19 nt, Homo sapiens
  misc_RNA (1)...(19): siRNA sense strand
gaagaaccauccaaaauac

SEQ ID NO: 432634 - RNA, 19 nt, Homo sapiens
  misc_RNA (1)...(19): siRNA sense strand
ggccacauuugaagucauu

SEQ ID NO: 432635 - RNA, 19 nt, Homo sapiens
  misc_RNA (1)...(19): siRNA sense strand
gcauuuauacguucucuuc

SEQ ID NO: 432636 - RNA, 19 nt, Homo sapiens
  misc_RNA (1)...(19): siRNA sense strand
caaaagaauuacaggauga

SEQ ID NO: 432637 - RNA, 19 nt, Homo sapiens
  misc_RNA (1)...(19): siRNA sense strand
ggacaggaauagcaaagcu

SEQ ID NO: 432638 - RNA, 19 nt, Homo sapiens
  misc_RNA (1)...(19): siRNA sense strand
gcaccuguguugugauagu

SEQ ID NO: 432639 - RNA, 19 nt, Homo sapiens
  misc_RNA (1)...(19): siRNA sense strand
guaguaaacaugacaagau

SEQ ID NO: 432640 - RNA, 19 nt, Homo sapiens
  misc_RNA (1)...(19): siRNA sense strand
caaacgaagggacaaacua

SEQ ID NO: 432641 - RNA, 19 nt, Homo sapiens
  misc_RNA (1)...(19): siRNA sense strand
gaaaucaaucacaugaaug

SEQ ID NO: 432642 - RNA, 19 nt, Homo sapiens
  misc_RNA (1)...(19): siRNA sense strand
ucagaaaucaaucacauga

SEQ ID NO: 432643 - RNA, 19 nt, Homo sapiens
  misc_RNA (1)...(19): siRNA sense strand
ugaagaacuuaaugugguu

SEQ ID NO: 432644 - RNA, 19 nt, Homo sapiens
  misc_RNA (1)...(19): siRNA sense strand
gaagaagugaauguaauug

SEQ ID NO: 432645 - RNA, 19 nt, Homo sapiens
  misc_RNA (1)...(19): siRNA sense strand
aacagaagcugacuaugau

SEQ ID NO: 432646 - RNA, 19 nt, Homo sapiens
  misc_RNA (1)...(19): siRNA sense strand
gccaccagcuggaaaggaa

SEQ ID NO: 432647 - RNA, 19 nt, Homo sapiens
  misc_RNA (1)...(19): siRNA sense strand
uaguaaacaugacaagaug

SEQ ID NO: 432648 - RNA, 19 nt, Homo sapiens
  misc_RNA (1)...(19): siRNA sense strand
ggcuggagauuuguuaauu

SEQ ID NO: 432649 - RNA, 19 nt, Homo sapiens
  misc_RNA (1)...(19): siRNA sense strand
agaaaaggcugguuugcua

SEQ ID NO: 432650 - RNA, 19 nt, Homo sapiens
  misc_RNA (1)...(19): siRNA sense strand
caagaagcuuuaaauugag

SEQ ID NO: 432651 - RNA, 19 nt, Homo sapiens
  misc_RNA (1)...(19): siRNA sense strand
gacgauaaacuucgaaauc

SEQ ID NO: 432652 - RNA, 19 nt, Homo sapiens
  misc_RNA (1)...(19): siRNA sense strand
uggaugaccaguaucuuua

SEQ ID NO: 432653 - RNA, 19 nt, Homo sapiens
  misc_RNA (1)...(19): siRNA sense strand
cggaguggaugaccaguau

SEQ ID NO: 432654 - RNA, 19 nt, Homo sapiens
  misc_RNA (1)...(19): siRNA sense strand
ggauaucuccugugaugga

SEQ ID NO: 432655 - RNA, 19 nt, Homo sapiens
  misc_RNA (1)...(19): siRNA sense strand
caugaaugcccauaauuug

SEQ ID NO: 432656 - RNA, 19 nt, Homo sapiens
  misc_RNA (1)...(19): siRNA sense strand
gaaaacaucagcuugaaga

SEQ ID NO: 432657 - RNA, 19 nt, Homo sapiens
  misc_RNA (1)...(19): siRNA sense strand
gcacaaugguucaaaaugg

SEQ ID NO: 432658 - RNA, 19 nt, Homo sapiens
  misc_RNA (1)...(19): siRNA sense strand
gaggguguauuaagucaag

SEQ ID NO: 432659 - RNA, 19 nt, Homo sapiens
  misc_RNA (1)...(19): siRNA sense strand
uggcaccuguguugugaua

SEQ ID NO: 432660 - RNA, 19 nt, Homo sapiens
  misc_RNA (1)...(19): siRNA sense strand
ggacauagaaaauagcuuu

SEQ ID NO: 432661 - RNA, 19 nt, Homo sapiens
  misc_RNA (1)...(19): siRNA sense strand
gggcaaagucugcaaaugg

SEQ ID NO: 432662 - RNA, 19 nt, Homo sapiens
  misc_RNA (1)...(19): siRNA sense strand
cagaagcugacuaugauuu

SEQ ID NO: 432663 - RNA, 19 nt, Homo sapiens
  misc_RNA (1)...(19): siRNA sense strand
caaggacgauaaacuucga

SEQ ID NO: 432664 - RNA, 19 nt, Homo sapiens
  misc_RNA (1)...(19): siRNA sense strand
ggaagcagaagaauuaacu

SEQ ID NO: 432665 - RNA, 19 nt, Homo sapiens
  misc_RNA (1)...(19): siRNA sense strand
gaucaagucaaacaaaugg

SEQ ID NO: 432666 - RNA, 19 nt, Homo sapiens
  misc_RNA (1)...(19): siRNA sense strand
uaauuuggccuuggucuuu

SEQ ID NO: 432667 - RNA, 19 nt, Homo sapiens
  misc_RNA (1)...(19): siRNA sense strand
ucagaaaugcucagaaauc

SEQ ID NO: 432668 - RNA, 19 nt, Homo sapiens
  misc_RNA (1)...(19): siRNA sense strand
augaugcacugcuuacuaa

SEQ ID NO: 432669 - RNA, 19 nt, Homo sapiens
  misc_RNA (1)...(19): siRNA sense strand
gaugcaagaagcuuuaaau

SEQ ID NO: 432670 - RNA, 19 nt, Homo sapiens
  misc_RNA (1)...(19): siRNA sense strand
cuggagauuuguuaauuga

SEQ ID NO: 432671 - RNA, 19 nt, Homo sapiens
  misc_RNA (1)...(19): siRNA sense strand
cauaaaggccuaaagacau

SEQ ID NO: 432672 - RNA, 19 nt, Homo sapiens
  misc_RNA (1)...(19): siRNA sense strand
gacaagauguuuucucuca

SEQ ID NO: 432673 - RNA, 19 nt, Homo sapiens
  misc_RNA (1)...(19): siRNA sense strand
gagaaggaguggccuauua

SEQ ID NO: 432674 - RNA, 19 nt, Homo sapiens
  misc_RNA (1)...(19): siRNA sense strand
gcagggaucuuacaucuau

SEQ ID NO: 432675 - RNA, 19 nt, Homo sapiens
  misc_RNA (1)...(19): siRNA sense strand
gaucuuacaucuaucagaa

SEQ ID NO: 432676 - RNA, 19 nt, Homo sapiens
  misc_RNA (1)...(19): siRNA sense strand
ggagaucacugccauugug

SEQ ID NO: 432677 - RNA, 19 nt, Homo sapiens
  misc_RNA (1)...(19): siRNA sense strand
acaagaaucuagaggagua

SEQ ID NO: 432678 - RNA, 19 nt, Homo sapiens
  misc_RNA (1)...(19): siRNA sense strand
gagaacggcuguaccuguu

SEQ ID NO: 432679 - RNA, 19 nt, Homo sapiens
  misc_RNA (1)...(19): siRNA sense strand
gaaaagcacuacucaguug

SEQ ID NO: 432680 - RNA, 19 nt, Homo sapiens
  misc_RNA (1)...(19): siRNA sense strand
cuucguggcuucaagaaua

SEQ ID NO: 432681 - RNA, 19 nt, Homo sapiens
  misc_RNA (1)...(19): siRNA sense strand
gaccagaaguuugaaguga

SEQ ID NO: 432682 - RNA, 19 nt, Homo sapiens
  misc_RNA (1)...(19): siRNA sense strand
gaacggcuguaccuguuug

SEQ ID NO: 432683 - RNA, 19 nt, Homo sapiens
  misc_RNA (1)...(19): siRNA sense strand
uuaagagucucaaagucua

SEQ ID NO: 432684 - RNA, 19 nt, Homo sapiens
  misc_RNA (1)...(19): siRNA sense strand
acucagagcuagagaagga

SEQ ID NO: 432685 - RNA, 19 nt, Homo sapiens
  misc_RNA (1)...(19): siRNA sense strand
ggaguggccuauuaagagu

SEQ ID NO: 432686 - RNA, 19 nt, Homo sapiens
  misc_RNA (1)...(19): siRNA sense strand
guccugagcuacuuugaga

SEQ ID NO: 432687 - RNA, 19 nt, Homo sapiens
  misc_RNA (1)...(19): siRNA sense strand
caguguaucuggaagagaa

SEQ ID NO: 432688 - RNA, 19 nt, Homo sapiens
  misc_RNA (1)...(19): siRNA sense strand
ugagcuacuuugagaauga

SEQ ID NO: 432689 - RNA, 19 nt, Homo sapiens
  misc_RNA (1)...(19): siRNA sense strand
caaccuggcaauuguguuu

SEQ ID NO: 432690 - RNA, 19 nt, Homo sapiens
  misc_RNA (1)...(19): siRNA sense strand
gggugagacuggauacuga

SEQ ID NO: 432691 - RNA, 19 nt, Homo sapiens
  misc_RNA (1)...(19): siRNA sense strand
gcacguggaugauguuucc

SEQ ID NO: 432692 - RNA, 19 nt, Homo sapiens
  misc_RNA (1)...(19): siRNA sense strand
acaaggacgcuuacucuaa

SEQ ID NO: 432693 - RNA, 19 nt, Homo sapiens
  misc_RNA (1)...(19): siRNA sense strand
ggacagaaacacuuaucga

SEQ ID NO: 432694 - RNA, 19 nt, Homo sapiens
  misc_RNA (1)...(19): siRNA sense strand
guucagugcuucucagaca

SEQ ID NO: 432695 - RNA, 19 nt, Homo sapiens
  misc_RNA (1)...(19): siRNA sense strand
ggaacaaccggaccacaga

SEQ ID NO: 432696 - RNA, 19 nt, Homo sapiens
  misc_RNA (1)...(19): siRNA sense strand
gggcugggaucaacugcuu

SEQ ID NO: 432697 - RNA, 19 nt, Homo sapiens
  misc_RNA (1)...(19): siRNA sense strand
uggaagaccucauuaacca

SEQ ID NO: 432698 - RNA, 19 nt, Homo sapiens
  misc_RNA (1)...(19): siRNA sense strand
gggacaaagugcagcucua

SEQ ID NO: 432699 - RNA, 19 nt, Homo sapiens
  misc_RNA (1)...(19): siRNA sense strand
uaacaaggacgcuuacucu

SEQ ID NO: 432700 - RNA, 19 nt, Homo sapiens
  misc_RNA (1)...(19): siRNA sense strand
gcuggaggccucagagauu

SEQ ID NO: 432701 - RNA, 19 nt, Homo sapiens
  misc_RNA (1)...(19): siRNA sense strand
aagugcagcucuacaagaa

SEQ ID NO: 432702 - RNA, 19 nt, Homo sapiens
  misc_RNA (1)...(19): siRNA sense strand
ucagggagaaggacuauug

SEQ ID NO: 432703 - RNA, 19 nt, Homo sapiens
  misc_RNA (1)...(19): siRNA sense strand
ggaagcagcgggaggagau

SEQ ID NO: 432704 - RNA, 19 nt, Homo sapiens
  misc_RNA (1)...(19): siRNA sense strand
gugcagcucuacaagaauc

SEQ ID NO: 432705 - RNA, 19 nt, Homo sapiens
  misc_RNA (1)...(19): siRNA sense strand
gaggagaucacugccauug

SEQ ID NO: 432706 - RNA, 19 nt, Homo sapiens
  misc_RNA (1)...(19): siRNA sense strand
gcgagcagcacguggauga

SEQ ID NO: 432707 - RNA, 19 nt, Homo sapiens
  misc_RNA (1)...(19): siRNA sense strand
gaagagccgcugcaacuac

SEQ ID NO: 432708 - RNA, 19 nt, Homo sapiens
  misc_RNA (1)...(19): siRNA sense strand
gcgaagagccgcugcaacu

SEQ ID NO: 432709 - RNA, 19 nt, Homo sapiens
  misc_RNA (1)...(19): siRNA sense strand
ggagcuccgugcugucuuc

SEQ ID NO: 432710 - RNA, 19 nt, Homo sapiens
  misc_RNA (1)...(19): siRNA sense strand
gcuuugagcacaccuuuga

SEQ ID NO: 432711 - RNA, 19 nt, Homo sapiens
  misc_RNA (1)...(19): siRNA sense strand
ccagaaguuugaagugauc

SEQ ID NO: 432712 - RNA, 19 nt, Homo sapiens
  misc_RNA (1)...(19): siRNA sense strand
gcagagacugagcagcaua

SEQ ID NO: 432713 - RNA, 19 nt, Homo sapiens
  misc_RNA (1)...(19): siRNA sense strand
gagcgaaggaggacacugu

SEQ ID NO: 432714 - RNA, 19 nt, Homo sapiens
  misc_RNA (1)...(19): siRNA sense strand
agaaggaguggccuauuaa

SEQ ID NO: 432715 - RNA, 19 nt, Homo sapiens
  misc_RNA (1)...(19): siRNA sense strand
gacuucaucugcacagugu

SEQ ID NO: 432716 - RNA, 19 nt, Homo sapiens
  misc_RNA (1)...(19): siRNA sense strand
agacugagcagcauaucaa

SEQ ID NO: 432717 - RNA, 19 nt, Homo sapiens
  misc_RNA (1)...(19): siRNA sense strand
agaagaaggcagagacuga

SEQ ID NO: 432718 - RNA, 19 nt, Homo sapiens
  misc_RNA (1)...(19): siRNA sense strand
ccgcagggaucuuacaucu

SEQ ID NO: 432719 - RNA, 19 nt, Homo sapiens
  misc_RNA (1)...(19): siRNA sense strand
gggagugguucgcuaccuu

SEQ ID NO: 432720 - RNA, 19 nt, Homo sapiens
  misc_RNA (1)...(19): siRNA sense strand
gcacaguguaucuggaaga

SEQ ID NO: 432721 - RNA, 19 nt, Homo sapiens
  misc_RNA (1)...(19): siRNA sense strand
gaaggaggacacuguacau

SEQ ID NO: 432722 - RNA, 19 nt, Homo sapiens
  misc_RNA (1)...(19): siRNA sense strand
aggaagguguggacagaaa

SEQ ID NO: 432723 - RNA, 19 nt, Homo sapiens
  misc_RNA (1)...(19): siRNA sense strand
gaucaccugcgauacuuug

SEQ ID NO: 432724 - RNA, 19 nt, Homo sapiens
  misc_RNA (1)...(19): siRNA sense strand
auacugaucaccugcgaua

SEQ ID NO: 432725 - RNA, 19 nt, Homo sapiens
  misc_RNA (1)...(19): siRNA sense strand
ggagugguucgcuaccuuu

SEQ ID NO: 432726 - RNA, 19 nt, Homo sapiens
  misc_RNA (1)...(19): siRNA sense strand
agacagagaaacaugagaa

SEQ ID NO: 432727 - RNA, 19 nt, Homo sapiens
  misc_RNA (1)...(19): siRNA sense strand
gcaugccggugacuucauc

SEQ ID NO: 432728 - RNA, 19 nt, Homo sapiens
  misc_RNA (1)...(19): siRNA sense strand
gggaugaggaagaggauga

SEQ ID NO: 432729 - RNA, 19 nt, Homo sapiens
  misc_RNA (1)...(19): siRNA sense strand
acaguaacaaggacgcuua

SEQ ID NO: 432730 - RNA, 19 nt, Homo sapiens
  misc_RNA (1)...(19): siRNA sense strand
gaagagaagaaggcagaga

SEQ ID NO: 432731 - RNA, 19 nt, Homo sapiens
  misc_RNA (1)...(19): siRNA sense strand
aggaagagcucaggaagca

SEQ ID NO: 432732 - RNA, 19 nt, Homo sapiens
  misc_RNA (1)...(19): siRNA sense strand
gugcacaaccuggcaauug

SEQ ID NO: 432733 - RNA, 19 nt, Homo sapiens
  misc_RNA (1)...(19): siRNA sense strand
gagggcaucuaccgcaagu

SEQ ID NO: 432734 - RNA, 19 nt, Homo sapiens
  misc_RNA (1)...(19): siRNA sense strand
gagaaugagcgggcaguga

SEQ ID NO: 432735 - RNA, 19 nt, Homo sapiens
  misc_RNA (1)...(19): siRNA sense strand
cacaguggcuuccucuaca

SEQ ID NO: 432736 - RNA, 19 nt, Homo sapiens
  misc_RNA (1)...(19): siRNA sense strand
acaggaagguguggacaga

SEQ ID NO: 432737 - RNA, 19 nt, Homo sapiens
  misc_RNA (1)...(19): siRNA sense strand
uuaucgagcucuucuuaca

SEQ ID NO: 432738 - RNA, 19 nt, Homo sapiens
  misc_RNA (1)...(19): siRNA sense strand
ggucaaguguauugcuaag

SEQ ID NO: 432739 - RNA, 19 nt, Homo sapiens
  misc_RNA (1)...(19): siRNA sense strand
ucagccaccuguacugugu

SEQ ID NO: 432740 - RNA, 19 nt, Homo sapiens
  misc_RNA (1)...(19): siRNA sense strand
cacaaacaaccgaaccuuu

SEQ ID NO: 432741 - RNA, 19 nt, Homo sapiens
  misc_RNA (1)...(19): siRNA sense strand
cagaugggcaggacuacaa

SEQ ID NO: 432742 - RNA, 19 nt, Homo sapiens
  misc_RNA (1)...(19): siRNA sense strand
agacagaugggcaggacua

SEQ ID NO: 432743 - RNA, 19 nt, Homo sapiens
  misc_RNA (1)...(19): siRNA sense strand
uuacaucuaucagaaacga

SEQ ID NO: 432744 - RNA, 19 nt, Homo sapiens
  misc_RNA (1)...(19): siRNA sense strand
gcauuggcaucaccuucau

SEQ ID NO: 432745 - RNA, 19 nt, Homo sapiens
  misc_RNA (1)...(19): siRNA sense strand
ggacaaagugcagcucuac

SEQ ID NO: 432746 - RNA, 19 nt, Homo sapiens
  misc_RNA (1)...(19): siRNA sense strand
ggaccagaaguuugaagug

SEQ ID NO: 432747 - RNA, 19 nt, Homo sapiens
  misc_RNA (1)...(19): siRNA sense strand
cagagaaacaugagaagca

SEQ ID NO: 432748 - RNA, 19 nt, Homo sapiens
  misc_RNA (1)...(19): siRNA sense strand
gcucaugagugggucaagu

SEQ ID NO: 432749 - RNA, 19 nt, Homo sapiens
  misc_RNA (1)...(19): siRNA sense strand
cccaauggcggauggcaua

SEQ ID NO: 432750 - RNA, 19 nt, Homo sapiens
  misc_RNA (1)...(19): siRNA sense strand
acaaagugcagcucuacaa

SEQ ID NO: 432751 - RNA, 19 nt, Homo sapiens
  misc_RNA (1)...(19): siRNA sense strand
uugaagugaucacaaacaa

SEQ ID NO: 432752 - RNA, 19 nt, Homo sapiens
  misc_RNA (1)...(19): siRNA sense strand
ggaaaagcacuacucaguu

SEQ ID NO: 432753 - RNA, 19 nt, Homo sapiens
  misc_RNA (1)...(19): siRNA sense strand
gaaggaguggccuauuaag

SEQ ID NO: 432754 - RNA, 19 nt, Homo sapiens
  misc_RNA (1)...(19): siRNA sense strand
gagcagcacguggaugaug

SEQ ID NO: 432755 - RNA, 19 nt, Homo sapiens
  misc_RNA (1)...(19): siRNA sense strand
gggcaucuaccgcaagugu

SEQ ID NO: 432756 - RNA, 19 nt, Homo sapiens
  misc_RNA (1)...(19): siRNA sense strand
gagggcugguucucucuca

SEQ ID NO: 432757 - RNA, 19 nt, Homo sapiens
  misc_RNA (1)...(19): siRNA sense strand
gagcuucguggcuucaaga

SEQ ID NO: 432758 - RNA, 19 nt, Homo sapiens
  misc_RNA (1)...(19): siRNA sense strand
gaagguguggacagaaaca

SEQ ID NO: 432759 - RNA, 19 nt, Homo sapiens
  misc_RNA (1)...(19): siRNA sense strand
gcaagugugggcagacauc

SEQ ID NO: 432760 - RNA, 19 nt, Homo sapiens
  misc_RNA (1)...(19): siRNA sense strand
uauuaagagucucaaaguc

SEQ ID NO: 432761 - RNA, 19 nt, Homo sapiens
  misc_RNA (1)...(19): siRNA sense strand
cuggcuggcuggacaagaa

SEQ ID NO: 432762 - RNA, 19 nt, Homo sapiens
  misc_RNA (1)...(19): siRNA sense strand
gcuucacaguggugcauga

SEQ ID NO: 432763 - RNA, 19 nt, Homo sapiens
  misc_RNA (1)...(19): siRNA sense strand
cgaagagccgcugcaacua

SEQ ID NO: 432764 - RNA, 19 nt, Homo sapiens
  misc_RNA (1)...(19): siRNA sense strand
ugggucaaguguauugcua

SEQ ID NO: 432765 - RNA, 19 nt, Homo sapiens
  misc_RNA (1)...(19): siRNA sense strand
uagagaaggagcagugguu

SEQ ID NO: 432766 - RNA, 19 nt, Homo sapiens
  misc_RNA (1)...(19): siRNA sense strand
aggaugaccacgccuauga

SEQ ID NO: 432767 - RNA, 19 nt, Homo sapiens
  misc_RNA (1)...(19): siRNA sense strand
agugguaccucugcuguga

SEQ ID NO: 432768 - RNA, 19 nt, Homo sapiens
  misc_RNA (1)...(19): siRNA sense strand
uggaggccaugcugcugua

SEQ ID NO: 432769 - RNA, 19 nt, Homo sapiens
  misc_RNA (1)...(19): siRNA sense strand
ggacuauuggaccugcuuu

SEQ ID NO: 432770 - RNA, 19 nt, Homo sapiens
  misc_RNA (1)...(19): siRNA sense strand
cgaaggaggacacuguaca

SEQ ID NO: 432771 - RNA, 19 nt, Homo sapiens
  misc_RNA (1)...(19): siRNA sense strand
gagugggucaaguguauug

SEQ ID NO: 432772 - RNA, 19 nt, Homo sapiens
  misc_RNA (1)...(19): siRNA sense strand
augagugggucaaguguau

SEQ ID NO: 432773 - RNA, 19 nt, Homo sapiens
  misc_RNA (1)...(19): siRNA sense strand
gagaaggaguggccuauua

SEQ ID NO: 432774 - RNA, 19 nt, Homo sapiens
  misc_RNA (1)...(19): siRNA sense strand
gcagggaucuuacaucuau

SEQ ID NO: 432775 - RNA, 19 nt, Homo sapiens
  misc_RNA (1)...(19): siRNA sense strand
gaucuuacaucuaucagaa

SEQ ID NO: 432776 - RNA, 19 nt, Homo sapiens
  misc_RNA (1)...(19): siRNA sense strand
ggagaucacugccauugug

SEQ ID NO: 432777 - RNA, 19 nt, Homo sapiens
  misc_RNA (1)...(19): siRNA sense strand
acaagaaucuagaggagua

SEQ ID NO: 432778 - RNA, 19 nt, Homo sapiens
  misc_RNA (1)...(19): siRNA sense strand
gagaacggcuguaccuguu

SEQ ID NO: 432779 - RNA, 19 nt, Homo sapiens
  misc_RNA (1)...(19): siRNA sense strand
gaaaagcacuacucaguug

SEQ ID NO: 432780 - RNA, 19 nt, Homo sapiens
  misc_RNA (1)...(19): siRNA sense strand
cuucguggcuucaagaaua

SEQ ID NO: 432781 - RNA, 19 nt, Homo sapiens
  misc_RNA (1)...(19): siRNA sense strand
gaccagaaguuugaaguga

SEQ ID NO: 432782 - RNA, 19 nt, Homo sapiens
  misc_RNA (1)...(19): siRNA sense strand
gaacggcuguaccuguuug

SEQ ID NO: 432783 - RNA, 19 nt, Homo sapiens
  misc_RNA (1)...(19): siRNA sense strand
uuaagagucucaaagucua

SEQ ID NO: 432784 - RNA, 19 nt, Homo sapiens
  misc_RNA (1)...(19): siRNA sense strand
acucagagcuagagaagga

SEQ ID NO: 432785 - RNA, 19 nt, Homo sapiens
  misc_RNA (1)...(19): siRNA sense strand
ggaguggccuauuaagagu

SEQ ID NO: 432786 - RNA, 19 nt, Homo sapiens
  misc_RNA (1)...(19): siRNA sense strand
guccugagcuacuuugaga

SEQ ID NO: 432787 - RNA, 19 nt, Homo sapiens
  misc_RNA (1)...(19): siRNA sense strand
caguguaucuggaagagaa

SEQ ID NO: 432788 - RNA, 19 nt, Homo sapiens
  misc_RNA (1)...(19): siRNA sense strand
ugagcuacuuugagaauga

SEQ ID NO: 432789 - RNA, 19 nt, Homo sapiens
  misc_RNA (1)...(19): siRNA sense strand
caaccuggcaauuguguuu

SEQ ID NO: 432790 - RNA, 19 nt, Homo sapiens
  misc_RNA (1)...(19): siRNA sense strand
gggugagacuggauacuga

SEQ ID NO: 432791 - RNA, 19 nt, Homo sapiens
  misc_RNA (1)...(19): siRNA sense strand
gcacguggaugauguuucc

SEQ ID NO: 432792 - RNA, 19 nt, Homo sapiens
  misc_RNA (1)...(19): siRNA sense strand
acaaggacgcuuacucuaa

SEQ ID NO: 432793 - RNA, 19 nt, Homo sapiens
  misc_RNA (1)...(19): siRNA sense strand
ggacagaaacacuuaucga

SEQ ID NO: 432794 - RNA, 19 nt, Homo sapiens
  misc_RNA (1)...(19): siRNA sense strand
guucagugcuucucagaca

SEQ ID NO: 432795 - RNA, 19 nt, Homo sapiens
  misc_RNA (1)...(19): siRNA sense strand
ggaacaaccggaccacaga

SEQ ID NO: 432796 - RNA, 19 nt, Homo sapiens
  misc_RNA (1)...(19): siRNA sense strand
gggcugggaucaacugcuu

SEQ ID NO: 432797 - RNA, 19 nt, Homo sapiens
  misc_RNA (1)...(19): siRNA sense strand
uggaagaccucauuaacca

SEQ ID NO: 432798 - RNA, 19 nt, Homo sapiens
  misc_RNA (1)...(19): siRNA sense strand
gggacaaagugcagcucua

SEQ ID NO: 432799 - RNA, 19 nt, Homo sapiens
  misc_RNA (1)...(19): siRNA sense strand
uaacaaggacgcuuacucu

SEQ ID NO: 432800 - RNA, 19 nt, Homo sapiens
  misc_RNA (1)...(19): siRNA sense strand
gcuggaggccucagagauu

SEQ ID NO: 432801 - RNA, 19 nt, Homo sapiens
  misc_RNA (1)...(19): siRNA sense strand
aagugcagcucuacaagaa

SEQ ID NO: 432802 - RNA, 19 nt, Homo sapiens
  misc_RNA (1)...(19): siRNA sense strand
ucagggagaaggacuauug

SEQ ID NO: 432803 - RNA, 19 nt, Homo sapiens
  misc_RNA (1)...(19): siRNA sense strand
ggaagcagcgggaggagau

SEQ ID NO: 432804 - RNA, 19 nt, Homo sapiens
  misc_RNA (1)...(19): siRNA sense strand
gugcagcucuacaagaauc

SEQ ID NO: 432805 - RNA, 19 nt, Homo sapiens
  misc_RNA (1)...(19): siRNA sense strand
gaggagaucacugccauug

SEQ ID NO: 432806 - RNA, 19 nt, Homo sapiens
  misc_RNA (1)...(19): siRNA sense strand
gcgagcagcacguggauga

SEQ ID NO: 432807 - RNA, 19 nt, Homo sapiens
  misc_RNA (1)...(19): siRNA sense strand
gaagagccgcugcaacuac

SEQ ID NO: 432808 - RNA, 19 nt, Homo sapiens
  misc_RNA (1)...(19): siRNA sense strand
gcgaagagccgcugcaacu

SEQ ID NO: 432809 - RNA, 19 nt, Homo sapiens
  misc_RNA (1)...(19): siRNA sense strand
ggagcuccgugcugucuuc

SEQ ID NO: 432810 - RNA, 19 nt, Homo sapiens
  misc_RNA (1)...(19): siRNA sense strand
gcuuugagcacaccuuuga

SEQ ID NO: 432811 - RNA, 19 nt, Homo sapiens
  misc_RNA (1)...(19): siRNA sense strand
ccagaaguuugaagugauc

SEQ ID NO: 432812 - RNA, 19 nt, Homo sapiens
  misc_RNA (1)...(19): siRNA sense strand
gcagagacugagcagcaua

SEQ ID NO: 432813 - RNA, 19 nt, Homo sapiens
  misc_RNA (1)...(19): siRNA sense strand
gagcgaaggaggacacugu

SEQ ID NO: 432814 - RNA, 19 nt, Homo sapiens
  misc_RNA (1)...(19): siRNA sense strand
agaaggaguggccuauuaa

SEQ ID NO: 432815 - RNA, 19 nt, Homo sapiens
  misc_RNA (1)...(19): siRNA sense strand
gacuucaucugcacagugu

SEQ ID NO: 432816 - RNA, 19 nt, Homo sapiens
  misc_RNA (1)...(19): siRNA sense strand
agacugagcagcauaucaa

SEQ ID NO: 432817 - RNA, 19 nt, Homo sapiens
  misc_RNA (1)...(19): siRNA sense strand
agaagaaggcagagacuga

SEQ ID NO: 432818 - RNA, 19 nt, Homo sapiens
  misc_RNA (1)...(19): siRNA sense strand
ccgcagggaucuuacaucu

SEQ ID NO: 432819 - RNA, 19 nt, Homo sapiens
  misc_RNA (1)...(19): siRNA sense strand
gggagugguucgcuaccuu

SEQ ID NO: 432820 - RNA, 19 nt, Homo sapiens
  misc_RNA (1)...(19): siRNA sense strand
gcacaguguaucuggaaga

SEQ ID NO: 432821 - RNA, 19 nt, Homo sapiens
  misc_RNA (1)...(19): siRNA sense strand
gaaggaggacacuguacau

SEQ ID NO: 432822 - RNA, 19 nt, Homo sapiens
  misc_RNA (1)...(19): siRNA sense strand
aggaagguguggacagaaa

SEQ ID NO: 432823 - RNA, 19 nt, Homo sapiens
  misc_RNA (1)...(19): siRNA sense strand
gaucaccugcgauacuuug

SEQ ID NO: 432824 - RNA, 19 nt, Homo sapiens
  misc_RNA (1)...(19): siRNA sense strand
auacugaucaccugcgaua

SEQ ID NO: 432825 - RNA, 19 nt, Homo sapiens
  misc_RNA (1)...(19): siRNA sense strand
ggagugguucgcuaccuuu

SEQ ID NO: 432826 - RNA, 19 nt, Homo sapiens
  misc_RNA (1)...(19): siRNA sense strand
agacagagaaacaugagaa

SEQ ID NO: 432827 - RNA, 19 nt, Homo sapiens
  misc_RNA (1)...(19): siRNA sense strand
gcaugccggugacuucauc

SEQ ID NO: 432828 - RNA, 19 nt, Homo sapiens
  misc_RNA (1)...(19): siRNA sense strand
gggaugaggaagaggauga

SEQ ID NO: 432829 - RNA, 19 nt, Homo sapiens
  misc_RNA (1)...(19): siRNA sense strand
acaguaacaaggacgcuua

SEQ ID NO: 432830 - RNA, 19 nt, Homo sapiens
  misc_RNA (1)...(19): siRNA sense strand
gaagagaagaaggcagaga

SEQ ID NO: 432831 - RNA, 19 nt, Homo sapiens
  misc_RNA (1)...(19): siRNA sense strand
aggaagagcucaggaagca

SEQ ID NO: 432832 - RNA, 19 nt, Homo sapiens
  misc_RNA (1)...(19): siRNA sense strand
gugcacaaccuggcaauug

SEQ ID NO: 432833 - RNA, 19 nt, Homo sapiens
  misc_RNA (1)...(19): siRNA sense strand
gagggcaucuaccgcaagu

SEQ ID NO: 432834 - RNA, 19 nt, Homo sapiens
  misc_RNA (1)...(19): siRNA sense strand
gagaaugagcgggcaguga

SEQ ID NO: 432835 - RNA, 19 nt, Homo sapiens
  misc_RNA (1)...(19): siRNA sense strand
cacaguggcuuccucuaca

SEQ ID NO: 432836 - RNA, 19 nt, Homo sapiens
  misc_RNA (1)...(19): siRNA sense strand
acaggaagguguggacaga

SEQ ID NO: 432837 - RNA, 19 nt, Homo sapiens
  misc_RNA (1)...(19): siRNA sense strand
uuaucgagcucuucuuaca

SEQ ID NO: 432838 - RNA, 19 nt, Homo sapiens
  misc_RNA (1)...(19): siRNA sense strand
ggucaaguguauugcuaag

SEQ ID NO: 432839 - RNA, 19 nt, Homo sapiens
  misc_RNA (1)...(19): siRNA sense strand
ucagccaccuguacugugu

SEQ ID NO: 432840 - RNA, 19 nt, Homo sapiens
  misc_RNA (1)...(19): siRNA sense strand
cacaaacaaccgaaccuuu

SEQ ID NO: 432841 - RNA, 19 nt, Homo sapiens
  misc_RNA (1)...(19): siRNA sense strand
cagaugggcaggacuacaa

SEQ ID NO: 432842 - RNA, 19 nt, Homo sapiens
  misc_RNA (1)...(19): siRNA sense strand
agacagaugggcaggacua

SEQ ID NO: 432843 - RNA, 19 nt, Homo sapiens
  misc_RNA (1)...(19): siRNA sense strand
uuacaucuaucagaaacga

SEQ ID NO: 432844 - RNA, 19 nt, Homo sapiens
  misc_RNA (1)...(19): siRNA sense strand
gcauuggcaucaccuucau

SEQ ID NO: 432845 - RNA, 19 nt, Homo sapiens
  misc_RNA (1)...(19): siRNA sense strand
ggacaaagugcagcucuac

SEQ ID NO: 432846 - RNA, 19 nt, Homo sapiens
  misc_RNA (1)...(19): siRNA sense strand
ggaccagaaguuugaagug

SEQ ID NO: 432847 - RNA, 19 nt, Homo sapiens
  misc_RNA (1)...(19): siRNA sense strand
cagagaaacaugagaagca

SEQ ID NO: 432848 - RNA, 19 nt, Homo sapiens
  misc_RNA (1)...(19): siRNA sense strand
gcucaugagugggucaagu

SEQ ID NO: 432849 - RNA, 19 nt, Homo sapiens
  misc_RNA (1)...(19): siRNA sense strand
cccaauggcggauggcaua

SEQ ID NO: 432850 - RNA, 19 nt, Homo sapiens
  misc_RNA (1)...(19): siRNA sense strand
acaaagugcagcucuacaa

SEQ ID NO: 432851 - RNA, 19 nt, Homo sapiens
  misc_RNA (1)...(19): siRNA sense strand
uugaagugaucacaaacaa

SEQ ID NO: 432852 - RNA, 19 nt, Homo sapiens
  misc_RNA (1)...(19): siRNA sense strand
ggaaaagcacuacucaguu

SEQ ID NO: 432853 - RNA, 19 nt, Homo sapiens
  misc_RNA (1)...(19): siRNA sense strand
gaaggaguggccuauuaag

SEQ ID NO: 432854 - RNA, 19 nt, Homo sapiens
  misc_RNA (1)...(19): siRNA sense strand
gagcagcacguggaugaug

SEQ ID NO: 432855 - RNA, 19 nt, Homo sapiens
  misc_RNA (1)...(19): siRNA sense strand
gggcaucuaccgcaagugu

SEQ ID NO: 432856 - RNA, 19 nt, Homo sapiens
  misc_RNA (1)...(19): siRNA sense strand
gagggcugguucucucuca

SEQ ID NO: 432857 - RNA, 19 nt, Homo sapiens
  misc_RNA (1)...(19): siRNA sense strand
gagcuucguggcuucaaga

SEQ ID NO: 432858 - RNA, 19 nt, Homo sapiens
  misc_RNA (1)...(19): siRNA sense strand
gaagguguggacagaaaca

SEQ ID NO: 432859 - RNA, 19 nt, Homo sapiens
  misc_RNA (1)...(19): siRNA sense strand
gcaagugugggcagacauc

SEQ ID NO: 432860 - RNA, 19 nt, Homo sapiens
  misc_RNA (1)...(19): siRNA sense strand
uauuaagagucucaaaguc

SEQ ID NO: 432861 - RNA, 19 nt, Homo sapiens
  misc_RNA (1)...(19): siRNA sense strand
cuggcuggcuggacaagaa

SEQ ID NO: 432862 - RNA, 19 nt, Homo sapiens
  misc_RNA (1)...(19): siRNA sense strand
gcuucacaguggugcauga

SEQ ID NO: 432863 - RNA, 19 nt, Homo sapiens
  misc_RNA (1)...(19): siRNA sense strand
cgaagagccgcugcaacua

SEQ ID NO: 432864 - RNA, 19 nt, Homo sapiens
  misc_RNA (1)...(19): siRNA sense strand
ugggucaaguguauugcua

SEQ ID NO: 432865 - RNA, 19 nt, Homo sapiens
  misc_RNA (1)...(19): siRNA sense strand
uagagaaggagcagugguu

SEQ ID NO: 432866 - RNA, 19 nt, Homo sapiens
  misc_RNA (1)...(19): siRNA sense strand
aggaugaccacgccuauga

SEQ ID NO: 432867 - RNA, 19 nt, Homo sapiens
  misc_RNA (1)...(19): siRNA sense strand
agugguaccucugcuguga

SEQ ID NO: 432868 - RNA, 19 nt, Homo sapiens
  misc_RNA (1)...(19): siRNA sense strand
uggaggccaugcugcugua

SEQ ID NO: 432869 - RNA, 19 nt, Homo sapiens
  misc_RNA (1)...(19): siRNA sense strand
ggacuauuggaccugcuuu

SEQ ID NO: 432870 - RNA, 19 nt, Homo sapiens
  misc_RNA (1)...(19): siRNA sense strand
cgaaggaggacacuguaca

SEQ ID NO: 432871 - RNA, 19 nt, Homo sapiens
  misc_RNA (1)...(19): siRNA sense strand
gagugggucaaguguauug

SEQ ID NO: 432872 - RNA, 19 nt, Homo sapiens
  misc_RNA (1)...(19): siRNA sense strand
augagugggucaaguguau

SEQ ID NO: 432873 - RNA, 19 nt, Homo sapiens
  misc_RNA (1)...(19): siRNA sense strand
agaaacagauaacaccaaa

SEQ ID NO: 432874 - RNA, 19 nt, Homo sapiens
  misc_RNA (1)...(19): siRNA sense strand
cagaaaagauggaaaagaa

SEQ ID NO: 432875 - RNA, 19 nt, Homo sapiens
  misc_RNA (1)...(19): siRNA sense strand
gaggagaaagaaacagaua

SEQ ID NO: 432876 - RNA, 19 nt, Homo sapiens
  misc_RNA (1)...(19): siRNA sense strand
ggaggaugaugaugaugau

SEQ ID NO: 432877 - RNA, 19 nt, Homo sapiens
  misc_RNA (1)...(19): siRNA sense strand
gaugaugacuccucuucag

SEQ ID NO: 432878 - RNA, 19 nt, Homo sapiens
  misc_RNA (1)...(19): siRNA sense strand
auucaaaccugaccacaga

SEQ ID NO: 432879 - RNA, 19 nt, Homo sapiens
  misc_RNA (1)...(19): siRNA sense strand
ggaugaugaugaugaugau

SEQ ID NO: 432880 - RNA, 19 nt, Homo sapiens
  misc_RNA (1)...(19): siRNA sense strand
cagauaacaccaaaccaaa

SEQ ID NO: 432881 - RNA, 19 nt, Homo sapiens
  misc_RNA (1)...(19): siRNA sense strand
ggagaaagaaacagauaac

SEQ ID NO: 432882 - RNA, 19 nt, Homo sapiens
  misc_RNA (1)...(19): siRNA sense strand
gaggcuacaagguccguua

SEQ ID NO: 432883 - RNA, 19 nt, Homo sapiens
  misc_RNA (1)...(19): siRNA sense strand
acacugcgcugguugaaaa

SEQ ID NO: 432884 - RNA, 19 nt, Homo sapiens
  misc_RNA (1)...(19): siRNA sense strand
aaaccugaccacagaauug

SEQ ID NO: 432885 - RNA, 19 nt, Homo sapiens
  misc_RNA (1)...(19): siRNA sense strand
acagauaacaccaaaccaa

SEQ ID NO: 432886 - RNA, 19 nt, Homo sapiens
  misc_RNA (1)...(19): siRNA sense strand
gcuacaagguccguuaugc

SEQ ID NO: 432887 - RNA, 19 nt, Homo sapiens
  misc_RNA (1)...(19): siRNA sense strand
gagaaagaaacagauaaca

SEQ ID NO: 432888 - RNA, 19 nt, Homo sapiens
  misc_RNA (1)...(19): siRNA sense strand
cagaggagaaagaaacaga

SEQ ID NO: 432889 - RNA, 19 nt, Homo sapiens
  misc_RNA (1)...(19): siRNA sense strand
gcaucauaauggacucugu

SEQ ID NO: 432890 - RNA, 19 nt, Homo sapiens
  misc_RNA (1)...(19): siRNA sense strand
caaaccugaccacagaauu

SEQ ID NO: 432891 - RNA, 19 nt, Homo sapiens
  misc_RNA (1)...(19): siRNA sense strand
cggaggaugaugaugauga

SEQ ID NO: 432892 - RNA, 19 nt, Homo sapiens
  misc_RNA (1)...(19): siRNA sense strand
ggacauccccagaaaagau

SEQ ID NO: 432893 - RNA, 19 nt, Homo sapiens
  misc_RNA (1)...(19): siRNA sense strand
gaauuggaggcuacaaggu

SEQ ID NO: 432894 - RNA, 19 nt, Homo sapiens
  misc_RNA (1)...(19): siRNA sense strand
acucuguggugcccucuga

SEQ ID NO: 432895 - RNA, 19 nt, Homo sapiens
  misc_RNA (1)...(19): siRNA sense strand
ccuggagcaucauaaugga

SEQ ID NO: 432896 - RNA, 19 nt, Homo sapiens
  misc_RNA (1)...(19): siRNA sense strand
ccaccuggagcaucauaau

SEQ ID NO: 432897 - RNA, 19 nt, Homo sapiens
  misc_RNA (1)...(19): siRNA sense strand
aaacagauaacaccaaacc

SEQ ID NO: 432898 - RNA, 19 nt, Homo sapiens
  misc_RNA (1)...(19): siRNA sense strand
aggaugaugaugaugauga

SEQ ID NO: 432899 - RNA, 19 nt, Homo sapiens
  misc_RNA (1)...(19): siRNA sense strand
aggagaaagaaacagauaa

SEQ ID NO: 432900 - RNA, 19 nt, Homo sapiens
  misc_RNA (1)...(19): siRNA sense strand
agaaacagauaacaccaaa

SEQ ID NO: 432901 - RNA, 19 nt, Homo sapiens
  misc_RNA (1)...(19): siRNA sense strand
cagaaaagauggaaaagaa

SEQ ID NO: 432902 - RNA, 19 nt, Homo sapiens
  misc_RNA (1)...(19): siRNA sense strand
gaggagaaagaaacagaua

SEQ ID NO: 432903 - RNA, 19 nt, Homo sapiens
  misc_RNA (1)...(19): siRNA sense strand
ggaggaugaugaugaugau

SEQ ID NO: 432904 - RNA, 19 nt, Homo sapiens
  misc_RNA (1)...(19): siRNA sense strand
gaugaugacuccucuucag

SEQ ID NO: 432905 - RNA, 19 nt, Homo sapiens
  misc_RNA (1)...(19): siRNA sense strand
auucaaaccugaccacaga

SEQ ID NO: 432906 - RNA, 19 nt, Homo sapiens
  misc_RNA (1)...(19): siRNA sense strand
ggaugaugaugaugaugau

SEQ ID NO: 432907 - RNA, 19 nt, Homo sapiens
  misc_RNA (1)...(19): siRNA sense strand
cagauaacaccaaaccaaa

SEQ ID NO: 432908 - RNA, 19 nt, Homo sapiens
  misc_RNA (1)...(19): siRNA sense strand
ggagaaagaaacagauaac

SEQ ID NO: 432909 - RNA, 19 nt, Homo sapiens
  misc_RNA (1)...(19): siRNA sense strand
gaggcuacaagguccguua

SEQ ID NO: 432910 - RNA, 19 nt, Homo sapiens
  misc_RNA (1)...(19): siRNA sense strand
acacugcgcugguugaaaa

SEQ ID NO: 432911 - RNA, 19 nt, Homo sapiens
  misc_RNA (1)...(19): siRNA sense strand
aaaccugaccacagaauug

SEQ ID NO: 432912 - RNA, 19 nt, Homo sapiens
  misc_RNA (1)...(19): siRNA sense strand
acagauaacaccaaaccaa

SEQ ID NO: 432913 - RNA, 19 nt, Homo sapiens
  misc_RNA (1)...(19): siRNA sense strand
gcuacaagguccguuaugc

SEQ ID NO: 432914 - RNA, 19 nt, Homo sapiens
  misc_RNA (1)...(19): siRNA sense strand
gagaaagaaacagauaaca

SEQ ID NO: 432915 - RNA, 19 nt, Homo sapiens
  misc_RNA (1)...(19): siRNA sense strand
cagaggagaaagaaacaga

SEQ ID NO: 432916 - RNA, 19 nt, Homo sapiens
  misc_RNA (1)...(19): siRNA sense strand
gcaucauaauggacucugu

SEQ ID NO: 432917 - RNA, 19 nt, Homo sapiens
  misc_RNA (1)...(19): siRNA sense strand
caaaccugaccacagaauu

SEQ ID NO: 432918 - RNA, 19 nt, Homo sapiens
  misc_RNA (1)...(19): siRNA sense strand
cggaggaugaugaugauga

SEQ ID NO: 432919 - RNA, 19 nt, Homo sapiens
  misc_RNA (1)...(19): siRNA sense strand
ggacauccccagaaaagau

SEQ ID NO: 432920 - RNA, 19 nt, Homo sapiens
  misc_RNA (1)...(19): siRNA sense strand
gaauuggaggcuacaaggu

SEQ ID NO: 432921 - RNA, 19 nt, Homo sapiens
  misc_RNA (1)...(19): siRNA sense strand
acucuguggugcccucuga

SEQ ID NO: 432922 - RNA, 19 nt, Homo sapiens
  misc_RNA (1)...(19): siRNA sense strand
ccuggagcaucauaaugga

SEQ ID NO: 432923 - RNA, 19 nt, Homo sapiens
  misc_RNA (1)...(19): siRNA sense strand
ccaccuggagcaucauaau

SEQ ID NO: 432924 - RNA, 19 nt, Homo sapiens
  misc_RNA (1)...(19): siRNA sense strand
aaacagauaacaccaaacc

SEQ ID NO: 432925 - RNA, 19 nt, Homo sapiens
  misc_RNA (1)...(19): siRNA sense strand
aggaugaugaugaugauga

SEQ ID NO: 432926 - RNA, 19 nt, Homo sapiens
  misc_RNA (1)...(19): siRNA sense strand
aggagaaagaaacagauaa

SEQ ID NO: 432927 - RNA, 19 nt, Homo sapiens
  misc_RNA (1)...(19): siRNA sense strand
agaaacagauaacaccaaa

SEQ ID NO: 432928 - RNA, 19 nt, Homo sapiens
  misc_RNA (1)...(19): siRNA sense strand
cagaaaagauggaaaagaa

SEQ ID NO: 432929 - RNA, 19 nt, Homo sapiens
  misc_RNA (1)...(19): siRNA sense strand
gaggagaaagaaacagaua

SEQ ID NO: 432930 - RNA, 19 nt, Homo sapiens
  misc_RNA (1)...(19): siRNA sense strand
ggaggaugaugaugaugau

SEQ ID NO: 432931 - RNA, 19 nt, Homo sapiens
  misc_RNA (1)...(19): siRNA sense strand
gaugaugacuccucuucag

SEQ ID NO: 432932 - RNA, 19 nt, Homo sapiens
  misc_RNA (1)...(19): siRNA sense strand
auucaaaccugaccacaga

SEQ ID NO: 432933 - RNA, 19 nt, Homo sapiens
  misc_RNA (1)...(19): siRNA sense strand
ggaugaugaugaugaugau

SEQ ID NO: 432934 - RNA, 19 nt, Homo sapiens
  misc_RNA (1)...(19): siRNA sense strand
cagauaacaccaaaccaaa

SEQ ID NO: 432935 - RNA, 19 nt, Homo sapiens
  misc_RNA (1)...(19): siRNA sense strand
ggagaaagaaacagauaac

SEQ ID NO: 432936 - RNA, 19 nt, Homo sapiens
  misc_RNA (1)...(19): siRNA sense strand
gaggcuacaagguccguua

SEQ ID NO: 432937 - RNA, 19 nt, Homo sapiens
  misc_RNA (1)...(19): siRNA sense strand
acacugcgcugguugaaaa

SEQ ID NO: 432938 - RNA, 19 nt, Homo sapiens
  misc_RNA (1)...(19): siRNA sense strand
aaaccugaccacagaauug

SEQ ID NO: 432939 - RNA, 19 nt, Homo sapiens
  misc_RNA (1)...(19): siRNA sense strand
acagauaacaccaaaccaa

SEQ ID NO: 432940 - RNA, 19 nt, Homo sapiens
  misc_RNA (1)...(19): siRNA sense strand
gcuacaagguccguuaugc

SEQ ID NO: 432941 - RNA, 19 nt, Homo sapiens
  misc_RNA (1)...(19): siRNA sense strand
gagaaagaaacagauaaca

SEQ ID NO: 432942 - RNA, 19 nt, Homo sapiens
  misc_RNA (1)...(19): siRNA sense strand
cagaggagaaagaaacaga

SEQ ID NO: 432943 - RNA, 19 nt, Homo sapiens
  misc_RNA (1)...(19): siRNA sense strand
gcaucauaauggacucugu

SEQ ID NO: 432944 - RNA, 19 nt, Homo sapiens
  misc_RNA (1)...(19): siRNA sense strand
caaaccugaccacagaauu

SEQ ID NO: 432945 - RNA, 19 nt, Homo sapiens
  misc_RNA (1)...(19): siRNA sense strand
cggaggaugaugaugauga

SEQ ID NO: 432946 - RNA, 19 nt, Homo sapiens
  misc_RNA (1)...(19): siRNA sense strand
ggacauccccagaaaagau

SEQ ID NO: 432947 - RNA, 19 nt, Homo sapiens
  misc_RNA (1)...(19): siRNA sense strand
gaauuggaggcuacaaggu

SEQ ID NO: 432948 - RNA, 19 nt, Homo sapiens
  misc_RNA (1)...(19): siRNA sense strand
acucuguggugcccucuga

SEQ ID NO: 432949 - RNA, 19 nt, Homo sapiens
  misc_RNA (1)...(19): siRNA sense strand
ccuggagcaucauaaugga

SEQ ID NO: 432950 - RNA, 19 nt, Homo sapiens
  misc_RNA (1)...(19): siRNA sense strand
ccaccuggagcaucauaau

SEQ ID NO: 432951 - RNA, 19 nt, Homo sapiens
  misc_RNA (1)...(19): siRNA sense strand
aaacagauaacaccaaacc

SEQ ID NO: 432952 - RNA, 19 nt, Homo sapiens
  misc_RNA (1)...(19): siRNA sense strand
aggaugaugaugaugauga

SEQ ID NO: 432953 - RNA, 19 nt, Homo sapiens
  misc_RNA (1)...(19): siRNA sense strand
aggagaaagaaacagauaa

SEQ ID NO: 432954 - RNA, 19 nt, Homo sapiens
  misc_RNA (1)...(19): siRNA sense strand
agaaacagauaacaccaaa

SEQ ID NO: 432955 - RNA, 19 nt, Homo sapiens
  misc_RNA (1)...(19): siRNA sense strand
cagaaaagauggaaaagaa

SEQ ID NO: 432956 - RNA, 19 nt, Homo sapiens
  misc_RNA (1)...(19): siRNA sense strand
gaggagaaagaaacagaua

SEQ ID NO: 432957 - RNA, 19 nt, Homo sapiens
  misc_RNA (1)...(19): siRNA sense strand
ggaggaugaugaugaugau

SEQ ID NO: 432958 - RNA, 19 nt, Homo sapiens
  misc_RNA (1)...(19): siRNA sense strand
gaugaugacuccucuucag

SEQ ID NO: 432959 - RNA, 19 nt, Homo sapiens
  misc_RNA (1)...(19): siRNA sense strand
auucaaaccugaccacaga

SEQ ID NO: 432960 - RNA, 19 nt, Homo sapiens
  misc_RNA (1)...(19): siRNA sense strand
ggaugaugaugaugaugau

SEQ ID NO: 432961 - RNA, 19 nt, Homo sapiens
  misc_RNA (1)...(19): siRNA sense strand
cagauaacaccaaaccaaa

SEQ ID NO: 432962 - RNA, 19 nt, Homo sapiens
  misc_RNA (1)...(19): siRNA sense strand
ggagaaagaaacagauaac

SEQ ID NO: 432963 - RNA, 19 nt, Homo sapiens
  misc_RNA (1)...(19): siRNA sense strand
gaggcuacaagguccguua

SEQ ID NO: 432964 - RNA, 19 nt, Homo sapiens
  misc_RNA (1)...(19): siRNA sense strand
acacugcgcugguugaaaa

SEQ ID NO: 432965 - RNA, 19 nt, Homo sapiens
  misc_RNA (1)...(19): siRNA sense strand
aaaccugaccacagaauug

SEQ ID NO: 432966 - RNA, 19 nt, Homo sapiens
  misc_RNA (1)...(19): siRNA sense strand
acagauaacaccaaaccaa

SEQ ID NO: 432967 - RNA, 19 nt, Homo sapiens
  misc_RNA (1)...(19): siRNA sense strand
gcuacaagguccguuaugc

SEQ ID NO: 432968 - RNA, 19 nt, Homo sapiens
  misc_RNA (1)...(19): siRNA sense strand
gagaaagaaacagauaaca

SEQ ID NO: 432969 - RNA, 19 nt, Homo sapiens
  misc_RNA (1)...(19): siRNA sense strand
cagaggagaaagaaacaga

SEQ ID NO: 432970 - RNA, 19 nt, Homo sapiens
  misc_RNA (1)...(19): siRNA sense strand
gcaucauaauggacucugu

SEQ ID NO: 432971 - RNA, 19 nt, Homo sapiens
  misc_RNA (1)...(19): siRNA sense strand
caaaccugaccacagaauu

SEQ ID NO: 432972 - RNA, 19 nt, Homo sapiens
  misc_RNA (1)...(19): siRNA sense strand
cggaggaugaugaugauga

SEQ ID NO: 432973 - RNA, 19 nt, Homo sapiens
  misc_RNA (1)...(19): siRNA sense strand
ggacauccccagaaaagau

SEQ ID NO: 432974 - RNA, 19 nt, Homo sapiens
  misc_RNA (1)...(19): siRNA sense strand
gaauuggaggcuacaaggu

SEQ ID NO: 432975 - RNA, 19 nt, Homo sapiens
  misc_RNA (1)...(19): siRNA sense strand
acucuguggugcccucuga

SEQ ID NO: 432976 - RNA, 19 nt, Homo sapiens
  misc_RNA (1)...(19): siRNA sense strand
ccuggagcaucauaaugga

SEQ ID NO: 432977 - RNA, 19 nt, Homo sapiens
  misc_RNA (1)...(19): siRNA sense strand
ccaccuggagcaucauaau

SEQ ID NO: 432978 - RNA, 19 nt, Homo sapiens
  misc_RNA (1)...(19): siRNA sense strand
aaacagauaacaccaaacc

SEQ ID NO: 432979 - RNA, 19 nt, Homo sapiens
  misc_RNA (1)...(19): siRNA sense strand
aggaugaugaugaugauga

SEQ ID NO: 432980 - RNA, 19 nt, Homo sapiens
  misc_RNA (1)...(19): siRNA sense strand
aggagaaagaaacagauaa

SEQ ID NO: 432981 - RNA, 19 nt, Homo sapiens
  misc_RNA (1)...(19): siRNA sense strand
agaaacagauaacaccaaa

SEQ ID NO: 432982 - RNA, 19 nt, Homo sapiens
  misc_RNA (1)...(19): siRNA sense strand
cagaaaagauggaaaagaa

SEQ ID NO: 432983 - RNA, 19 nt, Homo sapiens
  misc_RNA (1)...(19): siRNA sense strand
gaggagaaagaaacagaua

SEQ ID NO: 432984 - RNA, 19 nt, Homo sapiens
  misc_RNA (1)...(19): siRNA sense strand
ggaggaugaugaugaugau

SEQ ID NO: 432985 - RNA, 19 nt, Homo sapiens
  misc_RNA (1)...(19): siRNA sense strand
gaugaugacuccucuucag

SEQ ID NO: 432986 - RNA, 19 nt, Homo sapiens
  misc_RNA (1)...(19): siRNA sense strand
auucaaaccugaccacaga

SEQ ID NO: 432987 - RNA, 19 nt, Homo sapiens
  misc_RNA (1)...(19): siRNA sense strand
ggaugaugaugaugaugau

SEQ ID NO: 432988 - RNA, 19 nt, Homo sapiens
  misc_RNA (1)...(19): siRNA sense strand
cagauaacaccaaaccaaa

SEQ ID NO: 432989 - RNA, 19 nt, Homo sapiens
  misc_RNA (1)...(19): siRNA sense strand
ggagaaagaaacagauaac

SEQ ID NO: 432990 - RNA, 19 nt, Homo sapiens
  misc_RNA (1)...(19): siRNA sense strand
gaggcuacaagguccguua

SEQ ID NO: 432991 - RNA, 19 nt, Homo sapiens
  misc_RNA (1)...(19): siRNA sense strand
acacugcgcugguugaaaa

SEQ ID NO: 432992 - RNA, 19 nt, Homo sapiens
  misc_RNA (1)...(19): siRNA sense strand
aaaccugaccacagaauug

SEQ ID NO: 432993 - RNA, 19 nt, Homo sapiens
  misc_RNA (1)...(19): siRNA sense strand
acagauaacaccaaaccaa

SEQ ID NO: 432994 - RNA, 19 nt, Homo sapiens
  misc_RNA (1)...(19): siRNA sense strand
gcuacaagguccguuaugc

SEQ ID NO: 432995 - RNA, 19 nt, Homo sapiens
  misc_RNA (1)...(19): siRNA sense strand
gagaaagaaacagauaaca

SEQ ID NO: 432996 - RNA, 19 nt, Homo sapiens
  misc_RNA (1)...(19): siRNA sense strand
cagaggagaaagaaacaga

SEQ ID NO: 432997 - RNA, 19 nt, Homo sapiens
  misc_RNA (1)...(19): siRNA sense strand
gcaucauaauggacucugu

SEQ ID NO: 432998 - RNA, 19 nt, Homo sapiens
  misc_RNA (1)...(19): siRNA sense strand
caaaccugaccacagaauu

SEQ ID NO: 432999 - RNA, 19 nt, Homo sapiens
  misc_RNA (1)...(19): siRNA sense strand
cggaggaugaugaugauga

SEQ ID NO: 433000 - RNA, 19 nt, Homo sapiens
  misc_RNA (1)...(19): siRNA sense strand
ggacauccccagaaaagau

SEQ ID NO: 433001 - RNA, 19 nt, Homo sapiens
  misc_RNA (1)...(19): siRNA sense strand
gaauuggaggcuacaaggu

SEQ ID NO: 433002 - RNA, 19 nt, Homo sapiens
  misc_RNA (1)...(19): siRNA sense strand
acucuguggugcccucuga

SEQ ID NO: 433003 - RNA, 19 nt, Homo sapiens
  misc_RNA (1)...(19): siRNA sense strand
ccuggagcaucauaaugga

SEQ ID NO: 433004 - RNA, 19 nt, Homo sapiens
  misc_RNA (1)...(19): siRNA sense strand
ccaccuggagcaucauaau

SEQ ID NO: 433005 - RNA, 19 nt, Homo sapiens
  misc_RNA (1)...(19): siRNA sense strand
aaacagauaacaccaaacc

SEQ ID NO: 433006 - RNA, 19 nt, Homo sapiens
  misc_RNA (1)...(19): siRNA sense strand
aggaugaugaugaugauga

SEQ ID NO: 433007 - RNA, 19 nt, Homo sapiens
  misc_RNA (1)...(19): siRNA sense strand
aggagaaagaaacagauaa

SEQ ID NO: 433008 - RNA, 19 nt, Homo sapiens
  misc_RNA (1)...(19): siRNA sense strand
agaaacagauaacaccaaa

SEQ ID NO: 433009 - RNA, 19 nt, Homo sapiens
  misc_RNA (1)...(19): siRNA sense strand
cagaaaagauggaaaagaa

SEQ ID NO: 433010 - RNA, 19 nt, Homo sapiens
  misc_RNA (1)...(19): siRNA sense strand
gaggagaaagaaacagaua

SEQ ID NO: 433011 - RNA, 19 nt, Homo sapiens
  misc_RNA (1)...(19): siRNA sense strand
ggaggaugaugaugaugau

SEQ ID NO: 433012 - RNA, 19 nt, Homo sapiens
  misc_RNA (1)...(19): siRNA sense strand
gaugaugacuccucuucag

SEQ ID NO: 433013 - RNA, 19 nt, Homo sapiens
  misc_RNA (1)...(19): siRNA sense strand
auucaaaccugaccacaga

SEQ ID NO: 433014 - RNA, 19 nt, Homo sapiens
  misc_RNA (1)...(19): siRNA sense strand
ggaugaugaugaugaugau

SEQ ID NO: 433015 - RNA, 19 nt, Homo sapiens
  misc_RNA (1)...(19): siRNA sense strand
cagauaacaccaaaccaaa

SEQ ID NO: 433016 - RNA, 19 nt, Homo sapiens
  misc_RNA (1)...(19): siRNA sense strand
ggagaaagaaacagauaac

SEQ ID NO: 433017 - RNA, 19 nt, Homo sapiens
  misc_RNA (1)...(19): siRNA sense strand
gaggcuacaagguccguua

SEQ ID NO: 433018 - RNA, 19 nt, Homo sapiens
  misc_RNA (1)...(19): siRNA sense strand
acacugcgcugguugaaaa

SEQ ID NO: 433019 - RNA, 19 nt, Homo sapiens
  misc_RNA (1)...(19): siRNA sense strand
aaaccugaccacagaauug

SEQ ID NO: 433020 - RNA, 19 nt, Homo sapiens
  misc_RNA (1)...(19): siRNA sense strand
acagauaacaccaaaccaa

SEQ ID NO: 433021 - RNA, 19 nt, Homo sapiens
  misc_RNA (1)...(19): siRNA sense strand
gcuacaagguccguuaugc

SEQ ID NO: 433022 - RNA, 19 nt, Homo sapiens
  misc_RNA (1)...(19): siRNA sense strand
gagaaagaaacagauaaca

SEQ ID NO: 433023 - RNA, 19 nt, Homo sapiens
  misc_RNA (1)...(19): siRNA sense strand
cagaggagaaagaaacaga

SEQ ID NO: 433024 - RNA, 19 nt, Homo sapiens
  misc_RNA (1)...(19): siRNA sense strand
gcaucauaauggacucugu

SEQ ID NO: 433025 - RNA, 19 nt, Homo sapiens
  misc_RNA (1)...(19): siRNA sense strand
caaaccugaccacagaauu

SEQ ID NO: 433026 - RNA, 19 nt, Homo sapiens
  misc_RNA (1)...(19): siRNA sense strand
cggaggaugaugaugauga

SEQ ID NO: 433027 - RNA, 19 nt, Homo sapiens
  misc_RNA (1)...(19): siRNA sense strand
ggacauccccagaaaagau

SEQ ID NO: 433028 - RNA, 19 nt, Homo sapiens
  misc_RNA (1)...(19): siRNA sense strand
gaauuggaggcuacaaggu

SEQ ID NO: 433029 - RNA, 19 nt, Homo sapiens
  misc_RNA (1)...(19): siRNA sense strand
acucuguggugcccucuga

SEQ ID NO: 433030 - RNA, 19 nt, Homo sapiens
  misc_RNA (1)...(19): siRNA sense strand
ccuggagcaucauaaugga

SEQ ID NO: 433031 - RNA, 19 nt, Homo sapiens
  misc_RNA (1)...(19): siRNA sense strand
ccaccuggagcaucauaau

SEQ ID NO: 433032 - RNA, 19 nt, Homo sapiens
  misc_RNA (1)...(19): siRNA sense strand
aaacagauaacaccaaacc

SEQ ID NO: 433033 - RNA, 19 nt, Homo sapiens
  misc_RNA (1)...(19): siRNA sense strand
aggaugaugaugaugauga

SEQ ID NO: 433034 - RNA, 19 nt, Homo sapiens
  misc_RNA (1)...(19): siRNA sense strand
aggagaaagaaacagauaa

SEQ ID NO: 433035 - RNA, 19 nt, Homo sapiens
  misc_RNA (1)...(19): siRNA sense strand
agaaacagauaacaccaaa

SEQ ID NO: 433036 - RNA, 19 nt, Homo sapiens
  misc_RNA (1)...(19): siRNA sense strand
cagaaaagauggaaaagaa

SEQ ID NO: 433037 - RNA, 19 nt, Homo sapiens
  misc_RNA (1)...(19): siRNA sense strand
gaggagaaagaaacagaua

SEQ ID NO: 433038 - RNA, 19 nt, Homo sapiens
  misc_RNA (1)...(19): siRNA sense strand
ggaggaugaugaugaugau

SEQ ID NO: 433039 - RNA, 19 nt, Homo sapiens
  misc_RNA (1)...(19): siRNA sense strand
gaugaugacuccucuucag

SEQ ID NO: 433040 - RNA, 19 nt, Homo sapiens
  misc_RNA (1)...(19): siRNA sense strand
auucaaaccugaccacaga

SEQ ID NO: 433041 - RNA, 19 nt, Homo sapiens
  misc_RNA (1)...(19): siRNA sense strand
ggaugaugaugaugaugau

SEQ ID NO: 433042 - RNA, 19 nt, Homo sapiens
  misc_RNA (1)...(19): siRNA sense strand
cagauaacaccaaaccaaa

SEQ ID NO: 433043 - RNA, 19 nt, Homo sapiens
  misc_RNA (1)...(19): siRNA sense strand
ggagaaagaaacagauaac

SEQ ID NO: 433044 - RNA, 19 nt, Homo sapiens
  misc_RNA (1)...(19): siRNA sense strand
gaggcuacaagguccguua

SEQ ID NO: 433045 - RNA, 19 nt, Homo sapiens
  misc_RNA (1)...(19): siRNA sense strand
acacugcgcugguugaaaa

SEQ ID NO: 433046 - RNA, 19 nt, Homo sapiens
  misc_RNA (1)...(19): siRNA sense strand
aaaccugaccacagaauug

SEQ ID NO: 433047 - RNA, 19 nt, Homo sapiens
  misc_RNA (1)...(19): siRNA sense strand
acagauaacaccaaaccaa

SEQ ID NO: 433048 - RNA, 19 nt, Homo sapiens
  misc_RNA (1)...(19): siRNA sense strand
gcuacaagguccguuaugc

SEQ ID NO: 433049 - RNA, 19 nt, Homo sapiens
  misc_RNA (1)...(19): siRNA sense strand
gagaaagaaacagauaaca

SEQ ID NO: 433050 - RNA, 19 nt, Homo sapiens
  misc_RNA (1)...(19): siRNA sense strand
cagaggagaaagaaacaga

SEQ ID NO: 433051 - RNA, 19 nt, Homo sapiens
  misc_RNA (1)...(19): siRNA sense strand
gcaucauaauggacucugu

SEQ ID NO: 433052 - RNA, 19 nt, Homo sapiens
  misc_RNA (1)...(19): siRNA sense strand
caaaccugaccacagaauu

SEQ ID NO: 433053 - RNA, 19 nt, Homo sapiens
  misc_RNA (1)...(19): siRNA sense strand
cggaggaugaugaugauga

SEQ ID NO: 433054 - RNA, 19 nt, Homo sapiens
  misc_RNA (1)...(19): siRNA sense strand
ggacauccccagaaaagau

SEQ ID NO: 433055 - RNA, 19 nt, Homo sapiens
  misc_RNA (1)...(19): siRNA sense strand
gaauuggaggcuacaaggu

SEQ ID NO: 433056 - RNA, 19 nt, Homo sapiens
  misc_RNA (1)...(19): siRNA sense strand
acucuguggugcccucuga

SEQ ID NO: 433057 - RNA, 19 nt, Homo sapiens
  misc_RNA (1)...(19): siRNA sense strand
ccuggagcaucauaaugga

SEQ ID NO: 433058 - RNA, 19 nt, Homo sapiens
  misc_RNA (1)...(19): siRNA sense strand
ccaccuggagcaucauaau

SEQ ID NO: 433059 - RNA, 19 nt, Homo sapiens
  misc_RNA (1)...(19): siRNA sense strand
aaacagauaacaccaaacc

SEQ ID NO: 433060 - RNA, 19 nt, Homo sapiens
  misc_RNA (1)...(19): siRNA sense strand
aggaugaugaugaugauga

SEQ ID NO: 433061 - RNA, 19 nt, Homo sapiens
  misc_RNA (1)...(19): siRNA sense strand
aggagaaagaaacagauaa

SEQ ID NO: 433062 - RNA, 19 nt, Homo sapiens
  misc_RNA (1)...(19): siRNA sense strand
agaaacagauaacaccaaa

SEQ ID NO: 433063 - RNA, 19 nt, Homo sapiens
  misc_RNA (1)...(19): siRNA sense strand
cagaaaagauggaaaagaa

SEQ ID NO: 433064 - RNA, 19 nt, Homo sapiens
  misc_RNA (1)...(19): siRNA sense strand
gaggagaaagaaacagaua

SEQ ID NO: 433065 - RNA, 19 nt, Homo sapiens
  misc_RNA (1)...(19): siRNA sense strand
ggaggaugaugaugaugau

SEQ ID NO: 433066 - RNA, 19 nt, Homo sapiens
  misc_RNA (1)...(19): siRNA sense strand
gaugaugacuccucuucag

SEQ ID NO: 433067 - RNA, 19 nt, Homo sapiens
  misc_RNA (1)...(19): siRNA sense strand
auucaaaccugaccacaga

SEQ ID NO: 433068 - RNA, 19 nt, Homo sapiens
  misc_RNA (1)...(19): siRNA sense strand
ggaugaugaugaugaugau

SEQ ID NO: 433069 - RNA, 19 nt, Homo sapiens
  misc_RNA (1)...(19): siRNA sense strand
cagauaacaccaaaccaaa

SEQ ID NO: 433070 - RNA, 19 nt, Homo sapiens
  misc_RNA (1)...(19): siRNA sense strand
ggagaaagaaacagauaac

SEQ ID NO: 433071 - RNA, 19 nt, Homo sapiens
  misc_RNA (1)...(19): siRNA sense strand
gaggcuacaagguccguua

SEQ ID NO: 433072 - RNA, 19 nt, Homo sapiens
  misc_RNA (1)...(19): siRNA sense strand
acacugcgcugguugaaaa

SEQ ID NO: 433073 - RNA, 19 nt, Homo sapiens
  misc_RNA (1)...(19): siRNA sense strand
aaaccugaccacagaauug

SEQ ID NO: 433074 - RNA, 19 nt, Homo sapiens
  misc_RNA (1)...(19): siRNA sense strand
acagauaacaccaaaccaa

SEQ ID NO: 433075 - RNA, 19 nt, Homo sapiens
  misc_RNA (1)...(19): siRNA sense strand
gcuacaagguccguuaugc

SEQ ID NO: 433076 - RNA, 19 nt, Homo sapiens
  misc_RNA (1)...(19): siRNA sense strand
gagaaagaaacagauaaca

SEQ ID NO: 433077 - RNA, 19 nt, Homo sapiens
  misc_RNA (1)...(19): siRNA sense strand
cagaggagaaagaaacaga

SEQ ID NO: 433078 - RNA, 19 nt, Homo sapiens
  misc_RNA (1)...(19): siRNA sense strand
gcaucauaauggacucugu

SEQ ID NO: 433079 - RNA, 19 nt, Homo sapiens
  misc_RNA (1)...(19): siRNA sense strand
caaaccugaccacagaauu

SEQ ID NO: 433080 - RNA, 19 nt, Homo sapiens
  misc_RNA (1)...(19): siRNA sense strand
cggaggaugaugaugauga

SEQ ID NO: 433081 - RNA, 19 nt, Homo sapiens
  misc_RNA (1)...(19): siRNA sense strand
ggacauccccagaaaagau

SEQ ID NO: 433082 - RNA, 19 nt, Homo sapiens
  misc_RNA (1)...(19): siRNA sense strand
gaauuggaggcuacaaggu

SEQ ID NO: 433083 - RNA, 19 nt, Homo sapiens
  misc_RNA (1)...(19): siRNA sense strand
acucuguggugcccucuga

SEQ ID NO: 433084 - RNA, 19 nt, Homo sapiens
  misc_RNA (1)...(19): siRNA sense strand
ccuggagcaucauaaugga

SEQ ID NO: 433085 - RNA, 19 nt, Homo sapiens
  misc_RNA (1)...(19): siRNA sense strand
ccaccuggagcaucauaau

SEQ ID NO: 433086 - RNA, 19 nt, Homo sapiens
  misc_RNA (1)...(19): siRNA sense strand
aaacagauaacaccaaacc

SEQ ID NO: 433087 - RNA, 19 nt, Homo sapiens
  misc_RNA (1)...(19): siRNA sense strand
aggaugaugaugaugauga

SEQ ID NO: 433088 - RNA, 19 nt, Homo sapiens
  misc_RNA (1)...(19): siRNA sense strand
aggagaaagaaacagauaa

SEQ ID NO: 433089 - RNA, 19 nt, Homo sapiens
  misc_RNA (1)...(19): siRNA sense strand
agaaacagauaacaccaaa

SEQ ID NO: 433090 - RNA, 19 nt, Homo sapiens
  misc_RNA (1)...(19): siRNA sense strand
cagaaaagauggaaaagaa

SEQ ID NO: 433091 - RNA, 19 nt, Homo sapiens
  misc_RNA (1)...(19): siRNA sense strand
gaggagaaagaaacagaua

SEQ ID NO: 433092 - RNA, 19 nt, Homo sapiens
  misc_RNA (1)...(19): siRNA sense strand
ggaggaugaugaugaugau

SEQ ID NO: 433093 - RNA, 19 nt, Homo sapiens
  misc_RNA (1)...(19): siRNA sense strand
gaugaugacuccucuucag

SEQ ID NO: 433094 - RNA, 19 nt, Homo sapiens
  misc_RNA (1)...(19): siRNA sense strand
auucaaaccugaccacaga

SEQ ID NO: 433095 - RNA, 19 nt, Homo sapiens
  misc_RNA (1)...(19): siRNA sense strand
ggaugaugaugaugaugau

SEQ ID NO: 433096 - RNA, 19 nt, Homo sapiens
  misc_RNA (1)...(19): siRNA sense strand
cagauaacaccaaaccaaa

SEQ ID NO: 433097 - RNA, 19 nt, Homo sapiens
  misc_RNA (1)...(19): siRNA sense strand
ggagaaagaaacagauaac

SEQ ID NO: 433098 - RNA, 19 nt, Homo sapiens
  misc_RNA (1)...(19): siRNA sense strand
gaggcuacaagguccguua

SEQ ID NO: 433099 - RNA, 19 nt, Homo sapiens
  misc_RNA (1)...(19): siRNA sense strand
acacugcgcugguugaaaa

SEQ ID NO: 433100 - RNA, 19 nt, Homo sapiens
  misc_RNA (1)...(19): siRNA sense strand
aaaccugaccacagaauug

SEQ ID NO: 433101 - RNA, 19 nt, Homo sapiens
  misc_RNA (1)...(19): siRNA sense strand
acagauaacaccaaaccaa

SEQ ID NO: 433102 - RNA, 19 nt, Homo sapiens
  misc_RNA (1)...(19): siRNA sense strand
gcuacaagguccguuaugc

SEQ ID NO: 433103 - RNA, 19 nt, Homo sapiens
  misc_RNA (1)...(19): siRNA sense strand
gagaaagaaacagauaaca

SEQ ID NO: 433104 - RNA, 19 nt, Homo sapiens
  misc_RNA (1)...(19): siRNA sense strand
cagaggagaaagaaacaga

SEQ ID NO: 433105 - RNA, 19 nt, Homo sapiens
  misc_RNA (1)...(19): siRNA sense strand
gcaucauaauggacucugu

SEQ ID NO: 433106 - RNA, 19 nt, Homo sapiens
  misc_RNA (1)...(19): siRNA sense strand
caaaccugaccacagaauu

SEQ ID NO: 433107 - RNA, 19 nt, Homo sapiens
  misc_RNA (1)...(19): siRNA sense strand
cggaggaugaugaugauga

SEQ ID NO: 433108 - RNA, 19 nt, Homo sapiens
  misc_RNA (1)...(19): siRNA sense strand
ggacauccccagaaaagau

SEQ ID NO: 433109 - RNA, 19 nt, Homo sapiens
  misc_RNA (1)...(19): siRNA sense strand
gaauuggaggcuacaaggu

SEQ ID NO: 433110 - RNA, 19 nt, Homo sapiens
  misc_RNA (1)...(19): siRNA sense strand
acucuguggugcccucuga

SEQ ID NO: 433111 - RNA, 19 nt, Homo sapiens
  misc_RNA (1)...(19): siRNA sense strand
ccuggagcaucauaaugga

SEQ ID NO: 433112 - RNA, 19 nt, Homo sapiens
  misc_RNA (1)...(19): siRNA sense strand
ccaccuggagcaucauaau

SEQ ID NO: 433113 - RNA, 19 nt, Homo sapiens
  misc_RNA (1)...(19): siRNA sense strand
aaacagauaacaccaaacc

SEQ ID NO: 433114 - RNA, 19 nt, Homo sapiens
  misc_RNA (1)...(19): siRNA sense strand
aggaugaugaugaugauga

SEQ ID NO: 433115 - RNA, 19 nt, Homo sapiens
  misc_RNA (1)...(19): siRNA sense strand
aggagaaagaaacagauaa

SEQ ID NO: 433116 - RNA, 19 nt, Homo sapiens
  misc_RNA (1)...(19): siRNA sense strand
agaaacagauaacaccaaa

SEQ ID NO: 433117 - RNA, 19 nt, Homo sapiens
  misc_RNA (1)...(19): siRNA sense strand
cagaaaagauggaaaagaa

SEQ ID NO: 433118 - RNA, 19 nt, Homo sapiens
  misc_RNA (1)...(19): siRNA sense strand
gaggagaaagaaacagaua

SEQ ID NO: 433119 - RNA, 19 nt, Homo sapiens
  misc_RNA (1)...(19): siRNA sense strand
ggaggaugaugaugaugau

SEQ ID NO: 433120 - RNA, 19 nt, Homo sapiens
  misc_RNA (1)...(19): siRNA sense strand
gaugaugacuccucuucag

SEQ ID NO: 433121 - RNA, 19 nt, Homo sapiens
  misc_RNA (1)...(19): siRNA sense strand
auucaaaccugaccacaga

SEQ ID NO: 433122 - RNA, 19 nt, Homo sapiens
  misc_RNA (1)...(19): siRNA sense strand
ggaugaugaugaugaugau

SEQ ID NO: 433123 - RNA, 19 nt, Homo sapiens
  misc_RNA (1)...(19): siRNA sense strand
cagauaacaccaaaccaaa

SEQ ID NO: 433124 - RNA, 19 nt, Homo sapiens
  misc_RNA (1)...(19): siRNA sense strand
ggagaaagaaacagauaac

SEQ ID NO: 433125 - RNA, 19 nt, Homo sapiens
  misc_RNA (1)...(19): siRNA sense strand
gaggcuacaagguccguua

SEQ ID NO: 433126 - RNA, 19 nt, Homo sapiens
  misc_RNA (1)...(19): siRNA sense strand
acacugcgcugguugaaaa

SEQ ID NO: 433127 - RNA, 19 nt, Homo sapiens
  misc_RNA (1)...(19): siRNA sense strand
aaaccugaccacagaauug

SEQ ID NO: 433128 - RNA, 19 nt, Homo sapiens
  misc_RNA (1)...(19): siRNA sense strand
acagauaacaccaaaccaa

SEQ ID NO: 433129 - RNA, 19 nt, Homo sapiens
  misc_RNA (1)...(19): siRNA sense strand
gcuacaagguccguuaugc

SEQ ID NO: 433130 - RNA, 19 nt, Homo sapiens
  misc_RNA (1)...(19): siRNA sense strand
gagaaagaaacagauaaca

SEQ ID NO: 433131 - RNA, 19 nt, Homo sapiens
  misc_RNA (1)...(19): siRNA sense strand
cagaggagaaagaaacaga

SEQ ID NO: 433132 - RNA, 19 nt, Homo sapiens
  misc_RNA (1)...(19): siRNA sense strand
gcaucauaauggacucugu

SEQ ID NO: 433133 - RNA, 19 nt, Homo sapiens
  misc_RNA (1)...(19): siRNA sense strand
caaaccugaccacagaauu

SEQ ID NO: 433134 - RNA, 19 nt, Homo sapiens
  misc_RNA (1)...(19): siRNA sense strand
cggaggaugaugaugauga

SEQ ID NO: 433135 - RNA, 19 nt, Homo sapiens
  misc_RNA (1)...(19): siRNA sense strand
ggacauccccagaaaagau

SEQ ID NO: 433136 - RNA, 19 nt, Homo sapiens
  misc_RNA (1)...(19): siRNA sense strand
gaauuggaggcuacaaggu

SEQ ID NO: 433137 - RNA, 19 nt, Homo sapiens
  misc_RNA (1)...(19): siRNA sense strand
acucuguggugcccucuga

SEQ ID NO: 433138 - RNA, 19 nt, Homo sapiens
  misc_RNA (1)...(19): siRNA sense strand
ccuggagcaucauaaugga

SEQ ID NO: 433139 - RNA, 19 nt, Homo sapiens
  misc_RNA (1)...(19): siRNA sense strand
ccaccuggagcaucauaau

SEQ ID NO: 433140 - RNA, 19 nt, Homo sapiens
  misc_RNA (1)...(19): siRNA sense strand
aaacagauaacaccaaacc

SEQ ID NO: 433141 - RNA, 19 nt, Homo sapiens
  misc_RNA (1)...(19): siRNA sense strand
aggaugaugaugaugauga

SEQ ID NO: 433142 - RNA, 19 nt, Homo sapiens
  misc_RNA (1)...(19): siRNA sense strand
aggagaaagaaacagauaa

SEQ ID NO: 433143 - RNA, 19 nt, Homo sapiens
  misc_RNA (1)...(19): siRNA sense strand
agaaacagauaacaccaaa

SEQ ID NO: 433144 - RNA, 19 nt, Homo sapiens
  misc_RNA (1)...(19): siRNA sense strand
cagaaaagauggaaaagaa

SEQ ID NO: 433145 - RNA, 19 nt, Homo sapiens
  misc_RNA (1)...(19): siRNA sense strand
gaggagaaagaaacagaua

SEQ ID NO: 433146 - RNA, 19 nt, Homo sapiens
  misc_RNA (1)...(19): siRNA sense strand
ggaggaugaugaugaugau

SEQ ID NO: 433147 - RNA, 19 nt, Homo sapiens
  misc_RNA (1)...(19): siRNA sense strand
gaugaugacuccucuucag

SEQ ID NO: 433148 - RNA, 19 nt, Homo sapiens
  misc_RNA (1)...(19): siRNA sense strand
auucaaaccugaccacaga

SEQ ID NO: 433149 - RNA, 19 nt, Homo sapiens
  misc_RNA (1)...(19): siRNA sense strand
ggaugaugaugaugaugau

SEQ ID NO: 433150 - RNA, 19 nt, Homo sapiens
  misc_RNA (1)...(19): siRNA sense strand
cagauaacaccaaaccaaa

SEQ ID NO: 433151 - RNA, 19 nt, Homo sapiens
  misc_RNA (1)...(19): siRNA sense strand
ggagaaagaaacagauaac

SEQ ID NO: 433152 - RNA, 19 nt, Homo sapiens
  misc_RNA (1)...(19): siRNA sense strand
gaggcuacaagguccguua

SEQ ID NO: 433153 - RNA, 19 nt, Homo sapiens
  misc_RNA (1)...(19): siRNA sense strand
acacugcgcugguugaaaa

SEQ ID NO: 433154 - RNA, 19 nt, Homo sapiens
  misc_RNA (1)...(19): siRNA sense strand
aaaccugaccacagaauug

SEQ ID NO: 433155 - RNA, 19 nt, Homo sapiens
  misc_RNA (1)...(19): siRNA sense strand
acagauaacaccaaaccaa

SEQ ID NO: 433156 - RNA, 19 nt, Homo sapiens
  misc_RNA (1)...(19): siRNA sense strand
gcuacaagguccguuaugc

SEQ ID NO: 433157 - RNA, 19 nt, Homo sapiens
  misc_RNA (1)...(19): siRNA sense strand
gagaaagaaacagauaaca

SEQ ID NO: 433158 - RNA, 19 nt, Homo sapiens
  misc_RNA (1)...(19): siRNA sense strand
cagaggagaaagaaacaga

SEQ ID NO: 433159 - RNA, 19 nt, Homo sapiens
  misc_RNA (1)...(19): siRNA sense strand
gcaucauaauggacucugu

SEQ ID NO: 433160 - RNA, 19 nt, Homo sapiens
  misc_RNA (1)...(19): siRNA sense strand
caaaccugaccacagaauu

SEQ ID NO: 433161 - RNA, 19 nt, Homo sapiens
  misc_RNA (1)...(19): siRNA sense strand
cggaggaugaugaugauga

SEQ ID NO: 433162 - RNA, 19 nt, Homo sapiens
  misc_RNA (1)...(19): siRNA sense strand
ggacauccccagaaaagau

SEQ ID NO: 433163 - RNA, 19 nt, Homo sapiens
  misc_RNA (1)...(19): siRNA sense strand
gaauuggaggcuacaaggu

SEQ ID NO: 433164 - RNA, 19 nt, Homo sapiens
  misc_RNA (1)...(19): siRNA sense strand
acucuguggugcccucuga

SEQ ID NO: 433165 - RNA, 19 nt, Homo sapiens
  misc_RNA (1)...(19): siRNA sense strand
ccuggagcaucauaaugga

SEQ ID NO: 433166 - RNA, 19 nt, Homo sapiens
  misc_RNA (1)...(19): siRNA sense strand
ccaccuggagcaucauaau

SEQ ID NO: 433167 - RNA, 19 nt, Homo sapiens
  misc_RNA (1)...(19): siRNA sense strand
aaacagauaacaccaaacc

SEQ ID NO: 433168 - RNA, 19 nt, Homo sapiens
  misc_RNA (1)...(19): siRNA sense strand
aggaugaugaugaugauga

SEQ ID NO: 433169 - RNA, 19 nt, Homo sapiens
  misc_RNA (1)...(19): siRNA sense strand
aggagaaagaaacagauaa

SEQ ID NO: 433170 - RNA, 19 nt, Homo sapiens
  misc_RNA (1)...(19): siRNA sense strand
agaaacagauaacaccaaa

SEQ ID NO: 433171 - RNA, 19 nt, Homo sapiens
  misc_RNA (1)...(19): siRNA sense strand
cagaaaagauggaaaagaa

SEQ ID NO: 433172 - RNA, 19 nt, Homo sapiens
  misc_RNA (1)...(19): siRNA sense strand
gaggagaaagaaacagaua

SEQ ID NO: 433173 - RNA, 19 nt, Homo sapiens
  misc_RNA (1)...(19): siRNA sense strand
ggaggaugaugaugaugau

SEQ ID NO: 433174 - RNA, 19 nt, Homo sapiens
  misc_RNA (1)...(19): siRNA sense strand
gaugaugacuccucuucag

SEQ ID NO: 433175 - RNA, 19 nt, Homo sapiens
  misc_RNA (1)...(19): siRNA sense strand
auucaaaccugaccacaga

SEQ ID NO: 433176 - RNA, 19 nt, Homo sapiens
  misc_RNA (1)...(19): siRNA sense strand
ggaugaugaugaugaugau

SEQ ID NO: 433177 - RNA, 19 nt, Homo sapiens
  misc_RNA (1)...(19): siRNA sense strand
cagauaacaccaaaccaaa

SEQ ID NO: 433178 - RNA, 19 nt, Homo sapiens
  misc_RNA (1)...(19): siRNA sense strand
ggagaaagaaacagauaac

SEQ ID NO: 433179 - RNA, 19 nt, Homo sapiens
  misc_RNA (1)...(19): siRNA sense strand
gaggcuacaagguccguua

SEQ ID NO: 433180 - RNA, 19 nt, Homo sapiens
  misc_RNA (1)...(19): siRNA sense strand
acacugcgcugguugaaaa

SEQ ID NO: 433181 - RNA, 19 nt, Homo sapiens
  misc_RNA (1)...(19): siRNA sense strand
aaaccugaccacagaauug

SEQ ID NO: 433182 - RNA, 19 nt, Homo sapiens
  misc_RNA (1)...(19): siRNA sense strand
acagauaacaccaaaccaa

SEQ ID NO: 433183 - RNA, 19 nt, Homo sapiens
  misc_RNA (1)...(19): siRNA sense strand
gcuacaagguccguuaugc

SEQ ID NO: 433184 - RNA, 19 nt, Homo sapiens
  misc_RNA (1)...(19): siRNA sense strand
gagaaagaaacagauaaca

SEQ ID NO: 433185 - RNA, 19 nt, Homo sapiens
  misc_RNA (1)...(19): siRNA sense strand
cagaggagaaagaaacaga

SEQ ID NO: 433186 - RNA, 19 nt, Homo sapiens
  misc_RNA (1)...(19): siRNA sense strand
gcaucauaauggacucugu

SEQ ID NO: 433187 - RNA, 19 nt, Homo sapiens
  misc_RNA (1)...(19): siRNA sense strand
caaaccugaccacagaauu

SEQ ID NO: 433188 - RNA, 19 nt, Homo sapiens
  misc_RNA (1)...(19): siRNA sense strand
cggaggaugaugaugauga

SEQ ID NO: 433189 - RNA, 19 nt, Homo sapiens
  misc_RNA (1)...(19): siRNA sense strand
ggacauccccagaaaagau

SEQ ID NO: 433190 - RNA, 19 nt, Homo sapiens
  misc_RNA (1)...(19): siRNA sense strand
gaauuggaggcuacaaggu

SEQ ID NO: 433191 - RNA, 19 nt, Homo sapiens
  misc_RNA (1)...(19): siRNA sense strand
acucuguggugcccucuga

SEQ ID NO: 433192 - RNA, 19 nt, Homo sapiens
  misc_RNA (1)...(19): siRNA sense strand
ccuggagcaucauaaugga

SEQ ID NO: 433193 - RNA, 19 nt, Homo sapiens
  misc_RNA (1)...(19): siRNA sense strand
ccaccuggagcaucauaau

SEQ ID NO: 433194 - RNA, 19 nt, Homo sapiens
  misc_RNA (1)...(19): siRNA sense strand
aaacagauaacaccaaacc

SEQ ID NO: 433195 - RNA, 19 nt, Homo sapiens
  misc_RNA (1)...(19): siRNA sense strand
aggaugaugaugaugauga

SEQ ID NO: 433196 - RNA, 19 nt, Homo sapiens
  misc_RNA (1)...(19): siRNA sense strand
aggagaaagaaacagauaa

SEQ ID NO: 433197 - RNA, 19 nt, Homo sapiens
  misc_RNA (1)...(19): siRNA sense strand
agaaacagauaacaccaaa

SEQ ID NO: 433198 - RNA, 19 nt, Homo sapiens
  misc_RNA (1)...(19): siRNA sense strand
cagaaaagauggaaaagaa

SEQ ID NO: 433199 - RNA, 19 nt, Homo sapiens
  misc_RNA (1)...(19): siRNA sense strand
gaggagaaagaaacagaua

SEQ ID NO: 433200 - RNA, 19 nt, Homo sapiens
  misc_RNA (1)...(19): siRNA sense strand
ggaggaugaugaugaugau

SEQ ID NO: 433201 - RNA, 19 nt, Homo sapiens
  misc_RNA (1)...(19): siRNA sense strand
gaugaugacuccucuucag

SEQ ID NO: 433202 - RNA, 19 nt, Homo sapiens
  misc_RNA (1)...(19): siRNA sense strand
auucaaaccugaccacaga

SEQ ID NO: 433203 - RNA, 19 nt, Homo sapiens
  misc_RNA (1)...(19): siRNA sense strand
ggaugaugaugaugaugau

SEQ ID NO: 433204 - RNA, 19 nt, Homo sapiens
  misc_RNA (1)...(19): siRNA sense strand
cagauaacaccaaaccaaa

SEQ ID NO: 433205 - RNA, 19 nt, Homo sapiens
  misc_RNA (1)...(19): siRNA sense strand
ggagaaagaaacagauaac

SEQ ID NO: 433206 - RNA, 19 nt, Homo sapiens
  misc_RNA (1)...(19): siRNA sense strand
gaggcuacaagguccguua

SEQ ID NO: 433207 - RNA, 19 nt, Homo sapiens
  misc_RNA (1)...(19): siRNA sense strand
acacugcgcugguugaaaa

SEQ ID NO: 433208 - RNA, 19 nt, Homo sapiens
  misc_RNA (1)...(19): siRNA sense strand
aaaccugaccacagaauug

SEQ ID NO: 433209 - RNA, 19 nt, Homo sapiens
  misc_RNA (1)...(19): siRNA sense strand
acagauaacaccaaaccaa

SEQ ID NO: 433210 - RNA, 19 nt, Homo sapiens
  misc_RNA (1)...(19): siRNA sense strand
gcuacaagguccguuaugc

SEQ ID NO: 433211 - RNA, 19 nt, Homo sapiens
  misc_RNA (1)...(19): siRNA sense strand
gagaaagaaacagauaaca

SEQ ID NO: 433212 - RNA, 19 nt, Homo sapiens
  misc_RNA (1)...(19): siRNA sense strand
cagaggagaaagaaacaga

SEQ ID NO: 433213 - RNA, 19 nt, Homo sapiens
  misc_RNA (1)...(19): siRNA sense strand
gcaucauaauggacucugu

SEQ ID NO: 433214 - RNA, 19 nt, Homo sapiens
  misc_RNA (1)...(19): siRNA sense strand
caaaccugaccacagaauu

SEQ ID NO: 433215 - RNA, 19 nt, Homo sapiens
  misc_RNA (1)...(19): siRNA sense strand
cggaggaugaugaugauga

SEQ ID NO: 433216 - RNA, 19 nt, Homo sapiens
  misc_RNA (1)...(19): siRNA sense strand
ggacauccccagaaaagau

SEQ ID NO: 433217 - RNA, 19 nt, Homo sapiens
  misc_RNA (1)...(19): siRNA sense strand
gaauuggaggcuacaaggu

SEQ ID NO: 433218 - RNA, 19 nt, Homo sapiens
  misc_RNA (1)...(19): siRNA sense strand
acucuguggugcccucuga

SEQ ID NO: 433219 - RNA, 19 nt, Homo sapiens
  misc_RNA (1)...(19): siRNA sense strand
ccuggagcaucauaaugga

SEQ ID NO: 433220 - RNA, 19 nt, Homo sapiens
  misc_RNA (1)...(19): siRNA sense strand
ccaccuggagcaucauaau

SEQ ID NO: 433221 - RNA, 19 nt, Homo sapiens
  misc_RNA (1)...(19): siRNA sense strand
aaacagauaacaccaaacc

SEQ ID NO: 433222 - RNA, 19 nt, Homo sapiens
  misc_RNA (1)...(19): siRNA sense strand
aggaugaugaugaugauga

SEQ ID NO: 433223 - RNA, 19 nt, Homo sapiens
  misc_RNA (1)...(19): siRNA sense strand
aggagaaagaaacagauaa

SEQ ID NO: 433224 - RNA, 19 nt, Homo sapiens
  misc_RNA (1)...(19): siRNA sense strand
agaaacagauaacaccaaa

SEQ ID NO: 433225 - RNA, 19 nt, Homo sapiens
  misc_RNA (1)...(19): siRNA sense strand
cagaaaagauggaaaagaa

SEQ ID NO: 433226 - RNA, 19 nt, Homo sapiens
  misc_RNA (1)...(19): siRNA sense strand
gaggagaaagaaacagaua

SEQ ID NO: 433227 - RNA, 19 nt, Homo sapiens
  misc_RNA (1)...(19): siRNA sense strand
ggaggaugaugaugaugau

SEQ ID NO: 433228 - RNA, 19 nt, Homo sapiens
  misc_RNA (1)...(19): siRNA sense strand
gaugaugacuccucuucag

SEQ ID NO: 433229 - RNA, 19 nt, Homo sapiens
  misc_RNA (1)...(19): siRNA sense strand
auucaaaccugaccacaga

SEQ ID NO: 433230 - RNA, 19 nt, Homo sapiens
  misc_RNA (1)...(19): siRNA sense strand
ggaugaugaugaugaugau

SEQ ID NO: 433231 - RNA, 19 nt, Homo sapiens
  misc_RNA (1)...(19): siRNA sense strand
cagauaacaccaaaccaaa

SEQ ID NO: 433232 - RNA, 19 nt, Homo sapiens
  misc_RNA (1)...(19): siRNA sense strand
ggagaaagaaacagauaac

SEQ ID NO: 433233 - RNA, 19 nt, Homo sapiens
  misc_RNA (1)...(19): siRNA sense strand
gaggcuacaagguccguua

SEQ ID NO: 433234 - RNA, 19 nt, Homo sapiens
  misc_RNA (1)...(19): siRNA sense strand
acacugcgcugguugaaaa

SEQ ID NO: 433235 - RNA, 19 nt, Homo sapiens
  misc_RNA (1)...(19): siRNA sense strand
aaaccugaccacagaauug

SEQ ID NO: 433236 - RNA, 19 nt, Homo sapiens
  misc_RNA (1)...(19): siRNA sense strand
acagauaacaccaaaccaa

SEQ ID NO: 433237 - RNA, 19 nt, Homo sapiens
  misc_RNA (1)...(19): siRNA sense strand
gcuacaagguccguuaugc

SEQ ID NO: 433238 - RNA, 19 nt, Homo sapiens
  misc_RNA (1)...(19): siRNA sense strand
gagaaagaaacagauaaca

SEQ ID NO: 433239 - RNA, 19 nt, Homo sapiens
  misc_RNA (1)...(19): siRNA sense strand
cagaggagaaagaaacaga

SEQ ID NO: 433240 - RNA, 19 nt, Homo sapiens
  misc_RNA (1)...(19): siRNA sense strand
gcaucauaauggacucugu

SEQ ID NO: 433241 - RNA, 19 nt, Homo sapiens
  misc_RNA (1)...(19): siRNA sense strand
caaaccugaccacagaauu

SEQ ID NO: 433242 - RNA, 19 nt, Homo sapiens
  misc_RNA (1)...(19): siRNA sense strand
cggaggaugaugaugauga

SEQ ID NO: 433243 - RNA, 19 nt, Homo sapiens
  misc_RNA (1)...(19): siRNA sense strand
ggacauccccagaaaagau

SEQ ID NO: 433244 - RNA, 19 nt, Homo sapiens
  misc_RNA (1)...(19): siRNA sense strand
gaauuggaggcuacaaggu

SEQ ID NO: 433245 - RNA, 19 nt, Homo sapiens
  misc_RNA (1)...(19): siRNA sense strand
acucuguggugcccucuga

SEQ ID NO: 433246 - RNA, 19 nt, Homo sapiens
  misc_RNA (1)...(19): siRNA sense strand
ccuggagcaucauaaugga

SEQ ID NO: 433247 - RNA, 19 nt, Homo sapiens
  misc_RNA (1)...(19): siRNA sense strand
ccaccuggagcaucauaau

SEQ ID NO: 433248 - RNA, 19 nt, Homo sapiens
  misc_RNA (1)...(19): siRNA sense strand
aaacagauaacaccaaacc

SEQ ID NO: 433249 - RNA, 19 nt, Homo sapiens
  misc_RNA (1)...(19): siRNA sense strand
aggaugaugaugaugauga

SEQ ID NO: 433250 - RNA, 19 nt, Homo sapiens
  misc_RNA (1)...(19): siRNA sense strand
aggagaaagaaacagauaa

SEQ ID NO: 433251 - RNA, 19 nt, Homo sapiens
  misc_RNA (1)...(19): siRNA sense strand
agaaacagauaacaccaaa

SEQ ID NO: 433252 - RNA, 19 nt, Homo sapiens
  misc_RNA (1)...(19): siRNA sense strand
cagaaaagauggaaaagaa

SEQ ID NO: 433253 - RNA, 19 nt, Homo sapiens
  misc_RNA (1)...(19): siRNA sense strand
gaggagaaagaaacagaua

SEQ ID NO: 433254 - RNA, 19 nt, Homo sapiens
  misc_RNA (1)...(19): siRNA sense strand
ggaggaugaugaugaugau

SEQ ID NO: 433255 - RNA, 19 nt, Homo sapiens
  misc_RNA (1)...(19): siRNA sense strand
gaugaugacuccucuucag

SEQ ID NO: 433256 - RNA, 19 nt, Homo sapiens
  misc_RNA (1)...(19): siRNA sense strand
auucaaaccugaccacaga

SEQ ID NO: 433257 - RNA, 19 nt, Homo sapiens
  misc_RNA (1)...(19): siRNA sense strand
ggaugaugaugaugaugau

SEQ ID NO: 433258 - RNA, 19 nt, Homo sapiens
  misc_RNA (1)...(19): siRNA sense strand
cagauaacaccaaaccaaa

SEQ ID NO: 433259 - RNA, 19 nt, Homo sapiens
  misc_RNA (1)...(19): siRNA sense strand
ggagaaagaaacagauaac

SEQ ID NO: 433260 - RNA, 19 nt, Homo sapiens
  misc_RNA (1)...(19): siRNA sense strand
gaggcuacaagguccguua

SEQ ID NO: 433261 - RNA, 19 nt, Homo sapiens
  misc_RNA (1)...(19): siRNA sense strand
acacugcgcugguugaaaa

SEQ ID NO: 433262 - RNA, 19 nt, Homo sapiens
  misc_RNA (1)...(19): siRNA sense strand
aaaccugaccacagaauug

SEQ ID NO: 433263 - RNA, 19 nt, Homo sapiens
  misc_RNA (1)...(19): siRNA sense strand
acagauaacaccaaaccaa

SEQ ID NO: 433264 - RNA, 19 nt, Homo sapiens
  misc_RNA (1)...(19): siRNA sense strand
gcuacaagguccguuaugc

SEQ ID NO: 433265 - RNA, 19 nt, Homo sapiens
  misc_RNA (1)...(19): siRNA sense strand
gagaaagaaacagauaaca

SEQ ID NO: 433266 - RNA, 19 nt, Homo sapiens
  misc_RNA (1)...(19): siRNA sense strand
cagaggagaaagaaacaga

SEQ ID NO: 433267 - RNA, 19 nt, Homo sapiens
  misc_RNA (1)...(19): siRNA sense strand
gcaucauaauggacucugu

SEQ ID NO: 433268 - RNA, 19 nt, Homo sapiens
  misc_RNA (1)...(19): siRNA sense strand
caaaccugaccacagaauu

SEQ ID NO: 433269 - RNA, 19 nt, Homo sapiens
  misc_RNA (1)...(19): siRNA sense strand
cggaggaugaugaugauga

SEQ ID NO: 433270 - RNA, 19 nt, Homo sapiens
  misc_RNA (1)...(19): siRNA sense strand
ggacauccccagaaaagau

SEQ ID NO: 433271 - RNA, 19 nt, Homo sapiens
  misc_RNA (1)...(19): siRNA sense strand
gaauuggaggcuacaaggu

SEQ ID NO: 433272 - RNA, 19 nt, Homo sapiens
  misc_RNA (1)...(19): siRNA sense strand
acucuguggugcccucuga

SEQ ID NO: 433273 - RNA, 19 nt, Homo sapiens
  misc_RNA (1)...(19): siRNA sense strand
ccuggagcaucauaaugga

SEQ ID NO: 433274 - RNA, 19 nt, Homo sapiens
  misc_RNA (1)...(19): siRNA sense strand
ccaccuggagcaucauaau

SEQ ID NO: 433275 - RNA, 19 nt, Homo sapiens
  misc_RNA (1)...(19): siRNA sense strand
aaacagauaacaccaaacc

SEQ ID NO: 433276 - RNA, 19 nt, Homo sapiens
  misc_RNA (1)...(19): siRNA sense strand
aggaugaugaugaugauga

SEQ ID NO: 433277 - RNA, 19 nt, Homo sapiens
  misc_RNA (1)...(19): siRNA sense strand
aggagaaagaaacagauaa

SEQ ID NO: 433278 - RNA, 19 nt, Homo sapiens
  misc_RNA (1)...(19): siRNA sense strand
agaaacagauaacaccaaa

SEQ ID NO: 433279 - RNA, 19 nt, Homo sapiens
  misc_RNA (1)...(19): siRNA sense strand
cagaaaagauggaaaagaa

SEQ ID NO: 433280 - RNA, 19 nt, Homo sapiens
  misc_RNA (1)...(19): siRNA sense strand
gaggagaaagaaacagaua

SEQ ID NO: 433281 - RNA, 19 nt, Homo sapiens
  misc_RNA (1)...(19): siRNA sense strand
ggaggaugaugaugaugau

SEQ ID NO: 433282 - RNA, 19 nt, Homo sapiens
  misc_RNA (1)...(19): siRNA sense strand
gaugaugacuccucuucag

SEQ ID NO: 433283 - RNA, 19 nt, Homo sapiens
  misc_RNA (1)...(19): siRNA sense strand
auucaaaccugaccacaga

SEQ ID NO: 433284 - RNA, 19 nt, Homo sapiens
  misc_RNA (1)...(19): siRNA sense strand
ggaugaugaugaugaugau

SEQ ID NO: 433285 - RNA, 19 nt, Homo sapiens
  misc_RNA (1)...(19): siRNA sense strand
cagauaacaccaaaccaaa

SEQ ID NO: 433286 - RNA, 19 nt, Homo sapiens
  misc_RNA (1)...(19): siRNA sense strand
ggagaaagaaacagauaac

SEQ ID NO: 433287 - RNA, 19 nt, Homo sapiens
  misc_RNA (1)...(19): siRNA sense strand
gaggcuacaagguccguua

SEQ ID NO: 433288 - RNA, 19 nt, Homo sapiens
  misc_RNA (1)...(19): siRNA sense strand
acacugcgcugguugaaaa

SEQ ID NO: 433289 - RNA, 19 nt, Homo sapiens
  misc_RNA (1)...(19): siRNA sense strand
aaaccugaccacagaauug

SEQ ID NO: 433290 - RNA, 19 nt, Homo sapiens
  misc_RNA (1)...(19): siRNA sense strand
acagauaacaccaaaccaa

SEQ ID NO: 433291 - RNA, 19 nt, Homo sapiens
  misc_RNA (1)...(19): siRNA sense strand
gcuacaagguccguuaugc

SEQ ID NO: 433292 - RNA, 19 nt, Homo sapiens
  misc_RNA (1)...(19): siRNA sense strand
gagaaagaaacagauaaca

SEQ ID NO: 433293 - RNA, 19 nt, Homo sapiens
  misc_RNA (1)...(19): siRNA sense strand
cagaggagaaagaaacaga

SEQ ID NO: 433294 - RNA, 19 nt, Homo sapiens
  misc_RNA (1)...(19): siRNA sense strand
gcaucauaauggacucugu

SEQ ID NO: 433295 - RNA, 19 nt, Homo sapiens
  misc_RNA (1)...(19): siRNA sense strand
caaaccugaccacagaauu

SEQ ID NO: 433296 - RNA, 19 nt, Homo sapiens
  misc_RNA (1)...(19): siRNA sense strand
cggaggaugaugaugauga

SEQ ID NO: 433297 - RNA, 19 nt, Homo sapiens
  misc_RNA (1)...(19): siRNA sense strand
ggacauccccagaaaagau

SEQ ID NO: 433298 - RNA, 19 nt, Homo sapiens
  misc_RNA (1)...(19): siRNA sense strand
gaauuggaggcuacaaggu

SEQ ID NO: 433299 - RNA, 19 nt, Homo sapiens
  misc_RNA (1)...(19): siRNA sense strand
acucuguggugcccucuga

SEQ ID NO: 433300 - RNA, 19 nt, Homo sapiens
  misc_RNA (1)...(19): siRNA sense strand
ccuggagcaucauaaugga

SEQ ID NO: 433301 - RNA, 19 nt, Homo sapiens
  misc_RNA (1)...(19): siRNA sense strand
ccaccuggagcaucauaau

SEQ ID NO: 433302 - RNA, 19 nt, Homo sapiens
  misc_RNA (1)...(19): siRNA sense strand
aaacagauaacaccaaacc

SEQ ID NO: 433303 - RNA, 19 nt, Homo sapiens
  misc_RNA (1)...(19): siRNA sense strand
aggaugaugaugaugauga

SEQ ID NO: 433304 - RNA, 19 nt, Homo sapiens
  misc_RNA (1)...(19): siRNA sense strand
aggagaaagaaacagauaa

SEQ ID NO: 433305 - RNA, 19 nt, Homo sapiens
  misc_RNA (1)...(19): siRNA sense strand
agaaacagauaacaccaaa

SEQ ID NO: 433306 - RNA, 19 nt, Homo sapiens
  misc_RNA (1)...(19): siRNA sense strand
cagaaaagauggaaaagaa

SEQ ID NO: 433307 - RNA, 19 nt, Homo sapiens
  misc_RNA (1)...(19): siRNA sense strand
gaggagaaagaaacagaua

SEQ ID NO: 433308 - RNA, 19 nt, Homo sapiens
  misc_RNA (1)...(19): siRNA sense strand
ggaggaugaugaugaugau

SEQ ID NO: 433309 - RNA, 19 nt, Homo sapiens
  misc_RNA (1)...(19): siRNA sense strand
gaugaugacuccucuucag

SEQ ID NO: 433310 - RNA, 19 nt, Homo sapiens
  misc_RNA (1)...(19): siRNA sense strand
auucaaaccugaccacaga

SEQ ID NO: 433311 - RNA, 19 nt, Homo sapiens
  misc_RNA (1)...(19): siRNA sense strand
ggaugaugaugaugaugau

SEQ ID NO: 433312 - RNA, 19 nt, Homo sapiens
  misc_RNA (1)...(19): siRNA sense strand
cagauaacaccaaaccaaa

SEQ ID NO: 433313 - RNA, 19 nt, Homo sapiens
  misc_RNA (1)...(19): siRNA sense strand
ggagaaagaaacagauaac

SEQ ID NO: 433314 - RNA, 19 nt, Homo sapiens
  misc_RNA (1)...(19): siRNA sense strand
gaggcuacaagguccguua

SEQ ID NO: 433315 - RNA, 19 nt, Homo sapiens
  misc_RNA (1)...(19): siRNA sense strand
acacugcgcugguugaaaa

SEQ ID NO: 433316 - RNA, 19 nt, Homo sapiens
  misc_RNA (1)...(19): siRNA sense strand
aaaccugaccacagaauug

SEQ ID NO: 433317 - RNA, 19 nt, Homo sapiens
  misc_RNA (1)...(19): siRNA sense strand
acagauaacaccaaaccaa

SEQ ID NO: 433318 - RNA, 19 nt, Homo sapiens
  misc_RNA (1)...(19): siRNA sense strand
gcuacaagguccguuaugc

SEQ ID NO: 433319 - RNA, 19 nt, Homo sapiens
  misc_RNA (1)...(19): siRNA sense strand
gagaaagaaacagauaaca

SEQ ID NO: 433320 - RNA, 19 nt, Homo sapiens
  misc_RNA (1)...(19): siRNA sense strand
cagaggagaaagaaacaga

SEQ ID NO: 433321 - RNA, 19 nt, Homo sapiens
  misc_RNA (1)...(19): siRNA sense strand
gcaucauaauggacucugu

SEQ ID NO: 433322 - RNA, 19 nt, Homo sapiens
  misc_RNA (1)...(19): siRNA sense strand
caaaccugaccacagaauu

SEQ ID NO: 433323 - RNA, 19 nt, Homo sapiens
  misc_RNA (1)...(19): siRNA sense strand
cggaggaugaugaugauga

SEQ ID NO: 433324 - RNA, 19 nt, Homo sapiens
  misc_RNA (1)...(19): siRNA sense strand
ggacauccccagaaaagau

SEQ ID NO: 433325 - RNA, 19 nt, Homo sapiens
  misc_RNA (1)...(19): siRNA sense strand
gaauuggaggcuacaaggu

SEQ ID NO: 433326 - RNA, 19 nt, Homo sapiens
  misc_RNA (1)...(19): siRNA sense strand
acucuguggugcccucuga

SEQ ID NO: 433327 - RNA, 19 nt, Homo sapiens
  misc_RNA (1)...(19): siRNA sense strand
ccuggagcaucauaaugga

SEQ ID NO: 433328 - RNA, 19 nt, Homo sapiens
  misc_RNA (1)...(19): siRNA sense strand
ccaccuggagcaucauaau

SEQ ID NO: 433329 - RNA, 19 nt, Homo sapiens
  misc_RNA (1)...(19): siRNA sense strand
aaacagauaacaccaaacc

SEQ ID NO: 433330 - RNA, 19 nt, Homo sapiens
  misc_RNA (1)...(19): siRNA sense strand
aggaugaugaugaugauga

SEQ ID NO: 433331 - RNA, 19 nt, Homo sapiens
  misc_RNA (1)...(19): siRNA sense strand
aggagaaagaaacagauaa

SEQ ID NO: 433332 - RNA, 19 nt, Homo sapiens
  misc_RNA (1)...(19): siRNA sense strand
agaaacagauaacaccaaa

SEQ ID NO: 433333 - RNA, 19 nt, Homo sapiens
  misc_RNA (1)...(19): siRNA sense strand
cagaaaagauggaaaagaa

SEQ ID NO: 433334 - RNA, 19 nt, Homo sapiens
  misc_RNA (1)...(19): siRNA sense strand
gaggagaaagaaacagaua

SEQ ID NO: 433335 - RNA, 19 nt, Homo sapiens
  misc_RNA (1)...(19): siRNA sense strand
ggaggaugaugaugaugau

SEQ ID NO: 433336 - RNA, 19 nt, Homo sapiens
  misc_RNA (1)...(19): siRNA sense strand
gaugaugacuccucuucag

SEQ ID NO: 433337 - RNA, 19 nt, Homo sapiens
  misc_RNA (1)...(19): siRNA sense strand
auucaaaccugaccacaga

SEQ ID NO: 433338 - RNA, 19 nt, Homo sapiens
  misc_RNA (1)...(19): siRNA sense strand
ggaugaugaugaugaugau

SEQ ID NO: 433339 - RNA, 19 nt, Homo sapiens
  misc_RNA (1)...(19): siRNA sense strand
cagauaacaccaaaccaaa

SEQ ID NO: 433340 - RNA, 19 nt, Homo sapiens
  misc_RNA (1)...(19): siRNA sense strand
ggagaaagaaacagauaac

SEQ ID NO: 433341 - RNA, 19 nt, Homo sapiens
  misc_RNA (1)...(19): siRNA sense strand
gaggcuacaagguccguua

SEQ ID NO: 433342 - RNA, 19 nt, Homo sapiens
  misc_RNA (1)...(19): siRNA sense strand
acacugcgcugguugaaaa

SEQ ID NO: 433343 - RNA, 19 nt, Homo sapiens
  misc_RNA (1)...(19): siRNA sense strand
aaaccugaccacagaauug

SEQ ID NO: 433344 - RNA, 19 nt, Homo sapiens
  misc_RNA (1)...(19): siRNA sense strand
acagauaacaccaaaccaa

SEQ ID NO: 433345 - RNA, 19 nt, Homo sapiens
  misc_RNA (1)...(19): siRNA sense strand
gcuacaagguccguuaugc

SEQ ID NO: 433346 - RNA, 19 nt, Homo sapiens
  misc_RNA (1)...(19): siRNA sense strand
gagaaagaaacagauaaca

SEQ ID NO: 433347 - RNA, 19 nt, Homo sapiens
  misc_RNA (1)...(19): siRNA sense strand
cagaggagaaagaaacaga

SEQ ID NO: 433348 - RNA, 19 nt, Homo sapiens
  misc_RNA (1)...(19): siRNA sense strand
gcaucauaauggacucugu

SEQ ID NO: 433349 - RNA, 19 nt, Homo sapiens
  misc_RNA (1)...(19): siRNA sense strand
caaaccugaccacagaauu

SEQ ID NO: 433350 - RNA, 19 nt, Homo sapiens
  misc_RNA (1)...(19): siRNA sense strand
cggaggaugaugaugauga

SEQ ID NO: 433351 - RNA, 19 nt, Homo sapiens
  misc_RNA (1)...(19): siRNA sense strand
ggacauccccagaaaagau

SEQ ID NO: 433352 - RNA, 19 nt, Homo sapiens
  misc_RNA (1)...(19): siRNA sense strand
gaauuggaggcuacaaggu

SEQ ID NO: 433353 - RNA, 19 nt, Homo sapiens
  misc_RNA (1)...(19): siRNA sense strand
acucuguggugcccucuga

SEQ ID NO: 433354 - RNA, 19 nt, Homo sapiens
  misc_RNA (1)...(19): siRNA sense strand
ccuggagcaucauaaugga

SEQ ID NO: 433355 - RNA, 19 nt, Homo sapiens
  misc_RNA (1)...(19): siRNA sense strand
ccaccuggagcaucauaau

SEQ ID NO: 433356 - RNA, 19 nt, Homo sapiens
  misc_RNA (1)...(19): siRNA sense strand
aaacagauaacaccaaacc

SEQ ID NO: 433357 - RNA, 19 nt, Homo sapiens
  misc_RNA (1)...(19): siRNA sense strand
aggaugaugaugaugauga

SEQ ID NO: 433358 - RNA, 19 nt, Homo sapiens
  misc_RNA (1)...(19): siRNA sense strand
aggagaaagaaacagauaa

SEQ ID NO: 433359 - RNA, 19 nt, Homo sapiens
  misc_RNA (1)...(19): siRNA sense strand
agaaacagauaacaccaaa

SEQ ID NO: 433360 - RNA, 19 nt, Homo sapiens
  misc_RNA (1)...(19): siRNA sense strand
cagaaaagauggaaaagaa

SEQ ID NO: 433361 - RNA, 19 nt, Homo sapiens
  misc_RNA (1)...(19): siRNA sense strand
gaggagaaagaaacagaua

SEQ ID NO: 433362 - RNA, 19 nt, Homo sapiens
  misc_RNA (1)...(19): siRNA sense strand
ggaggaugaugaugaugau

SEQ ID NO: 433363 - RNA, 19 nt, Homo sapiens
  misc_RNA (1)...(19): siRNA sense strand
gaugaugacuccucuucag

SEQ ID NO: 433364 - RNA, 19 nt, Homo sapiens
  misc_RNA (1)...(19): siRNA sense strand
auucaaaccugaccacaga

SEQ ID NO: 433365 - RNA, 19 nt, Homo sapiens
  misc_RNA (1)...(19): siRNA sense strand
ggaugaugaugaugaugau

SEQ ID NO: 433366 - RNA, 19 nt, Homo sapiens
  misc_RNA (1)...(19): siRNA sense strand
cagauaacaccaaaccaaa

SEQ ID NO: 433367 - RNA, 19 nt, Homo sapiens
  misc_RNA (1)...(19): siRNA sense strand
ggagaaagaaacagauaac

SEQ ID NO: 433368 - RNA, 19 nt, Homo sapiens
  misc_RNA (1)...(19): siRNA sense strand
gaggcuacaagguccguua

SEQ ID NO: 433369 - RNA, 19 nt, Homo sapiens
  misc_RNA (1)...(19): siRNA sense strand
acacugcgcugguugaaaa

SEQ ID NO: 433370 - RNA, 19 nt, Homo sapiens
  misc_RNA (1)...(19): siRNA sense strand
aaaccugaccacagaauug

SEQ ID NO: 433371 - RNA, 19 nt, Homo sapiens
  misc_RNA (1)...(19): siRNA sense strand
acagauaacaccaaaccaa

SEQ ID NO: 433372 - RNA, 19 nt, Homo sapiens
  misc_RNA (1)...(19): siRNA sense strand
gcuacaagguccguuaugc

SEQ ID NO: 433373 - RNA, 19 nt, Homo sapiens
  misc_RNA (1)...(19): siRNA sense strand
gagaaagaaacagauaaca

SEQ ID NO: 433374 - RNA, 19 nt, Homo sapiens
  misc_RNA (1)...(19): siRNA sense strand
cagaggagaaagaaacaga

SEQ ID NO: 433375 - RNA, 19 nt, Homo sapiens
  misc_RNA (1)...(19): siRNA sense strand
gcaucauaauggacucugu

SEQ ID NO: 433376 - RNA, 19 nt, Homo sapiens
  misc_RNA (1)...(19): siRNA sense strand
caaaccugaccacagaauu

SEQ ID NO: 433377 - RNA, 19 nt, Homo sapiens
  misc_RNA (1)...(19): siRNA sense strand
cggaggaugaugaugauga

SEQ ID NO: 433378 - RNA, 19 nt, Homo sapiens
  misc_RNA (1)...(19): siRNA sense strand
ggacauccccagaaaagau

SEQ ID NO: 433379 - RNA, 19 nt, Homo sapiens
  misc_RNA (1)...(19): siRNA sense strand
gaauuggaggcuacaaggu

SEQ ID NO: 433380 - RNA, 19 nt, Homo sapiens
  misc_RNA (1)...(19): siRNA sense strand
acucuguggugcccucuga

SEQ ID NO: 433381 - RNA, 19 nt, Homo sapiens
  misc_RNA (1)...(19): siRNA sense strand
ccuggagcaucauaaugga

SEQ ID NO: 433382 - RNA, 19 nt, Homo sapiens
  misc_RNA (1)...(19): siRNA sense strand
ccaccuggagcaucauaau

SEQ ID NO: 433383 - RNA, 19 nt, Homo sapiens
  misc_RNA (1)...(19): siRNA sense strand
aaacagauaacaccaaacc

SEQ ID NO: 433384 - RNA, 19 nt, Homo sapiens
  misc_RNA (1)...(19): siRNA sense strand
aggaugaugaugaugauga

SEQ ID NO: 433385 - RNA, 19 nt, Homo sapiens
  misc_RNA (1)...(19): siRNA sense strand
aggagaaagaaacagauaa

SEQ ID NO: 433386 - RNA, 19 nt, Homo sapiens
  misc_RNA (1)...(19): siRNA sense strand
agaaacagauaacaccaaa

SEQ ID NO: 433387 - RNA, 19 nt, Homo sapiens
  misc_RNA (1)...(19): siRNA sense strand
cagaaaagauggaaaagaa

SEQ ID NO: 433388 - RNA, 19 nt, Homo sapiens
  misc_RNA (1)...(19): siRNA sense strand
gaggagaaagaaacagaua

SEQ ID NO: 433389 - RNA, 19 nt, Homo sapiens
  misc_RNA (1)...(19): siRNA sense strand
ggaggaugaugaugaugau

SEQ ID NO: 433390 - RNA, 19 nt, Homo sapiens
  misc_RNA (1)...(19): siRNA sense strand
gaugaugacuccucuucag

SEQ ID NO: 433391 - RNA, 19 nt, Homo sapiens
  misc_RNA (1)...(19): siRNA sense strand
auucaaaccugaccacaga

SEQ ID NO: 433392 - RNA, 19 nt, Homo sapiens
  misc_RNA (1)...(19): siRNA sense strand
ggaugaugaugaugaugau

SEQ ID NO: 433393 - RNA, 19 nt, Homo sapiens
  misc_RNA (1)...(19): siRNA sense strand
cagauaacaccaaaccaaa

SEQ ID NO: 433394 - RNA, 19 nt, Homo sapiens
  misc_RNA (1)...(19): siRNA sense strand
ggagaaagaaacagauaac

SEQ ID NO: 433395 - RNA, 19 nt, Homo sapiens
  misc_RNA (1)...(19): siRNA sense strand
gaggcuacaagguccguua

SEQ ID NO: 433396 - RNA, 19 nt, Homo sapiens
  misc_RNA (1)...(19): siRNA sense strand
acacugcgcugguugaaaa

SEQ ID NO: 433397 - RNA, 19 nt, Homo sapiens
  misc_RNA (1)...(19): siRNA sense strand
aaaccugaccacagaauug

SEQ ID NO: 433398 - RNA, 19 nt, Homo sapiens
  misc_RNA (1)...(19): siRNA sense strand
acagauaacaccaaaccaa

SEQ ID NO: 433399 - RNA, 19 nt, Homo sapiens
  misc_RNA (1)...(19): siRNA sense strand
gcuacaagguccguuaugc

SEQ ID NO: 433400 - RNA, 19 nt, Homo sapiens
  misc_RNA (1)...(19): siRNA sense strand
gagaaagaaacagauaaca

SEQ ID NO: 433401 - RNA, 19 nt, Homo sapiens
  misc_RNA (1)...(19): siRNA sense strand
cagaggagaaagaaacaga

SEQ ID NO: 433402 - RNA, 19 nt, Homo sapiens
  misc_RNA (1)...(19): siRNA sense strand
gcaucauaauggacucugu

SEQ ID NO: 433403 - RNA, 19 nt, Homo sapiens
  misc_RNA (1)...(19): siRNA sense strand
caaaccugaccacagaauu

SEQ ID NO: 433404 - RNA, 19 nt, Homo sapiens
  misc_RNA (1)...(19): siRNA sense strand
cggaggaugaugaugauga

SEQ ID NO: 433405 - RNA, 19 nt, Homo sapiens
  misc_RNA (1)...(19): siRNA sense strand
ggacauccccagaaaagau

SEQ ID NO: 433406 - RNA, 19 nt, Homo sapiens
  misc_RNA (1)...(19): siRNA sense strand
gaauuggaggcuacaaggu

SEQ ID NO: 433407 - RNA, 19 nt, Homo sapiens
  misc_RNA (1)...(19): siRNA sense strand
acucuguggugcccucuga

SEQ ID NO: 433408 - RNA, 19 nt, Homo sapiens
  misc_RNA (1)...(19): siRNA sense strand
ccuggagcaucauaaugga

SEQ ID NO: 433409 - RNA, 19 nt, Homo sapiens
  misc_RNA (1)...(19): siRNA sense strand
ccaccuggagcaucauaau

SEQ ID NO: 433410 - RNA, 19 nt, Homo sapiens
  misc_RNA (1)...(19): siRNA sense strand
aaacagauaacaccaaacc

SEQ ID NO: 433411 - RNA, 19 nt, Homo sapiens
  misc_RNA (1)...(19): siRNA sense strand
aggaugaugaugaugauga

SEQ ID NO: 433412 - RNA, 19 nt, Homo sapiens
  misc_RNA (1)...(19): siRNA sense strand
aggagaaagaaacagauaa

SEQ ID NO: 433413 - RNA, 19 nt, Homo sapiens
  misc_RNA (1)...(19): siRNA sense strand
agaaacagauaacaccaaa

SEQ ID NO: 433414 - RNA, 19 nt, Homo sapiens
  misc_RNA (1)...(19): siRNA sense strand
cagaaaagauggaaaagaa

SEQ ID NO: 433415 - RNA, 19 nt, Homo sapiens
  misc_RNA (1)...(19): siRNA sense strand
gaggagaaagaaacagaua

SEQ ID NO: 433416 - RNA, 19 nt, Homo sapiens
  misc_RNA (1)...(19): siRNA sense strand
ggaggaugaugaugaugau

SEQ ID NO: 433417 - RNA, 19 nt, Homo sapiens
  misc_RNA (1)...(19): siRNA sense strand
gaugaugacuccucuucag

SEQ ID NO: 433418 - RNA, 19 nt, Homo sapiens
  misc_RNA (1)...(19): siRNA sense strand
auucaaaccugaccacaga

SEQ ID NO: 433419 - RNA, 19 nt, Homo sapiens
  misc_RNA (1)...(19): siRNA sense strand
ggaugaugaugaugaugau

SEQ ID NO: 433420 - RNA, 19 nt, Homo sapiens
  misc_RNA (1)...(19): siRNA sense strand
cagauaacaccaaaccaaa

SEQ ID NO: 433421 - RNA, 19 nt, Homo sapiens
  misc_RNA (1)...(19): siRNA sense strand
ggagaaagaaacagauaac

SEQ ID NO: 433422 - RNA, 19 nt, Homo sapiens
  misc_RNA (1)...(19): siRNA sense strand
gaggcuacaagguccguua

SEQ ID NO: 433423 - RNA, 19 nt, Homo sapiens
  misc_RNA (1)...(19): siRNA sense strand
acacugcgcugguugaaaa

SEQ ID NO: 433424 - RNA, 19 nt, Homo sapiens
  misc_RNA (1)...(19): siRNA sense strand
aaaccugaccacagaauug

SEQ ID NO: 433425 - RNA, 19 nt, Homo sapiens
  misc_RNA (1)...(19): siRNA sense strand
acagauaacaccaaaccaa

SEQ ID NO: 433426 - RNA, 19 nt, Homo sapiens
  misc_RNA (1)...(19): siRNA sense strand
gcuacaagguccguuaugc

SEQ ID NO: 433427 - RNA, 19 nt, Homo sapiens
  misc_RNA (1)...(19): siRNA sense strand
gagaaagaaacagauaaca

SEQ ID NO: 433428 - RNA, 19 nt, Homo sapiens
  misc_RNA (1)...(19): siRNA sense strand
cagaggagaaagaaacaga

SEQ ID NO: 433429 - RNA, 19 nt, Homo sapiens
  misc_RNA (1)...(19): siRNA sense strand
gcaucauaauggacucugu

SEQ ID NO: 433430 - RNA, 19 nt, Homo sapiens
  misc_RNA (1)...(19): siRNA sense strand
caaaccugaccacagaauu

SEQ ID NO: 433431 - RNA, 19 nt, Homo sapiens
  misc_RNA (1)...(19): siRNA sense strand
cggaggaugaugaugauga

SEQ ID NO: 433432 - RNA, 19 nt, Homo sapiens
  misc_RNA (1)...(19): siRNA sense strand
ggacauccccagaaaagau

SEQ ID NO: 433433 - RNA, 19 nt, Homo sapiens
  misc_RNA (1)...(19): siRNA sense strand
gaauuggaggcuacaaggu

SEQ ID NO: 433434 - RNA, 19 nt, Homo sapiens
  misc_RNA (1)...(19): siRNA sense strand
acucuguggugcccucuga

SEQ ID NO: 433435 - RNA, 19 nt, Homo sapiens
  misc_RNA (1)...(19): siRNA sense strand
ccuggagcaucauaaugga

SEQ ID NO: 433436 - RNA, 19 nt, Homo sapiens
  misc_RNA (1)...(19): siRNA sense strand
ccaccuggagcaucauaau

SEQ ID NO: 433437 - RNA, 19 nt, Homo sapiens
  misc_RNA (1)...(19): siRNA sense strand
aaacagauaacaccaaacc

SEQ ID NO: 433438 - RNA, 19 nt, Homo sapiens
  misc_RNA (1)...(19): siRNA sense strand
aggaugaugaugaugauga

SEQ ID NO: 433439 - RNA, 19 nt, Homo sapiens
  misc_RNA (1)...(19): siRNA sense strand
aggagaaagaaacagauaa

SEQ ID NO: 433440 - RNA, 19 nt, Homo sapiens
  misc_RNA (1)...(19): siRNA sense strand
agaaacagauaacaccaaa

SEQ ID NO: 433441 - RNA, 19 nt, Homo sapiens
  misc_RNA (1)...(19): siRNA sense strand
cagaaaagauggaaaagaa

SEQ ID NO: 433442 - RNA, 19 nt, Homo sapiens
  misc_RNA (1)...(19): siRNA sense strand
gaggagaaagaaacagaua

SEQ ID NO: 433443 - RNA, 19 nt, Homo sapiens
  misc_RNA (1)...(19): siRNA sense strand
ggaggaugaugaugaugau

SEQ ID NO: 433444 - RNA, 19 nt, Homo sapiens
  misc_RNA (1)...(19): siRNA sense strand
gaugaugacuccucuucag

SEQ ID NO: 433445 - RNA, 19 nt, Homo sapiens
  misc_RNA (1)...(19): siRNA sense strand
auucaaaccugaccacaga

SEQ ID NO: 433446 - RNA, 19 nt, Homo sapiens
  misc_RNA (1)...(19): siRNA sense strand
ggaugaugaugaugaugau

SEQ ID NO: 433447 - RNA, 19 nt, Homo sapiens
  misc_RNA (1)...(19): siRNA sense strand
cagauaacaccaaaccaaa

SEQ ID NO: 433448 - RNA, 19 nt, Homo sapiens
  misc_RNA (1)...(19): siRNA sense strand
ggagaaagaaacagauaac

SEQ ID NO: 433449 - RNA, 19 nt, Homo sapiens
  misc_RNA (1)...(19): siRNA sense strand
gaggcuacaagguccguua

SEQ ID NO: 433450 - RNA, 19 nt, Homo sapiens
  misc_RNA (1)...(19): siRNA sense strand
acacugcgcugguugaaaa

SEQ ID NO: 433451 - RNA, 19 nt, Homo sapiens
  misc_RNA (1)...(19): siRNA sense strand
aaaccugaccacagaauug

SEQ ID NO: 433452 - RNA, 19 nt, Homo sapiens
  misc_RNA (1)...(19): siRNA sense strand
acagauaacaccaaaccaa

SEQ ID NO: 433453 - RNA, 19 nt, Homo sapiens
  misc_RNA (1)...(19): siRNA sense strand
gcuacaagguccguuaugc

SEQ ID NO: 433454 - RNA, 19 nt, Homo sapiens
  misc_RNA (1)...(19): siRNA sense strand
gagaaagaaacagauaaca

SEQ ID NO: 433455 - RNA, 19 nt, Homo sapiens
  misc_RNA (1)...(19): siRNA sense strand
cagaggagaaagaaacaga

SEQ ID NO: 433456 - RNA, 19 nt, Homo sapiens
  misc_RNA (1)...(19): siRNA sense strand
gcaucauaauggacucugu

SEQ ID NO: 433457 - RNA, 19 nt, Homo sapiens
  misc_RNA (1)...(19): siRNA sense strand
caaaccugaccacagaauu

SEQ ID NO: 433458 - RNA, 19 nt, Homo sapiens
  misc_RNA (1)...(19): siRNA sense strand
cggaggaugaugaugauga

SEQ ID NO: 433459 - RNA, 19 nt, Homo sapiens
  misc_RNA (1)...(19): siRNA sense strand
ggacauccccagaaaagau

SEQ ID NO: 433460 - RNA, 19 nt, Homo sapiens
  misc_RNA (1)...(19): siRNA sense strand
gaauuggaggcuacaaggu

SEQ ID NO: 433461 - RNA, 19 nt, Homo sapiens
  misc_RNA (1)...(19): siRNA sense strand
acucuguggugcccucuga

SEQ ID NO: 433462 - RNA, 19 nt, Homo sapiens
  misc_RNA (1)...(19): siRNA sense strand
ccuggagcaucauaaugga

SEQ ID NO: 433463 - RNA, 19 nt, Homo sapiens
  misc_RNA (1)...(19): siRNA sense strand
ccaccuggagcaucauaau

SEQ ID NO: 433464 - RNA, 19 nt, Homo sapiens
  misc_RNA (1)...(19): siRNA sense strand
aaacagauaacaccaaacc

SEQ ID NO: 433465 - RNA, 19 nt, Homo sapiens
  misc_RNA (1)...(19): siRNA sense strand
aggaugaugaugaugauga

SEQ ID NO: 433466 - RNA, 19 nt, Homo sapiens
  misc_RNA (1)...(19): siRNA sense strand
aggagaaagaaacagauaa

SEQ ID NO: 433467 - RNA, 19 nt, Homo sapiens
  misc_RNA (1)...(19): siRNA sense strand
agaaacagauaacaccaaa

SEQ ID NO: 433468 - RNA, 19 nt, Homo sapiens
  misc_RNA (1)...(19): siRNA sense strand
cagaaaagauggaaaagaa

SEQ ID NO: 433469 - RNA, 19 nt, Homo sapiens
  misc_RNA (1)...(19): siRNA sense strand
gaggagaaagaaacagaua

SEQ ID NO: 433470 - RNA, 19 nt, Homo sapiens
  misc_RNA (1)...(19): siRNA sense strand
ggaggaugaugaugaugau

SEQ ID NO: 433471 - RNA, 19 nt, Homo sapiens
  misc_RNA (1)...(19): siRNA sense strand
gaugaugacuccucuucag

SEQ ID NO: 433472 - RNA, 19 nt, Homo sapiens
  misc_RNA (1)...(19): siRNA sense strand
auucaaaccugaccacaga

SEQ ID NO: 433473 - RNA, 19 nt, Homo sapiens
  misc_RNA (1)...(19): siRNA sense strand
ggaugaugaugaugaugau

SEQ ID NO: 433474 - RNA, 19 nt, Homo sapiens
  misc_RNA (1)...(19): siRNA sense strand
cagauaacaccaaaccaaa

SEQ ID NO: 433475 - RNA, 19 nt, Homo sapiens
  misc_RNA (1)...(19): siRNA sense strand
ggagaaagaaacagauaac

SEQ ID NO: 433476 - RNA, 19 nt, Homo sapiens
  misc_RNA (1)...(19): siRNA sense strand
gaggcuacaagguccguua

SEQ ID NO: 433477 - RNA, 19 nt, Homo sapiens
  misc_RNA (1)...(19): siRNA sense strand
acacugcgcugguugaaaa

SEQ ID NO: 433478 - RNA, 19 nt, Homo sapiens
  misc_RNA (1)...(19): siRNA sense strand
aaaccugaccacagaauug

SEQ ID NO: 433479 - RNA, 19 nt, Homo sapiens
  misc_RNA (1)...(19): siRNA sense strand
acagauaacaccaaaccaa

SEQ ID NO: 433480 - RNA, 19 nt, Homo sapiens
  misc_RNA (1)...(19): siRNA sense strand
gcuacaagguccguuaugc

SEQ ID NO: 433481 - RNA, 19 nt, Homo sapiens
  misc_RNA (1)...(19): siRNA sense strand
gagaaagaaacagauaaca

SEQ ID NO: 433482 - RNA, 19 nt, Homo sapiens
  misc_RNA (1)...(19): siRNA sense strand
cagaggagaaagaaacaga

SEQ ID NO: 433483 - RNA, 19 nt, Homo sapiens
  misc_RNA (1)...(19): siRNA sense strand
gcaucauaauggacucugu

SEQ ID NO: 433484 - RNA, 19 nt, Homo sapiens
  misc_RNA (1)...(19): siRNA sense strand
caaaccugaccacagaauu

SEQ ID NO: 433485 - RNA, 19 nt, Homo sapiens
  misc_RNA (1)...(19): siRNA sense strand
cggaggaugaugaugauga

SEQ ID NO: 433486 - RNA, 19 nt, Homo sapiens
  misc_RNA (1)...(19): siRNA sense strand
ggacauccccagaaaagau

SEQ ID NO: 433487 - RNA, 19 nt, Homo sapiens
  misc_RNA (1)...(19): siRNA sense strand
gaauuggaggcuacaaggu

SEQ ID NO: 433488 - RNA, 19 nt, Homo sapiens
  misc_RNA (1)...(19): siRNA sense strand
acucuguggugcccucuga

SEQ ID NO: 433489 - RNA, 19 nt, Homo sapiens
  misc_RNA (1)...(19): siRNA sense strand
ccuggagcaucauaaugga

SEQ ID NO: 433490 - RNA, 19 nt, Homo sapiens
  misc_RNA (1)...(19): siRNA sense strand
ccaccuggagcaucauaau

SEQ ID NO: 433491 - RNA, 19 nt, Homo sapiens
  misc_RNA (1)...(19): siRNA sense strand
aaacagauaacaccaaacc

SEQ ID NO: 433492 - RNA, 19 nt, Homo sapiens
  misc_RNA (1)...(19): siRNA sense strand
aggaugaugaugaugauga

SEQ ID NO: 433493 - RNA, 19 nt, Homo sapiens
  misc_RNA (1)...(19): siRNA sense strand
aggagaaagaaacagauaa

SEQ ID NO: 433494 - RNA, 19 nt, Homo sapiens
  misc_RNA (1)...(19): siRNA sense strand
agaaacagauaacaccaaa

SEQ ID NO: 433495 - RNA, 19 nt, Homo sapiens
  misc_RNA (1)...(19): siRNA sense strand
cagaaaagauggaaaagaa

SEQ ID NO: 433496 - RNA, 19 nt, Homo sapiens
  misc_RNA (1)...(19): siRNA sense strand
gaggagaaagaaacagaua

SEQ ID NO: 433497 - RNA, 19 nt, Homo sapiens
  misc_RNA (1)...(19): siRNA sense strand
ggaggaugaugaugaugau

SEQ ID NO: 433498 - RNA, 19 nt, Homo sapiens
  misc_RNA (1)...(19): siRNA sense strand
gaugaugacuccucuucag

SEQ ID NO: 433499 - RNA, 19 nt, Homo sapiens
  misc_RNA (1)...(19): siRNA sense strand
auucaaaccugaccacaga

SEQ ID NO: 433500 - RNA, 19 nt, Homo sapiens
  misc_RNA (1)...(19): siRNA sense strand
ggaugaugaugaugaugau

SEQ ID NO: 433501 - RNA, 19 nt, Homo sapiens
  misc_RNA (1)...(19): siRNA sense strand
cagauaacaccaaaccaaa

SEQ ID NO: 433502 - RNA, 19 nt, Homo sapiens
  misc_RNA (1)...(19): siRNA sense strand
ggagaaagaaacagauaac

SEQ ID NO: 433503 - RNA, 19 nt, Homo sapiens
  misc_RNA (1)...(19): siRNA sense strand
gaggcuacaagguccguua

SEQ ID NO: 433504 - RNA, 19 nt, Homo sapiens
  misc_RNA (1)...(19): siRNA sense strand
acacugcgcugguugaaaa

SEQ ID NO: 433505 - RNA, 19 nt, Homo sapiens
  misc_RNA (1)...(19): siRNA sense strand
aaaccugaccacagaauug

SEQ ID NO: 433506 - RNA, 19 nt, Homo sapiens
  misc_RNA (1)...(19): siRNA sense strand
acagauaacaccaaaccaa

SEQ ID NO: 433507 - RNA, 19 nt, Homo sapiens
  misc_RNA (1)...(19): siRNA sense strand
gcuacaagguccguuaugc

SEQ ID NO: 433508 - RNA, 19 nt, Homo sapiens
  misc_RNA (1)...(19): siRNA sense strand
gagaaagaaacagauaaca

SEQ ID NO: 433509 - RNA, 19 nt, Homo sapiens
  misc_RNA (1)...(19): siRNA sense strand
cagaggagaaagaaacaga

SEQ ID NO: 433510 - RNA, 19 nt, Homo sapiens
  misc_RNA (1)...(19): siRNA sense strand
gcaucauaauggacucugu

SEQ ID NO: 433511 - RNA, 19 nt, Homo sapiens
  misc_RNA (1)...(19): siRNA sense strand
caaaccugaccacagaauu

SEQ ID NO: 433512 - RNA, 19 nt, Homo sapiens
  misc_RNA (1)...(19): siRNA sense strand
cggaggaugaugaugauga

SEQ ID NO: 433513 - RNA, 19 nt, Homo sapiens
  misc_RNA (1)...(19): siRNA sense strand
ggacauccccagaaaagau

SEQ ID NO: 433514 - RNA, 19 nt, Homo sapiens
  misc_RNA (1)...(19): siRNA sense strand
gaauuggaggcuacaaggu

SEQ ID NO: 433515 - RNA, 19 nt, Homo sapiens
  misc_RNA (1)...(19): siRNA sense strand
acucuguggugcccucuga

SEQ ID NO: 433516 - RNA, 19 nt, Homo sapiens
  misc_RNA (1)...(19): siRNA sense strand
ccuggagcaucauaaugga

SEQ ID NO: 433517 - RNA, 19 nt, Homo sapiens
  misc_RNA (1)...(19): siRNA sense strand
ccaccuggagcaucauaau

SEQ ID NO: 433518 - RNA, 19 nt, Homo sapiens
  misc_RNA (1)...(19): siRNA sense strand
aaacagauaacaccaaacc

SEQ ID NO: 433519 - RNA, 19 nt, Homo sapiens
  misc_RNA (1)...(19): siRNA sense strand
aggaugaugaugaugauga

SEQ ID NO: 433520 - RNA, 19 nt, Homo sapiens
  misc_RNA (1)...(19): siRNA sense strand
aggagaaagaaacagauaa

SEQ ID NO: 433521 - RNA, 19 nt, Homo sapiens
  misc_RNA (1)...(19): siRNA sense strand
agaaacagauaacaccaaa

SEQ ID NO: 433522 - RNA, 19 nt, Homo sapiens
  misc_RNA (1)...(19): siRNA sense strand
cagaaaagauggaaaagaa

SEQ ID NO: 433523 - RNA, 19 nt, Homo sapiens
  misc_RNA (1)...(19): siRNA sense strand
gaggagaaagaaacagaua

SEQ ID NO: 433524 - RNA, 19 nt, Homo sapiens
  misc_RNA (1)...(19): siRNA sense strand
ggaggaugaugaugaugau

SEQ ID NO: 433525 - RNA, 19 nt, Homo sapiens
  misc_RNA (1)...(19): siRNA sense strand
gaugaugacuccucuucag

SEQ ID NO: 433526 - RNA, 19 nt, Homo sapiens
  misc_RNA (1)...(19): siRNA sense strand
auucaaaccugaccacaga

SEQ ID NO: 433527 - RNA, 19 nt, Homo sapiens
  misc_RNA (1)...(19): siRNA sense strand
ggaugaugaugaugaugau

SEQ ID NO: 433528 - RNA, 19 nt, Homo sapiens
  misc_RNA (1)...(19): siRNA sense strand
cagauaacaccaaaccaaa

SEQ ID NO: 433529 - RNA, 19 nt, Homo sapiens
  misc_RNA (1)...(19): siRNA sense strand
ggagaaagaaacagauaac

SEQ ID NO: 433530 - RNA, 19 nt, Homo sapiens
  misc_RNA (1)...(19): siRNA sense strand
gaggcuacaagguccguua

SEQ ID NO: 433531 - RNA, 19 nt, Homo sapiens
  misc_RNA (1)...(19): siRNA sense strand
acacugcgcugguugaaaa

SEQ ID NO: 433532 - RNA, 19 nt, Homo sapiens
  misc_RNA (1)...(19): siRNA sense strand
aaaccugaccacagaauug

SEQ ID NO: 433533 - RNA, 19 nt, Homo sapiens
  misc_RNA (1)...(19): siRNA sense strand
acagauaacaccaaaccaa

SEQ ID NO: 433534 - RNA, 19 nt, Homo sapiens
  misc_RNA (1)...(19): siRNA sense strand
gcuacaagguccguuaugc

SEQ ID NO: 433535 - RNA, 19 nt, Homo sapiens
  misc_RNA (1)...(19): siRNA sense strand
gagaaagaaacagauaaca

SEQ ID NO: 433536 - RNA, 19 nt, Homo sapiens
  misc_RNA (1)...(19): siRNA sense strand
cagaggagaaagaaacaga

SEQ ID NO: 433537 - RNA, 19 nt, Homo sapiens
  misc_RNA (1)...(19): siRNA sense strand
gcaucauaauggacucugu

SEQ ID NO: 433538 - RNA, 19 nt, Homo sapiens
  misc_RNA (1)...(19): siRNA sense strand
caaaccugaccacagaauu

SEQ ID NO: 433539 - RNA, 19 nt, Homo sapiens
  misc_RNA (1)...(19): siRNA sense strand
cggaggaugaugaugauga

SEQ ID NO: 433540 - RNA, 19 nt, Homo sapiens
  misc_RNA (1)...(19): siRNA sense strand
ggacauccccagaaaagau

SEQ ID NO: 433541 - RNA, 19 nt, Homo sapiens
  misc_RNA (1)...(19): siRNA sense strand
gaauuggaggcuacaaggu

SEQ ID NO: 433542 - RNA, 19 nt, Homo sapiens
  misc_RNA (1)...(19): siRNA sense strand
acucuguggugcccucuga

SEQ ID NO: 433543 - RNA, 19 nt, Homo sapiens
  misc_RNA (1)...(19): siRNA sense strand
ccuggagcaucauaaugga

SEQ ID NO: 433544 - RNA, 19 nt, Homo sapiens
  misc_RNA (1)...(19): siRNA sense strand
ccaccuggagcaucauaau

SEQ ID NO: 433545 - RNA, 19 nt, Homo sapiens
  misc_RNA (1)...(19): siRNA sense strand
aaacagauaacaccaaacc

SEQ ID NO: 433546 - RNA, 19 nt, Homo sapiens
  misc_RNA (1)...(19): siRNA sense strand
aggaugaugaugaugauga

SEQ ID NO: 433547 - RNA, 19 nt, Homo sapiens
  misc_RNA (1)...(19): siRNA sense strand
aggagaaagaaacagauaa

SEQ ID NO: 433548 - RNA, 19 nt, Homo sapiens
  misc_RNA (1)...(19): siRNA sense strand
agaaacagauaacaccaaa

SEQ ID NO: 433549 - RNA, 19 nt, Homo sapiens
  misc_RNA (1)...(19): siRNA sense strand
cagaaaagauggaaaagaa

SEQ ID NO: 433550 - RNA, 19 nt, Homo sapiens
  misc_RNA (1)...(19): siRNA sense strand
gaggagaaagaaacagaua

SEQ ID NO: 433551 - RNA, 19 nt, Homo sapiens
  misc_RNA (1)...(19): siRNA sense strand
ggaggaugaugaugaugau

SEQ ID NO: 433552 - RNA, 19 nt, Homo sapiens
  misc_RNA (1)...(19): siRNA sense strand
gaugaugacuccucuucag

SEQ ID NO: 433553 - RNA, 19 nt, Homo sapiens
  misc_RNA (1)...(19): siRNA sense strand
auucaaaccugaccacaga

SEQ ID NO: 433554 - RNA, 19 nt, Homo sapiens
  misc_RNA (1)...(19): siRNA sense strand
ggaugaugaugaugaugau

SEQ ID NO: 433555 - RNA, 19 nt, Homo sapiens
  misc_RNA (1)...(19): siRNA sense strand
cagauaacaccaaaccaaa

SEQ ID NO: 433556 - RNA, 19 nt, Homo sapiens
  misc_RNA (1)...(19): siRNA sense strand
ggagaaagaaacagauaac

SEQ ID NO: 433557 - RNA, 19 nt, Homo sapiens
  misc_RNA (1)...(19): siRNA sense strand
gaggcuacaagguccguua

SEQ ID NO: 433558 - RNA, 19 nt, Homo sapiens
  misc_RNA (1)...(19): siRNA sense strand
acacugcgcugguugaaaa

SEQ ID NO: 433559 - RNA, 19 nt, Homo sapiens
  misc_RNA (1)...(19): siRNA sense strand
aaaccugaccacagaauug

SEQ ID NO: 433560 - RNA, 19 nt, Homo sapiens
  misc_RNA (1)...(19): siRNA sense strand
acagauaacaccaaaccaa

SEQ ID NO: 433561 - RNA, 19 nt, Homo sapiens
  misc_RNA (1)...(19): siRNA sense strand
gcuacaagguccguuaugc

SEQ ID NO: 433562 - RNA, 19 nt, Homo sapiens
  misc_RNA (1)...(19): siRNA sense strand
gagaaagaaacagauaaca

SEQ ID NO: 433563 - RNA, 19 nt, Homo sapiens
  misc_RNA (1)...(19): siRNA sense strand
cagaggagaaagaaacaga

SEQ ID NO: 433564 - RNA, 19 nt, Homo sapiens
  misc_RNA (1)...(19): siRNA sense strand
gcaucauaauggacucugu

SEQ ID NO: 433565 - RNA, 19 nt, Homo sapiens
  misc_RNA (1)...(19): siRNA sense strand
caaaccugaccacagaauu

SEQ ID NO: 433566 - RNA, 19 nt, Homo sapiens
  misc_RNA (1)...(19): siRNA sense strand
cggaggaugaugaugauga

SEQ ID NO: 433567 - RNA, 19 nt, Homo sapiens
  misc_RNA (1)...(19): siRNA sense strand
ggacauccccagaaaagau

SEQ ID NO: 433568 - RNA, 19 nt, Homo sapiens
  misc_RNA (1)...(19): siRNA sense strand
gaauuggaggcuacaaggu

SEQ ID NO: 433569 - RNA, 19 nt, Homo sapiens
  misc_RNA (1)...(19): siRNA sense strand
acucuguggugcccucuga

SEQ ID NO: 433570 - RNA, 19 nt, Homo sapiens
  misc_RNA (1)...(19): siRNA sense strand
ccuggagcaucauaaugga

SEQ ID NO: 433571 - RNA, 19 nt, Homo sapiens
  misc_RNA (1)...(19): siRNA sense strand
ccaccuggagcaucauaau

SEQ ID NO: 433572 - RNA, 19 nt, Homo sapiens
  misc_RNA (1)...(19): siRNA sense strand
aaacagauaacaccaaacc

SEQ ID NO: 433573 - RNA, 19 nt, Homo sapiens
  misc_RNA (1)...(19): siRNA sense strand
aggaugaugaugaugauga

SEQ ID NO: 433574 - RNA, 19 nt, Homo sapiens
  misc_RNA (1)...(19): siRNA sense strand
aggagaaagaaacagauaa

SEQ ID NO: 433575 - RNA, 19 nt, Homo sapiens
  misc_RNA (1)...(19): siRNA sense strand
agaaacagauaacaccaaa

SEQ ID NO: 433576 - RNA, 19 nt, Homo sapiens
  misc_RNA (1)...(19): siRNA sense strand
cagaaaagauggaaaagaa

SEQ ID NO: 433577 - RNA, 19 nt, Homo sapiens
  misc_RNA (1)...(19): siRNA sense strand
gaggagaaagaaacagaua

SEQ ID NO: 433578 - RNA, 19 nt, Homo sapiens
  misc_RNA (1)...(19): siRNA sense strand
ggaggaugaugaugaugau

SEQ ID NO: 433579 - RNA, 19 nt, Homo sapiens
  misc_RNA (1)...(19): siRNA sense strand
gaugaugacuccucuucag

SEQ ID NO: 433580 - RNA, 19 nt, Homo sapiens
  misc_RNA (1)...(19): siRNA sense strand
auucaaaccugaccacaga

SEQ ID NO: 433581 - RNA, 19 nt, Homo sapiens
  misc_RNA (1)...(19): siRNA sense strand
ggaugaugaugaugaugau

SEQ ID NO: 433582 - RNA, 19 nt, Homo sapiens
  misc_RNA (1)...(19): siRNA sense strand
cagauaacaccaaaccaaa

SEQ ID NO: 433583 - RNA, 19 nt, Homo sapiens
  misc_RNA (1)...(19): siRNA sense strand
ggagaaagaaacagauaac

SEQ ID NO: 433584 - RNA, 19 nt, Homo sapiens
  misc_RNA (1)...(19): siRNA sense strand
gaggcuacaagguccguua

SEQ ID NO: 433585 - RNA, 19 nt, Homo sapiens
  misc_RNA (1)...(19): siRNA sense strand
acacugcgcugguugaaaa

SEQ ID NO: 433586 - RNA, 19 nt, Homo sapiens
  misc_RNA (1)...(19): siRNA sense strand
aaaccugaccacagaauug

SEQ ID NO: 433587 - RNA, 19 nt, Homo sapiens
  misc_RNA (1)...(19): siRNA sense strand
acagauaacaccaaaccaa

SEQ ID NO: 433588 - RNA, 19 nt, Homo sapiens
  misc_RNA (1)...(19): siRNA sense strand
gcuacaagguccguuaugc

SEQ ID NO: 433589 - RNA, 19 nt, Homo sapiens
  misc_RNA (1)...(19): siRNA sense strand
gagaaagaaacagauaaca

SEQ ID NO: 433590 - RNA, 19 nt, Homo sapiens
  misc_RNA (1)...(19): siRNA sense strand
cagaggagaaagaaacaga

SEQ ID NO: 433591 - RNA, 19 nt, Homo sapiens
  misc_RNA (1)...(19): siRNA sense strand
gcaucauaauggacucugu

SEQ ID NO: 433592 - RNA, 19 nt, Homo sapiens
  misc_RNA (1)...(19): siRNA sense strand
caaaccugaccacagaauu

SEQ ID NO: 433593 - RNA, 19 nt, Homo sapiens
  misc_RNA (1)...(19): siRNA sense strand
cggaggaugaugaugauga

SEQ ID NO: 433594 - RNA, 19 nt, Homo sapiens
  misc_RNA (1)...(19): siRNA sense strand
ggacauccccagaaaagau

SEQ ID NO: 433595 - RNA, 19 nt, Homo sapiens
  misc_RNA (1)...(19): siRNA sense strand
gaauuggaggcuacaaggu

SEQ ID NO: 433596 - RNA, 19 nt, Homo sapiens
  misc_RNA (1)...(19): siRNA sense strand
acucuguggugcccucuga

SEQ ID NO: 433597 - RNA, 19 nt, Homo sapiens
  misc_RNA (1)...(19): siRNA sense strand
ccuggagcaucauaaugga

SEQ ID NO: 433598 - RNA, 19 nt, Homo sapiens
  misc_RNA (1)...(19): siRNA sense strand
ccaccuggagcaucauaau

SEQ ID NO: 433599 - RNA, 19 nt, Homo sapiens
  misc_RNA (1)...(19): siRNA sense strand
aaacagauaacaccaaacc

SEQ ID NO: 433600 - RNA, 19 nt, Homo sapiens
  misc_RNA (1)...(19): siRNA sense strand
aggaugaugaugaugauga

SEQ ID NO: 433601 - RNA, 19 nt, Homo sapiens
  misc_RNA (1)...(19): siRNA sense strand
aggagaaagaaacagauaa

SEQ ID NO: 433602 - RNA, 19 nt, Homo sapiens
  misc_RNA (1)...(19): siRNA sense strand
agaaacagauaacaccaaa

SEQ ID NO: 433603 - RNA, 19 nt, Homo sapiens
  misc_RNA (1)...(19): siRNA sense strand
cagaaaagauggaaaagaa

SEQ ID NO: 433604 - RNA, 19 nt, Homo sapiens
  misc_RNA (1)...(19): siRNA sense strand
gaggagaaagaaacagaua

SEQ ID NO: 433605 - RNA, 19 nt, Homo sapiens
  misc_RNA (1)...(19): siRNA sense strand
ggaggaugaugaugaugau

SEQ ID NO: 433606 - RNA, 19 nt, Homo sapiens
  misc_RNA (1)...(19): siRNA sense strand
gaugaugacuccucuucag

SEQ ID NO: 433607 - RNA, 19 nt, Homo sapiens
  misc_RNA (1)...(19): siRNA sense strand
auucaaaccugaccacaga

SEQ ID NO: 433608 - RNA, 19 nt, Homo sapiens
  misc_RNA (1)...(19): siRNA sense strand
ggaugaugaugaugaugau

SEQ ID NO: 433609 - RNA, 19 nt, Homo sapiens
  misc_RNA (1)...(19): siRNA sense strand
cagauaacaccaaaccaaa

SEQ ID NO: 433610 - RNA, 19 nt, Homo sapiens
  misc_RNA (1)...(19): siRNA sense strand
ggagaaagaaacagauaac

SEQ ID NO: 433611 - RNA, 19 nt, Homo sapiens
  misc_RNA (1)...(19): siRNA sense strand
gaggcuacaagguccguua

SEQ ID NO: 433612 - RNA, 19 nt, Homo sapiens
  misc_RNA (1)...(19): siRNA sense strand
acacugcgcugguugaaaa

SEQ ID NO: 433613 - RNA, 19 nt, Homo sapiens
  misc_RNA (1)...(19): siRNA sense strand
aaaccugaccacagaauug

SEQ ID NO: 433614 - RNA, 19 nt, Homo sapiens
  misc_RNA (1)...(19): siRNA sense strand
acagauaacaccaaaccaa

SEQ ID NO: 433615 - RNA, 19 nt, Homo sapiens
  misc_RNA (1)...(19): siRNA sense strand
gcuacaagguccguuaugc

SEQ ID NO: 433616 - RNA, 19 nt, Homo sapiens
  misc_RNA (1)...(19): siRNA sense strand
gagaaagaaacagauaaca

SEQ ID NO: 433617 - RNA, 19 nt, Homo sapiens
  misc_RNA (1)...(19): siRNA sense strand
cagaggagaaagaaacaga

SEQ ID NO: 433618 - RNA, 19 nt, Homo sapiens
  misc_RNA (1)...(19): siRNA sense strand
gcaucauaauggacucugu

SEQ ID NO: 433619 - RNA, 19 nt, Homo sapiens
  misc_RNA (1)...(19): siRNA sense strand
caaaccugaccacagaauu

SEQ ID NO: 433620 - RNA, 19 nt, Homo sapiens
  misc_RNA (1)...(19): siRNA sense strand
cggaggaugaugaugauga

SEQ ID NO: 433621 - RNA, 19 nt, Homo sapiens
  misc_RNA (1)...(19): siRNA sense strand
ggacauccccagaaaagau

SEQ ID NO: 433622 - RNA, 19 nt, Homo sapiens
  misc_RNA (1)...(19): siRNA sense strand
gaauuggaggcuacaaggu

SEQ ID NO: 433623 - RNA, 19 nt, Homo sapiens
  misc_RNA (1)...(19): siRNA sense strand
acucuguggugcccucuga

SEQ ID NO: 433624 - RNA, 19 nt, Homo sapiens
  misc_RNA (1)...(19): siRNA sense strand
ccuggagcaucauaaugga

SEQ ID NO: 433625 - RNA, 19 nt, Homo sapiens
  misc_RNA (1)...(19): siRNA sense strand
ccaccuggagcaucauaau

SEQ ID NO: 433626 - RNA, 19 nt, Homo sapiens
  misc_RNA (1)...(19): siRNA sense strand
aaacagauaacaccaaacc

SEQ ID NO: 433627 - RNA, 19 nt, Homo sapiens
  misc_RNA (1)...(19): siRNA sense strand
aggaugaugaugaugauga

SEQ ID NO: 433628 - RNA, 19 nt, Homo sapiens
  misc_RNA (1)...(19): siRNA sense strand
aggagaaagaaacagauaa

SEQ ID NO: 433629 - RNA, 19 nt, Homo sapiens
  misc_RNA (1)...(19): siRNA sense strand
agaaacagauaacaccaaa

SEQ ID NO: 433630 - RNA, 19 nt, Homo sapiens
  misc_RNA (1)...(19): siRNA sense strand
cagaaaagauggaaaagaa

SEQ ID NO: 433631 - RNA, 19 nt, Homo sapiens
  misc_RNA (1)...(19): siRNA sense strand
gaggagaaagaaacagaua

SEQ ID NO: 433632 - RNA, 19 nt, Homo sapiens
  misc_RNA (1)...(19): siRNA sense strand
ggaggaugaugaugaugau

SEQ ID NO: 433633 - RNA, 19 nt, Homo sapiens
  misc_RNA (1)...(19): siRNA sense strand
gaugaugacuccucuucag

SEQ ID NO: 433634 - RNA, 19 nt, Homo sapiens
  misc_RNA (1)...(19): siRNA sense strand
auucaaaccugaccacaga

SEQ ID NO: 433635 - RNA, 19 nt, Homo sapiens
  misc_RNA (1)...(19): siRNA sense strand
ggaugaugaugaugaugau

SEQ ID NO: 433636 - RNA, 19 nt, Homo sapiens
  misc_RNA (1)...(19): siRNA sense strand
cagauaacaccaaaccaaa

SEQ ID NO: 433637 - RNA, 19 nt, Homo sapiens
  misc_RNA (1)...(19): siRNA sense strand
ggagaaagaaacagauaac

SEQ ID NO: 433638 - RNA, 19 nt, Homo sapiens
  misc_RNA (1)...(19): siRNA sense strand
gaggcuacaagguccguua

SEQ ID NO: 433639 - RNA, 19 nt, Homo sapiens
  misc_RNA (1)...(19): siRNA sense strand
acacugcgcugguugaaaa

SEQ ID NO: 433640 - RNA, 19 nt, Homo sapiens
  misc_RNA (1)...(19): siRNA sense strand
aaaccugaccacagaauug

SEQ ID NO: 433641 - RNA, 19 nt, Homo sapiens
  misc_RNA (1)...(19): siRNA sense strand
acagauaacaccaaaccaa

SEQ ID NO: 433642 - RNA, 19 nt, Homo sapiens
  misc_RNA (1)...(19): siRNA sense strand
gcuacaagguccguuaugc

SEQ ID NO: 433643 - RNA, 19 nt, Homo sapiens
  misc_RNA (1)...(19): siRNA sense strand
gagaaagaaacagauaaca

SEQ ID NO: 433644 - RNA, 19 nt, Homo sapiens
  misc_RNA (1)...(19): siRNA sense strand
cagaggagaaagaaacaga

SEQ ID NO: 433645 - RNA, 19 nt, Homo sapiens
  misc_RNA (1)...(19): siRNA sense strand
gcaucauaauggacucugu

SEQ ID NO: 433646 - RNA, 19 nt, Homo sapiens
  misc_RNA (1)...(19): siRNA sense strand
caaaccugaccacagaauu

SEQ ID NO: 433647 - RNA, 19 nt, Homo sapiens
  misc_RNA (1)...(19): siRNA sense strand
cggaggaugaugaugauga

SEQ ID NO: 433648 - RNA, 19 nt, Homo sapiens
  misc_RNA (1)...(19): siRNA sense strand
ggacauccccagaaaagau

SEQ ID NO: 433649 - RNA, 19 nt, Homo sapiens
  misc_RNA (1)...(19): siRNA sense strand
gaauuggaggcuacaaggu

SEQ ID NO: 433650 - RNA, 19 nt, Homo sapiens
  misc_RNA (1)...(19): siRNA sense strand
acucuguggugcccucuga

SEQ ID NO: 433651 - RNA, 19 nt, Homo sapiens
  misc_RNA (1)...(19): siRNA sense strand
ccuggagcaucauaaugga

SEQ ID NO: 433652 - RNA, 19 nt, Homo sapiens
  misc_RNA (1)...(19): siRNA sense strand
ccaccuggagcaucauaau

SEQ ID NO: 433653 - RNA, 19 nt, Homo sapiens
  misc_RNA (1)...(19): siRNA sense strand
aaacagauaacaccaaacc

SEQ ID NO: 433654 - RNA, 19 nt, Homo sapiens
  misc_RNA (1)...(19): siRNA sense strand
aggaugaugaugaugauga

SEQ ID NO: 433655 - RNA, 19 nt, Homo sapiens
  misc_RNA (1)...(19): siRNA sense strand
aggagaaagaaacagauaa

SEQ ID NO: 433656 - RNA, 19 nt, Homo sapiens
  misc_RNA (1)...(19): siRNA sense strand
agaaacagauaacaccaaa

SEQ ID NO: 433657 - RNA, 19 nt, Homo sapiens
  misc_RNA (1)...(19): siRNA sense strand
cagaaaagauggaaaagaa

SEQ ID NO: 433658 - RNA, 19 nt, Homo sapiens
  misc_RNA (1)...(19): siRNA sense strand
gaggagaaagaaacagaua

SEQ ID NO: 433659 - RNA, 19 nt, Homo sapiens
  misc_RNA (1)...(19): siRNA sense strand
ggaggaugaugaugaugau

SEQ ID NO: 433660 - RNA, 19 nt, Homo sapiens
  misc_RNA (1)...(19): siRNA sense strand
gaugaugacuccucuucag

SEQ ID NO: 433661 - RNA, 19 nt, Homo sapiens
  misc_RNA (1)...(19): siRNA sense strand
auucaaaccugaccacaga

SEQ ID NO: 433662 - RNA, 19 nt, Homo sapiens
  misc_RNA (1)...(19): siRNA sense strand
ggaugaugaugaugaugau

SEQ ID NO: 433663 - RNA, 19 nt, Homo sapiens
  misc_RNA (1)...(19): siRNA sense strand
cagauaacaccaaaccaaa

SEQ ID NO: 433664 - RNA, 19 nt, Homo sapiens
  misc_RNA (1)...(19): siRNA sense strand
ggagaaagaaacagauaac

SEQ ID NO: 433665 - RNA, 19 nt, Homo sapiens
  misc_RNA (1)...(19): siRNA sense strand
gaggcuacaagguccguua

SEQ ID NO: 433666 - RNA, 19 nt, Homo sapiens
  misc_RNA (1)...(19): siRNA sense strand
acacugcgcugguugaaaa

SEQ ID NO: 433667 - RNA, 19 nt, Homo sapiens
  misc_RNA (1)...(19): siRNA sense strand
aaaccugaccacagaauug

SEQ ID NO: 433668 - RNA, 19 nt, Homo sapiens
  misc_RNA (1)...(19): siRNA sense strand
acagauaacaccaaaccaa

SEQ ID NO: 433669 - RNA, 19 nt, Homo sapiens
  misc_RNA (1)...(19): siRNA sense strand
gcuacaagguccguuaugc

SEQ ID NO: 433670 - RNA, 19 nt, Homo sapiens
  misc_RNA (1)...(19): siRNA sense strand
gagaaagaaacagauaaca

SEQ ID NO: 433671 - RNA, 19 nt, Homo sapiens
  misc_RNA (1)...(19): siRNA sense strand
cagaggagaaagaaacaga

SEQ ID NO: 433672 - RNA, 19 nt, Homo sapiens
  misc_RNA (1)...(19): siRNA sense strand
gcaucauaauggacucugu

SEQ ID NO: 433673 - RNA, 19 nt, Homo sapiens
  misc_RNA (1)...(19): siRNA sense strand
caaaccugaccacagaauu

SEQ ID NO: 433674 - RNA, 19 nt, Homo sapiens
  misc_RNA (1)...(19): siRNA sense strand
cggaggaugaugaugauga

SEQ ID NO: 433675 - RNA, 19 nt, Homo sapiens
  misc_RNA (1)...(19): siRNA sense strand
ggacauccccagaaaagau

SEQ ID NO: 433676 - RNA, 19 nt, Homo sapiens
  misc_RNA (1)...(19): siRNA sense strand
gaauuggaggcuacaaggu

SEQ ID NO: 433677 - RNA, 19 nt, Homo sapiens
  misc_RNA (1)...(19): siRNA sense strand
acucuguggugcccucuga

SEQ ID NO: 433678 - RNA, 19 nt, Homo sapiens
  misc_RNA (1)...(19): siRNA sense strand
ccuggagcaucauaaugga

SEQ ID NO: 433679 - RNA, 19 nt, Homo sapiens
  misc_RNA (1)...(19): siRNA sense strand
ccaccuggagcaucauaau

SEQ ID NO: 433680 - RNA, 19 nt, Homo sapiens
  misc_RNA (1)...(19): siRNA sense strand
aaacagauaacaccaaacc

SEQ ID NO: 433681 - RNA, 19 nt, Homo sapiens
  misc_RNA (1)...(19): siRNA sense strand
aggaugaugaugaugauga

SEQ ID NO: 433682 - RNA, 19 nt, Homo sapiens
  misc_RNA (1)...(19): siRNA sense strand
aggagaaagaaacagauaa

SEQ ID NO: 433683 - RNA, 19 nt, Homo sapiens
  misc_RNA (1)...(19): siRNA sense strand
agaaacagauaacaccaaa

SEQ ID NO: 433684 - RNA, 19 nt, Homo sapiens
  misc_RNA (1)...(19): siRNA sense strand
cagaaaagauggaaaagaa

SEQ ID NO: 433685 - RNA, 19 nt, Homo sapiens
  misc_RNA (1)...(19): siRNA sense strand
gaggagaaagaaacagaua

SEQ ID NO: 433686 - RNA, 19 nt, Homo sapiens
  misc_RNA (1)...(19): siRNA sense strand
ggaggaugaugaugaugau

SEQ ID NO: 433687 - RNA, 19 nt, Homo sapiens
  misc_RNA (1)...(19): siRNA sense strand
gaugaugacuccucuucag

SEQ ID NO: 433688 - RNA, 19 nt, Homo sapiens
  misc_RNA (1)...(19): siRNA sense strand
auucaaaccugaccacaga

SEQ ID NO: 433689 - RNA, 19 nt, Homo sapiens
  misc_RNA (1)...(19): siRNA sense strand
ggaugaugaugaugaugau

SEQ ID NO: 433690 - RNA, 19 nt, Homo sapiens
  misc_RNA (1)...(19): siRNA sense strand
cagauaacaccaaaccaaa

SEQ ID NO: 433691 - RNA, 19 nt, Homo sapiens
  misc_RNA (1)...(19): siRNA sense strand
ggagaaagaaacagauaac

SEQ ID NO: 433692 - RNA, 19 nt, Homo sapiens
  misc_RNA (1)...(19): siRNA sense strand
gaggcuacaagguccguua

SEQ ID NO: 433693 - RNA, 19 nt, Homo sapiens
  misc_RNA (1)...(19): siRNA sense strand
acacugcgcugguugaaaa

SEQ ID NO: 433694 - RNA, 19 nt, Homo sapiens
  misc_RNA (1)...(19): siRNA sense strand
aaaccugaccacagaauug

SEQ ID NO: 433695 - RNA, 19 nt, Homo sapiens
  misc_RNA (1)...(19): siRNA sense strand
acagauaacaccaaaccaa

SEQ ID NO: 433696 - RNA, 19 nt, Homo sapiens
  misc_RNA (1)...(19): siRNA sense strand
gcuacaagguccguuaugc

SEQ ID NO: 433697 - RNA, 19 nt, Homo sapiens
  misc_RNA (1)...(19): siRNA sense strand
gagaaagaaacagauaaca

SEQ ID NO: 433698 - RNA, 19 nt, Homo sapiens
  misc_RNA (1)...(19): siRNA sense strand
cagaggagaaagaaacaga

SEQ ID NO: 433699 - RNA, 19 nt, Homo sapiens
  misc_RNA (1)...(19): siRNA sense strand
gcaucauaauggacucugu

SEQ ID NO: 433700 - RNA, 19 nt, Homo sapiens
  misc_RNA (1)...(19): siRNA sense strand
caaaccugaccacagaauu

SEQ ID NO: 433701 - RNA, 19 nt, Homo sapiens
  misc_RNA (1)...(19): siRNA sense strand
cggaggaugaugaugauga

SEQ ID NO: 433702 - RNA, 19 nt, Homo sapiens
  misc_RNA (1)...(19): siRNA sense strand
ggacauccccagaaaagau

SEQ ID NO: 433703 - RNA, 19 nt, Homo sapiens
  misc_RNA (1)...(19): siRNA sense strand
gaauuggaggcuacaaggu

SEQ ID NO: 433704 - RNA, 19 nt, Homo sapiens
  misc_RNA (1)...(19): siRNA sense strand
acucuguggugcccucuga

SEQ ID NO: 433705 - RNA, 19 nt, Homo sapiens
  misc_RNA (1)...(19): siRNA sense strand
ccuggagcaucauaaugga

SEQ ID NO: 433706 - RNA, 19 nt, Homo sapiens
  misc_RNA (1)...(19): siRNA sense strand
ccaccuggagcaucauaau

SEQ ID NO: 433707 - RNA, 19 nt, Homo sapiens
  misc_RNA (1)...(19): siRNA sense strand
aaacagauaacaccaaacc

SEQ ID NO: 433708 - RNA, 19 nt, Homo sapiens
  misc_RNA (1)...(19): siRNA sense strand
aggaugaugaugaugauga

SEQ ID NO: 433709 - RNA, 19 nt, Homo sapiens
  misc_RNA (1)...(19): siRNA sense strand
aggagaaagaaacagauaa

SEQ ID NO: 433710 - RNA, 19 nt, Homo sapiens
  misc_RNA (1)...(19): siRNA sense strand
agaaacagauaacaccaaa

SEQ ID NO: 433711 - RNA, 19 nt, Homo sapiens
  misc_RNA (1)...(19): siRNA sense strand
cagaaaagauggaaaagaa

SEQ ID NO: 433712 - RNA, 19 nt, Homo sapiens
  misc_RNA (1)...(19): siRNA sense strand
gaggagaaagaaacagaua

SEQ ID NO: 433713 - RNA, 19 nt, Homo sapiens
  misc_RNA (1)...(19): siRNA sense strand
ggaggaugaugaugaugau

SEQ ID NO: 433714 - RNA, 19 nt, Homo sapiens
  misc_RNA (1)...(19): siRNA sense strand
gaugaugacuccucuucag

SEQ ID NO: 433715 - RNA, 19 nt, Homo sapiens
  misc_RNA (1)...(19): siRNA sense strand
auucaaaccugaccacaga

SEQ ID NO: 433716 - RNA, 19 nt, Homo sapiens
  misc_RNA (1)...(19): siRNA sense strand
ggaugaugaugaugaugau

SEQ ID NO: 433717 - RNA, 19 nt, Homo sapiens
  misc_RNA (1)...(19): siRNA sense strand
cagauaacaccaaaccaaa

SEQ ID NO: 433718 - RNA, 19 nt, Homo sapiens
  misc_RNA (1)...(19): siRNA sense strand
ggagaaagaaacagauaac

SEQ ID NO: 433719 - RNA, 19 nt, Homo sapiens
  misc_RNA (1)...(19): siRNA sense strand
gaggcuacaagguccguua

SEQ ID NO: 433720 - RNA, 19 nt, Homo sapiens
  misc_RNA (1)...(19): siRNA sense strand
acacugcgcugguugaaaa

SEQ ID NO: 433721 - RNA, 19 nt, Homo sapiens
  misc_RNA (1)...(19): siRNA sense strand
aaaccugaccacagaauug

SEQ ID NO: 433722 - RNA, 19 nt, Homo sapiens
  misc_RNA (1)...(19): siRNA sense strand
acagauaacaccaaaccaa

SEQ ID NO: 433723 - RNA, 19 nt, Homo sapiens
  misc_RNA (1)...(19): siRNA sense strand
gcuacaagguccguuaugc

SEQ ID NO: 433724 - RNA, 19 nt, Homo sapiens
  misc_RNA (1)...(19): siRNA sense strand
gagaaagaaacagauaaca

SEQ ID NO: 433725 - RNA, 19 nt, Homo sapiens
  misc_RNA (1)...(19): siRNA sense strand
cagaggagaaagaaacaga

SEQ ID NO: 433726 - RNA, 19 nt, Homo sapiens
  misc_RNA (1)...(19): siRNA sense strand
gcaucauaauggacucugu

SEQ ID NO: 433727 - RNA, 19 nt, Homo sapiens
  misc_RNA (1)...(19): siRNA sense strand
caaaccugaccacagaauu

SEQ ID NO: 433728 - RNA, 19 nt, Homo sapiens
  misc_RNA (1)...(19): siRNA sense strand
cggaggaugaugaugauga

SEQ ID NO: 433729 - RNA, 19 nt, Homo sapiens
  misc_RNA (1)...(19): siRNA sense strand
ggacauccccagaaaagau

SEQ ID NO: 433730 - RNA, 19 nt, Homo sapiens
  misc_RNA (1)...(19): siRNA sense strand
gaauuggaggcuacaaggu

SEQ ID NO: 433731 - RNA, 19 nt, Homo sapiens
  misc_RNA (1)...(19): siRNA sense strand
acucuguggugcccucuga

SEQ ID NO: 433732 - RNA, 19 nt, Homo sapiens
  misc_RNA (1)...(19): siRNA sense strand
ccuggagcaucauaaugga

SEQ ID NO: 433733 - RNA, 19 nt, Homo sapiens
  misc_RNA (1)...(19): siRNA sense strand
ccaccuggagcaucauaau

SEQ ID NO: 433734 - RNA, 19 nt, Homo sapiens
  misc_RNA (1)...(19): siRNA sense strand
aaacagauaacaccaaacc

SEQ ID NO: 433735 - RNA, 19 nt, Homo sapiens
  misc_RNA (1)...(19): siRNA sense strand
aggaugaugaugaugauga

SEQ ID NO: 433736 - RNA, 19 nt, Homo sapiens
  misc_RNA (1)...(19): siRNA sense strand
aggagaaagaaacagauaa

SEQ ID NO: 433737 - RNA, 19 nt, Homo sapiens
  misc_RNA (1)...(19): siRNA sense strand
agaaacagauaacaccaaa

SEQ ID NO: 433738 - RNA, 19 nt, Homo sapiens
  misc_RNA (1)...(19): siRNA sense strand
cagaaaagauggaaaagaa

SEQ ID NO: 433739 - RNA, 19 nt, Homo sapiens
  misc_RNA (1)...(19): siRNA sense strand
gaggagaaagaaacagaua

SEQ ID NO: 433740 - RNA, 19 nt, Homo sapiens
  misc_RNA (1)...(19): siRNA sense strand
ggaggaugaugaugaugau

SEQ ID NO: 433741 - RNA, 19 nt, Homo sapiens
  misc_RNA (1)...(19): siRNA sense strand
gaugaugacuccucuucag

SEQ ID NO: 433742 - RNA, 19 nt, Homo sapiens
  misc_RNA (1)...(19): siRNA sense strand
auucaaaccugaccacaga

SEQ ID NO: 433743 - RNA, 19 nt, Homo sapiens
  misc_RNA (1)...(19): siRNA sense strand
ggaugaugaugaugaugau

SEQ ID NO: 433744 - RNA, 19 nt, Homo sapiens
  misc_RNA (1)...(19): siRNA sense strand
cagauaacaccaaaccaaa

SEQ ID NO: 433745 - RNA, 19 nt, Homo sapiens
  misc_RNA (1)...(19): siRNA sense strand
ggagaaagaaacagauaac

SEQ ID NO: 433746 - RNA, 19 nt, Homo sapiens
  misc_RNA (1)...(19): siRNA sense strand
gaggcuacaagguccguua

SEQ ID NO: 433747 - RNA, 19 nt, Homo sapiens
  misc_RNA (1)...(19): siRNA sense strand
acacugcgcugguugaaaa

SEQ ID NO: 433748 - RNA, 19 nt, Homo sapiens
  misc_RNA (1)...(19): siRNA sense strand
aaaccugaccacagaauug

SEQ ID NO: 433749 - RNA, 19 nt, Homo sapiens
  misc_RNA (1)...(19): siRNA sense strand
acagauaacaccaaaccaa

SEQ ID NO: 433750 - RNA, 19 nt, Homo sapiens
  misc_RNA (1)...(19): siRNA sense strand
gcuacaagguccguuaugc

SEQ ID NO: 433751 - RNA, 19 nt, Homo sapiens
  misc_RNA (1)...(19): siRNA sense strand
gagaaagaaacagauaaca

SEQ ID NO: 433752 - RNA, 19 nt, Homo sapiens
  misc_RNA (1)...(19): siRNA sense strand
cagaggagaaagaaacaga

SEQ ID NO: 433753 - RNA, 19 nt, Homo sapiens
  misc_RNA (1)...(19): siRNA sense strand
gcaucauaauggacucugu

SEQ ID NO: 433754 - RNA, 19 nt, Homo sapiens
  misc_RNA (1)...(19): siRNA sense strand
caaaccugaccacagaauu

SEQ ID NO: 433755 - RNA, 19 nt, Homo sapiens
  misc_RNA (1)...(19): siRNA sense strand
cggaggaugaugaugauga

SEQ ID NO: 433756 - RNA, 19 nt, Homo sapiens
  misc_RNA (1)...(19): siRNA sense strand
ggacauccccagaaaagau

SEQ ID NO: 433757 - RNA, 19 nt, Homo sapiens
  misc_RNA (1)...(19): siRNA sense strand
gaauuggaggcuacaaggu

SEQ ID NO: 433758 - RNA, 19 nt, Homo sapiens
  misc_RNA (1)...(19): siRNA sense strand
acucuguggugcccucuga

SEQ ID NO: 433759 - RNA, 19 nt, Homo sapiens
  misc_RNA (1)...(19): siRNA sense strand
ccuggagcaucauaaugga

SEQ ID NO: 433760 - RNA, 19 nt, Homo sapiens
  misc_RNA (1)...(19): siRNA sense strand
ccaccuggagcaucauaau

SEQ ID NO: 433761 - RNA, 19 nt, Homo sapiens
  misc_RNA (1)...(19): siRNA sense strand
aaacagauaacaccaaacc

SEQ ID NO: 433762 - RNA, 19 nt, Homo sapiens
  misc_RNA (1)...(19): siRNA sense strand
aggaugaugaugaugauga

SEQ ID NO: 433763 - RNA, 19 nt, Homo sapiens
  misc_RNA (1)...(19): siRNA sense strand
aggagaaagaaacagauaa

SEQ ID NO: 433764 - RNA, 19 nt, Homo sapiens
  misc_RNA (1)...(19): siRNA sense strand
agaaacagauaacaccaaa

SEQ ID NO: 433765 - RNA, 19 nt, Homo sapiens
  misc_RNA (1)...(19): siRNA sense strand
cagaaaagauggaaaagaa

SEQ ID NO: 433766 - RNA, 19 nt, Homo sapiens
  misc_RNA (1)...(19): siRNA sense strand
gaggagaaagaaacagaua

SEQ ID NO: 433767 - RNA, 19 nt, Homo sapiens
  misc_RNA (1)...(19): siRNA sense strand
ggaggaugaugaugaugau

SEQ ID NO: 433768 - RNA, 19 nt, Homo sapiens
  misc_RNA (1)...(19): siRNA sense strand
gaugaugacuccucuucag

SEQ ID NO: 433769 - RNA, 19 nt, Homo sapiens
  misc_RNA (1)...(19): siRNA sense strand
auucaaaccugaccacaga

SEQ ID NO: 433770 - RNA, 19 nt, Homo sapiens
  misc_RNA (1)...(19): siRNA sense strand
ggaugaugaugaugaugau

SEQ ID NO: 433771 - RNA, 19 nt, Homo sapiens
  misc_RNA (1)...(19): siRNA sense strand
cagauaacaccaaaccaaa

SEQ ID NO: 433772 - RNA, 19 nt, Homo sapiens
  misc_RNA (1)...(19): siRNA sense strand
ggagaaagaaacagauaac

SEQ ID NO: 433773 - RNA, 19 nt, Homo sapiens
  misc_RNA (1)...(19): siRNA sense strand
gaggcuacaagguccguua

SEQ ID NO: 433774 - RNA, 19 nt, Homo sapiens
  misc_RNA (1)...(19): siRNA sense strand
acacugcgcugguugaaaa

SEQ ID NO: 433775 - RNA, 19 nt, Homo sapiens
  misc_RNA (1)...(19): siRNA sense strand
aaaccugaccacagaauug

SEQ ID NO: 433776 - RNA, 19 nt, Homo sapiens
  misc_RNA (1)...(19): siRNA sense strand
acagauaacaccaaaccaa

SEQ ID NO: 433777 - RNA, 19 nt, Homo sapiens
  misc_RNA (1)...(19): siRNA sense strand
gcuacaagguccguuaugc

SEQ ID NO: 433778 - RNA, 19 nt, Homo sapiens
  misc_RNA (1)...(19): siRNA sense strand
gagaaagaaacagauaaca

SEQ ID NO: 433779 - RNA, 19 nt, Homo sapiens
  misc_RNA (1)...(19): siRNA sense strand
cagaggagaaagaaacaga

SEQ ID NO: 433780 - RNA, 19 nt, Homo sapiens
  misc_RNA (1)...(19): siRNA sense strand
gcaucauaauggacucugu

SEQ ID NO: 433781 - RNA, 19 nt, Homo sapiens
  misc_RNA (1)...(19): siRNA sense strand
caaaccugaccacagaauu

SEQ ID NO: 433782 - RNA, 19 nt, Homo sapiens
  misc_RNA (1)...(19): siRNA sense strand
cggaggaugaugaugauga

SEQ ID NO: 433783 - RNA, 19 nt, Homo sapiens
  misc_RNA (1)...(19): siRNA sense strand
ggacauccccagaaaagau

SEQ ID NO: 433784 - RNA, 19 nt, Homo sapiens
  misc_RNA (1)...(19): siRNA sense strand
gaauuggaggcuacaaggu

SEQ ID NO: 433785 - RNA, 19 nt, Homo sapiens
  misc_RNA (1)...(19): siRNA sense strand
acucuguggugcccucuga

SEQ ID NO: 433786 - RNA, 19 nt, Homo sapiens
  misc_RNA (1)...(19): siRNA sense strand
ccuggagcaucauaaugga

SEQ ID NO: 433787 - RNA, 19 nt, Homo sapiens
  misc_RNA (1)...(19): siRNA sense strand
ccaccuggagcaucauaau

SEQ ID NO: 433788 - RNA, 19 nt, Homo sapiens
  misc_RNA (1)...(19): siRNA sense strand
aaacagauaacaccaaacc

SEQ ID NO: 433789 - RNA, 19 nt, Homo sapiens
  misc_RNA (1)...(19): siRNA sense strand
aggaugaugaugaugauga

SEQ ID NO: 433790 - RNA, 19 nt, Homo sapiens
  misc_RNA (1)...(19): siRNA sense strand
aggagaaagaaacagauaa

SEQ ID NO: 433791 - RNA, 19 nt, Homo sapiens
  misc_RNA (1)...(19): siRNA sense strand
agaaacagauaacaccaaa

SEQ ID NO: 433792 - RNA, 19 nt, Homo sapiens
  misc_RNA (1)...(19): siRNA sense strand
cagaaaagauggaaaagaa

SEQ ID NO: 433793 - RNA, 19 nt, Homo sapiens
  misc_RNA (1)...(19): siRNA sense strand
gaggagaaagaaacagaua

SEQ ID NO: 433794 - RNA, 19 nt, Homo sapiens
  misc_RNA (1)...(19): siRNA sense strand
ggaggaugaugaugaugau

SEQ ID NO: 433795 - RNA, 19 nt, Homo sapiens
  misc_RNA (1)...(19): siRNA sense strand
gaugaugacuccucuucag

SEQ ID NO: 433796 - RNA, 19 nt, Homo sapiens
  misc_RNA (1)...(19): siRNA sense strand
auucaaaccugaccacaga

SEQ ID NO: 433797 - RNA, 19 nt, Homo sapiens
  misc_RNA (1)...(19): siRNA sense strand
ggaugaugaugaugaugau

SEQ ID NO: 433798 - RNA, 19 nt, Homo sapiens
  misc_RNA (1)...(19): siRNA sense strand
cagauaacaccaaaccaaa

SEQ ID NO: 433799 - RNA, 19 nt, Homo sapiens
  misc_RNA (1)...(19): siRNA sense strand
ggagaaagaaacagauaac

SEQ ID NO: 433800 - RNA, 19 nt, Homo sapiens
  misc_RNA (1)...(19): siRNA sense strand
gaggcuacaagguccguua

SEQ ID NO: 433801 - RNA, 19 nt, Homo sapiens
  misc_RNA (1)...(19): siRNA sense strand
acacugcgcugguugaaaa

SEQ ID NO: 433802 - RNA, 19 nt, Homo sapiens
  misc_RNA (1)...(19): siRNA sense strand
aaaccugaccacagaauug

SEQ ID NO: 433803 - RNA, 19 nt, Homo sapiens
  misc_RNA (1)...(19): siRNA sense strand
acagauaacaccaaaccaa

SEQ ID NO: 433804 - RNA, 19 nt, Homo sapiens
  misc_RNA (1)...(19): siRNA sense strand
gcuacaagguccguuaugc

SEQ ID NO: 433805 - RNA, 19 nt, Homo sapiens
  misc_RNA (1)...(19): siRNA sense strand
gagaaagaaacagauaaca

SEQ ID NO: 433806 - RNA, 19 nt, Homo sapiens
  misc_RNA (1)...(19): siRNA sense strand
cagaggagaaagaaacaga

SEQ ID NO: 433807 - RNA, 19 nt, Homo sapiens
  misc_RNA (1)...(19): siRNA sense strand
gcaucauaauggacucugu

SEQ ID NO: 433808 - RNA, 19 nt, Homo sapiens
  misc_RNA (1)...(19): siRNA sense strand
caaaccugaccacagaauu

SEQ ID NO: 433809 - RNA, 19 nt, Homo sapiens
  misc_RNA (1)...(19): siRNA sense strand
cggaggaugaugaugauga

SEQ ID NO: 433810 - RNA, 19 nt, Homo sapiens
  misc_RNA (1)...(19): siRNA sense strand
ggacauccccagaaaagau

SEQ ID NO: 433811 - RNA, 19 nt, Homo sapiens
  misc_RNA (1)...(19): siRNA sense strand
gaauuggaggcuacaaggu

SEQ ID NO: 433812 - RNA, 19 nt, Homo sapiens
  misc_RNA (1)...(19): siRNA sense strand
acucuguggugcccucuga

SEQ ID NO: 433813 - RNA, 19 nt, Homo sapiens
  misc_RNA (1)...(19): siRNA sense strand
ccuggagcaucauaaugga

SEQ ID NO: 433814 - RNA, 19 nt, Homo sapiens
  misc_RNA (1)...(19): siRNA sense strand
ccaccuggagcaucauaau

SEQ ID NO: 433815 - RNA, 19 nt, Homo sapiens
  misc_RNA (1)...(19): siRNA sense strand
aaacagauaacaccaaacc

SEQ ID NO: 433816 - RNA, 19 nt, Homo sapiens
  misc_RNA (1)...(19): siRNA sense strand
aggaugaugaugaugauga

SEQ ID NO: 433817 - RNA, 19 nt, Homo sapiens
  misc_RNA (1)...(19): siRNA sense strand
aggagaaagaaacagauaa

SEQ ID NO: 433818 - RNA, 19 nt, Homo sapiens
  misc_RNA (1)...(19): siRNA sense strand
agaaacagauaacaccaaa

SEQ ID NO: 433819 - RNA, 19 nt, Homo sapiens
  misc_RNA (1)...(19): siRNA sense strand
cagaaaagauggaaaagaa

SEQ ID NO: 433820 - RNA, 19 nt, Homo sapiens
  misc_RNA (1)...(19): siRNA sense strand
gaggagaaagaaacagaua

SEQ ID NO: 433821 - RNA, 19 nt, Homo sapiens
  misc_RNA (1)...(19): siRNA sense strand
ggaggaugaugaugaugau

SEQ ID NO: 433822 - RNA, 19 nt, Homo sapiens
  misc_RNA (1)...(19): siRNA sense strand
gaugaugacuccucuucag

SEQ ID NO: 433823 - RNA, 19 nt, Homo sapiens
  misc_RNA (1)...(19): siRNA sense strand
auucaaaccugaccacaga

SEQ ID NO: 433824 - RNA, 19 nt, Homo sapiens
  misc_RNA (1)...(19): siRNA sense strand
ggaugaugaugaugaugau

SEQ ID NO: 433825 - RNA, 19 nt, Homo sapiens
  misc_RNA (1)...(19): siRNA sense strand
cagauaacaccaaaccaaa

SEQ ID NO: 433826 - RNA, 19 nt, Homo sapiens
  misc_RNA (1)...(19): siRNA sense strand
ggagaaagaaacagauaac

SEQ ID NO: 433827 - RNA, 19 nt, Homo sapiens
  misc_RNA (1)...(19): siRNA sense strand
gaggcuacaagguccguua

SEQ ID NO: 433828 - RNA, 19 nt, Homo sapiens
  misc_RNA (1)...(19): siRNA sense strand
acacugcgcugguugaaaa

SEQ ID NO: 433829 - RNA, 19 nt, Homo sapiens
  misc_RNA (1)...(19): siRNA sense strand
aaaccugaccacagaauug

SEQ ID NO: 433830 - RNA, 19 nt, Homo sapiens
  misc_RNA (1)...(19): siRNA sense strand
acagauaacaccaaaccaa

SEQ ID NO: 433831 - RNA, 19 nt, Homo sapiens
  misc_RNA (1)...(19): siRNA sense strand
gcuacaagguccguuaugc

SEQ ID NO: 433832 - RNA, 19 nt, Homo sapiens
  misc_RNA (1)...(19): siRNA sense strand
gagaaagaaacagauaaca

SEQ ID NO: 433833 - RNA, 19 nt, Homo sapiens
  misc_RNA (1)...(19): siRNA sense strand
cagaggagaaagaaacaga

SEQ ID NO: 433834 - RNA, 19 nt, Homo sapiens
  misc_RNA (1)...(19): siRNA sense strand
gcaucauaauggacucugu

SEQ ID NO: 433835 - RNA, 19 nt, Homo sapiens
  misc_RNA (1)...(19): siRNA sense strand
caaaccugaccacagaauu

SEQ ID NO: 433836 - RNA, 19 nt, Homo sapiens
  misc_RNA (1)...(19): siRNA sense strand
cggaggaugaugaugauga

SEQ ID NO: 433837 - RNA, 19 nt, Homo sapiens
  misc_RNA (1)...(19): siRNA sense strand
ggacauccccagaaaagau

SEQ ID NO: 433838 - RNA, 19 nt, Homo sapiens
  misc_RNA (1)...(19): siRNA sense strand
gaauuggaggcuacaaggu

SEQ ID NO: 433839 - RNA, 19 nt, Homo sapiens
  misc_RNA (1)...(19): siRNA sense strand
acucuguggugcccucuga

SEQ ID NO: 433840 - RNA, 19 nt, Homo sapiens
  misc_RNA (1)...(19): siRNA sense strand
ccuggagcaucauaaugga

SEQ ID NO: 433841 - RNA, 19 nt, Homo sapiens
  misc_RNA (1)...(19): siRNA sense strand
ccaccuggagcaucauaau

SEQ ID NO: 433842 - RNA, 19 nt, Homo sapiens
  misc_RNA (1)...(19): siRNA sense strand
aaacagauaacaccaaacc

SEQ ID NO: 433843 - RNA, 19 nt, Homo sapiens
  misc_RNA (1)...(19): siRNA sense strand
aggaugaugaugaugauga

SEQ ID NO: 433844 - RNA, 19 nt, Homo sapiens
  misc_RNA (1)...(19): siRNA sense strand
aggagaaagaaacagauaa

SEQ ID NO: 433845 - RNA, 19 nt, Homo sapiens
  misc_RNA (1)...(19): siRNA sense strand
agaaacagauaacaccaaa

SEQ ID NO: 433846 - RNA, 19 nt, Homo sapiens
  misc_RNA (1)...(19): siRNA sense strand
cagaaaagauggaaaagaa

SEQ ID NO: 433847 - RNA, 19 nt, Homo sapiens
  misc_RNA (1)...(19): siRNA sense strand
gaggagaaagaaacagaua

SEQ ID NO: 433848 - RNA, 19 nt, Homo sapiens
  misc_RNA (1)...(19): siRNA sense strand
ggaggaugaugaugaugau

SEQ ID NO: 433849 - RNA, 19 nt, Homo sapiens
  misc_RNA (1)...(19): siRNA sense strand
gaugaugacuccucuucag

SEQ ID NO: 433850 - RNA, 19 nt, Homo sapiens
  misc_RNA (1)...(19): siRNA sense strand
auucaaaccugaccacaga

SEQ ID NO: 433851 - RNA, 19 nt, Homo sapiens
  misc_RNA (1)...(19): siRNA sense strand
ggaugaugaugaugaugau

SEQ ID NO: 433852 - RNA, 19 nt, Homo sapiens
  misc_RNA (1)...(19): siRNA sense strand
cagauaacaccaaaccaaa

SEQ ID NO: 433853 - RNA, 19 nt, Homo sapiens
  misc_RNA (1)...(19): siRNA sense strand
ggagaaagaaacagauaac

SEQ ID NO: 433854 - RNA, 19 nt, Homo sapiens
  misc_RNA (1)...(19): siRNA sense strand
gaggcuacaagguccguua

SEQ ID NO: 433855 - RNA, 19 nt, Homo sapiens
  misc_RNA (1)...(19): siRNA sense strand
acacugcgcugguugaaaa

SEQ ID NO: 433856 - RNA, 19 nt, Homo sapiens
  misc_RNA (1)...(19): siRNA sense strand
aaaccugaccacagaauug

SEQ ID NO: 433857 - RNA, 19 nt, Homo sapiens
  misc_RNA (1)...(19): siRNA sense strand
acagauaacaccaaaccaa

SEQ ID NO: 433858 - RNA, 19 nt, Homo sapiens
  misc_RNA (1)...(19): siRNA sense strand
gcuacaagguccguuaugc

SEQ ID NO: 433859 - RNA, 19 nt, Homo sapiens
  misc_RNA (1)...(19): siRNA sense strand
gagaaagaaacagauaaca

SEQ ID NO: 433860 - RNA, 19 nt, Homo sapiens
  misc_RNA (1)...(19): siRNA sense strand
cagaggagaaagaaacaga

SEQ ID NO: 433861 - RNA, 19 nt, Homo sapiens
  misc_RNA (1)...(19): siRNA sense strand
gcaucauaauggacucugu

SEQ ID NO: 433862 - RNA, 19 nt, Homo sapiens
  misc_RNA (1)...(19): siRNA sense strand
caaaccugaccacagaauu

SEQ ID NO: 433863 - RNA, 19 nt, Homo sapiens
  misc_RNA (1)...(19): siRNA sense strand
cggaggaugaugaugauga

SEQ ID NO: 433864 - RNA, 19 nt, Homo sapiens
  misc_RNA (1)...(19): siRNA sense strand
ggacauccccagaaaagau

SEQ ID NO: 433865 - RNA, 19 nt, Homo sapiens
  misc_RNA (1)...(19): siRNA sense strand
gaauuggaggcuacaaggu

SEQ ID NO: 433866 - RNA, 19 nt, Homo sapiens
  misc_RNA (1)...(19): siRNA sense strand
acucuguggugcccucuga

SEQ ID NO: 433867 - RNA, 19 nt, Homo sapiens
  misc_RNA (1)...(19): siRNA sense strand
ccuggagcaucauaaugga

SEQ ID NO: 433868 - RNA, 19 nt, Homo sapiens
  misc_RNA (1)...(19): siRNA sense strand
ccaccuggagcaucauaau

SEQ ID NO: 433869 - RNA, 19 nt, Homo sapiens
  misc_RNA (1)...(19): siRNA sense strand
aaacagauaacaccaaacc

SEQ ID NO: 433870 - RNA, 19 nt, Homo sapiens
  misc_RNA (1)...(19): siRNA sense strand
aggaugaugaugaugauga

SEQ ID NO: 433871 - RNA, 19 nt, Homo sapiens
  misc_RNA (1)...(19): siRNA sense strand
aggagaaagaaacagauaa

SEQ ID NO: 433872 - RNA, 19 nt, Homo sapiens
  misc_RNA (1)...(19): siRNA sense strand
agaaacagauaacaccaaa

SEQ ID NO: 433873 - RNA, 19 nt, Homo sapiens
  misc_RNA (1)...(19): siRNA sense strand
cagaaaagauggaaaagaa

SEQ ID NO: 433874 - RNA, 19 nt, Homo sapiens
  misc_RNA (1)...(19): siRNA sense strand
gaggagaaagaaacagaua

SEQ ID NO: 433875 - RNA, 19 nt, Homo sapiens
  misc_RNA (1)...(19): siRNA sense strand
ggaggaugaugaugaugau

SEQ ID NO: 433876 - RNA, 19 nt, Homo sapiens
  misc_RNA (1)...(19): siRNA sense strand
gaugaugacuccucuucag

SEQ ID NO: 433877 - RNA, 19 nt, Homo sapiens
  misc_RNA (1)...(19): siRNA sense strand
auucaaaccugaccacaga

SEQ ID NO: 433878 - RNA, 19 nt, Homo sapiens
  misc_RNA (1)...(19): siRNA sense strand
ggaugaugaugaugaugau

SEQ ID NO: 433879 - RNA, 19 nt, Homo sapiens
  misc_RNA (1)...(19): siRNA sense strand
cagauaacaccaaaccaaa

SEQ ID NO: 433880 - RNA, 19 nt, Homo sapiens
  misc_RNA (1)...(19): siRNA sense strand
ggagaaagaaacagauaac

SEQ ID NO: 433881 - RNA, 19 nt, Homo sapiens
  misc_RNA (1)...(19): siRNA sense strand
gaggcuacaagguccguua

SEQ ID NO: 433882 - RNA, 19 nt, Homo sapiens
  misc_RNA (1)...(19): siRNA sense strand
acacugcgcugguugaaaa

SEQ ID NO: 433883 - RNA, 19 nt, Homo sapiens
  misc_RNA (1)...(19): siRNA sense strand
aaaccugaccacagaauug

SEQ ID NO: 433884 - RNA, 19 nt, Homo sapiens
  misc_RNA (1)...(19): siRNA sense strand
acagauaacaccaaaccaa

SEQ ID NO: 433885 - RNA, 19 nt, Homo sapiens
  misc_RNA (1)...(19): siRNA sense strand
gcuacaagguccguuaugc

SEQ ID NO: 433886 - RNA, 19 nt, Homo sapiens
  misc_RNA (1)...(19): siRNA sense strand
gagaaagaaacagauaaca

SEQ ID NO: 433887 - RNA, 19 nt, Homo sapiens
  misc_RNA (1)...(19): siRNA sense strand
cagaggagaaagaaacaga

SEQ ID NO: 433888 - RNA, 19 nt, Homo sapiens
  misc_RNA (1)...(19): siRNA sense strand
gcaucauaauggacucugu

SEQ ID NO: 433889 - RNA, 19 nt, Homo sapiens
  misc_RNA (1)...(19): siRNA sense strand
caaaccugaccacagaauu

SEQ ID NO: 433890 - RNA, 19 nt, Homo sapiens
  misc_RNA (1)...(19): siRNA sense strand
cggaggaugaugaugauga

SEQ ID NO: 433891 - RNA, 19 nt, Homo sapiens
  misc_RNA (1)...(19): siRNA sense strand
ggacauccccagaaaagau

SEQ ID NO: 433892 - RNA, 19 nt, Homo sapiens
  misc_RNA (1)...(19): siRNA sense strand
gaauuggaggcuacaaggu

SEQ ID NO: 433893 - RNA, 19 nt, Homo sapiens
  misc_RNA (1)...(19): siRNA sense strand
acucuguggugcccucuga

SEQ ID NO: 433894 - RNA, 19 nt, Homo sapiens
  misc_RNA (1)...(19): siRNA sense strand
ccuggagcaucauaaugga

SEQ ID NO: 433895 - RNA, 19 nt, Homo sapiens
  misc_RNA (1)...(19): siRNA sense strand
ccaccuggagcaucauaau

SEQ ID NO: 433896 - RNA, 19 nt, Homo sapiens
  misc_RNA (1)...(19): siRNA sense strand
aaacagauaacaccaaacc

SEQ ID NO: 433897 - RNA, 19 nt, Homo sapiens
  misc_RNA (1)...(19): siRNA sense strand
aggaugaugaugaugauga

SEQ ID NO: 433898 - RNA, 19 nt, Homo sapiens
  misc_RNA (1)...(19): siRNA sense strand
aggagaaagaaacagauaa

SEQ ID NO: 433899 - RNA, 19 nt, Homo sapiens
  misc_RNA (1)...(19): siRNA sense strand
agaaacagauaacaccaaa

SEQ ID NO: 433900 - RNA, 19 nt, Homo sapiens
  misc_RNA (1)...(19): siRNA sense strand
cagaaaagauggaaaagaa

SEQ ID NO: 433901 - RNA, 19 nt, Homo sapiens
  misc_RNA (1)...(19): siRNA sense strand
gaggagaaagaaacagaua

SEQ ID NO: 433902 - RNA, 19 nt, Homo sapiens
  misc_RNA (1)...(19): siRNA sense strand
ggaggaugaugaugaugau

SEQ ID NO: 433903 - RNA, 19 nt, Homo sapiens
  misc_RNA (1)...(19): siRNA sense strand
gaugaugacuccucuucag

SEQ ID NO: 433904 - RNA, 19 nt, Homo sapiens
  misc_RNA (1)...(19): siRNA sense strand
auucaaaccugaccacaga

SEQ ID NO: 433905 - RNA, 19 nt, Homo sapiens
  misc_RNA (1)...(19): siRNA sense strand
ggaugaugaugaugaugau

SEQ ID NO: 433906 - RNA, 19 nt, Homo sapiens
  misc_RNA (1)...(19): siRNA sense strand
cagauaacaccaaaccaaa

SEQ ID NO: 433907 - RNA, 19 nt, Homo sapiens
  misc_RNA (1)...(19): siRNA sense strand
ggagaaagaaacagauaac

SEQ ID NO: 433908 - RNA, 19 nt, Homo sapiens
  misc_RNA (1)...(19): siRNA sense strand
gaggcuacaagguccguua

SEQ ID NO: 433909 - RNA, 19 nt, Homo sapiens
  misc_RNA (1)...(19): siRNA sense strand
acacugcgcugguugaaaa

SEQ ID NO: 433910 - RNA, 19 nt, Homo sapiens
  misc_RNA (1)...(19): siRNA sense strand
aaaccugaccacagaauug

SEQ ID NO: 433911 - RNA, 19 nt, Homo sapiens
  misc_RNA (1)...(19): siRNA sense strand
acagauaacaccaaaccaa

SEQ ID NO: 433912 - RNA, 19 nt, Homo sapiens
  misc_RNA (1)...(19): siRNA sense strand
gcuacaagguccguuaugc

SEQ ID NO: 433913 - RNA, 19 nt, Homo sapiens
  misc_RNA (1)...(19): siRNA sense strand
gagaaagaaacagauaaca

SEQ ID NO: 433914 - RNA, 19 nt, Homo sapiens
  misc_RNA (1)...(19): siRNA sense strand
cagaggagaaagaaacaga

SEQ ID NO: 433915 - RNA, 19 nt, Homo sapiens
  misc_RNA (1)...(19): siRNA sense strand
gcaucauaauggacucugu

SEQ ID NO: 433916 - RNA, 19 nt, Homo sapiens
  misc_RNA (1)...(19): siRNA sense strand
caaaccugaccacagaauu

SEQ ID NO: 433917 - RNA, 19 nt, Homo sapiens
  misc_RNA (1)...(19): siRNA sense strand
cggaggaugaugaugauga

SEQ ID NO: 433918 - RNA, 19 nt, Homo sapiens
  misc_RNA (1)...(19): siRNA sense strand
ggacauccccagaaaagau

SEQ ID NO: 433919 - RNA, 19 nt, Homo sapiens
  misc_RNA (1)...(19): siRNA sense strand
gaauuggaggcuacaaggu

SEQ ID NO: 433920 - RNA, 19 nt, Homo sapiens
  misc_RNA (1)...(19): siRNA sense strand
acucuguggugcccucuga

SEQ ID NO: 433921 - RNA, 19 nt, Homo sapiens
  misc_RNA (1)...(19): siRNA sense strand
ccuggagcaucauaaugga

SEQ ID NO: 433922 - RNA, 19 nt, Homo sapiens
  misc_RNA (1)...(19): siRNA sense strand
ccaccuggagcaucauaau

SEQ ID NO: 433923 - RNA, 19 nt, Homo sapiens
  misc_RNA (1)...(19): siRNA sense strand
aaacagauaacaccaaacc

SEQ ID NO: 433924 - RNA, 19 nt, Homo sapiens
  misc_RNA (1)...(19): siRNA sense strand
aggaugaugaugaugauga

SEQ ID NO: 433925 - RNA, 19 nt, Homo sapiens
  misc_RNA (1)...(19): siRNA sense strand
aggagaaagaaacagauaa

SEQ ID NO: 433926 - RNA, 19 nt, Homo sapiens
  misc_RNA (1)...(19): siRNA sense strand
agaaacagauaacaccaaa

SEQ ID NO: 433927 - RNA, 19 nt, Homo sapiens
  misc_RNA (1)...(19): siRNA sense strand
cagaaaagauggaaaagaa

SEQ ID NO: 433928 - RNA, 19 nt, Homo sapiens
  misc_RNA (1)...(19): siRNA sense strand
gaggagaaagaaacagaua

SEQ ID NO: 433929 - RNA, 19 nt, Homo sapiens
  misc_RNA (1)...(19): siRNA sense strand
ggaggaugaugaugaugau

SEQ ID NO: 433930 - RNA, 19 nt, Homo sapiens
  misc_RNA (1)...(19): siRNA sense strand
gaugaugacuccucuucag

SEQ ID NO: 433931 - RNA, 19 nt, Homo sapiens
  misc_RNA (1)...(19): siRNA sense strand
auucaaaccugaccacaga

SEQ ID NO: 433932 - RNA, 19 nt, Homo sapiens
  misc_RNA (1)...(19): siRNA sense strand
ggaugaugaugaugaugau

SEQ ID NO: 433933 - RNA, 19 nt, Homo sapiens
  misc_RNA (1)...(19): siRNA sense strand
cagauaacaccaaaccaaa

SEQ ID NO: 433934 - RNA, 19 nt, Homo sapiens
  misc_RNA (1)...(19): siRNA sense strand
ggagaaagaaacagauaac

SEQ ID NO: 433935 - RNA, 19 nt, Homo sapiens
  misc_RNA (1)...(19): siRNA sense strand
gaggcuacaagguccguua

SEQ ID NO: 433936 - RNA, 19 nt, Homo sapiens
  misc_RNA (1)...(19): siRNA sense strand
acacugcgcugguugaaaa

SEQ ID NO: 433937 - RNA, 19 nt, Homo sapiens
  misc_RNA (1)...(19): siRNA sense strand
aaaccugaccacagaauug

SEQ ID NO: 433938 - RNA, 19 nt, Homo sapiens
  misc_RNA (1)...(19): siRNA sense strand
acagauaacaccaaaccaa

SEQ ID NO: 433939 - RNA, 19 nt, Homo sapiens
  misc_RNA (1)...(19): siRNA sense strand
gcuacaagguccguuaugc

SEQ ID NO: 433940 - RNA, 19 nt, Homo sapiens
  misc_RNA (1)...(19): siRNA sense strand
gagaaagaaacagauaaca

SEQ ID NO: 433941 - RNA, 19 nt, Homo sapiens
  misc_RNA (1)...(19): siRNA sense strand
cagaggagaaagaaacaga

SEQ ID NO: 433942 - RNA, 19 nt, Homo sapiens
  misc_RNA (1)...(19): siRNA sense strand
gcaucauaauggacucugu

SEQ ID NO: 433943 - RNA, 19 nt, Homo sapiens
  misc_RNA (1)...(19): siRNA sense strand
caaaccugaccacagaauu

SEQ ID NO: 433944 - RNA, 19 nt, Homo sapiens
  misc_RNA (1)...(19): siRNA sense strand
cggaggaugaugaugauga

SEQ ID NO: 433945 - RNA, 19 nt, Homo sapiens
  misc_RNA (1)...(19): siRNA sense strand
ggacauccccagaaaagau

SEQ ID NO: 433946 - RNA, 19 nt, Homo sapiens
  misc_RNA (1)...(19): siRNA sense strand
gaauuggaggcuacaaggu

SEQ ID NO: 433947 - RNA, 19 nt, Homo sapiens
  misc_RNA (1)...(19): siRNA sense strand
acucuguggugcccucuga

SEQ ID NO: 433948 - RNA, 19 nt, Homo sapiens
  misc_RNA (1)...(19): siRNA sense strand
ccuggagcaucauaaugga

SEQ ID NO: 433949 - RNA, 19 nt, Homo sapiens
  misc_RNA (1)...(19): siRNA sense strand
ccaccuggagcaucauaau

SEQ ID NO: 433950 - RNA, 19 nt, Homo sapiens
  misc_RNA (1)...(19): siRNA sense strand
aaacagauaacaccaaacc

SEQ ID NO: 433951 - RNA, 19 nt, Homo sapiens
  misc_RNA (1)...(19): siRNA sense strand
aggaugaugaugaugauga

SEQ ID NO: 433952 - RNA, 19 nt, Homo sapiens
  misc_RNA (1)...(19): siRNA sense strand
aggagaaagaaacagauaa

SEQ ID NO: 433953 - RNA, 19 nt, Homo sapiens
  misc_RNA (1)...(19): siRNA sense strand
agaaacagauaacaccaaa

SEQ ID NO: 433954 - RNA, 19 nt, Homo sapiens
  misc_RNA (1)...(19): siRNA sense strand
cagaaaagauggaaaagaa

SEQ ID NO: 433955 - RNA, 19 nt, Homo sapiens
  misc_RNA (1)...(19): siRNA sense strand
gaggagaaagaaacagaua

SEQ ID NO: 433956 - RNA, 19 nt, Homo sapiens
  misc_RNA (1)...(19): siRNA sense strand
ggaggaugaugaugaugau

SEQ ID NO: 433957 - RNA, 19 nt, Homo sapiens
  misc_RNA (1)...(19): siRNA sense strand
gaugaugacuccucuucag

SEQ ID NO: 433958 - RNA, 19 nt, Homo sapiens
  misc_RNA (1)...(19): siRNA sense strand
auucaaaccugaccacaga

SEQ ID NO: 433959 - RNA, 19 nt, Homo sapiens
  misc_RNA (1)...(19): siRNA sense strand
ggaugaugaugaugaugau

SEQ ID NO: 433960 - RNA, 19 nt, Homo sapiens
  misc_RNA (1)...(19): siRNA sense strand
cagauaacaccaaaccaaa

SEQ ID NO: 433961 - RNA, 19 nt, Homo sapiens
  misc_RNA (1)...(19): siRNA sense strand
ggagaaagaaacagauaac

SEQ ID NO: 433962 - RNA, 19 nt, Homo sapiens
  misc_RNA (1)...(19): siRNA sense strand
gaggcuacaagguccguua

SEQ ID NO: 433963 - RNA, 19 nt, Homo sapiens
  misc_RNA (1)...(19): siRNA sense strand
acacugcgcugguugaaaa

SEQ ID NO: 433964 - RNA, 19 nt, Homo sapiens
  misc_RNA (1)...(19): siRNA sense strand
aaaccugaccacagaauug

SEQ ID NO: 433965 - RNA, 19 nt, Homo sapiens
  misc_RNA (1)...(19): siRNA sense strand
acagauaacaccaaaccaa

SEQ ID NO: 433966 - RNA, 19 nt, Homo sapiens
  misc_RNA (1)...(19): siRNA sense strand
gcuacaagguccguuaugc

SEQ ID NO: 433967 - RNA, 19 nt, Homo sapiens
  misc_RNA (1)...(19): siRNA sense strand
gagaaagaaacagauaaca

SEQ ID NO: 433968 - RNA, 19 nt, Homo sapiens
  misc_RNA (1)...(19): siRNA sense strand
cagaggagaaagaaacaga

SEQ ID NO: 433969 - RNA, 19 nt, Homo sapiens
  misc_RNA (1)...(19): siRNA sense strand
gcaucauaauggacucugu

SEQ ID NO: 433970 - RNA, 19 nt, Homo sapiens
  misc_RNA (1)...(19): siRNA sense strand
caaaccugaccacagaauu

SEQ ID NO: 433971 - RNA, 19 nt, Homo sapiens
  misc_RNA (1)...(19): siRNA sense strand
cggaggaugaugaugauga

SEQ ID NO: 433972 - RNA, 19 nt, Homo sapiens
  misc_RNA (1)...(19): siRNA sense strand
ggacauccccagaaaagau

SEQ ID NO: 433973 - RNA, 19 nt, Homo sapiens
  misc_RNA (1)...(19): siRNA sense strand
gaauuggaggcuacaaggu

SEQ ID NO: 433974 - RNA, 19 nt, Homo sapiens
  misc_RNA (1)...(19): siRNA sense strand
acucuguggugcccucuga

SEQ ID NO: 433975 - RNA, 19 nt, Homo sapiens
  misc_RNA (1)...(19): siRNA sense strand
ccuggagcaucauaaugga

SEQ ID NO: 433976 - RNA, 19 nt, Homo sapiens
  misc_RNA (1)...(19): siRNA sense strand
ccaccuggagcaucauaau

SEQ ID NO: 433977 - RNA, 19 nt, Homo sapiens
  misc_RNA (1)...(19): siRNA sense strand
aaacagauaacaccaaacc

SEQ ID NO: 433978 - RNA, 19 nt, Homo sapiens
  misc_RNA (1)...(19): siRNA sense strand
aggaugaugaugaugauga

SEQ ID NO: 433979 - RNA, 19 nt, Homo sapiens
  misc_RNA (1)...(19): siRNA sense strand
aggagaaagaaacagauaa

SEQ ID NO: 433980 - RNA, 19 nt, Homo sapiens
  misc_RNA (1)...(19): siRNA sense strand
agaaacagauaacaccaaa

SEQ ID NO: 433981 - RNA, 19 nt, Homo sapiens
  misc_RNA (1)...(19): siRNA sense strand
cagaaaagauggaaaagaa

SEQ ID NO: 433982 - RNA, 19 nt, Homo sapiens
  misc_RNA (1)...(19): siRNA sense strand
gaggagaaagaaacagaua

SEQ ID NO: 433983 - RNA, 19 nt, Homo sapiens
  misc_RNA (1)...(19): siRNA sense strand
ggaggaugaugaugaugau

SEQ ID NO: 433984 - RNA, 19 nt, Homo sapiens
  misc_RNA (1)...(19): siRNA sense strand
gaugaugacuccucuucag

SEQ ID NO: 433985 - RNA, 19 nt, Homo sapiens
  misc_RNA (1)...(19): siRNA sense strand
auucaaaccugaccacaga

SEQ ID NO: 433986 - RNA, 19 nt, Homo sapiens
  misc_RNA (1)...(19): siRNA sense strand
ggaugaugaugaugaugau

SEQ ID NO: 433987 - RNA, 19 nt, Homo sapiens
  misc_RNA (1)...(19): siRNA sense strand
cagauaacaccaaaccaaa

SEQ ID NO: 433988 - RNA, 19 nt, Homo sapiens
  misc_RNA (1)...(19): siRNA sense strand
ggagaaagaaacagauaac

SEQ ID NO: 433989 - RNA, 19 nt, Homo sapiens
  misc_RNA (1)...(19): siRNA sense strand
gaggcuacaagguccguua

SEQ ID NO: 433990 - RNA, 19 nt, Homo sapiens
  misc_RNA (1)...(19): siRNA sense strand
acacugcgcugguugaaaa

SEQ ID NO: 433991 - RNA, 19 nt, Homo sapiens
  misc_RNA (1)...(19): siRNA sense strand
aaaccugaccacagaauug

SEQ ID NO: 433992 - RNA, 19 nt, Homo sapiens
  misc_RNA (1)...(19): siRNA sense strand
acagauaacaccaaaccaa

SEQ ID NO: 433993 - RNA, 19 nt, Homo sapiens
  misc_RNA (1)...(19): siRNA sense strand
gcuacaagguccguuaugc

SEQ ID NO: 433994 - RNA, 19 nt, Homo sapiens
  misc_RNA (1)...(19): siRNA sense strand
gagaaagaaacagauaaca

SEQ ID NO: 433995 - RNA, 19 nt, Homo sapiens
  misc_RNA (1)...(19): siRNA sense strand
cagaggagaaagaaacaga

SEQ ID NO: 433996 - RNA, 19 nt, Homo sapiens
  misc_RNA (1)...(19): siRNA sense strand
gcaucauaauggacucugu

SEQ ID NO: 433997 - RNA, 19 nt, Homo sapiens
  misc_RNA (1)...(19): siRNA sense strand
caaaccugaccacagaauu

SEQ ID NO: 433998 - RNA, 19 nt, Homo sapiens
  misc_RNA (1)...(19): siRNA sense strand
cggaggaugaugaugauga

SEQ ID NO: 433999 - RNA, 19 nt, Homo sapiens
  misc_RNA (1)...(19): siRNA sense strand
ggacauccccagaaaagau

SEQ ID NO: 434000 - RNA, 19 nt, Homo sapiens
  misc_RNA (1)...(19): siRNA sense strand
gaauuggaggcuacaaggu

SEQ ID NO: 434001 - RNA, 19 nt, Homo sapiens
  misc_RNA (1)...(19): siRNA sense strand
acucuguggugcccucuga

SEQ ID NO: 434002 - RNA, 19 nt, Homo sapiens
  misc_RNA (1)...(19): siRNA sense strand
ccuggagcaucauaaugga

SEQ ID NO: 434003 - RNA, 19 nt, Homo sapiens
  misc_RNA (1)...(19): siRNA sense strand
ccaccuggagcaucauaau

SEQ ID NO: 434004 - RNA, 19 nt, Homo sapiens
  misc_RNA (1)...(19): siRNA sense strand
aaacagauaacaccaaacc

SEQ ID NO: 434005 - RNA, 19 nt, Homo sapiens
  misc_RNA (1)...(19): siRNA sense strand
aggaugaugaugaugauga

SEQ ID NO: 434006 - RNA, 19 nt, Homo sapiens
  misc_RNA (1)...(19): siRNA sense strand
aggagaaagaaacagauaa

SEQ ID NO: 434007 - RNA, 19 nt, Homo sapiens
  misc_RNA (1)...(19): siRNA sense strand
agaaacagauaacaccaaa

SEQ ID NO: 434008 - RNA, 19 nt, Homo sapiens
  misc_RNA (1)...(19): siRNA sense strand
cagaaaagauggaaaagaa

SEQ ID NO: 434009 - RNA, 19 nt, Homo sapiens
  misc_RNA (1)...(19): siRNA sense strand
gaggagaaagaaacagaua

SEQ ID NO: 434010 - RNA, 19 nt, Homo sapiens
  misc_RNA (1)...(19): siRNA sense strand
ggaggaugaugaugaugau

SEQ ID NO: 434011 - RNA, 19 nt, Homo sapiens
  misc_RNA (1)...(19): siRNA sense strand
gaugaugacuccucuucag

SEQ ID NO: 434012 - RNA, 19 nt, Homo sapiens
  misc_RNA (1)...(19): siRNA sense strand
auucaaaccugaccacaga

SEQ ID NO: 434013 - RNA, 19 nt, Homo sapiens
  misc_RNA (1)...(19): siRNA sense strand
ggaugaugaugaugaugau

SEQ ID NO: 434014 - RNA, 19 nt, Homo sapiens
  misc_RNA (1)...(19): siRNA sense strand
cagauaacaccaaaccaaa

SEQ ID NO: 434015 - RNA, 19 nt, Homo sapiens
  misc_RNA (1)...(19): siRNA sense strand
ggagaaagaaacagauaac

SEQ ID NO: 434016 - RNA, 19 nt, Homo sapiens
  misc_RNA (1)...(19): siRNA sense strand
gaggcuacaagguccguua

SEQ ID NO: 434017 - RNA, 19 nt, Homo sapiens
  misc_RNA (1)...(19): siRNA sense strand
acacugcgcugguugaaaa

SEQ ID NO: 434018 - RNA, 19 nt, Homo sapiens
  misc_RNA (1)...(19): siRNA sense strand
aaaccugaccacagaauug

SEQ ID NO: 434019 - RNA, 19 nt, Homo sapiens
  misc_RNA (1)...(19): siRNA sense strand
acagauaacaccaaaccaa

SEQ ID NO: 434020 - RNA, 19 nt, Homo sapiens
  misc_RNA (1)...(19): siRNA sense strand
gcuacaagguccguuaugc

SEQ ID NO: 434021 - RNA, 19 nt, Homo sapiens
  misc_RNA (1)...(19): siRNA sense strand
gagaaagaaacagauaaca

SEQ ID NO: 434022 - RNA, 19 nt, Homo sapiens
  misc_RNA (1)...(19): siRNA sense strand
cagaggagaaagaaacaga

SEQ ID NO: 434023 - RNA, 19 nt, Homo sapiens
  misc_RNA (1)...(19): siRNA sense strand
gcaucauaauggacucugu

SEQ ID NO: 434024 - RNA, 19 nt, Homo sapiens
  misc_RNA (1)...(19): siRNA sense strand
caaaccugaccacagaauu

SEQ ID NO: 434025 - RNA, 19 nt, Homo sapiens
  misc_RNA (1)...(19): siRNA sense strand
cggaggaugaugaugauga

SEQ ID NO: 434026 - RNA, 19 nt, Homo sapiens
  misc_RNA (1)...(19): siRNA sense strand
ggacauccccagaaaagau

SEQ ID NO: 434027 - RNA, 19 nt, Homo sapiens
  misc_RNA (1)...(19): siRNA sense strand
gaauuggaggcuacaaggu

SEQ ID NO: 434028 - RNA, 19 nt, Homo sapiens
  misc_RNA (1)...(19): siRNA sense strand
acucuguggugcccucuga

SEQ ID NO: 434029 - RNA, 19 nt, Homo sapiens
  misc_RNA (1)...(19): siRNA sense strand
ccuggagcaucauaaugga

SEQ ID NO: 434030 - RNA, 19 nt, Homo sapiens
  misc_RNA (1)...(19): siRNA sense strand
ccaccuggagcaucauaau

SEQ ID NO: 434031 - RNA, 19 nt, Homo sapiens
  misc_RNA (1)...(19): siRNA sense strand
aaacagauaacaccaaacc

SEQ ID NO: 434032 - RNA, 19 nt, Homo sapiens
  misc_RNA (1)...(19): siRNA sense strand
aggaugaugaugaugauga

SEQ ID NO: 434033 - RNA, 19 nt, Homo sapiens
  misc_RNA (1)...(19): siRNA sense strand
aggagaaagaaacagauaa

SEQ ID NO: 434034 - RNA, 19 nt, Homo sapiens
  misc_RNA (1)...(19): siRNA sense strand
agaaacagauaacaccaaa

SEQ ID NO: 434035 - RNA, 19 nt, Homo sapiens
  misc_RNA (1)...(19): siRNA sense strand
cagaaaagauggaaaagaa

SEQ ID NO: 434036 - RNA, 19 nt, Homo sapiens
  misc_RNA (1)...(19): siRNA sense strand
gaggagaaagaaacagaua

SEQ ID NO: 434037 - RNA, 19 nt, Homo sapiens
  misc_RNA (1)...(19): siRNA sense strand
ggaggaugaugaugaugau

SEQ ID NO: 434038 - RNA, 19 nt, Homo sapiens
  misc_RNA (1)...(19): siRNA sense strand
gaugaugacuccucuucag

SEQ ID NO: 434039 - RNA, 19 nt, Homo sapiens
  misc_RNA (1)...(19): siRNA sense strand
auucaaaccugaccacaga

SEQ ID NO: 434040 - RNA, 19 nt, Homo sapiens
  misc_RNA (1)...(19): siRNA sense strand
ggaugaugaugaugaugau

SEQ ID NO: 434041 - RNA, 19 nt, Homo sapiens
  misc_RNA (1)...(19): siRNA sense strand
cagauaacaccaaaccaaa

SEQ ID NO: 434042 - RNA, 19 nt, Homo sapiens
  misc_RNA (1)...(19): siRNA sense strand
ggagaaagaaacagauaac

SEQ ID NO: 434043 - RNA, 19 nt, Homo sapiens
  misc_RNA (1)...(19): siRNA sense strand
gaggcuacaagguccguua

SEQ ID NO: 434044 - RNA, 19 nt, Homo sapiens
  misc_RNA (1)...(19): siRNA sense strand
acacugcgcugguugaaaa

SEQ ID NO: 434045 - RNA, 19 nt, Homo sapiens
  misc_RNA (1)...(19): siRNA sense strand
aaaccugaccacagaauug

SEQ ID NO: 434046 - RNA, 19 nt, Homo sapiens
  misc_RNA (1)...(19): siRNA sense strand
acagauaacaccaaaccaa

SEQ ID NO: 434047 - RNA, 19 nt, Homo sapiens
  misc_RNA (1)...(19): siRNA sense strand
gcuacaagguccguuaugc

SEQ ID NO: 434048 - RNA, 19 nt, Homo sapiens
  misc_RNA (1)...(19): siRNA sense strand
gagaaagaaacagauaaca

SEQ ID NO: 434049 - RNA, 19 nt, Homo sapiens
  misc_RNA (1)...(19): siRNA sense strand
cagaggagaaagaaacaga

SEQ ID NO: 434050 - RNA, 19 nt, Homo sapiens
  misc_RNA (1)...(19): siRNA sense strand
gcaucauaauggacucugu

SEQ ID NO: 434051 - RNA, 19 nt, Homo sapiens
  misc_RNA (1)...(19): siRNA sense strand
caaaccugaccacagaauu

SEQ ID NO: 434052 - RNA, 19 nt, Homo sapiens
  misc_RNA (1)...(19): siRNA sense strand
cggaggaugaugaugauga

SEQ ID NO: 434053 - RNA, 19 nt, Homo sapiens
  misc_RNA (1)...(19): siRNA sense strand
ggacauccccagaaaagau

SEQ ID NO: 434054 - RNA, 19 nt, Homo sapiens
  misc_RNA (1)...(19): siRNA sense strand
gaauuggaggcuacaaggu

SEQ ID NO: 434055 - RNA, 19 nt, Homo sapiens
  misc_RNA (1)...(19): siRNA sense strand
acucuguggugcccucuga

SEQ ID NO: 434056 - RNA, 19 nt, Homo sapiens
  misc_RNA (1)...(19): siRNA sense strand
ccuggagcaucauaaugga

SEQ ID NO: 434057 - RNA, 19 nt, Homo sapiens
  misc_RNA (1)...(19): siRNA sense strand
ccaccuggagcaucauaau

SEQ ID NO: 434058 - RNA, 19 nt, Homo sapiens
  misc_RNA (1)...(19): siRNA sense strand
aaacagauaacaccaaacc

SEQ ID NO: 434059 - RNA, 19 nt, Homo sapiens
  misc_RNA (1)...(19): siRNA sense strand
aggaugaugaugaugauga

SEQ ID NO: 434060 - RNA, 19 nt, Homo sapiens
  misc_RNA (1)...(19): siRNA sense strand
aggagaaagaaacagauaa

SEQ ID NO: 434061 - RNA, 19 nt, Homo sapiens
  misc_RNA (1)...(19): siRNA sense strand
agaaacagauaacaccaaa

SEQ ID NO: 434062 - RNA, 19 nt, Homo sapiens
  misc_RNA (1)...(19): siRNA sense strand
cagaaaagauggaaaagaa

SEQ ID NO: 434063 - RNA, 19 nt, Homo sapiens
  misc_RNA (1)...(19): siRNA sense strand
gaggagaaagaaacagaua

SEQ ID NO: 434064 - RNA, 19 nt, Homo sapiens
  misc_RNA (1)...(19): siRNA sense strand
ggaggaugaugaugaugau

SEQ ID NO: 434065 - RNA, 19 nt, Homo sapiens
  misc_RNA (1)...(19): siRNA sense strand
gaugaugacuccucuucag

SEQ ID NO: 434066 - RNA, 19 nt, Homo sapiens
  misc_RNA (1)...(19): siRNA sense strand
auucaaaccugaccacaga

SEQ ID NO: 434067 - RNA, 19 nt, Homo sapiens
  misc_RNA (1)...(19): siRNA sense strand
ggaugaugaugaugaugau

SEQ ID NO: 434068 - RNA, 19 nt, Homo sapiens
  misc_RNA (1)...(19): siRNA sense strand
cagauaacaccaaaccaaa

SEQ ID NO: 434069 - RNA, 19 nt, Homo sapiens
  misc_RNA (1)...(19): siRNA sense strand
ggagaaagaaacagauaac

SEQ ID NO: 434070 - RNA, 19 nt, Homo sapiens
  misc_RNA (1)...(19): siRNA sense strand
gaggcuacaagguccguua

SEQ ID NO: 434071 - RNA, 19 nt, Homo sapiens
  misc_RNA (1)...(19): siRNA sense strand
acacugcgcugguugaaaa

SEQ ID NO: 434072 - RNA, 19 nt, Homo sapiens
  misc_RNA (1)...(19): siRNA sense strand
aaaccugaccacagaauug

SEQ ID NO: 434073 - RNA, 19 nt, Homo sapiens
  misc_RNA (1)...(19): siRNA sense strand
acagauaacaccaaaccaa

SEQ ID NO: 434074 - RNA, 19 nt, Homo sapiens
  misc_RNA (1)...(19): siRNA sense strand
gcuacaagguccguuaugc

SEQ ID NO: 434075 - RNA, 19 nt, Homo sapiens
  misc_RNA (1)...(19): siRNA sense strand
gagaaagaaacagauaaca

SEQ ID NO: 434076 - RNA, 19 nt, Homo sapiens
  misc_RNA (1)...(19): siRNA sense strand
cagaggagaaagaaacaga

SEQ ID NO: 434077 - RNA, 19 nt, Homo sapiens
  misc_RNA (1)...(19): siRNA sense strand
gcaucauaauggacucugu

SEQ ID NO: 434078 - RNA, 19 nt, Homo sapiens
  misc_RNA (1)...(19): siRNA sense strand
caaaccugaccacagaauu

SEQ ID NO: 434079 - RNA, 19 nt, Homo sapiens
  misc_RNA (1)...(19): siRNA sense strand
cggaggaugaugaugauga

SEQ ID NO: 434080 - RNA, 19 nt, Homo sapiens
  misc_RNA (1)...(19): siRNA sense strand
ggacauccccagaaaagau

SEQ ID NO: 434081 - RNA, 19 nt, Homo sapiens
  misc_RNA (1)...(19): siRNA sense strand
gaauuggaggcuacaaggu

SEQ ID NO: 434082 - RNA, 19 nt, Homo sapiens
  misc_RNA (1)...(19): siRNA sense strand
acucuguggugcccucuga

SEQ ID NO: 434083 - RNA, 19 nt, Homo sapiens
  misc_RNA (1)...(19): siRNA sense strand
ccuggagcaucauaaugga

SEQ ID NO: 434084 - RNA, 19 nt, Homo sapiens
  misc_RNA (1)...(19): siRNA sense strand
ccaccuggagcaucauaau

SEQ ID NO: 434085 - RNA, 19 nt, Homo sapiens
  misc_RNA (1)...(19): siRNA sense strand
aaacagauaacaccaaacc

SEQ ID NO: 434086 - RNA, 19 nt, Homo sapiens
  misc_RNA (1)...(19): siRNA sense strand
aggaugaugaugaugauga

SEQ ID NO: 434087 - RNA, 19 nt, Homo sapiens
  misc_RNA (1)...(19): siRNA sense strand
aggagaaagaaacagauaa

SEQ ID NO: 434088 - RNA, 19 nt, Homo sapiens
  misc_RNA (1)...(19): siRNA sense strand
agaaacagauaacaccaaa

SEQ ID NO: 434089 - RNA, 19 nt, Homo sapiens
  misc_RNA (1)...(19): siRNA sense strand
cagaaaagauggaaaagaa

SEQ ID NO: 434090 - RNA, 19 nt, Homo sapiens
  misc_RNA (1)...(19): siRNA sense strand
gaggagaaagaaacagaua

SEQ ID NO: 434091 - RNA, 19 nt, Homo sapiens
  misc_RNA (1)...(19): siRNA sense strand
ggaggaugaugaugaugau

SEQ ID NO: 434092 - RNA, 19 nt, Homo sapiens
  misc_RNA (1)...(19): siRNA sense strand
gaugaugacuccucuucag

SEQ ID NO: 434093 - RNA, 19 nt, Homo sapiens
  misc_RNA (1)...(19): siRNA sense strand
auucaaaccugaccacaga

SEQ ID NO: 434094 - RNA, 19 nt, Homo sapiens
  misc_RNA (1)...(19): siRNA sense strand
ggaugaugaugaugaugau

SEQ ID NO: 434095 - RNA, 19 nt, Homo sapiens
  misc_RNA (1)...(19): siRNA sense strand
cagauaacaccaaaccaaa

SEQ ID NO: 434096 - RNA, 19 nt, Homo sapiens
  misc_RNA (1)...(19): siRNA sense strand
ggagaaagaaacagauaac

SEQ ID NO: 434097 - RNA, 19 nt, Homo sapiens
  misc_RNA (1)...(19): siRNA sense strand
gaggcuacaagguccguua

SEQ ID NO: 434098 - RNA, 19 nt, Homo sapiens
  misc_RNA (1)...(19): siRNA sense strand
acacugcgcugguugaaaa

SEQ ID NO: 434099 - RNA, 19 nt, Homo sapiens
  misc_RNA (1)...(19): siRNA sense strand
aaaccugaccacagaauug

SEQ ID NO: 434100 - RNA, 19 nt, Homo sapiens
  misc_RNA (1)...(19): siRNA sense strand
acagauaacaccaaaccaa

SEQ ID NO: 434101 - RNA, 19 nt, Homo sapiens
  misc_RNA (1)...(19): siRNA sense strand
gcuacaagguccguuaugc

SEQ ID NO: 434102 - RNA, 19 nt, Homo sapiens
  misc_RNA (1)...(19): siRNA sense strand
gagaaagaaacagauaaca

SEQ ID NO: 434103 - RNA, 19 nt, Homo sapiens
  misc_RNA (1)...(19): siRNA sense strand
cagaggagaaagaaacaga

SEQ ID NO: 434104 - RNA, 19 nt, Homo sapiens
  misc_RNA (1)...(19): siRNA sense strand
gcaucauaauggacucugu

SEQ ID NO: 434105 - RNA, 19 nt, Homo sapiens
  misc_RNA (1)...(19): siRNA sense strand
caaaccugaccacagaauu

SEQ ID NO: 434106 - RNA, 19 nt, Homo sapiens
  misc_RNA (1)...(19): siRNA sense strand
cggaggaugaugaugauga

SEQ ID NO: 434107 - RNA, 19 nt, Homo sapiens
  misc_RNA (1)...(19): siRNA sense strand
ggacauccccagaaaagau

SEQ ID NO: 434108 - RNA, 19 nt, Homo sapiens
  misc_RNA (1)...(19): siRNA sense strand
gaauuggaggcuacaaggu

SEQ ID NO: 434109 - RNA, 19 nt, Homo sapiens
  misc_RNA (1)...(19): siRNA sense strand
acucuguggugcccucuga

SEQ ID NO: 434110 - RNA, 19 nt, Homo sapiens
  misc_RNA (1)...(19): siRNA sense strand
ccuggagcaucauaaugga

SEQ ID NO: 434111 - RNA, 19 nt, Homo sapiens
  misc_RNA (1)...(19): siRNA sense strand
ccaccuggagcaucauaau

SEQ ID NO: 434112 - RNA, 19 nt, Homo sapiens
  misc_RNA (1)...(19): siRNA sense strand
aaacagauaacaccaaacc

SEQ ID NO: 434113 - RNA, 19 nt, Homo sapiens
  misc_RNA (1)...(19): siRNA sense strand
aggaugaugaugaugauga

SEQ ID NO: 434114 - RNA, 19 nt, Homo sapiens
  misc_RNA (1)...(19): siRNA sense strand
aggagaaagaaacagauaa

SEQ ID NO: 434115 - RNA, 19 nt, Homo sapiens
  misc_RNA (1)...(19): siRNA sense strand
agaaacagauaacaccaaa

SEQ ID NO: 434116 - RNA, 19 nt, Homo sapiens
  misc_RNA (1)...(19): siRNA sense strand
cagaaaagauggaaaagaa

SEQ ID NO: 434117 - RNA, 19 nt, Homo sapiens
  misc_RNA (1)...(19): siRNA sense strand
gaggagaaagaaacagaua

SEQ ID NO: 434118 - RNA, 19 nt, Homo sapiens
  misc_RNA (1)...(19): siRNA sense strand
ggaggaugaugaugaugau

SEQ ID NO: 434119 - RNA, 19 nt, Homo sapiens
  misc_RNA (1)...(19): siRNA sense strand
gaugaugacuccucuucag

SEQ ID NO: 434120 - RNA, 19 nt, Homo sapiens
  misc_RNA (1)...(19): siRNA sense strand
auucaaaccugaccacaga

SEQ ID NO: 434121 - RNA, 19 nt, Homo sapiens
  misc_RNA (1)...(19): siRNA sense strand
ggaugaugaugaugaugau

SEQ ID NO: 434122 - RNA, 19 nt, Homo sapiens
  misc_RNA (1)...(19): siRNA sense strand
cagauaacaccaaaccaaa

SEQ ID NO: 434123 - RNA, 19 nt, Homo sapiens
  misc_RNA (1)...(19): siRNA sense strand
ggagaaagaaacagauaac

SEQ ID NO: 434124 - RNA, 19 nt, Homo sapiens
  misc_RNA (1)...(19): siRNA sense strand
gaggcuacaagguccguua

SEQ ID NO: 434125 - RNA, 19 nt, Homo sapiens
  misc_RNA (1)...(19): siRNA sense strand
acacugcgcugguugaaaa

SEQ ID NO: 434126 - RNA, 19 nt, Homo sapiens
  misc_RNA (1)...(19): siRNA sense strand
aaaccugaccacagaauug

SEQ ID NO: 434127 - RNA, 19 nt, Homo sapiens
  misc_RNA (1)...(19): siRNA sense strand
acagauaacaccaaaccaa

SEQ ID NO: 434128 - RNA, 19 nt, Homo sapiens
  misc_RNA (1)...(19): siRNA sense strand
gcuacaagguccguuaugc

SEQ ID NO: 434129 - RNA, 19 nt, Homo sapiens
  misc_RNA (1)...(19): siRNA sense strand
gagaaagaaacagauaaca

SEQ ID NO: 434130 - RNA, 19 nt, Homo sapiens
  misc_RNA (1)...(19): siRNA sense strand
cagaggagaaagaaacaga

SEQ ID NO: 434131 - RNA, 19 nt, Homo sapiens
  misc_RNA (1)...(19): siRNA sense strand
gcaucauaauggacucugu

SEQ ID NO: 434132 - RNA, 19 nt, Homo sapiens
  misc_RNA (1)...(19): siRNA sense strand
caaaccugaccacagaauu

SEQ ID NO: 434133 - RNA, 19 nt, Homo sapiens
  misc_RNA (1)...(19): siRNA sense strand
cggaggaugaugaugauga

SEQ ID NO: 434134 - RNA, 19 nt, Homo sapiens
  misc_RNA (1)...(19): siRNA sense strand
ggacauccccagaaaagau

SEQ ID NO: 434135 - RNA, 19 nt, Homo sapiens
  misc_RNA (1)...(19): siRNA sense strand
gaauuggaggcuacaaggu

SEQ ID NO: 434136 - RNA, 19 nt, Homo sapiens
  misc_RNA (1)...(19): siRNA sense strand
acucuguggugcccucuga

SEQ ID NO: 434137 - RNA, 19 nt, Homo sapiens
  misc_RNA (1)...(19): siRNA sense strand
ccuggagcaucauaaugga

SEQ ID NO: 434138 - RNA, 19 nt, Homo sapiens
  misc_RNA (1)...(19): siRNA sense strand
ccaccuggagcaucauaau

SEQ ID NO: 434139 - RNA, 19 nt, Homo sapiens
  misc_RNA (1)...(19): siRNA sense strand
aaacagauaacaccaaacc

SEQ ID NO: 434140 - RNA, 19 nt, Homo sapiens
  misc_RNA (1)...(19): siRNA sense strand
aggaugaugaugaugauga

SEQ ID NO: 434141 - RNA, 19 nt, Homo sapiens
  misc_RNA (1)...(19): siRNA sense strand
aggagaaagaaacagauaa

SEQ ID NO: 434142 - RNA, 19 nt, Homo sapiens
  misc_RNA (1)...(19): siRNA sense strand
agaaacagauaacaccaaa

SEQ ID NO: 434143 - RNA, 19 nt, Homo sapiens
  misc_RNA (1)...(19): siRNA sense strand
cagaaaagauggaaaagaa

SEQ ID NO: 434144 - RNA, 19 nt, Homo sapiens
  misc_RNA (1)...(19): siRNA sense strand
gaggagaaagaaacagaua

SEQ ID NO: 434145 - RNA, 19 nt, Homo sapiens
  misc_RNA (1)...(19): siRNA sense strand
ggaggaugaugaugaugau

SEQ ID NO: 434146 - RNA, 19 nt, Homo sapiens
  misc_RNA (1)...(19): siRNA sense strand
gaugaugacuccucuucag

SEQ ID NO: 434147 - RNA, 19 nt, Homo sapiens
  misc_RNA (1)...(19): siRNA sense strand
auucaaaccugaccacaga

SEQ ID NO: 434148 - RNA, 19 nt, Homo sapiens
  misc_RNA (1)...(19): siRNA sense strand
ggaugaugaugaugaugau

SEQ ID NO: 434149 - RNA, 19 nt, Homo sapiens
  misc_RNA (1)...(19): siRNA sense strand
cagauaacaccaaaccaaa

SEQ ID NO: 434150 - RNA, 19 nt, Homo sapiens
  misc_RNA (1)...(19): siRNA sense strand
ggagaaagaaacagauaac

SEQ ID NO: 434151 - RNA, 19 nt, Homo sapiens
  misc_RNA (1)...(19): siRNA sense strand
gaggcuacaagguccguua

SEQ ID NO: 434152 - RNA, 19 nt, Homo sapiens
  misc_RNA (1)...(19): siRNA sense strand
acacugcgcugguugaaaa

SEQ ID NO: 434153 - RNA, 19 nt, Homo sapiens
  misc_RNA (1)...(19): siRNA sense strand
aaaccugaccacagaauug

SEQ ID NO: 434154 - RNA, 19 nt, Homo sapiens
  misc_RNA (1)...(19): siRNA sense strand
acagauaacaccaaaccaa

SEQ ID NO: 434155 - RNA, 19 nt, Homo sapiens
  misc_RNA (1)...(19): siRNA sense strand
gcuacaagguccguuaugc

SEQ ID NO: 434156 - RNA, 19 nt, Homo sapiens
  misc_RNA (1)...(19): siRNA sense strand
gagaaagaaacagauaaca

SEQ ID NO: 434157 - RNA, 19 nt, Homo sapiens
  misc_RNA (1)...(19): siRNA sense strand
cagaggagaaagaaacaga

SEQ ID NO: 434158 - RNA, 19 nt, Homo sapiens
  misc_RNA (1)...(19): siRNA sense strand
gcaucauaauggacucugu

SEQ ID NO: 434159 - RNA, 19 nt, Homo sapiens
  misc_RNA (1)...(19): siRNA sense strand
caaaccugaccacagaauu

SEQ ID NO: 434160 - RNA, 19 nt, Homo sapiens
  misc_RNA (1)...(19): siRNA sense strand
cggaggaugaugaugauga

SEQ ID NO: 434161 - RNA, 19 nt, Homo sapiens
  misc_RNA (1)...(19): siRNA sense strand
ggacauccccagaaaagau

SEQ ID NO: 434162 - RNA, 19 nt, Homo sapiens
  misc_RNA (1)...(19): siRNA sense strand
gaauuggaggcuacaaggu

SEQ ID NO: 434163 - RNA, 19 nt, Homo sapiens
  misc_RNA (1)...(19): siRNA sense strand
acucuguggugcccucuga

SEQ ID NO: 434164 - RNA, 19 nt, Homo sapiens
  misc_RNA (1)...(19): siRNA sense strand
ccuggagcaucauaaugga

SEQ ID NO: 434165 - RNA, 19 nt, Homo sapiens
  misc_RNA (1)...(19): siRNA sense strand
ccaccuggagcaucauaau

SEQ ID NO: 434166 - RNA, 19 nt, Homo sapiens
  misc_RNA (1)...(19): siRNA sense strand
aaacagauaacaccaaacc

SEQ ID NO: 434167 - RNA, 19 nt, Homo sapiens
  misc_RNA (1)...(19): siRNA sense strand
aggaugaugaugaugauga

SEQ ID NO: 434168 - RNA, 19 nt, Homo sapiens
  misc_RNA (1)...(19): siRNA sense strand
aggagaaagaaacagauaa

SEQ ID NO: 434169 - RNA, 19 nt, Homo sapiens
  misc_RNA (1)...(19): siRNA sense strand
agaaacagauaacaccaaa

SEQ ID NO: 434170 - RNA, 19 nt, Homo sapiens
  misc_RNA (1)...(19): siRNA sense strand
cagaaaagauggaaaagaa

SEQ ID NO: 434171 - RNA, 19 nt, Homo sapiens
  misc_RNA (1)...(19): siRNA sense strand
gaggagaaagaaacagaua

SEQ ID NO: 434172 - RNA, 19 nt, Homo sapiens
  misc_RNA (1)...(19): siRNA sense strand
ggaggaugaugaugaugau

SEQ ID NO: 434173 - RNA, 19 nt, Homo sapiens
  misc_RNA (1)...(19): siRNA sense strand
gaugaugacuccucuucag

SEQ ID NO: 434174 - RNA, 19 nt, Homo sapiens
  misc_RNA (1)...(19): siRNA sense strand
auucaaaccugaccacaga

SEQ ID NO: 434175 - RNA, 19 nt, Homo sapiens
  misc_RNA (1)...(19): siRNA sense strand
ggaugaugaugaugaugau

SEQ ID NO: 434176 - RNA, 19 nt, Homo sapiens
  misc_RNA (1)...(19): siRNA sense strand
cagauaacaccaaaccaaa

SEQ ID NO: 434177 - RNA, 19 nt, Homo sapiens
  misc_RNA (1)...(19): siRNA sense strand
ggagaaagaaacagauaac

SEQ ID NO: 434178 - RNA, 19 nt, Homo sapiens
  misc_RNA (1)...(19): siRNA sense strand
gaggcuacaagguccguua

SEQ ID NO: 434179 - RNA, 19 nt, Homo sapiens
  misc_RNA (1)...(19): siRNA sense strand
acacugcgcugguugaaaa

SEQ ID NO: 434180 - RNA, 19 nt, Homo sapiens
  misc_RNA (1)...(19): siRNA sense strand
aaaccugaccacagaauug

SEQ ID NO: 434181 - RNA, 19 nt, Homo sapiens
  misc_RNA (1)...(19): siRNA sense strand
acagauaacaccaaaccaa

SEQ ID NO: 434182 - RNA, 19 nt, Homo sapiens
  misc_RNA (1)...(19): siRNA sense strand
gcuacaagguccguuaugc

SEQ ID NO: 434183 - RNA, 19 nt, Homo sapiens
  misc_RNA (1)...(19): siRNA sense strand
gagaaagaaacagauaaca

SEQ ID NO: 434184 - RNA, 19 nt, Homo sapiens
  misc_RNA (1)...(19): siRNA sense strand
cagaggagaaagaaacaga

SEQ ID NO: 434185 - RNA, 19 nt, Homo sapiens
  misc_RNA (1)...(19): siRNA sense strand
gcaucauaauggacucugu

SEQ ID NO: 434186 - RNA, 19 nt, Homo sapiens
  misc_RNA (1)...(19): siRNA sense strand
caaaccugaccacagaauu

SEQ ID NO: 434187 - RNA, 19 nt, Homo sapiens
  misc_RNA (1)...(19): siRNA sense strand
cggaggaugaugaugauga

SEQ ID NO: 434188 - RNA, 19 nt, Homo sapiens
  misc_RNA (1)...(19): siRNA sense strand
ggacauccccagaaaagau

SEQ ID NO: 434189 - RNA, 19 nt, Homo sapiens
  misc_RNA (1)...(19): siRNA sense strand
gaauuggaggcuacaaggu

SEQ ID NO: 434190 - RNA, 19 nt, Homo sapiens
  misc_RNA (1)...(19): siRNA sense strand
acucuguggugcccucuga

SEQ ID NO: 434191 - RNA, 19 nt, Homo sapiens
  misc_RNA (1)...(19): siRNA sense strand
ccuggagcaucauaaugga

SEQ ID NO: 434192 - RNA, 19 nt, Homo sapiens
  misc_RNA (1)...(19): siRNA sense strand
ccaccuggagcaucauaau

SEQ ID NO: 434193 - RNA, 19 nt, Homo sapiens
  misc_RNA (1)...(19): siRNA sense strand
aaacagauaacaccaaacc

SEQ ID NO: 434194 - RNA, 19 nt, Homo sapiens
  misc_RNA (1)...(19): siRNA sense strand
aggaugaugaugaugauga

SEQ ID NO: 434195 - RNA, 19 nt, Homo sapiens
  misc_RNA (1)...(19): siRNA sense strand
aggagaaagaaacagauaa

SEQ ID NO: 434196 - RNA, 19 nt, Homo sapiens
  misc_RNA (1)...(19): siRNA sense strand
agaaacagauaacaccaaa

SEQ ID NO: 434197 - RNA, 19 nt, Homo sapiens
  misc_RNA (1)...(19): siRNA sense strand
cagaaaagauggaaaagaa

SEQ ID NO: 434198 - RNA, 19 nt, Homo sapiens
  misc_RNA (1)...(19): siRNA sense strand
gaggagaaagaaacagaua

SEQ ID NO: 434199 - RNA, 19 nt, Homo sapiens
  misc_RNA (1)...(19): siRNA sense strand
ggaggaugaugaugaugau

SEQ ID NO: 434200 - RNA, 19 nt, Homo sapiens
  misc_RNA (1)...(19): siRNA sense strand
gaugaugacuccucuucag

SEQ ID NO: 434201 - RNA, 19 nt, Homo sapiens
  misc_RNA (1)...(19): siRNA sense strand
auucaaaccugaccacaga

SEQ ID NO: 434202 - RNA, 19 nt, Homo sapiens
  misc_RNA (1)...(19): siRNA sense strand
ggaugaugaugaugaugau

SEQ ID NO: 434203 - RNA, 19 nt, Homo sapiens
  misc_RNA (1)...(19): siRNA sense strand
cagauaacaccaaaccaaa

SEQ ID NO: 434204 - RNA, 19 nt, Homo sapiens
  misc_RNA (1)...(19): siRNA sense strand
ggagaaagaaacagauaac

SEQ ID NO: 434205 - RNA, 19 nt, Homo sapiens
  misc_RNA (1)...(19): siRNA sense strand
gaggcuacaagguccguua

SEQ ID NO: 434206 - RNA, 19 nt, Homo sapiens
  misc_RNA (1)...(19): siRNA sense strand
acacugcgcugguugaaaa

SEQ ID NO: 434207 - RNA, 19 nt, Homo sapiens
  misc_RNA (1)...(19): siRNA sense strand
aaaccugaccacagaauug

SEQ ID NO: 434208 - RNA, 19 nt, Homo sapiens
  misc_RNA (1)...(19): siRNA sense strand
acagauaacaccaaaccaa

SEQ ID NO: 434209 - RNA, 19 nt, Homo sapiens
  misc_RNA (1)...(19): siRNA sense strand
gcuacaagguccguuaugc

SEQ ID NO: 434210 - RNA, 19 nt, Homo sapiens
  misc_RNA (1)...(19): siRNA sense strand
gagaaagaaacagauaaca

SEQ ID NO: 434211 - RNA, 19 nt, Homo sapiens
  misc_RNA (1)...(19): siRNA sense strand
cagaggagaaagaaacaga

SEQ ID NO: 434212 - RNA, 19 nt, Homo sapiens
  misc_RNA (1)...(19): siRNA sense strand
gcaucauaauggacucugu

SEQ ID NO: 434213 - RNA, 19 nt, Homo sapiens
  misc_RNA (1)...(19): siRNA sense strand
caaaccugaccacagaauu

SEQ ID NO: 434214 - RNA, 19 nt, Homo sapiens
  misc_RNA (1)...(19): siRNA sense strand
cggaggaugaugaugauga

SEQ ID NO: 434215 - RNA, 19 nt, Homo sapiens
  misc_RNA (1)...(19): siRNA sense strand
ggacauccccagaaaagau

SEQ ID NO: 434216 - RNA, 19 nt, Homo sapiens
  misc_RNA (1)...(19): siRNA sense strand
gaauuggaggcuacaaggu

SEQ ID NO: 434217 - RNA, 19 nt, Homo sapiens
  misc_RNA (1)...(19): siRNA sense strand
acucuguggugcccucuga

SEQ ID NO: 434218 - RNA, 19 nt, Homo sapiens
  misc_RNA (1)...(19): siRNA sense strand
ccuggagcaucauaaugga

SEQ ID NO: 434219 - RNA, 19 nt, Homo sapiens
  misc_RNA (1)...(19): siRNA sense strand
ccaccuggagcaucauaau

SEQ ID NO: 434220 - RNA, 19 nt, Homo sapiens
  misc_RNA (1)...(19): siRNA sense strand
aaacagauaacaccaaacc

SEQ ID NO: 434221 - RNA, 19 nt, Homo sapiens
  misc_RNA (1)...(19): siRNA sense strand
aggaugaugaugaugauga

SEQ ID NO: 434222 - RNA, 19 nt, Homo sapiens
  misc_RNA (1)...(19): siRNA sense strand
aggagaaagaaacagauaa

SEQ ID NO: 434223 - RNA, 19 nt, Homo sapiens
  misc_RNA (1)...(19): siRNA sense strand
agaaacagauaacaccaaa

SEQ ID NO: 434224 - RNA, 19 nt, Homo sapiens
  misc_RNA (1)...(19): siRNA sense strand
cagaaaagauggaaaagaa

SEQ ID NO: 434225 - RNA, 19 nt, Homo sapiens
  misc_RNA (1)...(19): siRNA sense strand
gaggagaaagaaacagaua

SEQ ID NO: 434226 - RNA, 19 nt, Homo sapiens
  misc_RNA (1)...(19): siRNA sense strand
ggaggaugaugaugaugau

SEQ ID NO: 434227 - RNA, 19 nt, Homo sapiens
  misc_RNA (1)...(19): siRNA sense strand
gaugaugacuccucuucag

SEQ ID NO: 434228 - RNA, 19 nt, Homo sapiens
  misc_RNA (1)...(19): siRNA sense strand
auucaaaccugaccacaga

SEQ ID NO: 434229 - RNA, 19 nt, Homo sapiens
  misc_RNA (1)...(19): siRNA sense strand
ggaugaugaugaugaugau

SEQ ID NO: 434230 - RNA, 19 nt, Homo sapiens
  misc_RNA (1)...(19): siRNA sense strand
cagauaacaccaaaccaaa

SEQ ID NO: 434231 - RNA, 19 nt, Homo sapiens
  misc_RNA (1)...(19): siRNA sense strand
ggagaaagaaacagauaac

SEQ ID NO: 434232 - RNA, 19 nt, Homo sapiens
  misc_RNA (1)...(19): siRNA sense strand
gaggcuacaagguccguua

SEQ ID NO: 434233 - RNA, 19 nt, Homo sapiens
  misc_RNA (1)...(19): siRNA sense strand
acacugcgcugguugaaaa

SEQ ID NO: 434234 - RNA, 19 nt, Homo sapiens
  misc_RNA (1)...(19): siRNA sense strand
aaaccugaccacagaauug

SEQ ID NO: 434235 - RNA, 19 nt, Homo sapiens
  misc_RNA (1)...(19): siRNA sense strand
acagauaacaccaaaccaa

SEQ ID NO: 434236 - RNA, 19 nt, Homo sapiens
  misc_RNA (1)...(19): siRNA sense strand
gcuacaagguccguuaugc

SEQ ID NO: 434237 - RNA, 19 nt, Homo sapiens
  misc_RNA (1)...(19): siRNA sense strand
gagaaagaaacagauaaca

SEQ ID NO: 434238 - RNA, 19 nt, Homo sapiens
  misc_RNA (1)...(19): siRNA sense strand
cagaggagaaagaaacaga

SEQ ID NO: 434239 - RNA, 19 nt, Homo sapiens
  misc_RNA (1)...(19): siRNA sense strand
gcaucauaauggacucugu

SEQ ID NO: 434240 - RNA, 19 nt, Homo sapiens
  misc_RNA (1)...(19): siRNA sense strand
caaaccugaccacagaauu

SEQ ID NO: 434241 - RNA, 19 nt, Homo sapiens
  misc_RNA (1)...(19): siRNA sense strand
cggaggaugaugaugauga

SEQ ID NO: 434242 - RNA, 19 nt, Homo sapiens
  misc_RNA (1)...(19): siRNA sense strand
ggacauccccagaaaagau

SEQ ID NO: 434243 - RNA, 19 nt, Homo sapiens
  misc_RNA (1)...(19): siRNA sense strand
gaauuggaggcuacaaggu

SEQ ID NO: 434244 - RNA, 19 nt, Homo sapiens
  misc_RNA (1)...(19): siRNA sense strand
acucuguggugcccucuga

SEQ ID NO: 434245 - RNA, 19 nt, Homo sapiens
  misc_RNA (1)...(19): siRNA sense strand
ccuggagcaucauaaugga

SEQ ID NO: 434246 - RNA, 19 nt, Homo sapiens
  misc_RNA (1)...(19): siRNA sense strand
ccaccuggagcaucauaau

SEQ ID NO: 434247 - RNA, 19 nt, Homo sapiens
  misc_RNA (1)...(19): siRNA sense strand
aaacagauaacaccaaacc

SEQ ID NO: 434248 - RNA, 19 nt, Homo sapiens
  misc_RNA (1)...(19): siRNA sense strand
aggaugaugaugaugauga

SEQ ID NO: 434249 - RNA, 19 nt, Homo sapiens
  misc_RNA (1)...(19): siRNA sense strand
aggagaaagaaacagauaa

SEQ ID NO: 434250 - RNA, 19 nt, Homo sapiens
  misc_RNA (1)...(19): siRNA sense strand
agaaacagauaacaccaaa

SEQ ID NO: 434251 - RNA, 19 nt, Homo sapiens
  misc_RNA (1)...(19): siRNA sense strand
cagaaaagauggaaaagaa

SEQ ID NO: 434252 - RNA, 19 nt, Homo sapiens
  misc_RNA (1)...(19): siRNA sense strand
gaggagaaagaaacagaua

SEQ ID NO: 434253 - RNA, 19 nt, Homo sapiens
  misc_RNA (1)...(19): siRNA sense strand
ggaggaugaugaugaugau

SEQ ID NO: 434254 - RNA, 19 nt, Homo sapiens
  misc_RNA (1)...(19): siRNA sense strand
gaugaugacuccucuucag

SEQ ID NO: 434255 - RNA, 19 nt, Homo sapiens
  misc_RNA (1)...(19): siRNA sense strand
auucaaaccugaccacaga

SEQ ID NO: 434256 - RNA, 19 nt, Homo sapiens
  misc_RNA (1)...(19): siRNA sense strand
ggaugaugaugaugaugau

SEQ ID NO: 434257 - RNA, 19 nt, Homo sapiens
  misc_RNA (1)...(19): siRNA sense strand
cagauaacaccaaaccaaa

SEQ ID NO: 434258 - RNA, 19 nt, Homo sapiens
  misc_RNA (1)...(19): siRNA sense strand
ggagaaagaaacagauaac

SEQ ID NO: 434259 - RNA, 19 nt, Homo sapiens
  misc_RNA (1)...(19): siRNA sense strand
gaggcuacaagguccguua

SEQ ID NO: 434260 - RNA, 19 nt, Homo sapiens
  misc_RNA (1)...(19): siRNA sense strand
acacugcgcugguugaaaa

SEQ ID NO: 434261 - RNA, 19 nt, Homo sapiens
  misc_RNA (1)...(19): siRNA sense strand
aaaccugaccacagaauug

SEQ ID NO: 434262 - RNA, 19 nt, Homo sapiens
  misc_RNA (1)...(19): siRNA sense strand
acagauaacaccaaaccaa

SEQ ID NO: 434263 - RNA, 19 nt, Homo sapiens
  misc_RNA (1)...(19): siRNA sense strand
gcuacaagguccguuaugc

SEQ ID NO: 434264 - RNA, 19 nt, Homo sapiens
  misc_RNA (1)...(19): siRNA sense strand
gagaaagaaacagauaaca

SEQ ID NO: 434265 - RNA, 19 nt, Homo sapiens
  misc_RNA (1)...(19): siRNA sense strand
cagaggagaaagaaacaga

SEQ ID NO: 434266 - RNA, 19 nt, Homo sapiens
  misc_RNA (1)...(19): siRNA sense strand
gcaucauaauggacucugu

SEQ ID NO: 434267 - RNA, 19 nt, Homo sapiens
  misc_RNA (1)...(19): siRNA sense strand
caaaccugaccacagaauu

SEQ ID NO: 434268 - RNA, 19 nt, Homo sapiens
  misc_RNA (1)...(19): siRNA sense strand
cggaggaugaugaugauga

SEQ ID NO: 434269 - RNA, 19 nt, Homo sapiens
  misc_RNA (1)...(19): siRNA sense strand
ggacauccccagaaaagau

SEQ ID NO: 434270 - RNA, 19 nt, Homo sapiens
  misc_RNA (1)...(19): siRNA sense strand
gaauuggaggcuacaaggu

SEQ ID NO: 434271 - RNA, 19 nt, Homo sapiens
  misc_RNA (1)...(19): siRNA sense strand
acucuguggugcccucuga

SEQ ID NO: 434272 - RNA, 19 nt, Homo sapiens
  misc_RNA (1)...(19): siRNA sense strand
ccuggagcaucauaaugga

SEQ ID NO: 434273 - RNA, 19 nt, Homo sapiens
  misc_RNA (1)...(19): siRNA sense strand
ccaccuggagcaucauaau

SEQ ID NO: 434274 - RNA, 19 nt, Homo sapiens
  misc_RNA (1)...(19): siRNA sense strand
aaacagauaacaccaaacc

SEQ ID NO: 434275 - RNA, 19 nt, Homo sapiens
  misc_RNA (1)...(19): siRNA sense strand
aggaugaugaugaugauga

SEQ ID NO: 434276 - RNA, 19 nt, Homo sapiens
  misc_RNA (1)...(19): siRNA sense strand
aggagaaagaaacagauaa

SEQ ID NO: 434277 - RNA, 19 nt, Homo sapiens
  misc_RNA (1)...(19): siRNA sense strand
agaaacagauaacaccaaa

SEQ ID NO: 434278 - RNA, 19 nt, Homo sapiens
  misc_RNA (1)...(19): siRNA sense strand
cagaaaagauggaaaagaa

SEQ ID NO: 434279 - RNA, 19 nt, Homo sapiens
  misc_RNA (1)...(19): siRNA sense strand
gaggagaaagaaacagaua

SEQ ID NO: 434280 - RNA, 19 nt, Homo sapiens
  misc_RNA (1)...(19): siRNA sense strand
ggaggaugaugaugaugau

SEQ ID NO: 434281 - RNA, 19 nt, Homo sapiens
  misc_RNA (1)...(19): siRNA sense strand
gaugaugacuccucuucag

SEQ ID NO: 434282 - RNA, 19 nt, Homo sapiens
  misc_RNA (1)...(19): siRNA sense strand
auucaaaccugaccacaga

SEQ ID NO: 434283 - RNA, 19 nt, Homo sapiens
  misc_RNA (1)...(19): siRNA sense strand
ggaugaugaugaugaugau

SEQ ID NO: 434284 - RNA, 19 nt, Homo sapiens
  misc_RNA (1)...(19): siRNA sense strand
cagauaacaccaaaccaaa

SEQ ID NO: 434285 - RNA, 19 nt, Homo sapiens
  misc_RNA (1)...(19): siRNA sense strand
ggagaaagaaacagauaac

SEQ ID NO: 434286 - RNA, 19 nt, Homo sapiens
  misc_RNA (1)...(19): siRNA sense strand
gaggcuacaagguccguua

SEQ ID NO: 434287 - RNA, 19 nt, Homo sapiens
  misc_RNA (1)...(19): siRNA sense strand
acacugcgcugguugaaaa

SEQ ID NO: 434288 - RNA, 19 nt, Homo sapiens
  misc_RNA (1)...(19): siRNA sense strand
aaaccugaccacagaauug

SEQ ID NO: 434289 - RNA, 19 nt, Homo sapiens
  misc_RNA (1)...(19): siRNA sense strand
acagauaacaccaaaccaa

SEQ ID NO: 434290 - RNA, 19 nt, Homo sapiens
  misc_RNA (1)...(19): siRNA sense strand
gcuacaagguccguuaugc

SEQ ID NO: 434291 - RNA, 19 nt, Homo sapiens
  misc_RNA (1)...(19): siRNA sense strand
gagaaagaaacagauaaca

SEQ ID NO: 434292 - RNA, 19 nt, Homo sapiens
  misc_RNA (1)...(19): siRNA sense strand
cagaggagaaagaaacaga

SEQ ID NO: 434293 - RNA, 19 nt, Homo sapiens
  misc_RNA (1)...(19): siRNA sense strand
gcaucauaauggacucugu

SEQ ID NO: 434294 - RNA, 19 nt, Homo sapiens
  misc_RNA (1)...(19): siRNA sense strand
caaaccugaccacagaauu

SEQ ID NO: 434295 - RNA, 19 nt, Homo sapiens
  misc_RNA (1)...(19): siRNA sense strand
cggaggaugaugaugauga

SEQ ID NO: 434296 - RNA, 19 nt, Homo sapiens
  misc_RNA (1)...(19): siRNA sense strand
ggacauccccagaaaagau

SEQ ID NO: 434297 - RNA, 19 nt, Homo sapiens
  misc_RNA (1)...(19): siRNA sense strand
gaauuggaggcuacaaggu

SEQ ID NO: 434298 - RNA, 19 nt, Homo sapiens
  misc_RNA (1)...(19): siRNA sense strand
acucuguggugcccucuga

SEQ ID NO: 434299 - RNA, 19 nt, Homo sapiens
  misc_RNA (1)...(19): siRNA sense strand
ccuggagcaucauaaugga

SEQ ID NO: 434300 - RNA, 19 nt, Homo sapiens
  misc_RNA (1)...(19): siRNA sense strand
ccaccuggagcaucauaau

SEQ ID NO: 434301 - RNA, 19 nt, Homo sapiens
  misc_RNA (1)...(19): siRNA sense strand
aaacagauaacaccaaacc

SEQ ID NO: 434302 - RNA, 19 nt, Homo sapiens
  misc_RNA (1)...(19): siRNA sense strand
aggaugaugaugaugauga

SEQ ID NO: 434303 - RNA, 19 nt, Homo sapiens
  misc_RNA (1)...(19): siRNA sense strand
aggagaaagaaacagauaa

SEQ ID NO: 434304 - RNA, 19 nt, Homo sapiens
  misc_RNA (1)...(19): siRNA sense strand
agaaacagauaacaccaaa

SEQ ID NO: 434305 - RNA, 19 nt, Homo sapiens
  misc_RNA (1)...(19): siRNA sense strand
cagaaaagauggaaaagaa

SEQ ID NO: 434306 - RNA, 19 nt, Homo sapiens
  misc_RNA (1)...(19): siRNA sense strand
gaggagaaagaaacagaua

SEQ ID NO: 434307 - RNA, 19 nt, Homo sapiens
  misc_RNA (1)...(19): siRNA sense strand
ggaggaugaugaugaugau

SEQ ID NO: 434308 - RNA, 19 nt, Homo sapiens
  misc_RNA (1)...(19): siRNA sense strand
gaugaugacuccucuucag

SEQ ID NO: 434309 - RNA, 19 nt, Homo sapiens
  misc_RNA (1)...(19): siRNA sense strand
auucaaaccugaccacaga

SEQ ID NO: 434310 - RNA, 19 nt, Homo sapiens
  misc_RNA (1)...(19): siRNA sense strand
ggaugaugaugaugaugau

SEQ ID NO: 434311 - RNA, 19 nt, Homo sapiens
  misc_RNA (1)...(19): siRNA sense strand
cagauaacaccaaaccaaa

SEQ ID NO: 434312 - RNA, 19 nt, Homo sapiens
  misc_RNA (1)...(19): siRNA sense strand
ggagaaagaaacagauaac

SEQ ID NO: 434313 - RNA, 19 nt, Homo sapiens
  misc_RNA (1)...(19): siRNA sense strand
gaggcuacaagguccguua

SEQ ID NO: 434314 - RNA, 19 nt, Homo sapiens
  misc_RNA (1)...(19): siRNA sense strand
acacugcgcugguugaaaa

SEQ ID NO: 434315 - RNA, 19 nt, Homo sapiens
  misc_RNA (1)...(19): siRNA sense strand
aaaccugaccacagaauug

SEQ ID NO: 434316 - RNA, 19 nt, Homo sapiens
  misc_RNA (1)...(19): siRNA sense strand
acagauaacaccaaaccaa

SEQ ID NO: 434317 - RNA, 19 nt, Homo sapiens
  misc_RNA (1)...(19): siRNA sense strand
gcuacaagguccguuaugc

SEQ ID NO: 434318 - RNA, 19 nt, Homo sapiens
  misc_RNA (1)...(19): siRNA sense strand
gagaaagaaacagauaaca

SEQ ID NO: 434319 - RNA, 19 nt, Homo sapiens
  misc_RNA (1)...(19): siRNA sense strand
cagaggagaaagaaacaga

SEQ ID NO: 434320 - RNA, 19 nt, Homo sapiens
  misc_RNA (1)...(19): siRNA sense strand
gcaucauaauggacucugu

SEQ ID NO: 434321 - RNA, 19 nt, Homo sapiens
  misc_RNA (1)...(19): siRNA sense strand
caaaccugaccacagaauu

SEQ ID NO: 434322 - RNA, 19 nt, Homo sapiens
  misc_RNA (1)...(19): siRNA sense strand
cggaggaugaugaugauga

SEQ ID NO: 434323 - RNA, 19 nt, Homo sapiens
  misc_RNA (1)...(19): siRNA sense strand
ggacauccccagaaaagau

SEQ ID NO: 434324 - RNA, 19 nt, Homo sapiens
  misc_RNA (1)...(19): siRNA sense strand
gaauuggaggcuacaaggu

SEQ ID NO: 434325 - RNA, 19 nt, Homo sapiens
  misc_RNA (1)...(19): siRNA sense strand
acucuguggugcccucuga

SEQ ID NO: 434326 - RNA, 19 nt, Homo sapiens
  misc_RNA (1)...(19): siRNA sense strand
ccuggagcaucauaaugga

SEQ ID NO: 434327 - RNA, 19 nt, Homo sapiens
  misc_RNA (1)...(19): siRNA sense strand
ccaccuggagcaucauaau

SEQ ID NO: 434328 - RNA, 19 nt, Homo sapiens
  misc_RNA (1)...(19): siRNA sense strand
aaacagauaacaccaaacc

SEQ ID NO: 434329 - RNA, 19 nt, Homo sapiens
  misc_RNA (1)...(19): siRNA sense strand
aggaugaugaugaugauga

SEQ ID NO: 434330 - RNA, 19 nt, Homo sapiens
  misc_RNA (1)...(19): siRNA sense strand
aggagaaagaaacagauaa

SEQ ID NO: 434331 - RNA, 19 nt, Homo sapiens
  misc_RNA (1)...(19): siRNA sense strand
agaaacagauaacaccaaa

SEQ ID NO: 434332 - RNA, 19 nt, Homo sapiens
  misc_RNA (1)...(19): siRNA sense strand
cagaaaagauggaaaagaa

SEQ ID NO: 434333 - RNA, 19 nt, Homo sapiens
  misc_RNA (1)...(19): siRNA sense strand
gaggagaaagaaacagaua

SEQ ID NO: 434334 - RNA, 19 nt, Homo sapiens
  misc_RNA (1)...(19): siRNA sense strand
ggaggaugaugaugaugau

SEQ ID NO: 434335 - RNA, 19 nt, Homo sapiens
  misc_RNA (1)...(19): siRNA sense strand
gaugaugacuccucuucag

SEQ ID NO: 434336 - RNA, 19 nt, Homo sapiens
  misc_RNA (1)...(19): siRNA sense strand
auucaaaccugaccacaga

SEQ ID NO: 434337 - RNA, 19 nt, Homo sapiens
  misc_RNA (1)...(19): siRNA sense strand
ggaugaugaugaugaugau

SEQ ID NO: 434338 - RNA, 19 nt, Homo sapiens
  misc_RNA (1)...(19): siRNA sense strand
cagauaacaccaaaccaaa

SEQ ID NO: 434339 - RNA, 19 nt, Homo sapiens
  misc_RNA (1)...(19): siRNA sense strand
ggagaaagaaacagauaac

SEQ ID NO: 434340 - RNA, 19 nt, Homo sapiens
  misc_RNA (1)...(19): siRNA sense strand
gaggcuacaagguccguua

SEQ ID NO: 434341 - RNA, 19 nt, Homo sapiens
  misc_RNA (1)...(19): siRNA sense strand
acacugcgcugguugaaaa

SEQ ID NO: 434342 - RNA, 19 nt, Homo sapiens
  misc_RNA (1)...(19): siRNA sense strand
aaaccugaccacagaauug

SEQ ID NO: 434343 - RNA, 19 nt, Homo sapiens
  misc_RNA (1)...(19): siRNA sense strand
acagauaacaccaaaccaa

SEQ ID NO: 434344 - RNA, 19 nt, Homo sapiens
  misc_RNA (1)...(19): siRNA sense strand
gcuacaagguccguuaugc

SEQ ID NO: 434345 - RNA, 19 nt, Homo sapiens
  misc_RNA (1)...(19): siRNA sense strand
gagaaagaaacagauaaca

SEQ ID NO: 434346 - RNA, 19 nt, Homo sapiens
  misc_RNA (1)...(19): siRNA sense strand
cagaggagaaagaaacaga

SEQ ID NO: 434347 - RNA, 19 nt, Homo sapiens
  misc_RNA (1)...(19): siRNA sense strand
gcaucauaauggacucugu

SEQ ID NO: 434348 - RNA, 19 nt, Homo sapiens
  misc_RNA (1)...(19): siRNA sense strand
caaaccugaccacagaauu

SEQ ID NO: 434349 - RNA, 19 nt, Homo sapiens
  misc_RNA (1)...(19): siRNA sense strand
cggaggaugaugaugauga

SEQ ID NO: 434350 - RNA, 19 nt, Homo sapiens
  misc_RNA (1)...(19): siRNA sense strand
ggacauccccagaaaagau

SEQ ID NO: 434351 - RNA, 19 nt, Homo sapiens
  misc_RNA (1)...(19): siRNA sense strand
gaauuggaggcuacaaggu

SEQ ID NO: 434352 - RNA, 19 nt, Homo sapiens
  misc_RNA (1)...(19): siRNA sense strand
acucuguggugcccucuga

SEQ ID NO: 434353 - RNA, 19 nt, Homo sapiens
  misc_RNA (1)...(19): siRNA sense strand
ccuggagcaucauaaugga

SEQ ID NO: 434354 - RNA, 19 nt, Homo sapiens
  misc_RNA (1)...(19): siRNA sense strand
ccaccuggagcaucauaau

SEQ ID NO: 434355 - RNA, 19 nt, Homo sapiens
  misc_RNA (1)...(19): siRNA sense strand
aaacagauaacaccaaacc

SEQ ID NO: 434356 - RNA, 19 nt, Homo sapiens
  misc_RNA (1)...(19): siRNA sense strand
aggaugaugaugaugauga

SEQ ID NO: 434357 - RNA, 19 nt, Homo sapiens
  misc_RNA (1)...(19): siRNA sense strand
aggagaaagaaacagauaa

SEQ ID NO: 434358 - RNA, 19 nt, Homo sapiens
  misc_RNA (1)...(19): siRNA sense strand
agaaacagauaacaccaaa

SEQ ID NO: 434359 - RNA, 19 nt, Homo sapiens
  misc_RNA (1)...(19): siRNA sense strand
cagaaaagauggaaaagaa

SEQ ID NO: 434360 - RNA, 19 nt, Homo sapiens
  misc_RNA (1)...(19): siRNA sense strand
gaggagaaagaaacagaua

SEQ ID NO: 434361 - RNA, 19 nt, Homo sapiens
  misc_RNA (1)...(19): siRNA sense strand
ggaggaugaugaugaugau

SEQ ID NO: 434362 - RNA, 19 nt, Homo sapiens
  misc_RNA (1)...(19): siRNA sense strand
gaugaugacuccucuucag

SEQ ID NO: 434363 - RNA, 19 nt, Homo sapiens
  misc_RNA (1)...(19): siRNA sense strand
auucaaaccugaccacaga

SEQ ID NO: 434364 - RNA, 19 nt, Homo sapiens
  misc_RNA (1)...(19): siRNA sense strand
ggaugaugaugaugaugau

SEQ ID NO: 434365 - RNA, 19 nt, Homo sapiens
  misc_RNA (1)...(19): siRNA sense strand
cagauaacaccaaaccaaa

SEQ ID NO: 434366 - RNA, 19 nt, Homo sapiens
  misc_RNA (1)...(19): siRNA sense strand
ggagaaagaaacagauaac

SEQ ID NO: 434367 - RNA, 19 nt, Homo sapiens
  misc_RNA (1)...(19): siRNA sense strand
gaggcuacaagguccguua

SEQ ID NO: 434368 - RNA, 19 nt, Homo sapiens
  misc_RNA (1)...(19): siRNA sense strand
acacugcgcugguugaaaa

SEQ ID NO: 434369 - RNA, 19 nt, Homo sapiens
  misc_RNA (1)...(19): siRNA sense strand
aaaccugaccacagaauug

SEQ ID NO: 434370 - RNA, 19 nt, Homo sapiens
  misc_RNA (1)...(19): siRNA sense strand
acagauaacaccaaaccaa

SEQ ID NO: 434371 - RNA, 19 nt, Homo sapiens
  misc_RNA (1)...(19): siRNA sense strand
gcuacaagguccguuaugc

SEQ ID NO: 434372 - RNA, 19 nt, Homo sapiens
  misc_RNA (1)...(19): siRNA sense strand
gagaaagaaacagauaaca

SEQ ID NO: 434373 - RNA, 19 nt, Homo sapiens
  misc_RNA (1)...(19): siRNA sense strand
cagaggagaaagaaacaga

SEQ ID NO: 434374 - RNA, 19 nt, Homo sapiens
  misc_RNA (1)...(19): siRNA sense strand
gcaucauaauggacucugu

SEQ ID NO: 434375 - RNA, 19 nt, Homo sapiens
  misc_RNA (1)...(19): siRNA sense strand
caaaccugaccacagaauu

SEQ ID NO: 434376 - RNA, 19 nt, Homo sapiens
  misc_RNA (1)...(19): siRNA sense strand
cggaggaugaugaugauga

SEQ ID NO: 434377 - RNA, 19 nt, Homo sapiens
  misc_RNA (1)...(19): siRNA sense strand
ggacauccccagaaaagau

SEQ ID NO: 434378 - RNA, 19 nt, Homo sapiens
  misc_RNA (1)...(19): siRNA sense strand
gaauuggaggcuacaaggu

SEQ ID NO: 434379 - RNA, 19 nt, Homo sapiens
  misc_RNA (1)...(19): siRNA sense strand
acucuguggugcccucuga

SEQ ID NO: 434380 - RNA, 19 nt, Homo sapiens
  misc_RNA (1)...(19): siRNA sense strand
ccuggagcaucauaaugga

SEQ ID NO: 434381 - RNA, 19 nt, Homo sapiens
  misc_RNA (1)...(19): siRNA sense strand
ccaccuggagcaucauaau

SEQ ID NO: 434382 - RNA, 19 nt, Homo sapiens
  misc_RNA (1)...(19): siRNA sense strand
aaacagauaacaccaaacc

SEQ ID NO: 434383 - RNA, 19 nt, Homo sapiens
  misc_RNA (1)...(19): siRNA sense strand
aggaugaugaugaugauga

SEQ ID NO: 434384 - RNA, 19 nt, Homo sapiens
  misc_RNA (1)...(19): siRNA sense strand
aggagaaagaaacagauaa

SEQ ID NO: 434385 - RNA, 19 nt, Homo sapiens
  misc_RNA (1)...(19): siRNA sense strand
agaaacagauaacaccaaa

SEQ ID NO: 434386 - RNA, 19 nt, Homo sapiens
  misc_RNA (1)...(19): siRNA sense strand
cagaaaagauggaaaagaa

SEQ ID NO: 434387 - RNA, 19 nt, Homo sapiens
  misc_RNA (1)...(19): siRNA sense strand
gaggagaaagaaacagaua

SEQ ID NO: 434388 - RNA, 19 nt, Homo sapiens
  misc_RNA (1)...(19): siRNA sense strand
ggaggaugaugaugaugau

SEQ ID NO: 434389 - RNA, 19 nt, Homo sapiens
  misc_RNA (1)...(19): siRNA sense strand
gaugaugacuccucuucag

SEQ ID NO: 434390 - RNA, 19 nt, Homo sapiens
  misc_RNA (1)...(19): siRNA sense strand
auucaaaccugaccacaga

SEQ ID NO: 434391 - RNA, 19 nt, Homo sapiens
  misc_RNA (1)...(19): siRNA sense strand
ggaugaugaugaugaugau

SEQ ID NO: 434392 - RNA, 19 nt, Homo sapiens
  misc_RNA (1)...(19): siRNA sense strand
cagauaacaccaaaccaaa

SEQ ID NO: 434393 - RNA, 19 nt, Homo sapiens
  misc_RNA (1)...(19): siRNA sense strand
ggagaaagaaacagauaac

SEQ ID NO: 434394 - RNA, 19 nt, Homo sapiens
  misc_RNA (1)...(19): siRNA sense strand
gaggcuacaagguccguua

SEQ ID NO: 434395 - RNA, 19 nt, Homo sapiens
  misc_RNA (1)...(19): siRNA sense strand
acacugcgcugguugaaaa

SEQ ID NO: 434396 - RNA, 19 nt, Homo sapiens
  misc_RNA (1)...(19): siRNA sense strand
aaaccugaccacagaauug

SEQ ID NO: 434397 - RNA, 19 nt, Homo sapiens
  misc_RNA (1)...(19): siRNA sense strand
acagauaacaccaaaccaa

SEQ ID NO: 434398 - RNA, 19 nt, Homo sapiens
  misc_RNA (1)...(19): siRNA sense strand
gcuacaagguccguuaugc

SEQ ID NO: 434399 - RNA, 19 nt, Homo sapiens
  misc_RNA (1)...(19): siRNA sense strand
gagaaagaaacagauaaca

SEQ ID NO: 434400 - RNA, 19 nt, Homo sapiens
  misc_RNA (1)...(19): siRNA sense strand
cagaggagaaagaaacaga

SEQ ID NO: 434401 - RNA, 19 nt, Homo sapiens
  misc_RNA (1)...(19): siRNA sense strand
gcaucauaauggacucugu

SEQ ID NO: 434402 - RNA, 19 nt, Homo sapiens
  misc_RNA (1)...(19): siRNA sense strand
caaaccugaccacagaauu

SEQ ID NO: 434403 - RNA, 19 nt, Homo sapiens
  misc_RNA (1)...(19): siRNA sense strand
cggaggaugaugaugauga

SEQ ID NO: 434404 - RNA, 19 nt, Homo sapiens
  misc_RNA (1)...(19): siRNA sense strand
ggacauccccagaaaagau

SEQ ID NO: 434405 - RNA, 19 nt, Homo sapiens
  misc_RNA (1)...(19): siRNA sense strand
gaauuggaggcuacaaggu

SEQ ID NO: 434406 - RNA, 19 nt, Homo sapiens
  misc_RNA (1)...(19): siRNA sense strand
acucuguggugcccucuga

SEQ ID NO: 434407 - RNA, 19 nt, Homo sapiens
  misc_RNA (1)...(19): siRNA sense strand
ccuggagcaucauaaugga

SEQ ID NO: 434408 - RNA, 19 nt, Homo sapiens
  misc_RNA (1)...(19): siRNA sense strand
ccaccuggagcaucauaau

SEQ ID NO: 434409 - RNA, 19 nt, Homo sapiens
  misc_RNA (1)...(19): siRNA sense strand
aaacagauaacaccaaacc

SEQ ID NO: 434410 - RNA, 19 nt, Homo sapiens
  misc_RNA (1)...(19): siRNA sense strand
aggaugaugaugaugauga

SEQ ID NO: 434411 - RNA, 19 nt, Homo sapiens
  misc_RNA (1)...(19): siRNA sense strand
aggagaaagaaacagauaa

SEQ ID NO: 434412 - RNA, 19 nt, Homo sapiens
  misc_RNA (1)...(19): siRNA sense strand
agaaacagauaacaccaaa

SEQ ID NO: 434413 - RNA, 19 nt, Homo sapiens
  misc_RNA (1)...(19): siRNA sense strand
cagaaaagauggaaaagaa

SEQ ID NO: 434414 - RNA, 19 nt, Homo sapiens
  misc_RNA (1)...(19): siRNA sense strand
gaggagaaagaaacagaua

SEQ ID NO: 434415 - RNA, 19 nt, Homo sapiens
  misc_RNA (1)...(19): siRNA sense strand
ggaggaugaugaugaugau

SEQ ID NO: 434416 - RNA, 19 nt, Homo sapiens
  misc_RNA (1)...(19): siRNA sense strand
gaugaugacuccucuucag

SEQ ID NO: 434417 - RNA, 19 nt, Homo sapiens
  misc_RNA (1)...(19): siRNA sense strand
auucaaaccugaccacaga

SEQ ID NO: 434418 - RNA, 19 nt, Homo sapiens
  misc_RNA (1)...(19): siRNA sense strand
ggaugaugaugaugaugau

SEQ ID NO: 434419 - RNA, 19 nt, Homo sapiens
  misc_RNA (1)...(19): siRNA sense strand
cagauaacaccaaaccaaa

SEQ ID NO: 434420 - RNA, 19 nt, Homo sapiens
  misc_RNA (1)...(19): siRNA sense strand
ggagaaagaaacagauaac

SEQ ID NO: 434421 - RNA, 19 nt, Homo sapiens
  misc_RNA (1)...(19): siRNA sense strand
gaggcuacaagguccguua

SEQ ID NO: 434422 - RNA, 19 nt, Homo sapiens
  misc_RNA (1)...(19): siRNA sense strand
acacugcgcugguugaaaa

SEQ ID NO: 434423 - RNA, 19 nt, Homo sapiens
  misc_RNA (1)...(19): siRNA sense strand
aaaccugaccacagaauug

SEQ ID NO: 434424 - RNA, 19 nt, Homo sapiens
  misc_RNA (1)...(19): siRNA sense strand
acagauaacaccaaaccaa

SEQ ID NO: 434425 - RNA, 19 nt, Homo sapiens
  misc_RNA (1)...(19): siRNA sense strand
gcuacaagguccguuaugc

SEQ ID NO: 434426 - RNA, 19 nt, Homo sapiens
  misc_RNA (1)...(19): siRNA sense strand
gagaaagaaacagauaaca

SEQ ID NO: 434427 - RNA, 19 nt, Homo sapiens
  misc_RNA (1)...(19): siRNA sense strand
cagaggagaaagaaacaga

SEQ ID NO: 434428 - RNA, 19 nt, Homo sapiens
  misc_RNA (1)...(19): siRNA sense strand
gcaucauaauggacucugu

SEQ ID NO: 434429 - RNA, 19 nt, Homo sapiens
  misc_RNA (1)...(19): siRNA sense strand
caaaccugaccacagaauu

SEQ ID NO: 434430 - RNA, 19 nt, Homo sapiens
  misc_RNA (1)...(19): siRNA sense strand
cggaggaugaugaugauga

SEQ ID NO: 434431 - RNA, 19 nt, Homo sapiens
  misc_RNA (1)...(19): siRNA sense strand
ggacauccccagaaaagau

SEQ ID NO: 434432 - RNA, 19 nt, Homo sapiens
  misc_RNA (1)...(19): siRNA sense strand
gaauuggaggcuacaaggu

SEQ ID NO: 434433 - RNA, 19 nt, Homo sapiens
  misc_RNA (1)...(19): siRNA sense strand
acucuguggugcccucuga

SEQ ID NO: 434434 - RNA, 19 nt, Homo sapiens
  misc_RNA (1)...(19): siRNA sense strand
ccuggagcaucauaaugga

SEQ ID NO: 434435 - RNA, 19 nt, Homo sapiens
  misc_RNA (1)...(19): siRNA sense strand
ccaccuggagcaucauaau

SEQ ID NO: 434436 - RNA, 19 nt, Homo sapiens
  misc_RNA (1)...(19): siRNA sense strand
aaacagauaacaccaaacc

SEQ ID NO: 434437 - RNA, 19 nt, Homo sapiens
  misc_RNA (1)...(19): siRNA sense strand
aggaugaugaugaugauga

SEQ ID NO: 434438 - RNA, 19 nt, Homo sapiens
  misc_RNA (1)...(19): siRNA sense strand
aggagaaagaaacagauaa

SEQ ID NO: 434439 - RNA, 19 nt, Homo sapiens
  misc_RNA (1)...(19): siRNA sense strand
agaaacagauaacaccaaa

SEQ ID NO: 434440 - RNA, 19 nt, Homo sapiens
  misc_RNA (1)...(19): siRNA sense strand
cagaaaagauggaaaagaa

SEQ ID NO: 434441 - RNA, 19 nt, Homo sapiens
  misc_RNA (1)...(19): siRNA sense strand
gaggagaaagaaacagaua

SEQ ID NO: 434442 - RNA, 19 nt, Homo sapiens
  misc_RNA (1)...(19): siRNA sense strand
ggaggaugaugaugaugau

SEQ ID NO: 434443 - RNA, 19 nt, Homo sapiens
  misc_RNA (1)...(19): siRNA sense strand
gaugaugacuccucuucag

SEQ ID NO: 434444 - RNA, 19 nt, Homo sapiens
  misc_RNA (1)...(19): siRNA sense strand
auucaaaccugaccacaga

SEQ ID NO: 434445 - RNA, 19 nt, Homo sapiens
  misc_RNA (1)...(19): siRNA sense strand
ggaugaugaugaugaugau

SEQ ID NO: 434446 - RNA, 19 nt, Homo sapiens
  misc_RNA (1)...(19): siRNA sense strand
cagauaacaccaaaccaaa

SEQ ID NO: 434447 - RNA, 19 nt, Homo sapiens
  misc_RNA (1)...(19): siRNA sense strand
ggagaaagaaacagauaac

SEQ ID NO: 434448 - RNA, 19 nt, Homo sapiens
  misc_RNA (1)...(19): siRNA sense strand
gaggcuacaagguccguua

SEQ ID NO: 434449 - RNA, 19 nt, Homo sapiens
  misc_RNA (1)...(19): siRNA sense strand
acacugcgcugguugaaaa

SEQ ID NO: 434450 - RNA, 19 nt, Homo sapiens
  misc_RNA (1)...(19): siRNA sense strand
aaaccugaccacagaauug

SEQ ID NO: 434451 - RNA, 19 nt, Homo sapiens
  misc_RNA (1)...(19): siRNA sense strand
acagauaacaccaaaccaa

SEQ ID NO: 434452 - RNA, 19 nt, Homo sapiens
  misc_RNA (1)...(19): siRNA sense strand
gcuacaagguccguuaugc

SEQ ID NO: 434453 - RNA, 19 nt, Homo sapiens
  misc_RNA (1)...(19): siRNA sense strand
gagaaagaaacagauaaca

SEQ ID NO: 434454 - RNA, 19 nt, Homo sapiens
  misc_RNA (1)...(19): siRNA sense strand
cagaggagaaagaaacaga

SEQ ID NO: 434455 - RNA, 19 nt, Homo sapiens
  misc_RNA (1)...(19): siRNA sense strand
gcaucauaauggacucugu

SEQ ID NO: 434456 - RNA, 19 nt, Homo sapiens
  misc_RNA (1)...(19): siRNA sense strand
caaaccugaccacagaauu

SEQ ID NO: 434457 - RNA, 19 nt, Homo sapiens
  misc_RNA (1)...(19): siRNA sense strand
cggaggaugaugaugauga

SEQ ID NO: 434458 - RNA, 19 nt, Homo sapiens
  misc_RNA (1)...(19): siRNA sense strand
ggacauccccagaaaagau

SEQ ID NO: 434459 - RNA, 19 nt, Homo sapiens
  misc_RNA (1)...(19): siRNA sense strand
gaauuggaggcuacaaggu

SEQ ID NO: 434460 - RNA, 19 nt, Homo sapiens
  misc_RNA (1)...(19): siRNA sense strand
acucuguggugcccucuga

SEQ ID NO: 434461 - RNA, 19 nt, Homo sapiens
  misc_RNA (1)...(19): siRNA sense strand
ccuggagcaucauaaugga

SEQ ID NO: 434462 - RNA, 19 nt, Homo sapiens
  misc_RNA (1)...(19): siRNA sense strand
ccaccuggagcaucauaau

SEQ ID NO: 434463 - RNA, 19 nt, Homo sapiens
  misc_RNA (1)...(19): siRNA sense strand
aaacagauaacaccaaacc

SEQ ID NO: 434464 - RNA, 19 nt, Homo sapiens
  misc_RNA (1)...(19): siRNA sense strand
aggaugaugaugaugauga

SEQ ID NO: 434465 - RNA, 19 nt, Homo sapiens
  misc_RNA (1)...(19): siRNA sense strand
aggagaaagaaacagauaa

SEQ ID NO: 434466 - RNA, 19 nt, Homo sapiens
  misc_RNA (1)...(19): siRNA sense strand
agaaacagauaacaccaaa

SEQ ID NO: 434467 - RNA, 19 nt, Homo sapiens
  misc_RNA (1)...(19): siRNA sense strand
cagaaaagauggaaaagaa

SEQ ID NO: 434468 - RNA, 19 nt, Homo sapiens
  misc_RNA (1)...(19): siRNA sense strand
gaggagaaagaaacagaua

SEQ ID NO: 434469 - RNA, 19 nt, Homo sapiens
  misc_RNA (1)...(19): siRNA sense strand
ggaggaugaugaugaugau

SEQ ID NO: 434470 - RNA, 19 nt, Homo sapiens
  misc_RNA (1)...(19): siRNA sense strand
gaugaugacuccucuucag

SEQ ID NO: 434471 - RNA, 19 nt, Homo sapiens
  misc_RNA (1)...(19): siRNA sense strand
auucaaaccugaccacaga

SEQ ID NO: 434472 - RNA, 19 nt, Homo sapiens
  misc_RNA (1)...(19): siRNA sense strand
ggaugaugaugaugaugau

SEQ ID NO: 434473 - RNA, 19 nt, Homo sapiens
  misc_RNA (1)...(19): siRNA sense strand
cagauaacaccaaaccaaa

SEQ ID NO: 434474 - RNA, 19 nt, Homo sapiens
  misc_RNA (1)...(19): siRNA sense strand
ggagaaagaaacagauaac

SEQ ID NO: 434475 - RNA, 19 nt, Homo sapiens
  misc_RNA (1)...(19): siRNA sense strand
gaggcuacaagguccguua

SEQ ID NO: 434476 - RNA, 19 nt, Homo sapiens
  misc_RNA (1)...(19): siRNA sense strand
acacugcgcugguugaaaa

SEQ ID NO: 434477 - RNA, 19 nt, Homo sapiens
  misc_RNA (1)...(19): siRNA sense strand
aaaccugaccacagaauug

SEQ ID NO: 434478 - RNA, 19 nt, Homo sapiens
  misc_RNA (1)...(19): siRNA sense strand
acagauaacaccaaaccaa

SEQ ID NO: 434479 - RNA, 19 nt, Homo sapiens
  misc_RNA (1)...(19): siRNA sense strand
gcuacaagguccguuaugc

SEQ ID NO: 434480 - RNA, 19 nt, Homo sapiens
  misc_RNA (1)...(19): siRNA sense strand
gagaaagaaacagauaaca

SEQ ID NO: 434481 - RNA, 19 nt, Homo sapiens
  misc_RNA (1)...(19): siRNA sense strand
cagaggagaaagaaacaga

SEQ ID NO: 434482 - RNA, 19 nt, Homo sapiens
  misc_RNA (1)...(19): siRNA sense strand
gcaucauaauggacucugu

SEQ ID NO: 434483 - RNA, 19 nt, Homo sapiens
  misc_RNA (1)...(19): siRNA sense strand
caaaccugaccacagaauu

SEQ ID NO: 434484 - RNA, 19 nt, Homo sapiens
  misc_RNA (1)...(19): siRNA sense strand
cggaggaugaugaugauga

SEQ ID NO: 434485 - RNA, 19 nt, Homo sapiens
  misc_RNA (1)...(19): siRNA sense strand
ggacauccccagaaaagau

SEQ ID NO: 434486 - RNA, 19 nt, Homo sapiens
  misc_RNA (1)...(19): siRNA sense strand
gaauuggaggcuacaaggu

SEQ ID NO: 434487 - RNA, 19 nt, Homo sapiens
  misc_RNA (1)...(19): siRNA sense strand
acucuguggugcccucuga

SEQ ID NO: 434488 - RNA, 19 nt, Homo sapiens
  misc_RNA (1)...(19): siRNA sense strand
ccuggagcaucauaaugga

SEQ ID NO: 434489 - RNA, 19 nt, Homo sapiens
  misc_RNA (1)...(19): siRNA sense strand
ccaccuggagcaucauaau

SEQ ID NO: 434490 - RNA, 19 nt, Homo sapiens
  misc_RNA (1)...(19): siRNA sense strand
aaacagauaacaccaaacc

SEQ ID NO: 434491 - RNA, 19 nt, Homo sapiens
  misc_RNA (1)...(19): siRNA sense strand
aggaugaugaugaugauga

SEQ ID NO: 434492 - RNA, 19 nt, Homo sapiens
  misc_RNA (1)...(19): siRNA sense strand
aggagaaagaaacagauaa

SEQ ID NO: 434493 - RNA, 19 nt, Homo sapiens
  misc_RNA (1)...(19): siRNA sense strand
agaaacagauaacaccaaa

SEQ ID NO: 434494 - RNA, 19 nt, Homo sapiens
  misc_RNA (1)...(19): siRNA sense strand
cagaaaagauggaaaagaa

SEQ ID NO: 434495 - RNA, 19 nt, Homo sapiens
  misc_RNA (1)...(19): siRNA sense strand
gaggagaaagaaacagaua

SEQ ID NO: 434496 - RNA, 19 nt, Homo sapiens
  misc_RNA (1)...(19): siRNA sense strand
ggaggaugaugaugaugau

SEQ ID NO: 434497 - RNA, 19 nt, Homo sapiens
  misc_RNA (1)...(19): siRNA sense strand
gaugaugacuccucuucag

SEQ ID NO: 434498 - RNA, 19 nt, Homo sapiens
  misc_RNA (1)...(19): siRNA sense strand
auucaaaccugaccacaga

SEQ ID NO: 434499 - RNA, 19 nt, Homo sapiens
  misc_RNA (1)...(19): siRNA sense strand
ggaugaugaugaugaugau

SEQ ID NO: 434500 - RNA, 19 nt, Homo sapiens
  misc_RNA (1)...(19): siRNA sense strand
cagauaacaccaaaccaaa

SEQ ID NO: 434501 - RNA, 19 nt, Homo sapiens
  misc_RNA (1)...(19): siRNA sense strand
ggagaaagaaacagauaac

SEQ ID NO: 434502 - RNA, 19 nt, Homo sapiens
  misc_RNA (1)...(19): siRNA sense strand
gaggcuacaagguccguua

SEQ ID NO: 434503 - RNA, 19 nt, Homo sapiens
  misc_RNA (1)...(19): siRNA sense strand
acacugcgcugguugaaaa

SEQ ID NO: 434504 - RNA, 19 nt, Homo sapiens
  misc_RNA (1)...(19): siRNA sense strand
aaaccugaccacagaauug

SEQ ID NO: 434505 - RNA, 19 nt, Homo sapiens
  misc_RNA (1)...(19): siRNA sense strand
acagauaacaccaaaccaa

SEQ ID NO: 434506 - RNA, 19 nt, Homo sapiens
  misc_RNA (1)...(19): siRNA sense strand
gcuacaagguccguuaugc

SEQ ID NO: 434507 - RNA, 19 nt, Homo sapiens
  misc_RNA (1)...(19): siRNA sense strand
gagaaagaaacagauaaca

SEQ ID NO: 434508 - RNA, 19 nt, Homo sapiens
  misc_RNA (1)...(19): siRNA sense strand
cagaggagaaagaaacaga

SEQ ID NO: 434509 - RNA, 19 nt, Homo sapiens
  misc_RNA (1)...(19): siRNA sense strand
gcaucauaauggacucugu

SEQ ID NO: 434510 - RNA, 19 nt, Homo sapiens
  misc_RNA (1)...(19): siRNA sense strand
caaaccugaccacagaauu

SEQ ID NO: 434511 - RNA, 19 nt, Homo sapiens
  misc_RNA (1)...(19): siRNA sense strand
cggaggaugaugaugauga

SEQ ID NO: 434512 - RNA, 19 nt, Homo sapiens
  misc_RNA (1)...(19): siRNA sense strand
ggacauccccagaaaagau

SEQ ID NO: 434513 - RNA, 19 nt, Homo sapiens
  misc_RNA (1)...(19): siRNA sense strand
gaauuggaggcuacaaggu

SEQ ID NO: 434514 - RNA, 19 nt, Homo sapiens
  misc_RNA (1)...(19): siRNA sense strand
acucuguggugcccucuga

SEQ ID NO: 434515 - RNA, 19 nt, Homo sapiens
  misc_RNA (1)...(19): siRNA sense strand
ccuggagcaucauaaugga

SEQ ID NO: 434516 - RNA, 19 nt, Homo sapiens
  misc_RNA (1)...(19): siRNA sense strand
ccaccuggagcaucauaau

SEQ ID NO: 434517 - RNA, 19 nt, Homo sapiens
  misc_RNA (1)...(19): siRNA sense strand
aaacagauaacaccaaacc

SEQ ID NO: 434518 - RNA, 19 nt, Homo sapiens
  misc_RNA (1)...(19): siRNA sense strand
aggaugaugaugaugauga

SEQ ID NO: 434519 - RNA, 19 nt, Homo sapiens
  misc_RNA (1)...(19): siRNA sense strand
aggagaaagaaacagauaa

SEQ ID NO: 434520 - RNA, 19 nt, Homo sapiens
  misc_RNA (1)...(19): siRNA sense strand
agaaacagauaacaccaaa

SEQ ID NO: 434521 - RNA, 19 nt, Homo sapiens
  misc_RNA (1)...(19): siRNA sense strand
cagaaaagauggaaaagaa

SEQ ID NO: 434522 - RNA, 19 nt, Homo sapiens
  misc_RNA (1)...(19): siRNA sense strand
gaggagaaagaaacagaua

SEQ ID NO: 434523 - RNA, 19 nt, Homo sapiens
  misc_RNA (1)...(19): siRNA sense strand
ggaggaugaugaugaugau

SEQ ID NO: 434524 - RNA, 19 nt, Homo sapiens
  misc_RNA (1)...(19): siRNA sense strand
gaugaugacuccucuucag

SEQ ID NO: 434525 - RNA, 19 nt, Homo sapiens
  misc_RNA (1)...(19): siRNA sense strand
auucaaaccugaccacaga

SEQ ID NO: 434526 - RNA, 19 nt, Homo sapiens
  misc_RNA (1)...(19): siRNA sense strand
ggaugaugaugaugaugau

SEQ ID NO: 434527 - RNA, 19 nt, Homo sapiens
  misc_RNA (1)...(19): siRNA sense strand
cagauaacaccaaaccaaa

SEQ ID NO: 434528 - RNA, 19 nt, Homo sapiens
  misc_RNA (1)...(19): siRNA sense strand
ggagaaagaaacagauaac

SEQ ID NO: 434529 - RNA, 19 nt, Homo sapiens
  misc_RNA (1)...(19): siRNA sense strand
gaggcuacaagguccguua

SEQ ID NO: 434530 - RNA, 19 nt, Homo sapiens
  misc_RNA (1)...(19): siRNA sense strand
acacugcgcugguugaaaa

SEQ ID NO: 434531 - RNA, 19 nt, Homo sapiens
  misc_RNA (1)...(19): siRNA sense strand
aaaccugaccacagaauug

SEQ ID NO: 434532 - RNA, 19 nt, Homo sapiens
  misc_RNA (1)...(19): siRNA sense strand
acagauaacaccaaaccaa

SEQ ID NO: 434533 - RNA, 19 nt, Homo sapiens
  misc_RNA (1)...(19): siRNA sense strand
gcuacaagguccguuaugc

SEQ ID NO: 434534 - RNA, 19 nt, Homo sapiens
  misc_RNA (1)...(19): siRNA sense strand
gagaaagaaacagauaaca

SEQ ID NO: 434535 - RNA, 19 nt, Homo sapiens
  misc_RNA (1)...(19): siRNA sense strand
cagaggagaaagaaacaga

SEQ ID NO: 434536 - RNA, 19 nt, Homo sapiens
  misc_RNA (1)...(19): siRNA sense strand
gcaucauaauggacucugu

SEQ ID NO: 434537 - RNA, 19 nt, Homo sapiens
  misc_RNA (1)...(19): siRNA sense strand
caaaccugaccacagaauu

SEQ ID NO: 434538 - RNA, 19 nt, Homo sapiens
  misc_RNA (1)...(19): siRNA sense strand
cggaggaugaugaugauga

SEQ ID NO: 434539 - RNA, 19 nt, Homo sapiens
  misc_RNA (1)...(19): siRNA sense strand
ggacauccccagaaaagau

SEQ ID NO: 434540 - RNA, 19 nt, Homo sapiens
  misc_RNA (1)...(19): siRNA sense strand
gaauuggaggcuacaaggu

SEQ ID NO: 434541 - RNA, 19 nt, Homo sapiens
  misc_RNA (1)...(19): siRNA sense strand
acucuguggugcccucuga

SEQ ID NO: 434542 - RNA, 19 nt, Homo sapiens
  misc_RNA (1)...(19): siRNA sense strand
ccuggagcaucauaaugga

SEQ ID NO: 434543 - RNA, 19 nt, Homo sapiens
  misc_RNA (1)...(19): siRNA sense strand
ccaccuggagcaucauaau

SEQ ID NO: 434544 - RNA, 19 nt, Homo sapiens
  misc_RNA (1)...(19): siRNA sense strand
aaacagauaacaccaaacc

SEQ ID NO: 434545 - RNA, 19 nt, Homo sapiens
  misc_RNA (1)...(19): siRNA sense strand
aggaugaugaugaugauga

SEQ ID NO: 434546 - RNA, 19 nt, Homo sapiens
  misc_RNA (1)...(19): siRNA sense strand
aggagaaagaaacagauaa

SEQ ID NO: 434547 - RNA, 19 nt, Homo sapiens
  misc_RNA (1)...(19): siRNA sense strand
agaaacagauaacaccaaa

SEQ ID NO: 434548 - RNA, 19 nt, Homo sapiens
  misc_RNA (1)...(19): siRNA sense strand
cagaaaagauggaaaagaa

SEQ ID NO: 434549 - RNA, 19 nt, Homo sapiens
  misc_RNA (1)...(19): siRNA sense strand
gaggagaaagaaacagaua

SEQ ID NO: 434550 - RNA, 19 nt, Homo sapiens
  misc_RNA (1)...(19): siRNA sense strand
ggaggaugaugaugaugau

SEQ ID NO: 434551 - RNA, 19 nt, Homo sapiens
  misc_RNA (1)...(19): siRNA sense strand
gaugaugacuccucuucag

SEQ ID NO: 434552 - RNA, 19 nt, Homo sapiens
  misc_RNA (1)...(19): siRNA sense strand
auucaaaccugaccacaga

SEQ ID NO: 434553 - RNA, 19 nt, Homo sapiens
  misc_RNA (1)...(19): siRNA sense strand
ggaugaugaugaugaugau

SEQ ID NO: 434554 - RNA, 19 nt, Homo sapiens
  misc_RNA (1)...(19): siRNA sense strand
cagauaacaccaaaccaaa

SEQ ID NO: 434555 - RNA, 19 nt, Homo sapiens
  misc_RNA (1)...(19): siRNA sense strand
ggagaaagaaacagauaac

SEQ ID NO: 434556 - RNA, 19 nt, Homo sapiens
  misc_RNA (1)...(19): siRNA sense strand
gaggcuacaagguccguua

SEQ ID NO: 434557 - RNA, 19 nt, Homo sapiens
  misc_RNA (1)...(19): siRNA sense strand
acacugcgcugguugaaaa

SEQ ID NO: 434558 - RNA, 19 nt, Homo sapiens
  misc_RNA (1)...(19): siRNA sense strand
aaaccugaccacagaauug

SEQ ID NO: 434559 - RNA, 19 nt, Homo sapiens
  misc_RNA (1)...(19): siRNA sense strand
acagauaacaccaaaccaa

SEQ ID NO: 434560 - RNA, 19 nt, Homo sapiens
  misc_RNA (1)...(19): siRNA sense strand
gcuacaagguccguuaugc

SEQ ID NO: 434561 - RNA, 19 nt, Homo sapiens
  misc_RNA (1)...(19): siRNA sense strand
gagaaagaaacagauaaca

SEQ ID NO: 434562 - RNA, 19 nt, Homo sapiens
  misc_RNA (1)...(19): siRNA sense strand
cagaggagaaagaaacaga

SEQ ID NO: 434563 - RNA, 19 nt, Homo sapiens
  misc_RNA (1)...(19): siRNA sense strand
gcaucauaauggacucugu

SEQ ID NO: 434564 - RNA, 19 nt, Homo sapiens
  misc_RNA (1)...(19): siRNA sense strand
caaaccugaccacagaauu

SEQ ID NO: 434565 - RNA, 19 nt, Homo sapiens
  misc_RNA (1)...(19): siRNA sense strand
cggaggaugaugaugauga

SEQ ID NO: 434566 - RNA, 19 nt, Homo sapiens
  misc_RNA (1)...(19): siRNA sense strand
ggacauccccagaaaagau

SEQ ID NO: 434567 - RNA, 19 nt, Homo sapiens
  misc_RNA (1)...(19): siRNA sense strand
gaauuggaggcuacaaggu

SEQ ID NO: 434568 - RNA, 19 nt, Homo sapiens
  misc_RNA (1)...(19): siRNA sense strand
acucuguggugcccucuga

SEQ ID NO: 434569 - RNA, 19 nt, Homo sapiens
  misc_RNA (1)...(19): siRNA sense strand
ccuggagcaucauaaugga

SEQ ID NO: 434570 - RNA, 19 nt, Homo sapiens
  misc_RNA (1)...(19): siRNA sense strand
ccaccuggagcaucauaau

SEQ ID NO: 434571 - RNA, 19 nt, Homo sapiens
  misc_RNA (1)...(19): siRNA sense strand
aaacagauaacaccaaacc

SEQ ID NO: 434572 - RNA, 19 nt, Homo sapiens
  misc_RNA (1)...(19): siRNA sense strand
aggaugaugaugaugauga

SEQ ID NO: 434573 - RNA, 19 nt, Homo sapiens
  misc_RNA (1)...(19): siRNA sense strand
aggagaaagaaacagauaa

SEQ ID NO: 434574 - RNA, 19 nt, Homo sapiens
  misc_RNA (1)...(19): siRNA sense strand
agaaacagauaacaccaaa

SEQ ID NO: 434575 - RNA, 19 nt, Homo sapiens
  misc_RNA (1)...(19): siRNA sense strand
cagaaaagauggaaaagaa

SEQ ID NO: 434576 - RNA, 19 nt, Homo sapiens
  misc_RNA (1)...(19): siRNA sense strand
gaggagaaagaaacagaua

SEQ ID NO: 434577 - RNA, 19 nt, Homo sapiens
  misc_RNA (1)...(19): siRNA sense strand
ggaggaugaugaugaugau

SEQ ID NO: 434578 - RNA, 19 nt, Homo sapiens
  misc_RNA (1)...(19): siRNA sense strand
gaugaugacuccucuucag

SEQ ID NO: 434579 - RNA, 19 nt, Homo sapiens
  misc_RNA (1)...(19): siRNA sense strand
auucaaaccugaccacaga

SEQ ID NO: 434580 - RNA, 19 nt, Homo sapiens
  misc_RNA (1)...(19): siRNA sense strand
ggaugaugaugaugaugau

SEQ ID NO: 434581 - RNA, 19 nt, Homo sapiens
  misc_RNA (1)...(19): siRNA sense strand
cagauaacaccaaaccaaa

SEQ ID NO: 434582 - RNA, 19 nt, Homo sapiens
  misc_RNA (1)...(19): siRNA sense strand
ggagaaagaaacagauaac

SEQ ID NO: 434583 - RNA, 19 nt, Homo sapiens
  misc_RNA (1)...(19): siRNA sense strand
gaggcuacaagguccguua

SEQ ID NO: 434584 - RNA, 19 nt, Homo sapiens
  misc_RNA (1)...(19): siRNA sense strand
acacugcgcugguugaaaa

SEQ ID NO: 434585 - RNA, 19 nt, Homo sapiens
  misc_RNA (1)...(19): siRNA sense strand
aaaccugaccacagaauug

SEQ ID NO: 434586 - RNA, 19 nt, Homo sapiens
  misc_RNA (1)...(19): siRNA sense strand
acagauaacaccaaaccaa

SEQ ID NO: 434587 - RNA, 19 nt, Homo sapiens
  misc_RNA (1)...(19): siRNA sense strand
gcuacaagguccguuaugc

SEQ ID NO: 434588 - RNA, 19 nt, Homo sapiens
  misc_RNA (1)...(19): siRNA sense strand
gagaaagaaacagauaaca

SEQ ID NO: 434589 - RNA, 19 nt, Homo sapiens
  misc_RNA (1)...(19): siRNA sense strand
cagaggagaaagaaacaga

SEQ ID NO: 434590 - RNA, 19 nt, Homo sapiens
  misc_RNA (1)...(19): siRNA sense strand
gcaucauaauggacucugu

SEQ ID NO: 434591 - RNA, 19 nt, Homo sapiens
  misc_RNA (1)...(19): siRNA sense strand
caaaccugaccacagaauu

SEQ ID NO: 434592 - RNA, 19 nt, Homo sapiens
  misc_RNA (1)...(19): siRNA sense strand
cggaggaugaugaugauga

SEQ ID NO: 434593 - RNA, 19 nt, Homo sapiens
  misc_RNA (1)...(19): siRNA sense strand
ggacauccccagaaaagau

SEQ ID NO: 434594 - RNA, 19 nt, Homo sapiens
  misc_RNA (1)...(19): siRNA sense strand
gaauuggaggcuacaaggu

SEQ ID NO: 434595 - RNA, 19 nt, Homo sapiens
  misc_RNA (1)...(19): siRNA sense strand
acucuguggugcccucuga

SEQ ID NO: 434596 - RNA, 19 nt, Homo sapiens
  misc_RNA (1)...(19): siRNA sense strand
ccuggagcaucauaaugga

SEQ ID NO: 434597 - RNA, 19 nt, Homo sapiens
  misc_RNA (1)...(19): siRNA sense strand
ccaccuggagcaucauaau

SEQ ID NO: 434598 - RNA, 19 nt, Homo sapiens
  misc_RNA (1)...(19): siRNA sense strand
aaacagauaacaccaaacc

SEQ ID NO: 434599 - RNA, 19 nt, Homo sapiens
  misc_RNA (1)...(19): siRNA sense strand
aggaugaugaugaugauga

SEQ ID NO: 434600 - RNA, 19 nt, Homo sapiens
  misc_RNA (1)...(19): siRNA sense strand
aggagaaagaaacagauaa

SEQ ID NO: 434601 - RNA, 19 nt, Homo sapiens
  misc_RNA (1)...(19): siRNA sense strand
gcacaucaaucaucauuua

SEQ ID NO: 434602 - RNA, 19 nt, Homo sapiens
  misc_RNA (1)...(19): siRNA sense strand
gaaauuaucuuccagcauu

SEQ ID NO: 434603 - RNA, 19 nt, Homo sapiens
  misc_RNA (1)...(19): siRNA sense strand
cauagaagcugaaccuuua

SEQ ID NO: 434604 - RNA, 19 nt, Homo sapiens
  misc_RNA (1)...(19): siRNA sense strand
caaaggagaugucauuaaa

SEQ ID NO: 434605 - RNA, 19 nt, Homo sapiens
  misc_RNA (1)...(19): siRNA sense strand
aaagaaagcuggauacaaa

SEQ ID NO: 434606 - RNA, 19 nt, Homo sapiens
  misc_RNA (1)...(19): siRNA sense strand
gaaagcauccaccuaauua

SEQ ID NO: 434607 - RNA, 19 nt, Homo sapiens
  misc_RNA (1)...(19): siRNA sense strand
gaagagaagccaugaauaa

SEQ ID NO: 434608 - RNA, 19 nt, Homo sapiens
  misc_RNA (1)...(19): siRNA sense strand
ggauagagcuuaugauuca

SEQ ID NO: 434609 - RNA, 19 nt, Homo sapiens
  misc_RNA (1)...(19): siRNA sense strand
gcaauuggcuauagugaaa

SEQ ID NO: 434610 - RNA, 19 nt, Homo sapiens
  misc_RNA (1)...(19): siRNA sense strand
uaacagaccuuaugacaga

SEQ ID NO: 434611 - RNA, 19 nt, Homo sapiens
  misc_RNA (1)...(19): siRNA sense strand
gaauggcacuggauauuaa

SEQ ID NO: 434612 - RNA, 19 nt, Homo sapiens
  misc_RNA (1)...(19): siRNA sense strand
gaaauaaacgcaaagcuaa

SEQ ID NO: 434613 - RNA, 19 nt, Homo sapiens
  misc_RNA (1)...(19): siRNA sense strand
gaaagcaacuccucgaaug

SEQ ID NO: 434614 - RNA, 19 nt, Homo sapiens
  misc_RNA (1)...(19): siRNA sense strand
ucacgugccuuacuaguua

SEQ ID NO: 434615 - RNA, 19 nt, Homo sapiens
  misc_RNA (1)...(19): siRNA sense strand
ggagaaaguuuaaguaugg

SEQ ID NO: 434616 - RNA, 19 nt, Homo sapiens
  misc_RNA (1)...(19): siRNA sense strand
agaaauggaucucagguua

SEQ ID NO: 434617 - RNA, 19 nt, Homo sapiens
  misc_RNA (1)...(19): siRNA sense strand
gaugagaacuaucaaaugu

SEQ ID NO: 434618 - RNA, 19 nt, Homo sapiens
  misc_RNA (1)...(19): siRNA sense strand
aaacaaagcccaagaagaa

SEQ ID NO: 434619 - RNA, 19 nt, Homo sapiens
  misc_RNA (1)...(19): siRNA sense strand
gcagauguauguacucauu

SEQ ID NO: 434620 - RNA, 19 nt, Homo sapiens
  misc_RNA (1)...(19): siRNA sense strand
ccacaguauuucaguauua

SEQ ID NO: 434621 - RNA, 19 nt, Homo sapiens
  misc_RNA (1)...(19): siRNA sense strand
gcagacaacugaucaauac

SEQ ID NO: 434622 - RNA, 19 nt, Homo sapiens
  misc_RNA (1)...(19): siRNA sense strand
gaaguuagagagagaauuu

SEQ ID NO: 434623 - RNA, 19 nt, Homo sapiens
  misc_RNA (1)...(19): siRNA sense strand
gcaaagcuaaggaauauaa

SEQ ID NO: 434624 - RNA, 19 nt, Homo sapiens
  misc_RNA (1)...(19): siRNA sense strand
uaacaucucuaucagugua

SEQ ID NO: 434625 - RNA, 19 nt, Homo sapiens
  misc_RNA (1)...(19): siRNA sense strand
ccaaggguauuuaaaguaa

SEQ ID NO: 434626 - RNA, 19 nt, Homo sapiens
  misc_RNA (1)...(19): siRNA sense strand
guacaaagcagacggaauu

SEQ ID NO: 434627 - RNA, 19 nt, Homo sapiens
  misc_RNA (1)...(19): siRNA sense strand
ggcaauauaugguaugaaa

SEQ ID NO: 434628 - RNA, 19 nt, Homo sapiens
  misc_RNA (1)...(19): siRNA sense strand
gaaaucuucuuccuuacaa

SEQ ID NO: 434629 - RNA, 19 nt, Homo sapiens
  misc_RNA (1)...(19): siRNA sense strand
ggaaaguuaccucuuauuu

SEQ ID NO: 434630 - RNA, 19 nt, Homo sapiens
  misc_RNA (1)...(19): siRNA sense strand
gacuggaaaucaaauguua

SEQ ID NO: 434631 - RNA, 19 nt, Homo sapiens
  misc_RNA (1)...(19): siRNA sense strand
uguaauagcucuacgaaga

SEQ ID NO: 434632 - RNA, 19 nt, Homo sapiens
  misc_RNA (1)...(19): siRNA sense strand
ggaacugccucaccugaaa

SEQ ID NO: 434633 - RNA, 19 nt, Homo sapiens
  misc_RNA (1)...(19): siRNA sense strand
uaauaaaucugcacuguca

SEQ ID NO: 434634 - RNA, 19 nt, Homo sapiens
  misc_RNA (1)...(19): siRNA sense strand
cuauacagaucucgauuua

SEQ ID NO: 434635 - RNA, 19 nt, Homo sapiens
  misc_RNA (1)...(19): siRNA sense strand
caauaaagcugagugaaau

SEQ ID NO: 434636 - RNA, 19 nt, Homo sapiens
  misc_RNA (1)...(19): siRNA sense strand
ucccagauaucacguauua

SEQ ID NO: 434637 - RNA, 19 nt, Homo sapiens
  misc_RNA (1)...(19): siRNA sense strand
uaacacaucugcacaucaa

SEQ ID NO: 434638 - RNA, 19 nt, Homo sapiens
  misc_RNA (1)...(19): siRNA sense strand
gcaagaaguagccuauaua

SEQ ID NO: 434639 - RNA, 19 nt, Homo sapiens
  misc_RNA (1)...(19): siRNA sense strand
ggaauugacuuugaagaga

SEQ ID NO: 434640 - RNA, 19 nt, Homo sapiens
  misc_RNA (1)...(19): siRNA sense strand
gcaaggacagugaauagua

SEQ ID NO: 434641 - RNA, 19 nt, Homo sapiens
  misc_RNA (1)...(19): siRNA sense strand
gaugaugccuauagauuug

SEQ ID NO: 434642 - RNA, 19 nt, Homo sapiens
  misc_RNA (1)...(19): siRNA sense strand
uaaaggaucuagcaccauu

SEQ ID NO: 434643 - RNA, 19 nt, Homo sapiens
  misc_RNA (1)...(19): siRNA sense strand
cuaaagguuucaccaguua

SEQ ID NO: 434644 - RNA, 19 nt, Homo sapiens
  misc_RNA (1)...(19): siRNA sense strand
gaaaauaauuccucucuug

SEQ ID NO: 434645 - RNA, 19 nt, Homo sapiens
  misc_RNA (1)...(19): siRNA sense strand
uauggaaaguuaccucuua

SEQ ID NO: 434646 - RNA, 19 nt, Homo sapiens
  misc_RNA (1)...(19): siRNA sense strand
gaauguacccgacuugaaa

SEQ ID NO: 434647 - RNA, 19 nt, Homo sapiens
  misc_RNA (1)...(19): siRNA sense strand
gcagcuacauuccucuuaa

SEQ ID NO: 434648 - RNA, 19 nt, Homo sapiens
  misc_RNA (1)...(19): siRNA sense strand
caacuuaugguaacugaua

SEQ ID NO: 434649 - RNA, 19 nt, Homo sapiens
  misc_RNA (1)...(19): siRNA sense strand
caaauguggucuuguaaug

SEQ ID NO: 434650 - RNA, 19 nt, Homo sapiens
  misc_RNA (1)...(19): siRNA sense strand
ucagugaagugggaaauua

SEQ ID NO: 434651 - RNA, 19 nt, Homo sapiens
  misc_RNA (1)...(19): siRNA sense strand
ucaaaugugugaaggaauu

SEQ ID NO: 434652 - RNA, 19 nt, Homo sapiens
  misc_RNA (1)...(19): siRNA sense strand
ggaauugauugaaagcauu

SEQ ID NO: 434653 - RNA, 19 nt, Homo sapiens
  misc_RNA (1)...(19): siRNA sense strand
gcaaauaccauauaucagu

SEQ ID NO: 434654 - RNA, 19 nt, Homo sapiens
  misc_RNA (1)...(19): siRNA sense strand
caaaggaguuccagaaugg

SEQ ID NO: 434655 - RNA, 19 nt, Homo sapiens
  misc_RNA (1)...(19): siRNA sense strand
gcacaaaggaguuccagaa

SEQ ID NO: 434656 - RNA, 19 nt, Homo sapiens
  misc_RNA (1)...(19): siRNA sense strand
caucacagauuucacagaa

SEQ ID NO: 434657 - RNA, 19 nt, Homo sapiens
  misc_RNA (1)...(19): siRNA sense strand
agaagaagcuaaagauuca

SEQ ID NO: 434658 - RNA, 19 nt, Homo sapiens
  misc_RNA (1)...(19): siRNA sense strand
ucauggagcuguuaaaugu

SEQ ID NO: 434659 - RNA, 19 nt, Homo sapiens
  misc_RNA (1)...(19): siRNA sense strand
gaucuacuccugccauuaa

SEQ ID NO: 434660 - RNA, 19 nt, Homo sapiens
  misc_RNA (1)...(19): siRNA sense strand
gaucuuggguuuaucuaug

SEQ ID NO: 434661 - RNA, 19 nt, Homo sapiens
  misc_RNA (1)...(19): siRNA sense strand
gaacaucacagauuucaca

SEQ ID NO: 434662 - RNA, 19 nt, Homo sapiens
  misc_RNA (1)...(19): siRNA sense strand
ugaaagaguucugcuuaaa

SEQ ID NO: 434663 - RNA, 19 nt, Homo sapiens
  misc_RNA (1)...(19): siRNA sense strand
auaaauggcucucucuuga

SEQ ID NO: 434664 - RNA, 19 nt, Homo sapiens
  misc_RNA (1)...(19): siRNA sense strand
cagguuagaucuuggguuu

SEQ ID NO: 434665 - RNA, 19 nt, Homo sapiens
  misc_RNA (1)...(19): siRNA sense strand
ucaacuggauguaccauuu

SEQ ID NO: 434666 - RNA, 19 nt, Homo sapiens
  misc_RNA (1)...(19): siRNA sense strand
ggacuuacuauuucuguuu

SEQ ID NO: 434667 - RNA, 19 nt, Homo sapiens
  misc_RNA (1)...(19): siRNA sense strand
gaugaagacuaccaacaga

SEQ ID NO: 434668 - RNA, 19 nt, Homo sapiens
  misc_RNA (1)...(19): siRNA sense strand
gagaagaagcuaaagauuc

SEQ ID NO: 434669 - RNA, 19 nt, Homo sapiens
  misc_RNA (1)...(19): siRNA sense strand
gaagauccaaggguauuua

SEQ ID NO: 434670 - RNA, 19 nt, Homo sapiens
  misc_RNA (1)...(19): siRNA sense strand
uccgaaaucuucuuccuua

SEQ ID NO: 434671 - RNA, 19 nt, Homo sapiens
  misc_RNA (1)...(19): siRNA sense strand
caaggacagugaauaguau

SEQ ID NO: 434672 - RNA, 19 nt, Homo sapiens
  misc_RNA (1)...(19): siRNA sense strand
guagaucaaucacaaguca

SEQ ID NO: 434673 - RNA, 19 nt, Homo sapiens
  misc_RNA (1)...(19): siRNA sense strand
ggaaaagacugauuuagau

SEQ ID NO: 434674 - RNA, 19 nt, Homo sapiens
  misc_RNA (1)...(19): siRNA sense strand
gaaaugcgacuauacagau

SEQ ID NO: 434675 - RNA, 19 nt, Homo sapiens
  misc_RNA (1)...(19): siRNA sense strand
ggucuacuguauauuauug

SEQ ID NO: 434676 - RNA, 19 nt, Homo sapiens
  misc_RNA (1)...(19): siRNA sense strand
gaaacaaggugaggccaau

SEQ ID NO: 434677 - RNA, 19 nt, Homo sapiens
  misc_RNA (1)...(19): siRNA sense strand
gagaagccaugaauaagca

SEQ ID NO: 434678 - RNA, 19 nt, Homo sapiens
  misc_RNA (1)...(19): siRNA sense strand
ggucacauagguaaucuua

SEQ ID NO: 434679 - RNA, 19 nt, Homo sapiens
  misc_RNA (1)...(19): siRNA sense strand
caaagucggucaccaugga

SEQ ID NO: 434680 - RNA, 19 nt, Homo sapiens
  misc_RNA (1)...(19): siRNA sense strand
gaaacaaagcccaagaaga

SEQ ID NO: 434681 - RNA, 19 nt, Homo sapiens
  misc_RNA (1)...(19): siRNA sense strand
gaaguaagaaggucacaau

SEQ ID NO: 434682 - RNA, 19 nt, Homo sapiens
  misc_RNA (1)...(19): siRNA sense strand
ggaguucccuaauaaaucu

SEQ ID NO: 434683 - RNA, 19 nt, Homo sapiens
  misc_RNA (1)...(19): siRNA sense strand
aaaugaugcuccugcuuua

SEQ ID NO: 434684 - RNA, 19 nt, Homo sapiens
  misc_RNA (1)...(19): siRNA sense strand
gugcaaacauggacugcua

SEQ ID NO: 434685 - RNA, 19 nt, Homo sapiens
  misc_RNA (1)...(19): siRNA sense strand
gaagauaucauuacuuugc

SEQ ID NO: 434686 - RNA, 19 nt, Homo sapiens
  misc_RNA (1)...(19): siRNA sense strand
gaagcaauauaaagaacug

SEQ ID NO: 434687 - RNA, 19 nt, Homo sapiens
  misc_RNA (1)...(19): siRNA sense strand
caaugaagauggaguuauc

SEQ ID NO: 434688 - RNA, 19 nt, Homo sapiens
  misc_RNA (1)...(19): siRNA sense strand
gcaguggcauuacaagaug

SEQ ID NO: 434689 - RNA, 19 nt, Homo sapiens
  misc_RNA (1)...(19): siRNA sense strand
gagugaagauccucccaaa

SEQ ID NO: 434690 - RNA, 19 nt, Homo sapiens
  misc_RNA (1)...(19): siRNA sense strand
gugaaggaauugacuuuga

SEQ ID NO: 434691 - RNA, 19 nt, Homo sapiens
  misc_RNA (1)...(19): siRNA sense strand
guaagaaggucacaauucg

SEQ ID NO: 434692 - RNA, 19 nt, Homo sapiens
  misc_RNA (1)...(19): siRNA sense strand
guacagcugcuuuacagua

SEQ ID NO: 434693 - RNA, 19 nt, Homo sapiens
  misc_RNA (1)...(19): siRNA sense strand
ugacaaaacuggaagaauu

SEQ ID NO: 434694 - RNA, 19 nt, Homo sapiens
  misc_RNA (1)...(19): siRNA sense strand
gcaaagaccaggagcacaa

SEQ ID NO: 434695 - RNA, 19 nt, Homo sapiens
  misc_RNA (1)...(19): siRNA sense strand
gaaccaaggacaaugauca

SEQ ID NO: 434696 - RNA, 19 nt, Homo sapiens
  misc_RNA (1)...(19): siRNA sense strand
ggaauggcacuaggacuua

SEQ ID NO: 434697 - RNA, 19 nt, Homo sapiens
  misc_RNA (1)...(19): siRNA sense strand
uaaaacagccucauuagua

SEQ ID NO: 434698 - RNA, 19 nt, Homo sapiens
  misc_RNA (1)...(19): siRNA sense strand
gaauacagauccaaaauca

SEQ ID NO: 434699 - RNA, 19 nt, Homo sapiens
  misc_RNA (1)...(19): siRNA sense strand
ucaaguuggugucacuaua

SEQ ID NO: 434700 - RNA, 19 nt, Homo sapiens
  misc_RNA (1)...(19): siRNA sense strand
gaaaauggacuaucaaguu

SEQ ID NO: 434701 - RNA, 19 nt, Homo sapiens
  misc_RNA (1)...(19): siRNA sense strand
gcacaucaaucaucauuua

SEQ ID NO: 434702 - RNA, 19 nt, Homo sapiens
  misc_RNA (1)...(19): siRNA sense strand
gaaauuaucuuccagcauu

SEQ ID NO: 434703 - RNA, 19 nt, Homo sapiens
  misc_RNA (1)...(19): siRNA sense strand
cauagaagcugaaccuuua

SEQ ID NO: 434704 - RNA, 19 nt, Homo sapiens
  misc_RNA (1)...(19): siRNA sense strand
caaaggagaugucauuaaa

SEQ ID NO: 434705 - RNA, 19 nt, Homo sapiens
  misc_RNA (1)...(19): siRNA sense strand
aaagaaagcuggauacaaa

SEQ ID NO: 434706 - RNA, 19 nt, Homo sapiens
  misc_RNA (1)...(19): siRNA sense strand
gaaagcauccaccuaauua

SEQ ID NO: 434707 - RNA, 19 nt, Homo sapiens
  misc_RNA (1)...(19): siRNA sense strand
gaagagaagccaugaauaa

SEQ ID NO: 434708 - RNA, 19 nt, Homo sapiens
  misc_RNA (1)...(19): siRNA sense strand
ggauagagcuuaugauuca

SEQ ID NO: 434709 - RNA, 19 nt, Homo sapiens
  misc_RNA (1)...(19): siRNA sense strand
gcaauuggcuauagugaaa

SEQ ID NO: 434710 - RNA, 19 nt, Homo sapiens
  misc_RNA (1)...(19): siRNA sense strand
uaacagaccuuaugacaga

SEQ ID NO: 434711 - RNA, 19 nt, Homo sapiens
  misc_RNA (1)...(19): siRNA sense strand
gaauggcacuggauauuaa

SEQ ID NO: 434712 - RNA, 19 nt, Homo sapiens
  misc_RNA (1)...(19): siRNA sense strand
gaaauaaacgcaaagcuaa

SEQ ID NO: 434713 - RNA, 19 nt, Homo sapiens
  misc_RNA (1)...(19): siRNA sense strand
gaaagcaacuccucgaaug

SEQ ID NO: 434714 - RNA, 19 nt, Homo sapiens
  misc_RNA (1)...(19): siRNA sense strand
ucacgugccuuacuaguua

SEQ ID NO: 434715 - RNA, 19 nt, Homo sapiens
  misc_RNA (1)...(19): siRNA sense strand
ggagaaaguuuaaguaugg

SEQ ID NO: 434716 - RNA, 19 nt, Homo sapiens
  misc_RNA (1)...(19): siRNA sense strand
agaaauggaucucagguua

SEQ ID NO: 434717 - RNA, 19 nt, Homo sapiens
  misc_RNA (1)...(19): siRNA sense strand
gaugagaacuaucaaaugu

SEQ ID NO: 434718 - RNA, 19 nt, Homo sapiens
  misc_RNA (1)...(19): siRNA sense strand
aaacaaagcccaagaagaa

SEQ ID NO: 434719 - RNA, 19 nt, Homo sapiens
  misc_RNA (1)...(19): siRNA sense strand
gcagauguauguacucauu

SEQ ID NO: 434720 - RNA, 19 nt, Homo sapiens
  misc_RNA (1)...(19): siRNA sense strand
ccacaguauuucaguauua

SEQ ID NO: 434721 - RNA, 19 nt, Homo sapiens
  misc_RNA (1)...(19): siRNA sense strand
gcagacaacugaucaauac

SEQ ID NO: 434722 - RNA, 19 nt, Homo sapiens
  misc_RNA (1)...(19): siRNA sense strand
gaaguuagagagagaauuu

SEQ ID NO: 434723 - RNA, 19 nt, Homo sapiens
  misc_RNA (1)...(19): siRNA sense strand
gcaaagcuaaggaauauaa

SEQ ID NO: 434724 - RNA, 19 nt, Homo sapiens
  misc_RNA (1)...(19): siRNA sense strand
uaacaucucuaucagugua

SEQ ID NO: 434725 - RNA, 19 nt, Homo sapiens
  misc_RNA (1)...(19): siRNA sense strand
ccaaggguauuuaaaguaa

SEQ ID NO: 434726 - RNA, 19 nt, Homo sapiens
  misc_RNA (1)...(19): siRNA sense strand
guacaaagcagacggaauu

SEQ ID NO: 434727 - RNA, 19 nt, Homo sapiens
  misc_RNA (1)...(19): siRNA sense strand
ggcaauauaugguaugaaa

SEQ ID NO: 434728 - RNA, 19 nt, Homo sapiens
  misc_RNA (1)...(19): siRNA sense strand
gaaaucuucuuccuuacaa

SEQ ID NO: 434729 - RNA, 19 nt, Homo sapiens
  misc_RNA (1)...(19): siRNA sense strand
ggaaaguuaccucuuauuu

SEQ ID NO: 434730 - RNA, 19 nt, Homo sapiens
  misc_RNA (1)...(19): siRNA sense strand
gacuggaaaucaaauguua

SEQ ID NO: 434731 - RNA, 19 nt, Homo sapiens
  misc_RNA (1)...(19): siRNA sense strand
uguaauagcucuacgaaga

SEQ ID NO: 434732 - RNA, 19 nt, Homo sapiens
  misc_RNA (1)...(19): siRNA sense strand
ggaacugccucaccugaaa

SEQ ID NO: 434733 - RNA, 19 nt, Homo sapiens
  misc_RNA (1)...(19): siRNA sense strand
uaauaaaucugcacuguca

SEQ ID NO: 434734 - RNA, 19 nt, Homo sapiens
  misc_RNA (1)...(19): siRNA sense strand
cuauacagaucucgauuua

SEQ ID NO: 434735 - RNA, 19 nt, Homo sapiens
  misc_RNA (1)...(19): siRNA sense strand
caauaaagcugagugaaau

SEQ ID NO: 434736 - RNA, 19 nt, Homo sapiens
  misc_RNA (1)...(19): siRNA sense strand
ucccagauaucacguauua

SEQ ID NO: 434737 - RNA, 19 nt, Homo sapiens
  misc_RNA (1)...(19): siRNA sense strand
uaacacaucugcacaucaa

SEQ ID NO: 434738 - RNA, 19 nt, Homo sapiens
  misc_RNA (1)...(19): siRNA sense strand
gcaagaaguagccuauaua

SEQ ID NO: 434739 - RNA, 19 nt, Homo sapiens
  misc_RNA (1)...(19): siRNA sense strand
ggaauugacuuugaagaga

SEQ ID NO: 434740 - RNA, 19 nt, Homo sapiens
  misc_RNA (1)...(19): siRNA sense strand
gcaaggacagugaauagua

SEQ ID NO: 434741 - RNA, 19 nt, Homo sapiens
  misc_RNA (1)...(19): siRNA sense strand
gaugaugccuauagauuug

SEQ ID NO: 434742 - RNA, 19 nt, Homo sapiens
  misc_RNA (1)...(19): siRNA sense strand
uaaaggaucuagcaccauu

SEQ ID NO: 434743 - RNA, 19 nt, Homo sapiens
  misc_RNA (1)...(19): siRNA sense strand
cuaaagguuucaccaguua

SEQ ID NO: 434744 - RNA, 19 nt, Homo sapiens
  misc_RNA (1)...(19): siRNA sense strand
gaaaauaauuccucucuug

SEQ ID NO: 434745 - RNA, 19 nt, Homo sapiens
  misc_RNA (1)...(19): siRNA sense strand
uauggaaaguuaccucuua

SEQ ID NO: 434746 - RNA, 19 nt, Homo sapiens
  misc_RNA (1)...(19): siRNA sense strand
gaauguacccgacuugaaa

SEQ ID NO: 434747 - RNA, 19 nt, Homo sapiens
  misc_RNA (1)...(19): siRNA sense strand
gcagcuacauuccucuuaa

SEQ ID NO: 434748 - RNA, 19 nt, Homo sapiens
  misc_RNA (1)...(19): siRNA sense strand
caacuuaugguaacugaua

SEQ ID NO: 434749 - RNA, 19 nt, Homo sapiens
  misc_RNA (1)...(19): siRNA sense strand
caaauguggucuuguaaug

SEQ ID NO: 434750 - RNA, 19 nt, Homo sapiens
  misc_RNA (1)...(19): siRNA sense strand
ucagugaagugggaaauua

SEQ ID NO: 434751 - RNA, 19 nt, Homo sapiens
  misc_RNA (1)...(19): siRNA sense strand
ucaaaugugugaaggaauu

SEQ ID NO: 434752 - RNA, 19 nt, Homo sapiens
  misc_RNA (1)...(19): siRNA sense strand
ggaauugauugaaagcauu

SEQ ID NO: 434753 - RNA, 19 nt, Homo sapiens
  misc_RNA (1)...(19): siRNA sense strand
gcaaauaccauauaucagu

SEQ ID NO: 434754 - RNA, 19 nt, Homo sapiens
  misc_RNA (1)...(19): siRNA sense strand
caaaggaguuccagaaugg

SEQ ID NO: 434755 - RNA, 19 nt, Homo sapiens
  misc_RNA (1)...(19): siRNA sense strand
gcacaaaggaguuccagaa

SEQ ID NO: 434756 - RNA, 19 nt, Homo sapiens
  misc_RNA (1)...(19): siRNA sense strand
caucacagauuucacagaa

SEQ ID NO: 434757 - RNA, 19 nt, Homo sapiens
  misc_RNA (1)...(19): siRNA sense strand
agaagaagcuaaagauuca

SEQ ID NO: 434758 - RNA, 19 nt, Homo sapiens
  misc_RNA (1)...(19): siRNA sense strand
ucauggagcuguuaaaugu

SEQ ID NO: 434759 - RNA, 19 nt, Homo sapiens
  misc_RNA (1)...(19): siRNA sense strand
gaucuacuccugccauuaa

SEQ ID NO: 434760 - RNA, 19 nt, Homo sapiens
  misc_RNA (1)...(19): siRNA sense strand
gaucuuggguuuaucuaug

SEQ ID NO: 434761 - RNA, 19 nt, Homo sapiens
  misc_RNA (1)...(19): siRNA sense strand
gaacaucacagauuucaca

SEQ ID NO: 434762 - RNA, 19 nt, Homo sapiens
  misc_RNA (1)...(19): siRNA sense strand
ugaaagaguucugcuuaaa

SEQ ID NO: 434763 - RNA, 19 nt, Homo sapiens
  misc_RNA (1)...(19): siRNA sense strand
auaaauggcucucucuuga

SEQ ID NO: 434764 - RNA, 19 nt, Homo sapiens
  misc_RNA (1)...(19): siRNA sense strand
cagguuagaucuuggguuu

SEQ ID NO: 434765 - RNA, 19 nt, Homo sapiens
  misc_RNA (1)...(19): siRNA sense strand
ucaacuggauguaccauuu

SEQ ID NO: 434766 - RNA, 19 nt, Homo sapiens
  misc_RNA (1)...(19): siRNA sense strand
ggacuuacuauuucuguuu

SEQ ID NO: 434767 - RNA, 19 nt, Homo sapiens
  misc_RNA (1)...(19): siRNA sense strand
gaugaagacuaccaacaga

SEQ ID NO: 434768 - RNA, 19 nt, Homo sapiens
  misc_RNA (1)...(19): siRNA sense strand
gagaagaagcuaaagauuc

SEQ ID NO: 434769 - RNA, 19 nt, Homo sapiens
  misc_RNA (1)...(19): siRNA sense strand
gaagauccaaggguauuua

SEQ ID NO: 434770 - RNA, 19 nt, Homo sapiens
  misc_RNA (1)...(19): siRNA sense strand
uccgaaaucuucuuccuua

SEQ ID NO: 434771 - RNA, 19 nt, Homo sapiens
  misc_RNA (1)...(19): siRNA sense strand
caaggacagugaauaguau

SEQ ID NO: 434772 - RNA, 19 nt, Homo sapiens
  misc_RNA (1)...(19): siRNA sense strand
guagaucaaucacaaguca

SEQ ID NO: 434773 - RNA, 19 nt, Homo sapiens
  misc_RNA (1)...(19): siRNA sense strand
ggaaaagacugauuuagau

SEQ ID NO: 434774 - RNA, 19 nt, Homo sapiens
  misc_RNA (1)...(19): siRNA sense strand
gaaaugcgacuauacagau

SEQ ID NO: 434775 - RNA, 19 nt, Homo sapiens
  misc_RNA (1)...(19): siRNA sense strand
ggucuacuguauauuauug

SEQ ID NO: 434776 - RNA, 19 nt, Homo sapiens
  misc_RNA (1)...(19): siRNA sense strand
gaaacaaggugaggccaau

SEQ ID NO: 434777 - RNA, 19 nt, Homo sapiens
  misc_RNA (1)...(19): siRNA sense strand
gagaagccaugaauaagca

SEQ ID NO: 434778 - RNA, 19 nt, Homo sapiens
  misc_RNA (1)...(19): siRNA sense strand
ggucacauagguaaucuua

SEQ ID NO: 434779 - RNA, 19 nt, Homo sapiens
  misc_RNA (1)...(19): siRNA sense strand
caaagucggucaccaugga

SEQ ID NO: 434780 - RNA, 19 nt, Homo sapiens
  misc_RNA (1)...(19): siRNA sense strand
gaaacaaagcccaagaaga

SEQ ID NO: 434781 - RNA, 19 nt, Homo sapiens
  misc_RNA (1)...(19): siRNA sense strand
gaaguaagaaggucacaau

SEQ ID NO: 434782 - RNA, 19 nt, Homo sapiens
  misc_RNA (1)...(19): siRNA sense strand
ggaguucccuaauaaaucu

SEQ ID NO: 434783 - RNA, 19 nt, Homo sapiens
  misc_RNA (1)...(19): siRNA sense strand
aaaugaugcuccugcuuua

SEQ ID NO: 434784 - RNA, 19 nt, Homo sapiens
  misc_RNA (1)...(19): siRNA sense strand
gugcaaacauggacugcua

SEQ ID NO: 434785 - RNA, 19 nt, Homo sapiens
  misc_RNA (1)...(19): siRNA sense strand
gaagauaucauuacuuugc

SEQ ID NO: 434786 - RNA, 19 nt, Homo sapiens
  misc_RNA (1)...(19): siRNA sense strand
gaagcaauauaaagaacug

SEQ ID NO: 434787 - RNA, 19 nt, Homo sapiens
  misc_RNA (1)...(19): siRNA sense strand
caaugaagauggaguuauc

SEQ ID NO: 434788 - RNA, 19 nt, Homo sapiens
  misc_RNA (1)...(19): siRNA sense strand
gcaguggcauuacaagaug

SEQ ID NO: 434789 - RNA, 19 nt, Homo sapiens
  misc_RNA (1)...(19): siRNA sense strand
gagugaagauccucccaaa

SEQ ID NO: 434790 - RNA, 19 nt, Homo sapiens
  misc_RNA (1)...(19): siRNA sense strand
gugaaggaauugacuuuga

SEQ ID NO: 434791 - RNA, 19 nt, Homo sapiens
  misc_RNA (1)...(19): siRNA sense strand
guaagaaggucacaauucg

SEQ ID NO: 434792 - RNA, 19 nt, Homo sapiens
  misc_RNA (1)...(19): siRNA sense strand
guacagcugcuuuacagua

SEQ ID NO: 434793 - RNA, 19 nt, Homo sapiens
  misc_RNA (1)...(19): siRNA sense strand
ugacaaaacuggaagaauu

SEQ ID NO: 434794 - RNA, 19 nt, Homo sapiens
  misc_RNA (1)...(19): siRNA sense strand
gcaaagaccaggagcacaa

SEQ ID NO: 434795 - RNA, 19 nt, Homo sapiens
  misc_RNA (1)...(19): siRNA sense strand
gaaccaaggacaaugauca

SEQ ID NO: 434796 - RNA, 19 nt, Homo sapiens
  misc_RNA (1)...(19): siRNA sense strand
ggaauggcacuaggacuua

SEQ ID NO: 434797 - RNA, 19 nt, Homo sapiens
  misc_RNA (1)...(19): siRNA sense strand
uaaaacagccucauuagua

SEQ ID NO: 434798 - RNA, 19 nt, Homo sapiens
  misc_RNA (1)...(19): siRNA sense strand
gaauacagauccaaaauca

SEQ ID NO: 434799 - RNA, 19 nt, Homo sapiens
  misc_RNA (1)...(19): siRNA sense strand
ucaaguuggugucacuaua

SEQ ID NO: 434800 - RNA, 19 nt, Homo sapiens
  misc_RNA (1)...(19): siRNA sense strand
gaaaauggacuaucaaguu

SEQ ID NO: 434801 - RNA, 19 nt, Homo sapiens
  misc_RNA (1)...(19): siRNA sense strand
caacagaaaucguuuguga

SEQ ID NO: 434802 - RNA, 19 nt, Homo sapiens
  misc_RNA (1)...(19): siRNA sense strand
gaugaugacucaacuauug

SEQ ID NO: 434803 - RNA, 19 nt, Homo sapiens
  misc_RNA (1)...(19): siRNA sense strand
ccacugaccuuaucaaaga

SEQ ID NO: 434804 - RNA, 19 nt, Homo sapiens
  misc_RNA (1)...(19): siRNA sense strand
gcaauuggcugcuuugaca

SEQ ID NO: 434805 - RNA, 19 nt, Homo sapiens
  misc_RNA (1)...(19): siRNA sense strand
gaacaucucccauuugaau

SEQ ID NO: 434806 - RNA, 19 nt, Homo sapiens
  misc_RNA (1)...(19): siRNA sense strand
gaagauaacagaagcuaaa

SEQ ID NO: 434807 - RNA, 19 nt, Homo sapiens
  misc_RNA (1)...(19): siRNA sense strand
ggaccuggcuaugcaaaua

SEQ ID NO: 434808 - RNA, 19 nt, Homo sapiens
  misc_RNA (1)...(19): siRNA sense strand
gagaauagcaguuuaugaa

SEQ ID NO: 434809 - RNA, 19 nt, Homo sapiens
  misc_RNA (1)...(19): siRNA sense strand
gaauagcaguuuaugaaga

SEQ ID NO: 434810 - RNA, 19 nt, Homo sapiens
  misc_RNA (1)...(19): siRNA sense strand
gaagaaaucacacaaguca

SEQ ID NO: 434811 - RNA, 19 nt, Homo sapiens
  misc_RNA (1)...(19): siRNA sense strand
gaaaggaaccagccucuga

SEQ ID NO: 434812 - RNA, 19 nt, Homo sapiens
  misc_RNA (1)...(19): siRNA sense strand
gaaaugaaagaccugguua

SEQ ID NO: 434813 - RNA, 19 nt, Homo sapiens
  misc_RNA (1)...(19): siRNA sense strand
caaaugagguuuucaguuu

SEQ ID NO: 434814 - RNA, 19 nt, Homo sapiens
  misc_RNA (1)...(19): siRNA sense strand
gcaagaauaccaagacaaa

SEQ ID NO: 434815 - RNA, 19 nt, Homo sapiens
  misc_RNA (1)...(19): siRNA sense strand
gaaacuggauuugaaugaa

SEQ ID NO: 434816 - RNA, 19 nt, Homo sapiens
  misc_RNA (1)...(19): siRNA sense strand
gcacuuaauuuccagacaa

SEQ ID NO: 434817 - RNA, 19 nt, Homo sapiens
  misc_RNA (1)...(19): siRNA sense strand
gaacagagagcuaagcaau

SEQ ID NO: 434818 - RNA, 19 nt, Homo sapiens
  misc_RNA (1)...(19): siRNA sense strand
gugaacaucucccauuuga

SEQ ID NO: 434819 - RNA, 19 nt, Homo sapiens
  misc_RNA (1)...(19): siRNA sense strand
ugaaagaccugguuaagag

SEQ ID NO: 434820 - RNA, 19 nt, Homo sapiens
  misc_RNA (1)...(19): siRNA sense strand
gcuggaaacuccucuguug

SEQ ID NO: 434821 - RNA, 19 nt, Homo sapiens
  misc_RNA (1)...(19): siRNA sense strand
gaaugcagguugucagaug

SEQ ID NO: 434822 - RNA, 19 nt, Homo sapiens
  misc_RNA (1)...(19): siRNA sense strand
gaacacguguggauucauc

SEQ ID NO: 434823 - RNA, 19 nt, Homo sapiens
  misc_RNA (1)...(19): siRNA sense strand
gaagcuaaauccaaagaca

SEQ ID NO: 434824 - RNA, 19 nt, Homo sapiens
  misc_RNA (1)...(19): siRNA sense strand
gaggagacaucccaggaaa

SEQ ID NO: 434825 - RNA, 19 nt, Homo sapiens
  misc_RNA (1)...(19): siRNA sense strand
ugucuaaucuggugaacua

SEQ ID NO: 434826 - RNA, 19 nt, Homo sapiens
  misc_RNA (1)...(19): siRNA sense strand
ggaaauacgucagcagauc

SEQ ID NO: 434827 - RNA, 19 nt, Homo sapiens
  misc_RNA (1)...(19): siRNA sense strand
caaaguaaacggcaagaaa

SEQ ID NO: 434828 - RNA, 19 nt, Homo sapiens
  misc_RNA (1)...(19): siRNA sense strand
gagaacgacuccagcagaa

SEQ ID NO: 434829 - RNA, 19 nt, Homo sapiens
  misc_RNA (1)...(19): siRNA sense strand
cagaagaaaugucuaaucu

SEQ ID NO: 434830 - RNA, 19 nt, Homo sapiens
  misc_RNA (1)...(19): siRNA sense strand
gaagcgagaacauauuaaa

SEQ ID NO: 434831 - RNA, 19 nt, Homo sapiens
  misc_RNA (1)...(19): siRNA sense strand
agaaggagguaaauucauu

SEQ ID NO: 434832 - RNA, 19 nt, Homo sapiens
  misc_RNA (1)...(19): siRNA sense strand
gaacacacuaccaaguaua

SEQ ID NO: 434833 - RNA, 19 nt, Homo sapiens
  misc_RNA (1)...(19): siRNA sense strand
gaucaugguucaucaacga

SEQ ID NO: 434834 - RNA, 19 nt, Homo sapiens
  misc_RNA (1)...(19): siRNA sense strand
ccaaggaaaugcugugaau

SEQ ID NO: 434835 - RNA, 19 nt, Homo sapiens
  misc_RNA (1)...(19): siRNA sense strand
gaacuaaagcaacagaaau

SEQ ID NO: 434836 - RNA, 19 nt, Homo sapiens
  misc_RNA (1)...(19): siRNA sense strand
acagagagcuaagcaauug

SEQ ID NO: 434837 - RNA, 19 nt, Homo sapiens
  misc_RNA (1)...(19): siRNA sense strand
caucgaagcuuuaucaaac

SEQ ID NO: 434838 - RNA, 19 nt, Homo sapiens
  misc_RNA (1)...(19): siRNA sense strand
gaagaaggagguaaauuca

SEQ ID NO: 434839 - RNA, 19 nt, Homo sapiens
  misc_RNA (1)...(19): siRNA sense strand
caagugggaugaugacuca

SEQ ID NO: 434840 - RNA, 19 nt, Homo sapiens
  misc_RNA (1)...(19): siRNA sense strand
ggucauauauccaggaagu

SEQ ID NO: 434841 - RNA, 19 nt, Homo sapiens
  misc_RNA (1)...(19): siRNA sense strand
gaagaguggcuacagauug

SEQ ID NO: 434842 - RNA, 19 nt, Homo sapiens
  misc_RNA (1)...(19): siRNA sense strand
gaagaagaaccuauugugu

SEQ ID NO: 434843 - RNA, 19 nt, Homo sapiens
  misc_RNA (1)...(19): siRNA sense strand
ucaaagaaaucugugagaa

SEQ ID NO: 434844 - RNA, 19 nt, Homo sapiens
  misc_RNA (1)...(19): siRNA sense strand
gcagaagagugucagaaca

SEQ ID NO: 434845 - RNA, 19 nt, Homo sapiens
  misc_RNA (1)...(19): siRNA sense strand
caagaacaguauuauagug

SEQ ID NO: 434846 - RNA, 19 nt, Homo sapiens
  misc_RNA (1)...(19): siRNA sense strand
ggaagaugaagaagaagua

SEQ ID NO: 434847 - RNA, 19 nt, Homo sapiens
  misc_RNA (1)...(19): siRNA sense strand
ccagaaguguacagaguuu

SEQ ID NO: 434848 - RNA, 19 nt, Homo sapiens
  misc_RNA (1)...(19): siRNA sense strand
caaagaaaucugugagaaa

SEQ ID NO: 434849 - RNA, 19 nt, Homo sapiens
  misc_RNA (1)...(19): siRNA sense strand
cagaagcgagaacauauua

SEQ ID NO: 434850 - RNA, 19 nt, Homo sapiens
  misc_RNA (1)...(19): siRNA sense strand
cagaaugacuacuugagaa

SEQ ID NO: 434851 - RNA, 19 nt, Homo sapiens
  misc_RNA (1)...(19): siRNA sense strand
gcaccaaauucgucaagug

SEQ ID NO: 434852 - RNA, 19 nt, Homo sapiens
  misc_RNA (1)...(19): siRNA sense strand
uaagagacaccacaagaaa

SEQ ID NO: 434853 - RNA, 19 nt, Homo sapiens
  misc_RNA (1)...(19): siRNA sense strand
gcacaacaccuaccucaca

SEQ ID NO: 434854 - RNA, 19 nt, Homo sapiens
  misc_RNA (1)...(19): siRNA sense strand
caugacaacugaaauaucu

SEQ ID NO: 434855 - RNA, 19 nt, Homo sapiens
  misc_RNA (1)...(19): siRNA sense strand
agacagagcuacuggaucu

SEQ ID NO: 434856 - RNA, 19 nt, Homo sapiens
  misc_RNA (1)...(19): siRNA sense strand
uaacagaagcuaaauccaa

SEQ ID NO: 434857 - RNA, 19 nt, Homo sapiens
  misc_RNA (1)...(19): siRNA sense strand
caucagaggcuccaaguga

SEQ ID NO: 434858 - RNA, 19 nt, Homo sapiens
  misc_RNA (1)...(19): siRNA sense strand
ggaaggcauuuaagaccaa

SEQ ID NO: 434859 - RNA, 19 nt, Homo sapiens
  misc_RNA (1)...(19): siRNA sense strand
ccaaaggacuugaacaacu

SEQ ID NO: 434860 - RNA, 19 nt, Homo sapiens
  misc_RNA (1)...(19): siRNA sense strand
ggauuugaaugaagacaug

SEQ ID NO: 434861 - RNA, 19 nt, Homo sapiens
  misc_RNA (1)...(19): siRNA sense strand
aaccauaucuuaccguuga

SEQ ID NO: 434862 - RNA, 19 nt, Homo sapiens
  misc_RNA (1)...(19): siRNA sense strand
gaccugaaauugauaacau

SEQ ID NO: 434863 - RNA, 19 nt, Homo sapiens
  misc_RNA (1)...(19): siRNA sense strand
ugucaaagaugccagaugu

SEQ ID NO: 434864 - RNA, 19 nt, Homo sapiens
  misc_RNA (1)...(19): siRNA sense strand
uagaagaagcgcaaaguaa

SEQ ID NO: 434865 - RNA, 19 nt, Homo sapiens
  misc_RNA (1)...(19): siRNA sense strand
ggaagaagaaccuauugug

SEQ ID NO: 434866 - RNA, 19 nt, Homo sapiens
  misc_RNA (1)...(19): siRNA sense strand
ucucguggcuuuccaagaa

SEQ ID NO: 434867 - RNA, 19 nt, Homo sapiens
  misc_RNA (1)...(19): siRNA sense strand
gccaaggaauggacaaaug

SEQ ID NO: 434868 - RNA, 19 nt, Homo sapiens
  misc_RNA (1)...(19): siRNA sense strand
aaagaaaucugugagaaag

SEQ ID NO: 434869 - RNA, 19 nt, Homo sapiens
  misc_RNA (1)...(19): siRNA sense strand
ugacggaugucgcagaaga

SEQ ID NO: 434870 - RNA, 19 nt, Homo sapiens
  misc_RNA (1)...(19): siRNA sense strand
gaaaugacccaaaaguuaa

SEQ ID NO: 434871 - RNA, 19 nt, Homo sapiens
  misc_RNA (1)...(19): siRNA sense strand
ccacagaagaaaugucuaa

SEQ ID NO: 434872 - RNA, 19 nt, Homo sapiens
  misc_RNA (1)...(19): siRNA sense strand
ucaagaagggcaccaaauu

SEQ ID NO: 434873 - RNA, 19 nt, Homo sapiens
  misc_RNA (1)...(19): siRNA sense strand
acauagaagugaaagacua

SEQ ID NO: 434874 - RNA, 19 nt, Homo sapiens
  misc_RNA (1)...(19): siRNA sense strand
gcaaguccaaguauugauu

SEQ ID NO: 434875 - RNA, 19 nt, Homo sapiens
  misc_RNA (1)...(19): siRNA sense strand
gaaacacuacaaagaaaug

SEQ ID NO: 434876 - RNA, 19 nt, Homo sapiens
  misc_RNA (1)...(19): siRNA sense strand
ggaaguagauauguuuggu

SEQ ID NO: 434877 - RNA, 19 nt, Homo sapiens
  misc_RNA (1)...(19): siRNA sense strand
caguggaauuuguagaaua

SEQ ID NO: 434878 - RNA, 19 nt, Homo sapiens
  misc_RNA (1)...(19): siRNA sense strand
aaacuccucuguugagaug

SEQ ID NO: 434879 - RNA, 19 nt, Homo sapiens
  misc_RNA (1)...(19): siRNA sense strand
ggaaacuccucuguugaga

SEQ ID NO: 434880 - RNA, 19 nt, Homo sapiens
  misc_RNA (1)...(19): siRNA sense strand
cugagaaacuggauuugaa

SEQ ID NO: 434881 - RNA, 19 nt, Homo sapiens
  misc_RNA (1)...(19): siRNA sense strand
gagcaagaauaccaagaca

SEQ ID NO: 434882 - RNA, 19 nt, Homo sapiens
  misc_RNA (1)...(19): siRNA sense strand
cacuauaucugucuaagga

SEQ ID NO: 434883 - RNA, 19 nt, Homo sapiens
  misc_RNA (1)...(19): siRNA sense strand
ccucagcucuucuggaaug

SEQ ID NO: 434884 - RNA, 19 nt, Homo sapiens
  misc_RNA (1)...(19): siRNA sense strand
caaaggacuugaacaacuc

SEQ ID NO: 434885 - RNA, 19 nt, Homo sapiens
  misc_RNA (1)...(19): siRNA sense strand
cgacgacgaugaugaugau

SEQ ID NO: 434886 - RNA, 19 nt, Homo sapiens
  misc_RNA (1)...(19): siRNA sense strand
aagaguggcuacagauuga

SEQ ID NO: 434887 - RNA, 19 nt, Homo sapiens
  misc_RNA (1)...(19): siRNA sense strand
ggaaagaucagugaagaca

SEQ ID NO: 434888 - RNA, 19 nt, Homo sapiens
  misc_RNA (1)...(19): siRNA sense strand
aacagaagcuaaauccaaa

SEQ ID NO: 434889 - RNA, 19 nt, Homo sapiens
  misc_RNA (1)...(19): siRNA sense strand
agaaaucugugagaaagaa

SEQ ID NO: 434890 - RNA, 19 nt, Homo sapiens
  misc_RNA (1)...(19): siRNA sense strand
ggcaagaacaguauuauag

SEQ ID NO: 434891 - RNA, 19 nt, Homo sapiens
  misc_RNA (1)...(19): siRNA sense strand
gaaaaccacugaccuuauc

SEQ ID NO: 434892 - RNA, 19 nt, Homo sapiens
  misc_RNA (1)...(19): siRNA sense strand
acagaaaucguuugugaaa

SEQ ID NO: 434893 - RNA, 19 nt, Homo sapiens
  misc_RNA (1)...(19): siRNA sense strand
caaggaggaaggcauuuaa

SEQ ID NO: 434894 - RNA, 19 nt, Homo sapiens
  misc_RNA (1)...(19): siRNA sense strand
gggaugcccuucucaugga

SEQ ID NO: 434895 - RNA, 19 nt, Homo sapiens
  misc_RNA (1)...(19): siRNA sense strand
gaaaggaaagaucagugaa

SEQ ID NO: 434896 - RNA, 19 nt, Homo sapiens
  misc_RNA (1)...(19): siRNA sense strand
agaagaagcgcaaaguaaa

SEQ ID NO: 434897 - RNA, 19 nt, Homo sapiens
  misc_RNA (1)...(19): siRNA sense strand
gcgagaacauauuaaacug

SEQ ID NO: 434898 - RNA, 19 nt, Homo sapiens
  misc_RNA (1)...(19): siRNA sense strand
gcaagaacaguauuauagu

SEQ ID NO: 434899 - RNA, 19 nt, Homo sapiens
  misc_RNA (1)...(19): siRNA sense strand
ugaaaugacccaaaaguua

SEQ ID NO: 434900 - RNA, 19 nt, Homo sapiens
  misc_RNA (1)...(19): siRNA sense strand
ugaagaaggagguaaauuc

SEQ ID NO: 434901 - RNA, 19 nt, Homo sapiens
  misc_RNA (1)...(19): siRNA sense strand
caacagaaaucguuuguga

SEQ ID NO: 434902 - RNA, 19 nt, Homo sapiens
  misc_RNA (1)...(19): siRNA sense strand
gaugaugacucaacuauug

SEQ ID NO: 434903 - RNA, 19 nt, Homo sapiens
  misc_RNA (1)...(19): siRNA sense strand
ccacugaccuuaucaaaga

SEQ ID NO: 434904 - RNA, 19 nt, Homo sapiens
  misc_RNA (1)...(19): siRNA sense strand
gcaauuggcugcuuugaca

SEQ ID NO: 434905 - RNA, 19 nt, Homo sapiens
  misc_RNA (1)...(19): siRNA sense strand
gaacaucucccauuugaau

SEQ ID NO: 434906 - RNA, 19 nt, Homo sapiens
  misc_RNA (1)...(19): siRNA sense strand
gaagauaacagaagcuaaa

SEQ ID NO: 434907 - RNA, 19 nt, Homo sapiens
  misc_RNA (1)...(19): siRNA sense strand
ggaccuggcuaugcaaaua

SEQ ID NO: 434908 - RNA, 19 nt, Homo sapiens
  misc_RNA (1)...(19): siRNA sense strand
gagaauagcaguuuaugaa

SEQ ID NO: 434909 - RNA, 19 nt, Homo sapiens
  misc_RNA (1)...(19): siRNA sense strand
gaauagcaguuuaugaaga

SEQ ID NO: 434910 - RNA, 19 nt, Homo sapiens
  misc_RNA (1)...(19): siRNA sense strand
gaagaaaucacacaaguca

SEQ ID NO: 434911 - RNA, 19 nt, Homo sapiens
  misc_RNA (1)...(19): siRNA sense strand
gaaaggaaccagccucuga

SEQ ID NO: 434912 - RNA, 19 nt, Homo sapiens
  misc_RNA (1)...(19): siRNA sense strand
gaaaugaaagaccugguua

SEQ ID NO: 434913 - RNA, 19 nt, Homo sapiens
  misc_RNA (1)...(19): siRNA sense strand
caaaugagguuuucaguuu

SEQ ID NO: 434914 - RNA, 19 nt, Homo sapiens
  misc_RNA (1)...(19): siRNA sense strand
gaaacuggauuugaaugaa

SEQ ID NO: 434915 - RNA, 19 nt, Homo sapiens
  misc_RNA (1)...(19): siRNA sense strand
gcacuuaauuuccagacaa

SEQ ID NO: 434916 - RNA, 19 nt, Homo sapiens
  misc_RNA (1)...(19): siRNA sense strand
gaacagagagcuaagcaau

SEQ ID NO: 434917 - RNA, 19 nt, Homo sapiens
  misc_RNA (1)...(19): siRNA sense strand
gugaacaucucccauuuga

SEQ ID NO: 434918 - RNA, 19 nt, Homo sapiens
  misc_RNA (1)...(19): siRNA sense strand
ugaaagaccugguuaagag

SEQ ID NO: 434919 - RNA, 19 nt, Homo sapiens
  misc_RNA (1)...(19): siRNA sense strand
gcuggaaacuccucuguug

SEQ ID NO: 434920 - RNA, 19 nt, Homo sapiens
  misc_RNA (1)...(19): siRNA sense strand
gaaugcagguugucagaug

SEQ ID NO: 434921 - RNA, 19 nt, Homo sapiens
  misc_RNA (1)...(19): siRNA sense strand
gaacacguguggauucauc

SEQ ID NO: 434922 - RNA, 19 nt, Homo sapiens
  misc_RNA (1)...(19): siRNA sense strand
gaagcuaaauccaaagaca

SEQ ID NO: 434923 - RNA, 19 nt, Homo sapiens
  misc_RNA (1)...(19): siRNA sense strand
ugucuaaucuggugaacua

SEQ ID NO: 434924 - RNA, 19 nt, Homo sapiens
  misc_RNA (1)...(19): siRNA sense strand
ggaaauacgucagcagauc

SEQ ID NO: 434925 - RNA, 19 nt, Homo sapiens
  misc_RNA (1)...(19): siRNA sense strand
caaaguaaacggcaagaaa

SEQ ID NO: 434926 - RNA, 19 nt, Homo sapiens
  misc_RNA (1)...(19): siRNA sense strand
gagaacgacuccagcagaa

SEQ ID NO: 434927 - RNA, 19 nt, Homo sapiens
  misc_RNA (1)...(19): siRNA sense strand
cagaagaaaugucuaaucu

SEQ ID NO: 434928 - RNA, 19 nt, Homo sapiens
  misc_RNA (1)...(19): siRNA sense strand
gaagcgagaacauauuaaa

SEQ ID NO: 434929 - RNA, 19 nt, Homo sapiens
  misc_RNA (1)...(19): siRNA sense strand
agaaggagguaaauucauu

SEQ ID NO: 434930 - RNA, 19 nt, Homo sapiens
  misc_RNA (1)...(19): siRNA sense strand
gaacacacuaccaaguaua

SEQ ID NO: 434931 - RNA, 19 nt, Homo sapiens
  misc_RNA (1)...(19): siRNA sense strand
gaucaugguucaucaacga

SEQ ID NO: 434932 - RNA, 19 nt, Homo sapiens
  misc_RNA (1)...(19): siRNA sense strand
ccaaggaaaugcugugaau

SEQ ID NO: 434933 - RNA, 19 nt, Homo sapiens
  misc_RNA (1)...(19): siRNA sense strand
gaacuaaagcaacagaaau

SEQ ID NO: 434934 - RNA, 19 nt, Homo sapiens
  misc_RNA (1)...(19): siRNA sense strand
acagagagcuaagcaauug

SEQ ID NO: 434935 - RNA, 19 nt, Homo sapiens
  misc_RNA (1)...(19): siRNA sense strand
caucgaagcuuuaucaaac

SEQ ID NO: 434936 - RNA, 19 nt, Homo sapiens
  misc_RNA (1)...(19): siRNA sense strand
gaagaaggagguaaauuca

SEQ ID NO: 434937 - RNA, 19 nt, Homo sapiens
  misc_RNA (1)...(19): siRNA sense strand
gaagaguggcuacagauug

SEQ ID NO: 434938 - RNA, 19 nt, Homo sapiens
  misc_RNA (1)...(19): siRNA sense strand
ggucauauauccaggaagu

SEQ ID NO: 434939 - RNA, 19 nt, Homo sapiens
  misc_RNA (1)...(19): siRNA sense strand
caagugggaugaugacuca

SEQ ID NO: 434940 - RNA, 19 nt, Homo sapiens
  misc_RNA (1)...(19): siRNA sense strand
gaagaagaaccuauugugu

SEQ ID NO: 434941 - RNA, 19 nt, Homo sapiens
  misc_RNA (1)...(19): siRNA sense strand
ucaaagaaaucugugagaa

SEQ ID NO: 434942 - RNA, 19 nt, Homo sapiens
  misc_RNA (1)...(19): siRNA sense strand
gcagaagagugucagaaca

SEQ ID NO: 434943 - RNA, 19 nt, Homo sapiens
  misc_RNA (1)...(19): siRNA sense strand
caagaacaguauuauagug

SEQ ID NO: 434944 - RNA, 19 nt, Homo sapiens
  misc_RNA (1)...(19): siRNA sense strand
ggaagaugaagaagaagua

SEQ ID NO: 434945 - RNA, 19 nt, Homo sapiens
  misc_RNA (1)...(19): siRNA sense strand
ccagaaguguacagaguuu

SEQ ID NO: 434946 - RNA, 19 nt, Homo sapiens
  misc_RNA (1)...(19): siRNA sense strand
caaagaaaucugugagaaa

SEQ ID NO: 434947 - RNA, 19 nt, Homo sapiens
  misc_RNA (1)...(19): siRNA sense strand
cagaagcgagaacauauua

SEQ ID NO: 434948 - RNA, 19 nt, Homo sapiens
  misc_RNA (1)...(19): siRNA sense strand
cagaaugacuacuugagaa

SEQ ID NO: 434949 - RNA, 19 nt, Homo sapiens
  misc_RNA (1)...(19): siRNA sense strand
gcaccaaauucgucaagug

SEQ ID NO: 434950 - RNA, 19 nt, Homo sapiens
  misc_RNA (1)...(19): siRNA sense strand
uaagagacaccacaagaaa

SEQ ID NO: 434951 - RNA, 19 nt, Homo sapiens
  misc_RNA (1)...(19): siRNA sense strand
gcacaacaccuaccucaca

SEQ ID NO: 434952 - RNA, 19 nt, Homo sapiens
  misc_RNA (1)...(19): siRNA sense strand
caugacaacugaaauaucu

SEQ ID NO: 434953 - RNA, 19 nt, Homo sapiens
  misc_RNA (1)...(19): siRNA sense strand
gaccugaaauugauaacau

SEQ ID NO: 434954 - RNA, 19 nt, Homo sapiens
  misc_RNA (1)...(19): siRNA sense strand
uaacagaagcuaaauccaa

SEQ ID NO: 434955 - RNA, 19 nt, Homo sapiens
  misc_RNA (1)...(19): siRNA sense strand
caucagaggcuccaaguga

SEQ ID NO: 434956 - RNA, 19 nt, Homo sapiens
  misc_RNA (1)...(19): siRNA sense strand
ggaaggcauuuaagaccaa

SEQ ID NO: 434957 - RNA, 19 nt, Homo sapiens
  misc_RNA (1)...(19): siRNA sense strand
ccaaaggacuugaacaacu

SEQ ID NO: 434958 - RNA, 19 nt, Homo sapiens
  misc_RNA (1)...(19): siRNA sense strand
agacagagcuacuggaucu

SEQ ID NO: 434959 - RNA, 19 nt, Homo sapiens
  misc_RNA (1)...(19): siRNA sense strand
ggauuugaaugaagacaug

SEQ ID NO: 434960 - RNA, 19 nt, Homo sapiens
  misc_RNA (1)...(19): siRNA sense strand
aaccauaucuuaccguuga

SEQ ID NO: 434961 - RNA, 19 nt, Homo sapiens
  misc_RNA (1)...(19): siRNA sense strand
ugucaaagaugccagaugu

SEQ ID NO: 434962 - RNA, 19 nt, Homo sapiens
  misc_RNA (1)...(19): siRNA sense strand
uagaagaagcgcaaaguaa

SEQ ID NO: 434963 - RNA, 19 nt, Homo sapiens
  misc_RNA (1)...(19): siRNA sense strand
ggaagaagaaccuauugug

SEQ ID NO: 434964 - RNA, 19 nt, Homo sapiens
  misc_RNA (1)...(19): siRNA sense strand
ucucguggcuuuccaagaa

SEQ ID NO: 434965 - RNA, 19 nt, Homo sapiens
  misc_RNA (1)...(19): siRNA sense strand
gccaaggaauggacaaaug

SEQ ID NO: 434966 - RNA, 19 nt, Homo sapiens
  misc_RNA (1)...(19): siRNA sense strand
aaagaaaucugugagaaag

SEQ ID NO: 434967 - RNA, 19 nt, Homo sapiens
  misc_RNA (1)...(19): siRNA sense strand
ugacggaugucgcagaaga

SEQ ID NO: 434968 - RNA, 19 nt, Homo sapiens
  misc_RNA (1)...(19): siRNA sense strand
gaaaugacccaaaaguuaa

SEQ ID NO: 434969 - RNA, 19 nt, Homo sapiens
  misc_RNA (1)...(19): siRNA sense strand
ccacagaagaaaugucuaa

SEQ ID NO: 434970 - RNA, 19 nt, Homo sapiens
  misc_RNA (1)...(19): siRNA sense strand
ucaagaagggcaccaaauu

SEQ ID NO: 434971 - RNA, 19 nt, Homo sapiens
  misc_RNA (1)...(19): siRNA sense strand
acauagaagugaaagacua

SEQ ID NO: 434972 - RNA, 19 nt, Homo sapiens
  misc_RNA (1)...(19): siRNA sense strand
gcaaguccaaguauugauu

SEQ ID NO: 434973 - RNA, 19 nt, Homo sapiens
  misc_RNA (1)...(19): siRNA sense strand
gaaacacuacaaagaaaug

SEQ ID NO: 434974 - RNA, 19 nt, Homo sapiens
  misc_RNA (1)...(19): siRNA sense strand
ggaaguagauauguuuggu

SEQ ID NO: 434975 - RNA, 19 nt, Homo sapiens
  misc_RNA (1)...(19): siRNA sense strand
caguggaauuuguagaaua

SEQ ID NO: 434976 - RNA, 19 nt, Homo sapiens
  misc_RNA (1)...(19): siRNA sense strand
aaacuccucuguugagaug

SEQ ID NO: 434977 - RNA, 19 nt, Homo sapiens
  misc_RNA (1)...(19): siRNA sense strand
ggaaacuccucuguugaga

SEQ ID NO: 434978 - RNA, 19 nt, Homo sapiens
  misc_RNA (1)...(19): siRNA sense strand
cugagaaacuggauuugaa

SEQ ID NO: 434979 - RNA, 19 nt, Homo sapiens
  misc_RNA (1)...(19): siRNA sense strand
cacuauaucugucuaagga

SEQ ID NO: 434980 - RNA, 19 nt, Homo sapiens
  misc_RNA (1)...(19): siRNA sense strand
ccucagcucuucuggaaug

SEQ ID NO: 434981 - RNA, 19 nt, Homo sapiens
  misc_RNA (1)...(19): siRNA sense strand
caaaggacuugaacaacuc

SEQ ID NO: 434982 - RNA, 19 nt, Homo sapiens
  misc_RNA (1)...(19): siRNA sense strand
cgacgacgaugaugaugau

SEQ ID NO: 434983 - RNA, 19 nt, Homo sapiens
  misc_RNA (1)...(19): siRNA sense strand
aagaguggcuacagauuga

SEQ ID NO: 434984 - RNA, 19 nt, Homo sapiens
  misc_RNA (1)...(19): siRNA sense strand
aacagaagcuaaauccaaa

SEQ ID NO: 434985 - RNA, 19 nt, Homo sapiens
  misc_RNA (1)...(19): siRNA sense strand
agaaaucugugagaaagaa

SEQ ID NO: 434986 - RNA, 19 nt, Homo sapiens
  misc_RNA (1)...(19): siRNA sense strand
ggcaagaacaguauuauag

SEQ ID NO: 434987 - RNA, 19 nt, Homo sapiens
  misc_RNA (1)...(19): siRNA sense strand
gaaaaccacugaccuuauc

SEQ ID NO: 434988 - RNA, 19 nt, Homo sapiens
  misc_RNA (1)...(19): siRNA sense strand
acagaaaucguuugugaaa

SEQ ID NO: 434989 - RNA, 19 nt, Homo sapiens
  misc_RNA (1)...(19): siRNA sense strand
caaggaggaaggcauuuaa

SEQ ID NO: 434990 - RNA, 19 nt, Homo sapiens
  misc_RNA (1)...(19): siRNA sense strand
aagaagaaguggccaagga

SEQ ID NO: 434991 - RNA, 19 nt, Homo sapiens
  misc_RNA (1)...(19): siRNA sense strand
agaagaagcgcaaaguaaa

SEQ ID NO: 434992 - RNA, 19 nt, Homo sapiens
  misc_RNA (1)...(19): siRNA sense strand
gcgagaacauauuaaacug

SEQ ID NO: 434993 - RNA, 19 nt, Homo sapiens
  misc_RNA (1)...(19): siRNA sense strand
gcaagaacaguauuauagu

SEQ ID NO: 434994 - RNA, 19 nt, Homo sapiens
  misc_RNA (1)...(19): siRNA sense strand
ugaaaugacccaaaaguua

SEQ ID NO: 434995 - RNA, 19 nt, Homo sapiens
  misc_RNA (1)...(19): siRNA sense strand
ugaagaaggagguaaauuc

SEQ ID NO: 434996 - RNA, 19 nt, Homo sapiens
  misc_RNA (1)...(19): siRNA sense strand
gggaugcccuucucaugga

SEQ ID NO: 434997 - RNA, 19 nt, Homo sapiens
  misc_RNA (1)...(19): siRNA sense strand
gacgcugccugcugucuuu

SEQ ID NO: 434998 - RNA, 19 nt, Homo sapiens
  misc_RNA (1)...(19): siRNA sense strand
uaauagacuugaaggacaa

SEQ ID NO: 434999 - RNA, 19 nt, Homo sapiens
  misc_RNA (1)...(19): siRNA sense strand
gaagaagaaguaaagaaag

SEQ ID NO: 435000 - RNA, 19 nt, Homo sapiens
  misc_RNA (1)...(19): siRNA sense strand
gaagaugaagaagaaguaa

SEQ ID NO: 435001 - RNA, 19 nt, Homo sapiens
  misc_RNA (1)...(19): siRNA sense strand
gaaaugcugugucuucgua

SEQ ID NO: 435002 - RNA, 19 nt, Homo sapiens
  misc_RNA (1)...(19): siRNA sense strand
ggacagcacuucccugaga

SEQ ID NO: 435003 - RNA, 19 nt, Homo sapiens
  misc_RNA (1)...(19): siRNA sense strand
ggccagagcuugaccuuca

SEQ ID NO: 435004 - RNA, 19 nt, Homo sapiens
  misc_RNA (1)...(19): siRNA sense strand
agaaggagcuggacacugu

SEQ ID NO: 435005 - RNA, 19 nt, Homo sapiens
  misc_RNA (1)...(19): siRNA sense strand
ggagaagauugucaaccuu

SEQ ID NO: 435006 - RNA, 19 nt, Homo sapiens
  misc_RNA (1)...(19): siRNA sense strand
gcacuucgacccuuacaau

SEQ ID NO: 435007 - RNA, 19 nt, Homo sapiens
  misc_RNA (1)...(19): siRNA sense strand
gugagaagaugaugcuguu

SEQ ID NO: 435008 - RNA, 19 nt, Homo sapiens
  misc_RNA (1)...(19): siRNA sense strand
agaggaagauccagaagga

SEQ ID NO: 435009 - RNA, 19 nt, Homo sapiens
  misc_RNA (1)...(19): siRNA sense strand
gagaagaugaugcuguuug

SEQ ID NO: 435010 - RNA, 19 nt, Homo sapiens
  misc_RNA (1)...(19): siRNA sense strand
ggagcacuaucaggacuuu

SEQ ID NO: 435011 - RNA, 19 nt, Homo sapiens
  misc_RNA (1)...(19): siRNA sense strand
uaucaggacuuugacaaga

SEQ ID NO: 435012 - RNA, 19 nt, Homo sapiens
  misc_RNA (1)...(19): siRNA sense strand
gggaaguccuggccaagug

SEQ ID NO: 435013 - RNA, 19 nt, Homo sapiens
  misc_RNA (1)...(19): siRNA sense strand
gagcaggauuugacacagu

SEQ ID NO: 435014 - RNA, 19 nt, Homo sapiens
  misc_RNA (1)...(19): siRNA sense strand
ucauguaccuugugaccaa

SEQ ID NO: 435015 - RNA, 19 nt, Homo sapiens
  misc_RNA (1)...(19): siRNA sense strand
agaaugcccucaacaccuu

SEQ ID NO: 435016 - RNA, 19 nt, Homo sapiens
  misc_RNA (1)...(19): siRNA sense strand
caucacgggugcccuguuc

SEQ ID NO: 435017 - RNA, 19 nt, Homo sapiens
  misc_RNA (1)...(19): siRNA sense strand
ccuccacccucaucacuga

SEQ ID NO: 435018 - RNA, 19 nt, Homo sapiens
  misc_RNA (1)...(19): siRNA sense strand
ugaccaagccugagauaca

SEQ ID NO: 435019 - RNA, 19 nt, Homo sapiens
  misc_RNA (1)...(19): siRNA sense strand
ucuacgggcugaccaugaa

SEQ ID NO: 435020 - RNA, 19 nt, Homo sapiens
  misc_RNA (1)...(19): siRNA sense strand
gcagggcgacgauuucaag

SEQ ID NO: 435021 - RNA, 19 nt, Homo sapiens
  misc_RNA (1)...(19): siRNA sense strand
gaccaagccugagauacag

SEQ ID NO: 435022 - RNA, 19 nt, Homo sapiens
  misc_RNA (1)...(19): siRNA sense strand
ggagcuggacacugugauu

SEQ ID NO: 435023 - RNA, 19 nt, Homo sapiens
  misc_RNA (1)...(19): siRNA sense strand
ucugggugcucaaggguuu

SEQ ID NO: 435024 - RNA, 19 nt, Homo sapiens
  misc_RNA (1)...(19): siRNA sense strand
aaacaguccaggagcacua

SEQ ID NO: 435025 - RNA, 19 nt, Homo sapiens
  misc_RNA (1)...(19): siRNA sense strand
cccaagaaaugcugugucu

SEQ ID NO: 435026 - RNA, 19 nt, Homo sapiens
  misc_RNA (1)...(19): siRNA sense strand
gagcuggacacugugauug

SEQ ID NO: 435027 - RNA, 19 nt, Homo sapiens
  misc_RNA (1)...(19): siRNA sense strand
uugucaaccuugucaauga

SEQ ID NO: 435028 - RNA, 19 nt, Homo sapiens
  misc_RNA (1)...(19): siRNA sense strand
agaagaugaugcuguuugg

SEQ ID NO: 435029 - RNA, 19 nt, Homo sapiens
  misc_RNA (1)...(19): siRNA sense strand
gcacaacaagggacacaac

SEQ ID NO: 435030 - RNA, 19 nt, Homo sapiens
  misc_RNA (1)...(19): siRNA sense strand
caucuuuggagcaggauuu

SEQ ID NO: 435031 - RNA, 19 nt, Homo sapiens
  misc_RNA (1)...(19): siRNA sense strand
aguggcaggucaaccauga

SEQ ID NO: 435032 - RNA, 19 nt, Homo sapiens
  misc_RNA (1)...(19): siRNA sense strand
caagggacacaacgcugaa

SEQ ID NO: 435033 - RNA, 19 nt, Homo sapiens
  misc_RNA (1)...(19): siRNA sense strand
agaagauugucaaccuugu

SEQ ID NO: 435034 - RNA, 19 nt, Homo sapiens
  misc_RNA (1)...(19): siRNA sense strand
gaagauugucaaccuuguc

SEQ ID NO: 435035 - RNA, 19 nt, Homo sapiens
  misc_RNA (1)...(19): siRNA sense strand
gucaguggccaacgucauu

SEQ ID NO: 435036 - RNA, 19 nt, Homo sapiens
  misc_RNA (1)...(19): siRNA sense strand
gcccuugagugagaagaug

SEQ ID NO: 435037 - RNA, 19 nt, Homo sapiens
  misc_RNA (1)...(19): siRNA sense strand
gccaucuucugccugguau

SEQ ID NO: 435038 - RNA, 19 nt, Homo sapiens
  misc_RNA (1)...(19): siRNA sense strand
ccacaggagaagauuguca

SEQ ID NO: 435039 - RNA, 19 nt, Homo sapiens
  misc_RNA (1)...(19): siRNA sense strand
agccugagauacagaggaa

SEQ ID NO: 435040 - RNA, 19 nt, Homo sapiens
  misc_RNA (1)...(19): siRNA sense strand
uggaggagcaugugagcaa

SEQ ID NO: 435041 - RNA, 19 nt, Homo sapiens
  misc_RNA (1)...(19): siRNA sense strand
gcugaauggcuucuacauc

SEQ ID NO: 435042 - RNA, 19 nt, Homo sapiens
  misc_RNA (1)...(19): siRNA sense strand
cgggugcccuguucaagca

SEQ ID NO: 435043 - RNA, 19 nt, Homo sapiens
  misc_RNA (1)...(19): siRNA sense strand
cuggagaccuuccgacacu

SEQ ID NO: 435044 - RNA, 19 nt, Homo sapiens
  misc_RNA (1)...(19): siRNA sense strand
ucacugauggccagagcuu

SEQ ID NO: 435045 - RNA, 19 nt, Homo sapiens
  misc_RNA (1)...(19): siRNA sense strand
agugggagaucuuccucuu

SEQ ID NO: 435046 - RNA, 19 nt, Homo sapiens
  misc_RNA (1)...(19): siRNA sense strand
cugggcacuucgacccuua

SEQ ID NO: 435047 - RNA, 19 nt, Homo sapiens
  misc_RNA (1)...(19): siRNA sense strand
aggagaagauugucaaccu

SEQ ID NO: 435048 - RNA, 19 nt, Homo sapiens
  misc_RNA (1)...(19): siRNA sense strand
aaugcugugucuucguaaa

SEQ ID NO: 435049 - RNA, 19 nt, Homo sapiens
  misc_RNA (1)...(19): siRNA sense strand
ccgacacuccuccuucuug

SEQ ID NO: 435050 - RNA, 19 nt, Homo sapiens
  misc_RNA (1)...(19): siRNA sense strand
gaccccagcugcccuacuu

SEQ ID NO: 435051 - RNA, 19 nt, Homo sapiens
  misc_RNA (1)...(19): siRNA sense strand
gcagguugcaggagcugau

SEQ ID NO: 435052 - RNA, 19 nt, Homo sapiens
  misc_RNA (1)...(19): siRNA sense strand
ccugagauacagaggaaga

SEQ ID NO: 435053 - RNA, 19 nt, Homo sapiens
  misc_RNA (1)...(19): siRNA sense strand
gcauugucccagucuguuc

SEQ ID NO: 435054 - RNA, 19 nt, Homo sapiens
  misc_RNA (1)...(19): siRNA sense strand
gaagaaagaugguaacaaa

SEQ ID NO: 435055 - RNA, 19 nt, Homo sapiens
  misc_RNA (1)...(19): siRNA sense strand
gauaugagguucugucuga

SEQ ID NO: 435056 - RNA, 19 nt, Homo sapiens
  misc_RNA (1)...(19): siRNA sense strand
ggagaugacuaaacugaaa

SEQ ID NO: 435057 - RNA, 19 nt, Homo sapiens
  misc_RNA (1)...(19): siRNA sense strand
ggacaucgcuguucuucug

SEQ ID NO: 435058 - RNA, 19 nt, Homo sapiens
  misc_RNA (1)...(19): siRNA sense strand
ugacuaaacugaaacaaga

SEQ ID NO: 435059 - RNA, 19 nt, Homo sapiens
  misc_RNA (1)...(19): siRNA sense strand
ggaaaugcaugaccgaugu

SEQ ID NO: 435060 - RNA, 19 nt, Homo sapiens
  misc_RNA (1)...(19): siRNA sense strand
uaucaacucugucaugaaa

SEQ ID NO: 435061 - RNA, 19 nt, Homo sapiens
  misc_RNA (1)...(19): siRNA sense strand
gacugaagcugacaaagaa

SEQ ID NO: 435062 - RNA, 19 nt, Homo sapiens
  misc_RNA (1)...(19): siRNA sense strand
ggaaaugugugacaagagu

SEQ ID NO: 435063 - RNA, 19 nt, Homo sapiens
  misc_RNA (1)...(19): siRNA sense strand
gaaagaugguaacaaagau

SEQ ID NO: 435064 - RNA, 19 nt, Homo sapiens
  misc_RNA (1)...(19): siRNA sense strand
caagcucccucccuucuuu

SEQ ID NO: 435065 - RNA, 19 nt, Homo sapiens
  misc_RNA (1)...(19): siRNA sense strand
ggccugagcugccuaugaa

SEQ ID NO: 435066 - RNA, 19 nt, Homo sapiens
  misc_RNA (1)...(19): siRNA sense strand
gguggaagcugccgucaug

SEQ ID NO: 435067 - RNA, 19 nt, Homo sapiens
  misc_RNA (1)...(19): siRNA sense strand
gaaguacagcuuagagaaa

SEQ ID NO: 435068 - RNA, 19 nt, Homo sapiens
  misc_RNA (1)...(19): siRNA sense strand
gaucgccgcuggccucuau

SEQ ID NO: 435069 - RNA, 19 nt, Homo sapiens
  misc_RNA (1)...(19): siRNA sense strand
ggaccuccguggaaacaaa

SEQ ID NO: 435070 - RNA, 19 nt, Homo sapiens
  misc_RNA (1)...(19): siRNA sense strand
acacugaaguccaucauga

SEQ ID NO: 435071 - RNA, 19 nt, Homo sapiens
  misc_RNA (1)...(19): siRNA sense strand
gcaaagauaugagguucug

SEQ ID NO: 435072 - RNA, 19 nt, Homo sapiens
  misc_RNA (1)...(19): siRNA sense strand
gcaauuauuugggauauac

SEQ ID NO: 435073 - RNA, 19 nt, Homo sapiens
  misc_RNA (1)...(19): siRNA sense strand
gcaacacagcccuccauua

SEQ ID NO: 435074 - RNA, 19 nt, Homo sapiens
  misc_RNA (1)...(19): siRNA sense strand
gaagucagcgucugcgaaa

SEQ ID NO: 435075 - RNA, 19 nt, Homo sapiens
  misc_RNA (1)...(19): siRNA sense strand
ugaaguccaucaugaagaa

SEQ ID NO: 435076 - RNA, 19 nt, Homo sapiens
  misc_RNA (1)...(19): siRNA sense strand
ugacuggccuggaucacua

SEQ ID NO: 435077 - RNA, 19 nt, Homo sapiens
  misc_RNA (1)...(19): siRNA sense strand
gaagggcaccaugcaguua

SEQ ID NO: 435078 - RNA, 19 nt, Homo sapiens
  misc_RNA (1)...(19): siRNA sense strand
agagagagguaugaauuaa

SEQ ID NO: 435079 - RNA, 19 nt, Homo sapiens
  misc_RNA (1)...(19): siRNA sense strand
cagccugaauguaagaaua

SEQ ID NO: 435080 - RNA, 19 nt, Homo sapiens
  misc_RNA (1)...(19): siRNA sense strand
caacacagcccuccauuac

SEQ ID NO: 435081 - RNA, 19 nt, Homo sapiens
  misc_RNA (1)...(19): siRNA sense strand
ucaaagaagugcggucuau

SEQ ID NO: 435082 - RNA, 19 nt, Homo sapiens
  misc_RNA (1)...(19): siRNA sense strand
ccucagagcucagggagaa

SEQ ID NO: 435083 - RNA, 19 nt, Homo sapiens
  misc_RNA (1)...(19): siRNA sense strand
ucacacuccucaagacaaa

SEQ ID NO: 435084 - RNA, 19 nt, Homo sapiens
  misc_RNA (1)...(19): siRNA sense strand
gagaaggacaugcggauug

SEQ ID NO: 435085 - RNA, 19 nt, Homo sapiens
  misc_RNA (1)...(19): siRNA sense strand
gaaaagauguugucugcau

SEQ ID NO: 435086 - RNA, 19 nt, Homo sapiens
  misc_RNA (1)...(19): siRNA sense strand
cagagagagguaugaauua

SEQ ID NO: 435087 - RNA, 19 nt, Homo sapiens
  misc_RNA (1)...(19): siRNA sense strand
gaaaugcagguucaagaau

SEQ ID NO: 435088 - RNA, 19 nt, Homo sapiens
  misc_RNA (1)...(19): siRNA sense strand
ccaccgagguucauuugau

SEQ ID NO: 435089 - RNA, 19 nt, Homo sapiens
  misc_RNA (1)...(19): siRNA sense strand
gcuguuagaugccgaugug

SEQ ID NO: 435090 - RNA, 19 nt, Homo sapiens
  misc_RNA (1)...(19): siRNA sense strand
ggaggucuguggaaaugug

SEQ ID NO: 435091 - RNA, 19 nt, Homo sapiens
  misc_RNA (1)...(19): siRNA sense strand
ucagagagagguaugaauu

SEQ ID NO: 435092 - RNA, 19 nt, Homo sapiens
  misc_RNA (1)...(19): siRNA sense strand
augaauugguggauuguua

SEQ ID NO: 435093 - RNA, 19 nt, Homo sapiens
  misc_RNA (1)...(19): siRNA sense strand
gcaccaugcaguuaauauu

SEQ ID NO: 435094 - RNA, 19 nt, Homo sapiens
  misc_RNA (1)...(19): siRNA sense strand
aagacaaacuugaaucuca

SEQ ID NO: 435095 - RNA, 19 nt, Homo sapiens
  misc_RNA (1)...(19): siRNA sense strand
gcacgcagaggauaaagga

SEQ ID NO: 435096 - RNA, 19 nt, Homo sapiens
  misc_RNA (1)...(19): siRNA sense strand
gcacugaagagcugaggaa

SEQ ID NO: 435097 - RNA, 19 nt, Homo sapiens
  misc_RNA (1)...(19): siRNA sense strand
caaagaaauugagcugcaa

SEQ ID NO: 435098 - RNA, 19 nt, Homo sapiens
  misc_RNA (1)...(19): siRNA sense strand
ugacugaagcugacaaaga

SEQ ID NO: 435099 - RNA, 19 nt, Homo sapiens
  misc_RNA (1)...(19): siRNA sense strand
gggacuacauagcugcuuu

SEQ ID NO: 435100 - RNA, 19 nt, Homo sapiens
  misc_RNA (1)...(19): siRNA sense strand
ggaggaggaugaagacacu

SEQ ID NO: 435101 - RNA, 19 nt, Homo sapiens
  misc_RNA (1)...(19): siRNA sense strand
agaaagaugguaacaaaga

SEQ ID NO: 435102 - RNA, 19 nt, Homo sapiens
  misc_RNA (1)...(19): siRNA sense strand
ccuaugaauugguggauug

SEQ ID NO: 435103 - RNA, 19 nt, Homo sapiens
  misc_RNA (1)...(19): siRNA sense strand
gauuccagcucagaugaaa

SEQ ID NO: 435104 - RNA, 19 nt, Homo sapiens
  misc_RNA (1)...(19): siRNA sense strand
acacuugucuaagcacuuu

SEQ ID NO: 435105 - RNA, 19 nt, Homo sapiens
  misc_RNA (1)...(19): siRNA sense strand
gagaaggccgugucaagga

SEQ ID NO: 435106 - RNA, 19 nt, Homo sapiens
  misc_RNA (1)...(19): siRNA sense strand
guaugcccaugucaacuuu

SEQ ID NO: 435107 - RNA, 19 nt, Homo sapiens
  misc_RNA (1)...(19): siRNA sense strand
agagagguaugaauuaagu

SEQ ID NO: 435108 - RNA, 19 nt, Homo sapiens
  misc_RNA (1)...(19): siRNA sense strand
aaaugcagguucaagaaug

SEQ ID NO: 435109 - RNA, 19 nt, Homo sapiens
  misc_RNA (1)...(19): siRNA sense strand
caucagcugugaagaccaa

SEQ ID NO: 435110 - RNA, 19 nt, Homo sapiens
  misc_RNA (1)...(19): siRNA sense strand
agacacugcuggcugagaa

SEQ ID NO: 435111 - RNA, 19 nt, Homo sapiens
  misc_RNA (1)...(19): siRNA sense strand
gcaugcaacuuacugaaaa

SEQ ID NO: 435112 - RNA, 19 nt, Homo sapiens
  misc_RNA (1)...(19): siRNA sense strand
gaaaucagagagagguaug

SEQ ID NO: 435113 - RNA, 19 nt, Homo sapiens
  misc_RNA (1)...(19): siRNA sense strand
ugaagaagaaagaugguaa

SEQ ID NO: 435114 - RNA, 19 nt, Homo sapiens
  misc_RNA (1)...(19): siRNA sense strand
gcugggaggucuguggaaa

SEQ ID NO: 435115 - RNA, 19 nt, Homo sapiens
  misc_RNA (1)...(19): siRNA sense strand
caccgagguucauuugauu

SEQ ID NO: 435116 - RNA, 19 nt, Homo sapiens
  misc_RNA (1)...(19): siRNA sense strand
gguacgcugucuccaguga

SEQ ID NO: 435117 - RNA, 19 nt, Homo sapiens
  misc_RNA (1)...(19): siRNA sense strand
cgagacggccacccucaua

SEQ ID NO: 435118 - RNA, 19 nt, Homo sapiens
  misc_RNA (1)...(19): siRNA sense strand
uggaacaggugcaccaguu

SEQ ID NO: 435119 - RNA, 19 nt, Homo sapiens
  misc_RNA (1)...(19): siRNA sense strand
uaacgacaacuaucugguu

SEQ ID NO: 435120 - RNA, 19 nt, Homo sapiens
  misc_RNA (1)...(19): siRNA sense strand
agugugaugucauugagua

SEQ ID NO: 435121 - RNA, 19 nt, Homo sapiens
  misc_RNA (1)...(19): siRNA sense strand
gaacccugacuuccagaaa

SEQ ID NO: 435122 - RNA, 19 nt, Homo sapiens
  misc_RNA (1)...(19): siRNA sense strand
ucaacucugucaugaaauc

SEQ ID NO: 435123 - RNA, 19 nt, Homo sapiens
  misc_RNA (1)...(19): siRNA sense strand
caacagcagaccauagaau

SEQ ID NO: 435124 - RNA, 19 nt, Homo sapiens
  misc_RNA (1)...(19): siRNA sense strand
aaaguacacugaaguccau

SEQ ID NO: 435125 - RNA, 19 nt, Homo sapiens
  misc_RNA (1)...(19): siRNA sense strand
gaccauagaauccuugaag

SEQ ID NO: 435126 - RNA, 19 nt, Homo sapiens
  misc_RNA (1)...(19): siRNA sense strand
guggaaaugugugacaaga

SEQ ID NO: 435127 - RNA, 19 nt, Homo sapiens
  misc_RNA (1)...(19): siRNA sense strand
acacagcccuccauuacag

SEQ ID NO: 435128 - RNA, 19 nt, Homo sapiens
  misc_RNA (1)...(19): siRNA sense strand
uaaaugaccccaaagcuuu

SEQ ID NO: 435129 - RNA, 19 nt, Homo sapiens
  misc_RNA (1)...(19): siRNA sense strand
caaugaaaguacacugaag

SEQ ID NO: 435130 - RNA, 19 nt, Homo sapiens
  misc_RNA (1)...(19): siRNA sense strand
ucuaucaacucugucauga

SEQ ID NO: 435131 - RNA, 19 nt, Homo sapiens
  misc_RNA (1)...(19): siRNA sense strand
ucagcacccugucgucuau

SEQ ID NO: 435132 - RNA, 19 nt, Homo sapiens
  misc_RNA (1)...(19): siRNA sense strand
cagaugggcucccucaacu

SEQ ID NO: 435133 - RNA, 19 nt, Homo sapiens
  misc_RNA (1)...(19): siRNA sense strand
gauggccauugcucugaaa

SEQ ID NO: 435134 - RNA, 19 nt, Homo sapiens
  misc_RNA (1)...(19): siRNA sense strand
gcauguacaaacaaugaaa

SEQ ID NO: 435135 - RNA, 19 nt, Homo sapiens
  misc_RNA (1)...(19): siRNA sense strand
ggcaauuauuugggauaua

SEQ ID NO: 435136 - RNA, 19 nt, Homo sapiens
  misc_RNA (1)...(19): siRNA sense strand
uuagagaaaccacccauga

SEQ ID NO: 435137 - RNA, 19 nt, Homo sapiens
  misc_RNA (1)...(19): siRNA sense strand
ggacaugcggauuguggaa

SEQ ID NO: 435138 - RNA, 19 nt, Homo sapiens
  misc_RNA (1)...(19): siRNA sense strand
gaacgccucccagcuggaa

SEQ ID NO: 435139 - RNA, 19 nt, Homo sapiens
  misc_RNA (1)...(19): siRNA sense strand
cuacauagcugcuuuugag

SEQ ID NO: 435140 - RNA, 19 nt, Homo sapiens
  misc_RNA (1)...(19): siRNA sense strand
gguaacaaagauucaaaug

SEQ ID NO: 435141 - RNA, 19 nt, Homo sapiens
  misc_RNA (1)...(19): siRNA sense strand
gaagcugacaaagaaauug

SEQ ID NO: 435142 - RNA, 19 nt, Homo sapiens
  misc_RNA (1)...(19): siRNA sense strand
ugaauugguggauuguuaa

SEQ ID NO: 435143 - RNA, 19 nt, Homo sapiens
  misc_RNA (1)...(19): siRNA sense strand
guaacaaagauucaaaugg

SEQ ID NO: 435144 - RNA, 19 nt, Homo sapiens
  misc_RNA (1)...(19): siRNA sense strand
caccaacacuugucuaagc

SEQ ID NO: 435145 - RNA, 19 nt, Homo sapiens
  misc_RNA (1)...(19): siRNA sense strand
caaauggucggcagucaca

SEQ ID NO: 435146 - RNA, 19 nt, Homo sapiens
  misc_RNA (1)...(19): siRNA sense strand
ggaaaucagagagagguau

SEQ ID NO: 435147 - RNA, 19 nt, Homo sapiens
  misc_RNA (1)...(19): siRNA sense strand
ccaugcaguuaauauugaa

SEQ ID NO: 435148 - RNA, 19 nt, Homo sapiens
  misc_RNA (1)...(19): siRNA sense strand
ccaggacacuagcacagau

SEQ ID NO: 435149 - RNA, 19 nt, Homo sapiens
  misc_RNA (1)...(19): siRNA sense strand
caccaugcaguuaauauug

SEQ ID NO: 435150 - RNA, 19 nt, Homo sapiens
  misc_RNA (1)...(19): siRNA sense strand
aaucacaggcaauuauuug

SEQ ID NO: 435151 - RNA, 19 nt, Homo sapiens
  misc_RNA (1)...(19): siRNA sense strand
gaaaucugcaagcacugaa

SEQ ID NO: 435152 - RNA, 19 nt, Homo sapiens
  misc_RNA (1)...(19): siRNA sense strand
uggccuggaucacuacauu

SEQ ID NO: 435153 - RNA, 19 nt, Homo sapiens
  misc_RNA (1)...(19): siRNA sense strand
gcgagcagauggccauugc

SEQ ID NO: 435154 - RNA, 19 nt, Homo sapiens
  misc_RNA (1)...(19): siRNA sense strand
gaagaaagaugguaacaaa

SEQ ID NO: 435155 - RNA, 19 nt, Homo sapiens
  misc_RNA (1)...(19): siRNA sense strand
gauaugagguucugucuga

SEQ ID NO: 435156 - RNA, 19 nt, Homo sapiens
  misc_RNA (1)...(19): siRNA sense strand
ggagaugacuaaacugaaa

SEQ ID NO: 435157 - RNA, 19 nt, Homo sapiens
  misc_RNA (1)...(19): siRNA sense strand
ggacaucgcuguucuucug

SEQ ID NO: 435158 - RNA, 19 nt, Homo sapiens
  misc_RNA (1)...(19): siRNA sense strand
ugacuaaacugaaacaaga

SEQ ID NO: 435159 - RNA, 19 nt, Homo sapiens
  misc_RNA (1)...(19): siRNA sense strand
ggaaaugcaugaccgaugu

SEQ ID NO: 435160 - RNA, 19 nt, Homo sapiens
  misc_RNA (1)...(19): siRNA sense strand
uaucaacucugucaugaaa

SEQ ID NO: 435161 - RNA, 19 nt, Homo sapiens
  misc_RNA (1)...(19): siRNA sense strand
gacugaagcugacaaagaa

SEQ ID NO: 435162 - RNA, 19 nt, Homo sapiens
  misc_RNA (1)...(19): siRNA sense strand
ggaaaugugugacaagagu

SEQ ID NO: 435163 - RNA, 19 nt, Homo sapiens
  misc_RNA (1)...(19): siRNA sense strand
gaaagaugguaacaaagau

SEQ ID NO: 435164 - RNA, 19 nt, Homo sapiens
  misc_RNA (1)...(19): siRNA sense strand
caagcucccucccuucuuu

SEQ ID NO: 435165 - RNA, 19 nt, Homo sapiens
  misc_RNA (1)...(19): siRNA sense strand
ggccugagcugccuaugaa

SEQ ID NO: 435166 - RNA, 19 nt, Homo sapiens
  misc_RNA (1)...(19): siRNA sense strand
gguggaagcugccgucaug

SEQ ID NO: 435167 - RNA, 19 nt, Homo sapiens
  misc_RNA (1)...(19): siRNA sense strand
gaaguacagcuuagagaaa

SEQ ID NO: 435168 - RNA, 19 nt, Homo sapiens
  misc_RNA (1)...(19): siRNA sense strand
gaucgccgcuggccucuau

SEQ ID NO: 435169 - RNA, 19 nt, Homo sapiens
  misc_RNA (1)...(19): siRNA sense strand
ggaccuccguggaaacaaa

SEQ ID NO: 435170 - RNA, 19 nt, Homo sapiens
  misc_RNA (1)...(19): siRNA sense strand
acacugaaguccaucauga

SEQ ID NO: 435171 - RNA, 19 nt, Homo sapiens
  misc_RNA (1)...(19): siRNA sense strand
gcaaagauaugagguucug

SEQ ID NO: 435172 - RNA, 19 nt, Homo sapiens
  misc_RNA (1)...(19): siRNA sense strand
gcaauuauuugggauauac

SEQ ID NO: 435173 - RNA, 19 nt, Homo sapiens
  misc_RNA (1)...(19): siRNA sense strand
gcaacacagcccuccauua

SEQ ID NO: 435174 - RNA, 19 nt, Homo sapiens
  misc_RNA (1)...(19): siRNA sense strand
gaagucagcgucugcgaaa

SEQ ID NO: 435175 - RNA, 19 nt, Homo sapiens
  misc_RNA (1)...(19): siRNA sense strand
ugaaguccaucaugaagaa

SEQ ID NO: 435176 - RNA, 19 nt, Homo sapiens
  misc_RNA (1)...(19): siRNA sense strand
ugacuggccuggaucacua

SEQ ID NO: 435177 - RNA, 19 nt, Homo sapiens
  misc_RNA (1)...(19): siRNA sense strand
gaagggcaccaugcaguua

SEQ ID NO: 435178 - RNA, 19 nt, Homo sapiens
  misc_RNA (1)...(19): siRNA sense strand
agagagagguaugaauuaa

SEQ ID NO: 435179 - RNA, 19 nt, Homo sapiens
  misc_RNA (1)...(19): siRNA sense strand
cagccugaauguaagaaua

SEQ ID NO: 435180 - RNA, 19 nt, Homo sapiens
  misc_RNA (1)...(19): siRNA sense strand
caacacagcccuccauuac

SEQ ID NO: 435181 - RNA, 19 nt, Homo sapiens
  misc_RNA (1)...(19): siRNA sense strand
ucaaagaagugcggucuau

SEQ ID NO: 435182 - RNA, 19 nt, Homo sapiens
  misc_RNA (1)...(19): siRNA sense strand
ccucagagcucagggagaa

SEQ ID NO: 435183 - RNA, 19 nt, Homo sapiens
  misc_RNA (1)...(19): siRNA sense strand
ucacacuccucaagacaaa

SEQ ID NO: 435184 - RNA, 19 nt, Homo sapiens
  misc_RNA (1)...(19): siRNA sense strand
gagaaggacaugcggauug

SEQ ID NO: 435185 - RNA, 19 nt, Homo sapiens
  misc_RNA (1)...(19): siRNA sense strand
gaaaagauguugucugcau

SEQ ID NO: 435186 - RNA, 19 nt, Homo sapiens
  misc_RNA (1)...(19): siRNA sense strand
cagagagagguaugaauua

SEQ ID NO: 435187 - RNA, 19 nt, Homo sapiens
  misc_RNA (1)...(19): siRNA sense strand
gaaaugcagguucaagaau

SEQ ID NO: 435188 - RNA, 19 nt, Homo sapiens
  misc_RNA (1)...(19): siRNA sense strand
ccaccgagguucauuugau

SEQ ID NO: 435189 - RNA, 19 nt, Homo sapiens
  misc_RNA (1)...(19): siRNA sense strand
gcuguuagaugccgaugug

SEQ ID NO: 435190 - RNA, 19 nt, Homo sapiens
  misc_RNA (1)...(19): siRNA sense strand
ggaggucuguggaaaugug

SEQ ID NO: 435191 - RNA, 19 nt, Homo sapiens
  misc_RNA (1)...(19): siRNA sense strand
ucagagagagguaugaauu

SEQ ID NO: 435192 - RNA, 19 nt, Homo sapiens
  misc_RNA (1)...(19): siRNA sense strand
augaauugguggauuguua

SEQ ID NO: 435193 - RNA, 19 nt, Homo sapiens
  misc_RNA (1)...(19): siRNA sense strand
gcaccaugcaguuaauauu

SEQ ID NO: 435194 - RNA, 19 nt, Homo sapiens
  misc_RNA (1)...(19): siRNA sense strand
aagacaaacuugaaucuca

SEQ ID NO: 435195 - RNA, 19 nt, Homo sapiens
  misc_RNA (1)...(19): siRNA sense strand
gcacgcagaggauaaagga

SEQ ID NO: 435196 - RNA, 19 nt, Homo sapiens
  misc_RNA (1)...(19): siRNA sense strand
gcacugaagagcugaggaa

SEQ ID NO: 435197 - RNA, 19 nt, Homo sapiens
  misc_RNA (1)...(19): siRNA sense strand
caaagaaauugagcugcaa

SEQ ID NO: 435198 - RNA, 19 nt, Homo sapiens
  misc_RNA (1)...(19): siRNA sense strand
ugacugaagcugacaaaga

SEQ ID NO: 435199 - RNA, 19 nt, Homo sapiens
  misc_RNA (1)...(19): siRNA sense strand
gggacuacauagcugcuuu

SEQ ID NO: 435200 - RNA, 19 nt, Homo sapiens
  misc_RNA (1)...(19): siRNA sense strand
ggaggaggaugaagacacu

SEQ ID NO: 435201 - RNA, 19 nt, Homo sapiens
  misc_RNA (1)...(19): siRNA sense strand
agaaagaugguaacaaaga

SEQ ID NO: 435202 - RNA, 19 nt, Homo sapiens
  misc_RNA (1)...(19): siRNA sense strand
ccuaugaauugguggauug

SEQ ID NO: 435203 - RNA, 19 nt, Homo sapiens
  misc_RNA (1)...(19): siRNA sense strand
gauuccagcucagaugaaa

SEQ ID NO: 435204 - RNA, 19 nt, Homo sapiens
  misc_RNA (1)...(19): siRNA sense strand
acacuugucuaagcacuuu

SEQ ID NO: 435205 - RNA, 19 nt, Homo sapiens
  misc_RNA (1)...(19): siRNA sense strand
gagaaggccgugucaagga

SEQ ID NO: 435206 - RNA, 19 nt, Homo sapiens
  misc_RNA (1)...(19): siRNA sense strand
guaugcccaugucaacuuu

SEQ ID NO: 435207 - RNA, 19 nt, Homo sapiens
  misc_RNA (1)...(19): siRNA sense strand
agagagguaugaauuaagu

SEQ ID NO: 435208 - RNA, 19 nt, Homo sapiens
  misc_RNA (1)...(19): siRNA sense strand
aaaugcagguucaagaaug

SEQ ID NO: 435209 - RNA, 19 nt, Homo sapiens
  misc_RNA (1)...(19): siRNA sense strand
caucagcugugaagaccaa

SEQ ID NO: 435210 - RNA, 19 nt, Homo sapiens
  misc_RNA (1)...(19): siRNA sense strand
agacacugcuggcugagaa

SEQ ID NO: 435211 - RNA, 19 nt, Homo sapiens
  misc_RNA (1)...(19): siRNA sense strand
gcaugcaacuuacugaaaa

SEQ ID NO: 435212 - RNA, 19 nt, Homo sapiens
  misc_RNA (1)...(19): siRNA sense strand
gaaaucagagagagguaug

SEQ ID NO: 435213 - RNA, 19 nt, Homo sapiens
  misc_RNA (1)...(19): siRNA sense strand
ugaagaagaaagaugguaa

SEQ ID NO: 435214 - RNA, 19 nt, Homo sapiens
  misc_RNA (1)...(19): siRNA sense strand
gcugggaggucuguggaaa

SEQ ID NO: 435215 - RNA, 19 nt, Homo sapiens
  misc_RNA (1)...(19): siRNA sense strand
caccgagguucauuugauu

SEQ ID NO: 435216 - RNA, 19 nt, Homo sapiens
  misc_RNA (1)...(19): siRNA sense strand
gguacgcugucuccaguga

SEQ ID NO: 435217 - RNA, 19 nt, Homo sapiens
  misc_RNA (1)...(19): siRNA sense strand
cgagacggccacccucaua

SEQ ID NO: 435218 - RNA, 19 nt, Homo sapiens
  misc_RNA (1)...(19): siRNA sense strand
uggaacaggugcaccaguu

SEQ ID NO: 435219 - RNA, 19 nt, Homo sapiens
  misc_RNA (1)...(19): siRNA sense strand
uaacgacaacuaucugguu

SEQ ID NO: 435220 - RNA, 19 nt, Homo sapiens
  misc_RNA (1)...(19): siRNA sense strand
agugugaugucauugagua

SEQ ID NO: 435221 - RNA, 19 nt, Homo sapiens
  misc_RNA (1)...(19): siRNA sense strand
gaacccugacuuccagaaa

SEQ ID NO: 435222 - RNA, 19 nt, Homo sapiens
  misc_RNA (1)...(19): siRNA sense strand
ucaacucugucaugaaauc

SEQ ID NO: 435223 - RNA, 19 nt, Homo sapiens
  misc_RNA (1)...(19): siRNA sense strand
caacagcagaccauagaau

SEQ ID NO: 435224 - RNA, 19 nt, Homo sapiens
  misc_RNA (1)...(19): siRNA sense strand
aaaguacacugaaguccau

SEQ ID NO: 435225 - RNA, 19 nt, Homo sapiens
  misc_RNA (1)...(19): siRNA sense strand
gaccauagaauccuugaag

SEQ ID NO: 435226 - RNA, 19 nt, Homo sapiens
  misc_RNA (1)...(19): siRNA sense strand
guggaaaugugugacaaga

SEQ ID NO: 435227 - RNA, 19 nt, Homo sapiens
  misc_RNA (1)...(19): siRNA sense strand
acacagcccuccauuacag

SEQ ID NO: 435228 - RNA, 19 nt, Homo sapiens
  misc_RNA (1)...(19): siRNA sense strand
uaaaugaccccaaagcuuu

SEQ ID NO: 435229 - RNA, 19 nt, Homo sapiens
  misc_RNA (1)...(19): siRNA sense strand
caaugaaaguacacugaag

SEQ ID NO: 435230 - RNA, 19 nt, Homo sapiens
  misc_RNA (1)...(19): siRNA sense strand
ucuaucaacucugucauga

SEQ ID NO: 435231 - RNA, 19 nt, Homo sapiens
  misc_RNA (1)...(19): siRNA sense strand
ucagcacccugucgucuau

SEQ ID NO: 435232 - RNA, 19 nt, Homo sapiens
  misc_RNA (1)...(19): siRNA sense strand
cagaugggcucccucaacu

SEQ ID NO: 435233 - RNA, 19 nt, Homo sapiens
  misc_RNA (1)...(19): siRNA sense strand
gauggccauugcucugaaa

SEQ ID NO: 435234 - RNA, 19 nt, Homo sapiens
  misc_RNA (1)...(19): siRNA sense strand
gcauguacaaacaaugaaa

SEQ ID NO: 435235 - RNA, 19 nt, Homo sapiens
  misc_RNA (1)...(19): siRNA sense strand
ggcaauuauuugggauaua

SEQ ID NO: 435236 - RNA, 19 nt, Homo sapiens
  misc_RNA (1)...(19): siRNA sense strand
uuagagaaaccacccauga

SEQ ID NO: 435237 - RNA, 19 nt, Homo sapiens
  misc_RNA (1)...(19): siRNA sense strand
ggacaugcggauuguggaa

SEQ ID NO: 435238 - RNA, 19 nt, Homo sapiens
  misc_RNA (1)...(19): siRNA sense strand
gaacgccucccagcuggaa

SEQ ID NO: 435239 - RNA, 19 nt, Homo sapiens
  misc_RNA (1)...(19): siRNA sense strand
cuacauagcugcuuuugag

SEQ ID NO: 435240 - RNA, 19 nt, Homo sapiens
  misc_RNA (1)...(19): siRNA sense strand
gguaacaaagauucaaaug

SEQ ID NO: 435241 - RNA, 19 nt, Homo sapiens
  misc_RNA (1)...(19): siRNA sense strand
gaagcugacaaagaaauug

SEQ ID NO: 435242 - RNA, 19 nt, Homo sapiens
  misc_RNA (1)...(19): siRNA sense strand
ugaauugguggauuguuaa

SEQ ID NO: 435243 - RNA, 19 nt, Homo sapiens
  misc_RNA (1)...(19): siRNA sense strand
guaacaaagauucaaaugg

SEQ ID NO: 435244 - RNA, 19 nt, Homo sapiens
  misc_RNA (1)...(19): siRNA sense strand
caccaacacuugucuaagc

SEQ ID NO: 435245 - RNA, 19 nt, Homo sapiens
  misc_RNA (1)...(19): siRNA sense strand
caaauggucggcagucaca

SEQ ID NO: 435246 - RNA, 19 nt, Homo sapiens
  misc_RNA (1)...(19): siRNA sense strand
ggaaaucagagagagguau

SEQ ID NO: 435247 - RNA, 19 nt, Homo sapiens
  misc_RNA (1)...(19): siRNA sense strand
ccaugcaguuaauauugaa

SEQ ID NO: 435248 - RNA, 19 nt, Homo sapiens
  misc_RNA (1)...(19): siRNA sense strand
ccaggacacuagcacagau

SEQ ID NO: 435249 - RNA, 19 nt, Homo sapiens
  misc_RNA (1)...(19): siRNA sense strand
caccaugcaguuaauauug

SEQ ID NO: 435250 - RNA, 19 nt, Homo sapiens
  misc_RNA (1)...(19): siRNA sense strand
aaucacaggcaauuauuug

SEQ ID NO: 435251 - RNA, 19 nt, Homo sapiens
  misc_RNA (1)...(19): siRNA sense strand
gaaaucugcaagcacugaa

SEQ ID NO: 435252 - RNA, 19 nt, Homo sapiens
  misc_RNA (1)...(19): siRNA sense strand
uggccuggaucacuacauu

SEQ ID NO: 435253 - RNA, 19 nt, Homo sapiens
  misc_RNA (1)...(19): siRNA sense strand
gcgagcagauggccauugc

SEQ ID NO: 435254 - RNA, 19 nt, Homo sapiens
  misc_RNA (1)...(19): siRNA sense strand
gagaggagcuggccuauga

SEQ ID NO: 435255 - RNA, 19 nt, Homo sapiens
  misc_RNA (1)...(19): siRNA sense strand
gaacguggaugacucaguu

SEQ ID NO: 435256 - RNA, 19 nt, Homo sapiens
  misc_RNA (1)...(19): siRNA sense strand
gcaauaaacaucaacuuca

SEQ ID NO: 435257 - RNA, 19 nt, Homo sapiens
  misc_RNA (1)...(19): siRNA sense strand
ugaaggaguucgacaagga

SEQ ID NO: 435258 - RNA, 19 nt, Homo sapiens
  misc_RNA (1)...(19): siRNA sense strand
gaggaacgccaaugugauu

SEQ ID NO: 435259 - RNA, 19 nt, Homo sapiens
  misc_RNA (1)...(19): siRNA sense strand
guggagauguuuaaggauu

SEQ ID NO: 435260 - RNA, 19 nt, Homo sapiens
  misc_RNA (1)...(19): siRNA sense strand
cggcugagauggauuacuu

SEQ ID NO: 435261 - RNA, 19 nt, Homo sapiens
  misc_RNA (1)...(19): siRNA sense strand
caaugugauucccaacuuu

SEQ ID NO: 435262 - RNA, 19 nt, Homo sapiens
  misc_RNA (1)...(19): siRNA sense strand
ccaaugugauucccaacuu

SEQ ID NO: 435263 - RNA, 19 nt, Homo sapiens
  misc_RNA (1)...(19): siRNA sense strand
guucacagccucuggauau

SEQ ID NO: 435264 - RNA, 19 nt, Homo sapiens
  misc_RNA (1)...(19): siRNA sense strand
caagugccauugccaguca

SEQ ID NO: 435265 - RNA, 19 nt, Homo sapiens
  misc_RNA (1)...(19): siRNA sense strand
uggagauguuuaaggauua

SEQ ID NO: 435266 - RNA, 19 nt, Homo sapiens
  misc_RNA (1)...(19): siRNA sense strand
gaugcaaacuaguccugaa

SEQ ID NO: 435267 - RNA, 19 nt, Homo sapiens
  misc_RNA (1)...(19): siRNA sense strand
gaggaggacugcaagaaaa

SEQ ID NO: 435268 - RNA, 19 nt, Homo sapiens
  misc_RNA (1)...(19): siRNA sense strand
ggucuucucugugcugaug

SEQ ID NO: 435269 - RNA, 19 nt, Homo sapiens
  misc_RNA (1)...(19): siRNA sense strand
caucagcaauaaacaucaa

SEQ ID NO: 435270 - RNA, 19 nt, Homo sapiens
  misc_RNA (1)...(19): siRNA sense strand
gaacccaucagcaauaaac

SEQ ID NO: 435271 - RNA, 19 nt, Homo sapiens
  misc_RNA (1)...(19): siRNA sense strand
gagaaucguggagauguuu

SEQ ID NO: 435272 - RNA, 19 nt, Homo sapiens
  misc_RNA (1)...(19): siRNA sense strand
accacuacguguuuaauuu

SEQ ID NO: 435273 - RNA, 19 nt, Homo sapiens
  misc_RNA (1)...(19): siRNA sense strand
cgaggaggacugcaagaaa

SEQ ID NO: 435274 - RNA, 19 nt, Homo sapiens
  misc_RNA (1)...(19): siRNA sense strand
ggauuacccgccagccaua

SEQ ID NO: 435275 - RNA, 19 nt, Homo sapiens
  misc_RNA (1)...(19): siRNA sense strand
ccacuacguguuuaauuug

SEQ ID NO: 435276 - RNA, 19 nt, Homo sapiens
  misc_RNA (1)...(19): siRNA sense strand
gaccacuacguguuuaauu

SEQ ID NO: 435277 - RNA, 19 nt, Homo sapiens
  misc_RNA (1)...(19): siRNA sense strand
gaaucguggagauguuuaa

SEQ ID NO: 435278 - RNA, 19 nt, Homo sapiens
  misc_RNA (1)...(19): siRNA sense strand
ugagaaucguggagauguu

SEQ ID NO: 435279 - RNA, 19 nt, Homo sapiens
  misc_RNA (1)...(19): siRNA sense strand
cuaguggccugcuuuccaa

SEQ ID NO: 435280 - RNA, 19 nt, Homo sapiens
  misc_RNA (1)...(19): siRNA sense strand
gguaaucgcaggcaucucu

SEQ ID NO: 435281 - RNA, 19 nt, Homo sapiens
  misc_RNA (1)...(19): siRNA sense strand
gauccuaguggccugcuuu

SEQ ID NO: 435282 - RNA, 19 nt, Homo sapiens
  misc_RNA (1)...(19): siRNA sense strand
ucguggagauguuuaagga

SEQ ID NO: 435283 - RNA, 19 nt, Homo sapiens
  misc_RNA (1)...(19): siRNA sense strand
ggaguucgacaaggagaaa

SEQ ID NO: 435284 - RNA, 19 nt, Homo sapiens
  misc_RNA (1)...(19): siRNA sense strand
cuacguguuuaauuugguu

SEQ ID NO: 435285 - RNA, 19 nt, Homo sapiens
  misc_RNA (1)...(19): siRNA sense strand
ccaacauucuggacgaagu

SEQ ID NO: 435286 - RNA, 19 nt, Homo sapiens
  misc_RNA (1)...(19): siRNA sense strand
ggaggaacgccaaugugau

SEQ ID NO: 435287 - RNA, 19 nt, Homo sapiens
  misc_RNA (1)...(19): siRNA sense strand
gcucggguccugaaaucuu

SEQ ID NO: 435288 - RNA, 19 nt, Homo sapiens
  misc_RNA (1)...(19): siRNA sense strand
ggagauguuuaaggauuac

SEQ ID NO: 435289 - RNA, 19 nt, Homo sapiens
  misc_RNA (1)...(19): siRNA sense strand
cucggguccugaaaucuua

SEQ ID NO: 435290 - RNA, 19 nt, Homo sapiens
  misc_RNA (1)...(19): siRNA sense strand
uaucugucauucagcauca

SEQ ID NO: 435291 - RNA, 19 nt, Homo sapiens
  misc_RNA (1)...(19): siRNA sense strand
gcgaggaggacugcaagaa

SEQ ID NO: 435292 - RNA, 19 nt, Homo sapiens
  misc_RNA (1)...(19): siRNA sense strand
ugacagcgccaacauucug

SEQ ID NO: 435293 - RNA, 19 nt, Homo sapiens
  misc_RNA (1)...(19): siRNA sense strand
uuacucagucgucgaggua

SEQ ID NO: 435294 - RNA, 19 nt, Homo sapiens
  misc_RNA (1)...(19): siRNA sense strand
aaagaagggcuccaugucu

SEQ ID NO: 435295 - RNA, 19 nt, Homo sapiens
  misc_RNA (1)...(19): siRNA sense strand
gagccgucguggugcaaau

SEQ ID NO: 435296 - RNA, 19 nt, Homo sapiens
  misc_RNA (1)...(19): siRNA sense strand
gcugugaccacuacguguu

SEQ ID NO: 435297 - RNA, 19 nt, Homo sapiens
  misc_RNA (1)...(19): siRNA sense strand
ucacgucuccgcugcuguu

SEQ ID NO: 435298 - RNA, 19 nt, Homo sapiens
  misc_RNA (1)...(19): siRNA sense strand
ccucggcaauugugagcuu

SEQ ID NO: 435299 - RNA, 19 nt, Homo sapiens
  misc_RNA (1)...(19): siRNA sense strand
uaauuugguuuggaugcaa

SEQ ID NO: 435300 - RNA, 19 nt, Homo sapiens
  misc_RNA (1)...(19): siRNA sense strand
ugugaccacuacguguuua

SEQ ID NO: 435301 - RNA, 19 nt, Homo sapiens
  misc_RNA (1)...(19): siRNA sense strand
gaccugcagcugucgaaga

SEQ ID NO: 435302 - RNA, 19 nt, Homo sapiens
  misc_RNA (1)...(19): siRNA sense strand
cuggauaucugucauucag

SEQ ID NO: 435303 - RNA, 19 nt, Homo sapiens
  misc_RNA (1)...(19): siRNA sense strand
auucccaacuuucagauau

SEQ ID NO: 435304 - RNA, 19 nt, Homo sapiens
  misc_RNA (1)...(19): siRNA sense strand
gauucccaacuuucagaua

SEQ ID NO: 435305 - RNA, 19 nt, Homo sapiens
  misc_RNA (1)...(19): siRNA sense strand
ccaggaggaacgccaaugu

SEQ ID NO: 435306 - RNA, 19 nt, Homo sapiens
  misc_RNA (1)...(19): siRNA sense strand
ucccaacuuucagauauug

SEQ ID NO: 435307 - RNA, 19 nt, Homo sapiens
  misc_RNA (1)...(19): siRNA sense strand
ggagguccugauugccaua

SEQ ID NO: 435308 - RNA, 19 nt, Homo sapiens
  misc_RNA (1)...(19): siRNA sense strand
cagcagagugucccagcaa

SEQ ID NO: 435309 - RNA, 19 nt, Homo sapiens
  misc_RNA (1)...(19): siRNA sense strand
ccaacuuucagauauuguu

SEQ ID NO: 435310 - RNA, 19 nt, Homo sapiens
  misc_RNA (1)...(19): siRNA sense strand
aggaggaacgccaauguga

SEQ ID NO: 435311 - RNA, 19 nt, Homo sapiens
  misc_RNA (1)...(19): siRNA sense strand
ucaugagaaucguggagau

SEQ ID NO: 435312 - RNA, 19 nt, Homo sapiens
  misc_RNA (1)...(19): siRNA sense strand
gcagagugucccagcaagu

SEQ ID NO: 435313 - RNA, 19 nt, Homo sapiens
  misc_RNA (1)...(19): siRNA sense strand
ggcccacaccucucaguga

SEQ ID NO: 435314 - RNA, 19 nt, Homo sapiens
  misc_RNA (1)...(19): siRNA sense strand
cccaggagccauucagaga

SEQ ID NO: 435315 - RNA, 19 nt, Homo sapiens
  misc_RNA (1)...(19): siRNA sense strand
caacauucuggacgaagug

SEQ ID NO: 435316 - RNA, 19 nt, Homo sapiens
  misc_RNA (1)...(19): siRNA sense strand
cagcaauaaacaucaacuu

SEQ ID NO: 435317 - RNA, 19 nt, Homo sapiens
  misc_RNA (1)...(19): siRNA sense strand
ucugacagcgccaacauuc

SEQ ID NO: 435318 - RNA, 19 nt, Homo sapiens
  misc_RNA (1)...(19): siRNA sense strand
agaagggcuccaugucuga

SEQ ID NO: 435319 - RNA, 19 nt, Homo sapiens
  misc_RNA (1)...(19): siRNA sense strand
cacagccucuggauaucug

SEQ ID NO: 435320 - RNA, 19 nt, Homo sapiens
  misc_RNA (1)...(19): siRNA sense strand
gagaggagcuggccuauga

SEQ ID NO: 435321 - RNA, 19 nt, Homo sapiens
  misc_RNA (1)...(19): siRNA sense strand
gaacguggaugacucaguu

SEQ ID NO: 435322 - RNA, 19 nt, Homo sapiens
  misc_RNA (1)...(19): siRNA sense strand
gcaauaaacaucaacuuca

SEQ ID NO: 435323 - RNA, 19 nt, Homo sapiens
  misc_RNA (1)...(19): siRNA sense strand
ugaaggaguucgacaagga

SEQ ID NO: 435324 - RNA, 19 nt, Homo sapiens
  misc_RNA (1)...(19): siRNA sense strand
gaggaacgccaaugugauu

SEQ ID NO: 435325 - RNA, 19 nt, Homo sapiens
  misc_RNA (1)...(19): siRNA sense strand
guggagauguuuaaggauu

SEQ ID NO: 435326 - RNA, 19 nt, Homo sapiens
  misc_RNA (1)...(19): siRNA sense strand
cggcugagauggauuacuu

SEQ ID NO: 435327 - RNA, 19 nt, Homo sapiens
  misc_RNA (1)...(19): siRNA sense strand
caaugugauucccaacuuu

SEQ ID NO: 435328 - RNA, 19 nt, Homo sapiens
  misc_RNA (1)...(19): siRNA sense strand
ccaaugugauucccaacuu

SEQ ID NO: 435329 - RNA, 19 nt, Homo sapiens
  misc_RNA (1)...(19): siRNA sense strand
guucacagccucuggauau

SEQ ID NO: 435330 - RNA, 19 nt, Homo sapiens
  misc_RNA (1)...(19): siRNA sense strand
caagugccauugccaguca

SEQ ID NO: 435331 - RNA, 19 nt, Homo sapiens
  misc_RNA (1)...(19): siRNA sense strand
uggagauguuuaaggauua

SEQ ID NO: 435332 - RNA, 19 nt, Homo sapiens
  misc_RNA (1)...(19): siRNA sense strand
gaugcaaacuaguccugaa

SEQ ID NO: 435333 - RNA, 19 nt, Homo sapiens
  misc_RNA (1)...(19): siRNA sense strand
gaggaggacugcaagaaaa

SEQ ID NO: 435334 - RNA, 19 nt, Homo sapiens
  misc_RNA (1)...(19): siRNA sense strand
ggucuucucugugcugaug

SEQ ID NO: 435335 - RNA, 19 nt, Homo sapiens
  misc_RNA (1)...(19): siRNA sense strand
caucagcaauaaacaucaa

SEQ ID NO: 435336 - RNA, 19 nt, Homo sapiens
  misc_RNA (1)...(19): siRNA sense strand
gaacccaucagcaauaaac

SEQ ID NO: 435337 - RNA, 19 nt, Homo sapiens
  misc_RNA (1)...(19): siRNA sense strand
gagaaucguggagauguuu

SEQ ID NO: 435338 - RNA, 19 nt, Homo sapiens
  misc_RNA (1)...(19): siRNA sense strand
accacuacguguuuaauuu

SEQ ID NO: 435339 - RNA, 19 nt, Homo sapiens
  misc_RNA (1)...(19): siRNA sense strand
cgaggaggacugcaagaaa

SEQ ID NO: 435340 - RNA, 19 nt, Homo sapiens
  misc_RNA (1)...(19): siRNA sense strand
ggauuacccgccagccaua

SEQ ID NO: 435341 - RNA, 19 nt, Homo sapiens
  misc_RNA (1)...(19): siRNA sense strand
ccacuacguguuuaauuug

SEQ ID NO: 435342 - RNA, 19 nt, Homo sapiens
  misc_RNA (1)...(19): siRNA sense strand
gaccacuacguguuuaauu

SEQ ID NO: 435343 - RNA, 19 nt, Homo sapiens
  misc_RNA (1)...(19): siRNA sense strand
gaaucguggagauguuuaa

SEQ ID NO: 435344 - RNA, 19 nt, Homo sapiens
  misc_RNA (1)...(19): siRNA sense strand
ugagaaucguggagauguu

SEQ ID NO: 435345 - RNA, 19 nt, Homo sapiens
  misc_RNA (1)...(19): siRNA sense strand
cuaguggccugcuuuccaa

SEQ ID NO: 435346 - RNA, 19 nt, Homo sapiens
  misc_RNA (1)...(19): siRNA sense strand
gguaaucgcaggcaucucu

SEQ ID NO: 435347 - RNA, 19 nt, Homo sapiens
  misc_RNA (1)...(19): siRNA sense strand
gauccuaguggccugcuuu

SEQ ID NO: 435348 - RNA, 19 nt, Homo sapiens
  misc_RNA (1)...(19): siRNA sense strand
ucguggagauguuuaagga

SEQ ID NO: 435349 - RNA, 19 nt, Homo sapiens
  misc_RNA (1)...(19): siRNA sense strand
ggaguucgacaaggagaaa

SEQ ID NO: 435350 - RNA, 19 nt, Homo sapiens
  misc_RNA (1)...(19): siRNA sense strand
cuacguguuuaauuugguu

SEQ ID NO: 435351 - RNA, 19 nt, Homo sapiens
  misc_RNA (1)...(19): siRNA sense strand
ccaacauucuggacgaagu

SEQ ID NO: 435352 - RNA, 19 nt, Homo sapiens
  misc_RNA (1)...(19): siRNA sense strand
ggaggaacgccaaugugau

SEQ ID NO: 435353 - RNA, 19 nt, Homo sapiens
  misc_RNA (1)...(19): siRNA sense strand
gcucggguccugaaaucuu

SEQ ID NO: 435354 - RNA, 19 nt, Homo sapiens
  misc_RNA (1)...(19): siRNA sense strand
ggagauguuuaaggauuac

SEQ ID NO: 435355 - RNA, 19 nt, Homo sapiens
  misc_RNA (1)...(19): siRNA sense strand
cucggguccugaaaucuua

SEQ ID NO: 435356 - RNA, 19 nt, Homo sapiens
  misc_RNA (1)...(19): siRNA sense strand
uaucugucauucagcauca

SEQ ID NO: 435357 - RNA, 19 nt, Homo sapiens
  misc_RNA (1)...(19): siRNA sense strand
gcgaggaggacugcaagaa

SEQ ID NO: 435358 - RNA, 19 nt, Homo sapiens
  misc_RNA (1)...(19): siRNA sense strand
ugacagcgccaacauucug

SEQ ID NO: 435359 - RNA, 19 nt, Homo sapiens
  misc_RNA (1)...(19): siRNA sense strand
uuacucagucgucgaggua

SEQ ID NO: 435360 - RNA, 19 nt, Homo sapiens
  misc_RNA (1)...(19): siRNA sense strand
aaagaagggcuccaugucu

SEQ ID NO: 435361 - RNA, 19 nt, Homo sapiens
  misc_RNA (1)...(19): siRNA sense strand
gagccgucguggugcaaau

SEQ ID NO: 435362 - RNA, 19 nt, Homo sapiens
  misc_RNA (1)...(19): siRNA sense strand
gcugugaccacuacguguu

SEQ ID NO: 435363 - RNA, 19 nt, Homo sapiens
  misc_RNA (1)...(19): siRNA sense strand
ucacgucuccgcugcuguu

SEQ ID NO: 435364 - RNA, 19 nt, Homo sapiens
  misc_RNA (1)...(19): siRNA sense strand
ccucggcaauugugagcuu

SEQ ID NO: 435365 - RNA, 19 nt, Homo sapiens
  misc_RNA (1)...(19): siRNA sense strand
uaauuugguuuggaugcaa

SEQ ID NO: 435366 - RNA, 19 nt, Homo sapiens
  misc_RNA (1)...(19): siRNA sense strand
ugugaccacuacguguuua

SEQ ID NO: 435367 - RNA, 19 nt, Homo sapiens
  misc_RNA (1)...(19): siRNA sense strand
gaccugcagcugucgaaga

SEQ ID NO: 435368 - RNA, 19 nt, Homo sapiens
  misc_RNA (1)...(19): siRNA sense strand
cuggauaucugucauucag

SEQ ID NO: 435369 - RNA, 19 nt, Homo sapiens
  misc_RNA (1)...(19): siRNA sense strand
auucccaacuuucagauau

SEQ ID NO: 435370 - RNA, 19 nt, Homo sapiens
  misc_RNA (1)...(19): siRNA sense strand
gauucccaacuuucagaua

SEQ ID NO: 435371 - RNA, 19 nt, Homo sapiens
  misc_RNA (1)...(19): siRNA sense strand
ccaggaggaacgccaaugu

SEQ ID NO: 435372 - RNA, 19 nt, Homo sapiens
  misc_RNA (1)...(19): siRNA sense strand
ucccaacuuucagauauug

SEQ ID NO: 435373 - RNA, 19 nt, Homo sapiens
  misc_RNA (1)...(19): siRNA sense strand
ggagguccugauugccaua

SEQ ID NO: 435374 - RNA, 19 nt, Homo sapiens
  misc_RNA (1)...(19): siRNA sense strand
cagcagagugucccagcaa

SEQ ID NO: 435375 - RNA, 19 nt, Homo sapiens
  misc_RNA (1)...(19): siRNA sense strand
ccaacuuucagauauuguu

SEQ ID NO: 435376 - RNA, 19 nt, Homo sapiens
  misc_RNA (1)...(19): siRNA sense strand
aggaggaacgccaauguga

SEQ ID NO: 435377 - RNA, 19 nt, Homo sapiens
  misc_RNA (1)...(19): siRNA sense strand
ucaugagaaucguggagau

SEQ ID NO: 435378 - RNA, 19 nt, Homo sapiens
  misc_RNA (1)...(19): siRNA sense strand
gcagagugucccagcaagu

SEQ ID NO: 435379 - RNA, 19 nt, Homo sapiens
  misc_RNA (1)...(19): siRNA sense strand
ggcccacaccucucaguga

SEQ ID NO: 435380 - RNA, 19 nt, Homo sapiens
  misc_RNA (1)...(19): siRNA sense strand
cccaggagccauucagaga

SEQ ID NO: 435381 - RNA, 19 nt, Homo sapiens
  misc_RNA (1)...(19): siRNA sense strand
caacauucuggacgaagug

SEQ ID NO: 435382 - RNA, 19 nt, Homo sapiens
  misc_RNA (1)...(19): siRNA sense strand
cagcaauaaacaucaacuu

SEQ ID NO: 435383 - RNA, 19 nt, Homo sapiens
  misc_RNA (1)...(19): siRNA sense strand
ucugacagcgccaacauuc

SEQ ID NO: 435384 - RNA, 19 nt, Homo sapiens
  misc_RNA (1)...(19): siRNA sense strand
agaagggcuccaugucuga

SEQ ID NO: 435385 - RNA, 19 nt, Homo sapiens
  misc_RNA (1)...(19): siRNA sense strand
cacagccucuggauaucug

SEQ ID NO: 435386 - RNA, 19 nt, Homo sapiens
  misc_RNA (1)...(19): siRNA sense strand
gaacaaagccuacaguaaa

SEQ ID NO: 435387 - RNA, 19 nt, Homo sapiens
  misc_RNA (1)...(19): siRNA sense strand
caaagcagaugcagaaaua

SEQ ID NO: 435388 - RNA, 19 nt, Homo sapiens
  misc_RNA (1)...(19): siRNA sense strand
gaaagucucucaagcauau

SEQ ID NO: 435389 - RNA, 19 nt, Homo sapiens
  misc_RNA (1)...(19): siRNA sense strand
gaaagaugaucaagugaaa

SEQ ID NO: 435390 - RNA, 19 nt, Homo sapiens
  misc_RNA (1)...(19): siRNA sense strand
gaaauagacuggcaaccuu

SEQ ID NO: 435391 - RNA, 19 nt, Homo sapiens
  misc_RNA (1)...(19): siRNA sense strand
gaagguaugugacucaaga

SEQ ID NO: 435392 - RNA, 19 nt, Homo sapiens
  misc_RNA (1)...(19): siRNA sense strand
cagaaaggcucaacagaaa

SEQ ID NO: 435393 - RNA, 19 nt, Homo sapiens
  misc_RNA (1)...(19): siRNA sense strand
gcuacgagaugaaagauuu

SEQ ID NO: 435394 - RNA, 19 nt, Homo sapiens
  misc_RNA (1)...(19): siRNA sense strand
gaacaagaguagcaggaaa

SEQ ID NO: 435395 - RNA, 19 nt, Homo sapiens
  misc_RNA (1)...(19): siRNA sense strand
gggauuauguccaguauug

SEQ ID NO: 435396 - RNA, 19 nt, Homo sapiens
  misc_RNA (1)...(19): siRNA sense strand
gcagauacuuugaaucaug

SEQ ID NO: 435397 - RNA, 19 nt, Homo sapiens
  misc_RNA (1)...(19): siRNA sense strand
aagauuaggucaagacaua

SEQ ID NO: 435398 - RNA, 19 nt, Homo sapiens
  misc_RNA (1)...(19): siRNA sense strand
uaaggcagcagaagaauua

SEQ ID NO: 435399 - RNA, 19 nt, Homo sapiens
  misc_RNA (1)...(19): siRNA sense strand
gaaccucuccagcaaguua

SEQ ID NO: 435400 - RNA, 19 nt, Homo sapiens
  misc_RNA (1)...(19): siRNA sense strand
gagaaugguuuaugucuuc

SEQ ID NO: 435401 - RNA, 19 nt, Homo sapiens
  misc_RNA (1)...(19): siRNA sense strand
gaaauuaggcagacucuuc

SEQ ID NO: 435402 - RNA, 19 nt, Homo sapiens
  misc_RNA (1)...(19): siRNA sense strand
uagaugaccuuucaaaugu

SEQ ID NO: 435403 - RNA, 19 nt, Homo sapiens
  misc_RNA (1)...(19): siRNA sense strand
ucaagcacaucuauucuuu

SEQ ID NO: 435404 - RNA, 19 nt, Homo sapiens
  misc_RNA (1)...(19): siRNA sense strand
agaacaagaucaugcgaua

SEQ ID NO: 435405 - RNA, 19 nt, Homo sapiens
  misc_RNA (1)...(19): siRNA sense strand
gcagucaggcaaagaaaua

SEQ ID NO: 435406 - RNA, 19 nt, Homo sapiens
  misc_RNA (1)...(19): siRNA sense strand
agagaaagaugaucaagug

SEQ ID NO: 435407 - RNA, 19 nt, Homo sapiens
  misc_RNA (1)...(19): siRNA sense strand
cagcacaaccaauuaaaua

SEQ ID NO: 435408 - RNA, 19 nt, Homo sapiens
  misc_RNA (1)...(19): siRNA sense strand
ggauuugugugaggucuua

SEQ ID NO: 435409 - RNA, 19 nt, Homo sapiens
  misc_RNA (1)...(19): siRNA sense strand
ggaugacaguggaaggaua

SEQ ID NO: 435410 - RNA, 19 nt, Homo sapiens
  misc_RNA (1)...(19): siRNA sense strand
ggucaaagcagaugcagaa

SEQ ID NO: 435411 - RNA, 19 nt, Homo sapiens
  misc_RNA (1)...(19): siRNA sense strand
gaugaccuuucaaauguuu

SEQ ID NO: 435412 - RNA, 19 nt, Homo sapiens
  misc_RNA (1)...(19): siRNA sense strand
gcagaagaauuacaguauc

SEQ ID NO: 435413 - RNA, 19 nt, Homo sapiens
  misc_RNA (1)...(19): siRNA sense strand
gcuguuccaugcagagaua

SEQ ID NO: 435414 - RNA, 19 nt, Homo sapiens
  misc_RNA (1)...(19): siRNA sense strand
ccaggacuauuaagauuga

SEQ ID NO: 435415 - RNA, 19 nt, Homo sapiens
  misc_RNA (1)...(19): siRNA sense strand
guaaauccacuucgcaauu

SEQ ID NO: 435416 - RNA, 19 nt, Homo sapiens
  misc_RNA (1)...(19): siRNA sense strand
uuaaaucccuuccugauag

SEQ ID NO: 435417 - RNA, 19 nt, Homo sapiens
  misc_RNA (1)...(19): siRNA sense strand
gauaaccuuuggacccuuu

SEQ ID NO: 435418 - RNA, 19 nt, Homo sapiens
  misc_RNA (1)...(19): siRNA sense strand
ggagaaugguuuaugucuu

SEQ ID NO: 435419 - RNA, 19 nt, Homo sapiens
  misc_RNA (1)...(19): siRNA sense strand
gcaagacauaugcauuaua

SEQ ID NO: 435420 - RNA, 19 nt, Homo sapiens
  misc_RNA (1)...(19): siRNA sense strand
cagaugagcugaagcacau

SEQ ID NO: 435421 - RNA, 19 nt, Homo sapiens
  misc_RNA (1)...(19): siRNA sense strand
ugugugaggucuuacuaua

SEQ ID NO: 435422 - RNA, 19 nt, Homo sapiens
  misc_RNA (1)...(19): siRNA sense strand
gagcugaagcacauuauug

SEQ ID NO: 435423 - RNA, 19 nt, Homo sapiens
  misc_RNA (1)...(19): siRNA sense strand
gcagcaaacuggaggucaa

SEQ ID NO: 435424 - RNA, 19 nt, Homo sapiens
  misc_RNA (1)...(19): siRNA sense strand
aaaggcaucuccaagaguu

SEQ ID NO: 435425 - RNA, 19 nt, Homo sapiens
  misc_RNA (1)...(19): siRNA sense strand
gaaagguauucuucguguu

SEQ ID NO: 435426 - RNA, 19 nt, Homo sapiens
  misc_RNA (1)...(19): siRNA sense strand
aaacaaacucagagaagua

SEQ ID NO: 435427 - RNA, 19 nt, Homo sapiens
  misc_RNA (1)...(19): siRNA sense strand
gaugacaauauuccacuua

SEQ ID NO: 435428 - RNA, 19 nt, Homo sapiens
  misc_RNA (1)...(19): siRNA sense strand
ucaaauguuucuucugaug

SEQ ID NO: 435429 - RNA, 19 nt, Homo sapiens
  misc_RNA (1)...(19): siRNA sense strand
ugugaggucuuacuauauu

SEQ ID NO: 435430 - RNA, 19 nt, Homo sapiens
  misc_RNA (1)...(19): siRNA sense strand
uaaauccacuucgcaauuc

SEQ ID NO: 435431 - RNA, 19 nt, Homo sapiens
  misc_RNA (1)...(19): siRNA sense strand
gagaacaaagccuacagua

SEQ ID NO: 435432 - RNA, 19 nt, Homo sapiens
  misc_RNA (1)...(19): siRNA sense strand
acuguuagcuccugaaaug

SEQ ID NO: 435433 - RNA, 19 nt, Homo sapiens
  misc_RNA (1)...(19): siRNA sense strand
guggaaggauaccggguua

SEQ ID NO: 435434 - RNA, 19 nt, Homo sapiens
  misc_RNA (1)...(19): siRNA sense strand
caacagcagcuagaaguuu

SEQ ID NO: 435435 - RNA, 19 nt, Homo sapiens
  misc_RNA (1)...(19): siRNA sense strand
acauauggcgauacuauua

SEQ ID NO: 435436 - RNA, 19 nt, Homo sapiens
  misc_RNA (1)...(19): siRNA sense strand
cuacuucaacagcuuauua

SEQ ID NO: 435437 - RNA, 19 nt, Homo sapiens
  misc_RNA (1)...(19): siRNA sense strand
ccacuucgcaauucaauga

SEQ ID NO: 435438 - RNA, 19 nt, Homo sapiens
  misc_RNA (1)...(19): siRNA sense strand
gaauugaugcuacgagaug

SEQ ID NO: 435439 - RNA, 19 nt, Homo sapiens
  misc_RNA (1)...(19): siRNA sense strand
ccagcaaguuauccaguuu

SEQ ID NO: 435440 - RNA, 19 nt, Homo sapiens
  misc_RNA (1)...(19): siRNA sense strand
acacaggcguuuguaauga

SEQ ID NO: 435441 - RNA, 19 nt, Homo sapiens
  misc_RNA (1)...(19): siRNA sense strand
cuacaggaagcauaaauuu

SEQ ID NO: 435442 - RNA, 19 nt, Homo sapiens
  misc_RNA (1)...(19): siRNA sense strand
cagauacuuugaaucauga

SEQ ID NO: 435443 - RNA, 19 nt, Homo sapiens
  misc_RNA (1)...(19): siRNA sense strand
caauguugcacuacaauuu

SEQ ID NO: 435444 - RNA, 19 nt, Homo sapiens
  misc_RNA (1)...(19): siRNA sense strand
gguaugugacucaagaaua

SEQ ID NO: 435445 - RNA, 19 nt, Homo sapiens
  misc_RNA (1)...(19): siRNA sense strand
uaacagagaaagaugauca

SEQ ID NO: 435446 - RNA, 19 nt, Homo sapiens
  misc_RNA (1)...(19): siRNA sense strand
ucagaaaggcucaacagaa

SEQ ID NO: 435447 - RNA, 19 nt, Homo sapiens
  misc_RNA (1)...(19): siRNA sense strand
gagacaacacggaaaggua

SEQ ID NO: 435448 - RNA, 19 nt, Homo sapiens
  misc_RNA (1)...(19): siRNA sense strand
guuaaaucccuuccugaua

SEQ ID NO: 435449 - RNA, 19 nt, Homo sapiens
  misc_RNA (1)...(19): siRNA sense strand
gaucauggcaagacauaug

SEQ ID NO: 435450 - RNA, 19 nt, Homo sapiens
  misc_RNA (1)...(19): siRNA sense strand
ucagacagaaugcacuuua

SEQ ID NO: 435451 - RNA, 19 nt, Homo sapiens
  misc_RNA (1)...(19): siRNA sense strand
gaguuacuguugaugacua

SEQ ID NO: 435452 - RNA, 19 nt, Homo sapiens
  misc_RNA (1)...(19): siRNA sense strand
gcagcuagaaguuuuauua

SEQ ID NO: 435453 - RNA, 19 nt, Homo sapiens
  misc_RNA (1)...(19): siRNA sense strand
ggacagcauucuuguagac

SEQ ID NO: 435454 - RNA, 19 nt, Homo sapiens
  misc_RNA (1)...(19): siRNA sense strand
uagaagcagucagagauaa

SEQ ID NO: 435455 - RNA, 19 nt, Homo sapiens
  misc_RNA (1)...(19): siRNA sense strand
gauucuaacugcaacuaug

SEQ ID NO: 435456 - RNA, 19 nt, Homo sapiens
  misc_RNA (1)...(19): siRNA sense strand
gaagccaggacuauuaaga

SEQ ID NO: 435457 - RNA, 19 nt, Homo sapiens
  misc_RNA (1)...(19): siRNA sense strand
uggcaagacauaugcauua

SEQ ID NO: 435458 - RNA, 19 nt, Homo sapiens
  misc_RNA (1)...(19): siRNA sense strand
uagcagauacuuugaauca

SEQ ID NO: 435459 - RNA, 19 nt, Homo sapiens
  misc_RNA (1)...(19): siRNA sense strand
gagauaaggcagcagaaga

SEQ ID NO: 435460 - RNA, 19 nt, Homo sapiens
  misc_RNA (1)...(19): siRNA sense strand
gcacgaggaauucuucuuc

SEQ ID NO: 435461 - RNA, 19 nt, Homo sapiens
  misc_RNA (1)...(19): siRNA sense strand
gaugaucaagugaaaggua

SEQ ID NO: 435462 - RNA, 19 nt, Homo sapiens
  misc_RNA (1)...(19): siRNA sense strand
ccaauuaaauaggagaaug

SEQ ID NO: 435463 - RNA, 19 nt, Homo sapiens
  misc_RNA (1)...(19): siRNA sense strand
gaaggagguuugccgugau

SEQ ID NO: 435464 - RNA, 19 nt, Homo sapiens
  misc_RNA (1)...(19): siRNA sense strand
ucagaaagauuaggucaag

SEQ ID NO: 435465 - RNA, 19 nt, Homo sapiens
  misc_RNA (1)...(19): siRNA sense strand
gaugagcugaagcacauua

SEQ ID NO: 435466 - RNA, 19 nt, Homo sapiens
  misc_RNA (1)...(19): siRNA sense strand
gaaagguacagcagaagau

SEQ ID NO: 435467 - RNA, 19 nt, Homo sapiens
  misc_RNA (1)...(19): siRNA sense strand
gcagaugcagaaauauaaa

SEQ ID NO: 435468 - RNA, 19 nt, Homo sapiens
  misc_RNA (1)...(19): siRNA sense strand
gaaaaccuaucgucguuau

SEQ ID NO: 435469 - RNA, 19 nt, Homo sapiens
  misc_RNA (1)...(19): siRNA sense strand
gugcuuagaagaaaugaaa

SEQ ID NO: 435470 - RNA, 19 nt, Homo sapiens
  misc_RNA (1)...(19): siRNA sense strand
gcacaucuauucuuuugga

SEQ ID NO: 435471 - RNA, 19 nt, Homo sapiens
  misc_RNA (1)...(19): siRNA sense strand
gcacacacuuacgaguauu

SEQ ID NO: 435472 - RNA, 19 nt, Homo sapiens
  misc_RNA (1)...(19): siRNA sense strand
ugugaacacucauuucuuc

SEQ ID NO: 435473 - RNA, 19 nt, Homo sapiens
  misc_RNA (1)...(19): siRNA sense strand
cagaagaauuacaguaucu

SEQ ID NO: 435474 - RNA, 19 nt, Homo sapiens
  misc_RNA (1)...(19): siRNA sense strand
uaugaggccuuuaugaaca

SEQ ID NO: 435475 - RNA, 19 nt, Homo sapiens
  misc_RNA (1)...(19): siRNA sense strand
gcaacuaugaggccuuuau

SEQ ID NO: 435476 - RNA, 19 nt, Homo sapiens
  misc_RNA (1)...(19): siRNA sense strand
cgggaagccaggacuauua

SEQ ID NO: 435477 - RNA, 19 nt, Homo sapiens
  misc_RNA (1)...(19): siRNA sense strand
gggaagccaggacuauuaa

SEQ ID NO: 435478 - RNA, 19 nt, Homo sapiens
  misc_RNA (1)...(19): siRNA sense strand
aagcagaugcagaaauaua

SEQ ID NO: 435479 - RNA, 19 nt, Homo sapiens
  misc_RNA (1)...(19): siRNA sense strand
aaagguauucuucguguuu

SEQ ID NO: 435480 - RNA, 19 nt, Homo sapiens
  misc_RNA (1)...(19): siRNA sense strand
cgaaugagaacaagaguag

SEQ ID NO: 435481 - RNA, 19 nt, Homo sapiens
  misc_RNA (1)...(19): siRNA sense strand
ugaggaauguuucaaaugc

SEQ ID NO: 435482 - RNA, 19 nt, Homo sapiens
  misc_RNA (1)...(19): siRNA sense strand
caacuucaugccuacauuu

SEQ ID NO: 435483 - RNA, 19 nt, Homo sapiens
  misc_RNA (1)...(19): siRNA sense strand
caagaguuacuguugauga

SEQ ID NO: 435484 - RNA, 19 nt, Homo sapiens
  misc_RNA (1)...(19): siRNA sense strand
gaaaaggcaucuccaagag

SEQ ID NO: 435485 - RNA, 19 nt, Homo sapiens
  misc_RNA (1)...(19): siRNA sense strand
caagaucaugcgauacuuu

SEQ ID NO: 435486 - RNA, 19 nt, Homo sapiens
  misc_RNA (1)...(19): siRNA sense strand
ggacagaacucucuccauu

SEQ ID NO: 435487 - RNA, 19 nt, Homo sapiens
  misc_RNA (1)...(19): siRNA sense strand
acagaacucucuccauuua

SEQ ID NO: 435488 - RNA, 19 nt, Homo sapiens
  misc_RNA (1)...(19): siRNA sense strand
ugaaggagcuguuugauca

SEQ ID NO: 435489 - RNA, 19 nt, Homo sapiens
  misc_RNA (1)...(19): siRNA sense strand
gaggagaaguccaagcuuu

SEQ ID NO: 435490 - RNA, 19 nt, Homo sapiens
  misc_RNA (1)...(19): siRNA sense strand
gugagaugcugcuucauua

SEQ ID NO: 435491 - RNA, 19 nt, Homo sapiens
  misc_RNA (1)...(19): siRNA sense strand
acagagagcugaugaagga

SEQ ID NO: 435492 - RNA, 19 nt, Homo sapiens
  misc_RNA (1)...(19): siRNA sense strand
ggacaaugauaacaguuug

SEQ ID NO: 435493 - RNA, 19 nt, Homo sapiens
  misc_RNA (1)...(19): siRNA sense strand
ggacugggaauacauaauu

SEQ ID NO: 435494 - RNA, 19 nt, Homo sapiens
  misc_RNA (1)...(19): siRNA sense strand
ccaacaagcucaucaaguc

SEQ ID NO: 435495 - RNA, 19 nt, Homo sapiens
  misc_RNA (1)...(19): siRNA sense strand
gaacacggcucccuuaccu

SEQ ID NO: 435496 - RNA, 19 nt, Homo sapiens
  misc_RNA (1)...(19): siRNA sense strand
gaacaagaggcggacuuua

SEQ ID NO: 435497 - RNA, 19 nt, Homo sapiens
  misc_RNA (1)...(19): siRNA sense strand
caaagacgccuaccacaug

SEQ ID NO: 435498 - RNA, 19 nt, Homo sapiens
  misc_RNA (1)...(19): siRNA sense strand
ggaaacagucagugcagua

SEQ ID NO: 435499 - RNA, 19 nt, Homo sapiens
  misc_RNA (1)...(19): siRNA sense strand
gaagagacagggcauagug

SEQ ID NO: 435500 - RNA, 19 nt, Homo sapiens
  misc_RNA (1)...(19): siRNA sense strand
uagaggaaguuaacaacaa

SEQ ID NO: 435501 - RNA, 19 nt, Homo sapiens
  misc_RNA (1)...(19): siRNA sense strand
ccaauccacugaaggagaa

SEQ ID NO: 435502 - RNA, 19 nt, Homo sapiens
  misc_RNA (1)...(19): siRNA sense strand
uauuuaaacucgccaguga

SEQ ID NO: 435503 - RNA, 19 nt, Homo sapiens
  misc_RNA (1)...(19): siRNA sense strand
ccaagucaaugaaagugaa

SEQ ID NO: 435504 - RNA, 19 nt, Homo sapiens
  misc_RNA (1)...(19): siRNA sense strand
ggucaucaacucuuacaaa

SEQ ID NO: 435505 - RNA, 19 nt, Homo sapiens
  misc_RNA (1)...(19): siRNA sense strand
gaaacagucagugcaguaa

SEQ ID NO: 435506 - RNA, 19 nt, Homo sapiens
  misc_RNA (1)...(19): siRNA sense strand
agacugaggacaaugauaa

SEQ ID NO: 435507 - RNA, 19 nt, Homo sapiens
  misc_RNA (1)...(19): siRNA sense strand
ggaggacugggaauacaua

SEQ ID NO: 435508 - RNA, 19 nt, Homo sapiens
  misc_RNA (1)...(19): siRNA sense strand
ucagugagaugcugcuuca

SEQ ID NO: 435509 - RNA, 19 nt, Homo sapiens
  misc_RNA (1)...(19): siRNA sense strand
auaauuggcuucugugauc

SEQ ID NO: 435510 - RNA, 19 nt, Homo sapiens
  misc_RNA (1)...(19): siRNA sense strand
gggagcagcugagcacaga

SEQ ID NO: 435511 - RNA, 19 nt, Homo sapiens
  misc_RNA (1)...(19): siRNA sense strand
ccaagcgucugcacacguu

SEQ ID NO: 435512 - RNA, 19 nt, Homo sapiens
  misc_RNA (1)...(19): siRNA sense strand
ucaaguccauggugaagga

SEQ ID NO: 435513 - RNA, 19 nt, Homo sapiens
  misc_RNA (1)...(19): siRNA sense strand
aaagugaagaccaagguua

SEQ ID NO: 435514 - RNA, 19 nt, Homo sapiens
  misc_RNA (1)...(19): siRNA sense strand
gacagaacucucuccauuu

SEQ ID NO: 435515 - RNA, 19 nt, Homo sapiens
  misc_RNA (1)...(19): siRNA sense strand
gcugaacacggcucccuua

SEQ ID NO: 435516 - RNA, 19 nt, Homo sapiens
  misc_RNA (1)...(19): siRNA sense strand
caagaggcggacuuuauuu

SEQ ID NO: 435517 - RNA, 19 nt, Homo sapiens
  misc_RNA (1)...(19): siRNA sense strand
ggacacgaccaacaguuug

SEQ ID NO: 435518 - RNA, 19 nt, Homo sapiens
  misc_RNA (1)...(19): siRNA sense strand
auacauaauuggcuucugu

SEQ ID NO: 435519 - RNA, 19 nt, Homo sapiens
  misc_RNA (1)...(19): siRNA sense strand
gcagugcccaagucaauga

SEQ ID NO: 435520 - RNA, 19 nt, Homo sapiens
  misc_RNA (1)...(19): siRNA sense strand
gaaagugaagaccaagguu

SEQ ID NO: 435521 - RNA, 19 nt, Homo sapiens
  misc_RNA (1)...(19): siRNA sense strand
ggacagagagcugaugaag

SEQ ID NO: 435522 - RNA, 19 nt, Homo sapiens
  misc_RNA (1)...(19): siRNA sense strand
acaagaggcggacuuuauu

SEQ ID NO: 435523 - RNA, 19 nt, Homo sapiens
  misc_RNA (1)...(19): siRNA sense strand
aagaggcggacuuuauuua

SEQ ID NO: 435524 - RNA, 19 nt, Homo sapiens
  misc_RNA (1)...(19): siRNA sense strand
gacugggaauacauaauug

SEQ ID NO: 435525 - RNA, 19 nt, Homo sapiens
  misc_RNA (1)...(19): siRNA sense strand
caucaacucuuacaaaaca

SEQ ID NO: 435526 - RNA, 19 nt, Homo sapiens
  misc_RNA (1)...(19): siRNA sense strand
ggagcuguuugaucagugu

SEQ ID NO: 435527 - RNA, 19 nt, Homo sapiens
  misc_RNA (1)...(19): siRNA sense strand
ugugacagccuacgauaaa

SEQ ID NO: 435528 - RNA, 19 nt, Homo sapiens
  misc_RNA (1)...(19): siRNA sense strand
gaagggcaggucaucaaug

SEQ ID NO: 435529 - RNA, 19 nt, Homo sapiens
  misc_RNA (1)...(19): siRNA sense strand
cuggaguccuggcucaaua

SEQ ID NO: 435530 - RNA, 19 nt, Homo sapiens
  misc_RNA (1)...(19): siRNA sense strand
agaagaagcaaagaucaaa

SEQ ID NO: 435531 - RNA, 19 nt, Homo sapiens
  misc_RNA (1)...(19): siRNA sense strand
ugaggacaaugauaacagu

SEQ ID NO: 435532 - RNA, 19 nt, Homo sapiens
  misc_RNA (1)...(19): siRNA sense strand
gaagaagcaaagaucaaag

SEQ ID NO: 435533 - RNA, 19 nt, Homo sapiens
  misc_RNA (1)...(19): siRNA sense strand
uuauugagcugcuguacag

SEQ ID NO: 435534 - RNA, 19 nt, Homo sapiens
  misc_RNA (1)...(19): siRNA sense strand
ccaccuggaugcccucgau

SEQ ID NO: 435535 - RNA, 19 nt, Homo sapiens
  misc_RNA (1)...(19): siRNA sense strand
aacaagaggcggacuuuau

SEQ ID NO: 435536 - RNA, 19 nt, Homo sapiens
  misc_RNA (1)...(19): siRNA sense strand
gagaugcugcuucauuaca

SEQ ID NO: 435537 - RNA, 19 nt, Homo sapiens
  misc_RNA (1)...(19): siRNA sense strand
gugaagaccaagguuauug

SEQ ID NO: 435538 - RNA, 19 nt, Homo sapiens
  misc_RNA (1)...(19): siRNA sense strand
cuaauguuccucccaaaga

SEQ ID NO: 435539 - RNA, 19 nt, Homo sapiens
  misc_RNA (1)...(19): siRNA sense strand
acgaggagcuacucugcuu

SEQ ID NO: 435540 - RNA, 19 nt, Homo sapiens
  misc_RNA (1)...(19): siRNA sense strand
ggagaaguccaagcuuuua

SEQ ID NO: 435541 - RNA, 19 nt, Homo sapiens
  misc_RNA (1)...(19): siRNA sense strand
cagaagaagcaaagaucaa

SEQ ID NO: 435542 - RNA, 19 nt, Homo sapiens
  misc_RNA (1)...(19): siRNA sense strand
gagacugaggacaaugaua

SEQ ID NO: 435543 - RNA, 19 nt, Homo sapiens
  misc_RNA (1)...(19): siRNA sense strand
agaggcggacuuuauuuaa

SEQ ID NO: 435544 - RNA, 19 nt, Homo sapiens
  misc_RNA (1)...(19): siRNA sense strand
ugaagaccaagguuauuga

SEQ ID NO: 435545 - RNA, 19 nt, Homo sapiens
  misc_RNA (1)...(19): siRNA sense strand
cugagaaagugaagaccaa

SEQ ID NO: 435546 - RNA, 19 nt, Homo sapiens
  misc_RNA (1)...(19): siRNA sense strand
gcagucugacccaccaauu

SEQ ID NO: 435547 - RNA, 19 nt, Homo sapiens
  misc_RNA (1)...(19): siRNA sense strand
ggaguccuggcucaauaaa

SEQ ID NO: 435548 - RNA, 19 nt, Homo sapiens
  misc_RNA (1)...(19): siRNA sense strand
cagggugucugagaaagug

SEQ ID NO: 435549 - RNA, 19 nt, Homo sapiens
  misc_RNA (1)...(19): siRNA sense strand
ugaugaaggagcuguuuga

SEQ ID NO: 435550 - RNA, 19 nt, Homo sapiens
  misc_RNA (1)...(19): siRNA sense strand
ccagaagaagcaaagauca

SEQ ID NO: 435551 - RNA, 19 nt, Homo sapiens
  misc_RNA (1)...(19): siRNA sense strand
caggaggacugggaauaca

SEQ ID NO: 435552 - RNA, 19 nt, Homo sapiens
  misc_RNA (1)...(19): siRNA sense strand
uaauguuccucccaaagag

SEQ ID NO: 435553 - RNA, 19 nt, Homo sapiens
  misc_RNA (1)...(19): siRNA sense strand
gagaacaagaggcggacuu

SEQ ID NO: 435554 - RNA, 19 nt, Homo sapiens
  misc_RNA (1)...(19): siRNA sense strand
ucaaagacgccuaccacau

SEQ ID NO: 435555 - RNA, 19 nt, Homo sapiens
  misc_RNA (1)...(19): siRNA sense strand
gagcuggacacgaccaaca

SEQ ID NO: 435556 - RNA, 19 nt, Homo sapiens
  misc_RNA (1)...(19): siRNA sense strand
aagaagcaaagaucaaaga

SEQ ID NO: 435557 - RNA, 19 nt, Homo sapiens
  misc_RNA (1)...(19): siRNA sense strand
gaucaacaaggagcuggaa

SEQ ID NO: 435558 - RNA, 19 nt, Homo sapiens
  misc_RNA (1)...(19): siRNA sense strand
gucaucaacucuuacaaaa

SEQ ID NO: 435559 - RNA, 19 nt, Homo sapiens
  misc_RNA (1)...(19): siRNA sense strand
cccgggucaucaacucuua

SEQ ID NO: 435560 - RNA, 19 nt, Homo sapiens
  misc_RNA (1)...(19): siRNA sense strand
gaagaccaagguuauugag

SEQ ID NO: 435561 - RNA, 19 nt, Homo sapiens
  misc_RNA (1)...(19): siRNA sense strand
ccgcauccucuuccacuuu

SEQ ID NO: 435562 - RNA, 19 nt, Homo sapiens
  misc_RNA (1)...(19): siRNA sense strand
aagggcaggucaucaaugg

SEQ ID NO: 435563 - RNA, 19 nt, Homo sapiens
  misc_RNA (1)...(19): siRNA sense strand
gugagacugaggacaauga

SEQ ID NO: 435564 - RNA, 19 nt, Homo sapiens
  misc_RNA (1)...(19): siRNA sense strand
gaggacugggaauacauaa

SEQ ID NO: 435565 - RNA, 19 nt, Homo sapiens
  misc_RNA (1)...(19): siRNA sense strand
gccagaagaagcaaagauc

SEQ ID NO: 435566 - RNA, 19 nt, Homo sapiens
  misc_RNA (1)...(19): siRNA sense strand
gagcuggaagggccacaga

SEQ ID NO: 435567 - RNA, 19 nt, Homo sapiens
  misc_RNA (1)...(19): siRNA sense strand
cgcauccucuuccacuuug

SEQ ID NO: 435568 - RNA, 19 nt, Homo sapiens
  misc_RNA (1)...(19): siRNA sense strand
gaaucgaucaagccuagca

SEQ ID NO: 435569 - RNA, 19 nt, Homo sapiens
  misc_RNA (1)...(19): siRNA sense strand
cuagaagaggccaaaguga

SEQ ID NO: 435570 - RNA, 19 nt, Homo sapiens
  misc_RNA (1)...(19): siRNA sense strand
uagccaagcugcugaaaag

SEQ ID NO: 435571 - RNA, 19 nt, Homo sapiens
  misc_RNA (1)...(19): siRNA sense strand
caauaaagccaccaauccu

SEQ ID NO: 435572 - RNA, 19 nt, Homo sapiens
  misc_RNA (1)...(19): siRNA sense strand
gcugaugaaggagcuguuu

SEQ ID NO: 435573 - RNA, 19 nt, Homo sapiens
  misc_RNA (1)...(19): siRNA sense strand
agugagaugcugcuucauu

SEQ ID NO: 435574 - RNA, 19 nt, Homo sapiens
  misc_RNA (1)...(19): siRNA sense strand
gcacacguuagaggaaguu

SEQ ID NO: 435575 - RNA, 19 nt, Homo sapiens
  misc_RNA (1)...(19): siRNA sense strand
ucaauaaagccaccaaucc

SEQ ID NO: 435576 - RNA, 19 nt, Homo sapiens
  misc_RNA (1)...(19): siRNA sense strand
caguuuguccuccguguug

SEQ ID NO: 435577 - RNA, 19 nt, Homo sapiens
  misc_RNA (1)...(19): siRNA sense strand
uggacacgaccaacaguuu

SEQ ID NO: 435578 - RNA, 19 nt, Homo sapiens
  misc_RNA (1)...(19): siRNA sense strand
agaacaagaggcggacuuu

SEQ ID NO: 435579 - RNA, 19 nt, Homo sapiens
  misc_RNA (1)...(19): siRNA sense strand
gaucagugugagaacaaga

SEQ ID NO: 435580 - RNA, 19 nt, Homo sapiens
  misc_RNA (1)...(19): siRNA sense strand
agaggaaguuaacaacaac

SEQ ID NO: 435581 - RNA, 19 nt, Homo sapiens
  misc_RNA (1)...(19): siRNA sense strand
aauaaagccaccaauccuu

SEQ ID NO: 435582 - RNA, 19 nt, Homo sapiens
  misc_RNA (1)...(19): siRNA sense strand
ugggcgagguggaccaguu

SEQ ID NO: 435583 - RNA, 19 nt, Homo sapiens
  misc_RNA (1)...(19): siRNA sense strand
agaacucucuccauuuagc

SEQ ID NO: 435584 - RNA, 19 nt, Homo sapiens
  misc_RNA (1)...(19): siRNA sense strand
ucuagaagaggccaaagug

SEQ ID NO: 435585 - RNA, 19 nt, Homo sapiens
  misc_RNA (1)...(19): siRNA sense strand
aaggugcggcuucgguaua

SEQ ID NO: 435586 - RNA, 19 nt, Homo sapiens
  misc_RNA (1)...(19): siRNA sense strand
ggacagaacucucuccauu

SEQ ID NO: 435587 - RNA, 19 nt, Homo sapiens
  misc_RNA (1)...(19): siRNA sense strand
acagaacucucuccauuua

SEQ ID NO: 435588 - RNA, 19 nt, Homo sapiens
  misc_RNA (1)...(19): siRNA sense strand
ugaaggagcuguuugauca

SEQ ID NO: 435589 - RNA, 19 nt, Homo sapiens
  misc_RNA (1)...(19): siRNA sense strand
gaggagaaguccaagcuuu

SEQ ID NO: 435590 - RNA, 19 nt, Homo sapiens
  misc_RNA (1)...(19): siRNA sense strand
gugagaugcugcuucauua

SEQ ID NO: 435591 - RNA, 19 nt, Homo sapiens
  misc_RNA (1)...(19): siRNA sense strand
acagagagcugaugaagga

SEQ ID NO: 435592 - RNA, 19 nt, Homo sapiens
  misc_RNA (1)...(19): siRNA sense strand
ggacaaugauaacaguuug

SEQ ID NO: 435593 - RNA, 19 nt, Homo sapiens
  misc_RNA (1)...(19): siRNA sense strand
ggacugggaauacauaauu

SEQ ID NO: 435594 - RNA, 19 nt, Homo sapiens
  misc_RNA (1)...(19): siRNA sense strand
ccaacaagcucaucaaguc

SEQ ID NO: 435595 - RNA, 19 nt, Homo sapiens
  misc_RNA (1)...(19): siRNA sense strand
gaacacggcucccuuaccu

SEQ ID NO: 435596 - RNA, 19 nt, Homo sapiens
  misc_RNA (1)...(19): siRNA sense strand
gaacaagaggcggacuuua

SEQ ID NO: 435597 - RNA, 19 nt, Homo sapiens
  misc_RNA (1)...(19): siRNA sense strand
caaagacgccuaccacaug

SEQ ID NO: 435598 - RNA, 19 nt, Homo sapiens
  misc_RNA (1)...(19): siRNA sense strand
ggaaacagucagugcagua

SEQ ID NO: 435599 - RNA, 19 nt, Homo sapiens
  misc_RNA (1)...(19): siRNA sense strand
gaagagacagggcauagug

SEQ ID NO: 435600 - RNA, 19 nt, Homo sapiens
  misc_RNA (1)...(19): siRNA sense strand
uagaggaaguuaacaacaa

SEQ ID NO: 435601 - RNA, 19 nt, Homo sapiens
  misc_RNA (1)...(19): siRNA sense strand
ccaauccacugaaggagaa

SEQ ID NO: 435602 - RNA, 19 nt, Homo sapiens
  misc_RNA (1)...(19): siRNA sense strand
uauuuaaacucgccaguga

SEQ ID NO: 435603 - RNA, 19 nt, Homo sapiens
  misc_RNA (1)...(19): siRNA sense strand
ccaagucaaugaaagugaa

SEQ ID NO: 435604 - RNA, 19 nt, Homo sapiens
  misc_RNA (1)...(19): siRNA sense strand
ggucaucaacucuuacaaa

SEQ ID NO: 435605 - RNA, 19 nt, Homo sapiens
  misc_RNA (1)...(19): siRNA sense strand
gaaacagucagugcaguaa

SEQ ID NO: 435606 - RNA, 19 nt, Homo sapiens
  misc_RNA (1)...(19): siRNA sense strand
agacugaggacaaugauaa

SEQ ID NO: 435607 - RNA, 19 nt, Homo sapiens
  misc_RNA (1)...(19): siRNA sense strand
ggaggacugggaauacaua

SEQ ID NO: 435608 - RNA, 19 nt, Homo sapiens
  misc_RNA (1)...(19): siRNA sense strand
ucagugagaugcugcuuca

SEQ ID NO: 435609 - RNA, 19 nt, Homo sapiens
  misc_RNA (1)...(19): siRNA sense strand
auaauuggcuucugugauc

SEQ ID NO: 435610 - RNA, 19 nt, Homo sapiens
  misc_RNA (1)...(19): siRNA sense strand
gggagcagcugagcacaga

SEQ ID NO: 435611 - RNA, 19 nt, Homo sapiens
  misc_RNA (1)...(19): siRNA sense strand
ccaagcgucugcacacguu

SEQ ID NO: 435612 - RNA, 19 nt, Homo sapiens
  misc_RNA (1)...(19): siRNA sense strand
ucaaguccauggugaagga

SEQ ID NO: 435613 - RNA, 19 nt, Homo sapiens
  misc_RNA (1)...(19): siRNA sense strand
aaagugaagaccaagguua

SEQ ID NO: 435614 - RNA, 19 nt, Homo sapiens
  misc_RNA (1)...(19): siRNA sense strand
gacagaacucucuccauuu

SEQ ID NO: 435615 - RNA, 19 nt, Homo sapiens
  misc_RNA (1)...(19): siRNA sense strand
gcugaacacggcucccuua

SEQ ID NO: 435616 - RNA, 19 nt, Homo sapiens
  misc_RNA (1)...(19): siRNA sense strand
caagaggcggacuuuauuu

SEQ ID NO: 435617 - RNA, 19 nt, Homo sapiens
  misc_RNA (1)...(19): siRNA sense strand
ggacacgaccaacaguuug

SEQ ID NO: 435618 - RNA, 19 nt, Homo sapiens
  misc_RNA (1)...(19): siRNA sense strand
auacauaauuggcuucugu

SEQ ID NO: 435619 - RNA, 19 nt, Homo sapiens
  misc_RNA (1)...(19): siRNA sense strand
gcagugcccaagucaauga

SEQ ID NO: 435620 - RNA, 19 nt, Homo sapiens
  misc_RNA (1)...(19): siRNA sense strand
gaaagugaagaccaagguu

SEQ ID NO: 435621 - RNA, 19 nt, Homo sapiens
  misc_RNA (1)...(19): siRNA sense strand
ggacagagagcugaugaag

SEQ ID NO: 435622 - RNA, 19 nt, Homo sapiens
  misc_RNA (1)...(19): siRNA sense strand
acaagaggcggacuuuauu

SEQ ID NO: 435623 - RNA, 19 nt, Homo sapiens
  misc_RNA (1)...(19): siRNA sense strand
aagaggcggacuuuauuua

SEQ ID NO: 435624 - RNA, 19 nt, Homo sapiens
  misc_RNA (1)...(19): siRNA sense strand
gacugggaauacauaauug

SEQ ID NO: 435625 - RNA, 19 nt, Homo sapiens
  misc_RNA (1)...(19): siRNA sense strand
caucaacucuuacaaaaca

SEQ ID NO: 435626 - RNA, 19 nt, Homo sapiens
  misc_RNA (1)...(19): siRNA sense strand
ggagcuguuugaucagugu

SEQ ID NO: 435627 - RNA, 19 nt, Homo sapiens
  misc_RNA (1)...(19): siRNA sense strand
ugugacagccuacgauaaa

SEQ ID NO: 435628 - RNA, 19 nt, Homo sapiens
  misc_RNA (1)...(19): siRNA sense strand
gaagggcaggucaucaaug

SEQ ID NO: 435629 - RNA, 19 nt, Homo sapiens
  misc_RNA (1)...(19): siRNA sense strand
cuggaguccuggcucaaua

SEQ ID NO: 435630 - RNA, 19 nt, Homo sapiens
  misc_RNA (1)...(19): siRNA sense strand
agaagaagcaaagaucaaa

SEQ ID NO: 435631 - RNA, 19 nt, Homo sapiens
  misc_RNA (1)...(19): siRNA sense strand
ugaggacaaugauaacagu

SEQ ID NO: 435632 - RNA, 19 nt, Homo sapiens
  misc_RNA (1)...(19): siRNA sense strand
gaagaagcaaagaucaaag

SEQ ID NO: 435633 - RNA, 19 nt, Homo sapiens
  misc_RNA (1)...(19): siRNA sense strand
uuauugagcugcuguacag

SEQ ID NO: 435634 - RNA, 19 nt, Homo sapiens
  misc_RNA (1)...(19): siRNA sense strand
ccaccuggaugcccucgau

SEQ ID NO: 435635 - RNA, 19 nt, Homo sapiens
  misc_RNA (1)...(19): siRNA sense strand
aacaagaggcggacuuuau

SEQ ID NO: 435636 - RNA, 19 nt, Homo sapiens
  misc_RNA (1)...(19): siRNA sense strand
gagaugcugcuucauuaca

SEQ ID NO: 435637 - RNA, 19 nt, Homo sapiens
  misc_RNA (1)...(19): siRNA sense strand
gugaagaccaagguuauug

SEQ ID NO: 435638 - RNA, 19 nt, Homo sapiens
  misc_RNA (1)...(19): siRNA sense strand
cuaauguuccucccaaaga

SEQ ID NO: 435639 - RNA, 19 nt, Homo sapiens
  misc_RNA (1)...(19): siRNA sense strand
acgaggagcuacucugcuu

SEQ ID NO: 435640 - RNA, 19 nt, Homo sapiens
  misc_RNA (1)...(19): siRNA sense strand
ggagaaguccaagcuuuua

SEQ ID NO: 435641 - RNA, 19 nt, Homo sapiens
  misc_RNA (1)...(19): siRNA sense strand
cagaagaagcaaagaucaa

SEQ ID NO: 435642 - RNA, 19 nt, Homo sapiens
  misc_RNA (1)...(19): siRNA sense strand
gagacugaggacaaugaua

SEQ ID NO: 435643 - RNA, 19 nt, Homo sapiens
  misc_RNA (1)...(19): siRNA sense strand
agaggcggacuuuauuuaa

SEQ ID NO: 435644 - RNA, 19 nt, Homo sapiens
  misc_RNA (1)...(19): siRNA sense strand
ugaagaccaagguuauuga

SEQ ID NO: 435645 - RNA, 19 nt, Homo sapiens
  misc_RNA (1)...(19): siRNA sense strand
cugagaaagugaagaccaa

SEQ ID NO: 435646 - RNA, 19 nt, Homo sapiens
  misc_RNA (1)...(19): siRNA sense strand
gcagucugacccaccaauu

SEQ ID NO: 435647 - RNA, 19 nt, Homo sapiens
  misc_RNA (1)...(19): siRNA sense strand
ggaguccuggcucaauaaa

SEQ ID NO: 435648 - RNA, 19 nt, Homo sapiens
  misc_RNA (1)...(19): siRNA sense strand
cagggugucugagaaagug

SEQ ID NO: 435649 - RNA, 19 nt, Homo sapiens
  misc_RNA (1)...(19): siRNA sense strand
ugaugaaggagcuguuuga

SEQ ID NO: 435650 - RNA, 19 nt, Homo sapiens
  misc_RNA (1)...(19): siRNA sense strand
ccagaagaagcaaagauca

SEQ ID NO: 435651 - RNA, 19 nt, Homo sapiens
  misc_RNA (1)...(19): siRNA sense strand
caggaggacugggaauaca

SEQ ID NO: 435652 - RNA, 19 nt, Homo sapiens
  misc_RNA (1)...(19): siRNA sense strand
uaauguuccucccaaagag

SEQ ID NO: 435653 - RNA, 19 nt, Homo sapiens
  misc_RNA (1)...(19): siRNA sense strand
gagaacaagaggcggacuu

SEQ ID NO: 435654 - RNA, 19 nt, Homo sapiens
  misc_RNA (1)...(19): siRNA sense strand
ucaaagacgccuaccacau

SEQ ID NO: 435655 - RNA, 19 nt, Homo sapiens
  misc_RNA (1)...(19): siRNA sense strand
gagcuggacacgaccaaca

SEQ ID NO: 435656 - RNA, 19 nt, Homo sapiens
  misc_RNA (1)...(19): siRNA sense strand
aagaagcaaagaucaaaga

SEQ ID NO: 435657 - RNA, 19 nt, Homo sapiens
  misc_RNA (1)...(19): siRNA sense strand
gaucaacaaggagcuggaa

SEQ ID NO: 435658 - RNA, 19 nt, Homo sapiens
  misc_RNA (1)...(19): siRNA sense strand
gucaucaacucuuacaaaa

SEQ ID NO: 435659 - RNA, 19 nt, Homo sapiens
  misc_RNA (1)...(19): siRNA sense strand
cccgggucaucaacucuua

SEQ ID NO: 435660 - RNA, 19 nt, Homo sapiens
  misc_RNA (1)...(19): siRNA sense strand
gaagaccaagguuauugag

SEQ ID NO: 435661 - RNA, 19 nt, Homo sapiens
  misc_RNA (1)...(19): siRNA sense strand
ccgcauccucuuccacuuu

SEQ ID NO: 435662 - RNA, 19 nt, Homo sapiens
  misc_RNA (1)...(19): siRNA sense strand
aagggcaggucaucaaugg

SEQ ID NO: 435663 - RNA, 19 nt, Homo sapiens
  misc_RNA (1)...(19): siRNA sense strand
gugagacugaggacaauga

SEQ ID NO: 435664 - RNA, 19 nt, Homo sapiens
  misc_RNA (1)...(19): siRNA sense strand
gaggacugggaauacauaa

SEQ ID NO: 435665 - RNA, 19 nt, Homo sapiens
  misc_RNA (1)...(19): siRNA sense strand
gccagaagaagcaaagauc

SEQ ID NO: 435666 - RNA, 19 nt, Homo sapiens
  misc_RNA (1)...(19): siRNA sense strand
gagcuggaagggccacaga

SEQ ID NO: 435667 - RNA, 19 nt, Homo sapiens
  misc_RNA (1)...(19): siRNA sense strand
cgcauccucuuccacuuug

SEQ ID NO: 435668 - RNA, 19 nt, Homo sapiens
  misc_RNA (1)...(19): siRNA sense strand
gaaucgaucaagccuagca

SEQ ID NO: 435669 - RNA, 19 nt, Homo sapiens
  misc_RNA (1)...(19): siRNA sense strand
cuagaagaggccaaaguga

SEQ ID NO: 435670 - RNA, 19 nt, Homo sapiens
  misc_RNA (1)...(19): siRNA sense strand
uagccaagcugcugaaaag

SEQ ID NO: 435671 - RNA, 19 nt, Homo sapiens
  misc_RNA (1)...(19): siRNA sense strand
caauaaagccaccaauccu

SEQ ID NO: 435672 - RNA, 19 nt, Homo sapiens
  misc_RNA (1)...(19): siRNA sense strand
gcugaugaaggagcuguuu

SEQ ID NO: 435673 - RNA, 19 nt, Homo sapiens
  misc_RNA (1)...(19): siRNA sense strand
agugagaugcugcuucauu

SEQ ID NO: 435674 - RNA, 19 nt, Homo sapiens
  misc_RNA (1)...(19): siRNA sense strand
gcacacguuagaggaaguu

SEQ ID NO: 435675 - RNA, 19 nt, Homo sapiens
  misc_RNA (1)...(19): siRNA sense strand
ucaauaaagccaccaaucc

SEQ ID NO: 435676 - RNA, 19 nt, Homo sapiens
  misc_RNA (1)...(19): siRNA sense strand
caguuuguccuccguguug

SEQ ID NO: 435677 - RNA, 19 nt, Homo sapiens
  misc_RNA (1)...(19): siRNA sense strand
uggacacgaccaacaguuu

SEQ ID NO: 435678 - RNA, 19 nt, Homo sapiens
  misc_RNA (1)...(19): siRNA sense strand
agaacaagaggcggacuuu

SEQ ID NO: 435679 - RNA, 19 nt, Homo sapiens
  misc_RNA (1)...(19): siRNA sense strand
gaucagugugagaacaaga

SEQ ID NO: 435680 - RNA, 19 nt, Homo sapiens
  misc_RNA (1)...(19): siRNA sense strand
agaggaaguuaacaacaac

SEQ ID NO: 435681 - RNA, 19 nt, Homo sapiens
  misc_RNA (1)...(19): siRNA sense strand
aauaaagccaccaauccuu

SEQ ID NO: 435682 - RNA, 19 nt, Homo sapiens
  misc_RNA (1)...(19): siRNA sense strand
ugggcgagguggaccaguu

SEQ ID NO: 435683 - RNA, 19 nt, Homo sapiens
  misc_RNA (1)...(19): siRNA sense strand
agaacucucuccauuuagc

SEQ ID NO: 435684 - RNA, 19 nt, Homo sapiens
  misc_RNA (1)...(19): siRNA sense strand
ucuagaagaggccaaagug

SEQ ID NO: 435685 - RNA, 19 nt, Homo sapiens
  misc_RNA (1)...(19): siRNA sense strand
aaggugcggcuucgguaua

SEQ ID NO: 435686 - RNA, 19 nt, Homo sapiens
  misc_RNA (1)...(19): siRNA sense strand
gaagagauauuuccuugau

SEQ ID NO: 435687 - RNA, 19 nt, Homo sapiens
  misc_RNA (1)...(19): siRNA sense strand
gaugauuggugacauagua

SEQ ID NO: 435688 - RNA, 19 nt, Homo sapiens
  misc_RNA (1)...(19): siRNA sense strand
caaagucagucaugaagaa

SEQ ID NO: 435689 - RNA, 19 nt, Homo sapiens
  misc_RNA (1)...(19): siRNA sense strand
gcaauagaggcaauauaua

SEQ ID NO: 435690 - RNA, 19 nt, Homo sapiens
  misc_RNA (1)...(19): siRNA sense strand
caauauaucgcacccauuu

SEQ ID NO: 435691 - RNA, 19 nt, Homo sapiens
  misc_RNA (1)...(19): siRNA sense strand
gauauuuccuugauugaca

SEQ ID NO: 435692 - RNA, 19 nt, Homo sapiens
  misc_RNA (1)...(19): siRNA sense strand
gguccuuucuuaucucuuu

SEQ ID NO: 435693 - RNA, 19 nt, Homo sapiens
  misc_RNA (1)...(19): siRNA sense strand
agagauauuuccuugauug

SEQ ID NO: 435694 - RNA, 19 nt, Homo sapiens
  misc_RNA (1)...(19): siRNA sense strand
cugaagauguuaagauuug

SEQ ID NO: 435695 - RNA, 19 nt, Homo sapiens
  misc_RNA (1)...(19): siRNA sense strand
uacccagucuuucuuguua

SEQ ID NO: 435696 - RNA, 19 nt, Homo sapiens
  misc_RNA (1)...(19): siRNA sense strand
ggacauuugccaauaauuc

SEQ ID NO: 435697 - RNA, 19 nt, Homo sapiens
  misc_RNA (1)...(19): siRNA sense strand
gaaucugucugcugugugu

SEQ ID NO: 435698 - RNA, 19 nt, Homo sapiens
  misc_RNA (1)...(19): siRNA sense strand
gaauugaccauagggauuu

SEQ ID NO: 435699 - RNA, 19 nt, Homo sapiens
  misc_RNA (1)...(19): siRNA sense strand
guugaugauuggugacaua

SEQ ID NO: 435700 - RNA, 19 nt, Homo sapiens
  misc_RNA (1)...(19): siRNA sense strand
uaauucaagucucugguuu

SEQ ID NO: 435701 - RNA, 19 nt, Homo sapiens
  misc_RNA (1)...(19): siRNA sense strand
uaaaggcagugaucaucuu

SEQ ID NO: 435702 - RNA, 19 nt, Homo sapiens
  misc_RNA (1)...(19): siRNA sense strand
uuagauggcuucuuuaugc

SEQ ID NO: 435703 - RNA, 19 nt, Homo sapiens
  misc_RNA (1)...(19): siRNA sense strand
ccagguacauauggcaaua

SEQ ID NO: 435704 - RNA, 19 nt, Homo sapiens
  misc_RNA (1)...(19): siRNA sense strand
ggaaauucaaagugaguaa

SEQ ID NO: 435705 - RNA, 19 nt, Homo sapiens
  misc_RNA (1)...(19): siRNA sense strand
gugaaguguuuccuuagaa

SEQ ID NO: 435706 - RNA, 19 nt, Homo sapiens
  misc_RNA (1)...(19): siRNA sense strand
ggauucauuguacuaguua

SEQ ID NO: 435707 - RNA, 19 nt, Homo sapiens
  misc_RNA (1)...(19): siRNA sense strand
uuugugaaguguuuccuua

SEQ ID NO: 435708 - RNA, 19 nt, Homo sapiens
  misc_RNA (1)...(19): siRNA sense strand
caaagaaugaugauaugug

SEQ ID NO: 435709 - RNA, 19 nt, Homo sapiens
  misc_RNA (1)...(19): siRNA sense strand
gcaaguugagggaagcuuu

SEQ ID NO: 435710 - RNA, 19 nt, Homo sapiens
  misc_RNA (1)...(19): siRNA sense strand
ucaaacaguuaacccugaa

SEQ ID NO: 435711 - RNA, 19 nt, Homo sapiens
  misc_RNA (1)...(19): siRNA sense strand
gccaauaauucaagucucu

SEQ ID NO: 435712 - RNA, 19 nt, Homo sapiens
  misc_RNA (1)...(19): siRNA sense strand
aucauuagauggcuucuuu

SEQ ID NO: 435713 - RNA, 19 nt, Homo sapiens
  misc_RNA (1)...(19): siRNA sense strand
cuaguuaacugcauugacu

SEQ ID NO: 435714 - RNA, 19 nt, Homo sapiens
  misc_RNA (1)...(19): siRNA sense strand
cauaguaacugucauuuuc

SEQ ID NO: 435715 - RNA, 19 nt, Homo sapiens
  misc_RNA (1)...(19): siRNA sense strand
guacagaggcccacaugag

SEQ ID NO: 435716 - RNA, 19 nt, Homo sapiens
  misc_RNA (1)...(19): siRNA sense strand
gaagaaaacauuacuugga

SEQ ID NO: 435717 - RNA, 19 nt, Homo sapiens
  misc_RNA (1)...(19): siRNA sense strand
agaaugaugauauguggua

SEQ ID NO: 435718 - RNA, 19 nt, Homo sapiens
  misc_RNA (1)...(19): siRNA sense strand
uaugggaaauagcaaguug

SEQ ID NO: 435719 - RNA, 19 nt, Homo sapiens
  misc_RNA (1)...(19): siRNA sense strand
gagggaagcuuuucugaag

SEQ ID NO: 435720 - RNA, 19 nt, Homo sapiens
  misc_RNA (1)...(19): siRNA sense strand
guuaagauuugugaagugu

SEQ ID NO: 435721 - RNA, 19 nt, Homo sapiens
  misc_RNA (1)...(19): siRNA sense strand
ccagguacuuucaaacagu

SEQ ID NO: 435722 - RNA, 19 nt, Homo sapiens
  misc_RNA (1)...(19): siRNA sense strand
ggcugaagcuaaagaucaa

SEQ ID NO: 435723 - RNA, 19 nt, Homo sapiens
  misc_RNA (1)...(19): siRNA sense strand
ucuggacauuugccaauaa

SEQ ID NO: 435724 - RNA, 19 nt, Homo sapiens
  misc_RNA (1)...(19): siRNA sense strand
cagauucgacugcaugcua

SEQ ID NO: 435725 - RNA, 19 nt, Homo sapiens
  misc_RNA (1)...(19): siRNA sense strand
uuacuuuucucccuaguua

SEQ ID NO: 435726 - RNA, 19 nt, Homo sapiens
  misc_RNA (1)...(19): siRNA sense strand
gaaugaugauaugugguau

SEQ ID NO: 435727 - RNA, 19 nt, Homo sapiens
  misc_RNA (1)...(19): siRNA sense strand
gccucaguaucuucuauuu

SEQ ID NO: 435728 - RNA, 19 nt, Homo sapiens
  misc_RNA (1)...(19): siRNA sense strand
caagugcaauagaggcaau

SEQ ID NO: 435729 - RNA, 19 nt, Homo sapiens
  misc_RNA (1)...(19): siRNA sense strand
ugcaauagaggcaauauau

SEQ ID NO: 435730 - RNA, 19 nt, Homo sapiens
  misc_RNA (1)...(19): siRNA sense strand
ccucaguaucuucuauuua

SEQ ID NO: 435731 - RNA, 19 nt, Homo sapiens
  misc_RNA (1)...(19): siRNA sense strand
gaaguguuuccuuagaaga

SEQ ID NO: 435732 - RNA, 19 nt, Homo sapiens
  misc_RNA (1)...(19): siRNA sense strand
guacuacccagucuuucuu

SEQ ID NO: 435733 - RNA, 19 nt, Homo sapiens
  misc_RNA (1)...(19): siRNA sense strand
gaucaacaaggucaugcuu

SEQ ID NO: 435734 - RNA, 19 nt, Homo sapiens
  misc_RNA (1)...(19): siRNA sense strand
gacauuugccaauaauuca

SEQ ID NO: 435735 - RNA, 19 nt, Homo sapiens
  misc_RNA (1)...(19): siRNA sense strand
ugugaaguguuuccuuaga

SEQ ID NO: 435736 - RNA, 19 nt, Homo sapiens
  misc_RNA (1)...(19): siRNA sense strand
gagauauuuccuugauuga

SEQ ID NO: 435737 - RNA, 19 nt, Homo sapiens
  misc_RNA (1)...(19): siRNA sense strand
uggauucauuguacuaguu

SEQ ID NO: 435738 - RNA, 19 nt, Homo sapiens
  misc_RNA (1)...(19): siRNA sense strand
ugaauugaccauagggauu

SEQ ID NO: 435739 - RNA, 19 nt, Homo sapiens
  misc_RNA (1)...(19): siRNA sense strand
uccaaagaaugaugauaug

SEQ ID NO: 435740 - RNA, 19 nt, Homo sapiens
  misc_RNA (1)...(19): siRNA sense strand
augcugcucuuuccaggua

SEQ ID NO: 435741 - RNA, 19 nt, Homo sapiens
  misc_RNA (1)...(19): siRNA sense strand
ugaaguguuuccuuagaag

SEQ ID NO: 435742 - RNA, 19 nt, Homo sapiens
  misc_RNA (1)...(19): siRNA sense strand
ucaagccauucauucauuc

SEQ ID NO: 435743 - RNA, 19 nt, Homo sapiens
  misc_RNA (1)...(19): siRNA sense strand
cucaguaucuucuauuuac

SEQ ID NO: 435744 - RNA, 19 nt, Homo sapiens
  misc_RNA (1)...(19): siRNA sense strand
gcuaguaagcauugugaau

SEQ ID NO: 435745 - RNA, 19 nt, Homo sapiens
  misc_RNA (1)...(19): siRNA sense strand
cagguacuuucaaacaguu

SEQ ID NO: 435746 - RNA, 19 nt, Homo sapiens
  misc_RNA (1)...(19): siRNA sense strand
agccauucauucauucuaa

SEQ ID NO: 435747 - RNA, 19 nt, Homo sapiens
  misc_RNA (1)...(19): siRNA sense strand
gauguuaagauuugugaag

SEQ ID NO: 435748 - RNA, 19 nt, Homo sapiens
  misc_RNA (1)...(19): siRNA sense strand
gaagauguuaagauuugug

SEQ ID NO: 435749 - RNA, 19 nt, Homo sapiens
  misc_RNA (1)...(19): siRNA sense strand
gugcaauagaggcaauaua

SEQ ID NO: 435750 - RNA, 19 nt, Homo sapiens
  misc_RNA (1)...(19): siRNA sense strand
ugucugcuguguguaauau

SEQ ID NO: 435751 - RNA, 19 nt, Homo sapiens
  misc_RNA (1)...(19): siRNA sense strand
gccauucauucauucuaau

SEQ ID NO: 435752 - RNA, 19 nt, Homo sapiens
  misc_RNA (1)...(19): siRNA sense strand
cauuagauggcuucuuuau

SEQ ID NO: 435753 - RNA, 19 nt, Homo sapiens
  misc_RNA (1)...(19): siRNA sense strand
ccaucaagccauucauuca

SEQ ID NO: 435754 - RNA, 19 nt, Homo sapiens
  misc_RNA (1)...(19): siRNA sense strand
ccacaugagggccauaaag

SEQ ID NO: 435755 - RNA, 19 nt, Homo sapiens
  misc_RNA (1)...(19): siRNA sense strand
augguucccuuuauccuuu

SEQ ID NO: 435756 - RNA, 19 nt, Homo sapiens
  misc_RNA (1)...(19): siRNA sense strand
uguacuaguuaacugcauu

SEQ ID NO: 435757 - RNA, 19 nt, Homo sapiens
  misc_RNA (1)...(19): siRNA sense strand
cuucugggguccuuucuua

SEQ ID NO: 435758 - RNA, 19 nt, Homo sapiens
  misc_RNA (1)...(19): siRNA sense strand
gcucuuuccagguacauau

SEQ ID NO: 435759 - RNA, 19 nt, Homo sapiens
  misc_RNA (1)...(19): siRNA sense strand
ggucaugcuugcgauucuu

SEQ ID NO: 435760 - RNA, 19 nt, Homo sapiens
  misc_RNA (1)...(19): siRNA sense strand
gaagcuaaagaucaacaag

SEQ ID NO: 435761 - RNA, 19 nt, Homo sapiens
  misc_RNA (1)...(19): siRNA sense strand
gucuggacauuugccaaua

SEQ ID NO: 435762 - RNA, 19 nt, Homo sapiens
  misc_RNA (1)...(19): siRNA sense strand
gaugguucccuuuauccuu

SEQ ID NO: 435763 - RNA, 19 nt, Homo sapiens
  misc_RNA (1)...(19): siRNA sense strand
cuaauuaugggaaauagca

SEQ ID NO: 435764 - RNA, 19 nt, Homo sapiens
  misc_RNA (1)...(19): siRNA sense strand
gcuuggccaucuccagaau

SEQ ID NO: 435765 - RNA, 19 nt, Homo sapiens
  misc_RNA (1)...(19): siRNA sense strand
cauaaaggcagugaucauc

SEQ ID NO: 435766 - RNA, 19 nt, Homo sapiens
  misc_RNA (1)...(19): siRNA sense strand
uacucaagauagccaauau

SEQ ID NO: 435767 - RNA, 19 nt, Homo sapiens
  misc_RNA (1)...(19): siRNA sense strand
guccuuucuuaucucuuua

SEQ ID NO: 435768 - RNA, 19 nt, Homo sapiens
  misc_RNA (1)...(19): siRNA sense strand
aucaagccauucauucauu

SEQ ID NO: 435769 - RNA, 19 nt, Homo sapiens
  misc_RNA (1)...(19): siRNA sense strand
ggaaaauuaguguugauga

SEQ ID NO: 435770 - RNA, 19 nt, Homo sapiens
  misc_RNA (1)...(19): siRNA sense strand
cucaagauagccaauauau

SEQ ID NO: 435771 - RNA, 19 nt, Homo sapiens
  misc_RNA (1)...(19): siRNA sense strand
guacuaguuaacugcauug

SEQ ID NO: 435772 - RNA, 19 nt, Homo sapiens
  misc_RNA (1)...(19): siRNA sense strand
ccaaagaaugaugauaugu

SEQ ID NO: 435773 - RNA, 19 nt, Homo sapiens
  misc_RNA (1)...(19): siRNA sense strand
ucaaagucagucaugaaga

SEQ ID NO: 435774 - RNA, 19 nt, Homo sapiens
  misc_RNA (1)...(19): siRNA sense strand
caucaagccauucauucau

SEQ ID NO: 435775 - RNA, 19 nt, Homo sapiens
  misc_RNA (1)...(19): siRNA sense strand
uggcugaagcuaaagauca

SEQ ID NO: 435776 - RNA, 19 nt, Homo sapiens
  misc_RNA (1)...(19): siRNA sense strand
ucugcuguguguaauauca

SEQ ID NO: 435777 - RNA, 19 nt, Homo sapiens
  misc_RNA (1)...(19): siRNA sense strand
cguguacuacccagucuuu

SEQ ID NO: 435778 - RNA, 19 nt, Homo sapiens
  misc_RNA (1)...(19): siRNA sense strand
ggccauaaaggcagugauc

SEQ ID NO: 435779 - RNA, 19 nt, Homo sapiens
  misc_RNA (1)...(19): siRNA sense strand
agacacaccaagcagauuc

SEQ ID NO: 435780 - RNA, 19 nt, Homo sapiens
  misc_RNA (1)...(19): siRNA sense strand
uuaguguuccaaagaauga

SEQ ID NO: 435781 - RNA, 19 nt, Homo sapiens
  misc_RNA (1)...(19): siRNA sense strand
uccuuugccugaucucauu

SEQ ID NO: 435782 - RNA, 19 nt, Homo sapiens
  misc_RNA (1)...(19): siRNA sense strand
uuacucaagauagccaaua

SEQ ID NO: 435783 - RNA, 19 nt, Homo sapiens
  misc_RNA (1)...(19): siRNA sense strand
ucauuguacuaguuaacug

SEQ ID NO: 435784 - RNA, 19 nt, Homo sapiens
  misc_RNA (1)...(19): siRNA sense strand
aauucaagucucugguuua

SEQ ID NO: 435785 - RNA, 19 nt, Homo sapiens
  misc_RNA (1)...(19): siRNA sense strand
uguuaagauuugugaagug

SEQ ID NO: 435786 - RNA, 19 nt, Homo sapiens
  misc_RNA (1)...(19): siRNA sense strand
caaguuagcuguggaguuu

SEQ ID NO: 435787 - RNA, 19 nt, Homo sapiens
  misc_RNA (1)...(19): siRNA sense strand
guacugaguugugauuaua

SEQ ID NO: 435788 - RNA, 19 nt, Homo sapiens
  misc_RNA (1)...(19): siRNA sense strand
ccuaauaacuggagaauuc

SEQ ID NO: 435789 - RNA, 19 nt, Homo sapiens
  misc_RNA (1)...(19): siRNA sense strand
gaacccagauguuuauaca

SEQ ID NO: 435790 - RNA, 19 nt, Homo sapiens
  misc_RNA (1)...(19): siRNA sense strand
gauuauagguuucaugcaa

SEQ ID NO: 435791 - RNA, 19 nt, Homo sapiens
  misc_RNA (1)...(19): siRNA sense strand
cuacauccuuaccaauuua

SEQ ID NO: 435792 - RNA, 19 nt, Homo sapiens
  misc_RNA (1)...(19): siRNA sense strand
guacugaacccagauguuu

SEQ ID NO: 435793 - RNA, 19 nt, Homo sapiens
  misc_RNA (1)...(19): siRNA sense strand
gccuuaaugucuucuauuu

SEQ ID NO: 435794 - RNA, 19 nt, Homo sapiens
  misc_RNA (1)...(19): siRNA sense strand
agacauaccaagcaaauaa

SEQ ID NO: 435795 - RNA, 19 nt, Homo sapiens
  misc_RNA (1)...(19): siRNA sense strand
acaguugacuacauccuua

SEQ ID NO: 435796 - RNA, 19 nt, Homo sapiens
  misc_RNA (1)...(19): siRNA sense strand
gacauuugccaacuacuua

SEQ ID NO: 435797 - RNA, 19 nt, Homo sapiens
  misc_RNA (1)...(19): siRNA sense strand
caacuggauugacuggauu

SEQ ID NO: 435798 - RNA, 19 nt, Homo sapiens
  misc_RNA (1)...(19): siRNA sense strand
gaauuuguuugaucagugu

SEQ ID NO: 435799 - RNA, 19 nt, Homo sapiens
  misc_RNA (1)...(19): siRNA sense strand
gaguugugauuauagguuu

SEQ ID NO: 435800 - RNA, 19 nt, Homo sapiens
  misc_RNA (1)...(19): siRNA sense strand
uggauugacuggauuaaga

SEQ ID NO: 435801 - RNA, 19 nt, Homo sapiens
  misc_RNA (1)...(19): siRNA sense strand
uuacugaaauguuccaugu

SEQ ID NO: 435802 - RNA, 19 nt, Homo sapiens
  misc_RNA (1)...(19): siRNA sense strand
ccuuauagcagcaauagua

SEQ ID NO: 435803 - RNA, 19 nt, Homo sapiens
  misc_RNA (1)...(19): siRNA sense strand
caauaguacugaguuguga

SEQ ID NO: 435804 - RNA, 19 nt, Homo sapiens
  misc_RNA (1)...(19): siRNA sense strand
uuaguuaucgccagaauuu

SEQ ID NO: 435805 - RNA, 19 nt, Homo sapiens
  misc_RNA (1)...(19): siRNA sense strand
gaaauguuccaugugagua

SEQ ID NO: 435806 - RNA, 19 nt, Homo sapiens
  misc_RNA (1)...(19): siRNA sense strand
gccaacuacuuaaauaugu

SEQ ID NO: 435807 - RNA, 19 nt, Homo sapiens
  misc_RNA (1)...(19): siRNA sense strand
gcacuagucaacuggauug

SEQ ID NO: 435808 - RNA, 19 nt, Homo sapiens
  misc_RNA (1)...(19): siRNA sense strand
ggagacauaccaagcaaau

SEQ ID NO: 435809 - RNA, 19 nt, Homo sapiens
  misc_RNA (1)...(19): siRNA sense strand
ggacauuugccaacuacuu

SEQ ID NO: 435810 - RNA, 19 nt, Homo sapiens
  misc_RNA (1)...(19): siRNA sense strand
aaacugaggcagacauuug

SEQ ID NO: 435811 - RNA, 19 nt, Homo sapiens
  misc_RNA (1)...(19): siRNA sense strand
ggagaauucauacuaggaa

SEQ ID NO: 435812 - RNA, 19 nt, Homo sapiens
  misc_RNA (1)...(19): siRNA sense strand
acugaaauguuccauguga

SEQ ID NO: 435813 - RNA, 19 nt, Homo sapiens
  misc_RNA (1)...(19): siRNA sense strand
acccagauguuuauacaaa

SEQ ID NO: 435814 - RNA, 19 nt, Homo sapiens
  misc_RNA (1)...(19): siRNA sense strand
gccagaauuuguuugauca

SEQ ID NO: 435815 - RNA, 19 nt, Homo sapiens
  misc_RNA (1)...(19): siRNA sense strand
gcaauaguacugaguugug

SEQ ID NO: 435816 - RNA, 19 nt, Homo sapiens
  misc_RNA (1)...(19): siRNA sense strand
uugggucacucacuuauuu

SEQ ID NO: 435817 - RNA, 19 nt, Homo sapiens
  misc_RNA (1)...(19): siRNA sense strand
gacuacauccuuaccaauu

SEQ ID NO: 435818 - RNA, 19 nt, Homo sapiens
  misc_RNA (1)...(19): siRNA sense strand
aaaauugccugcaugauau

SEQ ID NO: 435819 - RNA, 19 nt, Homo sapiens
  misc_RNA (1)...(19): siRNA sense strand
ccaccugccuuaaugucuu

SEQ ID NO: 435820 - RNA, 19 nt, Homo sapiens
  misc_RNA (1)...(19): siRNA sense strand
acuacauccuuaccaauuu

SEQ ID NO: 435821 - RNA, 19 nt, Homo sapiens
  misc_RNA (1)...(19): siRNA sense strand
cagcaauaguacugaguug

SEQ ID NO: 435822 - RNA, 19 nt, Homo sapiens
  misc_RNA (1)...(19): siRNA sense strand
uggauuaccaccugccuua

SEQ ID NO: 435823 - RNA, 19 nt, Homo sapiens
  misc_RNA (1)...(19): siRNA sense strand
ggauugacuggauuaagaa

SEQ ID NO: 435824 - RNA, 19 nt, Homo sapiens
  misc_RNA (1)...(19): siRNA sense strand
accuuuagcuaucuuauga

SEQ ID NO: 435825 - RNA, 19 nt, Homo sapiens
  misc_RNA (1)...(19): siRNA sense strand
ccaacuacuuaaauaugug

SEQ ID NO: 435826 - RNA, 19 nt, Homo sapiens
  misc_RNA (1)...(19): siRNA sense strand
gaacccuugacucucuuua

SEQ ID NO: 435827 - RNA, 19 nt, Homo sapiens
  misc_RNA (1)...(19): siRNA sense strand
gcagcaauaguacugaguu

SEQ ID NO: 435828 - RNA, 19 nt, Homo sapiens
  misc_RNA (1)...(19): siRNA sense strand
ucaguguaaugguuguaaa

SEQ ID NO: 435829 - RNA, 19 nt, Homo sapiens
  misc_RNA (1)...(19): siRNA sense strand
gacauaccaagcaaauaaa

SEQ ID NO: 435830 - RNA, 19 nt, Homo sapiens
  misc_RNA (1)...(19): siRNA sense strand
gcuuugccauuuccuuguu

SEQ ID NO: 435831 - RNA, 19 nt, Homo sapiens
  misc_RNA (1)...(19): siRNA sense strand
gcaauugccaaacauaaaa

SEQ ID NO: 435832 - RNA, 19 nt, Homo sapiens
  misc_RNA (1)...(19): siRNA sense strand
gagacauaccaagcaaaua

SEQ ID NO: 435833 - RNA, 19 nt, Homo sapiens
  misc_RNA (1)...(19): siRNA sense strand
uugacuggauuaagaagaa

SEQ ID NO: 435834 - RNA, 19 nt, Homo sapiens
  misc_RNA (1)...(19): siRNA sense strand
guucaugugagagccauua

SEQ ID NO: 435835 - RNA, 19 nt, Homo sapiens
  misc_RNA (1)...(19): siRNA sense strand
gcauuguaauaguacugaa

SEQ ID NO: 435836 - RNA, 19 nt, Homo sapiens
  misc_RNA (1)...(19): siRNA sense strand
guuugcaauugucccauuu

SEQ ID NO: 435837 - RNA, 19 nt, Homo sapiens
  misc_RNA (1)...(19): siRNA sense strand
cgccagaauuuguuugauc

SEQ ID NO: 435838 - RNA, 19 nt, Homo sapiens
  misc_RNA (1)...(19): siRNA sense strand
uugaugaccuuuagcuauc

SEQ ID NO: 435839 - RNA, 19 nt, Homo sapiens
  misc_RNA (1)...(19): siRNA sense strand
ucuuuaaccuguuugcaau

SEQ ID NO: 435840 - RNA, 19 nt, Homo sapiens
  misc_RNA (1)...(19): siRNA sense strand
gcugggaugcuuugccauu

SEQ ID NO: 435841 - RNA, 19 nt, Homo sapiens
  misc_RNA (1)...(19): siRNA sense strand
guguaaugguuguaaaugg

SEQ ID NO: 435842 - RNA, 19 nt, Homo sapiens
  misc_RNA (1)...(19): siRNA sense strand
ugacuggauuaagaagaaa

SEQ ID NO: 435843 - RNA, 19 nt, Homo sapiens
  misc_RNA (1)...(19): siRNA sense strand
ugagagccauuaaaacuau

SEQ ID NO: 435844 - RNA, 19 nt, Homo sapiens
  misc_RNA (1)...(19): siRNA sense strand
guucaguccugcagauaac

SEQ ID NO: 435845 - RNA, 19 nt, Homo sapiens
  misc_RNA (1)...(19): siRNA sense strand
uaaccuguuugcaauuguc

SEQ ID NO: 435846 - RNA, 19 nt, Homo sapiens
  misc_RNA (1)...(19): siRNA sense strand
gaugaccuuuagcuaucuu

SEQ ID NO: 435847 - RNA, 19 nt, Homo sapiens
  misc_RNA (1)...(19): siRNA sense strand
uuugaucaguguaaugguu

SEQ ID NO: 435848 - RNA, 19 nt, Homo sapiens
  misc_RNA (1)...(19): siRNA sense strand
gcuguggaguuuggagaga

SEQ ID NO: 435849 - RNA, 19 nt, Homo sapiens
  misc_RNA (1)...(19): siRNA sense strand
uugugucacugauaucauu

SEQ ID NO: 435850 - RNA, 19 nt, Homo sapiens
  misc_RNA (1)...(19): siRNA sense strand
agaaugcugacauguagaa

SEQ ID NO: 435851 - RNA, 19 nt, Homo sapiens
  misc_RNA (1)...(19): siRNA sense strand
ggauacauugcacuaguca

SEQ ID NO: 435852 - RNA, 19 nt, Homo sapiens
  misc_RNA (1)...(19): siRNA sense strand
uugcaauugucccauuuau

SEQ ID NO: 435853 - RNA, 19 nt, Homo sapiens
  misc_RNA (1)...(19): siRNA sense strand
aaauguuccaugugaguaa

SEQ ID NO: 435854 - RNA, 19 nt, Homo sapiens
  misc_RNA (1)...(19): siRNA sense strand
uggcugaaguggaaaauug

SEQ ID NO: 435855 - RNA, 19 nt, Homo sapiens
  misc_RNA (1)...(19): siRNA sense strand
gauagccaguuccucucau

SEQ ID NO: 435856 - RNA, 19 nt, Homo sapiens
  misc_RNA (1)...(19): siRNA sense strand
ggauuaccaccugccuuaa

SEQ ID NO: 435857 - RNA, 19 nt, Homo sapiens
  misc_RNA (1)...(19): siRNA sense strand
ucuggacauuugccaacua

SEQ ID NO: 435858 - RNA, 19 nt, Homo sapiens
  misc_RNA (1)...(19): siRNA sense strand
cagaauuuguuugaucagu

SEQ ID NO: 435859 - RNA, 19 nt, Homo sapiens
  misc_RNA (1)...(19): siRNA sense strand
uacugaacccagauguuua

SEQ ID NO: 435860 - RNA, 19 nt, Homo sapiens
  misc_RNA (1)...(19): siRNA sense strand
gaauauuggggaauggaua

SEQ ID NO: 435861 - RNA, 19 nt, Homo sapiens
  misc_RNA (1)...(19): siRNA sense strand
ccauuuauugugucacuga

SEQ ID NO: 435862 - RNA, 19 nt, Homo sapiens
  misc_RNA (1)...(19): siRNA sense strand
uuuaaccuguuugcaauug

SEQ ID NO: 435863 - RNA, 19 nt, Homo sapiens
  misc_RNA (1)...(19): siRNA sense strand
aguacugaguugugauuau

SEQ ID NO: 435864 - RNA, 19 nt, Homo sapiens
  misc_RNA (1)...(19): siRNA sense strand
cugggaugcuuugccauuu

SEQ ID NO: 435865 - RNA, 19 nt, Homo sapiens
  misc_RNA (1)...(19): siRNA sense strand
caugcaauugccaaacaua

SEQ ID NO: 435866 - RNA, 19 nt, Homo sapiens
  misc_RNA (1)...(19): siRNA sense strand
uaaacugaggcagacauuu

SEQ ID NO: 435867 - RNA, 19 nt, Homo sapiens
  misc_RNA (1)...(19): siRNA sense strand
gaccuuuagcuaucuuaug

SEQ ID NO: 435868 - RNA, 19 nt, Homo sapiens
  misc_RNA (1)...(19): siRNA sense strand
uaagaucuuuauggagaca

SEQ ID NO: 435869 - RNA, 19 nt, Homo sapiens
  misc_RNA (1)...(19): siRNA sense strand
ugaaauguuccaugugagu

SEQ ID NO: 435870 - RNA, 19 nt, Homo sapiens
  misc_RNA (1)...(19): siRNA sense strand
ugcaauugccaaacauaaa

SEQ ID NO: 435871 - RNA, 19 nt, Homo sapiens
  misc_RNA (1)...(19): siRNA sense strand
uguggaguuuggagagauu

SEQ ID NO: 435872 - RNA, 19 nt, Homo sapiens
  misc_RNA (1)...(19): siRNA sense strand
gacucucuuuaaccuguuu

SEQ ID NO: 435873 - RNA, 19 nt, Homo sapiens
  misc_RNA (1)...(19): siRNA sense strand
caguuccucucauccacuu

SEQ ID NO: 435874 - RNA, 19 nt, Homo sapiens
  misc_RNA (1)...(19): siRNA sense strand
ccaagcaaauaaaacucua

SEQ ID NO: 435875 - RNA, 19 nt, Homo sapiens
  misc_RNA (1)...(19): siRNA sense strand
uuugaacccuugacucucu

SEQ ID NO: 435876 - RNA, 19 nt, Homo sapiens
  misc_RNA (1)...(19): siRNA sense strand
ugaguugugauuauagguu

SEQ ID NO: 435877 - RNA, 19 nt, Homo sapiens
  misc_RNA (1)...(19): siRNA sense strand
acauugcacuagucaacug

SEQ ID NO: 435878 - RNA, 19 nt, Homo sapiens
  misc_RNA (1)...(19): siRNA sense strand
gaucaguguaaugguugua

SEQ ID NO: 435879 - RNA, 19 nt, Homo sapiens
  misc_RNA (1)...(19): siRNA sense strand
ugggaugcuuugccauuuc

SEQ ID NO: 435880 - RNA, 19 nt, Homo sapiens
  misc_RNA (1)...(19): siRNA sense strand
cauccuuaccaauuuaguu

SEQ ID NO: 435881 - RNA, 19 nt, Homo sapiens
  misc_RNA (1)...(19): siRNA sense strand
acuggagaauucauacuag

SEQ ID NO: 435882 - RNA, 19 nt, Homo sapiens
  misc_RNA (1)...(19): siRNA sense strand
uugacuacauccuuaccaa

SEQ ID NO: 435883 - RNA, 19 nt, Homo sapiens
  misc_RNA (1)...(19): siRNA sense strand
aauguuccaugugaguaaa

SEQ ID NO: 435884 - RNA, 19 nt, Homo sapiens
  misc_RNA (1)...(19): siRNA sense strand
guuaucgccagaauuuguu

SEQ ID NO: 435885 - RNA, 19 nt, Homo sapiens
  misc_RNA (1)...(19): siRNA sense strand
uauagcagcaauaguacug

SEQ ID NO: 435886 - RNA, 19 nt, Homo sapiens
  misc_RNA (1)...(19): siRNA sense strand
caaccugccucagcauuua

SEQ ID NO: 435887 - RNA, 19 nt, Homo sapiens
  misc_RNA (1)...(19): siRNA sense strand
gcagacuacuuuauuguuc

SEQ ID NO: 435888 - RNA, 19 nt, Homo sapiens
  misc_RNA (1)...(19): siRNA sense strand
gacacuaaccaaucauuua

SEQ ID NO: 435889 - RNA, 19 nt, Homo sapiens
  misc_RNA (1)...(19): siRNA sense strand
ggaaaguaaugucuauucu

SEQ ID NO: 435890 - RNA, 19 nt, Homo sapiens
  misc_RNA (1)...(19): siRNA sense strand
uuaaguaucugguuugcaa

SEQ ID NO: 435891 - RNA, 19 nt, Homo sapiens
  misc_RNA (1)...(19): siRNA sense strand
gcagauaaagugcagacua

SEQ ID NO: 435892 - RNA, 19 nt, Homo sapiens
  misc_RNA (1)...(19): siRNA sense strand
ucacaagucuggccauauc

SEQ ID NO: 435893 - RNA, 19 nt, Homo sapiens
  misc_RNA (1)...(19): siRNA sense strand
ggacacuaaccaaucauuu

SEQ ID NO: 435894 - RNA, 19 nt, Homo sapiens
  misc_RNA (1)...(19): siRNA sense strand
uggaugaaguggagaauug

SEQ ID NO: 435895 - RNA, 19 nt, Homo sapiens
  misc_RNA (1)...(19): siRNA sense strand
caacaugcuucuaccaagu

SEQ ID NO: 435896 - RNA, 19 nt, Homo sapiens
  misc_RNA (1)...(19): siRNA sense strand
ccaacaacauaaacaaauc

SEQ ID NO: 435897 - RNA, 19 nt, Homo sapiens
  misc_RNA (1)...(19): siRNA sense strand
ggaguugcagaguaaauaa

SEQ ID NO: 435898 - RNA, 19 nt, Homo sapiens
  misc_RNA (1)...(19): siRNA sense strand
gugguucucucuguguuua

SEQ ID NO: 435899 - RNA, 19 nt, Homo sapiens
  misc_RNA (1)...(19): siRNA sense strand
gaagaaaauuccaacaaca

SEQ ID NO: 435900 - RNA, 19 nt, Homo sapiens
  misc_RNA (1)...(19): siRNA sense strand
gcaaccugccucagcauuu

SEQ ID NO: 435901 - RNA, 19 nt, Homo sapiens
  misc_RNA (1)...(19): siRNA sense strand
cagauaaagugcagacuac

SEQ ID NO: 435902 - RNA, 19 nt, Homo sapiens
  misc_RNA (1)...(19): siRNA sense strand
aaggugauuuggaaaguaa

SEQ ID NO: 435903 - RNA, 19 nt, Homo sapiens
  misc_RNA (1)...(19): siRNA sense strand
aaaauugccuccauugauu

SEQ ID NO: 435904 - RNA, 19 nt, Homo sapiens
  misc_RNA (1)...(19): siRNA sense strand
ggagacauaucaggcgaau

SEQ ID NO: 435905 - RNA, 19 nt, Homo sapiens
  misc_RNA (1)...(19): siRNA sense strand
gaauuugaacgcugauuuc

SEQ ID NO: 435906 - RNA, 19 nt, Homo sapiens
  misc_RNA (1)...(19): siRNA sense strand
gguaaagaaaugagaauca

SEQ ID NO: 435907 - RNA, 19 nt, Homo sapiens
  misc_RNA (1)...(19): siRNA sense strand
gaauugacagggugauuuc

SEQ ID NO: 435908 - RNA, 19 nt, Homo sapiens
  misc_RNA (1)...(19): siRNA sense strand
aaaggugauuuggaaagua

SEQ ID NO: 435909 - RNA, 19 nt, Homo sapiens
  misc_RNA (1)...(19): siRNA sense strand
uaaaggugauuuggaaagu

SEQ ID NO: 435910 - RNA, 19 nt, Homo sapiens
  misc_RNA (1)...(19): siRNA sense strand
agacaugcaucucuaaagg

SEQ ID NO: 435911 - RNA, 19 nt, Homo sapiens
  misc_RNA (1)...(19): siRNA sense strand
cuuagcaguuggagaguuu

SEQ ID NO: 435912 - RNA, 19 nt, Homo sapiens
  misc_RNA (1)...(19): siRNA sense strand
ggccauauccagaauuugu

SEQ ID NO: 435913 - RNA, 19 nt, Homo sapiens
  misc_RNA (1)...(19): siRNA sense strand
ccucagcauuuacuauuuc

SEQ ID NO: 435914 - RNA, 19 nt, Homo sapiens
  misc_RNA (1)...(19): siRNA sense strand
gaaaauugccuccauugau

SEQ ID NO: 435915 - RNA, 19 nt, Homo sapiens
  misc_RNA (1)...(19): siRNA sense strand
ccucacaagucuggccaua

SEQ ID NO: 435916 - RNA, 19 nt, Homo sapiens
  misc_RNA (1)...(19): siRNA sense strand
ccucaagucauucauuuau

SEQ ID NO: 435917 - RNA, 19 nt, Homo sapiens
  misc_RNA (1)...(19): siRNA sense strand
gccucagcauuuacuauuu

SEQ ID NO: 435918 - RNA, 19 nt, Homo sapiens
  misc_RNA (1)...(19): siRNA sense strand
gacuucuucuggacacuaa

SEQ ID NO: 435919 - RNA, 19 nt, Homo sapiens
  misc_RNA (1)...(19): siRNA sense strand
cuaugccacugguaaagaa

SEQ ID NO: 435920 - RNA, 19 nt, Homo sapiens
  misc_RNA (1)...(19): siRNA sense strand
auuaagacaugcaucucua

SEQ ID NO: 435921 - RNA, 19 nt, Homo sapiens
  misc_RNA (1)...(19): siRNA sense strand
ggaaaacaaacuuaacuug

SEQ ID NO: 435922 - RNA, 19 nt, Homo sapiens
  misc_RNA (1)...(19): siRNA sense strand
uaagacaugcaucucuaaa

SEQ ID NO: 435923 - RNA, 19 nt, Homo sapiens
  misc_RNA (1)...(19): siRNA sense strand
gauuucagguuuuguguga

SEQ ID NO: 435924 - RNA, 19 nt, Homo sapiens
  misc_RNA (1)...(19): siRNA sense strand
uauuuguccuuucucauug

SEQ ID NO: 435925 - RNA, 19 nt, Homo sapiens
  misc_RNA (1)...(19): siRNA sense strand
auccagaauuugucuauug

SEQ ID NO: 435926 - RNA, 19 nt, Homo sapiens
  misc_RNA (1)...(19): siRNA sense strand
gugauuuccuggauucuac

SEQ ID NO: 435927 - RNA, 19 nt, Homo sapiens
  misc_RNA (1)...(19): siRNA sense strand
cuauuuguccuuucucauu

SEQ ID NO: 435928 - RNA, 19 nt, Homo sapiens
  misc_RNA (1)...(19): siRNA sense strand
agacauaucaggcgaaugc

SEQ ID NO: 435929 - RNA, 19 nt, Homo sapiens
  misc_RNA (1)...(19): siRNA sense strand
acaugcuucuaccaaguua

SEQ ID NO: 435930 - RNA, 19 nt, Homo sapiens
  misc_RNA (1)...(19): siRNA sense strand
acuuggaguugcagaguaa

SEQ ID NO: 435931 - RNA, 19 nt, Homo sapiens
  misc_RNA (1)...(19): siRNA sense strand
agaauuugaacgcugauuu

SEQ ID NO: 435932 - RNA, 19 nt, Homo sapiens
  misc_RNA (1)...(19): siRNA sense strand
gcuauauccagaugucuau

SEQ ID NO: 435933 - RNA, 19 nt, Homo sapiens
  misc_RNA (1)...(19): siRNA sense strand
cucuaaaggugauuuggaa

SEQ ID NO: 435934 - RNA, 19 nt, Homo sapiens
  misc_RNA (1)...(19): siRNA sense strand
gguucucucuguguuuauu

SEQ ID NO: 435935 - RNA, 19 nt, Homo sapiens
  misc_RNA (1)...(19): siRNA sense strand
ucuggacacuaaccaauca

SEQ ID NO: 435936 - RNA, 19 nt, Homo sapiens
  misc_RNA (1)...(19): siRNA sense strand
caacgcugcuccccuuuug

SEQ ID NO: 435937 - RNA, 19 nt, Homo sapiens
  misc_RNA (1)...(19): siRNA sense strand
gagaauugacagggugauu

SEQ ID NO: 435938 - RNA, 19 nt, Homo sapiens
  misc_RNA (1)...(19): siRNA sense strand
ggaugaaguggagaauuga

SEQ ID NO: 435939 - RNA, 19 nt, Homo sapiens
  misc_RNA (1)...(19): siRNA sense strand
uaauuucuuucacccacuu

SEQ ID NO: 435940 - RNA, 19 nt, Homo sapiens
  misc_RNA (1)...(19): siRNA sense strand
cagcauuuacuauuucuuc

SEQ ID NO: 435941 - RNA, 19 nt, Homo sapiens
  misc_RNA (1)...(19): siRNA sense strand
ggugcuauauccagauguc

SEQ ID NO: 435942 - RNA, 19 nt, Homo sapiens
  misc_RNA (1)...(19): siRNA sense strand
gcauucauuggauugguaa

SEQ ID NO: 435943 - RNA, 19 nt, Homo sapiens
  misc_RNA (1)...(19): siRNA sense strand
cuaccaaguuauuucucaa

SEQ ID NO: 435944 - RNA, 19 nt, Homo sapiens
  misc_RNA (1)...(19): siRNA sense strand
gcauggacugggucaagaa

SEQ ID NO: 435945 - RNA, 19 nt, Homo sapiens
  misc_RNA (1)...(19): siRNA sense strand
agaauugacagggugauuu

SEQ ID NO: 435946 - RNA, 19 nt, Homo sapiens
  misc_RNA (1)...(19): siRNA sense strand
gaguugcagaguaaauaaa

SEQ ID NO: 435947 - RNA, 19 nt, Homo sapiens
  misc_RNA (1)...(19): siRNA sense strand
ucaagucauucauuuaucc

SEQ ID NO: 435948 - RNA, 19 nt, Homo sapiens
  misc_RNA (1)...(19): siRNA sense strand
aaacucaacaugcuucuac

SEQ ID NO: 435949 - RNA, 19 nt, Homo sapiens
  misc_RNA (1)...(19): siRNA sense strand
ugcauucauuggauuggua

SEQ ID NO: 435950 - RNA, 19 nt, Homo sapiens
  misc_RNA (1)...(19): siRNA sense strand
ggggaacaauaaauuaaga

SEQ ID NO: 435951 - RNA, 19 nt, Homo sapiens
  misc_RNA (1)...(19): siRNA sense strand
ucuaccaaguuauuucuca

SEQ ID NO: 435952 - RNA, 19 nt, Homo sapiens
  misc_RNA (1)...(19): siRNA sense strand
ggaaaauugccuccauuga

SEQ ID NO: 435953 - RNA, 19 nt, Homo sapiens
  misc_RNA (1)...(19): siRNA sense strand
uccagaauuugucuauugu

SEQ ID NO: 435954 - RNA, 19 nt, Homo sapiens
  misc_RNA (1)...(19): siRNA sense strand
gauagguaauuucuuucac

SEQ ID NO: 435955 - RNA, 19 nt, Homo sapiens
  misc_RNA (1)...(19): siRNA sense strand
agugcagacuacuuuauug

SEQ ID NO: 435956 - RNA, 19 nt, Homo sapiens
  misc_RNA (1)...(19): siRNA sense strand
cagacuacuuuauuguucu

SEQ ID NO: 435957 - RNA, 19 nt, Homo sapiens
  misc_RNA (1)...(19): siRNA sense strand
uggaguugcagaguaaaua

SEQ ID NO: 435958 - RNA, 19 nt, Homo sapiens
  misc_RNA (1)...(19): siRNA sense strand
uggaaaguaaugucuauuc

SEQ ID NO: 435959 - RNA, 19 nt, Homo sapiens
  misc_RNA (1)...(19): siRNA sense strand
ccucuuuauugccuacuau

SEQ ID NO: 435960 - RNA, 19 nt, Homo sapiens
  misc_RNA (1)...(19): siRNA sense strand
gugcagacuacuuuauugu

SEQ ID NO: 435961 - RNA, 19 nt, Homo sapiens
  misc_RNA (1)...(19): siRNA sense strand
uuaagacaugcaucucuaa

SEQ ID NO: 435962 - RNA, 19 nt, Homo sapiens
  misc_RNA (1)...(19): siRNA sense strand
gcccugaaagcugucauuu

SEQ ID NO: 435963 - RNA, 19 nt, Homo sapiens
  misc_RNA (1)...(19): siRNA sense strand
ggugauuuccuggauucua

SEQ ID NO: 435964 - RNA, 19 nt, Homo sapiens
  misc_RNA (1)...(19): siRNA sense strand
gcgugguucucucuguguu

SEQ ID NO: 435965 - RNA, 19 nt, Homo sapiens
  misc_RNA (1)...(19): siRNA sense strand
gugaguccauagcucuaau

SEQ ID NO: 435966 - RNA, 19 nt, Homo sapiens
  misc_RNA (1)...(19): siRNA sense strand
ggugaguccauagcucuaa

SEQ ID NO: 435967 - RNA, 19 nt, Homo sapiens
  misc_RNA (1)...(19): siRNA sense strand
ggugcgugguucucucugu

SEQ ID NO: 435968 - RNA, 19 nt, Homo sapiens
  misc_RNA (1)...(19): siRNA sense strand
gcaaagaggaaaacaaacu

SEQ ID NO: 435969 - RNA, 19 nt, Homo sapiens
  misc_RNA (1)...(19): siRNA sense strand
guucucucuguguuuauua

SEQ ID NO: 435970 - RNA, 19 nt, Homo sapiens
  misc_RNA (1)...(19): siRNA sense strand
ccuacuauuuguccuuucu

SEQ ID NO: 435971 - RNA, 19 nt, Homo sapiens
  misc_RNA (1)...(19): siRNA sense strand
uuccagccacugagaauuu

SEQ ID NO: 435972 - RNA, 19 nt, Homo sapiens
  misc_RNA (1)...(19): siRNA sense strand
uuauuguucuuagcaguug

SEQ ID NO: 435973 - RNA, 19 nt, Homo sapiens
  misc_RNA (1)...(19): siRNA sense strand
cuaaaggugauuuggaaag

SEQ ID NO: 435974 - RNA, 19 nt, Homo sapiens
  misc_RNA (1)...(19): siRNA sense strand
ccaccuccagcuacuuuau

SEQ ID NO: 435975 - RNA, 19 nt, Homo sapiens
  misc_RNA (1)...(19): siRNA sense strand
ucauuggauugguaaacug

SEQ ID NO: 435976 - RNA, 19 nt, Homo sapiens
  misc_RNA (1)...(19): siRNA sense strand
cuuuauugccuacuauuug

SEQ ID NO: 435977 - RNA, 19 nt, Homo sapiens
  misc_RNA (1)...(19): siRNA sense strand
uuccuucuccucuuuauug

SEQ ID NO: 435978 - RNA, 19 nt, Homo sapiens
  misc_RNA (1)...(19): siRNA sense strand
gcagagaccccagcacaga

SEQ ID NO: 435979 - RNA, 19 nt, Homo sapiens
  misc_RNA (1)...(19): siRNA sense strand
ugccuacuauuuguccuuu

SEQ ID NO: 435980 - RNA, 19 nt, Homo sapiens
  misc_RNA (1)...(19): siRNA sense strand
ggaacaggauuaagaauua

SEQ ID NO: 435981 - RNA, 19 nt, Homo sapiens
  misc_RNA (1)...(19): siRNA sense strand
gcagaaacaucuccagaaa

SEQ ID NO: 435982 - RNA, 19 nt, Homo sapiens
  misc_RNA (1)...(19): siRNA sense strand
gaaccuuggucuucuuauu

SEQ ID NO: 435983 - RNA, 19 nt, Homo sapiens
  misc_RNA (1)...(19): siRNA sense strand
gaaagugcccugccgagua

SEQ ID NO: 435984 - RNA, 19 nt, Homo sapiens
  misc_RNA (1)...(19): siRNA sense strand
gaaagaaacacaacuugga

SEQ ID NO: 435985 - RNA, 19 nt, Homo sapiens
  misc_RNA (1)...(19): siRNA sense strand
aaagagagcuguccucagu

SEQ ID NO: 435986 - RNA, 19 nt, Homo sapiens
  misc_RNA (1)...(19): siRNA sense strand
gguaugggcuaaacgauga

SEQ ID NO: 435987 - RNA, 19 nt, Homo sapiens
  misc_RNA (1)...(19): siRNA sense strand
gggcugaucugggaaauau

SEQ ID NO: 435988 - RNA, 19 nt, Homo sapiens
  misc_RNA (1)...(19): siRNA sense strand
gcaacucaauuacaaagga

SEQ ID NO: 435989 - RNA, 19 nt, Homo sapiens
  misc_RNA (1)...(19): siRNA sense strand
caaagugauucugaugaua

SEQ ID NO: 435990 - RNA, 19 nt, Homo sapiens
  misc_RNA (1)...(19): siRNA sense strand
gagcaauggauuuauagua

SEQ ID NO: 435991 - RNA, 19 nt, Homo sapiens
  misc_RNA (1)...(19): siRNA sense strand
guucucauaucauggauuu

SEQ ID NO: 435992 - RNA, 19 nt, Homo sapiens
  misc_RNA (1)...(19): siRNA sense strand
aaacacaacuuggaauuuc

SEQ ID NO: 435993 - RNA, 19 nt, Homo sapiens
  misc_RNA (1)...(19): siRNA sense strand
gaaacacaacuuggaauuu

SEQ ID NO: 435994 - RNA, 19 nt, Homo sapiens
  misc_RNA (1)...(19): siRNA sense strand
gcugaucugggaaauauua

SEQ ID NO: 435995 - RNA, 19 nt, Homo sapiens
  misc_RNA (1)...(19): siRNA sense strand
gauaguuucuaaucacuuc

SEQ ID NO: 435996 - RNA, 19 nt, Homo sapiens
  misc_RNA (1)...(19): siRNA sense strand
acagugaucuacaugcuuu

SEQ ID NO: 435997 - RNA, 19 nt, Homo sapiens
  misc_RNA (1)...(19): siRNA sense strand
ccauacaaaugccuugaaa

SEQ ID NO: 435998 - RNA, 19 nt, Homo sapiens
  misc_RNA (1)...(19): siRNA sense strand
gaucugggaaauauuagua

SEQ ID NO: 435999 - RNA, 19 nt, Homo sapiens
  misc_RNA (1)...(19): siRNA sense strand
guaaacaaagugauucuga

SEQ ID NO: 436000 - RNA, 19 nt, Homo sapiens
  misc_RNA (1)...(19): siRNA sense strand
gagaguaaacaaagugauu

SEQ ID NO: 436001 - RNA, 19 nt, Homo sapiens
  misc_RNA (1)...(19): siRNA sense strand
ugagugacuuugaaacauu

SEQ ID NO: 436002 - RNA, 19 nt, Homo sapiens
  misc_RNA (1)...(19): siRNA sense strand
caacuuggaauuucaguau

SEQ ID NO: 436003 - RNA, 19 nt, Homo sapiens
  misc_RNA (1)...(19): siRNA sense strand
ggaccgauaugaaagaaac

SEQ ID NO: 436004 - RNA, 19 nt, Homo sapiens
  misc_RNA (1)...(19): siRNA sense strand
gaaguggagaguaaacaaa

SEQ ID NO: 436005 - RNA, 19 nt, Homo sapiens
  misc_RNA (1)...(19): siRNA sense strand
gagugacuuugaaacauuu

SEQ ID NO: 436006 - RNA, 19 nt, Homo sapiens
  misc_RNA (1)...(19): siRNA sense strand
gcuacaaucuucagcaucu

SEQ ID NO: 436007 - RNA, 19 nt, Homo sapiens
  misc_RNA (1)...(19): siRNA sense strand
gagcuguccucagucgaua

SEQ ID NO: 436008 - RNA, 19 nt, Homo sapiens
  misc_RNA (1)...(19): siRNA sense strand
acaaaugccuugaaaauug

SEQ ID NO: 436009 - RNA, 19 nt, Homo sapiens
  misc_RNA (1)...(19): siRNA sense strand
aaagugcccugccgaguau

SEQ ID NO: 436010 - RNA, 19 nt, Homo sapiens
  misc_RNA (1)...(19): siRNA sense strand
uauuugaaguggagaguaa

SEQ ID NO: 436011 - RNA, 19 nt, Homo sapiens
  misc_RNA (1)...(19): siRNA sense strand
gaauuugagcaauggauuu

SEQ ID NO: 436012 - RNA, 19 nt, Homo sapiens
  misc_RNA (1)...(19): siRNA sense strand
gucgauaaacuccucauua

SEQ ID NO: 436013 - RNA, 19 nt, Homo sapiens
  misc_RNA (1)...(19): siRNA sense strand
gaacacagugaucuacaug

SEQ ID NO: 436014 - RNA, 19 nt, Homo sapiens
  misc_RNA (1)...(19): siRNA sense strand
caaauucacuaugacuaug

SEQ ID NO: 436015 - RNA, 19 nt, Homo sapiens
  misc_RNA (1)...(19): siRNA sense strand
guacugaucaacugcauug

SEQ ID NO: 436016 - RNA, 19 nt, Homo sapiens
  misc_RNA (1)...(19): siRNA sense strand
ucuaggaaacgcuaaguua

SEQ ID NO: 436017 - RNA, 19 nt, Homo sapiens
  misc_RNA (1)...(19): siRNA sense strand
aagacuggcuggaccgaua

SEQ ID NO: 436018 - RNA, 19 nt, Homo sapiens
  misc_RNA (1)...(19): siRNA sense strand
gcuaguuucuuucuaugug

SEQ ID NO: 436019 - RNA, 19 nt, Homo sapiens
  misc_RNA (1)...(19): siRNA sense strand
ucaagccacuccuuucuuc

SEQ ID NO: 436020 - RNA, 19 nt, Homo sapiens
  misc_RNA (1)...(19): siRNA sense strand
cagcuaagguaugggcuaa

SEQ ID NO: 436021 - RNA, 19 nt, Homo sapiens
  misc_RNA (1)...(19): siRNA sense strand
ucuaaucacuucaaucucu

SEQ ID NO: 436022 - RNA, 19 nt, Homo sapiens
  misc_RNA (1)...(19): siRNA sense strand
ggaauuugagcaauggauu

SEQ ID NO: 436023 - RNA, 19 nt, Homo sapiens
  misc_RNA (1)...(19): siRNA sense strand
gggaaauauuaguaaguug

SEQ ID NO: 436024 - RNA, 19 nt, Homo sapiens
  misc_RNA (1)...(19): siRNA sense strand
ccacuccuuucuucugauu

SEQ ID NO: 436025 - RNA, 19 nt, Homo sapiens
  misc_RNA (1)...(19): siRNA sense strand
ggaauuucaguaugaguga

SEQ ID NO: 436026 - RNA, 19 nt, Homo sapiens
  misc_RNA (1)...(19): siRNA sense strand
acaaagugauucugaugau

SEQ ID NO: 436027 - RNA, 19 nt, Homo sapiens
  misc_RNA (1)...(19): siRNA sense strand
ugcauuaucuagccauauu

SEQ ID NO: 436028 - RNA, 19 nt, Homo sapiens
  misc_RNA (1)...(19): siRNA sense strand
gcaauggauuuauaguacu

SEQ ID NO: 436029 - RNA, 19 nt, Homo sapiens
  misc_RNA (1)...(19): siRNA sense strand
ugaucuacaugcuuuguga

SEQ ID NO: 436030 - RNA, 19 nt, Homo sapiens
  misc_RNA (1)...(19): siRNA sense strand
gcuggauaguuucuaauca

SEQ ID NO: 436031 - RNA, 19 nt, Homo sapiens
  misc_RNA (1)...(19): siRNA sense strand
cuaggaaacgcuaaguuaa

SEQ ID NO: 436032 - RNA, 19 nt, Homo sapiens
  misc_RNA (1)...(19): siRNA sense strand
ggauuuauaguacugauca

SEQ ID NO: 436033 - RNA, 19 nt, Homo sapiens
  misc_RNA (1)...(19): siRNA sense strand
ucggucaaauucacuauga

SEQ ID NO: 436034 - RNA, 19 nt, Homo sapiens
  misc_RNA (1)...(19): siRNA sense strand
auugugaucucauuccuuu

SEQ ID NO: 436035 - RNA, 19 nt, Homo sapiens
  misc_RNA (1)...(19): siRNA sense strand
agaaacaucuccagaaaau

SEQ ID NO: 436036 - RNA, 19 nt, Homo sapiens
  misc_RNA (1)...(19): siRNA sense strand
aaagaaacacaacuuggaa

SEQ ID NO: 436037 - RNA, 19 nt, Homo sapiens
  misc_RNA (1)...(19): siRNA sense strand
aggaaacgcuaaguuaaga

SEQ ID NO: 436038 - RNA, 19 nt, Homo sapiens
  misc_RNA (1)...(19): siRNA sense strand
caguaugagugacuuugaa

SEQ ID NO: 436039 - RNA, 19 nt, Homo sapiens
  misc_RNA (1)...(19): siRNA sense strand
aaacaaagugauucugaug

SEQ ID NO: 436040 - RNA, 19 nt, Homo sapiens
  misc_RNA (1)...(19): siRNA sense strand
caauggauuuauaguacug

SEQ ID NO: 436041 - RNA, 19 nt, Homo sapiens
  misc_RNA (1)...(19): siRNA sense strand
gaaacgcuaaguuaagaca

SEQ ID NO: 436042 - RNA, 19 nt, Homo sapiens
  misc_RNA (1)...(19): siRNA sense strand
gcuaggaaccuuggucuuc

SEQ ID NO: 436043 - RNA, 19 nt, Homo sapiens
  misc_RNA (1)...(19): siRNA sense strand
agaaacacaacuuggaauu

SEQ ID NO: 436044 - RNA, 19 nt, Homo sapiens
  misc_RNA (1)...(19): siRNA sense strand
uucaaucucuggcuugcua

SEQ ID NO: 436045 - RNA, 19 nt, Homo sapiens
  misc_RNA (1)...(19): siRNA sense strand
gcuaagguaugggcuaaac

SEQ ID NO: 436046 - RNA, 19 nt, Homo sapiens
  misc_RNA (1)...(19): siRNA sense strand
uggaacaggauuaagaauu

SEQ ID NO: 436047 - RNA, 19 nt, Homo sapiens
  misc_RNA (1)...(19): siRNA sense strand
ggauuucugagcuguauca

SEQ ID NO: 436048 - RNA, 19 nt, Homo sapiens
  misc_RNA (1)...(19): siRNA sense strand
gcauuaucuagccauauuu

SEQ ID NO: 436049 - RNA, 19 nt, Homo sapiens
  misc_RNA (1)...(19): siRNA sense strand
gguggcagcuaagguaugg

SEQ ID NO: 436050 - RNA, 19 nt, Homo sapiens
  misc_RNA (1)...(19): siRNA sense strand
aaccuuggucuucuuauuu

SEQ ID NO: 436051 - RNA, 19 nt, Homo sapiens
  misc_RNA (1)...(19): siRNA sense strand
agcaauggauuuauaguac

SEQ ID NO: 436052 - RNA, 19 nt, Homo sapiens
  misc_RNA (1)...(19): siRNA sense strand
acuuggaauuucaguauga

SEQ ID NO: 436053 - RNA, 19 nt, Homo sapiens
  misc_RNA (1)...(19): siRNA sense strand
uggcuggaccgauaugaaa

SEQ ID NO: 436054 - RNA, 19 nt, Homo sapiens
  misc_RNA (1)...(19): siRNA sense strand
uaaguuaagacaggccuuu

SEQ ID NO: 436055 - RNA, 19 nt, Homo sapiens
  misc_RNA (1)...(19): siRNA sense strand
caaaugccuugaaaauugu

SEQ ID NO: 436056 - RNA, 19 nt, Homo sapiens
  misc_RNA (1)...(19): siRNA sense strand
uuauaguacugaucaacug

SEQ ID NO: 436057 - RNA, 19 nt, Homo sapiens
  misc_RNA (1)...(19): siRNA sense strand
uaagguaugggcuaaacga

SEQ ID NO: 436058 - RNA, 19 nt, Homo sapiens
  misc_RNA (1)...(19): siRNA sense strand
caaaauagcgaguuucucu

SEQ ID NO: 436059 - RNA, 19 nt, Homo sapiens
  misc_RNA (1)...(19): siRNA sense strand
agaacacagugaucuacau

SEQ ID NO: 436060 - RNA, 19 nt, Homo sapiens
  misc_RNA (1)...(19): siRNA sense strand
uaucuagccauauuugugu

SEQ ID NO: 436061 - RNA, 19 nt, Homo sapiens
  misc_RNA (1)...(19): siRNA sense strand
ugaaguggagaguaaacaa

SEQ ID NO: 436062 - RNA, 19 nt, Homo sapiens
  misc_RNA (1)...(19): siRNA sense strand
gaaaaugcaacucaauuac

SEQ ID NO: 436063 - RNA, 19 nt, Homo sapiens
  misc_RNA (1)...(19): siRNA sense strand
aaauagcgaguuucucuag

SEQ ID NO: 436064 - RNA, 19 nt, Homo sapiens
  misc_RNA (1)...(19): siRNA sense strand
gauaugaaagaaacacaac

SEQ ID NO: 436065 - RNA, 19 nt, Homo sapiens
  misc_RNA (1)...(19): siRNA sense strand
gcccugcuuuucucuauuu

SEQ ID NO: 436066 - RNA, 19 nt, Homo sapiens
  misc_RNA (1)...(19): siRNA sense strand
cuaggaaccuuggucuucu

SEQ ID NO: 436067 - RNA, 19 nt, Homo sapiens
  misc_RNA (1)...(19): siRNA sense strand
uaggaaacgcuaaguuaag

SEQ ID NO: 436068 - RNA, 19 nt, Homo sapiens
  misc_RNA (1)...(19): siRNA sense strand
acacagugaucuacaugcu

SEQ ID NO: 436069 - RNA, 19 nt, Homo sapiens
  misc_RNA (1)...(19): siRNA sense strand
uaaacuccucauuaucuug

SEQ ID NO: 436070 - RNA, 19 nt, Homo sapiens
  misc_RNA (1)...(19): siRNA sense strand
caauuacaaaggacacaga

SEQ ID NO: 436071 - RNA, 19 nt, Homo sapiens
  misc_RNA (1)...(19): siRNA sense strand
uaggaaccuuggucuucuu

SEQ ID NO: 436072 - RNA, 19 nt, Homo sapiens
  misc_RNA (1)...(19): siRNA sense strand
gcuguccucagucgauaaa

SEQ ID NO: 436073 - RNA, 19 nt, Homo sapiens
  misc_RNA (1)...(19): siRNA sense strand
uaugagugacuuugaaaca

SEQ ID NO: 436074 - RNA, 19 nt, Homo sapiens
  misc_RNA (1)...(19): siRNA sense strand
ucaguaugagugacuuuga

SEQ ID NO: 436075 - RNA, 19 nt, Homo sapiens
  misc_RNA (1)...(19): siRNA sense strand
cucauuaucuuggcaaucu

SEQ ID NO: 436076 - RNA, 19 nt, Homo sapiens
  misc_RNA (1)...(19): siRNA sense strand
cauuaucuagccauauuug

SEQ ID NO: 436077 - RNA, 19 nt, Homo sapiens
  misc_RNA (1)...(19): siRNA sense strand
gcuggaccgauaugaaaga

SEQ ID NO: 436078 - RNA, 19 nt, Homo sapiens
  misc_RNA (1)...(19): siRNA sense strand
aaagugauucugaugauac

SEQ ID NO: 436079 - RNA, 19 nt, Homo sapiens
  misc_RNA (1)...(19): siRNA sense strand
ggauaguuucuaaucacuu

SEQ ID NO: 436080 - RNA, 19 nt, Homo sapiens
  misc_RNA (1)...(19): siRNA sense strand
gguaaucaaucaaguaugu

SEQ ID NO: 436081 - RNA, 19 nt, Homo sapiens
  misc_RNA (1)...(19): siRNA sense strand
ccgguaaccuaauugaaua

SEQ ID NO: 436082 - RNA, 19 nt, Homo sapiens
  misc_RNA (1)...(19): siRNA sense strand
cggcuuagcuauuucaaga

SEQ ID NO: 436083 - RNA, 19 nt, Homo sapiens
  misc_RNA (1)...(19): siRNA sense strand
gaaaacaaacugcugcuua

SEQ ID NO: 436084 - RNA, 19 nt, Homo sapiens
  misc_RNA (1)...(19): siRNA sense strand
uugaagagcagaacaaaua

SEQ ID NO: 436085 - RNA, 19 nt, Homo sapiens
  misc_RNA (1)...(19): siRNA sense strand
acagauggauuuauacaga

SEQ ID NO: 436086 - RNA, 19 nt, Homo sapiens
  misc_RNA (1)...(19): siRNA sense strand
caauugaagugcugugaga

SEQ ID NO: 436087 - RNA, 19 nt, Homo sapiens
  misc_RNA (1)...(19): siRNA sense strand
gagcagaacaaauaugguu

SEQ ID NO: 436088 - RNA, 19 nt, Homo sapiens
  misc_RNA (1)...(19): siRNA sense strand
ucugggaucucaacaugua

SEQ ID NO: 436089 - RNA, 19 nt, Homo sapiens
  misc_RNA (1)...(19): siRNA sense strand
cagaugcaaucgaauguga

SEQ ID NO: 436090 - RNA, 19 nt, Homo sapiens
  misc_RNA (1)...(19): siRNA sense strand
ggucacucauuuaucuuaa

SEQ ID NO: 436091 - RNA, 19 nt, Homo sapiens
  misc_RNA (1)...(19): siRNA sense strand
gaauggauuuauuggacuu

SEQ ID NO: 436092 - RNA, 19 nt, Homo sapiens
  misc_RNA (1)...(19): siRNA sense strand
acaaacugcugcuuauguu

SEQ ID NO: 436093 - RNA, 19 nt, Homo sapiens
  misc_RNA (1)...(19): siRNA sense strand
auacagauauucucuccaa

SEQ ID NO: 436094 - RNA, 19 nt, Homo sapiens
  misc_RNA (1)...(19): siRNA sense strand
guucuucccuucaugauag

SEQ ID NO: 436095 - RNA, 19 nt, Homo sapiens
  misc_RNA (1)...(19): siRNA sense strand
ggauuuauuggacuuguaa

SEQ ID NO: 436096 - RNA, 19 nt, Homo sapiens
  misc_RNA (1)...(19): siRNA sense strand
aggcauggccauagaaaua

SEQ ID NO: 436097 - RNA, 19 nt, Homo sapiens
  misc_RNA (1)...(19): siRNA sense strand
ggagucauuuucuucuuua

SEQ ID NO: 436098 - RNA, 19 nt, Homo sapiens
  misc_RNA (1)...(19): siRNA sense strand
acgauuggcuuuauucuca

SEQ ID NO: 436099 - RNA, 19 nt, Homo sapiens
  misc_RNA (1)...(19): siRNA sense strand
gcuuagcuauuucaagaau

SEQ ID NO: 436100 - RNA, 19 nt, Homo sapiens
  misc_RNA (1)...(19): siRNA sense strand
gaaugugacaggauugaga

SEQ ID NO: 436101 - RNA, 19 nt, Homo sapiens
  misc_RNA (1)...(19): siRNA sense strand
gaagagcagaacaaauaug

SEQ ID NO: 436102 - RNA, 19 nt, Homo sapiens
  misc_RNA (1)...(19): siRNA sense strand
ugaggguacugcagcaauu

SEQ ID NO: 436103 - RNA, 19 nt, Homo sapiens
  misc_RNA (1)...(19): siRNA sense strand
uaucuacgauuggcuuuau

SEQ ID NO: 436104 - RNA, 19 nt, Homo sapiens
  misc_RNA (1)...(19): siRNA sense strand
acaggcagaugcaaucgaa

SEQ ID NO: 436105 - RNA, 19 nt, Homo sapiens
  misc_RNA (1)...(19): siRNA sense strand
gagagacuccaacacagaa

SEQ ID NO: 436106 - RNA, 19 nt, Homo sapiens
  misc_RNA (1)...(19): siRNA sense strand
ggaaacagcaagcuaaagc

SEQ ID NO: 436107 - RNA, 19 nt, Homo sapiens
  misc_RNA (1)...(19): siRNA sense strand
ggacuuguaaacugcauug

SEQ ID NO: 436108 - RNA, 19 nt, Homo sapiens
  misc_RNA (1)...(19): siRNA sense strand
cugcuuauguuuggaauga

SEQ ID NO: 436109 - RNA, 19 nt, Homo sapiens
  misc_RNA (1)...(19): siRNA sense strand
ucaaucaaguaugugguuu

SEQ ID NO: 436110 - RNA, 19 nt, Homo sapiens
  misc_RNA (1)...(19): siRNA sense strand
cuaggaaacagcaagcuaa

SEQ ID NO: 436111 - RNA, 19 nt, Homo sapiens
  misc_RNA (1)...(19): siRNA sense strand
gugaaggcaaugaaaguuu

SEQ ID NO: 436112 - RNA, 19 nt, Homo sapiens
  misc_RNA (1)...(19): siRNA sense strand
uccugaagauagcaaauuu

SEQ ID NO: 436113 - RNA, 19 nt, Homo sapiens
  misc_RNA (1)...(19): siRNA sense strand
uugcauacauugcgaagau

SEQ ID NO: 436114 - RNA, 19 nt, Homo sapiens
  misc_RNA (1)...(19): siRNA sense strand
caucauccucuuuaucuug

SEQ ID NO: 436115 - RNA, 19 nt, Homo sapiens
  misc_RNA (1)...(19): siRNA sense strand
aaacgaagaaugacacagu

SEQ ID NO: 436116 - RNA, 19 nt, Homo sapiens
  misc_RNA (1)...(19): siRNA sense strand
gggucacucauuuaucuua

SEQ ID NO: 436117 - RNA, 19 nt, Homo sapiens
  misc_RNA (1)...(19): siRNA sense strand
gcauggccauagaaauauc

SEQ ID NO: 436118 - RNA, 19 nt, Homo sapiens
  misc_RNA (1)...(19): siRNA sense strand
gccucagcaucuucuauuu

SEQ ID NO: 436119 - RNA, 19 nt, Homo sapiens
  misc_RNA (1)...(19): siRNA sense strand
aaaacaaacugcugcuuau

SEQ ID NO: 436120 - RNA, 19 nt, Homo sapiens
  misc_RNA (1)...(19): siRNA sense strand
cagauggauuuauacagau

SEQ ID NO: 436121 - RNA, 19 nt, Homo sapiens
  misc_RNA (1)...(19): siRNA sense strand
gaaacagcaagcuaaagca

SEQ ID NO: 436122 - RNA, 19 nt, Homo sapiens
  misc_RNA (1)...(19): siRNA sense strand
auauuucucugguugaaga

SEQ ID NO: 436123 - RNA, 19 nt, Homo sapiens
  misc_RNA (1)...(19): siRNA sense strand
gacaaccacagccaucuau

SEQ ID NO: 436124 - RNA, 19 nt, Homo sapiens
  misc_RNA (1)...(19): siRNA sense strand
ggccauagaaauaucaugu

SEQ ID NO: 436125 - RNA, 19 nt, Homo sapiens
  misc_RNA (1)...(19): siRNA sense strand
gcauugacugugccaagaa

SEQ ID NO: 436126 - RNA, 19 nt, Homo sapiens
  misc_RNA (1)...(19): siRNA sense strand
ugaaggcaaugaaaguuuu

SEQ ID NO: 436127 - RNA, 19 nt, Homo sapiens
  misc_RNA (1)...(19): siRNA sense strand
agucugggaucucaacaug

SEQ ID NO: 436128 - RNA, 19 nt, Homo sapiens
  misc_RNA (1)...(19): siRNA sense strand
gacacagucugggaucuca

SEQ ID NO: 436129 - RNA, 19 nt, Homo sapiens
  misc_RNA (1)...(19): siRNA sense strand
uuauuggacuuguaaacug

SEQ ID NO: 436130 - RNA, 19 nt, Homo sapiens
  misc_RNA (1)...(19): siRNA sense strand
cacuaucccuaauuacaug

SEQ ID NO: 436131 - RNA, 19 nt, Homo sapiens
  misc_RNA (1)...(19): siRNA sense strand
gggagucauuuucuucuuu

SEQ ID NO: 436132 - RNA, 19 nt, Homo sapiens
  misc_RNA (1)...(19): siRNA sense strand
uuaaucauuucccuuugga

SEQ ID NO: 436133 - RNA, 19 nt, Homo sapiens
  misc_RNA (1)...(19): siRNA sense strand
aaacagcaagcuaaagcaa

SEQ ID NO: 436134 - RNA, 19 nt, Homo sapiens
  misc_RNA (1)...(19): siRNA sense strand
gcuuauguuuggaaugaca

SEQ ID NO: 436135 - RNA, 19 nt, Homo sapiens
  misc_RNA (1)...(19): siRNA sense strand
ugagagacuccaacacaga

SEQ ID NO: 436136 - RNA, 19 nt, Homo sapiens
  misc_RNA (1)...(19): siRNA sense strand
guuagugagucaguguuug

SEQ ID NO: 436137 - RNA, 19 nt, Homo sapiens
  misc_RNA (1)...(19): siRNA sense strand
ugacaaccacagccaucua

SEQ ID NO: 436138 - RNA, 19 nt, Homo sapiens
  misc_RNA (1)...(19): siRNA sense strand
uuauaggcauggccauaga

SEQ ID NO: 436139 - RNA, 19 nt, Homo sapiens
  misc_RNA (1)...(19): siRNA sense strand
acagauauucucuccaaau

SEQ ID NO: 436140 - RNA, 19 nt, Homo sapiens
  misc_RNA (1)...(19): siRNA sense strand
ugaagagcagaacaaauau

SEQ ID NO: 436141 - RNA, 19 nt, Homo sapiens
  misc_RNA (1)...(19): siRNA sense strand
ccaccagccucagcaucuu

SEQ ID NO: 436142 - RNA, 19 nt, Homo sapiens
  misc_RNA (1)...(19): siRNA sense strand
cauccucuuuaucuuguau

SEQ ID NO: 436143 - RNA, 19 nt, Homo sapiens
  misc_RNA (1)...(19): siRNA sense strand
uggauuuauuggacuugua

SEQ ID NO: 436144 - RNA, 19 nt, Homo sapiens
  misc_RNA (1)...(19): siRNA sense strand
gggaucucaacauguauaa

SEQ ID NO: 436145 - RNA, 19 nt, Homo sapiens
  misc_RNA (1)...(19): siRNA sense strand
gcauacauugcgaagauuc

SEQ ID NO: 436146 - RNA, 19 nt, Homo sapiens
  misc_RNA (1)...(19): siRNA sense strand
uaggaaacagcaagcuaaa

SEQ ID NO: 436147 - RNA, 19 nt, Homo sapiens
  misc_RNA (1)...(19): siRNA sense strand
auauauaugccuccgguaa

SEQ ID NO: 436148 - RNA, 19 nt, Homo sapiens
  misc_RNA (1)...(19): siRNA sense strand
cauugacugugccaagaau

SEQ ID NO: 436149 - RNA, 19 nt, Homo sapiens
  misc_RNA (1)...(19): siRNA sense strand
cuuguaaacugcauugacu

SEQ ID NO: 436150 - RNA, 19 nt, Homo sapiens
  misc_RNA (1)...(19): siRNA sense strand
ggauugagagacuccaaca

SEQ ID NO: 436151 - RNA, 19 nt, Homo sapiens
  misc_RNA (1)...(19): siRNA sense strand
acauauuucucugguugaa

SEQ ID NO: 436152 - RNA, 19 nt, Homo sapiens
  misc_RNA (1)...(19): siRNA sense strand
aagcucaugugaaggcaau

SEQ ID NO: 436153 - RNA, 19 nt, Homo sapiens
  misc_RNA (1)...(19): siRNA sense strand
gguucuucccuucaugaua

SEQ ID NO: 436154 - RNA, 19 nt, Homo sapiens
  misc_RNA (1)...(19): siRNA sense strand
guaguuagugagucagugu

SEQ ID NO: 436155 - RNA, 19 nt, Homo sapiens
  misc_RNA (1)...(19): siRNA sense strand
caaucaaguaugugguuug

SEQ ID NO: 436156 - RNA, 19 nt, Homo sapiens
  misc_RNA (1)...(19): siRNA sense strand
guacugcagcaauugaagu

SEQ ID NO: 436157 - RNA, 19 nt, Homo sapiens
  misc_RNA (1)...(19): siRNA sense strand
aaacaaacugcugcuuaug

SEQ ID NO: 436158 - RNA, 19 nt, Homo sapiens
  misc_RNA (1)...(19): siRNA sense strand
ggcauggccauagaaauau

SEQ ID NO: 436159 - RNA, 19 nt, Homo sapiens
  misc_RNA (1)...(19): siRNA sense strand
gguugaagagcagaacaaa

SEQ ID NO: 436160 - RNA, 19 nt, Homo sapiens
  misc_RNA (1)...(19): siRNA sense strand
gaggguacugcagcaauug

SEQ ID NO: 436161 - RNA, 19 nt, Homo sapiens
  misc_RNA (1)...(19): siRNA sense strand
gccauagaaauaucauguu

SEQ ID NO: 436162 - RNA, 19 nt, Homo sapiens
  misc_RNA (1)...(19): siRNA sense strand
ucauuucccuuuggagaca

SEQ ID NO: 436163 - RNA, 19 nt, Homo sapiens
  misc_RNA (1)...(19): siRNA sense strand
cucaccggcuuagcuauuu

SEQ ID NO: 436164 - RNA, 19 nt, Homo sapiens
  misc_RNA (1)...(19): siRNA sense strand
ucuuucaucauccucuuua

SEQ ID NO: 436165 - RNA, 19 nt, Homo sapiens
  misc_RNA (1)...(19): siRNA sense strand
uaucuuucaucauccucuu

SEQ ID NO: 436166 - RNA, 19 nt, Homo sapiens
  misc_RNA (1)...(19): siRNA sense strand
gugacaggauugagagacu

SEQ ID NO: 436167 - RNA, 19 nt, Homo sapiens
  misc_RNA (1)...(19): siRNA sense strand
gaugcaaucgaaugugaca

SEQ ID NO: 436168 - RNA, 19 nt, Homo sapiens
  misc_RNA (1)...(19): siRNA sense strand
ugccuccgguaaccuaauu

SEQ ID NO: 436169 - RNA, 19 nt, Homo sapiens
  misc_RNA (1)...(19): siRNA sense strand
gcagaugcaaucgaaugug

SEQ ID NO: 436170 - RNA, 19 nt, Homo sapiens
  misc_RNA (1)...(19): siRNA sense strand
gcuaaaucugggagucauu

SEQ ID NO: 436171 - RNA, 19 nt, Homo sapiens
  misc_RNA (1)...(19): siRNA sense strand
uacacuaucccuaauuaca

SEQ ID NO: 436172 - RNA, 19 nt, Homo sapiens
  misc_RNA (1)...(19): siRNA sense strand
aacaaacugcugcuuaugu

SEQ ID NO: 436173 - RNA, 19 nt, Homo sapiens
  misc_RNA (1)...(19): siRNA sense strand
ucaucauccucuuuaucuu

SEQ ID NO: 436174 - RNA, 19 nt, Homo sapiens
  misc_RNA (1)...(19): siRNA sense strand
acacuaucccuaauuacau

SEQ ID NO: 436175 - RNA, 19 nt, Homo sapiens
  misc_RNA (1)...(19): siRNA sense strand
ccucagcaucuucuauuuc

SEQ ID NO: 436176 - RNA, 19 nt, Homo sapiens
  misc_RNA (1)...(19): siRNA sense strand
ugggaucucaacauguaua

SEQ ID NO: 436177 - RNA, 19 nt, Homo sapiens
  misc_RNA (1)...(19): siRNA sense strand
gaauuagccugguuugguu

SEQ ID NO: 436178 - RNA, 19 nt, Homo sapiens
  misc_RNA (1)...(19): siRNA sense strand
gggaauggcuuauccuuca

SEQ ID NO: 436179 - RNA, 19 nt, Homo sapiens
  misc_RNA (1)...(19): siRNA sense strand
gagcauauuuacauucguu

SEQ ID NO: 436180 - RNA, 19 nt, Homo sapiens
  misc_RNA (1)...(19): siRNA sense strand
acuaauaucuggacaguga

SEQ ID NO: 436181 - RNA, 19 nt, Homo sapiens
  misc_RNA (1)...(19): siRNA sense strand
ugagguacauguucaaaga

SEQ ID NO: 436182 - RNA, 19 nt, Homo sapiens
  misc_RNA (1)...(19): siRNA sense strand
ggaaacaucgcaagaagau

SEQ ID NO: 436183 - RNA, 19 nt, Homo sapiens
  misc_RNA (1)...(19): siRNA sense strand
ucacucauguguucugauu

SEQ ID NO: 436184 - RNA, 19 nt, Homo sapiens
  misc_RNA (1)...(19): siRNA sense strand
cuacaggccucgguacuuu

SEQ ID NO: 436185 - RNA, 19 nt, Homo sapiens
  misc_RNA (1)...(19): siRNA sense strand
gcagcacacugucaaaaua

SEQ ID NO: 436186 - RNA, 19 nt, Homo sapiens
  misc_RNA (1)...(19): siRNA sense strand
gcacugauaaacauccaua

SEQ ID NO: 436187 - RNA, 19 nt, Homo sapiens
  misc_RNA (1)...(19): siRNA sense strand
ugacuucggucuucuuguu

SEQ ID NO: 436188 - RNA, 19 nt, Homo sapiens
  misc_RNA (1)...(19): siRNA sense strand
uuggcaaucucucgaauua

SEQ ID NO: 436189 - RNA, 19 nt, Homo sapiens
  misc_RNA (1)...(19): siRNA sense strand
gcccucaggucacaaagaa

SEQ ID NO: 436190 - RNA, 19 nt, Homo sapiens
  misc_RNA (1)...(19): siRNA sense strand
gcaguucugauucaaguaa

SEQ ID NO: 436191 - RNA, 19 nt, Homo sapiens
  misc_RNA (1)...(19): siRNA sense strand
gaaacaagaagcugagaca

SEQ ID NO: 436192 - RNA, 19 nt, Homo sapiens
  misc_RNA (1)...(19): siRNA sense strand
ugugaucacuuucuuccua

SEQ ID NO: 436193 - RNA, 19 nt, Homo sapiens
  misc_RNA (1)...(19): siRNA sense strand
ggauacagaagaaacaaga

SEQ ID NO: 436194 - RNA, 19 nt, Homo sapiens
  misc_RNA (1)...(19): siRNA sense strand
ccauauaaaugccaguauc

SEQ ID NO: 436195 - RNA, 19 nt, Homo sapiens
  misc_RNA (1)...(19): siRNA sense strand
gcacuggugaacuguauug

SEQ ID NO: 436196 - RNA, 19 nt, Homo sapiens
  misc_RNA (1)...(19): siRNA sense strand
uagccugguuugguuaaua

SEQ ID NO: 436197 - RNA, 19 nt, Homo sapiens
  misc_RNA (1)...(19): siRNA sense strand
ucauagcacuggugaacug

SEQ ID NO: 436198 - RNA, 19 nt, Homo sapiens
  misc_RNA (1)...(19): siRNA sense strand
guggaaacaucgcaagaag

SEQ ID NO: 436199 - RNA, 19 nt, Homo sapiens
  misc_RNA (1)...(19): siRNA sense strand
uuuagugucugguuagcua

SEQ ID NO: 436200 - RNA, 19 nt, Homo sapiens
  misc_RNA (1)...(19): siRNA sense strand
uagcacuggugaacuguau

SEQ ID NO: 436201 - RNA, 19 nt, Homo sapiens
  misc_RNA (1)...(19): siRNA sense strand
ucugaaagguuggaggaaa

SEQ ID NO: 436202 - RNA, 19 nt, Homo sapiens
  misc_RNA (1)...(19): siRNA sense strand
uuucauacccuuuacuuug

SEQ ID NO: 436203 - RNA, 19 nt, Homo sapiens
  misc_RNA (1)...(19): siRNA sense strand
ggcaaucucucgaauuagc

SEQ ID NO: 436204 - RNA, 19 nt, Homo sapiens
  misc_RNA (1)...(19): siRNA sense strand
ccucaggucacaaagaauu

SEQ ID NO: 436205 - RNA, 19 nt, Homo sapiens
  misc_RNA (1)...(19): siRNA sense strand
aaccagcacuguguucauu

SEQ ID NO: 436206 - RNA, 19 nt, Homo sapiens
  misc_RNA (1)...(19): siRNA sense strand
ggaauggcuuauccuucau

SEQ ID NO: 436207 - RNA, 19 nt, Homo sapiens
  misc_RNA (1)...(19): siRNA sense strand
cgaauuagccugguuuggu

SEQ ID NO: 436208 - RNA, 19 nt, Homo sapiens
  misc_RNA (1)...(19): siRNA sense strand
cagaaugcuuacuaauauc

SEQ ID NO: 436209 - RNA, 19 nt, Homo sapiens
  misc_RNA (1)...(19): siRNA sense strand
cagcuuuauuugccacuga

SEQ ID NO: 436210 - RNA, 19 nt, Homo sapiens
  misc_RNA (1)...(19): siRNA sense strand
gcuggugugugucuguguu

SEQ ID NO: 436211 - RNA, 19 nt, Homo sapiens
  misc_RNA (1)...(19): siRNA sense strand
uggcuuauccuucauguca

SEQ ID NO: 436212 - RNA, 19 nt, Homo sapiens
  misc_RNA (1)...(19): siRNA sense strand
guauuaaccagcacugugu

SEQ ID NO: 436213 - RNA, 19 nt, Homo sapiens
  misc_RNA (1)...(19): siRNA sense strand
cauauaaaugccaguauca

SEQ ID NO: 436214 - RNA, 19 nt, Homo sapiens
  misc_RNA (1)...(19): siRNA sense strand
gacuugcaguucugauuca

SEQ ID NO: 436215 - RNA, 19 nt, Homo sapiens
  misc_RNA (1)...(19): siRNA sense strand
uuacuaauaucuggacagu

SEQ ID NO: 436216 - RNA, 19 nt, Homo sapiens
  misc_RNA (1)...(19): siRNA sense strand
uaaaugccaguaucaaugg

SEQ ID NO: 436217 - RNA, 19 nt, Homo sapiens
  misc_RNA (1)...(19): siRNA sense strand
auaaaugccaguaucaaug

SEQ ID NO: 436218 - RNA, 19 nt, Homo sapiens
  misc_RNA (1)...(19): siRNA sense strand
ucaggucacaaagaauuua

SEQ ID NO: 436219 - RNA, 19 nt, Homo sapiens
  misc_RNA (1)...(19): siRNA sense strand
uggcugagguacauguuca

SEQ ID NO: 436220 - RNA, 19 nt, Homo sapiens
  misc_RNA (1)...(19): siRNA sense strand
ucacuuucuuccuacucua

SEQ ID NO: 436221 - RNA, 19 nt, Homo sapiens
  misc_RNA (1)...(19): siRNA sense strand
gaagcuggugugugucugu

SEQ ID NO: 436222 - RNA, 19 nt, Homo sapiens
  misc_RNA (1)...(19): siRNA sense strand
aucaauggauacagaagaa

SEQ ID NO: 436223 - RNA, 19 nt, Homo sapiens
  misc_RNA (1)...(19): siRNA sense strand
ggagcccucaggucacaaa

SEQ ID NO: 436224 - RNA, 19 nt, Homo sapiens
  misc_RNA (1)...(19): siRNA sense strand
gaauggcuuauccuucaug

SEQ ID NO: 436225 - RNA, 19 nt, Homo sapiens
  misc_RNA (1)...(19): siRNA sense strand
caauguuucuucuccucau

SEQ ID NO: 436226 - RNA, 19 nt, Homo sapiens
  misc_RNA (1)...(19): siRNA sense strand
uucggaagcuggugugugu

SEQ ID NO: 436227 - RNA, 19 nt, Homo sapiens
  misc_RNA (1)...(19): siRNA sense strand
acucauguguucugauucu

SEQ ID NO: 436228 - RNA, 19 nt, Homo sapiens
  misc_RNA (1)...(19): siRNA sense strand
uucauacccuuuacuuugu

SEQ ID NO: 436229 - RNA, 19 nt, Homo sapiens
  misc_RNA (1)...(19): siRNA sense strand
uguucagaaugcuuacuaa

SEQ ID NO: 436230 - RNA, 19 nt, Homo sapiens
  misc_RNA (1)...(19): siRNA sense strand
cuccucaucuucuccaugu

SEQ ID NO: 436231 - RNA, 19 nt, Homo sapiens
  misc_RNA (1)...(19): siRNA sense strand
ggagacgccagcaccaaag

SEQ ID NO: 436232 - RNA, 19 nt, Homo sapiens
  misc_RNA (1)...(19): siRNA sense strand
ggucaagggaagaaagauc

SEQ ID NO: 436233 - RNA, 19 nt, Homo sapiens
  misc_RNA (1)...(19): siRNA sense strand
ccacagaggaguuaaaagu

SEQ ID NO: 436234 - RNA, 19 nt, Homo sapiens
  misc_RNA (1)...(19): siRNA sense strand
cuggugaacuguauugacu

SEQ ID NO: 436235 - RNA, 19 nt, Homo sapiens
  misc_RNA (1)...(19): siRNA sense strand
gcuacaggccucgguacuu

SEQ ID NO: 436236 - RNA, 19 nt, Homo sapiens
  misc_RNA (1)...(19): siRNA sense strand
aagagcauauuuacauucg

SEQ ID NO: 436237 - RNA, 19 nt, Homo sapiens
  misc_RNA (1)...(19): siRNA sense strand
ccagcacuguguucauuuu

SEQ ID NO: 436238 - RNA, 19 nt, Homo sapiens
  misc_RNA (1)...(19): siRNA sense strand
uugcaguucugauucaagu

SEQ ID NO: 436239 - RNA, 19 nt, Homo sapiens
  misc_RNA (1)...(19): siRNA sense strand
guucagaaugcuuacuaau

SEQ ID NO: 436240 - RNA, 19 nt, Homo sapiens
  misc_RNA (1)...(19): siRNA sense strand
caaagcccacagaggaguu

SEQ ID NO: 436241 - RNA, 19 nt, Homo sapiens
  misc_RNA (1)...(19): siRNA sense strand
acacgauuuuccagucuua

SEQ ID NO: 436242 - RNA, 19 nt, Homo sapiens
  misc_RNA (1)...(19): siRNA sense strand
gaugcagcacacugucaaa

SEQ ID NO: 436243 - RNA, 19 nt, Homo sapiens
  misc_RNA (1)...(19): siRNA sense strand
agguacauguucaaagaug

SEQ ID NO: 436244 - RNA, 19 nt, Homo sapiens
  misc_RNA (1)...(19): siRNA sense strand
agccugguuugguuaauau

SEQ ID NO: 436245 - RNA, 19 nt, Homo sapiens
  misc_RNA (1)...(19): siRNA sense strand
cggagacgccagcaccaaa

SEQ ID NO: 436246 - RNA, 19 nt, Homo sapiens
  misc_RNA (1)...(19): siRNA sense strand
gacuucggucuucuuguuu

SEQ ID NO: 436247 - RNA, 19 nt, Homo sapiens
  misc_RNA (1)...(19): siRNA sense strand
ggucacaaagaauuuagag

SEQ ID NO: 436248 - RNA, 19 nt, Homo sapiens
  misc_RNA (1)...(19): siRNA sense strand
gcugagguacauguucaaa

SEQ ID NO: 436249 - RNA, 19 nt, Homo sapiens
  misc_RNA (1)...(19): siRNA sense strand
agaagaugcagcacacugu

SEQ ID NO: 436250 - RNA, 19 nt, Homo sapiens
  misc_RNA (1)...(19): siRNA sense strand
ccucacugcuuuggcaauc

SEQ ID NO: 436251 - RNA, 19 nt, Homo sapiens
  misc_RNA (1)...(19): siRNA sense strand
gcauggaacccugggauua

SEQ ID NO: 436252 - RNA, 19 nt, Homo sapiens
  misc_RNA (1)...(19): siRNA sense strand
ggagaucgaacacgucaug

SEQ ID NO: 436253 - RNA, 19 nt, Homo sapiens
  misc_RNA (1)...(19): siRNA sense strand
gaucgaacacgucauguac

SEQ ID NO: 436254 - RNA, 19 nt, Homo sapiens
  misc_RNA (1)...(19): siRNA sense strand
gaggagcccaugcugaaug

SEQ ID NO: 436255 - RNA, 19 nt, Homo sapiens
  misc_RNA (1)...(19): siRNA sense strand
ccgaggagcccaugcugaa

SEQ ID NO: 436256 - RNA, 19 nt, Homo sapiens
  misc_RNA (1)...(19): siRNA sense strand
ggccaugauuaucgcagaa

SEQ ID NO: 436257 - RNA, 19 nt, Homo sapiens
  misc_RNA (1)...(19): siRNA sense strand
gcagaggauacgcauggaa

SEQ ID NO: 436258 - RNA, 19 nt, Homo sapiens
  misc_RNA (1)...(19): siRNA sense strand
uaucgcagaacgacagaaa

SEQ ID NO: 436259 - RNA, 19 nt, Homo sapiens
  misc_RNA (1)...(19): siRNA sense strand
aaacaggaagacaaaggaa

SEQ ID NO: 436260 - RNA, 19 nt, Homo sapiens
  misc_RNA (1)...(19): siRNA sense strand
ucgaacacgucauguacca

SEQ ID NO: 436261 - RNA, 19 nt, Homo sapiens
  misc_RNA (1)...(19): siRNA sense strand
cuacacggcgcagaacuug

SEQ ID NO: 436262 - RNA, 19 nt, Homo sapiens
  misc_RNA (1)...(19): siRNA sense strand
gggauuacccugcaaaaca

SEQ ID NO: 436263 - RNA, 19 nt, Homo sapiens
  misc_RNA (1)...(19): siRNA sense strand
acacggcgcagaacuugga

SEQ ID NO: 436264 - RNA, 19 nt, Homo sapiens
  misc_RNA (1)...(19): siRNA sense strand
agaucgaacacgucaugua

SEQ ID NO: 436265 - RNA, 19 nt, Homo sapiens
  misc_RNA (1)...(19): siRNA sense strand
gcaagucgcugagccauug

SEQ ID NO: 436266 - RNA, 19 nt, Homo sapiens
  misc_RNA (1)...(19): siRNA sense strand
gcaaggcucgcgggaauga

SEQ ID NO: 436267 - RNA, 19 nt, Homo sapiens
  misc_RNA (1)...(19): siRNA sense strand
caacaucaaacgcaagaac

SEQ ID NO: 436268 - RNA, 19 nt, Homo sapiens
  misc_RNA (1)...(19): siRNA sense strand
gaguaucagccgagcaaca

SEQ ID NO: 436269 - RNA, 19 nt, Homo sapiens
  misc_RNA (1)...(19): siRNA sense strand
gcaggaagcuggaauugau

SEQ ID NO: 436270 - RNA, 19 nt, Homo sapiens
  misc_RNA (1)...(19): siRNA sense strand
ggaccuaugccuucuauaa

SEQ ID NO: 436271 - RNA, 19 nt, Homo sapiens
  misc_RNA (1)...(19): siRNA sense strand
gcacauggacuuucuguau

SEQ ID NO: 436272 - RNA, 19 nt, Homo sapiens
  misc_RNA (1)...(19): siRNA sense strand
ggaaggcauugucagauga

SEQ ID NO: 436273 - RNA, 19 nt, Homo sapiens
  misc_RNA (1)...(19): siRNA sense strand
caacaagagugcaaacauc

SEQ ID NO: 436274 - RNA, 19 nt, Homo sapiens
  misc_RNA (1)...(19): siRNA sense strand
acauggacuuucuguauua

SEQ ID NO: 436275 - RNA, 19 nt, Homo sapiens
  misc_RNA (1)...(19): siRNA sense strand
gugcaaacaucaugcuuga

SEQ ID NO: 436276 - RNA, 19 nt, Homo sapiens
  misc_RNA (1)...(19): siRNA sense strand
gcugacaccuucauguuug

SEQ ID NO: 436277 - RNA, 19 nt, Homo sapiens
  misc_RNA (1)...(19): siRNA sense strand
gaaaugcaucuucagcuuu

SEQ ID NO: 436278 - RNA, 19 nt, Homo sapiens
  misc_RNA (1)...(19): siRNA sense strand
uguauuaccucucccauga

SEQ ID NO: 436279 - RNA, 19 nt, Homo sapiens
  misc_RNA (1)...(19): siRNA sense strand
ggagaggcccagugaauau

SEQ ID NO: 436280 - RNA, 19 nt, Homo sapiens
  misc_RNA (1)...(19): siRNA sense strand
gggaaggcauugucagaug

SEQ ID NO: 436281 - RNA, 19 nt, Homo sapiens
  misc_RNA (1)...(19): siRNA sense strand
gcaaacaucaugcuugaca

SEQ ID NO: 436282 - RNA, 19 nt, Homo sapiens
  misc_RNA (1)...(19): siRNA sense strand
ggacauuguucucccagau

SEQ ID NO: 436283 - RNA, 19 nt, Homo sapiens
  misc_RNA (1)...(19): siRNA sense strand
ggagcucagugcccuugua

SEQ ID NO: 436284 - RNA, 19 nt, Homo sapiens
  misc_RNA (1)...(19): siRNA sense strand
gagcacaucagccucauga

SEQ ID NO: 436285 - RNA, 19 nt, Homo sapiens
  misc_RNA (1)...(19): siRNA sense strand
gagcagaggcugacaccuu

SEQ ID NO: 436286 - RNA, 19 nt, Homo sapiens
  misc_RNA (1)...(19): siRNA sense strand
gaauguaggcuugcaguga

SEQ ID NO: 436287 - RNA, 19 nt, Homo sapiens
  misc_RNA (1)...(19): siRNA sense strand
ggaccgcgauccuaaagag

SEQ ID NO: 436288 - RNA, 19 nt, Homo sapiens
  misc_RNA (1)...(19): siRNA sense strand
ucagugcccuuguagagaa

SEQ ID NO: 436289 - RNA, 19 nt, Homo sapiens
  misc_RNA (1)...(19): siRNA sense strand
gaaggagagccugagguua

SEQ ID NO: 436290 - RNA, 19 nt, Homo sapiens
  misc_RNA (1)...(19): siRNA sense strand
cacauggacuuucuguauu

SEQ ID NO: 436291 - RNA, 19 nt, Homo sapiens
  misc_RNA (1)...(19): siRNA sense strand
agaaaugcaucuucagcuu

SEQ ID NO: 436292 - RNA, 19 nt, Homo sapiens
  misc_RNA (1)...(19): siRNA sense strand
aaaugcaucuucagcuuug

SEQ ID NO: 436293 - RNA, 19 nt, Homo sapiens
  misc_RNA (1)...(19): siRNA sense strand
gugaauauauugccaccau

SEQ ID NO: 436294 - RNA, 19 nt, Homo sapiens
  misc_RNA (1)...(19): siRNA sense strand
gagaggcccagugaauaua

SEQ ID NO: 436295 - RNA, 19 nt, Homo sapiens
  misc_RNA (1)...(19): siRNA sense strand
ccacucaggguauugauga

SEQ ID NO: 436296 - RNA, 19 nt, Homo sapiens
  misc_RNA (1)...(19): siRNA sense strand
ucaacauccugaaguccua

SEQ ID NO: 436297 - RNA, 19 nt, Homo sapiens
  misc_RNA (1)...(19): siRNA sense strand
uuaccugccucaucgauau

SEQ ID NO: 436298 - RNA, 19 nt, Homo sapiens
  misc_RNA (1)...(19): siRNA sense strand
ccauugcacccaaggauaa

SEQ ID NO: 436299 - RNA, 19 nt, Homo sapiens
  misc_RNA (1)...(19): siRNA sense strand
gagaaaagaagccagcaua

SEQ ID NO: 436300 - RNA, 19 nt, Homo sapiens
  misc_RNA (1)...(19): siRNA sense strand
ucccagggcuuuacgguau

SEQ ID NO: 436301 - RNA, 19 nt, Homo sapiens
  misc_RNA (1)...(19): siRNA sense strand
ggauuucauugaugugcuu

SEQ ID NO: 436302 - RNA, 19 nt, Homo sapiens
  misc_RNA (1)...(19): siRNA sense strand
auccugaaguccuauauaa

SEQ ID NO: 436303 - RNA, 19 nt, Homo sapiens
  misc_RNA (1)...(19): siRNA sense strand
caaggauaaucucuucauc

SEQ ID NO: 436304 - RNA, 19 nt, Homo sapiens
  misc_RNA (1)...(19): siRNA sense strand
caaacaucaugcuugacaa

SEQ ID NO: 436305 - RNA, 19 nt, Homo sapiens
  misc_RNA (1)...(19): siRNA sense strand
gaggcccagugaauauauu

SEQ ID NO: 436306 - RNA, 19 nt, Homo sapiens
  misc_RNA (1)...(19): siRNA sense strand
gacuuuggauuucauugau

SEQ ID NO: 436307 - RNA, 19 nt, Homo sapiens
  misc_RNA (1)...(19): siRNA sense strand
gaaggacucgacccagaug

SEQ ID NO: 436308 - RNA, 19 nt, Homo sapiens
  misc_RNA (1)...(19): siRNA sense strand
ugaaggagagccugagguu

SEQ ID NO: 436309 - RNA, 19 nt, Homo sapiens
  misc_RNA (1)...(19): siRNA sense strand
caagagugcaaacaucaug

SEQ ID NO: 436310 - RNA, 19 nt, Homo sapiens
  misc_RNA (1)...(19): siRNA sense strand
gaauauauugccaccaucu

SEQ ID NO: 436311 - RNA, 19 nt, Homo sapiens
  misc_RNA (1)...(19): siRNA sense strand
caggagaggcccagugaau

SEQ ID NO: 436312 - RNA, 19 nt, Homo sapiens
  misc_RNA (1)...(19): siRNA sense strand
cauccuggcuuggaccuau

SEQ ID NO: 436313 - RNA, 19 nt, Homo sapiens
  misc_RNA (1)...(19): siRNA sense strand
cucaggguauugaugauuu

SEQ ID NO: 436314 - RNA, 19 nt, Homo sapiens
  misc_RNA (1)...(19): siRNA sense strand
gacaccauccggucuauca

SEQ ID NO: 436315 - RNA, 19 nt, Homo sapiens
  misc_RNA (1)...(19): siRNA sense strand
ccuaugccuucuauaacaa

SEQ ID NO: 436316 - RNA, 19 nt, Homo sapiens
  misc_RNA (1)...(19): siRNA sense strand
gcucagugcccuuguagag

SEQ ID NO: 436317 - RNA, 19 nt, Homo sapiens
  misc_RNA (1)...(19): siRNA sense strand
ggucaccucuggcuuuuau

SEQ ID NO: 436318 - RNA, 19 nt, Homo sapiens
  misc_RNA (1)...(19): siRNA sense strand
gacaaagccaaguccaaga

SEQ ID NO: 436319 - RNA, 19 nt, Homo sapiens
  misc_RNA (1)...(19): siRNA sense strand
ggccggauccugaggucua

SEQ ID NO: 436320 - RNA, 19 nt, Homo sapiens
  misc_RNA (1)...(19): siRNA sense strand
ccgcgauccuaaagagauu

SEQ ID NO: 436321 - RNA, 19 nt, Homo sapiens
  misc_RNA (1)...(19): siRNA sense strand
cagaggagggcuugaagga

SEQ ID NO: 436322 - RNA, 19 nt, Homo sapiens
  misc_RNA (1)...(19): siRNA sense strand
gccauugcacccaaggaua

SEQ ID NO: 436323 - RNA, 19 nt, Homo sapiens
  misc_RNA (1)...(19): siRNA sense strand
gaagaugggaaggcauugu

SEQ ID NO: 436324 - RNA, 19 nt, Homo sapiens
  misc_RNA (1)...(19): siRNA sense strand
cauccugaaguccuauaua

SEQ ID NO: 436325 - RNA, 19 nt, Homo sapiens
  misc_RNA (1)...(19): siRNA sense strand
gaagcuggaauugaucaug

SEQ ID NO: 436326 - RNA, 19 nt, Homo sapiens
  misc_RNA (1)...(19): siRNA sense strand
ccagaugucggccaccuau

SEQ ID NO: 436327 - RNA, 19 nt, Homo sapiens
  misc_RNA (1)...(19): siRNA sense strand
ggcugacaccuucauguuu

SEQ ID NO: 436328 - RNA, 19 nt, Homo sapiens
  misc_RNA (1)...(19): siRNA sense strand
gaaaagaagccagcauauc

SEQ ID NO: 436329 - RNA, 19 nt, Homo sapiens
  misc_RNA (1)...(19): siRNA sense strand
gauccuaaagagauugaau

SEQ ID NO: 436330 - RNA, 19 nt, Homo sapiens
  misc_RNA (1)...(19): siRNA sense strand
aggauaaucucuucaucag

SEQ ID NO: 436331 - RNA, 19 nt, Homo sapiens
  misc_RNA (1)...(19): siRNA sense strand
agacuuuggauuucauuga

SEQ ID NO: 436332 - RNA, 19 nt, Homo sapiens
  misc_RNA (1)...(19): siRNA sense strand
cauccggucuaucaccaau

SEQ ID NO: 436333 - RNA, 19 nt, Homo sapiens
  misc_RNA (1)...(19): siRNA sense strand
ucuccuggguccuguacaa

SEQ ID NO: 436334 - RNA, 19 nt, Homo sapiens
  misc_RNA (1)...(19): siRNA sense strand
cuacagaggagggcuugaa

SEQ ID NO: 436335 - RNA, 19 nt, Homo sapiens
  misc_RNA (1)...(19): siRNA sense strand
ccaaggauaaucucuucau

SEQ ID NO: 436336 - RNA, 19 nt, Homo sapiens
  misc_RNA (1)...(19): siRNA sense strand
uugcgaggcacccagaaua

SEQ ID NO: 436337 - RNA, 19 nt, Homo sapiens
  misc_RNA (1)...(19): siRNA sense strand
auugucagaugaggauaua

SEQ ID NO: 436338 - RNA, 19 nt, Homo sapiens
  misc_RNA (1)...(19): siRNA sense strand
aggagaggcccagugaaua

SEQ ID NO: 436339 - RNA, 19 nt, Homo sapiens
  misc_RNA (1)...(19): siRNA sense strand
ucaacaagagugcaaacau

SEQ ID NO: 436340 - RNA, 19 nt, Homo sapiens
  misc_RNA (1)...(19): siRNA sense strand
acccaaggauaaucucuuc

SEQ ID NO: 436341 - RNA, 19 nt, Homo sapiens
  misc_RNA (1)...(19): siRNA sense strand
ucaaagacaaagccaaguc

SEQ ID NO: 436342 - RNA, 19 nt, Homo sapiens
  misc_RNA (1)...(19): siRNA sense strand
gaccuaugccuucuauaac

SEQ ID NO: 436343 - RNA, 19 nt, Homo sapiens
  misc_RNA (1)...(19): siRNA sense strand
gagcucagugcccuuguag

SEQ ID NO: 436344 - RNA, 19 nt, Homo sapiens
  misc_RNA (1)...(19): siRNA sense strand
cugaaguccuauauaacga

SEQ ID NO: 436345 - RNA, 19 nt, Homo sapiens
  misc_RNA (1)...(19): siRNA sense strand
aaggagagccugagguuac

SEQ ID NO: 436346 - RNA, 19 nt, Homo sapiens
  misc_RNA (1)...(19): siRNA sense strand
aaggauaaucucuucauca

SEQ ID NO: 436347 - RNA, 19 nt, Homo sapiens
  misc_RNA (1)...(19): siRNA sense strand
gacauuguucucccagaug

SEQ ID NO: 436348 - RNA, 19 nt, Homo sapiens
  misc_RNA (1)...(19): siRNA sense strand
gucaggagaggcccaguga

SEQ ID NO: 436349 - RNA, 19 nt, Homo sapiens
  misc_RNA (1)...(19): siRNA sense strand
gcugagcaaggaugaagau

SEQ ID NO: 436350 - RNA, 19 nt, Homo sapiens
  misc_RNA (1)...(19): siRNA sense strand
cgccuuccauuucaacauc

SEQ ID NO: 436351 - RNA, 19 nt, Homo sapiens
  misc_RNA (1)...(19): siRNA sense strand
gaggugcaagagcuucuga

SEQ ID NO: 436352 - RNA, 19 nt, Homo sapiens
  misc_RNA (1)...(19): siRNA sense strand
caagacuuuggauuucauu

SEQ ID NO: 436353 - RNA, 19 nt, Homo sapiens
  misc_RNA (1)...(19): siRNA sense strand
accuaugccuucuauaaca

SEQ ID NO: 436354 - RNA, 19 nt, Homo sapiens
  misc_RNA (1)...(19): siRNA sense strand
ugccucagcugccauugca

SEQ ID NO: 436355 - RNA, 19 nt, Homo sapiens
  misc_RNA (1)...(19): siRNA sense strand
gcacccaggacauuguucu

SEQ ID NO: 436356 - RNA, 19 nt, Homo sapiens
  misc_RNA (1)...(19): siRNA sense strand
gaggcugacaccuucaugu

SEQ ID NO: 436357 - RNA, 19 nt, Homo sapiens
  misc_RNA (1)...(19): siRNA sense strand
gcauaaagcugauguugua

SEQ ID NO: 436358 - RNA, 19 nt, Homo sapiens
  misc_RNA (1)...(19): siRNA sense strand
gcaaagacuuauugaauga

SEQ ID NO: 436359 - RNA, 19 nt, Homo sapiens
  misc_RNA (1)...(19): siRNA sense strand
ggaaguauggguaguauua

SEQ ID NO: 436360 - RNA, 19 nt, Homo sapiens
  misc_RNA (1)...(19): siRNA sense strand
ggacaaguuugacuaguuu

SEQ ID NO: 436361 - RNA, 19 nt, Homo sapiens
  misc_RNA (1)...(19): siRNA sense strand
uaaagaaacuguugcuuga

SEQ ID NO: 436362 - RNA, 19 nt, Homo sapiens
  misc_RNA (1)...(19): siRNA sense strand
uaaagaaucuccuccaaga

SEQ ID NO: 436363 - RNA, 19 nt, Homo sapiens
  misc_RNA (1)...(19): siRNA sense strand
cuugaaagccuucuuauua

SEQ ID NO: 436364 - RNA, 19 nt, Homo sapiens
  misc_RNA (1)...(19): siRNA sense strand
ccaagaaagcucuaaauaa

SEQ ID NO: 436365 - RNA, 19 nt, Homo sapiens
  misc_RNA (1)...(19): siRNA sense strand
gcagggagcaguucucuuu

SEQ ID NO: 436366 - RNA, 19 nt, Homo sapiens
  misc_RNA (1)...(19): siRNA sense strand
cacaacagcuccuaaagaa

SEQ ID NO: 436367 - RNA, 19 nt, Homo sapiens
  misc_RNA (1)...(19): siRNA sense strand
gcagucguauucagagaua

SEQ ID NO: 436368 - RNA, 19 nt, Homo sapiens
  misc_RNA (1)...(19): siRNA sense strand
uuggaaaggugauacauua

SEQ ID NO: 436369 - RNA, 19 nt, Homo sapiens
  misc_RNA (1)...(19): siRNA sense strand
gaaaggugauacauuagug

SEQ ID NO: 436370 - RNA, 19 nt, Homo sapiens
  misc_RNA (1)...(19): siRNA sense strand
aagaagagcuaugcagaua

SEQ ID NO: 436371 - RNA, 19 nt, Homo sapiens
  misc_RNA (1)...(19): siRNA sense strand
gcaccaaacuauggaagaa

SEQ ID NO: 436372 - RNA, 19 nt, Homo sapiens
  misc_RNA (1)...(19): siRNA sense strand
ggcaaagacuuauugaaug

SEQ ID NO: 436373 - RNA, 19 nt, Homo sapiens
  misc_RNA (1)...(19): siRNA sense strand
gcuaugacgugcucuguga

SEQ ID NO: 436374 - RNA, 19 nt, Homo sapiens
  misc_RNA (1)...(19): siRNA sense strand
gcacaacagcuccuaaaga

SEQ ID NO: 436375 - RNA, 19 nt, Homo sapiens
  misc_RNA (1)...(19): siRNA sense strand
acacagagcugaguauugu

SEQ ID NO: 436376 - RNA, 19 nt, Homo sapiens
  misc_RNA (1)...(19): siRNA sense strand
ugauagagcagccuuauuu

SEQ ID NO: 436377 - RNA, 19 nt, Homo sapiens
  misc_RNA (1)...(19): siRNA sense strand
gcagauaacauucuuucuu

SEQ ID NO: 436378 - RNA, 19 nt, Homo sapiens
  misc_RNA (1)...(19): siRNA sense strand
gguauugaauggacaaguu

SEQ ID NO: 436379 - RNA, 19 nt, Homo sapiens
  misc_RNA (1)...(19): siRNA sense strand
gaagagcuaugcagauaac

SEQ ID NO: 436380 - RNA, 19 nt, Homo sapiens
  misc_RNA (1)...(19): siRNA sense strand
ggaaacaagugcagauaac

SEQ ID NO: 436381 - RNA, 19 nt, Homo sapiens
  misc_RNA (1)...(19): siRNA sense strand
aaugugaccuuucguauau

SEQ ID NO: 436382 - RNA, 19 nt, Homo sapiens
  misc_RNA (1)...(19): siRNA sense strand
ggauguagcagcaggagua

SEQ ID NO: 436383 - RNA, 19 nt, Homo sapiens
  misc_RNA (1)...(19): siRNA sense strand
uaggagugcuacagaauaa

SEQ ID NO: 436384 - RNA, 19 nt, Homo sapiens
  misc_RNA (1)...(19): siRNA sense strand
gaaauucacggaacaguag

SEQ ID NO: 436385 - RNA, 19 nt, Homo sapiens
  misc_RNA (1)...(19): siRNA sense strand
gccaagaaagcucuaaaua

SEQ ID NO: 436386 - RNA, 19 nt, Homo sapiens
  misc_RNA (1)...(19): siRNA sense strand
ggagcuuaccuaugauuua

SEQ ID NO: 436387 - RNA, 19 nt, Homo sapiens
  misc_RNA (1)...(19): siRNA sense strand
acucaucacugcuauauau

SEQ ID NO: 436388 - RNA, 19 nt, Homo sapiens
  misc_RNA (1)...(19): siRNA sense strand
ccucaaguauggagcauuu

SEQ ID NO: 436389 - RNA, 19 nt, Homo sapiens
  misc_RNA (1)...(19): siRNA sense strand
guacaaugauggagcugaa

SEQ ID NO: 436390 - RNA, 19 nt, Homo sapiens
  misc_RNA (1)...(19): siRNA sense strand
gaaguugggugaggaagau

SEQ ID NO: 436391 - RNA, 19 nt, Homo sapiens
  misc_RNA (1)...(19): siRNA sense strand
gcaacccacuggauauaug

SEQ ID NO: 436392 - RNA, 19 nt, Homo sapiens
  misc_RNA (1)...(19): siRNA sense strand
gugaaacggucaacuuaug

SEQ ID NO: 436393 - RNA, 19 nt, Homo sapiens
  misc_RNA (1)...(19): siRNA sense strand
gugcagauaaccagcauua

SEQ ID NO: 436394 - RNA, 19 nt, Homo sapiens
  misc_RNA (1)...(19): siRNA sense strand
gagaaacucaucacugcua

SEQ ID NO: 436395 - RNA, 19 nt, Homo sapiens
  misc_RNA (1)...(19): siRNA sense strand
cagaguauccagaggaaua

SEQ ID NO: 436396 - RNA, 19 nt, Homo sapiens
  misc_RNA (1)...(19): siRNA sense strand
cuaaagagguucagauggu

SEQ ID NO: 436397 - RNA, 19 nt, Homo sapiens
  misc_RNA (1)...(19): siRNA sense strand
uucaggagcuuaccuauga

SEQ ID NO: 436398 - RNA, 19 nt, Homo sapiens
  misc_RNA (1)...(19): siRNA sense strand
gccgcuaccugcagacaua

SEQ ID NO: 436399 - RNA, 19 nt, Homo sapiens
  misc_RNA (1)...(19): siRNA sense strand
gaaauguacagaccagcua

SEQ ID NO: 436400 - RNA, 19 nt, Homo sapiens
  misc_RNA (1)...(19): siRNA sense strand
ccagaccuuuccuuagaua

SEQ ID NO: 436401 - RNA, 19 nt, Homo sapiens
  misc_RNA (1)...(19): siRNA sense strand
gaaaccuagugcugaauuc

SEQ ID NO: 436402 - RNA, 19 nt, Homo sapiens
  misc_RNA (1)...(19): siRNA sense strand
gcaguucucuuugcuucaa

SEQ ID NO: 436403 - RNA, 19 nt, Homo sapiens
  misc_RNA (1)...(19): siRNA sense strand
ugaagagccugagaaagaa

SEQ ID NO: 436404 - RNA, 19 nt, Homo sapiens
  misc_RNA (1)...(19): siRNA sense strand
gcaggaggcagaaaguaaa

SEQ ID NO: 436405 - RNA, 19 nt, Homo sapiens
  misc_RNA (1)...(19): siRNA sense strand
caagaacaguugaauucau

SEQ ID NO: 436406 - RNA, 19 nt, Homo sapiens
  misc_RNA (1)...(19): siRNA sense strand
aacauuggcucaccauauu

SEQ ID NO: 436407 - RNA, 19 nt, Homo sapiens
  misc_RNA (1)...(19): siRNA sense strand
gagcaacccacuggauaua

SEQ ID NO: 436408 - RNA, 19 nt, Homo sapiens
  misc_RNA (1)...(19): siRNA sense strand
ggacuugaaaggcagagua

SEQ ID NO: 436409 - RNA, 19 nt, Homo sapiens
  misc_RNA (1)...(19): siRNA sense strand
gaacuuagucagaacaucu

SEQ ID NO: 436410 - RNA, 19 nt, Homo sapiens
  misc_RNA (1)...(19): siRNA sense strand
gaagaagagcuaugcagau

SEQ ID NO: 436411 - RNA, 19 nt, Homo sapiens
  misc_RNA (1)...(19): siRNA sense strand
ggaagaacccauugaagag

SEQ ID NO: 436412 - RNA, 19 nt, Homo sapiens
  misc_RNA (1)...(19): siRNA sense strand
caaaggcucuccugguucu

SEQ ID NO: 436413 - RNA, 19 nt, Homo sapiens
  misc_RNA (1)...(19): siRNA sense strand
gaaagccuguuuagucacu

SEQ ID NO: 436414 - RNA, 19 nt, Homo sapiens
  misc_RNA (1)...(19): siRNA sense strand
uaaccagcauuauuacugu

SEQ ID NO: 436415 - RNA, 19 nt, Homo sapiens
  misc_RNA (1)...(19): siRNA sense strand
ugaaagaggcaaugaugaa

SEQ ID NO: 436416 - RNA, 19 nt, Homo sapiens
  misc_RNA (1)...(19): siRNA sense strand
gaauggacaaguuugacua

SEQ ID NO: 436417 - RNA, 19 nt, Homo sapiens
  misc_RNA (1)...(19): siRNA sense strand
gcaccacaguuugcuauuc

SEQ ID NO: 436418 - RNA, 19 nt, Homo sapiens
  misc_RNA (1)...(19): siRNA sense strand
gagcuuaccuaugauuuac

SEQ ID NO: 436419 - RNA, 19 nt, Homo sapiens
  misc_RNA (1)...(19): siRNA sense strand
ucagcgugaugguuuauuu

SEQ ID NO: 436420 - RNA, 19 nt, Homo sapiens
  misc_RNA (1)...(19): siRNA sense strand
uuugaucccucacauuuaa

SEQ ID NO: 436421 - RNA, 19 nt, Homo sapiens
  misc_RNA (1)...(19): siRNA sense strand
gagcuaugcagauaacauu

SEQ ID NO: 436422 - RNA, 19 nt, Homo sapiens
  misc_RNA (1)...(19): siRNA sense strand
uaacauuggcucaccauau

SEQ ID NO: 436423 - RNA, 19 nt, Homo sapiens
  misc_RNA (1)...(19): siRNA sense strand
ucagaaauuucagcuagaa

SEQ ID NO: 436424 - RNA, 19 nt, Homo sapiens
  misc_RNA (1)...(19): siRNA sense strand
cauguugacuauccagaaa

SEQ ID NO: 436425 - RNA, 19 nt, Homo sapiens
  misc_RNA (1)...(19): siRNA sense strand
uagaauggaugaacaagag

SEQ ID NO: 436426 - RNA, 19 nt, Homo sapiens
  misc_RNA (1)...(19): siRNA sense strand
gcgauuuacugcuugcuau

SEQ ID NO: 436427 - RNA, 19 nt, Homo sapiens
  misc_RNA (1)...(19): siRNA sense strand
caagaugcuucccgcgauu

SEQ ID NO: 436428 - RNA, 19 nt, Homo sapiens
  misc_RNA (1)...(19): siRNA sense strand
agagaaaccuagugcugaa

SEQ ID NO: 436429 - RNA, 19 nt, Homo sapiens
  misc_RNA (1)...(19): siRNA sense strand
gaagaacaucccagagguu

SEQ ID NO: 436430 - RNA, 19 nt, Homo sapiens
  misc_RNA (1)...(19): siRNA sense strand
ucccagaccuuuccuuaga

SEQ ID NO: 436431 - RNA, 19 nt, Homo sapiens
  misc_RNA (1)...(19): siRNA sense strand
caaggaagaacccauugaa

SEQ ID NO: 436432 - RNA, 19 nt, Homo sapiens
  misc_RNA (1)...(19): siRNA sense strand
gauuaugcccggaguuuga

SEQ ID NO: 436433 - RNA, 19 nt, Homo sapiens
  misc_RNA (1)...(19): siRNA sense strand
agcaugagauacuuugaua

SEQ ID NO: 436434 - RNA, 19 nt, Homo sapiens
  misc_RNA (1)...(19): siRNA sense strand
gguagugauugauuccauu

SEQ ID NO: 436435 - RNA, 19 nt, Homo sapiens
  misc_RNA (1)...(19): siRNA sense strand
gaaggaaacucaguaaaag

SEQ ID NO: 436436 - RNA, 19 nt, Homo sapiens
  misc_RNA (1)...(19): siRNA sense strand
uaucucauuugaagcagua

SEQ ID NO: 436437 - RNA, 19 nt, Homo sapiens
  misc_RNA (1)...(19): siRNA sense strand
ccaguggucugcuacacaa

SEQ ID NO: 436438 - RNA, 19 nt, Homo sapiens
  misc_RNA (1)...(19): siRNA sense strand
uaaagcugauguuguaaag

SEQ ID NO: 436439 - RNA, 19 nt, Homo sapiens
  misc_RNA (1)...(19): siRNA sense strand
cuacugcucuugggucaaa

SEQ ID NO: 436440 - RNA, 19 nt, Homo sapiens
  misc_RNA (1)...(19): siRNA sense strand
gcugaagugugggauacua

SEQ ID NO: 436441 - RNA, 19 nt, Homo sapiens
  misc_RNA (1)...(19): siRNA sense strand
guagugauugauuccauua

SEQ ID NO: 436442 - RNA, 19 nt, Homo sapiens
  misc_RNA (1)...(19): siRNA sense strand
uguaucaucucacuguuga

SEQ ID NO: 436443 - RNA, 19 nt, Homo sapiens
  misc_RNA (1)...(19): siRNA sense strand
uugaagagccugagaaaga

SEQ ID NO: 436444 - RNA, 19 nt, Homo sapiens
  misc_RNA (1)...(19): siRNA sense strand
gaaagaggcaaugaugaau

SEQ ID NO: 436445 - RNA, 19 nt, Homo sapiens
  misc_RNA (1)...(19): siRNA sense strand
ggaagugcaccucaaguuc

SEQ ID NO: 436446 - RNA, 19 nt, Homo sapiens
  misc_RNA (1)...(19): siRNA sense strand
ggaaucacauguuguugcu

SEQ ID NO: 436447 - RNA, 19 nt, Homo sapiens
  misc_RNA (1)...(19): siRNA sense strand
cugaaagccuguuuaguca

SEQ ID NO: 436448 - RNA, 19 nt, Homo sapiens
  misc_RNA (1)...(19): siRNA sense strand
ugaaagccuucuuauuaca

SEQ ID NO: 436449 - RNA, 19 nt, Homo sapiens
  misc_RNA (1)...(19): siRNA sense strand
gggccucucuugccuugaa

SEQ ID NO: 436450 - RNA, 19 nt, Homo sapiens
  misc_RNA (1)...(19): siRNA sense strand
ggagauauggauggaaauu

SEQ ID NO: 436451 - RNA, 19 nt, Homo sapiens
  misc_RNA (1)...(19): siRNA sense strand
aaacuucccuacaauaacu

SEQ ID NO: 436452 - RNA, 19 nt, Homo sapiens
  misc_RNA (1)...(19): siRNA sense strand
caaacaauaugggauuagu

SEQ ID NO: 436453 - RNA, 19 nt, Homo sapiens
  misc_RNA (1)...(19): siRNA sense strand
caugugaagucaaggguau

SEQ ID NO: 436454 - RNA, 19 nt, Homo sapiens
  misc_RNA (1)...(19): siRNA sense strand
gaauaaacucccagaccuu

SEQ ID NO: 436455 - RNA, 19 nt, Homo sapiens
  misc_RNA (1)...(19): siRNA sense strand
gaaacucaucacugcuaua

SEQ ID NO: 436456 - RNA, 19 nt, Homo sapiens
  misc_RNA (1)...(19): siRNA sense strand
ccauauugcuuacgguuag

SEQ ID NO: 436457 - RNA, 19 nt, Homo sapiens
  misc_RNA (1)...(19): siRNA sense strand
ccaaauaccagucauauaa

SEQ ID NO: 436458 - RNA, 19 nt, Homo sapiens
  misc_RNA (1)...(19): siRNA sense strand
caagacaggcuuauaauuu

SEQ ID NO: 436459 - RNA, 19 nt, Homo sapiens
  misc_RNA (1)...(19): siRNA sense strand
gcaaccaccucaacucauu

SEQ ID NO: 436460 - RNA, 19 nt, Homo sapiens
  misc_RNA (1)...(19): siRNA sense strand
gaagagccaccgccuguua

SEQ ID NO: 436461 - RNA, 19 nt, Homo sapiens
  misc_RNA (1)...(19): siRNA sense strand
guaugaaacucaaaccaaa

SEQ ID NO: 436462 - RNA, 19 nt, Homo sapiens
  misc_RNA (1)...(19): siRNA sense strand
ccacugagguugugccaaa

SEQ ID NO: 436463 - RNA, 19 nt, Homo sapiens
  misc_RNA (1)...(19): siRNA sense strand
uaacaugucuccaguugug

SEQ ID NO: 436464 - RNA, 19 nt, Homo sapiens
  misc_RNA (1)...(19): siRNA sense strand
gaucugugcugaauacuca

SEQ ID NO: 436465 - RNA, 19 nt, Homo sapiens
  misc_RNA (1)...(19): siRNA sense strand
gagaauaucauguccaguu

SEQ ID NO: 436466 - RNA, 19 nt, Homo sapiens
  misc_RNA (1)...(19): siRNA sense strand
caacaaagggaauugguaa

SEQ ID NO: 436467 - RNA, 19 nt, Homo sapiens
  misc_RNA (1)...(19): siRNA sense strand
aaacugugauuccaaagaa

SEQ ID NO: 436468 - RNA, 19 nt, Homo sapiens
  misc_RNA (1)...(19): siRNA sense strand
gggcaagacaggcuuauaa

SEQ ID NO: 436469 - RNA, 19 nt, Homo sapiens
  misc_RNA (1)...(19): siRNA sense strand
ggauuucucuuucucuuuc

SEQ ID NO: 436470 - RNA, 19 nt, Homo sapiens
  misc_RNA (1)...(19): siRNA sense strand
gaagcaacaucugguucua

SEQ ID NO: 436471 - RNA, 19 nt, Homo sapiens
  misc_RNA (1)...(19): siRNA sense strand
caagaucugugcugaauac

SEQ ID NO: 436472 - RNA, 19 nt, Homo sapiens
  misc_RNA (1)...(19): siRNA sense strand
caaauuagaaccagaggaa

SEQ ID NO: 436473 - RNA, 19 nt, Homo sapiens
  misc_RNA (1)...(19): siRNA sense strand
gcaagacaggcuuauaauu

SEQ ID NO: 436474 - RNA, 19 nt, Homo sapiens
  misc_RNA (1)...(19): siRNA sense strand
ccaauacuaucuucuguuc

SEQ ID NO: 436475 - RNA, 19 nt, Homo sapiens
  misc_RNA (1)...(19): siRNA sense strand
guacccagcuacaacagaa

SEQ ID NO: 436476 - RNA, 19 nt, Homo sapiens
  misc_RNA (1)...(19): siRNA sense strand
guauaaaggucauaaacag

SEQ ID NO: 436477 - RNA, 19 nt, Homo sapiens
  misc_RNA (1)...(19): siRNA sense strand
aaagggaauugguaacaaa

SEQ ID NO: 436478 - RNA, 19 nt, Homo sapiens
  misc_RNA (1)...(19): siRNA sense strand
gaggaugccuuugauaaca

SEQ ID NO: 436479 - RNA, 19 nt, Homo sapiens
  misc_RNA (1)...(19): siRNA sense strand
gaaauccacugagguugug

SEQ ID NO: 436480 - RNA, 19 nt, Homo sapiens
  misc_RNA (1)...(19): siRNA sense strand
cacaagaggugcccgagaa

SEQ ID NO: 436481 - RNA, 19 nt, Homo sapiens
  misc_RNA (1)...(19): siRNA sense strand
caagugagcacacgaaauc

SEQ ID NO: 436482 - RNA, 19 nt, Homo sapiens
  misc_RNA (1)...(19): siRNA sense strand
ccacugguguuaaguuuca

SEQ ID NO: 436483 - RNA, 19 nt, Homo sapiens
  misc_RNA (1)...(19): siRNA sense strand
gggaagaaccaguacuaaa

SEQ ID NO: 436484 - RNA, 19 nt, Homo sapiens
  misc_RNA (1)...(19): siRNA sense strand
caaagggaauugguaacaa

SEQ ID NO: 436485 - RNA, 19 nt, Homo sapiens
  misc_RNA (1)...(19): siRNA sense strand
cacaagaccacaugaaauu

SEQ ID NO: 436486 - RNA, 19 nt, Homo sapiens
  misc_RNA (1)...(19): siRNA sense strand
gaagaaagaauagaacagu

SEQ ID NO: 436487 - RNA, 19 nt, Homo sapiens
  misc_RNA (1)...(19): siRNA sense strand
uggcucaccugaaauuaaa

SEQ ID NO: 436488 - RNA, 19 nt, Homo sapiens
  misc_RNA (1)...(19): siRNA sense strand
guggagaccuuuuaaauga

SEQ ID NO: 436489 - RNA, 19 nt, Homo sapiens
  misc_RNA (1)...(19): siRNA sense strand
ggagcagguugaaacaguu

SEQ ID NO: 436490 - RNA, 19 nt, Homo sapiens
  misc_RNA (1)...(19): siRNA sense strand
agaauaucauguccaguuu

SEQ ID NO: 436491 - RNA, 19 nt, Homo sapiens
  misc_RNA (1)...(19): siRNA sense strand
ggaagaaccaguacuaaaa

SEQ ID NO: 436492 - RNA, 19 nt, Homo sapiens
  misc_RNA (1)...(19): siRNA sense strand
ugagaggguugacacugua

SEQ ID NO: 436493 - RNA, 19 nt, Homo sapiens
  misc_RNA (1)...(19): siRNA sense strand
gaucaugggaaacacaauu

SEQ ID NO: 436494 - RNA, 19 nt, Homo sapiens
  misc_RNA (1)...(19): siRNA sense strand
gcagaaguguaacaugucu

SEQ ID NO: 436495 - RNA, 19 nt, Homo sapiens
  misc_RNA (1)...(19): siRNA sense strand
caaaauagaccaaaugaga

SEQ ID NO: 436496 - RNA, 19 nt, Homo sapiens
  misc_RNA (1)...(19): siRNA sense strand
gggaauuguuugagucuuc

SEQ ID NO: 436497 - RNA, 19 nt, Homo sapiens
  misc_RNA (1)...(19): siRNA sense strand
gauaacaacagugacauug

SEQ ID NO: 436498 - RNA, 19 nt, Homo sapiens
  misc_RNA (1)...(19): siRNA sense strand
gaagacuggauuacagaaa

SEQ ID NO: 436499 - RNA, 19 nt, Homo sapiens
  misc_RNA (1)...(19): siRNA sense strand
aagacaggcuuauaauuuc

SEQ ID NO: 436500 - RNA, 19 nt, Homo sapiens
  misc_RNA (1)...(19): siRNA sense strand
guacugaaauucggagaca

SEQ ID NO: 436501 - RNA, 19 nt, Homo sapiens
  misc_RNA (1)...(19): siRNA sense strand
ggguauccaucaucaauca

SEQ ID NO: 436502 - RNA, 19 nt, Homo sapiens
  misc_RNA (1)...(19): siRNA sense strand
ugacauugcugaagauggu

SEQ ID NO: 436503 - RNA, 19 nt, Homo sapiens
  misc_RNA (1)...(19): siRNA sense strand
caucaucaaucagugugua

SEQ ID NO: 436504 - RNA, 19 nt, Homo sapiens
  misc_RNA (1)...(19): siRNA sense strand
gguugacacuguaucagaa

SEQ ID NO: 436505 - RNA, 19 nt, Homo sapiens
  misc_RNA (1)...(19): siRNA sense strand
gaagagcgcaagucacaca

SEQ ID NO: 436506 - RNA, 19 nt, Homo sapiens
  misc_RNA (1)...(19): siRNA sense strand
gaauggcagggaauuguuu

SEQ ID NO: 436507 - RNA, 19 nt, Homo sapiens
  misc_RNA (1)...(19): siRNA sense strand
aagacuggcucaccugaaa

SEQ ID NO: 436508 - RNA, 19 nt, Homo sapiens
  misc_RNA (1)...(19): siRNA sense strand
ccagucauauaaucaguau

SEQ ID NO: 436509 - RNA, 19 nt, Homo sapiens
  misc_RNA (1)...(19): siRNA sense strand
acagugacauugcugaaga

SEQ ID NO: 436510 - RNA, 19 nt, Homo sapiens
  misc_RNA (1)...(19): siRNA sense strand
uguaacaugucuccaguug

SEQ ID NO: 436511 - RNA, 19 nt, Homo sapiens
  misc_RNA (1)...(19): siRNA sense strand
gaacgugcucagugggaua

SEQ ID NO: 436512 - RNA, 19 nt, Homo sapiens
  misc_RNA (1)...(19): siRNA sense strand
acaaagggagccuggauuu

SEQ ID NO: 436513 - RNA, 19 nt, Homo sapiens
  misc_RNA (1)...(19): siRNA sense strand
uaacaacagugacauugcu

SEQ ID NO: 436514 - RNA, 19 nt, Homo sapiens
  misc_RNA (1)...(19): siRNA sense strand
gaaaagaagcaacagagaa

SEQ ID NO: 436515 - RNA, 19 nt, Homo sapiens
  misc_RNA (1)...(19): siRNA sense strand
gcacaaagggagccuggau

SEQ ID NO: 436516 - RNA, 19 nt, Homo sapiens
  misc_RNA (1)...(19): siRNA sense strand
caagaggugcccgagaaua

SEQ ID NO: 436517 - RNA, 19 nt, Homo sapiens
  misc_RNA (1)...(19): siRNA sense strand
gaacaaaauagaccaaaug

SEQ ID NO: 436518 - RNA, 19 nt, Homo sapiens
  misc_RNA (1)...(19): siRNA sense strand
gcaaucacucugagaaaca

SEQ ID NO: 436519 - RNA, 19 nt, Homo sapiens
  misc_RNA (1)...(19): siRNA sense strand
ccacaugaaauucuggaaa

SEQ ID NO: 436520 - RNA, 19 nt, Homo sapiens
  misc_RNA (1)...(19): siRNA sense strand
aaagaguguugccuccaaa

SEQ ID NO: 436521 - RNA, 19 nt, Homo sapiens
  misc_RNA (1)...(19): siRNA sense strand
ucagugggauauuggcauu

SEQ ID NO: 436522 - RNA, 19 nt, Homo sapiens
  misc_RNA (1)...(19): siRNA sense strand
guccacugguguuaaguuu

SEQ ID NO: 436523 - RNA, 19 nt, Homo sapiens
  misc_RNA (1)...(19): siRNA sense strand
acacaaaauccccaaauua

SEQ ID NO: 436524 - RNA, 19 nt, Homo sapiens
  misc_RNA (1)...(19): siRNA sense strand
gagaguauaaaggucauaa

SEQ ID NO: 436525 - RNA, 19 nt, Homo sapiens
  misc_RNA (1)...(19): siRNA sense strand
gaaaucaaagcaugaaagc

SEQ ID NO: 436526 - RNA, 19 nt, Homo sapiens
  misc_RNA (1)...(19): siRNA sense strand
uugcagaaguguaacaugu

SEQ ID NO: 436527 - RNA, 19 nt, Homo sapiens
  misc_RNA (1)...(19): siRNA sense strand
gcuugagguucauacuaaa

SEQ ID NO: 436528 - RNA, 19 nt, Homo sapiens
  misc_RNA (1)...(19): siRNA sense strand
aaaccaaauaccagucaua

SEQ ID NO: 436529 - RNA, 19 nt, Homo sapiens
  misc_RNA (1)...(19): siRNA sense strand
caccaaaccagagaaauga

SEQ ID NO: 436530 - RNA, 19 nt, Homo sapiens
  misc_RNA (1)...(19): siRNA sense strand
caaaauccccaaauuagaa

SEQ ID NO: 436531 - RNA, 19 nt, Homo sapiens
  misc_RNA (1)...(19): siRNA sense strand
gcagcaaggcuuucaguac

SEQ ID NO: 436532 - RNA, 19 nt, Homo sapiens
  misc_RNA (1)...(19): siRNA sense strand
caaacugugauuccaaaga

SEQ ID NO: 436533 - RNA, 19 nt, Homo sapiens
  misc_RNA (1)...(19): siRNA sense strand
caacgcagaguguaucauc

SEQ ID NO: 436534 - RNA, 19 nt, Homo sapiens
  misc_RNA (1)...(19): siRNA sense strand
ccaaaccagagaaaugaaa

SEQ ID NO: 436535 - RNA, 19 nt, Homo sapiens
  misc_RNA (1)...(19): siRNA sense strand
ucaacaaagggaauuggua

SEQ ID NO: 436536 - RNA, 19 nt, Homo sapiens
  misc_RNA (1)...(19): siRNA sense strand
ugcaagggaucaugggaaa

SEQ ID NO: 436537 - RNA, 19 nt, Homo sapiens
  misc_RNA (1)...(19): siRNA sense strand
caaucacucugagaaacaa

SEQ ID NO: 436538 - RNA, 19 nt, Homo sapiens
  misc_RNA (1)...(19): siRNA sense strand
ucaggaggaugccuuugau

SEQ ID NO: 436539 - RNA, 19 nt, Homo sapiens
  misc_RNA (1)...(19): siRNA sense strand
ucaaucaguguguaugaaa

SEQ ID NO: 436540 - RNA, 19 nt, Homo sapiens
  misc_RNA (1)...(19): siRNA sense strand
agagaaauccacugagguu

SEQ ID NO: 436541 - RNA, 19 nt, Homo sapiens
  misc_RNA (1)...(19): siRNA sense strand
gagagggcguggguucaug

SEQ ID NO: 436542 - RNA, 19 nt, Homo sapiens
  misc_RNA (1)...(19): siRNA sense strand
gagcgcaagucacacaaaa

SEQ ID NO: 436543 - RNA, 19 nt, Homo sapiens
  misc_RNA (1)...(19): siRNA sense strand
gcaagugagcacacgaaau

SEQ ID NO: 436544 - RNA, 19 nt, Homo sapiens
  misc_RNA (1)...(19): siRNA sense strand
gaagacuggcucaccugaa

SEQ ID NO: 436545 - RNA, 19 nt, Homo sapiens
  misc_RNA (1)...(19): siRNA sense strand
ccuaaugggucagccaaug

SEQ ID NO: 436546 - RNA, 19 nt, Homo sapiens
  misc_RNA (1)...(19): siRNA sense strand
caacagugacauugcugaa

SEQ ID NO: 436547 - RNA, 19 nt, Homo sapiens
  misc_RNA (1)...(19): siRNA sense strand
uguaucaucuccugaagca

SEQ ID NO: 436548 - RNA, 19 nt, Homo sapiens
  misc_RNA (1)...(19): siRNA sense strand
ccauuacgaugcacaaagg

SEQ ID NO: 436549 - RNA, 19 nt, Homo sapiens
  misc_RNA (1)...(19): siRNA sense strand
gcagagaaagcauugaaaa

SEQ ID NO: 436550 - RNA, 19 nt, Homo sapiens
  misc_RNA (1)...(19): siRNA sense strand
aaacacaagaccacaugaa

SEQ ID NO: 436551 - RNA, 19 nt, Homo sapiens
  misc_RNA (1)...(19): siRNA sense strand
caauggcuuuggugcaguu

SEQ ID NO: 436552 - RNA, 19 nt, Homo sapiens
  misc_RNA (1)...(19): siRNA sense strand
uauccuugguggccuugua

SEQ ID NO: 436553 - RNA, 19 nt, Homo sapiens
  misc_RNA (1)...(19): siRNA sense strand
acucucaaguacugaaauu

SEQ ID NO: 436554 - RNA, 19 nt, Homo sapiens
  misc_RNA (1)...(19): siRNA sense strand
ccaaacaagccagcaauca

SEQ ID NO: 436555 - RNA, 19 nt, Homo sapiens
  misc_RNA (1)...(19): siRNA sense strand
gggcguggguucaugaaaa

SEQ ID NO: 436556 - RNA, 19 nt, Homo sapiens
  misc_RNA (1)...(19): siRNA sense strand
agcuugagguucauacuaa

SEQ ID NO: 436557 - RNA, 19 nt, Homo sapiens
  misc_RNA (1)...(19): siRNA sense strand
ccaaauaccagucauauaa

SEQ ID NO: 436558 - RNA, 19 nt, Homo sapiens
  misc_RNA (1)...(19): siRNA sense strand
caagacaggcuuauaauuu

SEQ ID NO: 436559 - RNA, 19 nt, Homo sapiens
  misc_RNA (1)...(19): siRNA sense strand
gcaaccaccucaacucauu

SEQ ID NO: 436560 - RNA, 19 nt, Homo sapiens
  misc_RNA (1)...(19): siRNA sense strand
gaagagccaccgccuguua

SEQ ID NO: 436561 - RNA, 19 nt, Homo sapiens
  misc_RNA (1)...(19): siRNA sense strand
guaugaaacucaaaccaaa

SEQ ID NO: 436562 - RNA, 19 nt, Homo sapiens
  misc_RNA (1)...(19): siRNA sense strand
ccacugagguugugccaaa

SEQ ID NO: 436563 - RNA, 19 nt, Homo sapiens
  misc_RNA (1)...(19): siRNA sense strand
uaacaugucuccaguugug

SEQ ID NO: 436564 - RNA, 19 nt, Homo sapiens
  misc_RNA (1)...(19): siRNA sense strand
gaucugugcugaauacuca

SEQ ID NO: 436565 - RNA, 19 nt, Homo sapiens
  misc_RNA (1)...(19): siRNA sense strand
gagaauaucauguccaguu

SEQ ID NO: 436566 - RNA, 19 nt, Homo sapiens
  misc_RNA (1)...(19): siRNA sense strand
caacaaagggaauugguaa

SEQ ID NO: 436567 - RNA, 19 nt, Homo sapiens
  misc_RNA (1)...(19): siRNA sense strand
aaacugugauuccaaagaa

SEQ ID NO: 436568 - RNA, 19 nt, Homo sapiens
  misc_RNA (1)...(19): siRNA sense strand
gggcaagacaggcuuauaa

SEQ ID NO: 436569 - RNA, 19 nt, Homo sapiens
  misc_RNA (1)...(19): siRNA sense strand
ggauuucucuuucucuuuc

SEQ ID NO: 436570 - RNA, 19 nt, Homo sapiens
  misc_RNA (1)...(19): siRNA sense strand
gaagcaacaucugguucua

SEQ ID NO: 436571 - RNA, 19 nt, Homo sapiens
  misc_RNA (1)...(19): siRNA sense strand
caagaucugugcugaauac

SEQ ID NO: 436572 - RNA, 19 nt, Homo sapiens
  misc_RNA (1)...(19): siRNA sense strand
caaauuagaaccagaggaa

SEQ ID NO: 436573 - RNA, 19 nt, Homo sapiens
  misc_RNA (1)...(19): siRNA sense strand
gcaagacaggcuuauaauu

SEQ ID NO: 436574 - RNA, 19 nt, Homo sapiens
  misc_RNA (1)...(19): siRNA sense strand
ccaauacuaucuucuguuc

SEQ ID NO: 436575 - RNA, 19 nt, Homo sapiens
  misc_RNA (1)...(19): siRNA sense strand
guacccagcuacaacagaa

SEQ ID NO: 436576 - RNA, 19 nt, Homo sapiens
  misc_RNA (1)...(19): siRNA sense strand
guauaaaggucauaaacag

SEQ ID NO: 436577 - RNA, 19 nt, Homo sapiens
  misc_RNA (1)...(19): siRNA sense strand
aaagggaauugguaacaaa

SEQ ID NO: 436578 - RNA, 19 nt, Homo sapiens
  misc_RNA (1)...(19): siRNA sense strand
gaggaugccuuugauaaca

SEQ ID NO: 436579 - RNA, 19 nt, Homo sapiens
  misc_RNA (1)...(19): siRNA sense strand
gaaauccacugagguugug

SEQ ID NO: 436580 - RNA, 19 nt, Homo sapiens
  misc_RNA (1)...(19): siRNA sense strand
cacaagaggugcccgagaa

SEQ ID NO: 436581 - RNA, 19 nt, Homo sapiens
  misc_RNA (1)...(19): siRNA sense strand
caagugagcacacgaaauc

SEQ ID NO: 436582 - RNA, 19 nt, Homo sapiens
  misc_RNA (1)...(19): siRNA sense strand
ccacugguguuaaguuuca

SEQ ID NO: 436583 - RNA, 19 nt, Homo sapiens
  misc_RNA (1)...(19): siRNA sense strand
gggaagaaccaguacuaaa

SEQ ID NO: 436584 - RNA, 19 nt, Homo sapiens
  misc_RNA (1)...(19): siRNA sense strand
caaagggaauugguaacaa

SEQ ID NO: 436585 - RNA, 19 nt, Homo sapiens
  misc_RNA (1)...(19): siRNA sense strand
cacaagaccacaugaaauu

SEQ ID NO: 436586 - RNA, 19 nt, Homo sapiens
  misc_RNA (1)...(19): siRNA sense strand
gaagaaagaauagaacagu

SEQ ID NO: 436587 - RNA, 19 nt, Homo sapiens
  misc_RNA (1)...(19): siRNA sense strand
uggcucaccugaaauuaaa

SEQ ID NO: 436588 - RNA, 19 nt, Homo sapiens
  misc_RNA (1)...(19): siRNA sense strand
guggagaccuuuuaaauga

SEQ ID NO: 436589 - RNA, 19 nt, Homo sapiens
  misc_RNA (1)...(19): siRNA sense strand
ggagcagguugaaacaguu

SEQ ID NO: 436590 - RNA, 19 nt, Homo sapiens
  misc_RNA (1)...(19): siRNA sense strand
agaauaucauguccaguuu

SEQ ID NO: 436591 - RNA, 19 nt, Homo sapiens
  misc_RNA (1)...(19): siRNA sense strand
ggaagaaccaguacuaaaa

SEQ ID NO: 436592 - RNA, 19 nt, Homo sapiens
  misc_RNA (1)...(19): siRNA sense strand
ugagaggguugacacugua

SEQ ID NO: 436593 - RNA, 19 nt, Homo sapiens
  misc_RNA (1)...(19): siRNA sense strand
gaucaugggaaacacaauu

SEQ ID NO: 436594 - RNA, 19 nt, Homo sapiens
  misc_RNA (1)...(19): siRNA sense strand
gcagaaguguaacaugucu

SEQ ID NO: 436595 - RNA, 19 nt, Homo sapiens
  misc_RNA (1)...(19): siRNA sense strand
caaaauagaccaaaugaga

SEQ ID NO: 436596 - RNA, 19 nt, Homo sapiens
  misc_RNA (1)...(19): siRNA sense strand
gggaauuguuugagucuuc

SEQ ID NO: 436597 - RNA, 19 nt, Homo sapiens
  misc_RNA (1)...(19): siRNA sense strand
gauaacaacagugacauug

SEQ ID NO: 436598 - RNA, 19 nt, Homo sapiens
  misc_RNA (1)...(19): siRNA sense strand
gaagacuggauuacagaaa

SEQ ID NO: 436599 - RNA, 19 nt, Homo sapiens
  misc_RNA (1)...(19): siRNA sense strand
aagacaggcuuauaauuuc

SEQ ID NO: 436600 - RNA, 19 nt, Homo sapiens
  misc_RNA (1)...(19): siRNA sense strand
guacugaaauucggagaca

SEQ ID NO: 436601 - RNA, 19 nt, Homo sapiens
  misc_RNA (1)...(19): siRNA sense strand
ggguauccaucaucaauca

SEQ ID NO: 436602 - RNA, 19 nt, Homo sapiens
  misc_RNA (1)...(19): siRNA sense strand
ugacauugcugaagauggu

SEQ ID NO: 436603 - RNA, 19 nt, Homo sapiens
  misc_RNA (1)...(19): siRNA sense strand
caucaucaaucagugugua

SEQ ID NO: 436604 - RNA, 19 nt, Homo sapiens
  misc_RNA (1)...(19): siRNA sense strand
gguugacacuguaucagaa

SEQ ID NO: 436605 - RNA, 19 nt, Homo sapiens
  misc_RNA (1)...(19): siRNA sense strand
gaagagcgcaagucacaca

SEQ ID NO: 436606 - RNA, 19 nt, Homo sapiens
  misc_RNA (1)...(19): siRNA sense strand
gaauggcagggaauuguuu

SEQ ID NO: 436607 - RNA, 19 nt, Homo sapiens
  misc_RNA (1)...(19): siRNA sense strand
aagacuggcucaccugaaa

SEQ ID NO: 436608 - RNA, 19 nt, Homo sapiens
  misc_RNA (1)...(19): siRNA sense strand
ccagucauauaaucaguau

SEQ ID NO: 436609 - RNA, 19 nt, Homo sapiens
  misc_RNA (1)...(19): siRNA sense strand
acagugacauugcugaaga

SEQ ID NO: 436610 - RNA, 19 nt, Homo sapiens
  misc_RNA (1)...(19): siRNA sense strand
uguaacaugucuccaguug

SEQ ID NO: 436611 - RNA, 19 nt, Homo sapiens
  misc_RNA (1)...(19): siRNA sense strand
gaacgugcucagugggaua

SEQ ID NO: 436612 - RNA, 19 nt, Homo sapiens
  misc_RNA (1)...(19): siRNA sense strand
acaaagggagccuggauuu

SEQ ID NO: 436613 - RNA, 19 nt, Homo sapiens
  misc_RNA (1)...(19): siRNA sense strand
uaacaacagugacauugcu

SEQ ID NO: 436614 - RNA, 19 nt, Homo sapiens
  misc_RNA (1)...(19): siRNA sense strand
gaaaagaagcaacagagaa

SEQ ID NO: 436615 - RNA, 19 nt, Homo sapiens
  misc_RNA (1)...(19): siRNA sense strand
gcacaaagggagccuggau

SEQ ID NO: 436616 - RNA, 19 nt, Homo sapiens
  misc_RNA (1)...(19): siRNA sense strand
caagaggugcccgagaaua

SEQ ID NO: 436617 - RNA, 19 nt, Homo sapiens
  misc_RNA (1)...(19): siRNA sense strand
gaacaaaauagaccaaaug

SEQ ID NO: 436618 - RNA, 19 nt, Homo sapiens
  misc_RNA (1)...(19): siRNA sense strand
gcaaucacucugagaaaca

SEQ ID NO: 436619 - RNA, 19 nt, Homo sapiens
  misc_RNA (1)...(19): siRNA sense strand
ccacaugaaauucuggaaa

SEQ ID NO: 436620 - RNA, 19 nt, Homo sapiens
  misc_RNA (1)...(19): siRNA sense strand
aaagaguguugccuccaaa

SEQ ID NO: 436621 - RNA, 19 nt, Homo sapiens
  misc_RNA (1)...(19): siRNA sense strand
ucagugggauauuggcauu

SEQ ID NO: 436622 - RNA, 19 nt, Homo sapiens
  misc_RNA (1)...(19): siRNA sense strand
guccacugguguuaaguuu

SEQ ID NO: 436623 - RNA, 19 nt, Homo sapiens
  misc_RNA (1)...(19): siRNA sense strand
acacaaaauccccaaauua

SEQ ID NO: 436624 - RNA, 19 nt, Homo sapiens
  misc_RNA (1)...(19): siRNA sense strand
gagaguauaaaggucauaa

SEQ ID NO: 436625 - RNA, 19 nt, Homo sapiens
  misc_RNA (1)...(19): siRNA sense strand
gaaaucaaagcaugaaagc

SEQ ID NO: 436626 - RNA, 19 nt, Homo sapiens
  misc_RNA (1)...(19): siRNA sense strand
uugcagaaguguaacaugu

SEQ ID NO: 436627 - RNA, 19 nt, Homo sapiens
  misc_RNA (1)...(19): siRNA sense strand
gcuugagguucauacuaaa

SEQ ID NO: 436628 - RNA, 19 nt, Homo sapiens
  misc_RNA (1)...(19): siRNA sense strand
aaaccaaauaccagucaua

SEQ ID NO: 436629 - RNA, 19 nt, Homo sapiens
  misc_RNA (1)...(19): siRNA sense strand
caccaaaccagagaaauga

SEQ ID NO: 436630 - RNA, 19 nt, Homo sapiens
  misc_RNA (1)...(19): siRNA sense strand
caaaauccccaaauuagaa

SEQ ID NO: 436631 - RNA, 19 nt, Homo sapiens
  misc_RNA (1)...(19): siRNA sense strand
gcagcaaggcuuucaguac

SEQ ID NO: 436632 - RNA, 19 nt, Homo sapiens
  misc_RNA (1)...(19): siRNA sense strand
caaacugugauuccaaaga

SEQ ID NO: 436633 - RNA, 19 nt, Homo sapiens
  misc_RNA (1)...(19): siRNA sense strand
caacgcagaguguaucauc

SEQ ID NO: 436634 - RNA, 19 nt, Homo sapiens
  misc_RNA (1)...(19): siRNA sense strand
ccaaaccagagaaaugaaa

SEQ ID NO: 436635 - RNA, 19 nt, Homo sapiens
  misc_RNA (1)...(19): siRNA sense strand
ucaacaaagggaauuggua

SEQ ID NO: 436636 - RNA, 19 nt, Homo sapiens
  misc_RNA (1)...(19): siRNA sense strand
ugcaagggaucaugggaaa

SEQ ID NO: 436637 - RNA, 19 nt, Homo sapiens
  misc_RNA (1)...(19): siRNA sense strand
caaucacucugagaaacaa

SEQ ID NO: 436638 - RNA, 19 nt, Homo sapiens
  misc_RNA (1)...(19): siRNA sense strand
ucaggaggaugccuuugau

SEQ ID NO: 436639 - RNA, 19 nt, Homo sapiens
  misc_RNA (1)...(19): siRNA sense strand
ucaaucaguguguaugaaa

SEQ ID NO: 436640 - RNA, 19 nt, Homo sapiens
  misc_RNA (1)...(19): siRNA sense strand
agagaaauccacugagguu

SEQ ID NO: 436641 - RNA, 19 nt, Homo sapiens
  misc_RNA (1)...(19): siRNA sense strand
gagagggcguggguucaug

SEQ ID NO: 436642 - RNA, 19 nt, Homo sapiens
  misc_RNA (1)...(19): siRNA sense strand
gagcgcaagucacacaaaa

SEQ ID NO: 436643 - RNA, 19 nt, Homo sapiens
  misc_RNA (1)...(19): siRNA sense strand
gcaagugagcacacgaaau

SEQ ID NO: 436644 - RNA, 19 nt, Homo sapiens
  misc_RNA (1)...(19): siRNA sense strand
gaagacuggcucaccugaa

SEQ ID NO: 436645 - RNA, 19 nt, Homo sapiens
  misc_RNA (1)...(19): siRNA sense strand
ccuaaugggucagccaaug

SEQ ID NO: 436646 - RNA, 19 nt, Homo sapiens
  misc_RNA (1)...(19): siRNA sense strand
caacagugacauugcugaa

SEQ ID NO: 436647 - RNA, 19 nt, Homo sapiens
  misc_RNA (1)...(19): siRNA sense strand
uguaucaucuccugaagca

SEQ ID NO: 436648 - RNA, 19 nt, Homo sapiens
  misc_RNA (1)...(19): siRNA sense strand
ccauuacgaugcacaaagg

SEQ ID NO: 436649 - RNA, 19 nt, Homo sapiens
  misc_RNA (1)...(19): siRNA sense strand
gcagagaaagcauugaaaa

SEQ ID NO: 436650 - RNA, 19 nt, Homo sapiens
  misc_RNA (1)...(19): siRNA sense strand
aaacacaagaccacaugaa

SEQ ID NO: 436651 - RNA, 19 nt, Homo sapiens
  misc_RNA (1)...(19): siRNA sense strand
caauggcuuuggugcaguu

SEQ ID NO: 436652 - RNA, 19 nt, Homo sapiens
  misc_RNA (1)...(19): siRNA sense strand
uauccuugguggccuugua

SEQ ID NO: 436653 - RNA, 19 nt, Homo sapiens
  misc_RNA (1)...(19): siRNA sense strand
acucucaaguacugaaauu

SEQ ID NO: 436654 - RNA, 19 nt, Homo sapiens
  misc_RNA (1)...(19): siRNA sense strand
ccaaacaagccagcaauca

SEQ ID NO: 436655 - RNA, 19 nt, Homo sapiens
  misc_RNA (1)...(19): siRNA sense strand
gggcguggguucaugaaaa

SEQ ID NO: 436656 - RNA, 19 nt, Homo sapiens
  misc_RNA (1)...(19): siRNA sense strand
agcuugagguucauacuaa

SEQ ID NO: 436657 - RNA, 19 nt, Homo sapiens
  misc_RNA (1)...(19): siRNA sense strand
gaaaugagaccaccaauau

SEQ ID NO: 436658 - RNA, 19 nt, Homo sapiens
  misc_RNA (1)...(19): siRNA sense strand
caagagacauauccacaaa

SEQ ID NO: 436659 - RNA, 19 nt, Homo sapiens
  misc_RNA (1)...(19): siRNA sense strand
gaacggcaaccucuacuuu

SEQ ID NO: 436660 - RNA, 19 nt, Homo sapiens
  misc_RNA (1)...(19): siRNA sense strand
ggaaaugagaccaccaaua

SEQ ID NO: 436661 - RNA, 19 nt, Homo sapiens
  misc_RNA (1)...(19): siRNA sense strand
gaggaugguucguucauug

SEQ ID NO: 436662 - RNA, 19 nt, Homo sapiens
  misc_RNA (1)...(19): siRNA sense strand
gaagaacccuguggaugug

SEQ ID NO: 436663 - RNA, 19 nt, Homo sapiens
  misc_RNA (1)...(19): siRNA sense strand
uggaggagcuggccaaaga

SEQ ID NO: 436664 - RNA, 19 nt, Homo sapiens
  misc_RNA (1)...(19): siRNA sense strand
gcagcacaaucgagaagaa

SEQ ID NO: 436665 - RNA, 19 nt, Homo sapiens
  misc_RNA (1)...(19): siRNA sense strand
cacuacaccuuuaggguua

SEQ ID NO: 436666 - RNA, 19 nt, Homo sapiens
  misc_RNA (1)...(19): siRNA sense strand
gauacaaugugacguacug

SEQ ID NO: 436667 - RNA, 19 nt, Homo sapiens
  misc_RNA (1)...(19): siRNA sense strand
gaccagaaguaccggauuc

SEQ ID NO: 436668 - RNA, 19 nt, Homo sapiens
  misc_RNA (1)...(19): siRNA sense strand
agagacauauccacaaaga

SEQ ID NO: 436669 - RNA, 19 nt, Homo sapiens
  misc_RNA (1)...(19): siRNA sense strand
gagauccacuuguuuaagg

SEQ ID NO: 436670 - RNA, 19 nt, Homo sapiens
  misc_RNA (1)...(19): siRNA sense strand
gcaaauacucagugaagga

SEQ ID NO: 436671 - RNA, 19 nt, Homo sapiens
  misc_RNA (1)...(19): siRNA sense strand
caucauggcuaaccugaag

SEQ ID NO: 436672 - RNA, 19 nt, Homo sapiens
  misc_RNA (1)...(19): siRNA sense strand
ggacgaggaugggacaaca

SEQ ID NO: 436673 - RNA, 19 nt, Homo sapiens
  misc_RNA (1)...(19): siRNA sense strand
cagcguggauguucaguuc

SEQ ID NO: 436674 - RNA, 19 nt, Homo sapiens
  misc_RNA (1)...(19): siRNA sense strand
gcaagagacauauccacaa

SEQ ID NO: 436675 - RNA, 19 nt, Homo sapiens
  misc_RNA (1)...(19): siRNA sense strand
ggaccaucauucagaagga

SEQ ID NO: 436676 - RNA, 19 nt, Homo sapiens
  misc_RNA (1)...(19): siRNA sense strand
ccaggaccaucauucagaa

SEQ ID NO: 436677 - RNA, 19 nt, Homo sapiens
  misc_RNA (1)...(19): siRNA sense strand
acacaauggugacccaaug

SEQ ID NO: 436678 - RNA, 19 nt, Homo sapiens
  misc_RNA (1)...(19): siRNA sense strand
guucaaagccuugggagaa

SEQ ID NO: 436679 - RNA, 19 nt, Homo sapiens
  misc_RNA (1)...(19): siRNA sense strand
gcaccaggaccaucauuca

SEQ ID NO: 436680 - RNA, 19 nt, Homo sapiens
  misc_RNA (1)...(19): siRNA sense strand
aauacucagugaaggauaa

SEQ ID NO: 436681 - RNA, 19 nt, Homo sapiens
  misc_RNA (1)...(19): siRNA sense strand
gcaacuguccuucaaccuu

SEQ ID NO: 436682 - RNA, 19 nt, Homo sapiens
  misc_RNA (1)...(19): siRNA sense strand
gcggauacaaugugacgua

SEQ ID NO: 436683 - RNA, 19 nt, Homo sapiens
  misc_RNA (1)...(19): siRNA sense strand
gggcaacaacagcaacuuu

SEQ ID NO: 436684 - RNA, 19 nt, Homo sapiens
  misc_RNA (1)...(19): siRNA sense strand
gaaauccucaacucaagug

SEQ ID NO: 436685 - RNA, 19 nt, Homo sapiens
  misc_RNA (1)...(19): siRNA sense strand
uauguccacuacaccuuua

SEQ ID NO: 436686 - RNA, 19 nt, Homo sapiens
  misc_RNA (1)...(19): siRNA sense strand
gagggaugguguccacuuc

SEQ ID NO: 436687 - RNA, 19 nt, Homo sapiens
  misc_RNA (1)...(19): siRNA sense strand
acgacagccuggccgauua

SEQ ID NO: 436688 - RNA, 19 nt, Homo sapiens
  misc_RNA (1)...(19): siRNA sense strand
uacgagauccacuuguuua

SEQ ID NO: 436689 - RNA, 19 nt, Homo sapiens
  misc_RNA (1)...(19): siRNA sense strand
ggaggaugauggcgaguac

SEQ ID NO: 436690 - RNA, 19 nt, Homo sapiens
  misc_RNA (1)...(19): siRNA sense strand
gggaugguguccacuucaa

SEQ ID NO: 436691 - RNA, 19 nt, Homo sapiens
  misc_RNA (1)...(19): siRNA sense strand
aagcacagcaagagacaua

SEQ ID NO: 436692 - RNA, 19 nt, Homo sapiens
  misc_RNA (1)...(19): siRNA sense strand
ggcaaucccugagcuggaa

SEQ ID NO: 436693 - RNA, 19 nt, Homo sapiens
  misc_RNA (1)...(19): siRNA sense strand
gggcaucuaccgcugcuuu

SEQ ID NO: 436694 - RNA, 19 nt, Homo sapiens
  misc_RNA (1)...(19): siRNA sense strand
agaagaacccuguggaugu

SEQ ID NO: 436695 - RNA, 19 nt, Homo sapiens
  misc_RNA (1)...(19): siRNA sense strand
caaagagggcccuggugaa

SEQ ID NO: 436696 - RNA, 19 nt, Homo sapiens
  misc_RNA (1)...(19): siRNA sense strand
ccaccuucgugcccuauga

SEQ ID NO: 436697 - RNA, 19 nt, Homo sapiens
  misc_RNA (1)...(19): siRNA sense strand
gauccugacugcggacaau

SEQ ID NO: 436698 - RNA, 19 nt, Homo sapiens
  misc_RNA (1)...(19): siRNA sense strand
gagcuggaaggcauugaaa

SEQ ID NO: 436699 - RNA, 19 nt, Homo sapiens
  misc_RNA (1)...(19): siRNA sense strand
ugaaggacaccaugugaug

SEQ ID NO: 436700 - RNA, 19 nt, Homo sapiens
  misc_RNA (1)...(19): siRNA sense strand
gcaacgugcagcccaguga

SEQ ID NO: 436701 - RNA, 19 nt, Homo sapiens
  misc_RNA (1)...(19): siRNA sense strand
gaccaucauucagaaggaa

SEQ ID NO: 436702 - RNA, 19 nt, Homo sapiens
  misc_RNA (1)...(19): siRNA sense strand
gaaagugggcgaggaggau

SEQ ID NO: 436703 - RNA, 19 nt, Homo sapiens
  misc_RNA (1)...(19): siRNA sense strand
uuccauaucuuguucaaag

SEQ ID NO: 436704 - RNA, 19 nt, Homo sapiens
  misc_RNA (1)...(19): siRNA sense strand
gcguggauguucaguucaa

SEQ ID NO: 436705 - RNA, 19 nt, Homo sapiens
  misc_RNA (1)...(19): siRNA sense strand
gcagcccagugacacaaug

SEQ ID NO: 436706 - RNA, 19 nt, Homo sapiens
  misc_RNA (1)...(19): siRNA sense strand
cgaggaugguucguucauu

SEQ ID NO: 436707 - RNA, 19 nt, Homo sapiens
  misc_RNA (1)...(19): siRNA sense strand
caagugccgugcuggucaa

SEQ ID NO: 436708 - RNA, 19 nt, Homo sapiens
  misc_RNA (1)...(19): siRNA sense strand
ccaccaacagcaugauuga

SEQ ID NO: 436709 - RNA, 19 nt, Homo sapiens
  misc_RNA (1)...(19): siRNA sense strand
acuacgagauccacuuguu

SEQ ID NO: 436710 - RNA, 19 nt, Homo sapiens
  misc_RNA (1)...(19): siRNA sense strand
gugcaucgccgagggcuuu

SEQ ID NO: 436711 - RNA, 19 nt, Homo sapiens
  misc_RNA (1)...(19): siRNA sense strand
ccaguacaguggcaagaag

SEQ ID NO: 436712 - RNA, 19 nt, Homo sapiens
  misc_RNA (1)...(19): siRNA sense strand
cacaguaugucagcuacaa

SEQ ID NO: 436713 - RNA, 19 nt, Homo sapiens
  misc_RNA (1)...(19): siRNA sense strand
ucaaagccuugggagaaga

SEQ ID NO: 436714 - RNA, 19 nt, Homo sapiens
  misc_RNA (1)...(19): siRNA sense strand
ugacaucagccucaagugu

SEQ ID NO: 436715 - RNA, 19 nt, Homo sapiens
  misc_RNA (1)...(19): siRNA sense strand
ggcaacaacagcaacuuug

SEQ ID NO: 436716 - RNA, 19 nt, Homo sapiens
  misc_RNA (1)...(19): siRNA sense strand
gcacagcaagagacauauc

SEQ ID NO: 436717 - RNA, 19 nt, Homo sapiens
  misc_RNA (1)...(19): siRNA sense strand
gcuggaaggcauugaaauc

SEQ ID NO: 436718 - RNA, 19 nt, Homo sapiens
  misc_RNA (1)...(19): siRNA sense strand
ugacaaguacuucauagag

SEQ ID NO: 436719 - RNA, 19 nt, Homo sapiens
  misc_RNA (1)...(19): siRNA sense strand
acaucagccucaaguguga

SEQ ID NO: 436720 - RNA, 19 nt, Homo sapiens
  misc_RNA (1)...(19): siRNA sense strand
ggccaaaggagacagugaa

SEQ ID NO: 436721 - RNA, 19 nt, Homo sapiens
  misc_RNA (1)...(19): siRNA sense strand
cuacgagauccacuuguuu

SEQ ID NO: 436722 - RNA, 19 nt, Homo sapiens
  misc_RNA (1)...(19): siRNA sense strand
ccaaggagggccagugcaa

SEQ ID NO: 436723 - RNA, 19 nt, Homo sapiens
  misc_RNA (1)...(19): siRNA sense strand
ggccuugucugggaucuca

SEQ ID NO: 436724 - RNA, 19 nt, Homo sapiens
  misc_RNA (1)...(19): siRNA sense strand
ggaagcacagcaagagaca

SEQ ID NO: 436725 - RNA, 19 nt, Homo sapiens
  misc_RNA (1)...(19): siRNA sense strand
ggacagugacaaguacuuc

SEQ ID NO: 436726 - RNA, 19 nt, Homo sapiens
  misc_RNA (1)...(19): siRNA sense strand
uaccagaaccacaacaaga

SEQ ID NO: 436727 - RNA, 19 nt, Homo sapiens
  misc_RNA (1)...(19): siRNA sense strand
cuccggaucuacuggauga

SEQ ID NO: 436728 - RNA, 19 nt, Homo sapiens
  misc_RNA (1)...(19): siRNA sense strand
cgacaaccacucagacuac

SEQ ID NO: 436729 - RNA, 19 nt, Homo sapiens
  misc_RNA (1)...(19): siRNA sense strand
cccgaccgaugaaagauga

SEQ ID NO: 436730 - RNA, 19 nt, Homo sapiens
  misc_RNA (1)...(19): siRNA sense strand
caacuucagguuccauauc

SEQ ID NO: 436731 - RNA, 19 nt, Homo sapiens
  misc_RNA (1)...(19): siRNA sense strand
cacacaaccugaccgaucu

SEQ ID NO: 436732 - RNA, 19 nt, Homo sapiens
  misc_RNA (1)...(19): siRNA sense strand
caauggugacccaauguga

SEQ ID NO: 436733 - RNA, 19 nt, Homo sapiens
  misc_RNA (1)...(19): siRNA sense strand
cggcaugcguacuauguca

SEQ ID NO: 436734 - RNA, 19 nt, Homo sapiens
  misc_RNA (1)...(19): siRNA sense strand
ggaugaacagcaagaucuu

SEQ ID NO: 436735 - RNA, 19 nt, Homo sapiens
  misc_RNA (1)...(19): siRNA sense strand
cagguuccauaucuuguuc

SEQ ID NO: 436736 - RNA, 19 nt, Homo sapiens
  misc_RNA (1)...(19): siRNA sense strand
gugccgugcuggucaagug

SEQ ID NO: 436737 - RNA, 19 nt, Homo sapiens
  misc_RNA (1)...(19): siRNA sense strand
ccagggaaccagaccucua

SEQ ID NO: 436738 - RNA, 19 nt, Homo sapiens
  misc_RNA (1)...(19): siRNA sense strand
gaauuugaggacaaggaaa

SEQ ID NO: 436739 - RNA, 19 nt, Homo sapiens
  misc_RNA (1)...(19): siRNA sense strand
gacaaccacucagacuaca

SEQ ID NO: 436740 - RNA, 19 nt, Homo sapiens
  misc_RNA (1)...(19): siRNA sense strand
caaccacucagacuacauc

SEQ ID NO: 436741 - RNA, 19 nt, Homo sapiens
  misc_RNA (1)...(19): siRNA sense strand
ggcggcaaauacucaguga

SEQ ID NO: 436742 - RNA, 19 nt, Homo sapiens
  misc_RNA (1)...(19): siRNA sense strand
guucaucggcuuugugagu

SEQ ID NO: 436743 - RNA, 19 nt, Homo sapiens
  misc_RNA (1)...(19): siRNA sense strand
aaauggcugugaagaccaa

SEQ ID NO: 436744 - RNA, 19 nt, Homo sapiens
  misc_RNA (1)...(19): siRNA sense strand
gcuacgugcucuccuacca

SEQ ID NO: 436745 - RNA, 19 nt, Homo sapiens
  misc_RNA (1)...(19): siRNA sense strand
uaugaaggacaccauguga

SEQ ID NO: 436746 - RNA, 19 nt, Homo sapiens
  misc_RNA (1)...(19): siRNA sense strand
gaggaagcacagcaagaga

SEQ ID NO: 436747 - RNA, 19 nt, Homo sapiens
  misc_RNA (1)...(19): siRNA sense strand
gaguagggcacagcucuug

SEQ ID NO: 436748 - RNA, 19 nt, Homo sapiens
  misc_RNA (1)...(19): siRNA sense strand
ggaugguguccacuucaaa

SEQ ID NO: 436749 - RNA, 19 nt, Homo sapiens
  misc_RNA (1)...(19): siRNA sense strand
ccacuucaaacccaaggaa

SEQ ID NO: 436750 - RNA, 19 nt, Homo sapiens
  misc_RNA (1)...(19): siRNA sense strand
gacgacagccuggccgauu

SEQ ID NO: 436751 - RNA, 19 nt, Homo sapiens
  misc_RNA (1)...(19): siRNA sense strand
caaauacucagugaaggau

SEQ ID NO: 436752 - RNA, 19 nt, Homo sapiens
  misc_RNA (1)...(19): siRNA sense strand
gauguuccggcaccaaaug

SEQ ID NO: 436753 - RNA, 19 nt, Homo sapiens
  misc_RNA (1)...(19): siRNA sense strand
gagggccagugcaacuuca

SEQ ID NO: 436754 - RNA, 19 nt, Homo sapiens
  misc_RNA (1)...(19): siRNA sense strand
acauugaauuugaggacaa

SEQ ID NO: 436755 - RNA, 19 nt, Homo sapiens
  misc_RNA (1)...(19): siRNA sense strand
gcacaaucgagaagaaagg

SEQ ID NO: 436756 - RNA, 19 nt, Homo sapiens
  misc_RNA (1)...(19): siRNA sense strand
cugccuaccuucugugcaa

SEQ ID NO: 436757 - RNA, 19 nt, Homo sapiens
  misc_RNA (1)...(19): siRNA sense strand
gaaaugagaccaccaauau

SEQ ID NO: 436758 - RNA, 19 nt, Homo sapiens
  misc_RNA (1)...(19): siRNA sense strand
caagagacauauccacaaa

SEQ ID NO: 436759 - RNA, 19 nt, Homo sapiens
  misc_RNA (1)...(19): siRNA sense strand
gaacggcaaccucuacuuu

SEQ ID NO: 436760 - RNA, 19 nt, Homo sapiens
  misc_RNA (1)...(19): siRNA sense strand
ggaaaugagaccaccaaua

SEQ ID NO: 436761 - RNA, 19 nt, Homo sapiens
  misc_RNA (1)...(19): siRNA sense strand
gaggaugguucguucauug

SEQ ID NO: 436762 - RNA, 19 nt, Homo sapiens
  misc_RNA (1)...(19): siRNA sense strand
gaagaacccuguggaugug

SEQ ID NO: 436763 - RNA, 19 nt, Homo sapiens
  misc_RNA (1)...(19): siRNA sense strand
uggaggagcuggccaaaga

SEQ ID NO: 436764 - RNA, 19 nt, Homo sapiens
  misc_RNA (1)...(19): siRNA sense strand
gcagcacaaucgagaagaa

SEQ ID NO: 436765 - RNA, 19 nt, Homo sapiens
  misc_RNA (1)...(19): siRNA sense strand
cacuacaccuuuaggguua

SEQ ID NO: 436766 - RNA, 19 nt, Homo sapiens
  misc_RNA (1)...(19): siRNA sense strand
gauacaaugugacguacug

SEQ ID NO: 436767 - RNA, 19 nt, Homo sapiens
  misc_RNA (1)...(19): siRNA sense strand
gaccagaaguaccggauuc

SEQ ID NO: 436768 - RNA, 19 nt, Homo sapiens
  misc_RNA (1)...(19): siRNA sense strand
agagacauauccacaaaga

SEQ ID NO: 436769 - RNA, 19 nt, Homo sapiens
  misc_RNA (1)...(19): siRNA sense strand
gagauccacuuguuuaagg

SEQ ID NO: 436770 - RNA, 19 nt, Homo sapiens
  misc_RNA (1)...(19): siRNA sense strand
gcaaauacucagugaagga

SEQ ID NO: 436771 - RNA, 19 nt, Homo sapiens
  misc_RNA (1)...(19): siRNA sense strand
caucauggcuaaccugaag

SEQ ID NO: 436772 - RNA, 19 nt, Homo sapiens
  misc_RNA (1)...(19): siRNA sense strand
ggacgaggaugggacaaca

SEQ ID NO: 436773 - RNA, 19 nt, Homo sapiens
  misc_RNA (1)...(19): siRNA sense strand
cagcguggauguucaguuc

SEQ ID NO: 436774 - RNA, 19 nt, Homo sapiens
  misc_RNA (1)...(19): siRNA sense strand
gcaagagacauauccacaa

SEQ ID NO: 436775 - RNA, 19 nt, Homo sapiens
  misc_RNA (1)...(19): siRNA sense strand
ggaccaucauucagaagga

SEQ ID NO: 436776 - RNA, 19 nt, Homo sapiens
  misc_RNA (1)...(19): siRNA sense strand
ccaggaccaucauucagaa

SEQ ID NO: 436777 - RNA, 19 nt, Homo sapiens
  misc_RNA (1)...(19): siRNA sense strand
acacaauggugacccaaug

SEQ ID NO: 436778 - RNA, 19 nt, Homo sapiens
  misc_RNA (1)...(19): siRNA sense strand
guucaaagccuugggagaa

SEQ ID NO: 436779 - RNA, 19 nt, Homo sapiens
  misc_RNA (1)...(19): siRNA sense strand
gcaccaggaccaucauuca

SEQ ID NO: 436780 - RNA, 19 nt, Homo sapiens
  misc_RNA (1)...(19): siRNA sense strand
aauacucagugaaggauaa

SEQ ID NO: 436781 - RNA, 19 nt, Homo sapiens
  misc_RNA (1)...(19): siRNA sense strand
gcaacuguccuucaaccuu

SEQ ID NO: 436782 - RNA, 19 nt, Homo sapiens
  misc_RNA (1)...(19): siRNA sense strand
gcggauacaaugugacgua

SEQ ID NO: 436783 - RNA, 19 nt, Homo sapiens
  misc_RNA (1)...(19): siRNA sense strand
gggcaacaacagcaacuuu

SEQ ID NO: 436784 - RNA, 19 nt, Homo sapiens
  misc_RNA (1)...(19): siRNA sense strand
gaaauccucaacucaagug

SEQ ID NO: 436785 - RNA, 19 nt, Homo sapiens
  misc_RNA (1)...(19): siRNA sense strand
uauguccacuacaccuuua

SEQ ID NO: 436786 - RNA, 19 nt, Homo sapiens
  misc_RNA (1)...(19): siRNA sense strand
gagggaugguguccacuuc

SEQ ID NO: 436787 - RNA, 19 nt, Homo sapiens
  misc_RNA (1)...(19): siRNA sense strand
acgacagccuggccgauua

SEQ ID NO: 436788 - RNA, 19 nt, Homo sapiens
  misc_RNA (1)...(19): siRNA sense strand
uacgagauccacuuguuua

SEQ ID NO: 436789 - RNA, 19 nt, Homo sapiens
  misc_RNA (1)...(19): siRNA sense strand
ggaggaugauggcgaguac

SEQ ID NO: 436790 - RNA, 19 nt, Homo sapiens
  misc_RNA (1)...(19): siRNA sense strand
gggaugguguccacuucaa

SEQ ID NO: 436791 - RNA, 19 nt, Homo sapiens
  misc_RNA (1)...(19): siRNA sense strand
aagcacagcaagagacaua

SEQ ID NO: 436792 - RNA, 19 nt, Homo sapiens
  misc_RNA (1)...(19): siRNA sense strand
ggcaaucccugagcuggaa

SEQ ID NO: 436793 - RNA, 19 nt, Homo sapiens
  misc_RNA (1)...(19): siRNA sense strand
gggcaucuaccgcugcuuu

SEQ ID NO: 436794 - RNA, 19 nt, Homo sapiens
  misc_RNA (1)...(19): siRNA sense strand
agaagaacccuguggaugu

SEQ ID NO: 436795 - RNA, 19 nt, Homo sapiens
  misc_RNA (1)...(19): siRNA sense strand
caaagagggcccuggugaa

SEQ ID NO: 436796 - RNA, 19 nt, Homo sapiens
  misc_RNA (1)...(19): siRNA sense strand
ccaccuucgugcccuauga

SEQ ID NO: 436797 - RNA, 19 nt, Homo sapiens
  misc_RNA (1)...(19): siRNA sense strand
gauccugacugcggacaau

SEQ ID NO: 436798 - RNA, 19 nt, Homo sapiens
  misc_RNA (1)...(19): siRNA sense strand
gagcuggaaggcauugaaa

SEQ ID NO: 436799 - RNA, 19 nt, Homo sapiens
  misc_RNA (1)...(19): siRNA sense strand
ugaaggacaccaugugaug

SEQ ID NO: 436800 - RNA, 19 nt, Homo sapiens
  misc_RNA (1)...(19): siRNA sense strand
gcaacgugcagcccaguga

SEQ ID NO: 436801 - RNA, 19 nt, Homo sapiens
  misc_RNA (1)...(19): siRNA sense strand
gaccaucauucagaaggaa

SEQ ID NO: 436802 - RNA, 19 nt, Homo sapiens
  misc_RNA (1)...(19): siRNA sense strand
gaaagugggcgaggaggau

SEQ ID NO: 436803 - RNA, 19 nt, Homo sapiens
  misc_RNA (1)...(19): siRNA sense strand
uuccauaucuuguucaaag

SEQ ID NO: 436804 - RNA, 19 nt, Homo sapiens
  misc_RNA (1)...(19): siRNA sense strand
gcguggauguucaguucaa

SEQ ID NO: 436805 - RNA, 19 nt, Homo sapiens
  misc_RNA (1)...(19): siRNA sense strand
gcagcccagugacacaaug

SEQ ID NO: 436806 - RNA, 19 nt, Homo sapiens
  misc_RNA (1)...(19): siRNA sense strand
cgaggaugguucguucauu

SEQ ID NO: 436807 - RNA, 19 nt, Homo sapiens
  misc_RNA (1)...(19): siRNA sense strand
caagugccgugcuggucaa

SEQ ID NO: 436808 - RNA, 19 nt, Homo sapiens
  misc_RNA (1)...(19): siRNA sense strand
ccaccaacagcaugauuga

SEQ ID NO: 436809 - RNA, 19 nt, Homo sapiens
  misc_RNA (1)...(19): siRNA sense strand
acuacgagauccacuuguu

SEQ ID NO: 436810 - RNA, 19 nt, Homo sapiens
  misc_RNA (1)...(19): siRNA sense strand
gugcaucgccgagggcuuu

SEQ ID NO: 436811 - RNA, 19 nt, Homo sapiens
  misc_RNA (1)...(19): siRNA sense strand
ccaguacaguggcaagaag

SEQ ID NO: 436812 - RNA, 19 nt, Homo sapiens
  misc_RNA (1)...(19): siRNA sense strand
cacaguaugucagcuacaa

SEQ ID NO: 436813 - RNA, 19 nt, Homo sapiens
  misc_RNA (1)...(19): siRNA sense strand
ucaaagccuugggagaaga

SEQ ID NO: 436814 - RNA, 19 nt, Homo sapiens
  misc_RNA (1)...(19): siRNA sense strand
ugacaucagccucaagugu

SEQ ID NO: 436815 - RNA, 19 nt, Homo sapiens
  misc_RNA (1)...(19): siRNA sense strand
ggcaacaacagcaacuuug

SEQ ID NO: 436816 - RNA, 19 nt, Homo sapiens
  misc_RNA (1)...(19): siRNA sense strand
gcacagcaagagacauauc

SEQ ID NO: 436817 - RNA, 19 nt, Homo sapiens
  misc_RNA (1)...(19): siRNA sense strand
gcuggaaggcauugaaauc

SEQ ID NO: 436818 - RNA, 19 nt, Homo sapiens
  misc_RNA (1)...(19): siRNA sense strand
ugacaaguacuucauagag

SEQ ID NO: 436819 - RNA, 19 nt, Homo sapiens
  misc_RNA (1)...(19): siRNA sense strand
acaucagccucaaguguga

SEQ ID NO: 436820 - RNA, 19 nt, Homo sapiens
  misc_RNA (1)...(19): siRNA sense strand
ggccaaaggagacagugaa

SEQ ID NO: 436821 - RNA, 19 nt, Homo sapiens
  misc_RNA (1)...(19): siRNA sense strand
cuacgagauccacuuguuu

SEQ ID NO: 436822 - RNA, 19 nt, Homo sapiens
  misc_RNA (1)...(19): siRNA sense strand
ccaaggagggccagugcaa

SEQ ID NO: 436823 - RNA, 19 nt, Homo sapiens
  misc_RNA (1)...(19): siRNA sense strand
ggccuugucugggaucuca

SEQ ID NO: 436824 - RNA, 19 nt, Homo sapiens
  misc_RNA (1)...(19): siRNA sense strand
ggaagcacagcaagagaca

SEQ ID NO: 436825 - RNA, 19 nt, Homo sapiens
  misc_RNA (1)...(19): siRNA sense strand
ggacagugacaaguacuuc

SEQ ID NO: 436826 - RNA, 19 nt, Homo sapiens
  misc_RNA (1)...(19): siRNA sense strand
uaccagaaccacaacaaga

SEQ ID NO: 436827 - RNA, 19 nt, Homo sapiens
  misc_RNA (1)...(19): siRNA sense strand
cuccggaucuacuggauga

SEQ ID NO: 436828 - RNA, 19 nt, Homo sapiens
  misc_RNA (1)...(19): siRNA sense strand
cgacaaccacucagacuac

SEQ ID NO: 436829 - RNA, 19 nt, Homo sapiens
  misc_RNA (1)...(19): siRNA sense strand
cccgaccgaugaaagauga

SEQ ID NO: 436830 - RNA, 19 nt, Homo sapiens
  misc_RNA (1)...(19): siRNA sense strand
caacuucagguuccauauc

SEQ ID NO: 436831 - RNA, 19 nt, Homo sapiens
  misc_RNA (1)...(19): siRNA sense strand
cacacaaccugaccgaucu

SEQ ID NO: 436832 - RNA, 19 nt, Homo sapiens
  misc_RNA (1)...(19): siRNA sense strand
caauggugacccaauguga

SEQ ID NO: 436833 - RNA, 19 nt, Homo sapiens
  misc_RNA (1)...(19): siRNA sense strand
cggcaugcguacuauguca

SEQ ID NO: 436834 - RNA, 19 nt, Homo sapiens
  misc_RNA (1)...(19): siRNA sense strand
ggaugaacagcaagaucuu

SEQ ID NO: 436835 - RNA, 19 nt, Homo sapiens
  misc_RNA (1)...(19): siRNA sense strand
cagguuccauaucuuguuc

SEQ ID NO: 436836 - RNA, 19 nt, Homo sapiens
  misc_RNA (1)...(19): siRNA sense strand
gugccgugcuggucaagug

SEQ ID NO: 436837 - RNA, 19 nt, Homo sapiens
  misc_RNA (1)...(19): siRNA sense strand
ccagggaaccagaccucua

SEQ ID NO: 436838 - RNA, 19 nt, Homo sapiens
  misc_RNA (1)...(19): siRNA sense strand
gaauuugaggacaaggaaa

SEQ ID NO: 436839 - RNA, 19 nt, Homo sapiens
  misc_RNA (1)...(19): siRNA sense strand
gacaaccacucagacuaca

SEQ ID NO: 436840 - RNA, 19 nt, Homo sapiens
  misc_RNA (1)...(19): siRNA sense strand
caaccacucagacuacauc

SEQ ID NO: 436841 - RNA, 19 nt, Homo sapiens
  misc_RNA (1)...(19): siRNA sense strand
ggcggcaaauacucaguga

SEQ ID NO: 436842 - RNA, 19 nt, Homo sapiens
  misc_RNA (1)...(19): siRNA sense strand
guucaucggcuuugugagu

SEQ ID NO: 436843 - RNA, 19 nt, Homo sapiens
  misc_RNA (1)...(19): siRNA sense strand
aaauggcugugaagaccaa

SEQ ID NO: 436844 - RNA, 19 nt, Homo sapiens
  misc_RNA (1)...(19): siRNA sense strand
gcuacgugcucuccuacca

SEQ ID NO: 436845 - RNA, 19 nt, Homo sapiens
  misc_RNA (1)...(19): siRNA sense strand
uaugaaggacaccauguga

SEQ ID NO: 436846 - RNA, 19 nt, Homo sapiens
  misc_RNA (1)...(19): siRNA sense strand
gaggaagcacagcaagaga

SEQ ID NO: 436847 - RNA, 19 nt, Homo sapiens
  misc_RNA (1)...(19): siRNA sense strand
gaguagggcacagcucuug

SEQ ID NO: 436848 - RNA, 19 nt, Homo sapiens
  misc_RNA (1)...(19): siRNA sense strand
ggaugguguccacuucaaa

SEQ ID NO: 436849 - RNA, 19 nt, Homo sapiens
  misc_RNA (1)...(19): siRNA sense strand
ccacuucaaacccaaggaa

SEQ ID NO: 436850 - RNA, 19 nt, Homo sapiens
  misc_RNA (1)...(19): siRNA sense strand
gacgacagccuggccgauu

SEQ ID NO: 436851 - RNA, 19 nt, Homo sapiens
  misc_RNA (1)...(19): siRNA sense strand
caaauacucagugaaggau

SEQ ID NO: 436852 - RNA, 19 nt, Homo sapiens
  misc_RNA (1)...(19): siRNA sense strand
gauguuccggcaccaaaug

SEQ ID NO: 436853 - RNA, 19 nt, Homo sapiens
  misc_RNA (1)...(19): siRNA sense strand
gagggccagugcaacuuca

SEQ ID NO: 436854 - RNA, 19 nt, Homo sapiens
  misc_RNA (1)...(19): siRNA sense strand
acauugaauuugaggacaa

SEQ ID NO: 436855 - RNA, 19 nt, Homo sapiens
  misc_RNA (1)...(19): siRNA sense strand
gcacaaucgagaagaaagg

SEQ ID NO: 436856 - RNA, 19 nt, Homo sapiens
  misc_RNA (1)...(19): siRNA sense strand
cugccuaccuucugugcaa

SEQ ID NO: 436857 - RNA, 19 nt, Homo sapiens
  misc_RNA (1)...(19): siRNA sense strand
gagcagagauggcaccuuu

SEQ ID NO: 436858 - RNA, 19 nt, Homo sapiens
  misc_RNA (1)...(19): siRNA sense strand
gcacuuggaugacuuauuc

SEQ ID NO: 436859 - RNA, 19 nt, Homo sapiens
  misc_RNA (1)...(19): siRNA sense strand
ggaccaggguugucaauuu

SEQ ID NO: 436860 - RNA, 19 nt, Homo sapiens
  misc_RNA (1)...(19): siRNA sense strand
uuaaugagcccuuguauuu

SEQ ID NO: 436861 - RNA, 19 nt, Homo sapiens
  misc_RNA (1)...(19): siRNA sense strand
ggaaaguggucuccucuuc

SEQ ID NO: 436862 - RNA, 19 nt, Homo sapiens
  misc_RNA (1)...(19): siRNA sense strand
gaacagaaagugagagguu

SEQ ID NO: 436863 - RNA, 19 nt, Homo sapiens
  misc_RNA (1)...(19): siRNA sense strand
ggccaaagacuguguauuu

SEQ ID NO: 436864 - RNA, 19 nt, Homo sapiens
  misc_RNA (1)...(19): siRNA sense strand
gaucucgggucaucucaaa

SEQ ID NO: 436865 - RNA, 19 nt, Homo sapiens
  misc_RNA (1)...(19): siRNA sense strand
gcaacgagauggugcuaca

SEQ ID NO: 436866 - RNA, 19 nt, Homo sapiens
  misc_RNA (1)...(19): siRNA sense strand
cagaaccugugacguuuaa

SEQ ID NO: 436867 - RNA, 19 nt, Homo sapiens
  misc_RNA (1)...(19): siRNA sense strand
gaccaggguugucaauuuc

SEQ ID NO: 436868 - RNA, 19 nt, Homo sapiens
  misc_RNA (1)...(19): siRNA sense strand
ggaagggugucaacaagag

SEQ ID NO: 436869 - RNA, 19 nt, Homo sapiens
  misc_RNA (1)...(19): siRNA sense strand
gcagagauggcaccuuuga

SEQ ID NO: 436870 - RNA, 19 nt, Homo sapiens
  misc_RNA (1)...(19): siRNA sense strand
cacaggaucuucacccaaa

SEQ ID NO: 436871 - RNA, 19 nt, Homo sapiens
  misc_RNA (1)...(19): siRNA sense strand
ggacacagacagugaggaa

SEQ ID NO: 436872 - RNA, 19 nt, Homo sapiens
  misc_RNA (1)...(19): siRNA sense strand
gcgagugucuuucuuugau

SEQ ID NO: 436873 - RNA, 19 nt, Homo sapiens
  misc_RNA (1)...(19): siRNA sense strand
ggaacaucauggccaaaga

SEQ ID NO: 436874 - RNA, 19 nt, Homo sapiens
  misc_RNA (1)...(19): siRNA sense strand
aaacauccauugccgaaca

SEQ ID NO: 436875 - RNA, 19 nt, Homo sapiens
  misc_RNA (1)...(19): siRNA sense strand
gauucuggaugccaauaaa

SEQ ID NO: 436876 - RNA, 19 nt, Homo sapiens
  misc_RNA (1)...(19): siRNA sense strand
ccaggaucgucuuuaauga

SEQ ID NO: 436877 - RNA, 19 nt, Homo sapiens
  misc_RNA (1)...(19): siRNA sense strand
cccaggagcugaagacaga

SEQ ID NO: 436878 - RNA, 19 nt, Homo sapiens
  misc_RNA (1)...(19): siRNA sense strand
ggaaccacgggacauauuu

SEQ ID NO: 436879 - RNA, 19 nt, Homo sapiens
  misc_RNA (1)...(19): siRNA sense strand
gcccggagaucaaagacuu

SEQ ID NO: 436880 - RNA, 19 nt, Homo sapiens
  misc_RNA (1)...(19): siRNA sense strand
gaaggucaucuaccaguga

SEQ ID NO: 436881 - RNA, 19 nt, Homo sapiens
  misc_RNA (1)...(19): siRNA sense strand
cguccaggaucgucuuuaa

SEQ ID NO: 436882 - RNA, 19 nt, Homo sapiens
  misc_RNA (1)...(19): siRNA sense strand
gccaaagacuguguauuuc

SEQ ID NO: 436883 - RNA, 19 nt, Homo sapiens
  misc_RNA (1)...(19): siRNA sense strand
ggaaggaauccacggcauu

SEQ ID NO: 436884 - RNA, 19 nt, Homo sapiens
  misc_RNA (1)...(19): siRNA sense strand
agacuucuuugucaucauu

SEQ ID NO: 436885 - RNA, 19 nt, Homo sapiens
  misc_RNA (1)...(19): siRNA sense strand
gaaagccucgccuccagaa

SEQ ID NO: 436886 - RNA, 19 nt, Homo sapiens
  misc_RNA (1)...(19): siRNA sense strand
ccacgggacauauuucuga

SEQ ID NO: 436887 - RNA, 19 nt, Homo sapiens
  misc_RNA (1)...(19): siRNA sense strand
gagagguuguagcacauug

SEQ ID NO: 436888 - RNA, 19 nt, Homo sapiens
  misc_RNA (1)...(19): siRNA sense strand
uggagaaguuugaggaaga

SEQ ID NO: 436889 - RNA, 19 nt, Homo sapiens
  misc_RNA (1)...(19): siRNA sense strand
gcacgaaggccgagagcau

SEQ ID NO: 436890 - RNA, 19 nt, Homo sapiens
  misc_RNA (1)...(19): siRNA sense strand
gcuacaguuucuugccuuu

SEQ ID NO: 436891 - RNA, 19 nt, Homo sapiens
  misc_RNA (1)...(19): siRNA sense strand
uaucguggcugugguggaa

SEQ ID NO: 436892 - RNA, 19 nt, Homo sapiens
  misc_RNA (1)...(19): siRNA sense strand
gagcaaaacagacacauga

SEQ ID NO: 436893 - RNA, 19 nt, Homo sapiens
  misc_RNA (1)...(19): siRNA sense strand
ggacggaccgguaauuagg

SEQ ID NO: 436894 - RNA, 19 nt, Homo sapiens
  misc_RNA (1)...(19): siRNA sense strand
caaugaccaugaggacaaa

SEQ ID NO: 436895 - RNA, 19 nt, Homo sapiens
  misc_RNA (1)...(19): siRNA sense strand
ccaaagacuguguauuuca

SEQ ID NO: 436896 - RNA, 19 nt, Homo sapiens
  misc_RNA (1)...(19): siRNA sense strand
caucauggccaaagacugu

SEQ ID NO: 436897 - RNA, 19 nt, Homo sapiens
  misc_RNA (1)...(19): siRNA sense strand
cgagauggugcuacaguuu

SEQ ID NO: 436898 - RNA, 19 nt, Homo sapiens
  misc_RNA (1)...(19): siRNA sense strand
gaaccacgggacauauuuc

SEQ ID NO: 436899 - RNA, 19 nt, Homo sapiens
  misc_RNA (1)...(19): siRNA sense strand
caaagacuguguauuucac

SEQ ID NO: 436900 - RNA, 19 nt, Homo sapiens
  misc_RNA (1)...(19): siRNA sense strand
ucaaugaccaugaggacaa

SEQ ID NO: 436901 - RNA, 19 nt, Homo sapiens
  misc_RNA (1)...(19): siRNA sense strand
cuacaucaaugaccaugag

SEQ ID NO: 436902 - RNA, 19 nt, Homo sapiens
  misc_RNA (1)...(19): siRNA sense strand
ucuuugaguuugugcuuaa

SEQ ID NO: 436903 - RNA, 19 nt, Homo sapiens
  misc_RNA (1)...(19): siRNA sense strand
gguggugaguggagacaug

SEQ ID NO: 436904 - RNA, 19 nt, Homo sapiens
  misc_RNA (1)...(19): siRNA sense strand
ggaauucuucggaucuuca

SEQ ID NO: 436905 - RNA, 19 nt, Homo sapiens
  misc_RNA (1)...(19): siRNA sense strand
ucaacaagaggaucaccua

SEQ ID NO: 436906 - RNA, 19 nt, Homo sapiens
  misc_RNA (1)...(19): siRNA sense strand
gccagccgcucaucuccaa

SEQ ID NO: 436907 - RNA, 19 nt, Homo sapiens
  misc_RNA (1)...(19): siRNA sense strand
ccacggcauuccagugugu

SEQ ID NO: 436908 - RNA, 19 nt, Homo sapiens
  misc_RNA (1)...(19): siRNA sense strand
ggucggccacccugcauuu

SEQ ID NO: 436909 - RNA, 19 nt, Homo sapiens
  misc_RNA (1)...(19): siRNA sense strand
ggagaaguuugaggaagag

SEQ ID NO: 436910 - RNA, 19 nt, Homo sapiens
  misc_RNA (1)...(19): siRNA sense strand
gagugucuuucuuugaugu

SEQ ID NO: 436911 - RNA, 19 nt, Homo sapiens
  misc_RNA (1)...(19): siRNA sense strand
gggaaccacgggacauauu

SEQ ID NO: 436912 - RNA, 19 nt, Homo sapiens
  misc_RNA (1)...(19): siRNA sense strand
guauuucaccuuccaguuc

SEQ ID NO: 436913 - RNA, 19 nt, Homo sapiens
  misc_RNA (1)...(19): siRNA sense strand
gccaguaccucgaguucuc

SEQ ID NO: 436914 - RNA, 19 nt, Homo sapiens
  misc_RNA (1)...(19): siRNA sense strand
cagcuucggucaccucucu

SEQ ID NO: 436915 - RNA, 19 nt, Homo sapiens
  misc_RNA (1)...(19): siRNA sense strand
ggacugccgaggaacauca

SEQ ID NO: 436916 - RNA, 19 nt, Homo sapiens
  misc_RNA (1)...(19): siRNA sense strand
gcgugaaggucaucuacca

SEQ ID NO: 436917 - RNA, 19 nt, Homo sapiens
  misc_RNA (1)...(19): siRNA sense strand
ccacuaaacacgccaaggu

SEQ ID NO: 436918 - RNA, 19 nt, Homo sapiens
  misc_RNA (1)...(19): siRNA sense strand
cagccggacucuccuaucu

SEQ ID NO: 436919 - RNA, 19 nt, Homo sapiens
  misc_RNA (1)...(19): siRNA sense strand
agagauggcaccuuugaug

SEQ ID NO: 436920 - RNA, 19 nt, Homo sapiens
  misc_RNA (1)...(19): siRNA sense strand
gagauggugcuacaguuuc

SEQ ID NO: 436921 - RNA, 19 nt, Homo sapiens
  misc_RNA (1)...(19): siRNA sense strand
cacaggaguucccguugga

SEQ ID NO: 436922 - RNA, 19 nt, Homo sapiens
  misc_RNA (1)...(19): siRNA sense strand
guccagaucucgggucauc

SEQ ID NO: 436923 - RNA, 19 nt, Homo sapiens
  misc_RNA (1)...(19): siRNA sense strand
ggagguacugucagagguu

SEQ ID NO: 436924 - RNA, 19 nt, Homo sapiens
  misc_RNA (1)...(19): siRNA sense strand
gaacaucauggccaaagac

SEQ ID NO: 436925 - RNA, 19 nt, Homo sapiens
  misc_RNA (1)...(19): siRNA sense strand
guuuaacccucagaaggaa

SEQ ID NO: 436926 - RNA, 19 nt, Homo sapiens
  misc_RNA (1)...(19): siRNA sense strand
gcucaucuccaaggccuuu

SEQ ID NO: 436927 - RNA, 19 nt, Homo sapiens
  misc_RNA (1)...(19): siRNA sense strand
uuggaugacuuauucuuca

SEQ ID NO: 436928 - RNA, 19 nt, Homo sapiens
  misc_RNA (1)...(19): siRNA sense strand
gggaagggugucaacaaga

SEQ ID NO: 436929 - RNA, 19 nt, Homo sapiens
  misc_RNA (1)...(19): siRNA sense strand
gagacucccugcugcucau

SEQ ID NO: 436930 - RNA, 19 nt, Homo sapiens
  misc_RNA (1)...(19): siRNA sense strand
aaaguggucuccucuucca

SEQ ID NO: 436931 - RNA, 19 nt, Homo sapiens
  misc_RNA (1)...(19): siRNA sense strand
ucgccgaguucuuugaguu

SEQ ID NO: 436932 - RNA, 19 nt, Homo sapiens
  misc_RNA (1)...(19): siRNA sense strand
ucccuaaaccacccucaua

SEQ ID NO: 436933 - RNA, 19 nt, Homo sapiens
  misc_RNA (1)...(19): siRNA sense strand
caccaucggcuugcaguuu

SEQ ID NO: 436934 - RNA, 19 nt, Homo sapiens
  misc_RNA (1)...(19): siRNA sense strand
gguccaagcccggagauca

SEQ ID NO: 436935 - RNA, 19 nt, Homo sapiens
  misc_RNA (1)...(19): siRNA sense strand
acccgaacgucaucuguga

SEQ ID NO: 436936 - RNA, 19 nt, Homo sapiens
  misc_RNA (1)...(19): siRNA sense strand
aaagugagagguuguagca

SEQ ID NO: 436937 - RNA, 19 nt, Homo sapiens
  misc_RNA (1)...(19): siRNA sense strand
cgagugucuuucuuugaug

SEQ ID NO: 436938 - RNA, 19 nt, Homo sapiens
  misc_RNA (1)...(19): siRNA sense strand
uacaguuucuugccuuuag

SEQ ID NO: 436939 - RNA, 19 nt, Homo sapiens
  misc_RNA (1)...(19): siRNA sense strand
gagauucuggaugccaaua

SEQ ID NO: 436940 - RNA, 19 nt, Homo sapiens
  misc_RNA (1)...(19): siRNA sense strand
ccaaggccuuugagaucau

SEQ ID NO: 436941 - RNA, 19 nt, Homo sapiens
  misc_RNA (1)...(19): siRNA sense strand
gaagggaagggugucaaca

SEQ ID NO: 436942 - RNA, 19 nt, Homo sapiens
  misc_RNA (1)...(19): siRNA sense strand
gccggacucuccuaucucu

SEQ ID NO: 436943 - RNA, 19 nt, Homo sapiens
  misc_RNA (1)...(19): siRNA sense strand
acaagaggaucaccuacac

SEQ ID NO: 436944 - RNA, 19 nt, Homo sapiens
  misc_RNA (1)...(19): siRNA sense strand
gccgaguucuuugaguuug

SEQ ID NO: 436945 - RNA, 19 nt, Homo sapiens
  misc_RNA (1)...(19): siRNA sense strand
ggucguggcaacugaauac

SEQ ID NO: 436946 - RNA, 19 nt, Homo sapiens
  misc_RNA (1)...(19): siRNA sense strand
auccauugccgaacaguua

SEQ ID NO: 436947 - RNA, 19 nt, Homo sapiens
  misc_RNA (1)...(19): siRNA sense strand
ccacagugaagccgacgaa

SEQ ID NO: 436948 - RNA, 19 nt, Homo sapiens
  misc_RNA (1)...(19): siRNA sense strand
guacacuccgguuccaguu

SEQ ID NO: 436949 - RNA, 19 nt, Homo sapiens
  misc_RNA (1)...(19): siRNA sense strand
cugcgagugucuuucuuug

SEQ ID NO: 436950 - RNA, 19 nt, Homo sapiens
  misc_RNA (1)...(19): siRNA sense strand
cgcacugucuggucuacaa

SEQ ID NO: 436951 - RNA, 19 nt, Homo sapiens
  misc_RNA (1)...(19): siRNA sense strand
gaagacagaccccaaaggu

SEQ ID NO: 436952 - RNA, 19 nt, Homo sapiens
  misc_RNA (1)...(19): siRNA sense strand
gcaacgagaagggcaugga

SEQ ID NO: 436953 - RNA, 19 nt, Homo sapiens
  misc_RNA (1)...(19): siRNA sense strand
ucagaaggaagaaucagau

SEQ ID NO: 436954 - RNA, 19 nt, Homo sapiens
  misc_RNA (1)...(19): siRNA sense strand
gugagagguuguagcacau

SEQ ID NO: 436955 - RNA, 19 nt, Homo sapiens
  misc_RNA (1)...(19): siRNA sense strand
uccaaggccuuugagauca

SEQ ID NO: 436956 - RNA, 19 nt, Homo sapiens
  misc_RNA (1)...(19): siRNA sense strand
cacgggacauauuucugaa

SEQ ID NO: 436957 - RNA, 19 nt, Homo sapiens
  misc_RNA (1)...(19): siRNA sense strand
gcacaugccuggaauauga

SEQ ID NO: 436958 - RNA, 19 nt, Homo sapiens
  misc_RNA (1)...(19): siRNA sense strand
caacaggucuugccagaua

SEQ ID NO: 436959 - RNA, 19 nt, Homo sapiens
  misc_RNA (1)...(19): siRNA sense strand
caacaggucuugccacaua

SEQ ID NO: 436960 - RNA, 19 nt, Homo sapiens
  misc_RNA (1)...(19): siRNA sense strand
caacaggucuugccacaua

SEQ ID NO: 436961 - RNA, 19 nt, Homo sapiens
  misc_RNA (1)...(19): siRNA sense strand
gaaccaaccuccaaauuau

SEQ ID NO: 436962 - RNA, 19 nt, Homo sapiens
  misc_RNA (1)...(19): siRNA sense strand
gaaggaaucuacaguaaga

SEQ ID NO: 436963 - RNA, 19 nt, Homo sapiens
  misc_RNA (1)...(19): siRNA sense strand
gaaauggacucuucccaaa

SEQ ID NO: 436964 - RNA, 19 nt, Homo sapiens
  misc_RNA (1)...(19): siRNA sense strand
cagcagaccuuacccaaua

SEQ ID NO: 436965 - RNA, 19 nt, Homo sapiens
  misc_RNA (1)...(19): siRNA sense strand
gaacaacucccauuucaaa

SEQ ID NO: 436966 - RNA, 19 nt, Homo sapiens
  misc_RNA (1)...(19): siRNA sense strand
caacagaccuugccagaga

SEQ ID NO: 436967 - RNA, 19 nt, Homo sapiens
  misc_RNA (1)...(19): siRNA sense strand
gaagagagucugaaaguuu

SEQ ID NO: 436968 - RNA, 19 nt, Homo sapiens
  misc_RNA (1)...(19): siRNA sense strand
gcacucagcucaaguagga

SEQ ID NO: 436969 - RNA, 19 nt, Homo sapiens
  misc_RNA (1)...(19): siRNA sense strand
gagagaagcccauuacuuu

SEQ ID NO: 436970 - RNA, 19 nt, Homo sapiens
  misc_RNA (1)...(19): siRNA sense strand
gaacacaaauuucugauac

SEQ ID NO: 436971 - RNA, 19 nt, Homo sapiens
  misc_RNA (1)...(19): siRNA sense strand
ggaaccaaccuccaaauua

SEQ ID NO: 436972 - RNA, 19 nt, Homo sapiens
  misc_RNA (1)...(19): siRNA sense strand
ggagagaagccgauuguua

SEQ ID NO: 436973 - RNA, 19 nt, Homo sapiens
  misc_RNA (1)...(19): siRNA sense strand
ggagagaagcccauuguua

SEQ ID NO: 436974 - RNA, 19 nt, Homo sapiens
  misc_RNA (1)...(19): siRNA sense strand
caacaggaguggccagaua

SEQ ID NO: 436975 - RNA, 19 nt, Homo sapiens
  misc_RNA (1)...(19): siRNA sense strand
caacaguaccuuuaaguua

SEQ ID NO: 436976 - RNA, 19 nt, Homo sapiens
  misc_RNA (1)...(19): siRNA sense strand
ccagagaucuuaaacagaa

SEQ ID NO: 436977 - RNA, 19 nt, Homo sapiens
  misc_RNA (1)...(19): siRNA sense strand
caacagcucuuccuaguuc

SEQ ID NO: 436978 - RNA, 19 nt, Homo sapiens
  misc_RNA (1)...(19): siRNA sense strand
ggaaagaacuguccuuggu

SEQ ID NO: 436979 - RNA, 19 nt, Homo sapiens
  misc_RNA (1)...(19): siRNA sense strand
ggaaguuagugaagcuuua

SEQ ID NO: 436980 - RNA, 19 nt, Homo sapiens
  misc_RNA (1)...(19): siRNA sense strand
gagagaagccgauuguuaa

SEQ ID NO: 436981 - RNA, 19 nt, Homo sapiens
  misc_RNA (1)...(19): siRNA sense strand
gaacauccacaacuagaua

SEQ ID NO: 436982 - RNA, 19 nt, Homo sapiens
  misc_RNA (1)...(19): siRNA sense strand
guaccaagauguauuaugu

SEQ ID NO: 436983 - RNA, 19 nt, Homo sapiens
  misc_RNA (1)...(19): siRNA sense strand
gcagaucgauuaccagaga

SEQ ID NO: 436984 - RNA, 19 nt, Homo sapiens
  misc_RNA (1)...(19): siRNA sense strand
ccagaagacugagacauua

SEQ ID NO: 436985 - RNA, 19 nt, Homo sapiens
  misc_RNA (1)...(19): siRNA sense strand
gcaagaaagugcugaauac

SEQ ID NO: 436986 - RNA, 19 nt, Homo sapiens
  misc_RNA (1)...(19): siRNA sense strand
gaacauguccaaaggcuaa

SEQ ID NO: 436987 - RNA, 19 nt, Homo sapiens
  misc_RNA (1)...(19): siRNA sense strand
gaauaucacucuucagauc

SEQ ID NO: 436988 - RNA, 19 nt, Homo sapiens
  misc_RNA (1)...(19): siRNA sense strand
cgacagaccuugccagaug

SEQ ID NO: 436989 - RNA, 19 nt, Homo sapiens
  misc_RNA (1)...(19): siRNA sense strand
gcaaggugcuuucucauca

SEQ ID NO: 436990 - RNA, 19 nt, Homo sapiens
  misc_RNA (1)...(19): siRNA sense strand
ugaagaagcucugaaaguu

SEQ ID NO: 436991 - RNA, 19 nt, Homo sapiens
  misc_RNA (1)...(19): siRNA sense strand
gcagguaacuuggagauug

SEQ ID NO: 436992 - RNA, 19 nt, Homo sapiens
  misc_RNA (1)...(19): siRNA sense strand
gaaaggaguagcucuguuu

SEQ ID NO: 436993 - RNA, 19 nt, Homo sapiens
  misc_RNA (1)...(19): siRNA sense strand
gcaaagcuccugucaaguu

SEQ ID NO: 436994 - RNA, 19 nt, Homo sapiens
  misc_RNA (1)...(19): siRNA sense strand
ccaaaucacuguacauuag

SEQ ID NO: 436995 - RNA, 19 nt, Homo sapiens
  misc_RNA (1)...(19): siRNA sense strand
ucaagaagcucugaaaguu

SEQ ID NO: 436996 - RNA, 19 nt, Homo sapiens
  misc_RNA (1)...(19): siRNA sense strand
caacaagaguuaccagaga

SEQ ID NO: 436997 - RNA, 19 nt, Homo sapiens
  misc_RNA (1)...(19): siRNA sense strand
caaauagcauccucuaguu

SEQ ID NO: 436998 - RNA, 19 nt, Homo sapiens
  misc_RNA (1)...(19): siRNA sense strand
gaagagggucugaaaguuu

SEQ ID NO: 436999 - RNA, 19 nt, Homo sapiens
  misc_RNA (1)...(19): siRNA sense strand
caaaggcuccuaaacauuu

SEQ ID NO: 437000 - RNA, 19 nt, Homo sapiens
  misc_RNA (1)...(19): siRNA sense strand
cagaauagccagauaguaa

SEQ ID NO: 437001 - RNA, 19 nt, Homo sapiens
  misc_RNA (1)...(19): siRNA sense strand
caacuggcauugcuaggua

SEQ ID NO: 437002 - RNA, 19 nt, Homo sapiens
  misc_RNA (1)...(19): siRNA sense strand
caacaguacucucuaguuc

SEQ ID NO: 437003 - RNA, 19 nt, Homo sapiens
  misc_RNA (1)...(19): siRNA sense strand
ggaauuccuugcaguuaaa

SEQ ID NO: 437004 - RNA, 19 nt, Homo sapiens
  misc_RNA (1)...(19): siRNA sense strand
caaccuuucugcauccuua

SEQ ID NO: 437005 - RNA, 19 nt, Homo sapiens
  misc_RNA (1)...(19): siRNA sense strand
caaauuaccggauuacaaa

SEQ ID NO: 437006 - RNA, 19 nt, Homo sapiens
  misc_RNA (1)...(19): siRNA sense strand
ucuacuagcuacucaaaua

SEQ ID NO: 437007 - RNA, 19 nt, Homo sapiens
  misc_RNA (1)...(19): siRNA sense strand
cagcaaaggucuucgaaug

SEQ ID NO: 437008 - RNA, 19 nt, Homo sapiens
  misc_RNA (1)...(19): siRNA sense strand
gaagagccuuuggaaguuu

SEQ ID NO: 437009 - RNA, 19 nt, Homo sapiens
  misc_RNA (1)...(19): siRNA sense strand
gaaaguacacaugaugaua

SEQ ID NO: 437010 - RNA, 19 nt, Homo sapiens
  misc_RNA (1)...(19): siRNA sense strand
gaucaaggcagaguuauuu

SEQ ID NO: 437011 - RNA, 19 nt, Homo sapiens
  misc_RNA (1)...(19): siRNA sense strand
gcacacagacgaauuugaa

SEQ ID NO: 437012 - RNA, 19 nt, Homo sapiens
  misc_RNA (1)...(19): siRNA sense strand
ccacaggaauugccaggua

SEQ ID NO: 437013 - RNA, 19 nt, Homo sapiens
  misc_RNA (1)...(19): siRNA sense strand
ggagaagauuguuccauug

SEQ ID NO: 437014 - RNA, 19 nt, Homo sapiens
  misc_RNA (1)...(19): siRNA sense strand
gaagaggcuuuggaaguuu

SEQ ID NO: 437015 - RNA, 19 nt, Homo sapiens
  misc_RNA (1)...(19): siRNA sense strand
gacauuggaucucauuuau

SEQ ID NO: 437016 - RNA, 19 nt, Homo sapiens
  misc_RNA (1)...(19): siRNA sense strand
ucacagaccugacuucauc

SEQ ID NO: 437017 - RNA, 19 nt, Homo sapiens
  misc_RNA (1)...(19): siRNA sense strand
gcugggaggucuaaucaaa

SEQ ID NO: 437018 - RNA, 19 nt, Homo sapiens
  misc_RNA (1)...(19): siRNA sense strand
gaucuuccuucuugcauuu

SEQ ID NO: 437019 - RNA, 19 nt, Homo sapiens
  misc_RNA (1)...(19): siRNA sense strand
gcacugaaacgaugcaauu

SEQ ID NO: 437020 - RNA, 19 nt, Homo sapiens
  misc_RNA (1)...(19): siRNA sense strand
gagagaagcccauuguuau

SEQ ID NO: 437021 - RNA, 19 nt, Homo sapiens
  misc_RNA (1)...(19): siRNA sense strand
gagagaagccugguacuuu

SEQ ID NO: 437022 - RNA, 19 nt, Homo sapiens
  misc_RNA (1)...(19): siRNA sense strand
guucauauaugucauggaa

SEQ ID NO: 437023 - RNA, 19 nt, Homo sapiens
  misc_RNA (1)...(19): siRNA sense strand
ggauaaagcgccugaaguu

SEQ ID NO: 437024 - RNA, 19 nt, Homo sapiens
  misc_RNA (1)...(19): siRNA sense strand
gagcaacccuucaggaauc

SEQ ID NO: 437025 - RNA, 19 nt, Homo sapiens
  misc_RNA (1)...(19): siRNA sense strand
caagaagaauucccaugaa

SEQ ID NO: 437026 - RNA, 19 nt, Homo sapiens
  misc_RNA (1)...(19): siRNA sense strand
caagauauuugccaugaau

SEQ ID NO: 437027 - RNA, 19 nt, Homo sapiens
  misc_RNA (1)...(19): siRNA sense strand
gaggaugaauagugaguuu

SEQ ID NO: 437028 - RNA, 19 nt, Homo sapiens
  misc_RNA (1)...(19): siRNA sense strand
caaagucaguauggcauua

SEQ ID NO: 437029 - RNA, 19 nt, Homo sapiens
  misc_RNA (1)...(19): siRNA sense strand
gaagaugugcugaagguuu

SEQ ID NO: 437030 - RNA, 19 nt, Homo sapiens
  misc_RNA (1)...(19): siRNA sense strand
aaacaggccuuuccagaug

SEQ ID NO: 437031 - RNA, 19 nt, Homo sapiens
  misc_RNA (1)...(19): siRNA sense strand
gagagaagcuccuuguuuu

SEQ ID NO: 437032 - RNA, 19 nt, Homo sapiens
  misc_RNA (1)...(19): siRNA sense strand
cagacuagguuuaauguga

SEQ ID NO: 437033 - RNA, 19 nt, Homo sapiens
  misc_RNA (1)...(19): siRNA sense strand
gaagagaacagugauguga

SEQ ID NO: 437034 - RNA, 19 nt, Homo sapiens
  misc_RNA (1)...(19): siRNA sense strand
ucagauauauugacccaaa

SEQ ID NO: 437035 - RNA, 19 nt, Homo sapiens
  misc_RNA (1)...(19): siRNA sense strand
caaagcuccugucaaguuu

SEQ ID NO: 437036 - RNA, 19 nt, Homo sapiens
  misc_RNA (1)...(19): siRNA sense strand
gaaauuauagagccuggua

SEQ ID NO: 437037 - RNA, 19 nt, Homo sapiens
  misc_RNA (1)...(19): siRNA sense strand
gauguuggcucugaagaaa

SEQ ID NO: 437038 - RNA, 19 nt, Homo sapiens
  misc_RNA (1)...(19): siRNA sense strand
ugaagaagcucugaagguu

SEQ ID NO: 437039 - RNA, 19 nt, Homo sapiens
  misc_RNA (1)...(19): siRNA sense strand
gaacauuucagauuucgaa

SEQ ID NO: 437040 - RNA, 19 nt, Homo sapiens
  misc_RNA (1)...(19): siRNA sense strand
guagaugaccaaaugaaua

SEQ ID NO: 437041 - RNA, 19 nt, Homo sapiens
  misc_RNA (1)...(19): siRNA sense strand
caauaggacugucuaguuc

SEQ ID NO: 437042 - RNA, 19 nt, Homo sapiens
  misc_RNA (1)...(19): siRNA sense strand
cagcaggccuugccaggua

SEQ ID NO: 437043 - RNA, 19 nt, Homo sapiens
  misc_RNA (1)...(19): siRNA sense strand
gacacaagaccaagaauuu

SEQ ID NO: 437044 - RNA, 19 nt, Homo sapiens
  misc_RNA (1)...(19): siRNA sense strand
ccaaauuauugaccaguaa

SEQ ID NO: 437045 - RNA, 19 nt, Homo sapiens
  misc_RNA (1)...(19): siRNA sense strand
cagaacaacucccauuuca

SEQ ID NO: 437046 - RNA, 19 nt, Homo sapiens
  misc_RNA (1)...(19): siRNA sense strand
gauacuccauuucagaauu

SEQ ID NO: 437047 - RNA, 19 nt, Homo sapiens
  misc_RNA (1)...(19): siRNA sense strand
gaagaggcacagaaaguuu

SEQ ID NO: 437048 - RNA, 19 nt, Homo sapiens
  misc_RNA (1)...(19): siRNA sense strand
caaagacugugaucguuau

SEQ ID NO: 437049 - RNA, 19 nt, Homo sapiens
  misc_RNA (1)...(19): siRNA sense strand
ggaagauacugaagugaca

SEQ ID NO: 437050 - RNA, 19 nt, Homo sapiens
  misc_RNA (1)...(19): siRNA sense strand
ggaauggagugguagacaa

SEQ ID NO: 437051 - RNA, 19 nt, Homo sapiens
  misc_RNA (1)...(19): siRNA sense strand
gaacuugccagacacuaaa

SEQ ID NO: 437052 - RNA, 19 nt, Homo sapiens
  misc_RNA (1)...(19): siRNA sense strand
gccagaagcuguauguaau

SEQ ID NO: 437053 - RNA, 19 nt, Homo sapiens
  misc_RNA (1)...(19): siRNA sense strand
ugaacuaacugaugugaau

SEQ ID NO: 437054 - RNA, 19 nt, Homo sapiens
  misc_RNA (1)...(19): siRNA sense strand
gagagaagcccauuguuuc

SEQ ID NO: 437055 - RNA, 19 nt, Homo sapiens
  misc_RNA (1)...(19): siRNA sense strand
agacaguccucuaaauaaa

SEQ ID NO: 437056 - RNA, 19 nt, Homo sapiens
  misc_RNA (1)...(19): siRNA sense strand
gcagaaacauauuuaacca

SEQ ID NO: 437057 - RNA, 19 nt, Homo sapiens
  misc_RNA (1)...(19): siRNA sense strand
ugaaugagaugaacgauga

SEQ ID NO: 437058 - RNA, 19 nt, Homo sapiens
  misc_RNA (1)...(19): siRNA sense strand
gcaggaggcuacagauauu

SEQ ID NO: 437059 - RNA, 19 nt, Homo sapiens
  misc_RNA (1)...(19): siRNA sense strand
gaagaucgagagacaguua

SEQ ID NO: 437060 - RNA, 19 nt, Homo sapiens
  misc_RNA (1)...(19): siRNA sense strand
agaagucacucaagauuaa

SEQ ID NO: 437061 - RNA, 19 nt, Homo sapiens
  misc_RNA (1)...(19): siRNA sense strand
gaaagaaggagaaagaguu

SEQ ID NO: 437062 - RNA, 19 nt, Homo sapiens
  misc_RNA (1)...(19): siRNA sense strand
gcucaugccucgucucauu

SEQ ID NO: 437063 - RNA, 19 nt, Homo sapiens
  misc_RNA (1)...(19): siRNA sense strand
gaagaagucacucaagauu

SEQ ID NO: 437064 - RNA, 19 nt, Homo sapiens
  misc_RNA (1)...(19): siRNA sense strand
ggacagugcugccaaggau

SEQ ID NO: 437065 - RNA, 19 nt, Homo sapiens
  misc_RNA (1)...(19): siRNA sense strand
gcagagagcaccauugaug

SEQ ID NO: 437066 - RNA, 19 nt, Homo sapiens
  misc_RNA (1)...(19): siRNA sense strand
uaaaagagcuggagaaaca

SEQ ID NO: 437067 - RNA, 19 nt, Homo sapiens
  misc_RNA (1)...(19): siRNA sense strand
ucgagaagcucaaggauga

SEQ ID NO: 437068 - RNA, 19 nt, Homo sapiens
  misc_RNA (1)...(19): siRNA sense strand
gaaacgggcagaagacaaa

SEQ ID NO: 437069 - RNA, 19 nt, Homo sapiens
  misc_RNA (1)...(19): siRNA sense strand
gaacuaaagcagcgucuga

SEQ ID NO: 437070 - RNA, 19 nt, Homo sapiens
  misc_RNA (1)...(19): siRNA sense strand
gagagacaguuauuaagga

SEQ ID NO: 437071 - RNA, 19 nt, Homo sapiens
  misc_RNA (1)...(19): siRNA sense strand
gaagacaaagcaaagcuaa

SEQ ID NO: 437072 - RNA, 19 nt, Homo sapiens
  misc_RNA (1)...(19): siRNA sense strand
ccaaggccaucaaguacua

SEQ ID NO: 437073 - RNA, 19 nt, Homo sapiens
  misc_RNA (1)...(19): siRNA sense strand
acaaggagauggcugaaga

SEQ ID NO: 437074 - RNA, 19 nt, Homo sapiens
  misc_RNA (1)...(19): siRNA sense strand
gcaaguggcucagcuuaag

SEQ ID NO: 437075 - RNA, 19 nt, Homo sapiens
  misc_RNA (1)...(19): siRNA sense strand
caugagcgcuccuuggauu

SEQ ID NO: 437076 - RNA, 19 nt, Homo sapiens
  misc_RNA (1)...(19): siRNA sense strand
cgagcucacuacugacuua

SEQ ID NO: 437077 - RNA, 19 nt, Homo sapiens
  misc_RNA (1)...(19): siRNA sense strand
gcacaaggaucagcuggau

SEQ ID NO: 437078 - RNA, 19 nt, Homo sapiens
  misc_RNA (1)...(19): siRNA sense strand
aaagugaccuucucaugug

SEQ ID NO: 437079 - RNA, 19 nt, Homo sapiens
  misc_RNA (1)...(19): siRNA sense strand
gaagagaagggcucagaug

SEQ ID NO: 437080 - RNA, 19 nt, Homo sapiens
  misc_RNA (1)...(19): siRNA sense strand
uugcaaagcuaucccauga

SEQ ID NO: 437081 - RNA, 19 nt, Homo sapiens
  misc_RNA (1)...(19): siRNA sense strand
gcaaaggaacgcuauaugg

SEQ ID NO: 437082 - RNA, 19 nt, Homo sapiens
  misc_RNA (1)...(19): siRNA sense strand
gcaaagugaccuucucaug

SEQ ID NO: 437083 - RNA, 19 nt, Homo sapiens
  misc_RNA (1)...(19): siRNA sense strand
ggaugagacugucaaugug

SEQ ID NO: 437084 - RNA, 19 nt, Homo sapiens
  misc_RNA (1)...(19): siRNA sense strand
uggacgagcucacuacuga

SEQ ID NO: 437085 - RNA, 19 nt, Homo sapiens
  misc_RNA (1)...(19): siRNA sense strand
caaagugaccuucucaugu

SEQ ID NO: 437086 - RNA, 19 nt, Homo sapiens
  misc_RNA (1)...(19): siRNA sense strand
ucaccaaggccaucaagua

SEQ ID NO: 437087 - RNA, 19 nt, Homo sapiens
  misc_RNA (1)...(19): siRNA sense strand
caaaggaacgcuauaugga

SEQ ID NO: 437088 - RNA, 19 nt, Homo sapiens
  misc_RNA (1)...(19): siRNA sense strand
gaucgagagacaguuauua

SEQ ID NO: 437089 - RNA, 19 nt, Homo sapiens
  misc_RNA (1)...(19): siRNA sense strand
gcaguguggauguguauaa

SEQ ID NO: 437090 - RNA, 19 nt, Homo sapiens
  misc_RNA (1)...(19): siRNA sense strand
ccagagaccuuugacuuca

SEQ ID NO: 437091 - RNA, 19 nt, Homo sapiens
  misc_RNA (1)...(19): siRNA sense strand
gcagagaaggcagaacuaa

SEQ ID NO: 437092 - RNA, 19 nt, Homo sapiens
  misc_RNA (1)...(19): siRNA sense strand
uggcauugcuggugaagaa

SEQ ID NO: 437093 - RNA, 19 nt, Homo sapiens
  misc_RNA (1)...(19): siRNA sense strand
gaaccaagagcuggaaguu

SEQ ID NO: 437094 - RNA, 19 nt, Homo sapiens
  misc_RNA (1)...(19): siRNA sense strand
gcagugacauccgccaguu

SEQ ID NO: 437095 - RNA, 19 nt, Homo sapiens
  misc_RNA (1)...(19): siRNA sense strand
ggaagcaggcccaggagaa

SEQ ID NO: 437096 - RNA, 19 nt, Homo sapiens
  misc_RNA (1)...(19): siRNA sense strand
acgaugagcugcaggagaa

SEQ ID NO: 437097 - RNA, 19 nt, Homo sapiens
  misc_RNA (1)...(19): siRNA sense strand
gaaacuucaugcagugaca

SEQ ID NO: 437098 - RNA, 19 nt, Homo sapiens
  misc_RNA (1)...(19): siRNA sense strand
cuagagacccugagacuga

SEQ ID NO: 437099 - RNA, 19 nt, Homo sapiens
  misc_RNA (1)...(19): siRNA sense strand
cuggagcgcuguaucguaa

SEQ ID NO: 437100 - RNA, 19 nt, Homo sapiens
  misc_RNA (1)...(19): siRNA sense strand
gaaacuagagacccugaga

SEQ ID NO: 437101 - RNA, 19 nt, Homo sapiens
  misc_RNA (1)...(19): siRNA sense strand
gaacuaagugagaacuguu

SEQ ID NO: 437102 - RNA, 19 nt, Homo sapiens
  misc_RNA (1)...(19): siRNA sense strand
gaaagaguuugaggagaca

SEQ ID NO: 437103 - RNA, 19 nt, Homo sapiens
  misc_RNA (1)...(19): siRNA sense strand
ccaaggcaauugagaugga

SEQ ID NO: 437104 - RNA, 19 nt, Homo sapiens
  misc_RNA (1)...(19): siRNA sense strand
gcaacauccucaucaguac

SEQ ID NO: 437105 - RNA, 19 nt, Homo sapiens
  misc_RNA (1)...(19): siRNA sense strand
ucauugaacugcugcacaa

SEQ ID NO: 437106 - RNA, 19 nt, Homo sapiens
  misc_RNA (1)...(19): siRNA sense strand
aggcugagauugaagagaa

SEQ ID NO: 437107 - RNA, 19 nt, Homo sapiens
  misc_RNA (1)...(19): siRNA sense strand
agacaguuauuaaggaguu

SEQ ID NO: 437108 - RNA, 19 nt, Homo sapiens
  misc_RNA (1)...(19): siRNA sense strand
gaaugcacgugagacagaa

SEQ ID NO: 437109 - RNA, 19 nt, Homo sapiens
  misc_RNA (1)...(19): siRNA sense strand
guguggauguguauaagaa

SEQ ID NO: 437110 - RNA, 19 nt, Homo sapiens
  misc_RNA (1)...(19): siRNA sense strand
ccacugacuuugccaccuu

SEQ ID NO: 437111 - RNA, 19 nt, Homo sapiens
  misc_RNA (1)...(19): siRNA sense strand
ggagcgcuguaucguaaga

SEQ ID NO: 437112 - RNA, 19 nt, Homo sapiens
  misc_RNA (1)...(19): siRNA sense strand
uuaaggaguugaagaaguc

SEQ ID NO: 437113 - RNA, 19 nt, Homo sapiens
  misc_RNA (1)...(19): siRNA sense strand
ugacagaucggaaccugaa

SEQ ID NO: 437114 - RNA, 19 nt, Homo sapiens
  misc_RNA (1)...(19): siRNA sense strand
aaagaaggagaaagaguuu

SEQ ID NO: 437115 - RNA, 19 nt, Homo sapiens
  misc_RNA (1)...(19): siRNA sense strand
uggaggaacuggcuuucaa

SEQ ID NO: 437116 - RNA, 19 nt, Homo sapiens
  misc_RNA (1)...(19): siRNA sense strand
gggcaggaggcuacagaua

SEQ ID NO: 437117 - RNA, 19 nt, Homo sapiens
  misc_RNA (1)...(19): siRNA sense strand
gagcaugcccucucucagu

SEQ ID NO: 437118 - RNA, 19 nt, Homo sapiens
  misc_RNA (1)...(19): siRNA sense strand
ggagacgguugcagacuac

SEQ ID NO: 437119 - RNA, 19 nt, Homo sapiens
  misc_RNA (1)...(19): siRNA sense strand
gaaccugaaucuggaagag

SEQ ID NO: 437120 - RNA, 19 nt, Homo sapiens
  misc_RNA (1)...(19): siRNA sense strand
gaucuuucuuccucagaga

SEQ ID NO: 437121 - RNA, 19 nt, Homo sapiens
  misc_RNA (1)...(19): siRNA sense strand
gggcagaagacaaagcaaa

SEQ ID NO: 437122 - RNA, 19 nt, Homo sapiens
  misc_RNA (1)...(19): siRNA sense strand
ggaggaacuggcuuucaaa

SEQ ID NO: 437123 - RNA, 19 nt, Homo sapiens
  misc_RNA (1)...(19): siRNA sense strand
acaaggaucagcuggauga

SEQ ID NO: 437124 - RNA, 19 nt, Homo sapiens
  misc_RNA (1)...(19): siRNA sense strand
accaagagcuggaaguugu

SEQ ID NO: 437125 - RNA, 19 nt, Homo sapiens
  misc_RNA (1)...(19): siRNA sense strand
ucucccagcuccagcauga

SEQ ID NO: 437126 - RNA, 19 nt, Homo sapiens
  misc_RNA (1)...(19): siRNA sense strand
aagaagucacucaagauua

SEQ ID NO: 437127 - RNA, 19 nt, Homo sapiens
  misc_RNA (1)...(19): siRNA sense strand
ggcaggaggcuacagauau

SEQ ID NO: 437128 - RNA, 19 nt, Homo sapiens
  misc_RNA (1)...(19): siRNA sense strand
gaaagugggcagccuguac

SEQ ID NO: 437129 - RNA, 19 nt, Homo sapiens
  misc_RNA (1)...(19): siRNA sense strand
gagcuaagccaggcagaga

SEQ ID NO: 437130 - RNA, 19 nt, Homo sapiens
  misc_RNA (1)...(19): siRNA sense strand
cagagaagcaggagcaugu

SEQ ID NO: 437131 - RNA, 19 nt, Homo sapiens
  misc_RNA (1)...(19): siRNA sense strand
gcaccgacagcccgaaaga

SEQ ID NO: 437132 - RNA, 19 nt, Homo sapiens
  misc_RNA (1)...(19): siRNA sense strand
caagcgagcagaucuaugg

SEQ ID NO: 437133 - RNA, 19 nt, Homo sapiens
  misc_RNA (1)...(19): siRNA sense strand
uggaagcgaugaaugagau

SEQ ID NO: 437134 - RNA, 19 nt, Homo sapiens
  misc_RNA (1)...(19): siRNA sense strand
gcugaaggccuggguuuga

SEQ ID NO: 437135 - RNA, 19 nt, Homo sapiens
  misc_RNA (1)...(19): siRNA sense strand
ugauacugcugaugccauu

SEQ ID NO: 437136 - RNA, 19 nt, Homo sapiens
  misc_RNA (1)...(19): siRNA sense strand
gcauccaccuugccgaaca

SEQ ID NO: 437137 - RNA, 19 nt, Homo sapiens
  misc_RNA (1)...(19): siRNA sense strand
ggagaaugcacgugagaca

SEQ ID NO: 437138 - RNA, 19 nt, Homo sapiens
  misc_RNA (1)...(19): siRNA sense strand
gcucacuacugacuuagag

SEQ ID NO: 437139 - RNA, 19 nt, Homo sapiens
  misc_RNA (1)...(19): siRNA sense strand
cagagaaggcagaacuaaa

SEQ ID NO: 437140 - RNA, 19 nt, Homo sapiens
  misc_RNA (1)...(19): siRNA sense strand
gaagaaccaagagcuggaa

SEQ ID NO: 437141 - RNA, 19 nt, Homo sapiens
  misc_RNA (1)...(19): siRNA sense strand
ugaacuaagugagaacugu

SEQ ID NO: 437142 - RNA, 19 nt, Homo sapiens
  misc_RNA (1)...(19): siRNA sense strand
ucaaguuugcugagacuaa

SEQ ID NO: 437143 - RNA, 19 nt, Homo sapiens
  misc_RNA (1)...(19): siRNA sense strand
aggaggcgcuggaggcaaa

SEQ ID NO: 437144 - RNA, 19 nt, Homo sapiens
  misc_RNA (1)...(19): siRNA sense strand
acagucgccucaucuccua

SEQ ID NO: 437145 - RNA, 19 nt, Homo sapiens
  misc_RNA (1)...(19): siRNA sense strand
gcacacacacgcacguagu

SEQ ID NO: 437146 - RNA, 19 nt, Homo sapiens
  misc_RNA (1)...(19): siRNA sense strand
caagggagcccagaugaag

SEQ ID NO: 437147 - RNA, 19 nt, Homo sapiens
  misc_RNA (1)...(19): siRNA sense strand
agaaggagaaagaguuuga

SEQ ID NO: 437148 - RNA, 19 nt, Homo sapiens
  misc_RNA (1)...(19): siRNA sense strand
uggaugagacugucaaugu

SEQ ID NO: 437149 - RNA, 19 nt, Homo sapiens
  misc_RNA (1)...(19): siRNA sense strand
caaggcaauugagauggaa

SEQ ID NO: 437150 - RNA, 19 nt, Homo sapiens
  misc_RNA (1)...(19): siRNA sense strand
cagcagaccaucaagaagu

SEQ ID NO: 437151 - RNA, 19 nt, Homo sapiens
  misc_RNA (1)...(19): siRNA sense strand
caaggaggcgagaaaggaa

SEQ ID NO: 437152 - RNA, 19 nt, Homo sapiens
  misc_RNA (1)...(19): siRNA sense strand
gagaagcaggagcauguga

SEQ ID NO: 437153 - RNA, 19 nt, Homo sapiens
  misc_RNA (1)...(19): siRNA sense strand
uggaggagauggcugauac

SEQ ID NO: 437154 - RNA, 19 nt, Homo sapiens
  misc_RNA (1)...(19): siRNA sense strand
ccugaggacuguacuaugc

SEQ ID NO: 437155 - RNA, 19 nt, Homo sapiens
  misc_RNA (1)...(19): siRNA sense strand
ggaugacacagucuacaug

SEQ ID NO: 437156 - RNA, 19 nt, Homo sapiens
  misc_RNA (1)...(19): siRNA sense strand
ggagcuaagugaggccaau

SEQ ID NO: 437157 - RNA, 19 nt, Homo sapiens
  misc_RNA (1)...(19): siRNA sense strand
ugaaugagaugaacgauga

SEQ ID NO: 437158 - RNA, 19 nt, Homo sapiens
  misc_RNA (1)...(19): siRNA sense strand
gcaggaggcuacagauauu

SEQ ID NO: 437159 - RNA, 19 nt, Homo sapiens
  misc_RNA (1)...(19): siRNA sense strand
gaagaucgagagacaguua

SEQ ID NO: 437160 - RNA, 19 nt, Homo sapiens
  misc_RNA (1)...(19): siRNA sense strand
agaagucacucaagauuaa

SEQ ID NO: 437161 - RNA, 19 nt, Homo sapiens
  misc_RNA (1)...(19): siRNA sense strand
gaaagaaggagaaagaguu

SEQ ID NO: 437162 - RNA, 19 nt, Homo sapiens
  misc_RNA (1)...(19): siRNA sense strand
gcucaugccucgucucauu

SEQ ID NO: 437163 - RNA, 19 nt, Homo sapiens
  misc_RNA (1)...(19): siRNA sense strand
gaagaagucacucaagauu

SEQ ID NO: 437164 - RNA, 19 nt, Homo sapiens
  misc_RNA (1)...(19): siRNA sense strand
ggacagugcugccaaggau

SEQ ID NO: 437165 - RNA, 19 nt, Homo sapiens
  misc_RNA (1)...(19): siRNA sense strand
gcagagagcaccauugaug

SEQ ID NO: 437166 - RNA, 19 nt, Homo sapiens
  misc_RNA (1)...(19): siRNA sense strand
uaaaagagcuggagaaaca

SEQ ID NO: 437167 - RNA, 19 nt, Homo sapiens
  misc_RNA (1)...(19): siRNA sense strand
ucgagaagcucaaggauga

SEQ ID NO: 437168 - RNA, 19 nt, Homo sapiens
  misc_RNA (1)...(19): siRNA sense strand
gaaacgggcagaagacaaa

SEQ ID NO: 437169 - RNA, 19 nt, Homo sapiens
  misc_RNA (1)...(19): siRNA sense strand
gaacuaaagcagcgucuga

SEQ ID NO: 437170 - RNA, 19 nt, Homo sapiens
  misc_RNA (1)...(19): siRNA sense strand
gagagacaguuauuaagga

SEQ ID NO: 437171 - RNA, 19 nt, Homo sapiens
  misc_RNA (1)...(19): siRNA sense strand
gaagacaaagcaaagcuaa

SEQ ID NO: 437172 - RNA, 19 nt, Homo sapiens
  misc_RNA (1)...(19): siRNA sense strand
ccaaggccaucaaguacua

SEQ ID NO: 437173 - RNA, 19 nt, Homo sapiens
  misc_RNA (1)...(19): siRNA sense strand
acaaggagauggcugaaga

SEQ ID NO: 437174 - RNA, 19 nt, Homo sapiens
  misc_RNA (1)...(19): siRNA sense strand
gcaaguggcucagcuuaag

SEQ ID NO: 437175 - RNA, 19 nt, Homo sapiens
  misc_RNA (1)...(19): siRNA sense strand
caugagcgcuccuuggauu

SEQ ID NO: 437176 - RNA, 19 nt, Homo sapiens
  misc_RNA (1)...(19): siRNA sense strand
cgagcucacuacugacuua

SEQ ID NO: 437177 - RNA, 19 nt, Homo sapiens
  misc_RNA (1)...(19): siRNA sense strand
gcacaaggaucagcuggau

SEQ ID NO: 437178 - RNA, 19 nt, Homo sapiens
  misc_RNA (1)...(19): siRNA sense strand
aaagugaccuucucaugug

SEQ ID NO: 437179 - RNA, 19 nt, Homo sapiens
  misc_RNA (1)...(19): siRNA sense strand
gaagagaagggcucagaug

SEQ ID NO: 437180 - RNA, 19 nt, Homo sapiens
  misc_RNA (1)...(19): siRNA sense strand
uugcaaagcuaucccauga

SEQ ID NO: 437181 - RNA, 19 nt, Homo sapiens
  misc_RNA (1)...(19): siRNA sense strand
gcaaaggaacgcuauaugg

SEQ ID NO: 437182 - RNA, 19 nt, Homo sapiens
  misc_RNA (1)...(19): siRNA sense strand
gcaaagugaccuucucaug

SEQ ID NO: 437183 - RNA, 19 nt, Homo sapiens
  misc_RNA (1)...(19): siRNA sense strand
ggaugagacugucaaugug

SEQ ID NO: 437184 - RNA, 19 nt, Homo sapiens
  misc_RNA (1)...(19): siRNA sense strand
uggacgagcucacuacuga

SEQ ID NO: 437185 - RNA, 19 nt, Homo sapiens
  misc_RNA (1)...(19): siRNA sense strand
caaagugaccuucucaugu

SEQ ID NO: 437186 - RNA, 19 nt, Homo sapiens
  misc_RNA (1)...(19): siRNA sense strand
ucaccaaggccaucaagua

SEQ ID NO: 437187 - RNA, 19 nt, Homo sapiens
  misc_RNA (1)...(19): siRNA sense strand
caaaggaacgcuauaugga

SEQ ID NO: 437188 - RNA, 19 nt, Homo sapiens
  misc_RNA (1)...(19): siRNA sense strand
gaucgagagacaguuauua

SEQ ID NO: 437189 - RNA, 19 nt, Homo sapiens
  misc_RNA (1)...(19): siRNA sense strand
gcaguguggauguguauaa

SEQ ID NO: 437190 - RNA, 19 nt, Homo sapiens
  misc_RNA (1)...(19): siRNA sense strand
ccagagaccuuugacuuca

SEQ ID NO: 437191 - RNA, 19 nt, Homo sapiens
  misc_RNA (1)...(19): siRNA sense strand
gcagagaaggcagaacuaa

SEQ ID NO: 437192 - RNA, 19 nt, Homo sapiens
  misc_RNA (1)...(19): siRNA sense strand
uggcauugcuggugaagaa

SEQ ID NO: 437193 - RNA, 19 nt, Homo sapiens
  misc_RNA (1)...(19): siRNA sense strand
gaaccaagagcuggaaguu

SEQ ID NO: 437194 - RNA, 19 nt, Homo sapiens
  misc_RNA (1)...(19): siRNA sense strand
gcagugacauccgccaguu

SEQ ID NO: 437195 - RNA, 19 nt, Homo sapiens
  misc_RNA (1)...(19): siRNA sense strand
ggaagcaggcccaggagaa

SEQ ID NO: 437196 - RNA, 19 nt, Homo sapiens
  misc_RNA (1)...(19): siRNA sense strand
acgaugagcugcaggagaa

SEQ ID NO: 437197 - RNA, 19 nt, Homo sapiens
  misc_RNA (1)...(19): siRNA sense strand
gaaacuucaugcagugaca

SEQ ID NO: 437198 - RNA, 19 nt, Homo sapiens
  misc_RNA (1)...(19): siRNA sense strand
cuagagacccugagacuga

SEQ ID NO: 437199 - RNA, 19 nt, Homo sapiens
  misc_RNA (1)...(19): siRNA sense strand
cuggagcgcuguaucguaa

SEQ ID NO: 437200 - RNA, 19 nt, Homo sapiens
  misc_RNA (1)...(19): siRNA sense strand
gaaacuagagacccugaga

SEQ ID NO: 437201 - RNA, 19 nt, Homo sapiens
  misc_RNA (1)...(19): siRNA sense strand
gaacuaagugagaacuguu

SEQ ID NO: 437202 - RNA, 19 nt, Homo sapiens
  misc_RNA (1)...(19): siRNA sense strand
gaaagaguuugaggagaca

SEQ ID NO: 437203 - RNA, 19 nt, Homo sapiens
  misc_RNA (1)...(19): siRNA sense strand
ccaaggcaauugagaugga

SEQ ID NO: 437204 - RNA, 19 nt, Homo sapiens
  misc_RNA (1)...(19): siRNA sense strand
gcaacauccucaucaguac

SEQ ID NO: 437205 - RNA, 19 nt, Homo sapiens
  misc_RNA (1)...(19): siRNA sense strand
ucauugaacugcugcacaa

SEQ ID NO: 437206 - RNA, 19 nt, Homo sapiens
  misc_RNA (1)...(19): siRNA sense strand
aggcugagauugaagagaa

SEQ ID NO: 437207 - RNA, 19 nt, Homo sapiens
  misc_RNA (1)...(19): siRNA sense strand
agacaguuauuaaggaguu

SEQ ID NO: 437208 - RNA, 19 nt, Homo sapiens
  misc_RNA (1)...(19): siRNA sense strand
gaaugcacgugagacagaa

SEQ ID NO: 437209 - RNA, 19 nt, Homo sapiens
  misc_RNA (1)...(19): siRNA sense strand
guguggauguguauaagaa

SEQ ID NO: 437210 - RNA, 19 nt, Homo sapiens
  misc_RNA (1)...(19): siRNA sense strand
ccacugacuuugccaccuu

SEQ ID NO: 437211 - RNA, 19 nt, Homo sapiens
  misc_RNA (1)...(19): siRNA sense strand
ggagcgcuguaucguaaga

SEQ ID NO: 437212 - RNA, 19 nt, Homo sapiens
  misc_RNA (1)...(19): siRNA sense strand
uuaaggaguugaagaaguc

SEQ ID NO: 437213 - RNA, 19 nt, Homo sapiens
  misc_RNA (1)...(19): siRNA sense strand
ugacagaucggaaccugaa

SEQ ID NO: 437214 - RNA, 19 nt, Homo sapiens
  misc_RNA (1)...(19): siRNA sense strand
aaagaaggagaaagaguuu

SEQ ID NO: 437215 - RNA, 19 nt, Homo sapiens
  misc_RNA (1)...(19): siRNA sense strand
uggaggaacuggcuuucaa

SEQ ID NO: 437216 - RNA, 19 nt, Homo sapiens
  misc_RNA (1)...(19): siRNA sense strand
gggcaggaggcuacagaua

SEQ ID NO: 437217 - RNA, 19 nt, Homo sapiens
  misc_RNA (1)...(19): siRNA sense strand
gagcaugcccucucucagu

SEQ ID NO: 437218 - RNA, 19 nt, Homo sapiens
  misc_RNA (1)...(19): siRNA sense strand
ggagacgguugcagacuac

SEQ ID NO: 437219 - RNA, 19 nt, Homo sapiens
  misc_RNA (1)...(19): siRNA sense strand
gaaccugaaucuggaagag

SEQ ID NO: 437220 - RNA, 19 nt, Homo sapiens
  misc_RNA (1)...(19): siRNA sense strand
gaucuuucuuccucagaga

SEQ ID NO: 437221 - RNA, 19 nt, Homo sapiens
  misc_RNA (1)...(19): siRNA sense strand
gggcagaagacaaagcaaa

SEQ ID NO: 437222 - RNA, 19 nt, Homo sapiens
  misc_RNA (1)...(19): siRNA sense strand
ggaggaacuggcuuucaaa

SEQ ID NO: 437223 - RNA, 19 nt, Homo sapiens
  misc_RNA (1)...(19): siRNA sense strand
acaaggaucagcuggauga

SEQ ID NO: 437224 - RNA, 19 nt, Homo sapiens
  misc_RNA (1)...(19): siRNA sense strand
accaagagcuggaaguugu

SEQ ID NO: 437225 - RNA, 19 nt, Homo sapiens
  misc_RNA (1)...(19): siRNA sense strand
ucucccagcuccagcauga

SEQ ID NO: 437226 - RNA, 19 nt, Homo sapiens
  misc_RNA (1)...(19): siRNA sense strand
aagaagucacucaagauua

SEQ ID NO: 437227 - RNA, 19 nt, Homo sapiens
  misc_RNA (1)...(19): siRNA sense strand
ggcaggaggcuacagauau

SEQ ID NO: 437228 - RNA, 19 nt, Homo sapiens
  misc_RNA (1)...(19): siRNA sense strand
gaaagugggcagccuguac

SEQ ID NO: 437229 - RNA, 19 nt, Homo sapiens
  misc_RNA (1)...(19): siRNA sense strand
gagcuaagccaggcagaga

SEQ ID NO: 437230 - RNA, 19 nt, Homo sapiens
  misc_RNA (1)...(19): siRNA sense strand
cagagaagcaggagcaugu

SEQ ID NO: 437231 - RNA, 19 nt, Homo sapiens
  misc_RNA (1)...(19): siRNA sense strand
gcaccgacagcccgaaaga

SEQ ID NO: 437232 - RNA, 19 nt, Homo sapiens
  misc_RNA (1)...(19): siRNA sense strand
caagcgagcagaucuaugg

SEQ ID NO: 437233 - RNA, 19 nt, Homo sapiens
  misc_RNA (1)...(19): siRNA sense strand
uggaagcgaugaaugagau

SEQ ID NO: 437234 - RNA, 19 nt, Homo sapiens
  misc_RNA (1)...(19): siRNA sense strand
gcugaaggccuggguuuga

SEQ ID NO: 437235 - RNA, 19 nt, Homo sapiens
  misc_RNA (1)...(19): siRNA sense strand
ugauacugcugaugccauu

SEQ ID NO: 437236 - RNA, 19 nt, Homo sapiens
  misc_RNA (1)...(19): siRNA sense strand
gcauccaccuugccgaaca

SEQ ID NO: 437237 - RNA, 19 nt, Homo sapiens
  misc_RNA (1)...(19): siRNA sense strand
ggagaaugcacgugagaca

SEQ ID NO: 437238 - RNA, 19 nt, Homo sapiens
  misc_RNA (1)...(19): siRNA sense strand
gcucacuacugacuuagag

SEQ ID NO: 437239 - RNA, 19 nt, Homo sapiens
  misc_RNA (1)...(19): siRNA sense strand
cagagaaggcagaacuaaa

SEQ ID NO: 437240 - RNA, 19 nt, Homo sapiens
  misc_RNA (1)...(19): siRNA sense strand
gaagaaccaagagcuggaa

SEQ ID NO: 437241 - RNA, 19 nt, Homo sapiens
  misc_RNA (1)...(19): siRNA sense strand
ugaacuaagugagaacugu

SEQ ID NO: 437242 - RNA, 19 nt, Homo sapiens
  misc_RNA (1)...(19): siRNA sense strand
ucaaguuugcugagacuaa

SEQ ID NO: 437243 - RNA, 19 nt, Homo sapiens
  misc_RNA (1)...(19): siRNA sense strand
aggaggcgcuggaggcaaa

SEQ ID NO: 437244 - RNA, 19 nt, Homo sapiens
  misc_RNA (1)...(19): siRNA sense strand
acagucgccucaucuccua

SEQ ID NO: 437245 - RNA, 19 nt, Homo sapiens
  misc_RNA (1)...(19): siRNA sense strand
gcacacacacgcacguagu

SEQ ID NO: 437246 - RNA, 19 nt, Homo sapiens
  misc_RNA (1)...(19): siRNA sense strand
caagggagcccagaugaag

SEQ ID NO: 437247 - RNA, 19 nt, Homo sapiens
  misc_RNA (1)...(19): siRNA sense strand
agaaggagaaagaguuuga

SEQ ID NO: 437248 - RNA, 19 nt, Homo sapiens
  misc_RNA (1)...(19): siRNA sense strand
uggaugagacugucaaugu

SEQ ID NO: 437249 - RNA, 19 nt, Homo sapiens
  misc_RNA (1)...(19): siRNA sense strand
caaggcaauugagauggaa

SEQ ID NO: 437250 - RNA, 19 nt, Homo sapiens
  misc_RNA (1)...(19): siRNA sense strand
cagcagaccaucaagaagu

SEQ ID NO: 437251 - RNA, 19 nt, Homo sapiens
  misc_RNA (1)...(19): siRNA sense strand
caaggaggcgagaaaggaa

SEQ ID NO: 437252 - RNA, 19 nt, Homo sapiens
  misc_RNA (1)...(19): siRNA sense strand
gagaagcaggagcauguga

SEQ ID NO: 437253 - RNA, 19 nt, Homo sapiens
  misc_RNA (1)...(19): siRNA sense strand
uggaggagauggcugauac

SEQ ID NO: 437254 - RNA, 19 nt, Homo sapiens
  misc_RNA (1)...(19): siRNA sense strand
ccugaggacuguacuaugc

SEQ ID NO: 437255 - RNA, 19 nt, Homo sapiens
  misc_RNA (1)...(19): siRNA sense strand
ggaugacacagucuacaug

SEQ ID NO: 437256 - RNA, 19 nt, Homo sapiens
  misc_RNA (1)...(19): siRNA sense strand
ggagcuaagugaggccaau

SEQ ID NO: 437257 - RNA, 19 nt, Homo sapiens
  misc_RNA (1)...(19): siRNA sense strand
gaacaaggcuccuauguag

SEQ ID NO: 437258 - RNA, 19 nt, Homo sapiens
  misc_RNA (1)...(19): siRNA sense strand
gacaagaguucucauguua

SEQ ID NO: 437259 - RNA, 19 nt, Homo sapiens
  misc_RNA (1)...(19): siRNA sense strand
gcaaggaccugcuguuuau

SEQ ID NO: 437260 - RNA, 19 nt, Homo sapiens
  misc_RNA (1)...(19): siRNA sense strand
gaaggaaacuuugaagaga

SEQ ID NO: 437261 - RNA, 19 nt, Homo sapiens
  misc_RNA (1)...(19): siRNA sense strand
ugacauaccuugauaaugg

SEQ ID NO: 437262 - RNA, 19 nt, Homo sapiens
  misc_RNA (1)...(19): siRNA sense strand
acacagagauggaacauga

SEQ ID NO: 437263 - RNA, 19 nt, Homo sapiens
  misc_RNA (1)...(19): siRNA sense strand
ggaaaccuuuaccaacuua

SEQ ID NO: 437264 - RNA, 19 nt, Homo sapiens
  misc_RNA (1)...(19): siRNA sense strand
ccaaagcucuggucaguga

SEQ ID NO: 437265 - RNA, 19 nt, Homo sapiens
  misc_RNA (1)...(19): siRNA sense strand
caagaguucucauguuaaa

SEQ ID NO: 437266 - RNA, 19 nt, Homo sapiens
  misc_RNA (1)...(19): siRNA sense strand
gcaaagaccccaacacuua

SEQ ID NO: 437267 - RNA, 19 nt, Homo sapiens
  misc_RNA (1)...(19): siRNA sense strand
ucaaagaggugggcaugua

SEQ ID NO: 437268 - RNA, 19 nt, Homo sapiens
  misc_RNA (1)...(19): siRNA sense strand
agagauugcucgagacuuu

SEQ ID NO: 437269 - RNA, 19 nt, Homo sapiens
  misc_RNA (1)...(19): siRNA sense strand
uggcaaaccuacaguauga

SEQ ID NO: 437270 - RNA, 19 nt, Homo sapiens
  misc_RNA (1)...(19): siRNA sense strand
gaaaaugccuuuaacuugu

SEQ ID NO: 437271 - RNA, 19 nt, Homo sapiens
  misc_RNA (1)...(19): siRNA sense strand
acaaauuggucuucucaaa

SEQ ID NO: 437272 - RNA, 19 nt, Homo sapiens
  misc_RNA (1)...(19): siRNA sense strand
gcauuguggucuuucagua

SEQ ID NO: 437273 - RNA, 19 nt, Homo sapiens
  misc_RNA (1)...(19): siRNA sense strand
gaaugaauaugcccucagu

SEQ ID NO: 437274 - RNA, 19 nt, Homo sapiens
  misc_RNA (1)...(19): siRNA sense strand
gagaguuuccuggauauua

SEQ ID NO: 437275 - RNA, 19 nt, Homo sapiens
  misc_RNA (1)...(19): siRNA sense strand
gcagggcccucuacuaucu

SEQ ID NO: 437276 - RNA, 19 nt, Homo sapiens
  misc_RNA (1)...(19): siRNA sense strand
gaagaucugcuaccaggaa

SEQ ID NO: 437277 - RNA, 19 nt, Homo sapiens
  misc_RNA (1)...(19): siRNA sense strand
caucgacggugacuugauu

SEQ ID NO: 437278 - RNA, 19 nt, Homo sapiens
  misc_RNA (1)...(19): siRNA sense strand
caucucggcucguaucuug

SEQ ID NO: 437279 - RNA, 19 nt, Homo sapiens
  misc_RNA (1)...(19): siRNA sense strand
aaauuggucuucucaaaug

SEQ ID NO: 437280 - RNA, 19 nt, Homo sapiens
  misc_RNA (1)...(19): siRNA sense strand
gaugucaaguuccuauaug

SEQ ID NO: 437281 - RNA, 19 nt, Homo sapiens
  misc_RNA (1)...(19): siRNA sense strand
ugauaaugguguuguguuu

SEQ ID NO: 437282 - RNA, 19 nt, Homo sapiens
  misc_RNA (1)...(19): siRNA sense strand
gcacagcaaugguguaucc

SEQ ID NO: 437283 - RNA, 19 nt, Homo sapiens
  misc_RNA (1)...(19): siRNA sense strand
cgagagcauugacaucauu

SEQ ID NO: 437284 - RNA, 19 nt, Homo sapiens
  misc_RNA (1)...(19): siRNA sense strand
agacaagaguucucauguu

SEQ ID NO: 437285 - RNA, 19 nt, Homo sapiens
  misc_RNA (1)...(19): siRNA sense strand
acacuuuggugcucucuuu

SEQ ID NO: 437286 - RNA, 19 nt, Homo sapiens
  misc_RNA (1)...(19): siRNA sense strand
ucaaucaccuaucacaaug

SEQ ID NO: 437287 - RNA, 19 nt, Homo sapiens
  misc_RNA (1)...(19): siRNA sense strand
gaaaaggaauucaauaagg

SEQ ID NO: 437288 - RNA, 19 nt, Homo sapiens
  misc_RNA (1)...(19): siRNA sense strand
ucagagaccggcauuauug

SEQ ID NO: 437289 - RNA, 19 nt, Homo sapiens
  misc_RNA (1)...(19): siRNA sense strand
gaccugcuguuuaucuuga

SEQ ID NO: 437290 - RNA, 19 nt, Homo sapiens
  misc_RNA (1)...(19): siRNA sense strand
gacggugacuugauugaga

SEQ ID NO: 437291 - RNA, 19 nt, Homo sapiens
  misc_RNA (1)...(19): siRNA sense strand
ggaaggaaacuuugaagag

SEQ ID NO: 437292 - RNA, 19 nt, Homo sapiens
  misc_RNA (1)...(19): siRNA sense strand
ucaaggaagugaacuacau

SEQ ID NO: 437293 - RNA, 19 nt, Homo sapiens
  misc_RNA (1)...(19): siRNA sense strand
gaugagugcuguggaaauc

SEQ ID NO: 437294 - RNA, 19 nt, Homo sapiens
  misc_RNA (1)...(19): siRNA sense strand
gggcauguaugggaagauu

SEQ ID NO: 437295 - RNA, 19 nt, Homo sapiens
  misc_RNA (1)...(19): siRNA sense strand
ccacggcucucugguaaug

SEQ ID NO: 437296 - RNA, 19 nt, Homo sapiens
  misc_RNA (1)...(19): siRNA sense strand
gagaggagguagaagaaac

SEQ ID NO: 437297 - RNA, 19 nt, Homo sapiens
  misc_RNA (1)...(19): siRNA sense strand
ucucaaggaucuccgugua

SEQ ID NO: 437298 - RNA, 19 nt, Homo sapiens
  misc_RNA (1)...(19): siRNA sense strand
guggaaaucuuggaugaug

SEQ ID NO: 437299 - RNA, 19 nt, Homo sapiens
  misc_RNA (1)...(19): siRNA sense strand
ggaagugaacuacaugugu

SEQ ID NO: 437300 - RNA, 19 nt, Homo sapiens
  misc_RNA (1)...(19): siRNA sense strand
ugacuuaccaggcaucaaa

SEQ ID NO: 437301 - RNA, 19 nt, Homo sapiens
  misc_RNA (1)...(19): siRNA sense strand
ugaacaaggcuccuaugua

SEQ ID NO: 437302 - RNA, 19 nt, Homo sapiens
  misc_RNA (1)...(19): siRNA sense strand
gcaaugguguauccugaag

SEQ ID NO: 437303 - RNA, 19 nt, Homo sapiens
  misc_RNA (1)...(19): siRNA sense strand
ggagaaggaggaacagaug

SEQ ID NO: 437304 - RNA, 19 nt, Homo sapiens
  misc_RNA (1)...(19): siRNA sense strand
caaauuggucuucucaaau

SEQ ID NO: 437305 - RNA, 19 nt, Homo sapiens
  misc_RNA (1)...(19): siRNA sense strand
ucaaggaucuccguguaga

SEQ ID NO: 437306 - RNA, 19 nt, Homo sapiens
  misc_RNA (1)...(19): siRNA sense strand
gccaagcaccuacuauuug

SEQ ID NO: 437307 - RNA, 19 nt, Homo sapiens
  misc_RNA (1)...(19): siRNA sense strand
agaaucgacucaauaaagu

SEQ ID NO: 437308 - RNA, 19 nt, Homo sapiens
  misc_RNA (1)...(19): siRNA sense strand
gccuuuaacuuguuugugu

SEQ ID NO: 437309 - RNA, 19 nt, Homo sapiens
  misc_RNA (1)...(19): siRNA sense strand
gaagguucuuugcggauca

SEQ ID NO: 437310 - RNA, 19 nt, Homo sapiens
  misc_RNA (1)...(19): siRNA sense strand
agaagaaaccgaacugaug

SEQ ID NO: 437311 - RNA, 19 nt, Homo sapiens
  misc_RNA (1)...(19): siRNA sense strand
gugacuugauugagaguuu

SEQ ID NO: 437312 - RNA, 19 nt, Homo sapiens
  misc_RNA (1)...(19): siRNA sense strand
gacuuaaaccuguugauug

SEQ ID NO: 437313 - RNA, 19 nt, Homo sapiens
  misc_RNA (1)...(19): siRNA sense strand
aaucuuggaugaugacaau

SEQ ID NO: 437314 - RNA, 19 nt, Homo sapiens
  misc_RNA (1)...(19): siRNA sense strand
cacuagaucgcgauaauaa

SEQ ID NO: 437315 - RNA, 19 nt, Homo sapiens
  misc_RNA (1)...(19): siRNA sense strand
cagaaucgacucaauaaag

SEQ ID NO: 437316 - RNA, 19 nt, Homo sapiens
  misc_RNA (1)...(19): siRNA sense strand
caaggaagaucugcuacca

SEQ ID NO: 437317 - RNA, 19 nt, Homo sapiens
  misc_RNA (1)...(19): siRNA sense strand
caauagcacccucaccauu

SEQ ID NO: 437318 - RNA, 19 nt, Homo sapiens
  misc_RNA (1)...(19): siRNA sense strand
gagagcauugacaucauua

SEQ ID NO: 437319 - RNA, 19 nt, Homo sapiens
  misc_RNA (1)...(19): siRNA sense strand
gcccauggaaggaaacuuu

SEQ ID NO: 437320 - RNA, 19 nt, Homo sapiens
  misc_RNA (1)...(19): siRNA sense strand
gaacucaaggccuucaaca

SEQ ID NO: 437321 - RNA, 19 nt, Homo sapiens
  misc_RNA (1)...(19): siRNA sense strand
acucuaugguggaauuuaa

SEQ ID NO: 437322 - RNA, 19 nt, Homo sapiens
  misc_RNA (1)...(19): siRNA sense strand
uagcagcaaccacaaauug

SEQ ID NO: 437323 - RNA, 19 nt, Homo sapiens
  misc_RNA (1)...(19): siRNA sense strand
gaguagccauuaccuccuu

SEQ ID NO: 437324 - RNA, 19 nt, Homo sapiens
  misc_RNA (1)...(19): siRNA sense strand
aagcaaagcacgauugugu

SEQ ID NO: 437325 - RNA, 19 nt, Homo sapiens
  misc_RNA (1)...(19): siRNA sense strand
gagcuaacucggauccauu

SEQ ID NO: 437326 - RNA, 19 nt, Homo sapiens
  misc_RNA (1)...(19): siRNA sense strand
gcagaaucgacucaauaaa

SEQ ID NO: 437327 - RNA, 19 nt, Homo sapiens
  misc_RNA (1)...(19): siRNA sense strand
ggacaucucggcucguauc

SEQ ID NO: 437328 - RNA, 19 nt, Homo sapiens
  misc_RNA (1)...(19): siRNA sense strand
ggagcugcaugucauugau

SEQ ID NO: 437329 - RNA, 19 nt, Homo sapiens
  misc_RNA (1)...(19): siRNA sense strand
caagcagggucgcauugug

SEQ ID NO: 437330 - RNA, 19 nt, Homo sapiens
  misc_RNA (1)...(19): siRNA sense strand
ucucaaaugucaaccucaa

SEQ ID NO: 437331 - RNA, 19 nt, Homo sapiens
  misc_RNA (1)...(19): siRNA sense strand
aguguggccuccugcaaua

SEQ ID NO: 437332 - RNA, 19 nt, Homo sapiens
  misc_RNA (1)...(19): siRNA sense strand
acaaucgaguggacccuaa

SEQ ID NO: 437333 - RNA, 19 nt, Homo sapiens
  misc_RNA (1)...(19): siRNA sense strand
auugagaguuuccuggaua

SEQ ID NO: 437334 - RNA, 19 nt, Homo sapiens
  misc_RNA (1)...(19): siRNA sense strand
ugccacggcucucugguaa

SEQ ID NO: 437335 - RNA, 19 nt, Homo sapiens
  misc_RNA (1)...(19): siRNA sense strand
agaaggacgugcgcacuga

SEQ ID NO: 437336 - RNA, 19 nt, Homo sapiens
  misc_RNA (1)...(19): siRNA sense strand
gagguuggucucucaagaa

SEQ ID NO: 437337 - RNA, 19 nt, Homo sapiens
  misc_RNA (1)...(19): siRNA sense strand
gaucauccggaauggaauu

SEQ ID NO: 437338 - RNA, 19 nt, Homo sapiens
  misc_RNA (1)...(19): siRNA sense strand
caacuuaggacccauuguc

SEQ ID NO: 437339 - RNA, 19 nt, Homo sapiens
  misc_RNA (1)...(19): siRNA sense strand
gacccugagugccggauga

SEQ ID NO: 437340 - RNA, 19 nt, Homo sapiens
  misc_RNA (1)...(19): siRNA sense strand
ggagcuaacucggauccau

SEQ ID NO: 437341 - RNA, 19 nt, Homo sapiens
  misc_RNA (1)...(19): siRNA sense strand
gcacaguuccccucuauga

SEQ ID NO: 437342 - RNA, 19 nt, Homo sapiens
  misc_RNA (1)...(19): siRNA sense strand
ccacaaauuggucuucuca

SEQ ID NO: 437343 - RNA, 19 nt, Homo sapiens
  misc_RNA (1)...(19): siRNA sense strand
uggaugaucagcagacuuu

SEQ ID NO: 437344 - RNA, 19 nt, Homo sapiens
  misc_RNA (1)...(19): siRNA sense strand
caaagaggugggcauguau

SEQ ID NO: 437345 - RNA, 19 nt, Homo sapiens
  misc_RNA (1)...(19): siRNA sense strand
uaccaggcaucaaaggauu

SEQ ID NO: 437346 - RNA, 19 nt, Homo sapiens
  misc_RNA (1)...(19): siRNA sense strand
ccaagcaccuacuauuugc

SEQ ID NO: 437347 - RNA, 19 nt, Homo sapiens
  misc_RNA (1)...(19): siRNA sense strand
ccacuagaucgcgauaaua

SEQ ID NO: 437348 - RNA, 19 nt, Homo sapiens
  misc_RNA (1)...(19): siRNA sense strand
ggacaucaccccauuagga

SEQ ID NO: 437349 - RNA, 19 nt, Homo sapiens
  misc_RNA (1)...(19): siRNA sense strand
gagauugcucgagacuuua

SEQ ID NO: 437350 - RNA, 19 nt, Homo sapiens
  misc_RNA (1)...(19): siRNA sense strand
aggaaacuuugaagagauu

SEQ ID NO: 437351 - RNA, 19 nt, Homo sapiens
  misc_RNA (1)...(19): siRNA sense strand
ccugcauccuggaguauaa

SEQ ID NO: 437352 - RNA, 19 nt, Homo sapiens
  misc_RNA (1)...(19): siRNA sense strand
ggaagugucccaguguuuc

SEQ ID NO: 437353 - RNA, 19 nt, Homo sapiens
  misc_RNA (1)...(19): siRNA sense strand
caacgucuuugcuuguucu

SEQ ID NO: 437354 - RNA, 19 nt, Homo sapiens
  misc_RNA (1)...(19): siRNA sense strand
gaugcuggguggagagauc

SEQ ID NO: 437355 - RNA, 19 nt, Homo sapiens
  misc_RNA (1)...(19): siRNA sense strand
ucuugaaguugcccucuuu

SEQ ID NO: 437356 - RNA, 19 nt, Homo sapiens
  misc_RNA (1)...(19): siRNA sense strand
ccaacacaccuuugaagug

SEQ ID NO: 437357 - RNA, 19 nt, Homo sapiens
  misc_RNA (1)...(19): siRNA sense strand
gcaaauacuugguguuaga

SEQ ID NO: 437358 - RNA, 19 nt, Homo sapiens
  misc_RNA (1)...(19): siRNA sense strand
gaacguggaugccauuugu

SEQ ID NO: 437359 - RNA, 19 nt, Homo sapiens
  misc_RNA (1)...(19): siRNA sense strand
acauugagcuuacucguua

SEQ ID NO: 437360 - RNA, 19 nt, Homo sapiens
  misc_RNA (1)...(19): siRNA sense strand
gaaaguaguuuggguggaa

SEQ ID NO: 437361 - RNA, 19 nt, Homo sapiens
  misc_RNA (1)...(19): siRNA sense strand
caagaggacuggacauuuc

SEQ ID NO: 437362 - RNA, 19 nt, Homo sapiens
  misc_RNA (1)...(19): siRNA sense strand
gaaauacgaugacauucca

SEQ ID NO: 437363 - RNA, 19 nt, Homo sapiens
  misc_RNA (1)...(19): siRNA sense strand
gaggaaagauuggauuaga

SEQ ID NO: 437364 - RNA, 19 nt, Homo sapiens
  misc_RNA (1)...(19): siRNA sense strand
caacuguccuccacauauu

SEQ ID NO: 437365 - RNA, 19 nt, Homo sapiens
  misc_RNA (1)...(19): siRNA sense strand
ggauauggaggaaauuaua

SEQ ID NO: 437366 - RNA, 19 nt, Homo sapiens
  misc_RNA (1)...(19): siRNA sense strand
gagaaauuaucaugggaaa

SEQ ID NO: 437367 - RNA, 19 nt, Homo sapiens
  misc_RNA (1)...(19): siRNA sense strand
cuauauuccuccucauuua

SEQ ID NO: 437368 - RNA, 19 nt, Homo sapiens
  misc_RNA (1)...(19): siRNA sense strand
caacagugauggauaugga

SEQ ID NO: 437369 - RNA, 19 nt, Homo sapiens
  misc_RNA (1)...(19): siRNA sense strand
gaaauuaucaugggaaaca

SEQ ID NO: 437370 - RNA, 19 nt, Homo sapiens
  misc_RNA (1)...(19): siRNA sense strand
aaacauggcuuaugaacac

SEQ ID NO: 437371 - RNA, 19 nt, Homo sapiens
  misc_RNA (1)...(19): siRNA sense strand
ugagucagauuuauucaga

SEQ ID NO: 437372 - RNA, 19 nt, Homo sapiens
  misc_RNA (1)...(19): siRNA sense strand
gcaagaggacuggacauuu

SEQ ID NO: 437373 - RNA, 19 nt, Homo sapiens
  misc_RNA (1)...(19): siRNA sense strand
gcaacacugggauuaauuu

SEQ ID NO: 437374 - RNA, 19 nt, Homo sapiens
  misc_RNA (1)...(19): siRNA sense strand
gaugcuggcucgugauuuc

SEQ ID NO: 437375 - RNA, 19 nt, Homo sapiens
  misc_RNA (1)...(19): siRNA sense strand
guacagaucuacgaagaag

SEQ ID NO: 437376 - RNA, 19 nt, Homo sapiens
  misc_RNA (1)...(19): siRNA sense strand
uuacaacagugauggauau

SEQ ID NO: 437377 - RNA, 19 nt, Homo sapiens
  misc_RNA (1)...(19): siRNA sense strand
gaagugccgucuugguuag

SEQ ID NO: 437378 - RNA, 19 nt, Homo sapiens
  misc_RNA (1)...(19): siRNA sense strand
ggaguucuagcaaagauaa

SEQ ID NO: 437379 - RNA, 19 nt, Homo sapiens
  misc_RNA (1)...(19): siRNA sense strand
ugacaaaucagaugaagau

SEQ ID NO: 437380 - RNA, 19 nt, Homo sapiens
  misc_RNA (1)...(19): siRNA sense strand
guagaauagucgaacaaga

SEQ ID NO: 437381 - RNA, 19 nt, Homo sapiens
  misc_RNA (1)...(19): siRNA sense strand
caacaacuguccuccacau

SEQ ID NO: 437382 - RNA, 19 nt, Homo sapiens
  misc_RNA (1)...(19): siRNA sense strand
ugagaaauacgaugacauu

SEQ ID NO: 437383 - RNA, 19 nt, Homo sapiens
  misc_RNA (1)...(19): siRNA sense strand
gaaccgagaagcuacuaga

SEQ ID NO: 437384 - RNA, 19 nt, Homo sapiens
  misc_RNA (1)...(19): siRNA sense strand
aaacaucacacagaaagua

SEQ ID NO: 437385 - RNA, 19 nt, Homo sapiens
  misc_RNA (1)...(19): siRNA sense strand
gaucggauguuggauaugg

SEQ ID NO: 437386 - RNA, 19 nt, Homo sapiens
  misc_RNA (1)...(19): siRNA sense strand
gaaggaaaauggaagguau

SEQ ID NO: 437387 - RNA, 19 nt, Homo sapiens
  misc_RNA (1)...(19): siRNA sense strand
gaucguggacggagugauu

SEQ ID NO: 437388 - RNA, 19 nt, Homo sapiens
  misc_RNA (1)...(19): siRNA sense strand
ggaggcaacacugggauua

SEQ ID NO: 437389 - RNA, 19 nt, Homo sapiens
  misc_RNA (1)...(19): siRNA sense strand
ucuaagaguagcagauuua

SEQ ID NO: 437390 - RNA, 19 nt, Homo sapiens
  misc_RNA (1)...(19): siRNA sense strand
gaagaagccagaaaauuuu

SEQ ID NO: 437391 - RNA, 19 nt, Homo sapiens
  misc_RNA (1)...(19): siRNA sense strand
gcuauauuccuccucauuu

SEQ ID NO: 437392 - RNA, 19 nt, Homo sapiens
  misc_RNA (1)...(19): siRNA sense strand
cgaagaagccagaaaauuu

SEQ ID NO: 437393 - RNA, 19 nt, Homo sapiens
  misc_RNA (1)...(19): siRNA sense strand
cagcaaagggcgcuauauu

SEQ ID NO: 437394 - RNA, 19 nt, Homo sapiens
  misc_RNA (1)...(19): siRNA sense strand
gccuagaccugaacucuuc

SEQ ID NO: 437395 - RNA, 19 nt, Homo sapiens
  misc_RNA (1)...(19): siRNA sense strand
gaagaauauguacaucgua

SEQ ID NO: 437396 - RNA, 19 nt, Homo sapiens
  misc_RNA (1)...(19): siRNA sense strand
gccaagugauauugaagaa

SEQ ID NO: 437397 - RNA, 19 nt, Homo sapiens
  misc_RNA (1)...(19): siRNA sense strand
gguguuagaugaagcugau

SEQ ID NO: 437398 - RNA, 19 nt, Homo sapiens
  misc_RNA (1)...(19): siRNA sense strand
uagaaaacauggcuuauga

SEQ ID NO: 437399 - RNA, 19 nt, Homo sapiens
  misc_RNA (1)...(19): siRNA sense strand
cuggcaaccucauucuuua

SEQ ID NO: 437400 - RNA, 19 nt, Homo sapiens
  misc_RNA (1)...(19): siRNA sense strand
caguacagaucuacgaaga

SEQ ID NO: 437401 - RNA, 19 nt, Homo sapiens
  misc_RNA (1)...(19): siRNA sense strand
gcaguuugcuggccuagac

SEQ ID NO: 437402 - RNA, 19 nt, Homo sapiens
  misc_RNA (1)...(19): siRNA sense strand
gccagagacuaccgacaaa

SEQ ID NO: 437403 - RNA, 19 nt, Homo sapiens
  misc_RNA (1)...(19): siRNA sense strand
cgagagaguuggcaguaca

SEQ ID NO: 437404 - RNA, 19 nt, Homo sapiens
  misc_RNA (1)...(19): siRNA sense strand
cuccacauauugaaaguuu

SEQ ID NO: 437405 - RNA, 19 nt, Homo sapiens
  misc_RNA (1)...(19): siRNA sense strand
gcucgugauuucuuagaug

SEQ ID NO: 437406 - RNA, 19 nt, Homo sapiens
  misc_RNA (1)...(19): siRNA sense strand
gcuggcucgugauuucuua

SEQ ID NO: 437407 - RNA, 19 nt, Homo sapiens
  misc_RNA (1)...(19): siRNA sense strand
gauggaaagaggaaagauu

SEQ ID NO: 437408 - RNA, 19 nt, Homo sapiens
  misc_RNA (1)...(19): siRNA sense strand
guugagaugggagaaauua

SEQ ID NO: 437409 - RNA, 19 nt, Homo sapiens
  misc_RNA (1)...(19): siRNA sense strand
gagaagcuacuagagguuu

SEQ ID NO: 437410 - RNA, 19 nt, Homo sapiens
  misc_RNA (1)...(19): siRNA sense strand
gguggaagaaucagacaaa

SEQ ID NO: 437411 - RNA, 19 nt, Homo sapiens
  misc_RNA (1)...(19): siRNA sense strand
gaaagaggaaagauuggau

SEQ ID NO: 437412 - RNA, 19 nt, Homo sapiens
  misc_RNA (1)...(19): siRNA sense strand
gcugaucggauguuggaua

SEQ ID NO: 437413 - RNA, 19 nt, Homo sapiens
  misc_RNA (1)...(19): siRNA sense strand
agaagugccgucuugguua

SEQ ID NO: 437414 - RNA, 19 nt, Homo sapiens
  misc_RNA (1)...(19): siRNA sense strand
caaccucauucuuuaacga

SEQ ID NO: 437415 - RNA, 19 nt, Homo sapiens
  misc_RNA (1)...(19): siRNA sense strand
gaaacagucgcugguguga

SEQ ID NO: 437416 - RNA, 19 nt, Homo sapiens
  misc_RNA (1)...(19): siRNA sense strand
cagauuuaguggaggguuu

SEQ ID NO: 437417 - RNA, 19 nt, Homo sapiens
  misc_RNA (1)...(19): siRNA sense strand
ugaagaauauguacaucgu

SEQ ID NO: 437418 - RNA, 19 nt, Homo sapiens
  misc_RNA (1)...(19): siRNA sense strand
uuuaguggcuacagcagua

SEQ ID NO: 437419 - RNA, 19 nt, Homo sapiens
  misc_RNA (1)...(19): siRNA sense strand
ggacgucuaguggauauga

SEQ ID NO: 437420 - RNA, 19 nt, Homo sapiens
  misc_RNA (1)...(19): siRNA sense strand
gagaugggagaaauuauca

SEQ ID NO: 437421 - RNA, 19 nt, Homo sapiens
  misc_RNA (1)...(19): siRNA sense strand
aagcaugcuauuccuauua

SEQ ID NO: 437422 - RNA, 19 nt, Homo sapiens
  misc_RNA (1)...(19): siRNA sense strand
ugauggauauggaggaaau

SEQ ID NO: 437423 - RNA, 19 nt, Homo sapiens
  misc_RNA (1)...(19): siRNA sense strand
gcaaagggcgcuauauucc

SEQ ID NO: 437424 - RNA, 19 nt, Homo sapiens
  misc_RNA (1)...(19): siRNA sense strand
agaauagucgaacaagaua

SEQ ID NO: 437425 - RNA, 19 nt, Homo sapiens
  misc_RNA (1)...(19): siRNA sense strand
uagaauagucgaacaagau

SEQ ID NO: 437426 - RNA, 19 nt, Homo sapiens
  misc_RNA (1)...(19): siRNA sense strand
ggaaagaggaaagauugga

SEQ ID NO: 437427 - RNA, 19 nt, Homo sapiens
  misc_RNA (1)...(19): siRNA sense strand
guacgggacguguaggaaa

SEQ ID NO: 437428 - RNA, 19 nt, Homo sapiens
  misc_RNA (1)...(19): siRNA sense strand
ggaaguacagccagcaaag

SEQ ID NO: 437429 - RNA, 19 nt, Homo sapiens
  misc_RNA (1)...(19): siRNA sense strand
aagaguagcagauuuagug

SEQ ID NO: 437430 - RNA, 19 nt, Homo sapiens
  misc_RNA (1)...(19): siRNA sense strand
cguggacguucuaagagua

SEQ ID NO: 437431 - RNA, 19 nt, Homo sapiens
  misc_RNA (1)...(19): siRNA sense strand
uguuggaucuucuuguuga

SEQ ID NO: 437432 - RNA, 19 nt, Homo sapiens
  misc_RNA (1)...(19): siRNA sense strand
cgagaggaacauaaauauu

SEQ ID NO: 437433 - RNA, 19 nt, Homo sapiens
  misc_RNA (1)...(19): siRNA sense strand
aagaggcccuucaccaguu

SEQ ID NO: 437434 - RNA, 19 nt, Homo sapiens
  misc_RNA (1)...(19): siRNA sense strand
gauaugauggaaagaggaa

SEQ ID NO: 437435 - RNA, 19 nt, Homo sapiens
  misc_RNA (1)...(19): siRNA sense strand
ucauaccgaucuagaguuc

SEQ ID NO: 437436 - RNA, 19 nt, Homo sapiens
  misc_RNA (1)...(19): siRNA sense strand
gcauuucuguugcccaucu

SEQ ID NO: 437437 - RNA, 19 nt, Homo sapiens
  misc_RNA (1)...(19): siRNA sense strand
acaaaucagaugaagauga

SEQ ID NO: 437438 - RNA, 19 nt, Homo sapiens
  misc_RNA (1)...(19): siRNA sense strand
cuaaggauuuguuggaucu

SEQ ID NO: 437439 - RNA, 19 nt, Homo sapiens
  misc_RNA (1)...(19): siRNA sense strand
guacaucguauuggucgua

SEQ ID NO: 437440 - RNA, 19 nt, Homo sapiens
  misc_RNA (1)...(19): siRNA sense strand
aagauacuaugccuccaaa

SEQ ID NO: 437441 - RNA, 19 nt, Homo sapiens
  misc_RNA (1)...(19): siRNA sense strand
ggaaagauuggauuagacu

SEQ ID NO: 437442 - RNA, 19 nt, Homo sapiens
  misc_RNA (1)...(19): siRNA sense strand
caggacgucuaguggauau

SEQ ID NO: 437443 - RNA, 19 nt, Homo sapiens
  misc_RNA (1)...(19): siRNA sense strand
uggaugccauuuguuagua

SEQ ID NO: 437444 - RNA, 19 nt, Homo sapiens
  misc_RNA (1)...(19): siRNA sense strand
gaugggagaaauuaucaug

SEQ ID NO: 437445 - RNA, 19 nt, Homo sapiens
  misc_RNA (1)...(19): siRNA sense strand
acgaugacauuccaguuga

SEQ ID NO: 437446 - RNA, 19 nt, Homo sapiens
  misc_RNA (1)...(19): siRNA sense strand
ggauuagacuuuugcaaau

SEQ ID NO: 437447 - RNA, 19 nt, Homo sapiens
  misc_RNA (1)...(19): siRNA sense strand
aagaggaaagauuggauua

SEQ ID NO: 437448 - RNA, 19 nt, Homo sapiens
  misc_RNA (1)...(19): siRNA sense strand
aaagcaugcuauuccuauu

SEQ ID NO: 437449 - RNA, 19 nt, Homo sapiens
  misc_RNA (1)...(19): siRNA sense strand
caagagggaagucuagcuu

SEQ ID NO: 437450 - RNA, 19 nt, Homo sapiens
  misc_RNA (1)...(19): siRNA sense strand
ucagagggauagagaagag

SEQ ID NO: 437451 - RNA, 19 nt, Homo sapiens
  misc_RNA (1)...(19): siRNA sense strand
uugcaaauacuugguguua

SEQ ID NO: 437452 - RNA, 19 nt, Homo sapiens
  misc_RNA (1)...(19): siRNA sense strand
cgauauuggucagcagauu

SEQ ID NO: 437453 - RNA, 19 nt, Homo sapiens
  misc_RNA (1)...(19): siRNA sense strand
acacugggauuaauuuuga

SEQ ID NO: 437454 - RNA, 19 nt, Homo sapiens
  misc_RNA (1)...(19): siRNA sense strand
aauacuugguguuagauga

SEQ ID NO: 437455 - RNA, 19 nt, Homo sapiens
  misc_RNA (1)...(19): siRNA sense strand
gaaaacaucacacagaaag

SEQ ID NO: 437456 - RNA, 19 nt, Homo sapiens
  misc_RNA (1)...(19): siRNA sense strand
aacgagaggaacauaaaua

SEQ ID NO: 437457 - RNA, 19 nt, Homo sapiens
  misc_RNA (1)...(19): siRNA sense strand
gcaaauacuugguguuaga

SEQ ID NO: 437458 - RNA, 19 nt, Homo sapiens
  misc_RNA (1)...(19): siRNA sense strand
gaacguggaugccauuugu

SEQ ID NO: 437459 - RNA, 19 nt, Homo sapiens
  misc_RNA (1)...(19): siRNA sense strand
acauugagcuuacucguua

SEQ ID NO: 437460 - RNA, 19 nt, Homo sapiens
  misc_RNA (1)...(19): siRNA sense strand
gaaaguaguuuggguggaa

SEQ ID NO: 437461 - RNA, 19 nt, Homo sapiens
  misc_RNA (1)...(19): siRNA sense strand
caagaggacuggacauuuc

SEQ ID NO: 437462 - RNA, 19 nt, Homo sapiens
  misc_RNA (1)...(19): siRNA sense strand
gaaauacgaugacauucca

SEQ ID NO: 437463 - RNA, 19 nt, Homo sapiens
  misc_RNA (1)...(19): siRNA sense strand
gaggaaagauuggauuaga

SEQ ID NO: 437464 - RNA, 19 nt, Homo sapiens
  misc_RNA (1)...(19): siRNA sense strand
caacuguccuccacauauu

SEQ ID NO: 437465 - RNA, 19 nt, Homo sapiens
  misc_RNA (1)...(19): siRNA sense strand
ggauauggaggaaauuaua

SEQ ID NO: 437466 - RNA, 19 nt, Homo sapiens
  misc_RNA (1)...(19): siRNA sense strand
gagaaauuaucaugggaaa

SEQ ID NO: 437467 - RNA, 19 nt, Homo sapiens
  misc_RNA (1)...(19): siRNA sense strand
cuauauuccuccucauuua

SEQ ID NO: 437468 - RNA, 19 nt, Homo sapiens
  misc_RNA (1)...(19): siRNA sense strand
caacagugauggauaugga

SEQ ID NO: 437469 - RNA, 19 nt, Homo sapiens
  misc_RNA (1)...(19): siRNA sense strand
gaaauuaucaugggaaaca

SEQ ID NO: 437470 - RNA, 19 nt, Homo sapiens
  misc_RNA (1)...(19): siRNA sense strand
aaacauggcuuaugaacac

SEQ ID NO: 437471 - RNA, 19 nt, Homo sapiens
  misc_RNA (1)...(19): siRNA sense strand
ugagucagauuuauucaga

SEQ ID NO: 437472 - RNA, 19 nt, Homo sapiens
  misc_RNA (1)...(19): siRNA sense strand
gcaagaggacuggacauuu

SEQ ID NO: 437473 - RNA, 19 nt, Homo sapiens
  misc_RNA (1)...(19): siRNA sense strand
gcaacacugggauuaauuu

SEQ ID NO: 437474 - RNA, 19 nt, Homo sapiens
  misc_RNA (1)...(19): siRNA sense strand
gaugcuggcucgugauuuc

SEQ ID NO: 437475 - RNA, 19 nt, Homo sapiens
  misc_RNA (1)...(19): siRNA sense strand
guacagaucuacgaagaag

SEQ ID NO: 437476 - RNA, 19 nt, Homo sapiens
  misc_RNA (1)...(19): siRNA sense strand
uuacaacagugauggauau

SEQ ID NO: 437477 - RNA, 19 nt, Homo sapiens
  misc_RNA (1)...(19): siRNA sense strand
gaagugccgucuugguuag

SEQ ID NO: 437478 - RNA, 19 nt, Homo sapiens
  misc_RNA (1)...(19): siRNA sense strand
ggaguucuagcaaagauaa

SEQ ID NO: 437479 - RNA, 19 nt, Homo sapiens
  misc_RNA (1)...(19): siRNA sense strand
ugacaaaucagaugaagau

SEQ ID NO: 437480 - RNA, 19 nt, Homo sapiens
  misc_RNA (1)...(19): siRNA sense strand
guagaauagucgaacaaga

SEQ ID NO: 437481 - RNA, 19 nt, Homo sapiens
  misc_RNA (1)...(19): siRNA sense strand
caacaacuguccuccacau

SEQ ID NO: 437482 - RNA, 19 nt, Homo sapiens
  misc_RNA (1)...(19): siRNA sense strand
ugagaaauacgaugacauu

SEQ ID NO: 437483 - RNA, 19 nt, Homo sapiens
  misc_RNA (1)...(19): siRNA sense strand
gaaccgagaagcuacuaga

SEQ ID NO: 437484 - RNA, 19 nt, Homo sapiens
  misc_RNA (1)...(19): siRNA sense strand
aaacaucacacagaaagua

SEQ ID NO: 437485 - RNA, 19 nt, Homo sapiens
  misc_RNA (1)...(19): siRNA sense strand
gaucggauguuggauaugg

SEQ ID NO: 437486 - RNA, 19 nt, Homo sapiens
  misc_RNA (1)...(19): siRNA sense strand
gaaggaaaauggaagguau

SEQ ID NO: 437487 - RNA, 19 nt, Homo sapiens
  misc_RNA (1)...(19): siRNA sense strand
gaucguggacggagugauu

SEQ ID NO: 437488 - RNA, 19 nt, Homo sapiens
  misc_RNA (1)...(19): siRNA sense strand
ggaggcaacacugggauua

SEQ ID NO: 437489 - RNA, 19 nt, Homo sapiens
  misc_RNA (1)...(19): siRNA sense strand
ucuaagaguagcagauuua

SEQ ID NO: 437490 - RNA, 19 nt, Homo sapiens
  misc_RNA (1)...(19): siRNA sense strand
gaagaagccagaaaauuuu

SEQ ID NO: 437491 - RNA, 19 nt, Homo sapiens
  misc_RNA (1)...(19): siRNA sense strand
gcuauauuccuccucauuu

SEQ ID NO: 437492 - RNA, 19 nt, Homo sapiens
  misc_RNA (1)...(19): siRNA sense strand
cgaagaagccagaaaauuu

SEQ ID NO: 437493 - RNA, 19 nt, Homo sapiens
  misc_RNA (1)...(19): siRNA sense strand
cagcaaagggcgcuauauu

SEQ ID NO: 437494 - RNA, 19 nt, Homo sapiens
  misc_RNA (1)...(19): siRNA sense strand
gccuagaccugaacucuuc

SEQ ID NO: 437495 - RNA, 19 nt, Homo sapiens
  misc_RNA (1)...(19): siRNA sense strand
gaagaauauguacaucgua

SEQ ID NO: 437496 - RNA, 19 nt, Homo sapiens
  misc_RNA (1)...(19): siRNA sense strand
gccaagugauauugaagaa

SEQ ID NO: 437497 - RNA, 19 nt, Homo sapiens
  misc_RNA (1)...(19): siRNA sense strand
gguguuagaugaagcugau

SEQ ID NO: 437498 - RNA, 19 nt, Homo sapiens
  misc_RNA (1)...(19): siRNA sense strand
uagaaaacauggcuuauga

SEQ ID NO: 437499 - RNA, 19 nt, Homo sapiens
  misc_RNA (1)...(19): siRNA sense strand
cuggcaaccucauucuuua

SEQ ID NO: 437500 - RNA, 19 nt, Homo sapiens
  misc_RNA (1)...(19): siRNA sense strand
caguacagaucuacgaaga

SEQ ID NO: 437501 - RNA, 19 nt, Homo sapiens
  misc_RNA (1)...(19): siRNA sense strand
gcaguuugcuggccuagac

SEQ ID NO: 437502 - RNA, 19 nt, Homo sapiens
  misc_RNA (1)...(19): siRNA sense strand
gccagagacuaccgacaaa

SEQ ID NO: 437503 - RNA, 19 nt, Homo sapiens
  misc_RNA (1)...(19): siRNA sense strand
cgagagaguuggcaguaca

SEQ ID NO: 437504 - RNA, 19 nt, Homo sapiens
  misc_RNA (1)...(19): siRNA sense strand
cuccacauauugaaaguuu

SEQ ID NO: 437505 - RNA, 19 nt, Homo sapiens
  misc_RNA (1)...(19): siRNA sense strand
gcucgugauuucuuagaug

SEQ ID NO: 437506 - RNA, 19 nt, Homo sapiens
  misc_RNA (1)...(19): siRNA sense strand
gcuggcucgugauuucuua

SEQ ID NO: 437507 - RNA, 19 nt, Homo sapiens
  misc_RNA (1)...(19): siRNA sense strand
gauggaaagaggaaagauu

SEQ ID NO: 437508 - RNA, 19 nt, Homo sapiens
  misc_RNA (1)...(19): siRNA sense strand
guugagaugggagaaauua

SEQ ID NO: 437509 - RNA, 19 nt, Homo sapiens
  misc_RNA (1)...(19): siRNA sense strand
gagaagcuacuagagguuu

SEQ ID NO: 437510 - RNA, 19 nt, Homo sapiens
  misc_RNA (1)...(19): siRNA sense strand
gguggaagaaucagacaaa

SEQ ID NO: 437511 - RNA, 19 nt, Homo sapiens
  misc_RNA (1)...(19): siRNA sense strand
gaaagaggaaagauuggau

SEQ ID NO: 437512 - RNA, 19 nt, Homo sapiens
  misc_RNA (1)...(19): siRNA sense strand
gcugaucggauguuggaua

SEQ ID NO: 437513 - RNA, 19 nt, Homo sapiens
  misc_RNA (1)...(19): siRNA sense strand
agaagugccgucuugguua

SEQ ID NO: 437514 - RNA, 19 nt, Homo sapiens
  misc_RNA (1)...(19): siRNA sense strand
caaccucauucuuuaacga

SEQ ID NO: 437515 - RNA, 19 nt, Homo sapiens
  misc_RNA (1)...(19): siRNA sense strand
gaaacagucgcugguguga

SEQ ID NO: 437516 - RNA, 19 nt, Homo sapiens
  misc_RNA (1)...(19): siRNA sense strand
cagauuuaguggaggguuu

SEQ ID NO: 437517 - RNA, 19 nt, Homo sapiens
  misc_RNA (1)...(19): siRNA sense strand
ugaagaauauguacaucgu

SEQ ID NO: 437518 - RNA, 19 nt, Homo sapiens
  misc_RNA (1)...(19): siRNA sense strand
uuuaguggcuacagcagua

SEQ ID NO: 437519 - RNA, 19 nt, Homo sapiens
  misc_RNA (1)...(19): siRNA sense strand
ggacgucuaguggauauga

SEQ ID NO: 437520 - RNA, 19 nt, Homo sapiens
  misc_RNA (1)...(19): siRNA sense strand
gagaugggagaaauuauca

SEQ ID NO: 437521 - RNA, 19 nt, Homo sapiens
  misc_RNA (1)...(19): siRNA sense strand
aagcaugcuauuccuauua

SEQ ID NO: 437522 - RNA, 19 nt, Homo sapiens
  misc_RNA (1)...(19): siRNA sense strand
ugauggauauggaggaaau

SEQ ID NO: 437523 - RNA, 19 nt, Homo sapiens
  misc_RNA (1)...(19): siRNA sense strand
gcaaagggcgcuauauucc

SEQ ID NO: 437524 - RNA, 19 nt, Homo sapiens
  misc_RNA (1)...(19): siRNA sense strand
agaauagucgaacaagaua

SEQ ID NO: 437525 - RNA, 19 nt, Homo sapiens
  misc_RNA (1)...(19): siRNA sense strand
uagaauagucgaacaagau

SEQ ID NO: 437526 - RNA, 19 nt, Homo sapiens
  misc_RNA (1)...(19): siRNA sense strand
ggaaagaggaaagauugga

SEQ ID NO: 437527 - RNA, 19 nt, Homo sapiens
  misc_RNA (1)...(19): siRNA sense strand
guacgggacguguaggaaa

SEQ ID NO: 437528 - RNA, 19 nt, Homo sapiens
  misc_RNA (1)...(19): siRNA sense strand
ggaaguacagccagcaaag

SEQ ID NO: 437529 - RNA, 19 nt, Homo sapiens
  misc_RNA (1)...(19): siRNA sense strand
aagaguagcagauuuagug

SEQ ID NO: 437530 - RNA, 19 nt, Homo sapiens
  misc_RNA (1)...(19): siRNA sense strand
cguggacguucuaagagua

SEQ ID NO: 437531 - RNA, 19 nt, Homo sapiens
  misc_RNA (1)...(19): siRNA sense strand
uguuggaucuucuuguuga

SEQ ID NO: 437532 - RNA, 19 nt, Homo sapiens
  misc_RNA (1)...(19): siRNA sense strand
cgagaggaacauaaauauu

SEQ ID NO: 437533 - RNA, 19 nt, Homo sapiens
  misc_RNA (1)...(19): siRNA sense strand
aagaggcccuucaccaguu

SEQ ID NO: 437534 - RNA, 19 nt, Homo sapiens
  misc_RNA (1)...(19): siRNA sense strand
gauaugauggaaagaggaa

SEQ ID NO: 437535 - RNA, 19 nt, Homo sapiens
  misc_RNA (1)...(19): siRNA sense strand
ucauaccgaucuagaguuc

SEQ ID NO: 437536 - RNA, 19 nt, Homo sapiens
  misc_RNA (1)...(19): siRNA sense strand
gcauuucuguugcccaucu

SEQ ID NO: 437537 - RNA, 19 nt, Homo sapiens
  misc_RNA (1)...(19): siRNA sense strand
acaaaucagaugaagauga

SEQ ID NO: 437538 - RNA, 19 nt, Homo sapiens
  misc_RNA (1)...(19): siRNA sense strand
cuaaggauuuguuggaucu

SEQ ID NO: 437539 - RNA, 19 nt, Homo sapiens
  misc_RNA (1)...(19): siRNA sense strand
guacaucguauuggucgua

SEQ ID NO: 437540 - RNA, 19 nt, Homo sapiens
  misc_RNA (1)...(19): siRNA sense strand
aagauacuaugccuccaaa

SEQ ID NO: 437541 - RNA, 19 nt, Homo sapiens
  misc_RNA (1)...(19): siRNA sense strand
ggaaagauuggauuagacu

SEQ ID NO: 437542 - RNA, 19 nt, Homo sapiens
  misc_RNA (1)...(19): siRNA sense strand
caggacgucuaguggauau

SEQ ID NO: 437543 - RNA, 19 nt, Homo sapiens
  misc_RNA (1)...(19): siRNA sense strand
uggaugccauuuguuagua

SEQ ID NO: 437544 - RNA, 19 nt, Homo sapiens
  misc_RNA (1)...(19): siRNA sense strand
gaugggagaaauuaucaug

SEQ ID NO: 437545 - RNA, 19 nt, Homo sapiens
  misc_RNA (1)...(19): siRNA sense strand
acgaugacauuccaguuga

SEQ ID NO: 437546 - RNA, 19 nt, Homo sapiens
  misc_RNA (1)...(19): siRNA sense strand
ggauuagacuuuugcaaau

SEQ ID NO: 437547 - RNA, 19 nt, Homo sapiens
  misc_RNA (1)...(19): siRNA sense strand
aagaggaaagauuggauua

SEQ ID NO: 437548 - RNA, 19 nt, Homo sapiens
  misc_RNA (1)...(19): siRNA sense strand
aaagcaugcuauuccuauu

SEQ ID NO: 437549 - RNA, 19 nt, Homo sapiens
  misc_RNA (1)...(19): siRNA sense strand
caagagggaagucuagcuu

SEQ ID NO: 437550 - RNA, 19 nt, Homo sapiens
  misc_RNA (1)...(19): siRNA sense strand
ucagagggauagagaagag

SEQ ID NO: 437551 - RNA, 19 nt, Homo sapiens
  misc_RNA (1)...(19): siRNA sense strand
uugcaaauacuugguguua

SEQ ID NO: 437552 - RNA, 19 nt, Homo sapiens
  misc_RNA (1)...(19): siRNA sense strand
cgauauuggucagcagauu

SEQ ID NO: 437553 - RNA, 19 nt, Homo sapiens
  misc_RNA (1)...(19): siRNA sense strand
acacugggauuaauuuuga

SEQ ID NO: 437554 - RNA, 19 nt, Homo sapiens
  misc_RNA (1)...(19): siRNA sense strand
aauacuugguguuagauga

SEQ ID NO: 437555 - RNA, 19 nt, Homo sapiens
  misc_RNA (1)...(19): siRNA sense strand
gaaaacaucacacagaaag

SEQ ID NO: 437556 - RNA, 19 nt, Homo sapiens
  misc_RNA (1)...(19): siRNA sense strand
aacgagaggaacauaaaua

SEQ ID NO: 437557 - RNA, 19 nt, Homo sapiens
  misc_RNA (1)...(19): siRNA sense strand
gcaaauacuugguguuaga

SEQ ID NO: 437558 - RNA, 19 nt, Homo sapiens
  misc_RNA (1)...(19): siRNA sense strand
gaacguggaugccauuugu

SEQ ID NO: 437559 - RNA, 19 nt, Homo sapiens
  misc_RNA (1)...(19): siRNA sense strand
acauugagcuuacucguua

SEQ ID NO: 437560 - RNA, 19 nt, Homo sapiens
  misc_RNA (1)...(19): siRNA sense strand
gaaaguaguuuggguggaa

SEQ ID NO: 437561 - RNA, 19 nt, Homo sapiens
  misc_RNA (1)...(19): siRNA sense strand
caagaggacuggacauuuc

SEQ ID NO: 437562 - RNA, 19 nt, Homo sapiens
  misc_RNA (1)...(19): siRNA sense strand
gaaauacgaugacauucca

SEQ ID NO: 437563 - RNA, 19 nt, Homo sapiens
  misc_RNA (1)...(19): siRNA sense strand
gaggaaagauuggauuaga

SEQ ID NO: 437564 - RNA, 19 nt, Homo sapiens
  misc_RNA (1)...(19): siRNA sense strand
caacuguccuccacauauu

SEQ ID NO: 437565 - RNA, 19 nt, Homo sapiens
  misc_RNA (1)...(19): siRNA sense strand
ggauauggaggaaauuaua

SEQ ID NO: 437566 - RNA, 19 nt, Homo sapiens
  misc_RNA (1)...(19): siRNA sense strand
gagaaauuaucaugggaaa

SEQ ID NO: 437567 - RNA, 19 nt, Homo sapiens
  misc_RNA (1)...(19): siRNA sense strand
cuauauuccuccucauuua

SEQ ID NO: 437568 - RNA, 19 nt, Homo sapiens
  misc_RNA (1)...(19): siRNA sense strand
caacagugauggauaugga

SEQ ID NO: 437569 - RNA, 19 nt, Homo sapiens
  misc_RNA (1)...(19): siRNA sense strand
gaaauuaucaugggaaaca

SEQ ID NO: 437570 - RNA, 19 nt, Homo sapiens
  misc_RNA (1)...(19): siRNA sense strand
aaacauggcuuaugaacac

SEQ ID NO: 437571 - RNA, 19 nt, Homo sapiens
  misc_RNA (1)...(19): siRNA sense strand
ugagucagauuuauucaga

SEQ ID NO: 437572 - RNA, 19 nt, Homo sapiens
  misc_RNA (1)...(19): siRNA sense strand
gcaagaggacuggacauuu

SEQ ID NO: 437573 - RNA, 19 nt, Homo sapiens
  misc_RNA (1)...(19): siRNA sense strand
gcaacacugggauuaauuu

SEQ ID NO: 437574 - RNA, 19 nt, Homo sapiens
  misc_RNA (1)...(19): siRNA sense strand
gaugcuggcucgugauuuc

SEQ ID NO: 437575 - RNA, 19 nt, Homo sapiens
  misc_RNA (1)...(19): siRNA sense strand
guacagaucuacgaagaag

SEQ ID NO: 437576 - RNA, 19 nt, Homo sapiens
  misc_RNA (1)...(19): siRNA sense strand
uuacaacagugauggauau

SEQ ID NO: 437577 - RNA, 19 nt, Homo sapiens
  misc_RNA (1)...(19): siRNA sense strand
gaagugccgucuugguuag

SEQ ID NO: 437578 - RNA, 19 nt, Homo sapiens
  misc_RNA (1)...(19): siRNA sense strand
ggaguucuagcaaagauaa

SEQ ID NO: 437579 - RNA, 19 nt, Homo sapiens
  misc_RNA (1)...(19): siRNA sense strand
ugacaaaucagaugaagau

SEQ ID NO: 437580 - RNA, 19 nt, Homo sapiens
  misc_RNA (1)...(19): siRNA sense strand
guagaauagucgaacaaga

SEQ ID NO: 437581 - RNA, 19 nt, Homo sapiens
  misc_RNA (1)...(19): siRNA sense strand
caacaacuguccuccacau

SEQ ID NO: 437582 - RNA, 19 nt, Homo sapiens
  misc_RNA (1)...(19): siRNA sense strand
ugagaaauacgaugacauu

SEQ ID NO: 437583 - RNA, 19 nt, Homo sapiens
  misc_RNA (1)...(19): siRNA sense strand
gaaccgagaagcuacuaga

SEQ ID NO: 437584 - RNA, 19 nt, Homo sapiens
  misc_RNA (1)...(19): siRNA sense strand
aaacaucacacagaaagua

SEQ ID NO: 437585 - RNA, 19 nt, Homo sapiens
  misc_RNA (1)...(19): siRNA sense strand
gaucggauguuggauaugg

SEQ ID NO: 437586 - RNA, 19 nt, Homo sapiens
  misc_RNA (1)...(19): siRNA sense strand
gaaggaaaauggaagguau

SEQ ID NO: 437587 - RNA, 19 nt, Homo sapiens
  misc_RNA (1)...(19): siRNA sense strand
gaucguggacggagugauu

SEQ ID NO: 437588 - RNA, 19 nt, Homo sapiens
  misc_RNA (1)...(19): siRNA sense strand
ggaggcaacacugggauua

SEQ ID NO: 437589 - RNA, 19 nt, Homo sapiens
  misc_RNA (1)...(19): siRNA sense strand
ucuaagaguagcagauuua

SEQ ID NO: 437590 - RNA, 19 nt, Homo sapiens
  misc_RNA (1)...(19): siRNA sense strand
gaagaagccagaaaauuuu

SEQ ID NO: 437591 - RNA, 19 nt, Homo sapiens
  misc_RNA (1)...(19): siRNA sense strand
gcuauauuccuccucauuu

SEQ ID NO: 437592 - RNA, 19 nt, Homo sapiens
  misc_RNA (1)...(19): siRNA sense strand
cgaagaagccagaaaauuu

SEQ ID NO: 437593 - RNA, 19 nt, Homo sapiens
  misc_RNA (1)...(19): siRNA sense strand
cagcaaagggcgcuauauu

SEQ ID NO: 437594 - RNA, 19 nt, Homo sapiens
  misc_RNA (1)...(19): siRNA sense strand
gccuagaccugaacucuuc

SEQ ID NO: 437595 - RNA, 19 nt, Homo sapiens
  misc_RNA (1)...(19): siRNA sense strand
gaagaauauguacaucgua

SEQ ID NO: 437596 - RNA, 19 nt, Homo sapiens
  misc_RNA (1)...(19): siRNA sense strand
gccaagugauauugaagaa

SEQ ID NO: 437597 - RNA, 19 nt, Homo sapiens
  misc_RNA (1)...(19): siRNA sense strand
gguguuagaugaagcugau

SEQ ID NO: 437598 - RNA, 19 nt, Homo sapiens
  misc_RNA (1)...(19): siRNA sense strand
uagaaaacauggcuuauga

SEQ ID NO: 437599 - RNA, 19 nt, Homo sapiens
  misc_RNA (1)...(19): siRNA sense strand
cuggcaaccucauucuuua

SEQ ID NO: 437600 - RNA, 19 nt, Homo sapiens
  misc_RNA (1)...(19): siRNA sense strand
caguacagaucuacgaaga

SEQ ID NO: 437601 - RNA, 19 nt, Homo sapiens
  misc_RNA (1)...(19): siRNA sense strand
gcaguuugcuggccuagac

SEQ ID NO: 437602 - RNA, 19 nt, Homo sapiens
  misc_RNA (1)...(19): siRNA sense strand
gccagagacuaccgacaaa

SEQ ID NO: 437603 - RNA, 19 nt, Homo sapiens
  misc_RNA (1)...(19): siRNA sense strand
cgagagaguuggcaguaca

SEQ ID NO: 437604 - RNA, 19 nt, Homo sapiens
  misc_RNA (1)...(19): siRNA sense strand
cuccacauauugaaaguuu

SEQ ID NO: 437605 - RNA, 19 nt, Homo sapiens
  misc_RNA (1)...(19): siRNA sense strand
gcucgugauuucuuagaug

SEQ ID NO: 437606 - RNA, 19 nt, Homo sapiens
  misc_RNA (1)...(19): siRNA sense strand
gcuggcucgugauuucuua

SEQ ID NO: 437607 - RNA, 19 nt, Homo sapiens
  misc_RNA (1)...(19): siRNA sense strand
gauggaaagaggaaagauu

SEQ ID NO: 437608 - RNA, 19 nt, Homo sapiens
  misc_RNA (1)...(19): siRNA sense strand
guugagaugggagaaauua

SEQ ID NO: 437609 - RNA, 19 nt, Homo sapiens
  misc_RNA (1)...(19): siRNA sense strand
gagaagcuacuagagguuu

SEQ ID NO: 437610 - RNA, 19 nt, Homo sapiens
  misc_RNA (1)...(19): siRNA sense strand
gguggaagaaucagacaaa

SEQ ID NO: 437611 - RNA, 19 nt, Homo sapiens
  misc_RNA (1)...(19): siRNA sense strand
gaaagaggaaagauuggau

SEQ ID NO: 437612 - RNA, 19 nt, Homo sapiens
  misc_RNA (1)...(19): siRNA sense strand
gcugaucggauguuggaua

SEQ ID NO: 437613 - RNA, 19 nt, Homo sapiens
  misc_RNA (1)...(19): siRNA sense strand
agaagugccgucuugguua

SEQ ID NO: 437614 - RNA, 19 nt, Homo sapiens
  misc_RNA (1)...(19): siRNA sense strand
caaccucauucuuuaacga

SEQ ID NO: 437615 - RNA, 19 nt, Homo sapiens
  misc_RNA (1)...(19): siRNA sense strand
gaaacagucgcugguguga

SEQ ID NO: 437616 - RNA, 19 nt, Homo sapiens
  misc_RNA (1)...(19): siRNA sense strand
cagauuuaguggaggguuu

SEQ ID NO: 437617 - RNA, 19 nt, Homo sapiens
  misc_RNA (1)...(19): siRNA sense strand
ugaagaauauguacaucgu

SEQ ID NO: 437618 - RNA, 19 nt, Homo sapiens
  misc_RNA (1)...(19): siRNA sense strand
uuuaguggcuacagcagua

SEQ ID NO: 437619 - RNA, 19 nt, Homo sapiens
  misc_RNA (1)...(19): siRNA sense strand
ggacgucuaguggauauga

SEQ ID NO: 437620 - RNA, 19 nt, Homo sapiens
  misc_RNA (1)...(19): siRNA sense strand
gagaugggagaaauuauca

SEQ ID NO: 437621 - RNA, 19 nt, Homo sapiens
  misc_RNA (1)...(19): siRNA sense strand
aagcaugcuauuccuauua

SEQ ID NO: 437622 - RNA, 19 nt, Homo sapiens
  misc_RNA (1)...(19): siRNA sense strand
ugauggauauggaggaaau

SEQ ID NO: 437623 - RNA, 19 nt, Homo sapiens
  misc_RNA (1)...(19): siRNA sense strand
gcaaagggcgcuauauucc

SEQ ID NO: 437624 - RNA, 19 nt, Homo sapiens
  misc_RNA (1)...(19): siRNA sense strand
agaauagucgaacaagaua

SEQ ID NO: 437625 - RNA, 19 nt, Homo sapiens
  misc_RNA (1)...(19): siRNA sense strand
uagaauagucgaacaagau

SEQ ID NO: 437626 - RNA, 19 nt, Homo sapiens
  misc_RNA (1)...(19): siRNA sense strand
ggaaagaggaaagauugga

SEQ ID NO: 437627 - RNA, 19 nt, Homo sapiens
  misc_RNA (1)...(19): siRNA sense strand
guacgggacguguaggaaa

SEQ ID NO: 437628 - RNA, 19 nt, Homo sapiens
  misc_RNA (1)...(19): siRNA sense strand
ggaaguacagccagcaaag

SEQ ID NO: 437629 - RNA, 19 nt, Homo sapiens
  misc_RNA (1)...(19): siRNA sense strand
aagaguagcagauuuagug

SEQ ID NO: 437630 - RNA, 19 nt, Homo sapiens
  misc_RNA (1)...(19): siRNA sense strand
cguggacguucuaagagua

SEQ ID NO: 437631 - RNA, 19 nt, Homo sapiens
  misc_RNA (1)...(19): siRNA sense strand
uguuggaucuucuuguuga

SEQ ID NO: 437632 - RNA, 19 nt, Homo sapiens
  misc_RNA (1)...(19): siRNA sense strand
cgagaggaacauaaauauu

SEQ ID NO: 437633 - RNA, 19 nt, Homo sapiens
  misc_RNA (1)...(19): siRNA sense strand
aagaggcccuucaccaguu

SEQ ID NO: 437634 - RNA, 19 nt, Homo sapiens
  misc_RNA (1)...(19): siRNA sense strand
gauaugauggaaagaggaa

SEQ ID NO: 437635 - RNA, 19 nt, Homo sapiens
  misc_RNA (1)...(19): siRNA sense strand
ucauaccgaucuagaguuc

SEQ ID NO: 437636 - RNA, 19 nt, Homo sapiens
  misc_RNA (1)...(19): siRNA sense strand
gcauuucuguugcccaucu

SEQ ID NO: 437637 - RNA, 19 nt, Homo sapiens
  misc_RNA (1)...(19): siRNA sense strand
acaaaucagaugaagauga

SEQ ID NO: 437638 - RNA, 19 nt, Homo sapiens
  misc_RNA (1)...(19): siRNA sense strand
cuaaggauuuguuggaucu

SEQ ID NO: 437639 - RNA, 19 nt, Homo sapiens
  misc_RNA (1)...(19): siRNA sense strand
guacaucguauuggucgua

SEQ ID NO: 437640 - RNA, 19 nt, Homo sapiens
  misc_RNA (1)...(19): siRNA sense strand
aagauacuaugccuccaaa

SEQ ID NO: 437641 - RNA, 19 nt, Homo sapiens
  misc_RNA (1)...(19): siRNA sense strand
ggaaagauuggauuagacu

SEQ ID NO: 437642 - RNA, 19 nt, Homo sapiens
  misc_RNA (1)...(19): siRNA sense strand
caggacgucuaguggauau

SEQ ID NO: 437643 - RNA, 19 nt, Homo sapiens
  misc_RNA (1)...(19): siRNA sense strand
uggaugccauuuguuagua

SEQ ID NO: 437644 - RNA, 19 nt, Homo sapiens
  misc_RNA (1)...(19): siRNA sense strand
gaugggagaaauuaucaug

SEQ ID NO: 437645 - RNA, 19 nt, Homo sapiens
  misc_RNA (1)...(19): siRNA sense strand
acgaugacauuccaguuga

SEQ ID NO: 437646 - RNA, 19 nt, Homo sapiens
  misc_RNA (1)...(19): siRNA sense strand
ggauuagacuuuugcaaau

SEQ ID NO: 437647 - RNA, 19 nt, Homo sapiens
  misc_RNA (1)...(19): siRNA sense strand
aagaggaaagauuggauua

SEQ ID NO: 437648 - RNA, 19 nt, Homo sapiens
  misc_RNA (1)...(19): siRNA sense strand
aaagcaugcuauuccuauu

SEQ ID NO: 437649 - RNA, 19 nt, Homo sapiens
  misc_RNA (1)...(19): siRNA sense strand
caagagggaagucuagcuu

SEQ ID NO: 437650 - RNA, 19 nt, Homo sapiens
  misc_RNA (1)...(19): siRNA sense strand
ucagagggauagagaagag

SEQ ID NO: 437651 - RNA, 19 nt, Homo sapiens
  misc_RNA (1)...(19): siRNA sense strand
uugcaaauacuugguguua

SEQ ID NO: 437652 - RNA, 19 nt, Homo sapiens
  misc_RNA (1)...(19): siRNA sense strand
cgauauuggucagcagauu

SEQ ID NO: 437653 - RNA, 19 nt, Homo sapiens
  misc_RNA (1)...(19): siRNA sense strand
acacugggauuaauuuuga

SEQ ID NO: 437654 - RNA, 19 nt, Homo sapiens
  misc_RNA (1)...(19): siRNA sense strand
aauacuugguguuagauga

SEQ ID NO: 437655 - RNA, 19 nt, Homo sapiens
  misc_RNA (1)...(19): siRNA sense strand
gaaaacaucacacagaaag

SEQ ID NO: 437656 - RNA, 19 nt, Homo sapiens
  misc_RNA (1)...(19): siRNA sense strand
aacgagaggaacauaaaua

SEQ ID NO: 437657 - RNA, 19 nt, Homo sapiens
  misc_RNA (1)...(19): siRNA sense strand
gcaaauacuugguguuaga

SEQ ID NO: 437658 - RNA, 19 nt, Homo sapiens
  misc_RNA (1)...(19): siRNA sense strand
gaacguggaugccauuugu

SEQ ID NO: 437659 - RNA, 19 nt, Homo sapiens
  misc_RNA (1)...(19): siRNA sense strand
acauugagcuuacucguua

SEQ ID NO: 437660 - RNA, 19 nt, Homo sapiens
  misc_RNA (1)...(19): siRNA sense strand
gaaaguaguuuggguggaa

SEQ ID NO: 437661 - RNA, 19 nt, Homo sapiens
  misc_RNA (1)...(19): siRNA sense strand
caagaggacuggacauuuc

SEQ ID NO: 437662 - RNA, 19 nt, Homo sapiens
  misc_RNA (1)...(19): siRNA sense strand
gaaauacgaugacauucca

SEQ ID NO: 437663 - RNA, 19 nt, Homo sapiens
  misc_RNA (1)...(19): siRNA sense strand
gaggaaagauuggauuaga

SEQ ID NO: 437664 - RNA, 19 nt, Homo sapiens
  misc_RNA (1)...(19): siRNA sense strand
caacuguccuccacauauu

SEQ ID NO: 437665 - RNA, 19 nt, Homo sapiens
  misc_RNA (1)...(19): siRNA sense strand
ggauauggaggaaauuaua

SEQ ID NO: 437666 - RNA, 19 nt, Homo sapiens
  misc_RNA (1)...(19): siRNA sense strand
gagaaauuaucaugggaaa

SEQ ID NO: 437667 - RNA, 19 nt, Homo sapiens
  misc_RNA (1)...(19): siRNA sense strand
cuauauuccuccucauuua

SEQ ID NO: 437668 - RNA, 19 nt, Homo sapiens
  misc_RNA (1)...(19): siRNA sense strand
caacagugauggauaugga

SEQ ID NO: 437669 - RNA, 19 nt, Homo sapiens
  misc_RNA (1)...(19): siRNA sense strand
gaaauuaucaugggaaaca

SEQ ID NO: 437670 - RNA, 19 nt, Homo sapiens
  misc_RNA (1)...(19): siRNA sense strand
aaacauggcuuaugaacac

SEQ ID NO: 437671 - RNA, 19 nt, Homo sapiens
  misc_RNA (1)...(19): siRNA sense strand
ugagucagauuuauucaga

SEQ ID NO: 437672 - RNA, 19 nt, Homo sapiens
  misc_RNA (1)...(19): siRNA sense strand
gcaagaggacuggacauuu

SEQ ID NO: 437673 - RNA, 19 nt, Homo sapiens
  misc_RNA (1)...(19): siRNA sense strand
gcaacacugggauuaauuu

SEQ ID NO: 437674 - RNA, 19 nt, Homo sapiens
  misc_RNA (1)...(19): siRNA sense strand
gaugcuggcucgugauuuc

SEQ ID NO: 437675 - RNA, 19 nt, Homo sapiens
  misc_RNA (1)...(19): siRNA sense strand
guacagaucuacgaagaag

SEQ ID NO: 437676 - RNA, 19 nt, Homo sapiens
  misc_RNA (1)...(19): siRNA sense strand
uuacaacagugauggauau

SEQ ID NO: 437677 - RNA, 19 nt, Homo sapiens
  misc_RNA (1)...(19): siRNA sense strand
gaagugccgucuugguuag

SEQ ID NO: 437678 - RNA, 19 nt, Homo sapiens
  misc_RNA (1)...(19): siRNA sense strand
ggaguucuagcaaagauaa

SEQ ID NO: 437679 - RNA, 19 nt, Homo sapiens
  misc_RNA (1)...(19): siRNA sense strand
ugacaaaucagaugaagau

SEQ ID NO: 437680 - RNA, 19 nt, Homo sapiens
  misc_RNA (1)...(19): siRNA sense strand
guagaauagucgaacaaga

SEQ ID NO: 437681 - RNA, 19 nt, Homo sapiens
  misc_RNA (1)...(19): siRNA sense strand
caacaacuguccuccacau

SEQ ID NO: 437682 - RNA, 19 nt, Homo sapiens
  misc_RNA (1)...(19): siRNA sense strand
ugagaaauacgaugacauu

SEQ ID NO: 437683 - RNA, 19 nt, Homo sapiens
  misc_RNA (1)...(19): siRNA sense strand
gaaccgagaagcuacuaga

SEQ ID NO: 437684 - RNA, 19 nt, Homo sapiens
  misc_RNA (1)...(19): siRNA sense strand
aaacaucacacagaaagua

SEQ ID NO: 437685 - RNA, 19 nt, Homo sapiens
  misc_RNA (1)...(19): siRNA sense strand
gaucggauguuggauaugg

SEQ ID NO: 437686 - RNA, 19 nt, Homo sapiens
  misc_RNA (1)...(19): siRNA sense strand
gaaggaaaauggaagguau

SEQ ID NO: 437687 - RNA, 19 nt, Homo sapiens
  misc_RNA (1)...(19): siRNA sense strand
gaucguggacggagugauu

SEQ ID NO: 437688 - RNA, 19 nt, Homo sapiens
  misc_RNA (1)...(19): siRNA sense strand
ggaggcaacacugggauua

SEQ ID NO: 437689 - RNA, 19 nt, Homo sapiens
  misc_RNA (1)...(19): siRNA sense strand
ucuaagaguagcagauuua

SEQ ID NO: 437690 - RNA, 19 nt, Homo sapiens
  misc_RNA (1)...(19): siRNA sense strand
gaagaagccagaaaauuuu

SEQ ID NO: 437691 - RNA, 19 nt, Homo sapiens
  misc_RNA (1)...(19): siRNA sense strand
gcuauauuccuccucauuu

SEQ ID NO: 437692 - RNA, 19 nt, Homo sapiens
  misc_RNA (1)...(19): siRNA sense strand
cgaagaagccagaaaauuu

SEQ ID NO: 437693 - RNA, 19 nt, Homo sapiens
  misc_RNA (1)...(19): siRNA sense strand
cagcaaagggcgcuauauu

SEQ ID NO: 437694 - RNA, 19 nt, Homo sapiens
  misc_RNA (1)...(19): siRNA sense strand
gccuagaccugaacucuuc

SEQ ID NO: 437695 - RNA, 19 nt, Homo sapiens
  misc_RNA (1)...(19): siRNA sense strand
gaagaauauguacaucgua

SEQ ID NO: 437696 - RNA, 19 nt, Homo sapiens
  misc_RNA (1)...(19): siRNA sense strand
gccaagugauauugaagaa

SEQ ID NO: 437697 - RNA, 19 nt, Homo sapiens
  misc_RNA (1)...(19): siRNA sense strand
gguguuagaugaagcugau

SEQ ID NO: 437698 - RNA, 19 nt, Homo sapiens
  misc_RNA (1)...(19): siRNA sense strand
uagaaaacauggcuuauga

SEQ ID NO: 437699 - RNA, 19 nt, Homo sapiens
  misc_RNA (1)...(19): siRNA sense strand
cuggcaaccucauucuuua

SEQ ID NO: 437700 - RNA, 19 nt, Homo sapiens
  misc_RNA (1)...(19): siRNA sense strand
caguacagaucuacgaaga

SEQ ID NO: 437701 - RNA, 19 nt, Homo sapiens
  misc_RNA (1)...(19): siRNA sense strand
gcaguuugcuggccuagac

SEQ ID NO: 437702 - RNA, 19 nt, Homo sapiens
  misc_RNA (1)...(19): siRNA sense strand
gccagagacuaccgacaaa

SEQ ID NO: 437703 - RNA, 19 nt, Homo sapiens
  misc_RNA (1)...(19): siRNA sense strand
cgagagaguuggcaguaca

SEQ ID NO: 437704 - RNA, 19 nt, Homo sapiens
  misc_RNA (1)...(19): siRNA sense strand
cuccacauauugaaaguuu

SEQ ID NO: 437705 - RNA, 19 nt, Homo sapiens
  misc_RNA (1)...(19): siRNA sense strand
gcucgugauuucuuagaug

SEQ ID NO: 437706 - RNA, 19 nt, Homo sapiens
  misc_RNA (1)...(19): siRNA sense strand
gcuggcucgugauuucuua

SEQ ID NO: 437707 - RNA, 19 nt, Homo sapiens
  misc_RNA (1)...(19): siRNA sense strand
gauggaaagaggaaagauu

SEQ ID NO: 437708 - RNA, 19 nt, Homo sapiens
  misc_RNA (1)...(19): siRNA sense strand
guugagaugggagaaauua

SEQ ID NO: 437709 - RNA, 19 nt, Homo sapiens
  misc_RNA (1)...(19): siRNA sense strand
gagaagcuacuagagguuu

SEQ ID NO: 437710 - RNA, 19 nt, Homo sapiens
  misc_RNA (1)...(19): siRNA sense strand
gguggaagaaucagacaaa

SEQ ID NO: 437711 - RNA, 19 nt, Homo sapiens
  misc_RNA (1)...(19): siRNA sense strand
gaaagaggaaagauuggau

SEQ ID NO: 437712 - RNA, 19 nt, Homo sapiens
  misc_RNA (1)...(19): siRNA sense strand
gcugaucggauguuggaua

SEQ ID NO: 437713 - RNA, 19 nt, Homo sapiens
  misc_RNA (1)...(19): siRNA sense strand
agaagugccgucuugguua

SEQ ID NO: 437714 - RNA, 19 nt, Homo sapiens
  misc_RNA (1)...(19): siRNA sense strand
caaccucauucuuuaacga

SEQ ID NO: 437715 - RNA, 19 nt, Homo sapiens
  misc_RNA (1)...(19): siRNA sense strand
gaaacagucgcugguguga

SEQ ID NO: 437716 - RNA, 19 nt, Homo sapiens
  misc_RNA (1)...(19): siRNA sense strand
cagauuuaguggaggguuu

SEQ ID NO: 437717 - RNA, 19 nt, Homo sapiens
  misc_RNA (1)...(19): siRNA sense strand
ugaagaauauguacaucgu

SEQ ID NO: 437718 - RNA, 19 nt, Homo sapiens
  misc_RNA (1)...(19): siRNA sense strand
uuuaguggcuacagcagua

SEQ ID NO: 437719 - RNA, 19 nt, Homo sapiens
  misc_RNA (1)...(19): siRNA sense strand
ggacgucuaguggauauga

SEQ ID NO: 437720 - RNA, 19 nt, Homo sapiens
  misc_RNA (1)...(19): siRNA sense strand
gagaugggagaaauuauca

SEQ ID NO: 437721 - RNA, 19 nt, Homo sapiens
  misc_RNA (1)...(19): siRNA sense strand
aagcaugcuauuccuauua

SEQ ID NO: 437722 - RNA, 19 nt, Homo sapiens
  misc_RNA (1)...(19): siRNA sense strand
ugauggauauggaggaaau

SEQ ID NO: 437723 - RNA, 19 nt, Homo sapiens
  misc_RNA (1)...(19): siRNA sense strand
gcaaagggcgcuauauucc

SEQ ID NO: 437724 - RNA, 19 nt, Homo sapiens
  misc_RNA (1)...(19): siRNA sense strand
agaauagucgaacaagaua

SEQ ID NO: 437725 - RNA, 19 nt, Homo sapiens
  misc_RNA (1)...(19): siRNA sense strand
uagaauagucgaacaagau

SEQ ID NO: 437726 - RNA, 19 nt, Homo sapiens
  misc_RNA (1)...(19): siRNA sense strand
ggaaagaggaaagauugga

SEQ ID NO: 437727 - RNA, 19 nt, Homo sapiens
  misc_RNA (1)...(19): siRNA sense strand
guacgggacguguaggaaa

SEQ ID NO: 437728 - RNA, 19 nt, Homo sapiens
  misc_RNA (1)...(19): siRNA sense strand
ggaaguacagccagcaaag

SEQ ID NO: 437729 - RNA, 19 nt, Homo sapiens
  misc_RNA (1)...(19): siRNA sense strand
aagaguagcagauuuagug

SEQ ID NO: 437730 - RNA, 19 nt, Homo sapiens
  misc_RNA (1)...(19): siRNA sense strand
cguggacguucuaagagua

SEQ ID NO: 437731 - RNA, 19 nt, Homo sapiens
  misc_RNA (1)...(19): siRNA sense strand
uguuggaucuucuuguuga

SEQ ID NO: 437732 - RNA, 19 nt, Homo sapiens
  misc_RNA (1)...(19): siRNA sense strand
cgagaggaacauaaauauu

SEQ ID NO: 437733 - RNA, 19 nt, Homo sapiens
  misc_RNA (1)...(19): siRNA sense strand
aagaggcccuucaccaguu

SEQ ID NO: 437734 - RNA, 19 nt, Homo sapiens
  misc_RNA (1)...(19): siRNA sense strand
gauaugauggaaagaggaa

SEQ ID NO: 437735 - RNA, 19 nt, Homo sapiens
  misc_RNA (1)...(19): siRNA sense strand
ucauaccgaucuagaguuc

SEQ ID NO: 437736 - RNA, 19 nt, Homo sapiens
  misc_RNA (1)...(19): siRNA sense strand
gcauuucuguugcccaucu

SEQ ID NO: 437737 - RNA, 19 nt, Homo sapiens
  misc_RNA (1)...(19): siRNA sense strand
acaaaucagaugaagauga

SEQ ID NO: 437738 - RNA, 19 nt, Homo sapiens
  misc_RNA (1)...(19): siRNA sense strand
cuaaggauuuguuggaucu

SEQ ID NO: 437739 - RNA, 19 nt, Homo sapiens
  misc_RNA (1)...(19): siRNA sense strand
guacaucguauuggucgua

SEQ ID NO: 437740 - RNA, 19 nt, Homo sapiens
  misc_RNA (1)...(19): siRNA sense strand
aagauacuaugccuccaaa

SEQ ID NO: 437741 - RNA, 19 nt, Homo sapiens
  misc_RNA (1)...(19): siRNA sense strand
ggaaagauuggauuagacu

SEQ ID NO: 437742 - RNA, 19 nt, Homo sapiens
  misc_RNA (1)...(19): siRNA sense strand
caggacgucuaguggauau

SEQ ID NO: 437743 - RNA, 19 nt, Homo sapiens
  misc_RNA (1)...(19): siRNA sense strand
uggaugccauuuguuagua

SEQ ID NO: 437744 - RNA, 19 nt, Homo sapiens
  misc_RNA (1)...(19): siRNA sense strand
gaugggagaaauuaucaug

SEQ ID NO: 437745 - RNA, 19 nt, Homo sapiens
  misc_RNA (1)...(19): siRNA sense strand
acgaugacauuccaguuga

SEQ ID NO: 437746 - RNA, 19 nt, Homo sapiens
  misc_RNA (1)...(19): siRNA sense strand
ggauuagacuuuugcaaau

SEQ ID NO: 437747 - RNA, 19 nt, Homo sapiens
  misc_RNA (1)...(19): siRNA sense strand
aagaggaaagauuggauua

SEQ ID NO: 437748 - RNA, 19 nt, Homo sapiens
  misc_RNA (1)...(19): siRNA sense strand
aaagcaugcuauuccuauu

SEQ ID NO: 437749 - RNA, 19 nt, Homo sapiens
  misc_RNA (1)...(19): siRNA sense strand
caagagggaagucuagcuu

SEQ ID NO: 437750 - RNA, 19 nt, Homo sapiens
  misc_RNA (1)...(19): siRNA sense strand
ucagagggauagagaagag

SEQ ID NO: 437751 - RNA, 19 nt, Homo sapiens
  misc_RNA (1)...(19): siRNA sense strand
uugcaaauacuugguguua

SEQ ID NO: 437752 - RNA, 19 nt, Homo sapiens
  misc_RNA (1)...(19): siRNA sense strand
cgauauuggucagcagauu

SEQ ID NO: 437753 - RNA, 19 nt, Homo sapiens
  misc_RNA (1)...(19): siRNA sense strand
acacugggauuaauuuuga

SEQ ID NO: 437754 - RNA, 19 nt, Homo sapiens
  misc_RNA (1)...(19): siRNA sense strand
aauacuugguguuagauga

SEQ ID NO: 437755 - RNA, 19 nt, Homo sapiens
  misc_RNA (1)...(19): siRNA sense strand
gaaaacaucacacagaaag

SEQ ID NO: 437756 - RNA, 19 nt, Homo sapiens
  misc_RNA (1)...(19): siRNA sense strand
aacgagaggaacauaaaua

SEQ ID NO: 437757 - RNA, 19 nt, Homo sapiens
  misc_RNA (1)...(19): siRNA sense strand
ucacaagccucucugaaua

SEQ ID NO: 437758 - RNA, 19 nt, Homo sapiens
  misc_RNA (1)...(19): siRNA sense strand
gaucuuaacucaucuaaag

SEQ ID NO: 437759 - RNA, 19 nt, Homo sapiens
  misc_RNA (1)...(19): siRNA sense strand
gcaaagagguuggaguuga

SEQ ID NO: 437760 - RNA, 19 nt, Homo sapiens
  misc_RNA (1)...(19): siRNA sense strand
guacaaagccuacuccaaa

SEQ ID NO: 437761 - RNA, 19 nt, Homo sapiens
  misc_RNA (1)...(19): siRNA sense strand
gggauuaucuauucagaaa

SEQ ID NO: 437762 - RNA, 19 nt, Homo sapiens
  misc_RNA (1)...(19): siRNA sense strand
uaacagugauucugaggua

SEQ ID NO: 437763 - RNA, 19 nt, Homo sapiens
  misc_RNA (1)...(19): siRNA sense strand
caaagaauauggccaagga

SEQ ID NO: 437764 - RNA, 19 nt, Homo sapiens
  misc_RNA (1)...(19): siRNA sense strand
ggagguuucuguuacuaua

SEQ ID NO: 437765 - RNA, 19 nt, Homo sapiens
  misc_RNA (1)...(19): siRNA sense strand
gagagaaacuccaagaaca

SEQ ID NO: 437766 - RNA, 19 nt, Homo sapiens
  misc_RNA (1)...(19): siRNA sense strand
cgacacagcccgcaaguuu

SEQ ID NO: 437767 - RNA, 19 nt, Homo sapiens
  misc_RNA (1)...(19): siRNA sense strand
gacugcagcuugaagauaa

SEQ ID NO: 437768 - RNA, 19 nt, Homo sapiens
  misc_RNA (1)...(19): siRNA sense strand
gcagaucuucacuguauua

SEQ ID NO: 437769 - RNA, 19 nt, Homo sapiens
  misc_RNA (1)...(19): siRNA sense strand
gcagaugacuguguagguu

SEQ ID NO: 437770 - RNA, 19 nt, Homo sapiens
  misc_RNA (1)...(19): siRNA sense strand
ccaauccaauguuguaauu

SEQ ID NO: 437771 - RNA, 19 nt, Homo sapiens
  misc_RNA (1)...(19): siRNA sense strand
caaagagguuggaguugaa

SEQ ID NO: 437772 - RNA, 19 nt, Homo sapiens
  misc_RNA (1)...(19): siRNA sense strand
caaaguauguacaagacaa

SEQ ID NO: 437773 - RNA, 19 nt, Homo sapiens
  misc_RNA (1)...(19): siRNA sense strand
gcucgaacaucuuccuaaa

SEQ ID NO: 437774 - RNA, 19 nt, Homo sapiens
  misc_RNA (1)...(19): siRNA sense strand
ggagaacggccauauuuau

SEQ ID NO: 437775 - RNA, 19 nt, Homo sapiens
  misc_RNA (1)...(19): siRNA sense strand
gaacaacacccagauggaa

SEQ ID NO: 437776 - RNA, 19 nt, Homo sapiens
  misc_RNA (1)...(19): siRNA sense strand
gaacaucuuccuaaacuuc

SEQ ID NO: 437777 - RNA, 19 nt, Homo sapiens
  misc_RNA (1)...(19): siRNA sense strand
gcaaguuuguuaaggaaau

SEQ ID NO: 437778 - RNA, 19 nt, Homo sapiens
  misc_RNA (1)...(19): siRNA sense strand
cugcagaucuucacuguau

SEQ ID NO: 437779 - RNA, 19 nt, Homo sapiens
  misc_RNA (1)...(19): siRNA sense strand
gcauauaccugcgggaugu

SEQ ID NO: 437780 - RNA, 19 nt, Homo sapiens
  misc_RNA (1)...(19): siRNA sense strand
caaaggccaucgcagaaga

SEQ ID NO: 437781 - RNA, 19 nt, Homo sapiens
  misc_RNA (1)...(19): siRNA sense strand
gaacagcaaccaauccaau

SEQ ID NO: 437782 - RNA, 19 nt, Homo sapiens
  misc_RNA (1)...(19): siRNA sense strand
guuuagaacuugugguuga

SEQ ID NO: 437783 - RNA, 19 nt, Homo sapiens
  misc_RNA (1)...(19): siRNA sense strand
uaacucaucuaaagguuuc

SEQ ID NO: 437784 - RNA, 19 nt, Homo sapiens
  misc_RNA (1)...(19): siRNA sense strand
ccacucugcugguagaauu

SEQ ID NO: 437785 - RNA, 19 nt, Homo sapiens
  misc_RNA (1)...(19): siRNA sense strand
caggagaacggccauauuu

SEQ ID NO: 437786 - RNA, 19 nt, Homo sapiens
  misc_RNA (1)...(19): siRNA sense strand
gaauauggccaaggaugua

SEQ ID NO: 437787 - RNA, 19 nt, Homo sapiens
  misc_RNA (1)...(19): siRNA sense strand
gaaauccgagcaauuccua

SEQ ID NO: 437788 - RNA, 19 nt, Homo sapiens
  misc_RNA (1)...(19): siRNA sense strand
ggaaauacagaaccaaaca

SEQ ID NO: 437789 - RNA, 19 nt, Homo sapiens
  misc_RNA (1)...(19): siRNA sense strand
caacaaauucuuuccacuu

SEQ ID NO: 437790 - RNA, 19 nt, Homo sapiens
  misc_RNA (1)...(19): siRNA sense strand
cccagaauauuuacaggua

SEQ ID NO: 437791 - RNA, 19 nt, Homo sapiens
  misc_RNA (1)...(19): siRNA sense strand
caugggaucuuaacucauc

SEQ ID NO: 437792 - RNA, 19 nt, Homo sapiens
  misc_RNA (1)...(19): siRNA sense strand
aaacacugccgguugauuu

SEQ ID NO: 437793 - RNA, 19 nt, Homo sapiens
  misc_RNA (1)...(19): siRNA sense strand
gaaagccaaguaucuguga

SEQ ID NO: 437794 - RNA, 19 nt, Homo sapiens
  misc_RNA (1)...(19): siRNA sense strand
gaggagguuucuguuacua

SEQ ID NO: 437795 - RNA, 19 nt, Homo sapiens
  misc_RNA (1)...(19): siRNA sense strand
ugaaaacccuggccacuuu

SEQ ID NO: 437796 - RNA, 19 nt, Homo sapiens
  misc_RNA (1)...(19): siRNA sense strand
ugugcaagcucaaguuuau

SEQ ID NO: 437797 - RNA, 19 nt, Homo sapiens
  misc_RNA (1)...(19): siRNA sense strand
ggaagauaauugauaaacg

SEQ ID NO: 437798 - RNA, 19 nt, Homo sapiens
  misc_RNA (1)...(19): siRNA sense strand
ggccaaggauguacaugau

SEQ ID NO: 437799 - RNA, 19 nt, Homo sapiens
  misc_RNA (1)...(19): siRNA sense strand
gauguucucuccaguucau

SEQ ID NO: 437800 - RNA, 19 nt, Homo sapiens
  misc_RNA (1)...(19): siRNA sense strand
gggauguucucuccaguuc

SEQ ID NO: 437801 - RNA, 19 nt, Homo sapiens
  misc_RNA (1)...(19): siRNA sense strand
agaugacuguguagguuua

SEQ ID NO: 437802 - RNA, 19 nt, Homo sapiens
  misc_RNA (1)...(19): siRNA sense strand
ggaggaaagccaaguaucu

SEQ ID NO: 437803 - RNA, 19 nt, Homo sapiens
  misc_RNA (1)...(19): siRNA sense strand
uaaacgacuucaagagcuu

SEQ ID NO: 437804 - RNA, 19 nt, Homo sapiens
  misc_RNA (1)...(19): siRNA sense strand
ggcauaaggauagggauua

SEQ ID NO: 437805 - RNA, 19 nt, Homo sapiens
  misc_RNA (1)...(19): siRNA sense strand
agucagagcugcuacacau

SEQ ID NO: 437806 - RNA, 19 nt, Homo sapiens
  misc_RNA (1)...(19): siRNA sense strand
gaacaacaaauucuuucca

SEQ ID NO: 437807 - RNA, 19 nt, Homo sapiens
  misc_RNA (1)...(19): siRNA sense strand
ggccaucgcagaagaaaug

SEQ ID NO: 437808 - RNA, 19 nt, Homo sapiens
  misc_RNA (1)...(19): siRNA sense strand
gcagugaacagcaaccaau

SEQ ID NO: 437809 - RNA, 19 nt, Homo sapiens
  misc_RNA (1)...(19): siRNA sense strand
gaucugcccuaacagugau

SEQ ID NO: 437810 - RNA, 19 nt, Homo sapiens
  misc_RNA (1)...(19): siRNA sense strand
caggaaagcuccauuuugu

SEQ ID NO: 437811 - RNA, 19 nt, Homo sapiens
  misc_RNA (1)...(19): siRNA sense strand
aagucgagcuucugagauu

SEQ ID NO: 437812 - RNA, 19 nt, Homo sapiens
  misc_RNA (1)...(19): siRNA sense strand
agagagcacugcguccuuu

SEQ ID NO: 437813 - RNA, 19 nt, Homo sapiens
  misc_RNA (1)...(19): siRNA sense strand
cuucugagauucgaugauu

SEQ ID NO: 437814 - RNA, 19 nt, Homo sapiens
  misc_RNA (1)...(19): siRNA sense strand
gaaaggauucugagguuuu

SEQ ID NO: 437815 - RNA, 19 nt, Homo sapiens
  misc_RNA (1)...(19): siRNA sense strand
cagcaaaguauguacaaga

SEQ ID NO: 437816 - RNA, 19 nt, Homo sapiens
  misc_RNA (1)...(19): siRNA sense strand
ucgaacaucuuccuaaacu

SEQ ID NO: 437817 - RNA, 19 nt, Homo sapiens
  misc_RNA (1)...(19): siRNA sense strand
caacuuacuacgaaugaug

SEQ ID NO: 437818 - RNA, 19 nt, Homo sapiens
  misc_RNA (1)...(19): siRNA sense strand
ggacaagaggagauaagug

SEQ ID NO: 437819 - RNA, 19 nt, Homo sapiens
  misc_RNA (1)...(19): siRNA sense strand
guguggagaugcaaagaau

SEQ ID NO: 437820 - RNA, 19 nt, Homo sapiens
  misc_RNA (1)...(19): siRNA sense strand
ggagcaaugugguuguuuu

SEQ ID NO: 437821 - RNA, 19 nt, Homo sapiens
  misc_RNA (1)...(19): siRNA sense strand
gugaauccgauaaguauga

SEQ ID NO: 437822 - RNA, 19 nt, Homo sapiens
  misc_RNA (1)...(19): siRNA sense strand
ccgcaaguuuguuaaggaa

SEQ ID NO: 437823 - RNA, 19 nt, Homo sapiens
  misc_RNA (1)...(19): siRNA sense strand
gcaaauaauaagcaaagag

SEQ ID NO: 437824 - RNA, 19 nt, Homo sapiens
  misc_RNA (1)...(19): siRNA sense strand
gacaacauccagcuucaug

SEQ ID NO: 437825 - RNA, 19 nt, Homo sapiens
  misc_RNA (1)...(19): siRNA sense strand
ccuacaacauagagagaaa

SEQ ID NO: 437826 - RNA, 19 nt, Homo sapiens
  misc_RNA (1)...(19): siRNA sense strand
uccaaagacugcagcuuga

SEQ ID NO: 437827 - RNA, 19 nt, Homo sapiens
  misc_RNA (1)...(19): siRNA sense strand
acaagccucucugaauauu

SEQ ID NO: 437828 - RNA, 19 nt, Homo sapiens
  misc_RNA (1)...(19): siRNA sense strand
cagagcugcuacacauuga

SEQ ID NO: 437829 - RNA, 19 nt, Homo sapiens
  misc_RNA (1)...(19): siRNA sense strand
acaugcagaugacugugua

SEQ ID NO: 437830 - RNA, 19 nt, Homo sapiens
  misc_RNA (1)...(19): siRNA sense strand
cuucaacauuguggaauuu

SEQ ID NO: 437831 - RNA, 19 nt, Homo sapiens
  misc_RNA (1)...(19): siRNA sense strand
gcccuugugcaaauaauaa

SEQ ID NO: 437832 - RNA, 19 nt, Homo sapiens
  misc_RNA (1)...(19): siRNA sense strand
cagaauauuuacagguaca

SEQ ID NO: 437833 - RNA, 19 nt, Homo sapiens
  misc_RNA (1)...(19): siRNA sense strand
cuacgaaugaugccauaaa

SEQ ID NO: 437834 - RNA, 19 nt, Homo sapiens
  misc_RNA (1)...(19): siRNA sense strand
gaaaauaaaggcagacaca

SEQ ID NO: 437835 - RNA, 19 nt, Homo sapiens
  misc_RNA (1)...(19): siRNA sense strand
cgauaaguaugaccuaaaa

SEQ ID NO: 437836 - RNA, 19 nt, Homo sapiens
  misc_RNA (1)...(19): siRNA sense strand
guggagaugcaaagaauau

SEQ ID NO: 437837 - RNA, 19 nt, Homo sapiens
  misc_RNA (1)...(19): siRNA sense strand
uuagugaauccgauaagua

SEQ ID NO: 437838 - RNA, 19 nt, Homo sapiens
  misc_RNA (1)...(19): siRNA sense strand
cuucaguucuucagccaaa

SEQ ID NO: 437839 - RNA, 19 nt, Homo sapiens
  misc_RNA (1)...(19): siRNA sense strand
ucagagcugcuacacauug

SEQ ID NO: 437840 - RNA, 19 nt, Homo sapiens
  misc_RNA (1)...(19): siRNA sense strand
ggcaaaggccaucgcagaa

SEQ ID NO: 437841 - RNA, 19 nt, Homo sapiens
  misc_RNA (1)...(19): siRNA sense strand
cucaagagaugcuccuguu

SEQ ID NO: 437842 - RNA, 19 nt, Homo sapiens
  misc_RNA (1)...(19): siRNA sense strand
guugguugcuucaguucuu

SEQ ID NO: 437843 - RNA, 19 nt, Homo sapiens
  misc_RNA (1)...(19): siRNA sense strand
cagcuccucuuguuguugu

SEQ ID NO: 437844 - RNA, 19 nt, Homo sapiens
  misc_RNA (1)...(19): siRNA sense strand
ucugaauauuccugguuua

SEQ ID NO: 437845 - RNA, 19 nt, Homo sapiens
  misc_RNA (1)...(19): siRNA sense strand
aagcaaagagguuggaguu

SEQ ID NO: 437846 - RNA, 19 nt, Homo sapiens
  misc_RNA (1)...(19): siRNA sense strand
ugagcaagcugugguacau

SEQ ID NO: 437847 - RNA, 19 nt, Homo sapiens
  misc_RNA (1)...(19): siRNA sense strand
uagugaauccgauaaguau

SEQ ID NO: 437848 - RNA, 19 nt, Homo sapiens
  misc_RNA (1)...(19): siRNA sense strand
aaacgcuaccuucaggaua

SEQ ID NO: 437849 - RNA, 19 nt, Homo sapiens
  misc_RNA (1)...(19): siRNA sense strand
caagaacaacacccagaug

SEQ ID NO: 437850 - RNA, 19 nt, Homo sapiens
  misc_RNA (1)...(19): siRNA sense strand
acacuggacaugcagauga

SEQ ID NO: 437851 - RNA, 19 nt, Homo sapiens
  misc_RNA (1)...(19): siRNA sense strand
aggagaacggccauauuua

SEQ ID NO: 437852 - RNA, 19 nt, Homo sapiens
  misc_RNA (1)...(19): siRNA sense strand
gcccuaacagugauucuga

SEQ ID NO: 437853 - RNA, 19 nt, Homo sapiens
  misc_RNA (1)...(19): siRNA sense strand
gaggaaagccaaguaucug

SEQ ID NO: 437854 - RNA, 19 nt, Homo sapiens
  misc_RNA (1)...(19): siRNA sense strand
cuguguagguuuagaacuu

SEQ ID NO: 437855 - RNA, 19 nt, Homo sapiens
  misc_RNA (1)...(19): siRNA sense strand
ggagaugcaaagaauaugg

SEQ ID NO: 437856 - RNA, 19 nt, Homo sapiens
  misc_RNA (1)...(19): siRNA sense strand
ccaggaggaaagccaagua

SEQ ID NO: 437857 - RNA, 19 nt, Homo sapiens
  misc_RNA (1)...(19): siRNA sense strand
ucacaagccucucugaaua

SEQ ID NO: 437858 - RNA, 19 nt, Homo sapiens
  misc_RNA (1)...(19): siRNA sense strand
gaucuuaacucaucuaaag

SEQ ID NO: 437859 - RNA, 19 nt, Homo sapiens
  misc_RNA (1)...(19): siRNA sense strand
gcaaagagguuggaguuga

SEQ ID NO: 437860 - RNA, 19 nt, Homo sapiens
  misc_RNA (1)...(19): siRNA sense strand
guacaaagccuacuccaaa

SEQ ID NO: 437861 - RNA, 19 nt, Homo sapiens
  misc_RNA (1)...(19): siRNA sense strand
gggauuaucuauucagaaa

SEQ ID NO: 437862 - RNA, 19 nt, Homo sapiens
  misc_RNA (1)...(19): siRNA sense strand
uaacagugauucugaggua

SEQ ID NO: 437863 - RNA, 19 nt, Homo sapiens
  misc_RNA (1)...(19): siRNA sense strand
ggagguuucuguuacuaua

SEQ ID NO: 437864 - RNA, 19 nt, Homo sapiens
  misc_RNA (1)...(19): siRNA sense strand
caaagaauauggccaagga

SEQ ID NO: 437865 - RNA, 19 nt, Homo sapiens
  misc_RNA (1)...(19): siRNA sense strand
gagagaaacuccaagaaca

SEQ ID NO: 437866 - RNA, 19 nt, Homo sapiens
  misc_RNA (1)...(19): siRNA sense strand
cgacacagcccgcaaguuu

SEQ ID NO: 437867 - RNA, 19 nt, Homo sapiens
  misc_RNA (1)...(19): siRNA sense strand
gacugcagcuugaagauaa

SEQ ID NO: 437868 - RNA, 19 nt, Homo sapiens
  misc_RNA (1)...(19): siRNA sense strand
gcagaucuucacuguauua

SEQ ID NO: 437869 - RNA, 19 nt, Homo sapiens
  misc_RNA (1)...(19): siRNA sense strand
gcagaugacuguguagguu

SEQ ID NO: 437870 - RNA, 19 nt, Homo sapiens
  misc_RNA (1)...(19): siRNA sense strand
ccaauccaauguuguaauu

SEQ ID NO: 437871 - RNA, 19 nt, Homo sapiens
  misc_RNA (1)...(19): siRNA sense strand
caaagagguuggaguugaa

SEQ ID NO: 437872 - RNA, 19 nt, Homo sapiens
  misc_RNA (1)...(19): siRNA sense strand
caaaguauguacaagacaa

SEQ ID NO: 437873 - RNA, 19 nt, Homo sapiens
  misc_RNA (1)...(19): siRNA sense strand
gcucgaacaucuuccuaaa

SEQ ID NO: 437874 - RNA, 19 nt, Homo sapiens
  misc_RNA (1)...(19): siRNA sense strand
ggagaacggccauauuuau

SEQ ID NO: 437875 - RNA, 19 nt, Homo sapiens
  misc_RNA (1)...(19): siRNA sense strand
gaacaacacccagauggaa

SEQ ID NO: 437876 - RNA, 19 nt, Homo sapiens
  misc_RNA (1)...(19): siRNA sense strand
gaacaucuuccuaaacuuc

SEQ ID NO: 437877 - RNA, 19 nt, Homo sapiens
  misc_RNA (1)...(19): siRNA sense strand
gcaaguuuguuaaggaaau

SEQ ID NO: 437878 - RNA, 19 nt, Homo sapiens
  misc_RNA (1)...(19): siRNA sense strand
caaaggccaucgcagaaga

SEQ ID NO: 437879 - RNA, 19 nt, Homo sapiens
  misc_RNA (1)...(19): siRNA sense strand
gcauauaccugcgggaugu

SEQ ID NO: 437880 - RNA, 19 nt, Homo sapiens
  misc_RNA (1)...(19): siRNA sense strand
cugcagaucuucacuguau

SEQ ID NO: 437881 - RNA, 19 nt, Homo sapiens
  misc_RNA (1)...(19): siRNA sense strand
gaacagcaaccaauccaau

SEQ ID NO: 437882 - RNA, 19 nt, Homo sapiens
  misc_RNA (1)...(19): siRNA sense strand
gaugaggagguuucuguua

SEQ ID NO: 437883 - RNA, 19 nt, Homo sapiens
  misc_RNA (1)...(19): siRNA sense strand
guuuagaacuugugguuga

SEQ ID NO: 437884 - RNA, 19 nt, Homo sapiens
  misc_RNA (1)...(19): siRNA sense strand
uaacucaucuaaagguuuc

SEQ ID NO: 437885 - RNA, 19 nt, Homo sapiens
  misc_RNA (1)...(19): siRNA sense strand
ccacucugcugguagaauu

SEQ ID NO: 437886 - RNA, 19 nt, Homo sapiens
  misc_RNA (1)...(19): siRNA sense strand
caggagaacggccauauuu

SEQ ID NO: 437887 - RNA, 19 nt, Homo sapiens
  misc_RNA (1)...(19): siRNA sense strand
gaauauggccaaggaugua

SEQ ID NO: 437888 - RNA, 19 nt, Homo sapiens
  misc_RNA (1)...(19): siRNA sense strand
gaaauccgagcaauuccua

SEQ ID NO: 437889 - RNA, 19 nt, Homo sapiens
  misc_RNA (1)...(19): siRNA sense strand
ggaaauacagaaccaaaca

SEQ ID NO: 437890 - RNA, 19 nt, Homo sapiens
  misc_RNA (1)...(19): siRNA sense strand
caacaaauucuuuccacuu

SEQ ID NO: 437891 - RNA, 19 nt, Homo sapiens
  misc_RNA (1)...(19): siRNA sense strand
cccagaauauuuacaggua

SEQ ID NO: 437892 - RNA, 19 nt, Homo sapiens
  misc_RNA (1)...(19): siRNA sense strand
caugggaucuuaacucauc

SEQ ID NO: 437893 - RNA, 19 nt, Homo sapiens
  misc_RNA (1)...(19): siRNA sense strand
aaacacugccgguugauuu

SEQ ID NO: 437894 - RNA, 19 nt, Homo sapiens
  misc_RNA (1)...(19): siRNA sense strand
gaaagccaaguaucuguga

SEQ ID NO: 437895 - RNA, 19 nt, Homo sapiens
  misc_RNA (1)...(19): siRNA sense strand
gaggagguuucuguuacua

SEQ ID NO: 437896 - RNA, 19 nt, Homo sapiens
  misc_RNA (1)...(19): siRNA sense strand
ugaaaacccuggccacuuu

SEQ ID NO: 437897 - RNA, 19 nt, Homo sapiens
  misc_RNA (1)...(19): siRNA sense strand
ugugcaagcucaaguuuau

SEQ ID NO: 437898 - RNA, 19 nt, Homo sapiens
  misc_RNA (1)...(19): siRNA sense strand
ggaagauaauugauaaacg

SEQ ID NO: 437899 - RNA, 19 nt, Homo sapiens
  misc_RNA (1)...(19): siRNA sense strand
ggccaaggauguacaugau

SEQ ID NO: 437900 - RNA, 19 nt, Homo sapiens
  misc_RNA (1)...(19): siRNA sense strand
gauguucucuccaguucau

SEQ ID NO: 437901 - RNA, 19 nt, Homo sapiens
  misc_RNA (1)...(19): siRNA sense strand
gggauguucucuccaguuc

SEQ ID NO: 437902 - RNA, 19 nt, Homo sapiens
  misc_RNA (1)...(19): siRNA sense strand
agaugacuguguagguuua

SEQ ID NO: 437903 - RNA, 19 nt, Homo sapiens
  misc_RNA (1)...(19): siRNA sense strand
ggaggaaagccaaguaucu

SEQ ID NO: 437904 - RNA, 19 nt, Homo sapiens
  misc_RNA (1)...(19): siRNA sense strand
uaaacgacuucaagagcuu

SEQ ID NO: 437905 - RNA, 19 nt, Homo sapiens
  misc_RNA (1)...(19): siRNA sense strand
ggcauaaggauagggauua

SEQ ID NO: 437906 - RNA, 19 nt, Homo sapiens
  misc_RNA (1)...(19): siRNA sense strand
agucagagcugcuacacau

SEQ ID NO: 437907 - RNA, 19 nt, Homo sapiens
  misc_RNA (1)...(19): siRNA sense strand
ggccaucgcagaagaaaug

SEQ ID NO: 437908 - RNA, 19 nt, Homo sapiens
  misc_RNA (1)...(19): siRNA sense strand
gaagugaugaggagguuuc

SEQ ID NO: 437909 - RNA, 19 nt, Homo sapiens
  misc_RNA (1)...(19): siRNA sense strand
uuacaugccuugaagugau

SEQ ID NO: 437910 - RNA, 19 nt, Homo sapiens
  misc_RNA (1)...(19): siRNA sense strand
gaacaacaaauucuuucca

SEQ ID NO: 437911 - RNA, 19 nt, Homo sapiens
  misc_RNA (1)...(19): siRNA sense strand
gcagugaacagcaaccaau

SEQ ID NO: 437912 - RNA, 19 nt, Homo sapiens
  misc_RNA (1)...(19): siRNA sense strand
gaucugcccuaacagugau

SEQ ID NO: 437913 - RNA, 19 nt, Homo sapiens
  misc_RNA (1)...(19): siRNA sense strand
caggaaagcuccauuuugu

SEQ ID NO: 437914 - RNA, 19 nt, Homo sapiens
  misc_RNA (1)...(19): siRNA sense strand
aagucgagcuucugagauu

SEQ ID NO: 437915 - RNA, 19 nt, Homo sapiens
  misc_RNA (1)...(19): siRNA sense strand
agagagcacugcguccuuu

SEQ ID NO: 437916 - RNA, 19 nt, Homo sapiens
  misc_RNA (1)...(19): siRNA sense strand
cuucugagauucgaugauu

SEQ ID NO: 437917 - RNA, 19 nt, Homo sapiens
  misc_RNA (1)...(19): siRNA sense strand
gaaaggauucugagguuuu

SEQ ID NO: 437918 - RNA, 19 nt, Homo sapiens
  misc_RNA (1)...(19): siRNA sense strand
cagcaaaguauguacaaga

SEQ ID NO: 437919 - RNA, 19 nt, Homo sapiens
  misc_RNA (1)...(19): siRNA sense strand
ucgaacaucuuccuaaacu

SEQ ID NO: 437920 - RNA, 19 nt, Homo sapiens
  misc_RNA (1)...(19): siRNA sense strand
caacuuacuacgaaugaug

SEQ ID NO: 437921 - RNA, 19 nt, Homo sapiens
  misc_RNA (1)...(19): siRNA sense strand
gugaauccgauaaguauga

SEQ ID NO: 437922 - RNA, 19 nt, Homo sapiens
  misc_RNA (1)...(19): siRNA sense strand
guguggagaugcaaagaau

SEQ ID NO: 437923 - RNA, 19 nt, Homo sapiens
  misc_RNA (1)...(19): siRNA sense strand
ggagcaaugugguuguuuu

SEQ ID NO: 437924 - RNA, 19 nt, Homo sapiens
  misc_RNA (1)...(19): siRNA sense strand
ggacaagaggagauaagug

SEQ ID NO: 437925 - RNA, 19 nt, Homo sapiens
  misc_RNA (1)...(19): siRNA sense strand
ccgcaaguuuguuaaggaa

SEQ ID NO: 437926 - RNA, 19 nt, Homo sapiens
  misc_RNA (1)...(19): siRNA sense strand
gcaaauaauaagcaaagag

SEQ ID NO: 437927 - RNA, 19 nt, Homo sapiens
  misc_RNA (1)...(19): siRNA sense strand
gacaacauccagcuucaug

SEQ ID NO: 437928 - RNA, 19 nt, Homo sapiens
  misc_RNA (1)...(19): siRNA sense strand
ccuacaacauagagagaaa

SEQ ID NO: 437929 - RNA, 19 nt, Homo sapiens
  misc_RNA (1)...(19): siRNA sense strand
uccaaagacugcagcuuga

SEQ ID NO: 437930 - RNA, 19 nt, Homo sapiens
  misc_RNA (1)...(19): siRNA sense strand
acaagccucucugaauauu

SEQ ID NO: 437931 - RNA, 19 nt, Homo sapiens
  misc_RNA (1)...(19): siRNA sense strand
cagagcugcuacacauuga

SEQ ID NO: 437932 - RNA, 19 nt, Homo sapiens
  misc_RNA (1)...(19): siRNA sense strand
acaugcagaugacugugua

SEQ ID NO: 437933 - RNA, 19 nt, Homo sapiens
  misc_RNA (1)...(19): siRNA sense strand
cuucaacauuguggaauuu

SEQ ID NO: 437934 - RNA, 19 nt, Homo sapiens
  misc_RNA (1)...(19): siRNA sense strand
gcccuugugcaaauaauaa

SEQ ID NO: 437935 - RNA, 19 nt, Homo sapiens
  misc_RNA (1)...(19): siRNA sense strand
cagaauauuuacagguaca

SEQ ID NO: 437936 - RNA, 19 nt, Homo sapiens
  misc_RNA (1)...(19): siRNA sense strand
cuacgaaugaugccauaaa

SEQ ID NO: 437937 - RNA, 19 nt, Homo sapiens
  misc_RNA (1)...(19): siRNA sense strand
cgauaaguaugaccuaaaa

SEQ ID NO: 437938 - RNA, 19 nt, Homo sapiens
  misc_RNA (1)...(19): siRNA sense strand
guggagaugcaaagaauau

SEQ ID NO: 437939 - RNA, 19 nt, Homo sapiens
  misc_RNA (1)...(19): siRNA sense strand
cuucaguucuucagccaaa

SEQ ID NO: 437940 - RNA, 19 nt, Homo sapiens
  misc_RNA (1)...(19): siRNA sense strand
gaaaauaaaggcagacaca

SEQ ID NO: 437941 - RNA, 19 nt, Homo sapiens
  misc_RNA (1)...(19): siRNA sense strand
uuagugaauccgauaagua

SEQ ID NO: 437942 - RNA, 19 nt, Homo sapiens
  misc_RNA (1)...(19): siRNA sense strand
cagcuccucuuguuguugu

SEQ ID NO: 437943 - RNA, 19 nt, Homo sapiens
  misc_RNA (1)...(19): siRNA sense strand
cucaagagaugcuccuguu

SEQ ID NO: 437944 - RNA, 19 nt, Homo sapiens
  misc_RNA (1)...(19): siRNA sense strand
guugguugcuucaguucuu

SEQ ID NO: 437945 - RNA, 19 nt, Homo sapiens
  misc_RNA (1)...(19): siRNA sense strand
ggcaaaggccaucgcagaa

SEQ ID NO: 437946 - RNA, 19 nt, Homo sapiens
  misc_RNA (1)...(19): siRNA sense strand
ucagagcugcuacacauug

SEQ ID NO: 437947 - RNA, 19 nt, Homo sapiens
  misc_RNA (1)...(19): siRNA sense strand
ucugaauauuccugguuua

SEQ ID NO: 437948 - RNA, 19 nt, Homo sapiens
  misc_RNA (1)...(19): siRNA sense strand
aagcaaagagguuggaguu

SEQ ID NO: 437949 - RNA, 19 nt, Homo sapiens
  misc_RNA (1)...(19): siRNA sense strand
ugagcaagcugugguacau

SEQ ID NO: 437950 - RNA, 19 nt, Homo sapiens
  misc_RNA (1)...(19): siRNA sense strand
caagaacaacacccagaug

SEQ ID NO: 437951 - RNA, 19 nt, Homo sapiens
  misc_RNA (1)...(19): siRNA sense strand
aaacgcuaccuucaggaua

SEQ ID NO: 437952 - RNA, 19 nt, Homo sapiens
  misc_RNA (1)...(19): siRNA sense strand
uagugaauccgauaaguau

SEQ ID NO: 437953 - RNA, 19 nt, Homo sapiens
  misc_RNA (1)...(19): siRNA sense strand
acacuggacaugcagauga

SEQ ID NO: 437954 - RNA, 19 nt, Homo sapiens
  misc_RNA (1)...(19): siRNA sense strand
aggagaacggccauauuua

SEQ ID NO: 437955 - RNA, 19 nt, Homo sapiens
  misc_RNA (1)...(19): siRNA sense strand
gcccuaacagugauucuga

SEQ ID NO: 437956 - RNA, 19 nt, Homo sapiens
  misc_RNA (1)...(19): siRNA sense strand
gaggaaagccaaguaucug

SEQ ID NO: 437957 - RNA, 19 nt, Homo sapiens
  misc_RNA (1)...(19): siRNA sense strand
aaaacaagcucaucaauuc

SEQ ID NO: 437958 - RNA, 19 nt, Homo sapiens
  misc_RNA (1)...(19): siRNA sense strand
gaaaacaagcucaucaauu

SEQ ID NO: 437959 - RNA, 19 nt, Homo sapiens
  misc_RNA (1)...(19): siRNA sense strand
cacuggagcuggagaagga

SEQ ID NO: 437960 - RNA, 19 nt, Homo sapiens
  misc_RNA (1)...(19): siRNA sense strand
ccucguguuucuauucuga

SEQ ID NO: 437961 - RNA, 19 nt, Homo sapiens
  misc_RNA (1)...(19): siRNA sense strand
caccucaccuuguuucuac

SEQ ID NO: 437962 - RNA, 19 nt, Homo sapiens
  misc_RNA (1)...(19): siRNA sense strand
caaagcacuccaugacgaa

SEQ ID NO: 437963 - RNA, 19 nt, Homo sapiens
  misc_RNA (1)...(19): siRNA sense strand
cgucgagucucccggacaa

SEQ ID NO: 437964 - RNA, 19 nt, Homo sapiens
  misc_RNA (1)...(19): siRNA sense strand
guacaccucaccuuguuuc

SEQ ID NO: 437965 - RNA, 19 nt, Homo sapiens
  misc_RNA (1)...(19): siRNA sense strand
gggcaaagcacuccaugac

SEQ ID NO: 437966 - RNA, 19 nt, Homo sapiens
  misc_RNA (1)...(19): siRNA sense strand
gggacuaccugcacuuuuc

SEQ ID NO: 437967 - RNA, 19 nt, Homo sapiens
  misc_RNA (1)...(19): siRNA sense strand
ucaccgagcgccagaucaa

SEQ ID NO: 437968 - RNA, 19 nt, Homo sapiens
  misc_RNA (1)...(19): siRNA sense strand
ucguguuucuauucugaua

SEQ ID NO: 437969 - RNA, 19 nt, Homo sapiens
  misc_RNA (1)...(19): siRNA sense strand
ggaugcagcggaugaacuc

SEQ ID NO: 437970 - RNA, 19 nt, Homo sapiens
  misc_RNA (1)...(19): siRNA sense strand
acguacaccucaccuuguu

SEQ ID NO: 437971 - RNA, 19 nt, Homo sapiens
  misc_RNA (1)...(19): siRNA sense strand
ggaaaacaagcucaucaau

SEQ ID NO: 437972 - RNA, 19 nt, Homo sapiens
  misc_RNA (1)...(19): siRNA sense strand
guguuucuauucugauaag

SEQ ID NO: 437973 - RNA, 19 nt, Homo sapiens
  misc_RNA (1)...(19): siRNA sense strand
gacguacaccucaccuugu

SEQ ID NO: 437974 - RNA, 19 nt, Homo sapiens
  misc_RNA (1)...(19): siRNA sense strand
ggccucguguuucuauucu

SEQ ID NO: 437975 - RNA, 19 nt, Homo sapiens
  misc_RNA (1)...(19): siRNA sense strand
gggaggacucagaggcaaa

SEQ ID NO: 437976 - RNA, 19 nt, Homo sapiens
  misc_RNA (1)...(19): siRNA sense strand
gcaaagagcccgucgucua

SEQ ID NO: 437977 - RNA, 19 nt, Homo sapiens
  misc_RNA (1)...(19): siRNA sense strand
gaaggaauuucacuacaac

SEQ ID NO: 437978 - RNA, 19 nt, Homo sapiens
  misc_RNA (1)...(19): siRNA sense strand
gagaaggaauuucacuaca

SEQ ID NO: 437979 - RNA, 19 nt, Homo sapiens
  misc_RNA (1)...(19): siRNA sense strand
agaaggaauuucacuacaa

SEQ ID NO: 437980 - RNA, 19 nt, Homo sapiens
  misc_RNA (1)...(19): siRNA sense strand
ggagaaggaauuucacuac

SEQ ID NO: 437981 - RNA, 19 nt, Homo sapiens
  misc_RNA (1)...(19): siRNA sense strand
ucuuggagcuggagaagga

SEQ ID NO: 437982 - RNA, 19 nt, Homo sapiens
  misc_RNA (1)...(19): siRNA sense strand
caaagagcccgucgucuac

SEQ ID NO: 437983 - RNA, 19 nt, Homo sapiens
  misc_RNA (1)...(19): siRNA sense strand
aauauucacagagcgauua

SEQ ID NO: 437984 - RNA, 19 nt, Homo sapiens
  misc_RNA (1)...(19): siRNA sense strand
gaauauucacagagcgauu

SEQ ID NO: 437985 - RNA, 19 nt, Homo sapiens
  misc_RNA (1)...(19): siRNA sense strand
gaucaacucaaacuauguc

SEQ ID NO: 437986 - RNA, 19 nt, Homo sapiens
  misc_RNA (1)...(19): siRNA sense strand
gcacgguaaaccccaauua

SEQ ID NO: 437987 - RNA, 19 nt, Homo sapiens
  misc_RNA (1)...(19): siRNA sense strand
ggagcuggagaaggaauuu

SEQ ID NO: 437988 - RNA, 19 nt, Homo sapiens
  misc_RNA (1)...(19): siRNA sense strand
cuacaaccgcuaccugaca

SEQ ID NO: 437989 - RNA, 19 nt, Homo sapiens
  misc_RNA (1)...(19): siRNA sense strand
uggagaaggaauuucacua

SEQ ID NO: 437990 - RNA, 19 nt, Homo sapiens
  misc_RNA (1)...(19): siRNA sense strand
ccacuccgcgugcaaagag

SEQ ID NO: 437991 - RNA, 19 nt, Homo sapiens
  misc_RNA (1)...(19): siRNA sense strand
gaacucugcuuacccauuc

SEQ ID NO: 437992 - RNA, 19 nt, Homo sapiens
  misc_RNA (1)...(19): siRNA sense strand
ggaaacaggcuuacucuga

SEQ ID NO: 437993 - RNA, 19 nt, Homo sapiens
  misc_RNA (1)...(19): siRNA sense strand
caucaaaugucaucaacuu

SEQ ID NO: 437994 - RNA, 19 nt, Homo sapiens
  misc_RNA (1)...(19): siRNA sense strand
gcagaaaucaaaguuauug

SEQ ID NO: 437995 - RNA, 19 nt, Homo sapiens
  misc_RNA (1)...(19): siRNA sense strand
gaucuuguguggcaugaug

SEQ ID NO: 437996 - RNA, 19 nt, Homo sapiens
  misc_RNA (1)...(19): siRNA sense strand
ucauagugcucccaucaaa

SEQ ID NO: 437997 - RNA, 19 nt, Homo sapiens
  misc_RNA (1)...(19): siRNA sense strand
ucaaacaggccaccuuaaa

SEQ ID NO: 437998 - RNA, 19 nt, Homo sapiens
  misc_RNA (1)...(19): siRNA sense strand
gcacucugcuggaauucug

SEQ ID NO: 437999 - RNA, 19 nt, Homo sapiens
  misc_RNA (1)...(19): siRNA sense strand
caaacaggccaccuuaaau

SEQ ID NO: 438000 - RNA, 19 nt, Homo sapiens
  misc_RNA (1)...(19): siRNA sense strand
cacaaccuguucccaauga

SEQ ID NO: 438001 - RNA, 19 nt, Homo sapiens
  misc_RNA (1)...(19): siRNA sense strand
acgcagaaaucaaaguuau

SEQ ID NO: 438002 - RNA, 19 nt, Homo sapiens
  misc_RNA (1)...(19): siRNA sense strand
aaacaggccaccuuaaauc

SEQ ID NO: 438003 - RNA, 19 nt, Homo sapiens
  misc_RNA (1)...(19): siRNA sense strand
ucaaaguuauugggacuau

SEQ ID NO: 438004 - RNA, 19 nt, Homo sapiens
  misc_RNA (1)...(19): siRNA sense strand
ugucugcccugguggguuu

SEQ ID NO: 438005 - RNA, 19 nt, Homo sapiens
  misc_RNA (1)...(19): siRNA sense strand
gauuugcacucugcuggaa

SEQ ID NO: 438006 - RNA, 19 nt, Homo sapiens
  misc_RNA (1)...(19): siRNA sense strand
ugucaaacaggccaccuua

SEQ ID NO: 438007 - RNA, 19 nt, Homo sapiens
  misc_RNA (1)...(19): siRNA sense strand
caaaugucaucaacuucuc

SEQ ID NO: 438008 - RNA, 19 nt, Homo sapiens
  misc_RNA (1)...(19): siRNA sense strand
gcccugguggguuucauua

SEQ ID NO: 438009 - RNA, 19 nt, Homo sapiens
  misc_RNA (1)...(19): siRNA sense strand
aggauagccugaagaaaca

SEQ ID NO: 438010 - RNA, 19 nt, Homo sapiens
  misc_RNA (1)...(19): siRNA sense strand
gcaugaugguauugagcuu

SEQ ID NO: 438011 - RNA, 19 nt, Homo sapiens
  misc_RNA (1)...(19): siRNA sense strand
caucauagugcucccauca

SEQ ID NO: 438012 - RNA, 19 nt, Homo sapiens
  misc_RNA (1)...(19): siRNA sense strand
ggacuauccagaucuugug

SEQ ID NO: 438013 - RNA, 19 nt, Homo sapiens
  misc_RNA (1)...(19): siRNA sense strand
cagccugguuggaagcauu

SEQ ID NO: 438014 - RNA, 19 nt, Homo sapiens
  misc_RNA (1)...(19): siRNA sense strand
cauagcagccugguuggaa

SEQ ID NO: 438015 - RNA, 19 nt, Homo sapiens
  misc_RNA (1)...(19): siRNA sense strand
gugcucccaucaaauguca

SEQ ID NO: 438016 - RNA, 19 nt, Homo sapiens
  misc_RNA (1)...(19): siRNA sense strand
ccugguggguuucauuauc

SEQ ID NO: 438017 - RNA, 19 nt, Homo sapiens
  misc_RNA (1)...(19): siRNA sense strand
ucaaaugucaucaacuucu

SEQ ID NO: 438018 - RNA, 19 nt, Homo sapiens
  misc_RNA (1)...(19): siRNA sense strand
aaacaucuacacgcagaaa

SEQ ID NO: 438019 - RNA, 19 nt, Homo sapiens
  misc_RNA (1)...(19): siRNA sense strand
caaccuguucccaaugaga

SEQ ID NO: 438020 - RNA, 19 nt, Homo sapiens
  misc_RNA (1)...(19): siRNA sense strand
ucucucugaugcugauuug

SEQ ID NO: 438021 - RNA, 19 nt, Homo sapiens
  misc_RNA (1)...(19): siRNA sense strand
cuucuacacuguugaacuc

SEQ ID NO: 438022 - RNA, 19 nt, Homo sapiens
  misc_RNA (1)...(19): siRNA sense strand
guauugagcuuggggauca

SEQ ID NO: 438023 - RNA, 19 nt, Homo sapiens
  misc_RNA (1)...(19): siRNA sense strand
ucuacacgcagaaaucaaa

SEQ ID NO: 438024 - RNA, 19 nt, Homo sapiens
  misc_RNA (1)...(19): siRNA sense strand
ugacuucuacacuguugaa

SEQ ID NO: 438025 - RNA, 19 nt, Homo sapiens
  misc_RNA (1)...(19): siRNA sense strand
acacgcagaaaucaaaguu

SEQ ID NO: 438026 - RNA, 19 nt, Homo sapiens
  misc_RNA (1)...(19): siRNA sense strand
gggacuauccagaucuugu

SEQ ID NO: 438027 - RNA, 19 nt, Homo sapiens
  misc_RNA (1)...(19): siRNA sense strand
auagugcucccaucaaaug

SEQ ID NO: 438028 - RNA, 19 nt, Homo sapiens
  misc_RNA (1)...(19): siRNA sense strand
uguguggcaugaugguauu

SEQ ID NO: 438029 - RNA, 19 nt, Homo sapiens
  misc_RNA (1)...(19): siRNA sense strand
gaaacaucuacacgcagaa

SEQ ID NO: 438030 - RNA, 19 nt, Homo sapiens
  misc_RNA (1)...(19): siRNA sense strand
aaacaggcuuacucugacu

SEQ ID NO: 438031 - RNA, 19 nt, Homo sapiens
  misc_RNA (1)...(19): siRNA sense strand
caucuacacgcagaaauca

SEQ ID NO: 438032 - RNA, 19 nt, Homo sapiens
  misc_RNA (1)...(19): siRNA sense strand
ugaacucugcuuacccauu

SEQ ID NO: 438033 - RNA, 19 nt, Homo sapiens
  misc_RNA (1)...(19): siRNA sense strand
ucauuauccugucugucaa

SEQ ID NO: 438034 - RNA, 19 nt, Homo sapiens
  misc_RNA (1)...(19): siRNA sense strand
uuugcacucugcuggaauu

SEQ ID NO: 438035 - RNA, 19 nt, Homo sapiens
  misc_RNA (1)...(19): siRNA sense strand
caaaguuauugggacuauc

SEQ ID NO: 438036 - RNA, 19 nt, Homo sapiens
  misc_RNA (1)...(19): siRNA sense strand
gguggaaacaggcuuacuc

SEQ ID NO: 438037 - RNA, 19 nt, Homo sapiens
  misc_RNA (1)...(19): siRNA sense strand
ucacaaccuguucccaaug

SEQ ID NO: 438038 - RNA, 19 nt, Homo sapiens
  misc_RNA (1)...(19): siRNA sense strand
cacgcagaaaucaaaguua

SEQ ID NO: 438039 - RNA, 19 nt, Homo sapiens
  misc_RNA (1)...(19): siRNA sense strand
gucaaacaggccaccuuaa

SEQ ID NO: 438040 - RNA, 19 nt, Homo sapiens
  misc_RNA (1)...(19): siRNA sense strand
uaucaaucgccacagagaa

SEQ ID NO: 438041 - RNA, 19 nt, Homo sapiens
  misc_RNA (1)...(19): siRNA sense strand
gaacucugcuuacccauuc

SEQ ID NO: 438042 - RNA, 19 nt, Homo sapiens
  misc_RNA (1)...(19): siRNA sense strand
ggaaacaggcuuacucuga

SEQ ID NO: 438043 - RNA, 19 nt, Homo sapiens
  misc_RNA (1)...(19): siRNA sense strand
caucaaaugucaucaacuu

SEQ ID NO: 438044 - RNA, 19 nt, Homo sapiens
  misc_RNA (1)...(19): siRNA sense strand
gcagaaaucaaaguuauug

SEQ ID NO: 438045 - RNA, 19 nt, Homo sapiens
  misc_RNA (1)...(19): siRNA sense strand
gaucuuguguggcaugaug

SEQ ID NO: 438046 - RNA, 19 nt, Homo sapiens
  misc_RNA (1)...(19): siRNA sense strand
ucauagugcucccaucaaa

SEQ ID NO: 438047 - RNA, 19 nt, Homo sapiens
  misc_RNA (1)...(19): siRNA sense strand
ucaaacaggccaccuuaaa

SEQ ID NO: 438048 - RNA, 19 nt, Homo sapiens
  misc_RNA (1)...(19): siRNA sense strand
gcacucugcuggaauucug

SEQ ID NO: 438049 - RNA, 19 nt, Homo sapiens
  misc_RNA (1)...(19): siRNA sense strand
caaacaggccaccuuaaau

SEQ ID NO: 438050 - RNA, 19 nt, Homo sapiens
  misc_RNA (1)...(19): siRNA sense strand
cacaaccuguucccaauga

SEQ ID NO: 438051 - RNA, 19 nt, Homo sapiens
  misc_RNA (1)...(19): siRNA sense strand
acgcagaaaucaaaguuau

SEQ ID NO: 438052 - RNA, 19 nt, Homo sapiens
  misc_RNA (1)...(19): siRNA sense strand
aaacaggccaccuuaaauc

SEQ ID NO: 438053 - RNA, 19 nt, Homo sapiens
  misc_RNA (1)...(19): siRNA sense strand
ucaaaguuauugggacuau

SEQ ID NO: 438054 - RNA, 19 nt, Homo sapiens
  misc_RNA (1)...(19): siRNA sense strand
ugucugcccugguggguuu

SEQ ID NO: 438055 - RNA, 19 nt, Homo sapiens
  misc_RNA (1)...(19): siRNA sense strand
gauuugcacucugcuggaa

SEQ ID NO: 438056 - RNA, 19 nt, Homo sapiens
  misc_RNA (1)...(19): siRNA sense strand
ugucaaacaggccaccuua

SEQ ID NO: 438057 - RNA, 19 nt, Homo sapiens
  misc_RNA (1)...(19): siRNA sense strand
caaaugucaucaacuucuc

SEQ ID NO: 438058 - RNA, 19 nt, Homo sapiens
  misc_RNA (1)...(19): siRNA sense strand
gcccugguggguuucauua

SEQ ID NO: 438059 - RNA, 19 nt, Homo sapiens
  misc_RNA (1)...(19): siRNA sense strand
aggauagccugaagaaaca

SEQ ID NO: 438060 - RNA, 19 nt, Homo sapiens
  misc_RNA (1)...(19): siRNA sense strand
gcaugaugguauugagcuu

SEQ ID NO: 438061 - RNA, 19 nt, Homo sapiens
  misc_RNA (1)...(19): siRNA sense strand
caucauagugcucccauca

SEQ ID NO: 438062 - RNA, 19 nt, Homo sapiens
  misc_RNA (1)...(19): siRNA sense strand
ggacuauccagaucuugug

SEQ ID NO: 438063 - RNA, 19 nt, Homo sapiens
  misc_RNA (1)...(19): siRNA sense strand
cagccugguuggaagcauu

SEQ ID NO: 438064 - RNA, 19 nt, Homo sapiens
  misc_RNA (1)...(19): siRNA sense strand
cauagcagccugguuggaa

SEQ ID NO: 438065 - RNA, 19 nt, Homo sapiens
  misc_RNA (1)...(19): siRNA sense strand
gugcucccaucaaauguca

SEQ ID NO: 438066 - RNA, 19 nt, Homo sapiens
  misc_RNA (1)...(19): siRNA sense strand
ccugguggguuucauuauc

SEQ ID NO: 438067 - RNA, 19 nt, Homo sapiens
  misc_RNA (1)...(19): siRNA sense strand
ucaaaugucaucaacuucu

SEQ ID NO: 438068 - RNA, 19 nt, Homo sapiens
  misc_RNA (1)...(19): siRNA sense strand
aaacaucuacacgcagaaa

SEQ ID NO: 438069 - RNA, 19 nt, Homo sapiens
  misc_RNA (1)...(19): siRNA sense strand
caaccuguucccaaugaga

SEQ ID NO: 438070 - RNA, 19 nt, Homo sapiens
  misc_RNA (1)...(19): siRNA sense strand
ucucucugaugcugauuug

SEQ ID NO: 438071 - RNA, 19 nt, Homo sapiens
  misc_RNA (1)...(19): siRNA sense strand
cuucuacacuguugaacuc

SEQ ID NO: 438072 - RNA, 19 nt, Homo sapiens
  misc_RNA (1)...(19): siRNA sense strand
guauugagcuuggggauca

SEQ ID NO: 438073 - RNA, 19 nt, Homo sapiens
  misc_RNA (1)...(19): siRNA sense strand
ucuacacgcagaaaucaaa

SEQ ID NO: 438074 - RNA, 19 nt, Homo sapiens
  misc_RNA (1)...(19): siRNA sense strand
ugacuucuacacuguugaa

SEQ ID NO: 438075 - RNA, 19 nt, Homo sapiens
  misc_RNA (1)...(19): siRNA sense strand
acacgcagaaaucaaaguu

SEQ ID NO: 438076 - RNA, 19 nt, Homo sapiens
  misc_RNA (1)...(19): siRNA sense strand
gggacuauccagaucuugu

SEQ ID NO: 438077 - RNA, 19 nt, Homo sapiens
  misc_RNA (1)...(19): siRNA sense strand
auagugcucccaucaaaug

SEQ ID NO: 438078 - RNA, 19 nt, Homo sapiens
  misc_RNA (1)...(19): siRNA sense strand
uguguggcaugaugguauu

SEQ ID NO: 438079 - RNA, 19 nt, Homo sapiens
  misc_RNA (1)...(19): siRNA sense strand
gaaacaucuacacgcagaa

SEQ ID NO: 438080 - RNA, 19 nt, Homo sapiens
  misc_RNA (1)...(19): siRNA sense strand
caucuacacgcagaaauca

SEQ ID NO: 438081 - RNA, 19 nt, Homo sapiens
  misc_RNA (1)...(19): siRNA sense strand
ugaacucugcuuacccauu

SEQ ID NO: 438082 - RNA, 19 nt, Homo sapiens
  misc_RNA (1)...(19): siRNA sense strand
ucauuauccugucugucaa

SEQ ID NO: 438083 - RNA, 19 nt, Homo sapiens
  misc_RNA (1)...(19): siRNA sense strand
uuugcacucugcuggaauu

SEQ ID NO: 438084 - RNA, 19 nt, Homo sapiens
  misc_RNA (1)...(19): siRNA sense strand
caaaguuauugggacuauc

SEQ ID NO: 438085 - RNA, 19 nt, Homo sapiens
  misc_RNA (1)...(19): siRNA sense strand
gguggaaacaggcuuacuc

SEQ ID NO: 438086 - RNA, 19 nt, Homo sapiens
  misc_RNA (1)...(19): siRNA sense strand
ucacaaccuguucccaaug

SEQ ID NO: 438087 - RNA, 19 nt, Homo sapiens
  misc_RNA (1)...(19): siRNA sense strand
cacgcagaaaucaaaguua

SEQ ID NO: 438088 - RNA, 19 nt, Homo sapiens
  misc_RNA (1)...(19): siRNA sense strand
gucaaacaggccaccuuaa

SEQ ID NO: 438089 - RNA, 19 nt, Homo sapiens
  misc_RNA (1)...(19): siRNA sense strand
uaucaaucgccacagagaa

SEQ ID NO: 438090 - RNA, 19 nt, Homo sapiens
  misc_RNA (1)...(19): siRNA sense strand
gaacucugcuuacccauuc

SEQ ID NO: 438091 - RNA, 19 nt, Homo sapiens
  misc_RNA (1)...(19): siRNA sense strand
ggaaacaggcuuacucuga

SEQ ID NO: 438092 - RNA, 19 nt, Homo sapiens
  misc_RNA (1)...(19): siRNA sense strand
caucaaaugucaucaacuu

SEQ ID NO: 438093 - RNA, 19 nt, Homo sapiens
  misc_RNA (1)...(19): siRNA sense strand
gcagaaaucaaaguuauug

SEQ ID NO: 438094 - RNA, 19 nt, Homo sapiens
  misc_RNA (1)...(19): siRNA sense strand
gaucuuguguggcaugaug

SEQ ID NO: 438095 - RNA, 19 nt, Homo sapiens
  misc_RNA (1)...(19): siRNA sense strand
ucauagugcucccaucaaa

SEQ ID NO: 438096 - RNA, 19 nt, Homo sapiens
  misc_RNA (1)...(19): siRNA sense strand
ucaaacaggccaccuuaaa

SEQ ID NO: 438097 - RNA, 19 nt, Homo sapiens
  misc_RNA (1)...(19): siRNA sense strand
gcacucugcuggaauucug

SEQ ID NO: 438098 - RNA, 19 nt, Homo sapiens
  misc_RNA (1)...(19): siRNA sense strand
caaacaggccaccuuaaau

SEQ ID NO: 438099 - RNA, 19 nt, Homo sapiens
  misc_RNA (1)...(19): siRNA sense strand
cacaaccuguucccaauga

SEQ ID NO: 438100 - RNA, 19 nt, Homo sapiens
  misc_RNA (1)...(19): siRNA sense strand
acgcagaaaucaaaguuau

SEQ ID NO: 438101 - RNA, 19 nt, Homo sapiens
  misc_RNA (1)...(19): siRNA sense strand
aaacaggccaccuuaaauc

SEQ ID NO: 438102 - RNA, 19 nt, Homo sapiens
  misc_RNA (1)...(19): siRNA sense strand
ucaaaguuauugggacuau

SEQ ID NO: 438103 - RNA, 19 nt, Homo sapiens
  misc_RNA (1)...(19): siRNA sense strand
ugucugcccugguggguuu

SEQ ID NO: 438104 - RNA, 19 nt, Homo sapiens
  misc_RNA (1)...(19): siRNA sense strand
gauuugcacucugcuggaa

SEQ ID NO: 438105 - RNA, 19 nt, Homo sapiens
  misc_RNA (1)...(19): siRNA sense strand
ugucaaacaggccaccuua

SEQ ID NO: 438106 - RNA, 19 nt, Homo sapiens
  misc_RNA (1)...(19): siRNA sense strand
caaaugucaucaacuucuc

SEQ ID NO: 438107 - RNA, 19 nt, Homo sapiens
  misc_RNA (1)...(19): siRNA sense strand
gcccugguggguuucauua

SEQ ID NO: 438108 - RNA, 19 nt, Homo sapiens
  misc_RNA (1)...(19): siRNA sense strand
aggauagccugaagaaaca

SEQ ID NO: 438109 - RNA, 19 nt, Homo sapiens
  misc_RNA (1)...(19): siRNA sense strand
gcaugaugguauugagcuu

SEQ ID NO: 438110 - RNA, 19 nt, Homo sapiens
  misc_RNA (1)...(19): siRNA sense strand
caucauagugcucccauca

SEQ ID NO: 438111 - RNA, 19 nt, Homo sapiens
  misc_RNA (1)...(19): siRNA sense strand
ggacuauccagaucuugug

SEQ ID NO: 438112 - RNA, 19 nt, Homo sapiens
  misc_RNA (1)...(19): siRNA sense strand
cagccugguuggaagcauu

SEQ ID NO: 438113 - RNA, 19 nt, Homo sapiens
  misc_RNA (1)...(19): siRNA sense strand
cauagcagccugguuggaa

SEQ ID NO: 438114 - RNA, 19 nt, Homo sapiens
  misc_RNA (1)...(19): siRNA sense strand
gugcucccaucaaauguca

SEQ ID NO: 438115 - RNA, 19 nt, Homo sapiens
  misc_RNA (1)...(19): siRNA sense strand
ccugguggguuucauuauc

SEQ ID NO: 438116 - RNA, 19 nt, Homo sapiens
  misc_RNA (1)...(19): siRNA sense strand
ucaaaugucaucaacuucu

SEQ ID NO: 438117 - RNA, 19 nt, Homo sapiens
  misc_RNA (1)...(19): siRNA sense strand
aaacaucuacacgcagaaa

SEQ ID NO: 438118 - RNA, 19 nt, Homo sapiens
  misc_RNA (1)...(19): siRNA sense strand
caaccuguucccaaugaga

SEQ ID NO: 438119 - RNA, 19 nt, Homo sapiens
  misc_RNA (1)...(19): siRNA sense strand
ucucucugaugcugauuug

SEQ ID NO: 438120 - RNA, 19 nt, Homo sapiens
  misc_RNA (1)...(19): siRNA sense strand
cuucuacacuguugaacuc

SEQ ID NO: 438121 - RNA, 19 nt, Homo sapiens
  misc_RNA (1)...(19): siRNA sense strand
guauugagcuuggggauca

SEQ ID NO: 438122 - RNA, 19 nt, Homo sapiens
  misc_RNA (1)...(19): siRNA sense strand
ucuacacgcagaaaucaaa

SEQ ID NO: 438123 - RNA, 19 nt, Homo sapiens
  misc_RNA (1)...(19): siRNA sense strand
ugacuucuacacuguugaa

SEQ ID NO: 438124 - RNA, 19 nt, Homo sapiens
  misc_RNA (1)...(19): siRNA sense strand
acacgcagaaaucaaaguu

SEQ ID NO: 438125 - RNA, 19 nt, Homo sapiens
  misc_RNA (1)...(19): siRNA sense strand
gggacuauccagaucuugu

SEQ ID NO: 438126 - RNA, 19 nt, Homo sapiens
  misc_RNA (1)...(19): siRNA sense strand
auagugcucccaucaaaug

SEQ ID NO: 438127 - RNA, 19 nt, Homo sapiens
  misc_RNA (1)...(19): siRNA sense strand
uguguggcaugaugguauu

SEQ ID NO: 438128 - RNA, 19 nt, Homo sapiens
  misc_RNA (1)...(19): siRNA sense strand
gaaacaucuacacgcagaa

SEQ ID NO: 438129 - RNA, 19 nt, Homo sapiens
  misc_RNA (1)...(19): siRNA sense strand
aaacaggcuuacucugacu

SEQ ID NO: 438130 - RNA, 19 nt, Homo sapiens
  misc_RNA (1)...(19): siRNA sense strand
caucuacacgcagaaauca

SEQ ID NO: 438131 - RNA, 19 nt, Homo sapiens
  misc_RNA (1)...(19): siRNA sense strand
ugaacucugcuuacccauu

SEQ ID NO: 438132 - RNA, 19 nt, Homo sapiens
  misc_RNA (1)...(19): siRNA sense strand
ucauuauccugucugucaa

SEQ ID NO: 438133 - RNA, 19 nt, Homo sapiens
  misc_RNA (1)...(19): siRNA sense strand
uuugcacucugcuggaauu

SEQ ID NO: 438134 - RNA, 19 nt, Homo sapiens
  misc_RNA (1)...(19): siRNA sense strand
caaaguuauugggacuauc

SEQ ID NO: 438135 - RNA, 19 nt, Homo sapiens
  misc_RNA (1)...(19): siRNA sense strand
gguggaaacaggcuuacuc

SEQ ID NO: 438136 - RNA, 19 nt, Homo sapiens
  misc_RNA (1)...(19): siRNA sense strand
ucacaaccuguucccaaug

SEQ ID NO: 438137 - RNA, 19 nt, Homo sapiens
  misc_RNA (1)...(19): siRNA sense strand
cacgcagaaaucaaaguua

SEQ ID NO: 438138 - RNA, 19 nt, Homo sapiens
  misc_RNA (1)...(19): siRNA sense strand
gucaaacaggccaccuuaa

SEQ ID NO: 438139 - RNA, 19 nt, Homo sapiens
  misc_RNA (1)...(19): siRNA sense strand
uaucaaucgccacagagaa

SEQ ID NO: 438140 - RNA, 19 nt, Homo sapiens
  misc_RNA (1)...(19): siRNA sense strand
caaagaggcugggcaauga

SEQ ID NO: 438141 - RNA, 19 nt, Homo sapiens
  misc_RNA (1)...(19): siRNA sense strand
gcaaugacaucgcccuuau

SEQ ID NO: 438142 - RNA, 19 nt, Homo sapiens
  misc_RNA (1)...(19): siRNA sense strand
gaucaccucuugccagaug

SEQ ID NO: 438143 - RNA, 19 nt, Homo sapiens
  misc_RNA (1)...(19): siRNA sense strand
ucagauaaccucagaguga

SEQ ID NO: 438144 - RNA, 19 nt, Homo sapiens
  misc_RNA (1)...(19): siRNA sense strand
gcucauccuuuaaguguau

SEQ ID NO: 438145 - RNA, 19 nt, Homo sapiens
  misc_RNA (1)...(19): siRNA sense strand
guccaucgaucaccucuug

SEQ ID NO: 438146 - RNA, 19 nt, Homo sapiens
  misc_RNA (1)...(19): siRNA sense strand
ggaagggucacuacgcaaa

SEQ ID NO: 438147 - RNA, 19 nt, Homo sapiens
  misc_RNA (1)...(19): siRNA sense strand
caucguggguggaaacaug

SEQ ID NO: 438148 - RNA, 19 nt, Homo sapiens
  misc_RNA (1)...(19): siRNA sense strand
ugacaucgcccuuaugaag

SEQ ID NO: 438149 - RNA, 19 nt, Homo sapiens
  misc_RNA (1)...(19): siRNA sense strand
ugacaaggugacugcauua

SEQ ID NO: 438150 - RNA, 19 nt, Homo sapiens
  misc_RNA (1)...(19): siRNA sense strand
caagcuaugugaguucaga

SEQ ID NO: 438151 - RNA, 19 nt, Homo sapiens
  misc_RNA (1)...(19): siRNA sense strand
caucacugcugcacacugu

SEQ ID NO: 438152 - RNA, 19 nt, Homo sapiens
  misc_RNA (1)...(19): siRNA sense strand
gaguucagauaaccucaga

SEQ ID NO: 438153 - RNA, 19 nt, Homo sapiens
  misc_RNA (1)...(19): siRNA sense strand
ccaaagaggcugggcaaug

SEQ ID NO: 438154 - RNA, 19 nt, Homo sapiens
  misc_RNA (1)...(19): siRNA sense strand
gcuaugugaguucagauaa

SEQ ID NO: 438155 - RNA, 19 nt, Homo sapiens
  misc_RNA (1)...(19): siRNA sense strand
gcaaguacaagccaaagag

SEQ ID NO: 438156 - RNA, 19 nt, Homo sapiens
  misc_RNA (1)...(19): siRNA sense strand
caaggugacugcauuacac

SEQ ID NO: 438157 - RNA, 19 nt, Homo sapiens
  misc_RNA (1)...(19): siRNA sense strand
gggaggaguuuguguccau

SEQ ID NO: 438158 - RNA, 19 nt, Homo sapiens
  misc_RNA (1)...(19): siRNA sense strand
gcauuacaccacucaguau

SEQ ID NO: 438159 - RNA, 19 nt, Homo sapiens
  misc_RNA (1)...(19): siRNA sense strand
gcucagggaaguacagaug

SEQ ID NO: 438160 - RNA, 19 nt, Homo sapiens
  misc_RNA (1)...(19): siRNA sense strand
gggucuaguuucccuguug

SEQ ID NO: 438161 - RNA, 19 nt, Homo sapiens
  misc_RNA (1)...(19): siRNA sense strand
uuacaccacucaguauaug

SEQ ID NO: 438162 - RNA, 19 nt, Homo sapiens
  misc_RNA (1)...(19): siRNA sense strand
uggagaagauugucuacca

SEQ ID NO: 438163 - RNA, 19 nt, Homo sapiens
  misc_RNA (1)...(19): siRNA sense strand
ucacagcugcuucguggaa

SEQ ID NO: 438164 - RNA, 19 nt, Homo sapiens
  misc_RNA (1)...(19): siRNA sense strand
gaagggucacuacgcaaau

SEQ ID NO: 438165 - RNA, 19 nt, Homo sapiens
  misc_RNA (1)...(19): siRNA sense strand
cauuacaccacucaguaua

SEQ ID NO: 438166 - RNA, 19 nt, Homo sapiens
  misc_RNA (1)...(19): siRNA sense strand
ggcaaugacaucgcccuua

SEQ ID NO: 438167 - RNA, 19 nt, Homo sapiens
  misc_RNA (1)...(19): siRNA sense strand
aaugacaucgcccuuauga

SEQ ID NO: 438168 - RNA, 19 nt, Homo sapiens
  misc_RNA (1)...(19): siRNA sense strand
gugacggagucucggauug

SEQ ID NO: 438169 - RNA, 19 nt, Homo sapiens
  misc_RNA (1)...(19): siRNA sense strand
ggucacuacgcaaauguug

SEQ ID NO: 438170 - RNA, 19 nt, Homo sapiens
  misc_RNA (1)...(19): siRNA sense strand
gcaguuccgggaggaguuu

SEQ ID NO: 438171 - RNA, 19 nt, Homo sapiens
  misc_RNA (1)...(19): siRNA sense strand
uaguuucccuguuggacaa

SEQ ID NO: 438172 - RNA, 19 nt, Homo sapiens
  misc_RNA (1)...(19): siRNA sense strand
uuaaguguaucgagcugau

SEQ ID NO: 438173 - RNA, 19 nt, Homo sapiens
  misc_RNA (1)...(19): siRNA sense strand
ucagggaaguacagauguc

SEQ ID NO: 438174 - RNA, 19 nt, Homo sapiens
  misc_RNA (1)...(19): siRNA sense strand
augacaaggugacugcauu

SEQ ID NO: 438175 - RNA, 19 nt, Homo sapiens
  misc_RNA (1)...(19): siRNA sense strand
guggaaacauguccuugcu

SEQ ID NO: 438176 - RNA, 19 nt, Homo sapiens
  misc_RNA (1)...(19): siRNA sense strand
ccggguggguggucagaau

SEQ ID NO: 438177 - RNA, 19 nt, Homo sapiens
  misc_RNA (1)...(19): siRNA sense strand
ugcauuacaccacucagua

SEQ ID NO: 438178 - RNA, 19 nt, Homo sapiens
  misc_RNA (1)...(19): siRNA sense strand
guucagauaaccucagagu

SEQ ID NO: 438179 - RNA, 19 nt, Homo sapiens
  misc_RNA (1)...(19): siRNA sense strand
ccaggugggucuaguuucc

SEQ ID NO: 438180 - RNA, 19 nt, Homo sapiens
  misc_RNA (1)...(19): siRNA sense strand
ucgcucauccuuuaagugu

SEQ ID NO: 438181 - RNA, 19 nt, Homo sapiens
  misc_RNA (1)...(19): siRNA sense strand
cggagucucggauugcaaa

SEQ ID NO: 438182 - RNA, 19 nt, Homo sapiens
  misc_RNA (1)...(19): siRNA sense strand
gggccacucacguucaaug

SEQ ID NO: 438183 - RNA, 19 nt, Homo sapiens
  misc_RNA (1)...(19): siRNA sense strand
caaagaggcugggcaauga

SEQ ID NO: 438184 - RNA, 19 nt, Homo sapiens
  misc_RNA (1)...(19): siRNA sense strand
gcaaugacaucgcccuuau

SEQ ID NO: 438185 - RNA, 19 nt, Homo sapiens
  misc_RNA (1)...(19): siRNA sense strand
gaucaccucuugccagaug

SEQ ID NO: 438186 - RNA, 19 nt, Homo sapiens
  misc_RNA (1)...(19): siRNA sense strand
ucagauaaccucagaguga

SEQ ID NO: 438187 - RNA, 19 nt, Homo sapiens
  misc_RNA (1)...(19): siRNA sense strand
guccaucgaucaccucuug

SEQ ID NO: 438188 - RNA, 19 nt, Homo sapiens
  misc_RNA (1)...(19): siRNA sense strand
caucguggguggaaacaug

SEQ ID NO: 438189 - RNA, 19 nt, Homo sapiens
  misc_RNA (1)...(19): siRNA sense strand
ggaagggucacuacgcaaa

SEQ ID NO: 438190 - RNA, 19 nt, Homo sapiens
  misc_RNA (1)...(19): siRNA sense strand
ugacaucgcccuuaugaag

SEQ ID NO: 438191 - RNA, 19 nt, Homo sapiens
  misc_RNA (1)...(19): siRNA sense strand
ugacaaggugacugcauua

SEQ ID NO: 438192 - RNA, 19 nt, Homo sapiens
  misc_RNA (1)...(19): siRNA sense strand
caagcuaugugaguucaga

SEQ ID NO: 438193 - RNA, 19 nt, Homo sapiens
  misc_RNA (1)...(19): siRNA sense strand
caucacugcugcacacugu

SEQ ID NO: 438194 - RNA, 19 nt, Homo sapiens
  misc_RNA (1)...(19): siRNA sense strand
gaguucagauaaccucaga

SEQ ID NO: 438195 - RNA, 19 nt, Homo sapiens
  misc_RNA (1)...(19): siRNA sense strand
ccaaagaggcugggcaaug

SEQ ID NO: 438196 - RNA, 19 nt, Homo sapiens
  misc_RNA (1)...(19): siRNA sense strand
gcuaugugaguucagauaa

SEQ ID NO: 438197 - RNA, 19 nt, Homo sapiens
  misc_RNA (1)...(19): siRNA sense strand
gcaaguacaagccaaagag

SEQ ID NO: 438198 - RNA, 19 nt, Homo sapiens
  misc_RNA (1)...(19): siRNA sense strand
caaggugacugcauuacac

SEQ ID NO: 438199 - RNA, 19 nt, Homo sapiens
  misc_RNA (1)...(19): siRNA sense strand
gggaggaguuuguguccau

SEQ ID NO: 438200 - RNA, 19 nt, Homo sapiens
  misc_RNA (1)...(19): siRNA sense strand
gcauuacaccacucaguau

SEQ ID NO: 438201 - RNA, 19 nt, Homo sapiens
  misc_RNA (1)...(19): siRNA sense strand
gggucuaguuucccuguug

SEQ ID NO: 438202 - RNA, 19 nt, Homo sapiens
  misc_RNA (1)...(19): siRNA sense strand
uuacaccacucaguauaug

SEQ ID NO: 438203 - RNA, 19 nt, Homo sapiens
  misc_RNA (1)...(19): siRNA sense strand
uggagaagauugucuacca

SEQ ID NO: 438204 - RNA, 19 nt, Homo sapiens
  misc_RNA (1)...(19): siRNA sense strand
gaagggucacuacgcaaau

SEQ ID NO: 438205 - RNA, 19 nt, Homo sapiens
  misc_RNA (1)...(19): siRNA sense strand
cauuacaccacucaguaua

SEQ ID NO: 438206 - RNA, 19 nt, Homo sapiens
  misc_RNA (1)...(19): siRNA sense strand
ggcaaugacaucgcccuua

SEQ ID NO: 438207 - RNA, 19 nt, Homo sapiens
  misc_RNA (1)...(19): siRNA sense strand
aaugacaucgcccuuauga

SEQ ID NO: 438208 - RNA, 19 nt, Homo sapiens
  misc_RNA (1)...(19): siRNA sense strand
ggucacuacgcaaauguug

SEQ ID NO: 438209 - RNA, 19 nt, Homo sapiens
  misc_RNA (1)...(19): siRNA sense strand
uaguuucccuguuggacaa

SEQ ID NO: 438210 - RNA, 19 nt, Homo sapiens
  misc_RNA (1)...(19): siRNA sense strand
gcaguuccgggaggaguuu

SEQ ID NO: 438211 - RNA, 19 nt, Homo sapiens
  misc_RNA (1)...(19): siRNA sense strand
augacaaggugacugcauu

SEQ ID NO: 438212 - RNA, 19 nt, Homo sapiens
  misc_RNA (1)...(19): siRNA sense strand
guggaaacauguccuugcu

SEQ ID NO: 438213 - RNA, 19 nt, Homo sapiens
  misc_RNA (1)...(19): siRNA sense strand
ugcauuacaccacucagua

SEQ ID NO: 438214 - RNA, 19 nt, Homo sapiens
  misc_RNA (1)...(19): siRNA sense strand
ccaggugggucuaguuucc

SEQ ID NO: 438215 - RNA, 19 nt, Homo sapiens
  misc_RNA (1)...(19): siRNA sense strand
guucagauaaccucagagu

SEQ ID NO: 438216 - RNA, 19 nt, Homo sapiens
  misc_RNA (1)...(19): siRNA sense strand
gggccacucacguucaaug

SEQ ID NO: 438217 - RNA, 19 nt, Homo sapiens
  misc_RNA (1)...(19): siRNA sense strand
caaagaggcugggcaauga

SEQ ID NO: 438218 - RNA, 19 nt, Homo sapiens
  misc_RNA (1)...(19): siRNA sense strand
gcaaugacaucgcccuuau

SEQ ID NO: 438219 - RNA, 19 nt, Homo sapiens
  misc_RNA (1)...(19): siRNA sense strand
gaucaccucuugccagaug

SEQ ID NO: 438220 - RNA, 19 nt, Homo sapiens
  misc_RNA (1)...(19): siRNA sense strand
ucagauaaccucagaguga

SEQ ID NO: 438221 - RNA, 19 nt, Homo sapiens
  misc_RNA (1)...(19): siRNA sense strand
guccaucgaucaccucuug

SEQ ID NO: 438222 - RNA, 19 nt, Homo sapiens
  misc_RNA (1)...(19): siRNA sense strand
caucguggguggaaacaug

SEQ ID NO: 438223 - RNA, 19 nt, Homo sapiens
  misc_RNA (1)...(19): siRNA sense strand
ggaagggucacuacgcaaa

SEQ ID NO: 438224 - RNA, 19 nt, Homo sapiens
  misc_RNA (1)...(19): siRNA sense strand
ugacaucgcccuuaugaag

SEQ ID NO: 438225 - RNA, 19 nt, Homo sapiens
  misc_RNA (1)...(19): siRNA sense strand
ugacaaggugacugcauua

SEQ ID NO: 438226 - RNA, 19 nt, Homo sapiens
  misc_RNA (1)...(19): siRNA sense strand
caagcuaugugaguucaga

SEQ ID NO: 438227 - RNA, 19 nt, Homo sapiens
  misc_RNA (1)...(19): siRNA sense strand
caucacugcugcacacugu

SEQ ID NO: 438228 - RNA, 19 nt, Homo sapiens
  misc_RNA (1)...(19): siRNA sense strand
gaguucagauaaccucaga

SEQ ID NO: 438229 - RNA, 19 nt, Homo sapiens
  misc_RNA (1)...(19): siRNA sense strand
ccaaagaggcugggcaaug

SEQ ID NO: 438230 - RNA, 19 nt, Homo sapiens
  misc_RNA (1)...(19): siRNA sense strand
gcuaugugaguucagauaa

SEQ ID NO: 438231 - RNA, 19 nt, Homo sapiens
  misc_RNA (1)...(19): siRNA sense strand
gcaaguacaagccaaagag

SEQ ID NO: 438232 - RNA, 19 nt, Homo sapiens
  misc_RNA (1)...(19): siRNA sense strand
caaggugacugcauuacac

SEQ ID NO: 438233 - RNA, 19 nt, Homo sapiens
  misc_RNA (1)...(19): siRNA sense strand
gggaggaguuuguguccau

SEQ ID NO: 438234 - RNA, 19 nt, Homo sapiens
  misc_RNA (1)...(19): siRNA sense strand
gcauuacaccacucaguau

SEQ ID NO: 438235 - RNA, 19 nt, Homo sapiens
  misc_RNA (1)...(19): siRNA sense strand
gggucuaguuucccuguug

SEQ ID NO: 438236 - RNA, 19 nt, Homo sapiens
  misc_RNA (1)...(19): siRNA sense strand
uuacaccacucaguauaug

SEQ ID NO: 438237 - RNA, 19 nt, Homo sapiens
  misc_RNA (1)...(19): siRNA sense strand
uggagaagauugucuacca

SEQ ID NO: 438238 - RNA, 19 nt, Homo sapiens
  misc_RNA (1)...(19): siRNA sense strand
gaagggucacuacgcaaau

SEQ ID NO: 438239 - RNA, 19 nt, Homo sapiens
  misc_RNA (1)...(19): siRNA sense strand
cauuacaccacucaguaua

SEQ ID NO: 438240 - RNA, 19 nt, Homo sapiens
  misc_RNA (1)...(19): siRNA sense strand
ggcaaugacaucgcccuua

SEQ ID NO: 438241 - RNA, 19 nt, Homo sapiens
  misc_RNA (1)...(19): siRNA sense strand
aaugacaucgcccuuauga

SEQ ID NO: 438242 - RNA, 19 nt, Homo sapiens
  misc_RNA (1)...(19): siRNA sense strand
ggucacuacgcaaauguug

SEQ ID NO: 438243 - RNA, 19 nt, Homo sapiens
  misc_RNA (1)...(19): siRNA sense strand
uaguuucccuguuggacaa

SEQ ID NO: 438244 - RNA, 19 nt, Homo sapiens
  misc_RNA (1)...(19): siRNA sense strand
gcaguuccgggaggaguuu

SEQ ID NO: 438245 - RNA, 19 nt, Homo sapiens
  misc_RNA (1)...(19): siRNA sense strand
augacaaggugacugcauu

SEQ ID NO: 438246 - RNA, 19 nt, Homo sapiens
  misc_RNA (1)...(19): siRNA sense strand
guggaaacauguccuugcu

SEQ ID NO: 438247 - RNA, 19 nt, Homo sapiens
  misc_RNA (1)...(19): siRNA sense strand
ugcauuacaccacucagua

SEQ ID NO: 438248 - RNA, 19 nt, Homo sapiens
  misc_RNA (1)...(19): siRNA sense strand
ccaggugggucuaguuucc

SEQ ID NO: 438249 - RNA, 19 nt, Homo sapiens
  misc_RNA (1)...(19): siRNA sense strand
guucagauaaccucagagu

SEQ ID NO: 438250 - RNA, 19 nt, Homo sapiens
  misc_RNA (1)...(19): siRNA sense strand
gggccacucacguucaaug

SEQ ID NO: 438251 - RNA, 19 nt, Homo sapiens
  misc_RNA (1)...(19): siRNA sense strand
caaagaggcugggcaauga

SEQ ID NO: 438252 - RNA, 19 nt, Homo sapiens
  misc_RNA (1)...(19): siRNA sense strand
gcaaugacaucgcccuuau

SEQ ID NO: 438253 - RNA, 19 nt, Homo sapiens
  misc_RNA (1)...(19): siRNA sense strand
gaucaccucuugccagaug

SEQ ID NO: 438254 - RNA, 19 nt, Homo sapiens
  misc_RNA (1)...(19): siRNA sense strand
ucagauaaccucagaguga

SEQ ID NO: 438255 - RNA, 19 nt, Homo sapiens
  misc_RNA (1)...(19): siRNA sense strand
gcucauccuuuaaguguau

SEQ ID NO: 438256 - RNA, 19 nt, Homo sapiens
  misc_RNA (1)...(19): siRNA sense strand
guccaucgaucaccucuug

SEQ ID NO: 438257 - RNA, 19 nt, Homo sapiens
  misc_RNA (1)...(19): siRNA sense strand
ggaagggucacuacgcaaa

SEQ ID NO: 438258 - RNA, 19 nt, Homo sapiens
  misc_RNA (1)...(19): siRNA sense strand
caucguggguggaaacaug

SEQ ID NO: 438259 - RNA, 19 nt, Homo sapiens
  misc_RNA (1)...(19): siRNA sense strand
ugacaucgcccuuaugaag

SEQ ID NO: 438260 - RNA, 19 nt, Homo sapiens
  misc_RNA (1)...(19): siRNA sense strand
ugacaaggugacugcauua

SEQ ID NO: 438261 - RNA, 19 nt, Homo sapiens
  misc_RNA (1)...(19): siRNA sense strand
caagcuaugugaguucaga

SEQ ID NO: 438262 - RNA, 19 nt, Homo sapiens
  misc_RNA (1)...(19): siRNA sense strand
caucacugcugcacacugu

SEQ ID NO: 438263 - RNA, 19 nt, Homo sapiens
  misc_RNA (1)...(19): siRNA sense strand
gaguucagauaaccucaga

SEQ ID NO: 438264 - RNA, 19 nt, Homo sapiens
  misc_RNA (1)...(19): siRNA sense strand
ccaaagaggcugggcaaug

SEQ ID NO: 438265 - RNA, 19 nt, Homo sapiens
  misc_RNA (1)...(19): siRNA sense strand
gcuaugugaguucagauaa

SEQ ID NO: 438266 - RNA, 19 nt, Homo sapiens
  misc_RNA (1)...(19): siRNA sense strand
gcaaguacaagccaaagag

SEQ ID NO: 438267 - RNA, 19 nt, Homo sapiens
  misc_RNA (1)...(19): siRNA sense strand
caaggugacugcauuacac

SEQ ID NO: 438268 - RNA, 19 nt, Homo sapiens
  misc_RNA (1)...(19): siRNA sense strand
gggaggaguuuguguccau

SEQ ID NO: 438269 - RNA, 19 nt, Homo sapiens
  misc_RNA (1)...(19): siRNA sense strand
gcauuacaccacucaguau

SEQ ID NO: 438270 - RNA, 19 nt, Homo sapiens
  misc_RNA (1)...(19): siRNA sense strand
gcucagggaaguacagaug

SEQ ID NO: 438271 - RNA, 19 nt, Homo sapiens
  misc_RNA (1)...(19): siRNA sense strand
gggucuaguuucccuguug

SEQ ID NO: 438272 - RNA, 19 nt, Homo sapiens
  misc_RNA (1)...(19): siRNA sense strand
uuacaccacucaguauaug

SEQ ID NO: 438273 - RNA, 19 nt, Homo sapiens
  misc_RNA (1)...(19): siRNA sense strand
uggagaagauugucuacca

SEQ ID NO: 438274 - RNA, 19 nt, Homo sapiens
  misc_RNA (1)...(19): siRNA sense strand
ucacagcugcuucguggaa

SEQ ID NO: 438275 - RNA, 19 nt, Homo sapiens
  misc_RNA (1)...(19): siRNA sense strand
gaagggucacuacgcaaau

SEQ ID NO: 438276 - RNA, 19 nt, Homo sapiens
  misc_RNA (1)...(19): siRNA sense strand
cauuacaccacucaguaua

SEQ ID NO: 438277 - RNA, 19 nt, Homo sapiens
  misc_RNA (1)...(19): siRNA sense strand
ggcaaugacaucgcccuua

SEQ ID NO: 438278 - RNA, 19 nt, Homo sapiens
  misc_RNA (1)...(19): siRNA sense strand
aaugacaucgcccuuauga

SEQ ID NO: 438279 - RNA, 19 nt, Homo sapiens
  misc_RNA (1)...(19): siRNA sense strand
gugacggagucucggauug

SEQ ID NO: 438280 - RNA, 19 nt, Homo sapiens
  misc_RNA (1)...(19): siRNA sense strand
ggucacuacgcaaauguug

SEQ ID NO: 438281 - RNA, 19 nt, Homo sapiens
  misc_RNA (1)...(19): siRNA sense strand
gcaguuccgggaggaguuu

SEQ ID NO: 438282 - RNA, 19 nt, Homo sapiens
  misc_RNA (1)...(19): siRNA sense strand
uaguuucccuguuggacaa

SEQ ID NO: 438283 - RNA, 19 nt, Homo sapiens
  misc_RNA (1)...(19): siRNA sense strand
uuaaguguaucgagcugau

SEQ ID NO: 438284 - RNA, 19 nt, Homo sapiens
  misc_RNA (1)...(19): siRNA sense strand
ucagggaaguacagauguc

SEQ ID NO: 438285 - RNA, 19 nt, Homo sapiens
  misc_RNA (1)...(19): siRNA sense strand
augacaaggugacugcauu

SEQ ID NO: 438286 - RNA, 19 nt, Homo sapiens
  misc_RNA (1)...(19): siRNA sense strand
guggaaacauguccuugcu

SEQ ID NO: 438287 - RNA, 19 nt, Homo sapiens
  misc_RNA (1)...(19): siRNA sense strand
ccggguggguggucagaau

SEQ ID NO: 438288 - RNA, 19 nt, Homo sapiens
  misc_RNA (1)...(19): siRNA sense strand
ugcauuacaccacucagua

SEQ ID NO: 438289 - RNA, 19 nt, Homo sapiens
  misc_RNA (1)...(19): siRNA sense strand
guucagauaaccucagagu

SEQ ID NO: 438290 - RNA, 19 nt, Homo sapiens
  misc_RNA (1)...(19): siRNA sense strand
ccaggugggucuaguuucc

SEQ ID NO: 438291 - RNA, 19 nt, Homo sapiens
  misc_RNA (1)...(19): siRNA sense strand
ucgcucauccuuuaagugu

SEQ ID NO: 438292 - RNA, 19 nt, Homo sapiens
  misc_RNA (1)...(19): siRNA sense strand
cggagucucggauugcaaa

SEQ ID NO: 438293 - RNA, 19 nt, Homo sapiens
  misc_RNA (1)...(19): siRNA sense strand
gggccacucacguucaaug

SEQ ID NO: 438294 - RNA, 19 nt, Homo sapiens
  misc_RNA (1)...(19): siRNA sense strand
aguagaagacucagaauua

SEQ ID NO: 438295 - RNA, 19 nt, Homo sapiens
  misc_RNA (1)...(19): siRNA sense strand
guagaagacucagaauuag

SEQ ID NO: 438296 - RNA, 19 nt, Homo sapiens
  misc_RNA (1)...(19): siRNA sense strand
gcuaagggcccaugugauc

SEQ ID NO: 438297 - RNA, 19 nt, Homo sapiens
  misc_RNA (1)...(19): siRNA sense strand
ccagauggacacugagaaa

SEQ ID NO: 438298 - RNA, 19 nt, Homo sapiens
  misc_RNA (1)...(19): siRNA sense strand
agaagacucagaauuagaa

SEQ ID NO: 438299 - RNA, 19 nt, Homo sapiens
  misc_RNA (1)...(19): siRNA sense strand
ggaagaaccagggcagcuu

SEQ ID NO: 438300 - RNA, 19 nt, Homo sapiens
  misc_RNA (1)...(19): siRNA sense strand
gcgucuaccugcucuacug

SEQ ID NO: 438301 - RNA, 19 nt, Homo sapiens
  misc_RNA (1)...(19): siRNA sense strand
gccaaugcccuugcuguga

SEQ ID NO: 438302 - RNA, 19 nt, Homo sapiens
  misc_RNA (1)...(19): siRNA sense strand
uagaagacucagaauuaga

SEQ ID NO: 438303 - RNA, 19 nt, Homo sapiens
  misc_RNA (1)...(19): siRNA sense strand
ugugccagauggacacuga

SEQ ID NO: 438304 - RNA, 19 nt, Homo sapiens
  misc_RNA (1)...(19): siRNA sense strand
caaugcccuugcugugaga

SEQ ID NO: 438305 - RNA, 19 nt, Homo sapiens
  misc_RNA (1)...(19): siRNA sense strand
cugcuaagggcccauguga

SEQ ID NO: 438306 - RNA, 19 nt, Homo sapiens
  misc_RNA (1)...(19): siRNA sense strand
aaguagaagacucagaauu

SEQ ID NO: 438307 - RNA, 19 nt, Homo sapiens
  misc_RNA (1)...(19): siRNA sense strand
aguagaagacucagaauua

SEQ ID NO: 438308 - RNA, 19 nt, Homo sapiens
  misc_RNA (1)...(19): siRNA sense strand
guagaagacucagaauuag

SEQ ID NO: 438309 - RNA, 19 nt, Homo sapiens
  misc_RNA (1)...(19): siRNA sense strand
gcuaagggcccaugugauc

SEQ ID NO: 438310 - RNA, 19 nt, Homo sapiens
  misc_RNA (1)...(19): siRNA sense strand
ccagauggacacugagaaa

SEQ ID NO: 438311 - RNA, 19 nt, Homo sapiens
  misc_RNA (1)...(19): siRNA sense strand
agaagacucagaauuagaa

SEQ ID NO: 438312 - RNA, 19 nt, Homo sapiens
  misc_RNA (1)...(19): siRNA sense strand
ggaagaaccagggcagcuu

SEQ ID NO: 438313 - RNA, 19 nt, Homo sapiens
  misc_RNA (1)...(19): siRNA sense strand
gcgucuaccugcucuacug

SEQ ID NO: 438314 - RNA, 19 nt, Homo sapiens
  misc_RNA (1)...(19): siRNA sense strand
gccaaugcccuugcuguga

SEQ ID NO: 438315 - RNA, 19 nt, Homo sapiens
  misc_RNA (1)...(19): siRNA sense strand
uagaagacucagaauuaga

SEQ ID NO: 438316 - RNA, 19 nt, Homo sapiens
  misc_RNA (1)...(19): siRNA sense strand
ugugccagauggacacuga

SEQ ID NO: 438317 - RNA, 19 nt, Homo sapiens
  misc_RNA (1)...(19): siRNA sense strand
caaugcccuugcugugaga

SEQ ID NO: 438318 - RNA, 19 nt, Homo sapiens
  misc_RNA (1)...(19): siRNA sense strand
cugcuaagggcccauguga

SEQ ID NO: 438319 - RNA, 19 nt, Homo sapiens
  misc_RNA (1)...(19): siRNA sense strand
aaguagaagacucagaauu

SEQ ID NO: 438320 - RNA, 19 nt, Homo sapiens
  misc_RNA (1)...(19): siRNA sense strand
ggaaagaacuuaacagaaa

SEQ ID NO: 438321 - RNA, 19 nt, Homo sapiens
  misc_RNA (1)...(19): siRNA sense strand
ggaaacacaucuucuaauu

SEQ ID NO: 438322 - RNA, 19 nt, Homo sapiens
  misc_RNA (1)...(19): siRNA sense strand
gaauagaaaucgaucaaga

SEQ ID NO: 438323 - RNA, 19 nt, Homo sapiens
  misc_RNA (1)...(19): siRNA sense strand
gccaaagacuucaaagaua

SEQ ID NO: 438324 - RNA, 19 nt, Homo sapiens
  misc_RNA (1)...(19): siRNA sense strand
gaagggagggcuauuauuu

SEQ ID NO: 438325 - RNA, 19 nt, Homo sapiens
  misc_RNA (1)...(19): siRNA sense strand
caacuacuguggaacauuu

SEQ ID NO: 438326 - RNA, 19 nt, Homo sapiens
  misc_RNA (1)...(19): siRNA sense strand
agaaagaggucaacuaaga

SEQ ID NO: 438327 - RNA, 19 nt, Homo sapiens
  misc_RNA (1)...(19): siRNA sense strand
ccaaagaaaucaagaaaca

SEQ ID NO: 438328 - RNA, 19 nt, Homo sapiens
  misc_RNA (1)...(19): siRNA sense strand
gaagaaggauuuaauagac

SEQ ID NO: 438329 - RNA, 19 nt, Homo sapiens
  misc_RNA (1)...(19): siRNA sense strand
gaaaugguauugacaucuu

SEQ ID NO: 438330 - RNA, 19 nt, Homo sapiens
  misc_RNA (1)...(19): siRNA sense strand
acagaaagcugaguaguaa

SEQ ID NO: 438331 - RNA, 19 nt, Homo sapiens
  misc_RNA (1)...(19): siRNA sense strand
ccaaagacuucaaagauau

SEQ ID NO: 438332 - RNA, 19 nt, Homo sapiens
  misc_RNA (1)...(19): siRNA sense strand
ggacagggauuuguauaug

SEQ ID NO: 438333 - RNA, 19 nt, Homo sapiens
  misc_RNA (1)...(19): siRNA sense strand
ugaaguggaucagauguua

SEQ ID NO: 438334 - RNA, 19 nt, Homo sapiens
  misc_RNA (1)...(19): siRNA sense strand
gauguuagauuuagguuuc

SEQ ID NO: 438335 - RNA, 19 nt, Homo sapiens
  misc_RNA (1)...(19): siRNA sense strand
uaacugaaauggccaugaa

SEQ ID NO: 438336 - RNA, 19 nt, Homo sapiens
  misc_RNA (1)...(19): siRNA sense strand
gaaaagaucuaccaaaugg

SEQ ID NO: 438337 - RNA, 19 nt, Homo sapiens
  misc_RNA (1)...(19): siRNA sense strand
gaucagauguuagauuuag

SEQ ID NO: 438338 - RNA, 19 nt, Homo sapiens
  misc_RNA (1)...(19): siRNA sense strand
gaaagaacuuaacagaaag

SEQ ID NO: 438339 - RNA, 19 nt, Homo sapiens
  misc_RNA (1)...(19): siRNA sense strand
ggaagucaaggcaccauua

SEQ ID NO: 438340 - RNA, 19 nt, Homo sapiens
  misc_RNA (1)...(19): siRNA sense strand
ggccaugaauccacacaua

SEQ ID NO: 438341 - RNA, 19 nt, Homo sapiens
  misc_RNA (1)...(19): siRNA sense strand
gguggaacaucauaucaaa

SEQ ID NO: 438342 - RNA, 19 nt, Homo sapiens
  misc_RNA (1)...(19): siRNA sense strand
caagaagaauguaacugaa

SEQ ID NO: 438343 - RNA, 19 nt, Homo sapiens
  misc_RNA (1)...(19): siRNA sense strand
gaugagaaaucagaaacaa

SEQ ID NO: 438344 - RNA, 19 nt, Homo sapiens
  misc_RNA (1)...(19): siRNA sense strand
agaaaucgaucaagaagug

SEQ ID NO: 438345 - RNA, 19 nt, Homo sapiens
  misc_RNA (1)...(19): siRNA sense strand
aaauauggguguuugcuuu

SEQ ID NO: 438346 - RNA, 19 nt, Homo sapiens
  misc_RNA (1)...(19): siRNA sense strand
gaaagacuccaaagaaauc

SEQ ID NO: 438347 - RNA, 19 nt, Homo sapiens
  misc_RNA (1)...(19): siRNA sense strand
ucucauaagucaagaagaa

SEQ ID NO: 438348 - RNA, 19 nt, Homo sapiens
  misc_RNA (1)...(19): siRNA sense strand
gaaaggaaauauggguguu

SEQ ID NO: 438349 - RNA, 19 nt, Homo sapiens
  misc_RNA (1)...(19): siRNA sense strand
ggaagucgcucaggaaguc

SEQ ID NO: 438350 - RNA, 19 nt, Homo sapiens
  misc_RNA (1)...(19): siRNA sense strand
uggaucagauguuagauuu

SEQ ID NO: 438351 - RNA, 19 nt, Homo sapiens
  misc_RNA (1)...(19): siRNA sense strand
ccacauuucuggugcauca

SEQ ID NO: 438352 - RNA, 19 nt, Homo sapiens
  misc_RNA (1)...(19): siRNA sense strand
cuauaaagcuucugaaagg

SEQ ID NO: 438353 - RNA, 19 nt, Homo sapiens
  misc_RNA (1)...(19): siRNA sense strand
ggacggacagggauuugua

SEQ ID NO: 438354 - RNA, 19 nt, Homo sapiens
  misc_RNA (1)...(19): siRNA sense strand
ccaagaagaauguaacuga

SEQ ID NO: 438355 - RNA, 19 nt, Homo sapiens
  misc_RNA (1)...(19): siRNA sense strand
gaaaucagaaacaagagaa

SEQ ID NO: 438356 - RNA, 19 nt, Homo sapiens
  misc_RNA (1)...(19): siRNA sense strand
gagauguccuucaagucua

SEQ ID NO: 438357 - RNA, 19 nt, Homo sapiens
  misc_RNA (1)...(19): siRNA sense strand
gauuggaucuuucuaaacu

SEQ ID NO: 438358 - RNA, 19 nt, Homo sapiens
  misc_RNA (1)...(19): siRNA sense strand
ggaacuggcaaaccaagua

SEQ ID NO: 438359 - RNA, 19 nt, Homo sapiens
  misc_RNA (1)...(19): siRNA sense strand
acauaucucuuuccuauuc

SEQ ID NO: 438360 - RNA, 19 nt, Homo sapiens
  misc_RNA (1)...(19): siRNA sense strand
gaaugugccuccugaaagg

SEQ ID NO: 438361 - RNA, 19 nt, Homo sapiens
  misc_RNA (1)...(19): siRNA sense strand
agacaauccucagacuuua

SEQ ID NO: 438362 - RNA, 19 nt, Homo sapiens
  misc_RNA (1)...(19): siRNA sense strand
caagggaacuggcaaacca

SEQ ID NO: 438363 - RNA, 19 nt, Homo sapiens
  misc_RNA (1)...(19): siRNA sense strand
gaaacacaucuucuaauuc

SEQ ID NO: 438364 - RNA, 19 nt, Homo sapiens
  misc_RNA (1)...(19): siRNA sense strand
gaagcuaaauggagacacu

SEQ ID NO: 438365 - RNA, 19 nt, Homo sapiens
  misc_RNA (1)...(19): siRNA sense strand
agagaaagaggucaacuaa

SEQ ID NO: 438366 - RNA, 19 nt, Homo sapiens
  misc_RNA (1)...(19): siRNA sense strand
uugaaagacuccaaagaaa

SEQ ID NO: 438367 - RNA, 19 nt, Homo sapiens
  misc_RNA (1)...(19): siRNA sense strand
ucagaugaauucuccaaau

SEQ ID NO: 438368 - RNA, 19 nt, Homo sapiens
  misc_RNA (1)...(19): siRNA sense strand
ggaaagccuagaggaaaua

SEQ ID NO: 438369 - RNA, 19 nt, Homo sapiens
  misc_RNA (1)...(19): siRNA sense strand
ggacauuccugaaguugac

SEQ ID NO: 438370 - RNA, 19 nt, Homo sapiens
  misc_RNA (1)...(19): siRNA sense strand
caaaccaaguagccaaaga

SEQ ID NO: 438371 - RNA, 19 nt, Homo sapiens
  misc_RNA (1)...(19): siRNA sense strand
caaauggagauauagauga

SEQ ID NO: 438372 - RNA, 19 nt, Homo sapiens
  misc_RNA (1)...(19): siRNA sense strand
aaacacaucuucuaauucc

SEQ ID NO: 438373 - RNA, 19 nt, Homo sapiens
  misc_RNA (1)...(19): siRNA sense strand
guaaugcagugucucagau

SEQ ID NO: 438374 - RNA, 19 nt, Homo sapiens
  misc_RNA (1)...(19): siRNA sense strand
ccgauuggaucuuucuaaa

SEQ ID NO: 438375 - RNA, 19 nt, Homo sapiens
  misc_RNA (1)...(19): siRNA sense strand
gaaagagaagcuaaaugga

SEQ ID NO: 438376 - RNA, 19 nt, Homo sapiens
  misc_RNA (1)...(19): siRNA sense strand
ugagaaaucagaaacaaga

SEQ ID NO: 438377 - RNA, 19 nt, Homo sapiens
  misc_RNA (1)...(19): siRNA sense strand
agagaaaggugcaguggau

SEQ ID NO: 438378 - RNA, 19 nt, Homo sapiens
  misc_RNA (1)...(19): siRNA sense strand
gaaagaggucaacuaagau

SEQ ID NO: 438379 - RNA, 19 nt, Homo sapiens
  misc_RNA (1)...(19): siRNA sense strand
ugaagagacuauaaagcuu

SEQ ID NO: 438380 - RNA, 19 nt, Homo sapiens
  misc_RNA (1)...(19): siRNA sense strand
cagaugaauucuccaaauc

SEQ ID NO: 438381 - RNA, 19 nt, Homo sapiens
  misc_RNA (1)...(19): siRNA sense strand
ugaaagagaagcuaaaugg

SEQ ID NO: 438382 - RNA, 19 nt, Homo sapiens
  misc_RNA (1)...(19): siRNA sense strand
gacagggauuuguauaugu

SEQ ID NO: 438383 - RNA, 19 nt, Homo sapiens
  misc_RNA (1)...(19): siRNA sense strand
ggagauguccuucaagucu

SEQ ID NO: 438384 - RNA, 19 nt, Homo sapiens
  misc_RNA (1)...(19): siRNA sense strand
cuccaaaucucauaaguca

SEQ ID NO: 438385 - RNA, 19 nt, Homo sapiens
  misc_RNA (1)...(19): siRNA sense strand
gacauguugugcuugauga

SEQ ID NO: 438386 - RNA, 19 nt, Homo sapiens
  misc_RNA (1)...(19): siRNA sense strand
gaugucagcugugcuugga

SEQ ID NO: 438387 - RNA, 19 nt, Homo sapiens
  misc_RNA (1)...(19): siRNA sense strand
aaagaggucaacuaagaua

SEQ ID NO: 438388 - RNA, 19 nt, Homo sapiens
  misc_RNA (1)...(19): siRNA sense strand
gaagucaaggcaccauuau

SEQ ID NO: 438389 - RNA, 19 nt, Homo sapiens
  misc_RNA (1)...(19): siRNA sense strand
gaggucaacuaagauaugu

SEQ ID NO: 438390 - RNA, 19 nt, Homo sapiens
  misc_RNA (1)...(19): siRNA sense strand
gaaguugaccuggugauuc

SEQ ID NO: 438391 - RNA, 19 nt, Homo sapiens
  misc_RNA (1)...(19): siRNA sense strand
gcacggacaggaacaggaa

SEQ ID NO: 438392 - RNA, 19 nt, Homo sapiens
  misc_RNA (1)...(19): siRNA sense strand
uaaacuagaggagaccuua

SEQ ID NO: 438393 - RNA, 19 nt, Homo sapiens
  misc_RNA (1)...(19): siRNA sense strand
cuuaacacgugaacagaaa

SEQ ID NO: 438394 - RNA, 19 nt, Homo sapiens
  misc_RNA (1)...(19): siRNA sense strand
ggaagucgacaagauggua

SEQ ID NO: 438395 - RNA, 19 nt, Homo sapiens
  misc_RNA (1)...(19): siRNA sense strand
ccagccaaauuaccugaaa

SEQ ID NO: 438396 - RNA, 19 nt, Homo sapiens
  misc_RNA (1)...(19): siRNA sense strand
gaaauauggguguuugcuu

SEQ ID NO: 438397 - RNA, 19 nt, Homo sapiens
  misc_RNA (1)...(19): siRNA sense strand
gcacagucacaaagagaaa

SEQ ID NO: 438398 - RNA, 19 nt, Homo sapiens
  misc_RNA (1)...(19): siRNA sense strand
cugaacaaguugaagauau

SEQ ID NO: 438399 - RNA, 19 nt, Homo sapiens
  misc_RNA (1)...(19): siRNA sense strand
cagcugugcuuggaaagaa

SEQ ID NO: 438400 - RNA, 19 nt, Homo sapiens
  misc_RNA (1)...(19): siRNA sense strand
caugaaauccagauaugaa

SEQ ID NO: 438401 - RNA, 19 nt, Homo sapiens
  misc_RNA (1)...(19): siRNA sense strand
uacaugaaauccagauaug

SEQ ID NO: 438402 - RNA, 19 nt, Homo sapiens
  misc_RNA (1)...(19): siRNA sense strand
gaagacaauccucagacuu

SEQ ID NO: 438403 - RNA, 19 nt, Homo sapiens
  misc_RNA (1)...(19): siRNA sense strand
cuacaaaacugauucugaa

SEQ ID NO: 438404 - RNA, 19 nt, Homo sapiens
  misc_RNA (1)...(19): siRNA sense strand
ucuaccaaauggagauaua

SEQ ID NO: 438405 - RNA, 19 nt, Homo sapiens
  misc_RNA (1)...(19): siRNA sense strand
ucucagaggccagcaguua

SEQ ID NO: 438406 - RNA, 19 nt, Homo sapiens
  misc_RNA (1)...(19): siRNA sense strand
gaugaauucuccaaaucuc

SEQ ID NO: 438407 - RNA, 19 nt, Homo sapiens
  misc_RNA (1)...(19): siRNA sense strand
caaggaagucgcucaggaa

SEQ ID NO: 438408 - RNA, 19 nt, Homo sapiens
  misc_RNA (1)...(19): siRNA sense strand
aaugcagugucucagauua

SEQ ID NO: 438409 - RNA, 19 nt, Homo sapiens
  misc_RNA (1)...(19): siRNA sense strand
ugaaagacuccaaagaaau

SEQ ID NO: 438410 - RNA, 19 nt, Homo sapiens
  misc_RNA (1)...(19): siRNA sense strand
gaugguagaagacgaagug

SEQ ID NO: 438411 - RNA, 19 nt, Homo sapiens
  misc_RNA (1)...(19): siRNA sense strand
ucgacaagaugguagaaga

SEQ ID NO: 438412 - RNA, 19 nt, Homo sapiens
  misc_RNA (1)...(19): siRNA sense strand
gcaugauuccgacuggaua

SEQ ID NO: 438413 - RNA, 19 nt, Homo sapiens
  misc_RNA (1)...(19): siRNA sense strand
acagggauuuguauauguu

SEQ ID NO: 438414 - RNA, 19 nt, Homo sapiens
  misc_RNA (1)...(19): siRNA sense strand
gaagaauguaacugaaaug

SEQ ID NO: 438415 - RNA, 19 nt, Homo sapiens
  misc_RNA (1)...(19): siRNA sense strand
aagacaauccucagacuuu

SEQ ID NO: 438416 - RNA, 19 nt, Homo sapiens
  misc_RNA (1)...(19): siRNA sense strand
agauuuagguuucgcugaa

SEQ ID NO: 438417 - RNA, 19 nt, Homo sapiens
  misc_RNA (1)...(19): siRNA sense strand
caacaagggaacuggcaaa

SEQ ID NO: 438418 - RNA, 19 nt, Homo sapiens
  misc_RNA (1)...(19): siRNA sense strand
uggagacacugaagaagga

SEQ ID NO: 438419 - RNA, 19 nt, Homo sapiens
  misc_RNA (1)...(19): siRNA sense strand
agacagagucgacaaggaa

SEQ ID NO: 438420 - RNA, 19 nt, Homo sapiens
  misc_RNA (1)...(19): siRNA sense strand
ggaaauaccagcccaggaa

SEQ ID NO: 438421 - RNA, 19 nt, Homo sapiens
  misc_RNA (1)...(19): siRNA sense strand
gcaggacaccgacauggaa

SEQ ID NO: 438422 - RNA, 19 nt, Homo sapiens
  misc_RNA (1)...(19): siRNA sense strand
caccaaggguccaguuuca

SEQ ID NO: 438423 - RNA, 19 nt, Homo sapiens
  misc_RNA (1)...(19): siRNA sense strand
ggguccaguuucagucuuu

SEQ ID NO: 438424 - RNA, 19 nt, Homo sapiens
  misc_RNA (1)...(19): siRNA sense strand
ccaaggguccaguuucagu

SEQ ID NO: 438425 - RNA, 19 nt, Homo sapiens
  misc_RNA (1)...(19): siRNA sense strand
gaagcagcagggucaccaa

SEQ ID NO: 438426 - RNA, 19 nt, Homo sapiens
  misc_RNA (1)...(19): siRNA sense strand
ucaccaaggguccaguuuc

SEQ ID NO: 438427 - RNA, 19 nt, Homo sapiens
  misc_RNA (1)...(19): siRNA sense strand
gguccaguuucagucuuug

SEQ ID NO: 438428 - RNA, 19 nt, Homo sapiens
  misc_RNA (1)...(19): siRNA sense strand
ggaaauaccagcccaggaa

SEQ ID NO: 438429 - RNA, 19 nt, Homo sapiens
  misc_RNA (1)...(19): siRNA sense strand
gcaggacaccgacauggaa

SEQ ID NO: 438430 - RNA, 19 nt, Homo sapiens
  misc_RNA (1)...(19): siRNA sense strand
caccaaggguccaguuuca

SEQ ID NO: 438431 - RNA, 19 nt, Homo sapiens
  misc_RNA (1)...(19): siRNA sense strand
ggguccaguuucagucuuu

SEQ ID NO: 438432 - RNA, 19 nt, Homo sapiens
  misc_RNA (1)...(19): siRNA sense strand
ccaaggguccaguuucagu

SEQ ID NO: 438433 - RNA, 19 nt, Homo sapiens
  misc_RNA (1)...(19): siRNA sense strand
gaagcagcagggucaccaa

SEQ ID NO: 438434 - RNA, 19 nt, Homo sapiens
  misc_RNA (1)...(19): siRNA sense strand
ucaccaaggguccaguuuc

SEQ ID NO: 438435 - RNA, 19 nt, Homo sapiens
  misc_RNA (1)...(19): siRNA sense strand
gguccaguuucagucuuug

SEQ ID NO: 438436 - RNA, 19 nt, Homo sapiens
  misc_RNA (1)...(19): siRNA sense strand
gcgacgaacugagcuguaa

SEQ ID NO: 438437 - RNA, 19 nt, Homo sapiens
  misc_RNA (1)...(19): siRNA sense strand
gaaccagcccuuugucuuc

SEQ ID NO: 438438 - RNA, 19 nt, Homo sapiens
  misc_RNA (1)...(19): siRNA sense strand
gcacaggccaggucaucaa

SEQ ID NO: 438439 - RNA, 19 nt, Homo sapiens
  misc_RNA (1)...(19): siRNA sense strand
gaagaugggacagaguuug

SEQ ID NO: 438440 - RNA, 19 nt, Homo sapiens
  misc_RNA (1)...(19): siRNA sense strand
ggaagaugggacagaguuu

SEQ ID NO: 438441 - RNA, 19 nt, Homo sapiens
  misc_RNA (1)...(19): siRNA sense strand
gugcaacccugguguucga

SEQ ID NO: 438442 - RNA, 19 nt, Homo sapiens
  misc_RNA (1)...(19): siRNA sense strand
ggugaucccauccgagcua

SEQ ID NO: 438443 - RNA, 19 nt, Homo sapiens
  misc_RNA (1)...(19): siRNA sense strand
cauccgagcuaggguaugg

SEQ ID NO: 438444 - RNA, 19 nt, Homo sapiens
  misc_RNA (1)...(19): siRNA sense strand
aaauagagcgacgaacuga

SEQ ID NO: 438445 - RNA, 19 nt, Homo sapiens
  misc_RNA (1)...(19): siRNA sense strand
aagaugggacagaguuuga

SEQ ID NO: 438446 - RNA, 19 nt, Homo sapiens
  misc_RNA (1)...(19): siRNA sense strand
uggaagaugggacagaguu

SEQ ID NO: 438447 - RNA, 19 nt, Homo sapiens
  misc_RNA (1)...(19): siRNA sense strand
agaaccagcccuuugucuu

SEQ ID NO: 438448 - RNA, 19 nt, Homo sapiens
  misc_RNA (1)...(19): siRNA sense strand
gcaaaaggaagcugcagau

SEQ ID NO: 438449 - RNA, 19 nt, Homo sapiens
  misc_RNA (1)...(19): siRNA sense strand
gcgacgaacugagcuguaa

SEQ ID NO: 438450 - RNA, 19 nt, Homo sapiens
  misc_RNA (1)...(19): siRNA sense strand
gaaccagcccuuugucuuc

SEQ ID NO: 438451 - RNA, 19 nt, Homo sapiens
  misc_RNA (1)...(19): siRNA sense strand
gcacaggccaggucaucaa

SEQ ID NO: 438452 - RNA, 19 nt, Homo sapiens
  misc_RNA (1)...(19): siRNA sense strand
gaagaugggacagaguuug

SEQ ID NO: 438453 - RNA, 19 nt, Homo sapiens
  misc_RNA (1)...(19): siRNA sense strand
ggaagaugggacagaguuu

SEQ ID NO: 438454 - RNA, 19 nt, Homo sapiens
  misc_RNA (1)...(19): siRNA sense strand
gugcaacccugguguucga

SEQ ID NO: 438455 - RNA, 19 nt, Homo sapiens
  misc_RNA (1)...(19): siRNA sense strand
ggugaucccauccgagcua

SEQ ID NO: 438456 - RNA, 19 nt, Homo sapiens
  misc_RNA (1)...(19): siRNA sense strand
cauccgagcuaggguaugg

SEQ ID NO: 438457 - RNA, 19 nt, Homo sapiens
  misc_RNA (1)...(19): siRNA sense strand
aaauagagcgacgaacuga

SEQ ID NO: 438458 - RNA, 19 nt, Homo sapiens
  misc_RNA (1)...(19): siRNA sense strand
aagaugggacagaguuuga

SEQ ID NO: 438459 - RNA, 19 nt, Homo sapiens
  misc_RNA (1)...(19): siRNA sense strand
uggaagaugggacagaguu

SEQ ID NO: 438460 - RNA, 19 nt, Homo sapiens
  misc_RNA (1)...(19): siRNA sense strand
agaaccagcccuuugucuu

SEQ ID NO: 438461 - RNA, 19 nt, Homo sapiens
  misc_RNA (1)...(19): siRNA sense strand
gcaaaaggaagcugcagau

SEQ ID NO: 438462 - RNA, 19 nt, Homo sapiens
  misc_RNA (1)...(19): siRNA sense strand
aggaagagcuguucaucaa

SEQ ID NO: 438463 - RNA, 19 nt, Homo sapiens
  misc_RNA (1)...(19): siRNA sense strand
gcaaggaggaggaggagaa

SEQ ID NO: 438464 - RNA, 19 nt, Homo sapiens
  misc_RNA (1)...(19): siRNA sense strand
caacuuguaugugugcauu

SEQ ID NO: 438465 - RNA, 19 nt, Homo sapiens
  misc_RNA (1)...(19): siRNA sense strand
cagcagaucuuggacuuca

SEQ ID NO: 438466 - RNA, 19 nt, Homo sapiens
  misc_RNA (1)...(19): siRNA sense strand
caacagugccucuuauucu

SEQ ID NO: 438467 - RNA, 19 nt, Homo sapiens
  misc_RNA (1)...(19): siRNA sense strand
caacaucuguggcaaaaug

SEQ ID NO: 438468 - RNA, 19 nt, Homo sapiens
  misc_RNA (1)...(19): siRNA sense strand
gcgagaagaccuacaagga

SEQ ID NO: 438469 - RNA, 19 nt, Homo sapiens
  misc_RNA (1)...(19): siRNA sense strand
ccaagggcuuccuguguga

SEQ ID NO: 438470 - RNA, 19 nt, Homo sapiens
  misc_RNA (1)...(19): siRNA sense strand
caaaggcucagacgaugaa

SEQ ID NO: 438471 - RNA, 19 nt, Homo sapiens
  misc_RNA (1)...(19): siRNA sense strand
cggcaaggaugcaagugaa

SEQ ID NO: 438472 - RNA, 19 nt, Homo sapiens
  misc_RNA (1)...(19): siRNA sense strand
gaucuuggacuucaucuac

SEQ ID NO: 438473 - RNA, 19 nt, Homo sapiens
  misc_RNA (1)...(19): siRNA sense strand
ucaucaaccuggacacaga

SEQ ID NO: 438474 - RNA, 19 nt, Homo sapiens
  misc_RNA (1)...(19): siRNA sense strand
ggaugcaagugaagacagu

SEQ ID NO: 438475 - RNA, 19 nt, Homo sapiens
  misc_RNA (1)...(19): siRNA sense strand
cucagacgaugaacucuuu

SEQ ID NO: 438476 - RNA, 19 nt, Homo sapiens
  misc_RNA (1)...(19): siRNA sense strand
gcacuccacucggaagaag

SEQ ID NO: 438477 - RNA, 19 nt, Homo sapiens
  misc_RNA (1)...(19): siRNA sense strand
gacgaugaacucuuucuug

SEQ ID NO: 438478 - RNA, 19 nt, Homo sapiens
  misc_RNA (1)...(19): siRNA sense strand
gcuacgagacgguguccua

SEQ ID NO: 438479 - RNA, 19 nt, Homo sapiens
  misc_RNA (1)...(19): siRNA sense strand
gaggaagagcuguucauca

SEQ ID NO: 438480 - RNA, 19 nt, Homo sapiens
  misc_RNA (1)...(19): siRNA sense strand
uaaccaggauagcgugcaa

SEQ ID NO: 438481 - RNA, 19 nt, Homo sapiens
  misc_RNA (1)...(19): siRNA sense strand
gaccaagggcuuccugugu

SEQ ID NO: 438482 - RNA, 19 nt, Homo sapiens
  misc_RNA (1)...(19): siRNA sense strand
ccacaguguuccagcagau

SEQ ID NO: 438483 - RNA, 19 nt, Homo sapiens
  misc_RNA (1)...(19): siRNA sense strand
gcaaggaugcaagugaaga

SEQ ID NO: 438484 - RNA, 19 nt, Homo sapiens
  misc_RNA (1)...(19): siRNA sense strand
gaacggcaaggaugcaagu

SEQ ID NO: 438485 - RNA, 19 nt, Homo sapiens
  misc_RNA (1)...(19): siRNA sense strand
ggucagcuccacaguguuc

SEQ ID NO: 438486 - RNA, 19 nt, Homo sapiens
  misc_RNA (1)...(19): siRNA sense strand
ccagcagcaucuauuucaa

SEQ ID NO: 438487 - RNA, 19 nt, Homo sapiens
  misc_RNA (1)...(19): siRNA sense strand
gccagcagcaucuauuuca

SEQ ID NO: 438488 - RNA, 19 nt, Homo sapiens
  misc_RNA (1)...(19): siRNA sense strand
ccaacagugccucuuauuc

SEQ ID NO: 438489 - RNA, 19 nt, Homo sapiens
  misc_RNA (1)...(19): siRNA sense strand
gcacgacaaccucaucaac

SEQ ID NO: 438490 - RNA, 19 nt, Homo sapiens
  misc_RNA (1)...(19): siRNA sense strand
caaccuggacacagacaug

SEQ ID NO: 438491 - RNA, 19 nt, Homo sapiens
  misc_RNA (1)...(19): siRNA sense strand
ggaggaagagcuguucauc

SEQ ID NO: 438492 - RNA, 19 nt, Homo sapiens
  misc_RNA (1)...(19): siRNA sense strand
ccaaaggcucagacgauga

SEQ ID NO: 438493 - RNA, 19 nt, Homo sapiens
  misc_RNA (1)...(19): siRNA sense strand
gcucagacgaugaacucuu

SEQ ID NO: 438494 - RNA, 19 nt, Homo sapiens
  misc_RNA (1)...(19): siRNA sense strand
cagcagcgcaaccucauca

SEQ ID NO: 438495 - RNA, 19 nt, Homo sapiens
  misc_RNA (1)...(19): siRNA sense strand
gccaacagugccucuuauu

SEQ ID NO: 438496 - RNA, 19 nt, Homo sapiens
  misc_RNA (1)...(19): siRNA sense strand
gcagaucuuggacuucauc

SEQ ID NO: 438497 - RNA, 19 nt, Homo sapiens
  misc_RNA (1)...(19): siRNA sense strand
ggaggagaacggcaaggau

SEQ ID NO: 438498 - RNA, 19 nt, Homo sapiens
  misc_RNA (1)...(19): siRNA sense strand
gcgcuucacccgucaguac

SEQ ID NO: 438499 - RNA, 19 nt, Homo sapiens
  misc_RNA (1)...(19): siRNA sense strand
cauccaagcucgguaucag

SEQ ID NO: 438500 - RNA, 19 nt, Homo sapiens
  misc_RNA (1)...(19): siRNA sense strand
ggaagagcuguucaucaag

SEQ ID NO: 438501 - RNA, 19 nt, Homo sapiens
  misc_RNA (1)...(19): siRNA sense strand
ccagcgcccacuacaugua

SEQ ID NO: 438502 - RNA, 19 nt, Homo sapiens
  misc_RNA (1)...(19): siRNA sense strand
ugccaacagugccucuuau

SEQ ID NO: 438503 - RNA, 19 nt, Homo sapiens
  misc_RNA (1)...(19): siRNA sense strand
ccaccucacucccgaugac

SEQ ID NO: 438504 - RNA, 19 nt, Homo sapiens
  misc_RNA (1)...(19): siRNA sense strand
aacagugccucuuauucug

SEQ ID NO: 438505 - RNA, 19 nt, Homo sapiens
  misc_RNA (1)...(19): siRNA sense strand
cugaugagcccauggaucu

SEQ ID NO: 438506 - RNA, 19 nt, Homo sapiens
  misc_RNA (1)...(19): siRNA sense strand
agacucacacggaggaaga

SEQ ID NO: 438507 - RNA, 19 nt, Homo sapiens
  misc_RNA (1)...(19): siRNA sense strand
gaagacgcacuggcugaca

SEQ ID NO: 438508 - RNA, 19 nt, Homo sapiens
  misc_RNA (1)...(19): siRNA sense strand
gaguguggcaugcgcuuca

SEQ ID NO: 438509 - RNA, 19 nt, Homo sapiens
  misc_RNA (1)...(19): siRNA sense strand
auggucagcuccacagugu

SEQ ID NO: 438510 - RNA, 19 nt, Homo sapiens
  misc_RNA (1)...(19): siRNA sense strand
gaagagagcuguuaggaaa

SEQ ID NO: 438511 - RNA, 19 nt, Homo sapiens
  misc_RNA (1)...(19): siRNA sense strand
gcaaugaaguggccaaauu

SEQ ID NO: 438512 - RNA, 19 nt, Homo sapiens
  misc_RNA (1)...(19): siRNA sense strand
gaaagucccuggauucaga

SEQ ID NO: 438513 - RNA, 19 nt, Homo sapiens
  misc_RNA (1)...(19): siRNA sense strand
gcucauggcucucaaagaa

SEQ ID NO: 438514 - RNA, 19 nt, Homo sapiens
  misc_RNA (1)...(19): siRNA sense strand
gcccagaaaugguugaaua

SEQ ID NO: 438515 - RNA, 19 nt, Homo sapiens
  misc_RNA (1)...(19): siRNA sense strand
gcaacuagcuguucagucu

SEQ ID NO: 438516 - RNA, 19 nt, Homo sapiens
  misc_RNA (1)...(19): siRNA sense strand
ggagagaugccuuauguuu

SEQ ID NO: 438517 - RNA, 19 nt, Homo sapiens
  misc_RNA (1)...(19): siRNA sense strand
ggaccugagucuucaauga

SEQ ID NO: 438518 - RNA, 19 nt, Homo sapiens
  misc_RNA (1)...(19): siRNA sense strand
gguuuaagaucuccuauga

SEQ ID NO: 438519 - RNA, 19 nt, Homo sapiens
  misc_RNA (1)...(19): siRNA sense strand
uagcccagcucacaaauuu

SEQ ID NO: 438520 - RNA, 19 nt, Homo sapiens
  misc_RNA (1)...(19): siRNA sense strand
gaagcgaccugguguuaca

SEQ ID NO: 438521 - RNA, 19 nt, Homo sapiens
  misc_RNA (1)...(19): siRNA sense strand
gaaaauauguccacgaugu

SEQ ID NO: 438522 - RNA, 19 nt, Homo sapiens
  misc_RNA (1)...(19): siRNA sense strand
cuaaucauuucccuacuua

SEQ ID NO: 438523 - RNA, 19 nt, Homo sapiens
  misc_RNA (1)...(19): siRNA sense strand
gaagagaaauguuuaucac

SEQ ID NO: 438524 - RNA, 19 nt, Homo sapiens
  misc_RNA (1)...(19): siRNA sense strand
gggcaaauaucugagcuuu

SEQ ID NO: 438525 - RNA, 19 nt, Homo sapiens
  misc_RNA (1)...(19): siRNA sense strand
ccagguacccaguuuguua

SEQ ID NO: 438526 - RNA, 19 nt, Homo sapiens
  misc_RNA (1)...(19): siRNA sense strand
caaguguucucccagauga

SEQ ID NO: 438527 - RNA, 19 nt, Homo sapiens
  misc_RNA (1)...(19): siRNA sense strand
gcugaacacuuccgaaauc

SEQ ID NO: 438528 - RNA, 19 nt, Homo sapiens
  misc_RNA (1)...(19): siRNA sense strand
caauaucgcuccucacucu

SEQ ID NO: 438529 - RNA, 19 nt, Homo sapiens
  misc_RNA (1)...(19): siRNA sense strand
gaccggaacgugaagaaua

SEQ ID NO: 438530 - RNA, 19 nt, Homo sapiens
  misc_RNA (1)...(19): siRNA sense strand
caucugcucugcccuuauu

SEQ ID NO: 438531 - RNA, 19 nt, Homo sapiens
  misc_RNA (1)...(19): siRNA sense strand
ccgaaugucugaauguuga

SEQ ID NO: 438532 - RNA, 19 nt, Homo sapiens
  misc_RNA (1)...(19): siRNA sense strand
ggucugggcacaaugguua

SEQ ID NO: 438533 - RNA, 19 nt, Homo sapiens
  misc_RNA (1)...(19): siRNA sense strand
cagcaaggccaaacgguua

SEQ ID NO: 438534 - RNA, 19 nt, Homo sapiens
  misc_RNA (1)...(19): siRNA sense strand
ccaaucaugugacuaguuc

SEQ ID NO: 438535 - RNA, 19 nt, Homo sapiens
  misc_RNA (1)...(19): siRNA sense strand
gcuccucacucuacucuga

SEQ ID NO: 438536 - RNA, 19 nt, Homo sapiens
  misc_RNA (1)...(19): siRNA sense strand
gcagaacggugagguagau

SEQ ID NO: 438537 - RNA, 19 nt, Homo sapiens
  misc_RNA (1)...(19): siRNA sense strand
caaaguaccagaaccaaau

SEQ ID NO: 438538 - RNA, 19 nt, Homo sapiens
  misc_RNA (1)...(19): siRNA sense strand
ugagaggucacauguguua

SEQ ID NO: 438539 - RNA, 19 nt, Homo sapiens
  misc_RNA (1)...(19): siRNA sense strand
caaugaaagugaccucuuc

SEQ ID NO: 438540 - RNA, 19 nt, Homo sapiens
  misc_RNA (1)...(19): siRNA sense strand
gaaucuagagggcaaauau

SEQ ID NO: 438541 - RNA, 19 nt, Homo sapiens
  misc_RNA (1)...(19): siRNA sense strand
ggucacauguguuacuguu

SEQ ID NO: 438542 - RNA, 19 nt, Homo sapiens
  misc_RNA (1)...(19): siRNA sense strand
aaaggaaagucccuggauu

SEQ ID NO: 438543 - RNA, 19 nt, Homo sapiens
  misc_RNA (1)...(19): siRNA sense strand
ugaggacucuguaguugaa

SEQ ID NO: 438544 - RNA, 19 nt, Homo sapiens
  misc_RNA (1)...(19): siRNA sense strand
ucacaaauuucccuaaggu

SEQ ID NO: 438545 - RNA, 19 nt, Homo sapiens
  misc_RNA (1)...(19): siRNA sense strand
ccaaacgguuagaccaauu

SEQ ID NO: 438546 - RNA, 19 nt, Homo sapiens
  misc_RNA (1)...(19): siRNA sense strand
uaaaugaggagaccuuguu

SEQ ID NO: 438547 - RNA, 19 nt, Homo sapiens
  misc_RNA (1)...(19): siRNA sense strand
gagcagcugucugugaaga

SEQ ID NO: 438548 - RNA, 19 nt, Homo sapiens
  misc_RNA (1)...(19): siRNA sense strand
gagagaugccuuauguuug

SEQ ID NO: 438549 - RNA, 19 nt, Homo sapiens
  misc_RNA (1)...(19): siRNA sense strand
caaacgguuagaccaauua

SEQ ID NO: 438550 - RNA, 19 nt, Homo sapiens
  misc_RNA (1)...(19): siRNA sense strand
gaaaggaaagucccuggau

SEQ ID NO: 438551 - RNA, 19 nt, Homo sapiens
  misc_RNA (1)...(19): siRNA sense strand
acaggcagcugaacacuuc

SEQ ID NO: 438552 - RNA, 19 nt, Homo sapiens
  misc_RNA (1)...(19): siRNA sense strand
ccaagaaccugagcuagca

SEQ ID NO: 438553 - RNA, 19 nt, Homo sapiens
  misc_RNA (1)...(19): siRNA sense strand
ggaagagccccaaguauuu

SEQ ID NO: 438554 - RNA, 19 nt, Homo sapiens
  misc_RNA (1)...(19): siRNA sense strand
gaccacgaaucccaagcua

SEQ ID NO: 438555 - RNA, 19 nt, Homo sapiens
  misc_RNA (1)...(19): siRNA sense strand
aauaggacguucuuuggaa

SEQ ID NO: 438556 - RNA, 19 nt, Homo sapiens
  misc_RNA (1)...(19): siRNA sense strand
ucauaagccuggagagaug

SEQ ID NO: 438557 - RNA, 19 nt, Homo sapiens
  misc_RNA (1)...(19): siRNA sense strand
caaaguagcccagcucaca

SEQ ID NO: 438558 - RNA, 19 nt, Homo sapiens
  misc_RNA (1)...(19): siRNA sense strand
guccagaccaaacucauua

SEQ ID NO: 438559 - RNA, 19 nt, Homo sapiens
  misc_RNA (1)...(19): siRNA sense strand
ugaauacccuuaacaccau

SEQ ID NO: 438560 - RNA, 19 nt, Homo sapiens
  misc_RNA (1)...(19): siRNA sense strand
ccaaccacaugaucaacaa

SEQ ID NO: 438561 - RNA, 19 nt, Homo sapiens
  misc_RNA (1)...(19): siRNA sense strand
ucauuucccuacuuacgua

SEQ ID NO: 438562 - RNA, 19 nt, Homo sapiens
  misc_RNA (1)...(19): siRNA sense strand
agacuucccuaaucauuuc

SEQ ID NO: 438563 - RNA, 19 nt, Homo sapiens
  misc_RNA (1)...(19): siRNA sense strand
cuggagagaugccuuaugu

SEQ ID NO: 438564 - RNA, 19 nt, Homo sapiens
  misc_RNA (1)...(19): siRNA sense strand
aaugcucaauuucguguua

SEQ ID NO: 438565 - RNA, 19 nt, Homo sapiens
  misc_RNA (1)...(19): siRNA sense strand
uuuaagaucuccuaugagu

SEQ ID NO: 438566 - RNA, 19 nt, Homo sapiens
  misc_RNA (1)...(19): siRNA sense strand
guuuaucacugcaacaaau

SEQ ID NO: 438567 - RNA, 19 nt, Homo sapiens
  misc_RNA (1)...(19): siRNA sense strand
ugagguagauguccauuuu

SEQ ID NO: 438568 - RNA, 19 nt, Homo sapiens
  misc_RNA (1)...(19): siRNA sense strand
gugaagcgaccugguguua

SEQ ID NO: 438569 - RNA, 19 nt, Homo sapiens
  misc_RNA (1)...(19): siRNA sense strand
guaguacuguuugcucuau

SEQ ID NO: 438570 - RNA, 19 nt, Homo sapiens
  misc_RNA (1)...(19): siRNA sense strand
ccgcugaccuccucaaugg

SEQ ID NO: 438571 - RNA, 19 nt, Homo sapiens
  misc_RNA (1)...(19): siRNA sense strand
gaaugggcguuugaaagug

SEQ ID NO: 438572 - RNA, 19 nt, Homo sapiens
  misc_RNA (1)...(19): siRNA sense strand
gcucacaaauuucccuaag

SEQ ID NO: 438573 - RNA, 19 nt, Homo sapiens
  misc_RNA (1)...(19): siRNA sense strand
ggauugugcugaacguaca

SEQ ID NO: 438574 - RNA, 19 nt, Homo sapiens
  misc_RNA (1)...(19): siRNA sense strand
acucuguaguugaagauua

SEQ ID NO: 438575 - RNA, 19 nt, Homo sapiens
  misc_RNA (1)...(19): siRNA sense strand
gaagagaaacuggcugagu

SEQ ID NO: 438576 - RNA, 19 nt, Homo sapiens
  misc_RNA (1)...(19): siRNA sense strand
ccacucacccgcaggcuuu

SEQ ID NO: 438577 - RNA, 19 nt, Homo sapiens
  misc_RNA (1)...(19): siRNA sense strand
ggaacgugaagaauaugua

SEQ ID NO: 438578 - RNA, 19 nt, Homo sapiens
  misc_RNA (1)...(19): siRNA sense strand
ggacaaaauugaacacaag

SEQ ID NO: 438579 - RNA, 19 nt, Homo sapiens
  misc_RNA (1)...(19): siRNA sense strand
acaccgaccuguucaugga

SEQ ID NO: 438580 - RNA, 19 nt, Homo sapiens
  misc_RNA (1)...(19): siRNA sense strand
caccagaagagaaauguuu

SEQ ID NO: 438581 - RNA, 19 nt, Homo sapiens
  misc_RNA (1)...(19): siRNA sense strand
gcucuaugcugcaauacag

SEQ ID NO: 438582 - RNA, 19 nt, Homo sapiens
  misc_RNA (1)...(19): siRNA sense strand
gcagaaugccaaucaugug

SEQ ID NO: 438583 - RNA, 19 nt, Homo sapiens
  misc_RNA (1)...(19): siRNA sense strand
uaugaaacaccacguagaa

SEQ ID NO: 438584 - RNA, 19 nt, Homo sapiens
  misc_RNA (1)...(19): siRNA sense strand
ccuaaucauuucccuacuu

SEQ ID NO: 438585 - RNA, 19 nt, Homo sapiens
  misc_RNA (1)...(19): siRNA sense strand
gccguuggcuucgacguuu

SEQ ID NO: 438586 - RNA, 19 nt, Homo sapiens
  misc_RNA (1)...(19): siRNA sense strand
acgauguaaugcucaauuu

SEQ ID NO: 438587 - RNA, 19 nt, Homo sapiens
  misc_RNA (1)...(19): siRNA sense strand
ccacagcuggcaauccuuu

SEQ ID NO: 438588 - RNA, 19 nt, Homo sapiens
  misc_RNA (1)...(19): siRNA sense strand
ucaccagccucaacugcaa

SEQ ID NO: 438589 - RNA, 19 nt, Homo sapiens
  misc_RNA (1)...(19): siRNA sense strand
guuccuguauccucuaaug

SEQ ID NO: 438590 - RNA, 19 nt, Homo sapiens
  misc_RNA (1)...(19): siRNA sense strand
ugaaugggcguuugaaagu

SEQ ID NO: 438591 - RNA, 19 nt, Homo sapiens
  misc_RNA (1)...(19): siRNA sense strand
ugagguagauggucacacu

SEQ ID NO: 438592 - RNA, 19 nt, Homo sapiens
  misc_RNA (1)...(19): siRNA sense strand
ccaggaugguggacggaaa

SEQ ID NO: 438593 - RNA, 19 nt, Homo sapiens
  misc_RNA (1)...(19): siRNA sense strand
ccagaaggccaccaaaaua

SEQ ID NO: 438594 - RNA, 19 nt, Homo sapiens
  misc_RNA (1)...(19): siRNA sense strand
cagcugaacacuuccgaaa

SEQ ID NO: 438595 - RNA, 19 nt, Homo sapiens
  misc_RNA (1)...(19): siRNA sense strand
ggagccgaaugucugaaug

SEQ ID NO: 438596 - RNA, 19 nt, Homo sapiens
  misc_RNA (1)...(19): siRNA sense strand
caaagcugccacugugaaa

SEQ ID NO: 438597 - RNA, 19 nt, Homo sapiens
  misc_RNA (1)...(19): siRNA sense strand
cauaaaaccuuccguaaac

SEQ ID NO: 438598 - RNA, 19 nt, Homo sapiens
  misc_RNA (1)...(19): siRNA sense strand
agagaugccuuauguuugc

SEQ ID NO: 438599 - RNA, 19 nt, Homo sapiens
  misc_RNA (1)...(19): siRNA sense strand
caaacucauuaugcuugua

SEQ ID NO: 438600 - RNA, 19 nt, Homo sapiens
  misc_RNA (1)...(19): siRNA sense strand
ucaauuucguguuacugaa

SEQ ID NO: 438601 - RNA, 19 nt, Homo sapiens
  misc_RNA (1)...(19): siRNA sense strand
cagcggaccugagucuuca

SEQ ID NO: 438602 - RNA, 19 nt, Homo sapiens
  misc_RNA (1)...(19): siRNA sense strand
ggacaccgaccuguucaug

SEQ ID NO: 438603 - RNA, 19 nt, Homo sapiens
  misc_RNA (1)...(19): siRNA sense strand
uuugagaggucacaugugu

SEQ ID NO: 438604 - RNA, 19 nt, Homo sapiens
  misc_RNA (1)...(19): siRNA sense strand
ccucacaaccaauauuuau

SEQ ID NO: 438605 - RNA, 19 nt, Homo sapiens
  misc_RNA (1)...(19): siRNA sense strand
ccaaacucauuaugcuugu

SEQ ID NO: 438606 - RNA, 19 nt, Homo sapiens
  misc_RNA (1)...(19): siRNA sense strand
cuagagggcaaauaucuga

SEQ ID NO: 438607 - RNA, 19 nt, Homo sapiens
  misc_RNA (1)...(19): siRNA sense strand
gaacgugaagaauauguac

SEQ ID NO: 438608 - RNA, 19 nt, Homo sapiens
  misc_RNA (1)...(19): siRNA sense strand
guaccuuuguuaccucugu

SEQ ID NO: 438609 - RNA, 19 nt, Homo sapiens
  misc_RNA (1)...(19): siRNA sense strand
cagaaugccaaucauguga

SEQ ID NO: 438610 - RNA, 19 nt, Homo sapiens
  misc_RNA (1)...(19): siRNA sense strand
gaagagagcuguuaggaaa

SEQ ID NO: 438611 - RNA, 19 nt, Homo sapiens
  misc_RNA (1)...(19): siRNA sense strand
gcaaugaaguggccaaauu

SEQ ID NO: 438612 - RNA, 19 nt, Homo sapiens
  misc_RNA (1)...(19): siRNA sense strand
gaaagucccuggauucaga

SEQ ID NO: 438613 - RNA, 19 nt, Homo sapiens
  misc_RNA (1)...(19): siRNA sense strand
gcucauggcucucaaagaa

SEQ ID NO: 438614 - RNA, 19 nt, Homo sapiens
  misc_RNA (1)...(19): siRNA sense strand
gcccagaaaugguugaaua

SEQ ID NO: 438615 - RNA, 19 nt, Homo sapiens
  misc_RNA (1)...(19): siRNA sense strand
gcaacuagcuguucagucu

SEQ ID NO: 438616 - RNA, 19 nt, Homo sapiens
  misc_RNA (1)...(19): siRNA sense strand
ggagagaugccuuauguuu

SEQ ID NO: 438617 - RNA, 19 nt, Homo sapiens
  misc_RNA (1)...(19): siRNA sense strand
ggaccugagucuucaauga

SEQ ID NO: 438618 - RNA, 19 nt, Homo sapiens
  misc_RNA (1)...(19): siRNA sense strand
gguuuaagaucuccuauga

SEQ ID NO: 438619 - RNA, 19 nt, Homo sapiens
  misc_RNA (1)...(19): siRNA sense strand
uagcccagcucacaaauuu

SEQ ID NO: 438620 - RNA, 19 nt, Homo sapiens
  misc_RNA (1)...(19): siRNA sense strand
gaagcgaccugguguuaca

SEQ ID NO: 438621 - RNA, 19 nt, Homo sapiens
  misc_RNA (1)...(19): siRNA sense strand
gaaaauauguccacgaugu

SEQ ID NO: 438622 - RNA, 19 nt, Homo sapiens
  misc_RNA (1)...(19): siRNA sense strand
cuaaucauuucccuacuua

SEQ ID NO: 438623 - RNA, 19 nt, Homo sapiens
  misc_RNA (1)...(19): siRNA sense strand
gaagagaaauguuuaucac

SEQ ID NO: 438624 - RNA, 19 nt, Homo sapiens
  misc_RNA (1)...(19): siRNA sense strand
gggcaaauaucugagcuuu

SEQ ID NO: 438625 - RNA, 19 nt, Homo sapiens
  misc_RNA (1)...(19): siRNA sense strand
ccagguacccaguuuguua

SEQ ID NO: 438626 - RNA, 19 nt, Homo sapiens
  misc_RNA (1)...(19): siRNA sense strand
caaguguucucccagauga

SEQ ID NO: 438627 - RNA, 19 nt, Homo sapiens
  misc_RNA (1)...(19): siRNA sense strand
gcugaacacuuccgaaauc

SEQ ID NO: 438628 - RNA, 19 nt, Homo sapiens
  misc_RNA (1)...(19): siRNA sense strand
caauaucgcuccucacucu

SEQ ID NO: 438629 - RNA, 19 nt, Homo sapiens
  misc_RNA (1)...(19): siRNA sense strand
gaccggaacgugaagaaua

SEQ ID NO: 438630 - RNA, 19 nt, Homo sapiens
  misc_RNA (1)...(19): siRNA sense strand
caucugcucugcccuuauu

SEQ ID NO: 438631 - RNA, 19 nt, Homo sapiens
  misc_RNA (1)...(19): siRNA sense strand
ccgaaugucugaauguuga

SEQ ID NO: 438632 - RNA, 19 nt, Homo sapiens
  misc_RNA (1)...(19): siRNA sense strand
ggucugggcacaaugguua

SEQ ID NO: 438633 - RNA, 19 nt, Homo sapiens
  misc_RNA (1)...(19): siRNA sense strand
cagcaaggccaaacgguua

SEQ ID NO: 438634 - RNA, 19 nt, Homo sapiens
  misc_RNA (1)...(19): siRNA sense strand
ccaaucaugugacuaguuc

SEQ ID NO: 438635 - RNA, 19 nt, Homo sapiens
  misc_RNA (1)...(19): siRNA sense strand
gcuccucacucuacucuga

SEQ ID NO: 438636 - RNA, 19 nt, Homo sapiens
  misc_RNA (1)...(19): siRNA sense strand
gcagaacggugagguagau

SEQ ID NO: 438637 - RNA, 19 nt, Homo sapiens
  misc_RNA (1)...(19): siRNA sense strand
caaaguaccagaaccaaau

SEQ ID NO: 438638 - RNA, 19 nt, Homo sapiens
  misc_RNA (1)...(19): siRNA sense strand
ugagaggucacauguguua

SEQ ID NO: 438639 - RNA, 19 nt, Homo sapiens
  misc_RNA (1)...(19): siRNA sense strand
caaugaaagugaccucuuc

SEQ ID NO: 438640 - RNA, 19 nt, Homo sapiens
  misc_RNA (1)...(19): siRNA sense strand
gaaucuagagggcaaauau

SEQ ID NO: 438641 - RNA, 19 nt, Homo sapiens
  misc_RNA (1)...(19): siRNA sense strand
ggucacauguguuacuguu

SEQ ID NO: 438642 - RNA, 19 nt, Homo sapiens
  misc_RNA (1)...(19): siRNA sense strand
aaaggaaagucccuggauu

SEQ ID NO: 438643 - RNA, 19 nt, Homo sapiens
  misc_RNA (1)...(19): siRNA sense strand
ugaggacucuguaguugaa

SEQ ID NO: 438644 - RNA, 19 nt, Homo sapiens
  misc_RNA (1)...(19): siRNA sense strand
ucacaaauuucccuaaggu

SEQ ID NO: 438645 - RNA, 19 nt, Homo sapiens
  misc_RNA (1)...(19): siRNA sense strand
ccaaacgguuagaccaauu

SEQ ID NO: 438646 - RNA, 19 nt, Homo sapiens
  misc_RNA (1)...(19): siRNA sense strand
uaaaugaggagaccuuguu

SEQ ID NO: 438647 - RNA, 19 nt, Homo sapiens
  misc_RNA (1)...(19): siRNA sense strand
gagcagcugucugugaaga

SEQ ID NO: 438648 - RNA, 19 nt, Homo sapiens
  misc_RNA (1)...(19): siRNA sense strand
gagagaugccuuauguuug

SEQ ID NO: 438649 - RNA, 19 nt, Homo sapiens
  misc_RNA (1)...(19): siRNA sense strand
caaacgguuagaccaauua

SEQ ID NO: 438650 - RNA, 19 nt, Homo sapiens
  misc_RNA (1)...(19): siRNA sense strand
gaaaggaaagucccuggau

SEQ ID NO: 438651 - RNA, 19 nt, Homo sapiens
  misc_RNA (1)...(19): siRNA sense strand
acaggcagcugaacacuuc

SEQ ID NO: 438652 - RNA, 19 nt, Homo sapiens
  misc_RNA (1)...(19): siRNA sense strand
ccaagaaccugagcuagca

SEQ ID NO: 438653 - RNA, 19 nt, Homo sapiens
  misc_RNA (1)...(19): siRNA sense strand
ggaagagccccaaguauuu

SEQ ID NO: 438654 - RNA, 19 nt, Homo sapiens
  misc_RNA (1)...(19): siRNA sense strand
gaccacgaaucccaagcua

SEQ ID NO: 438655 - RNA, 19 nt, Homo sapiens
  misc_RNA (1)...(19): siRNA sense strand
aauaggacguucuuuggaa

SEQ ID NO: 438656 - RNA, 19 nt, Homo sapiens
  misc_RNA (1)...(19): siRNA sense strand
ucauaagccuggagagaug

SEQ ID NO: 438657 - RNA, 19 nt, Homo sapiens
  misc_RNA (1)...(19): siRNA sense strand
caaaguagcccagcucaca

SEQ ID NO: 438658 - RNA, 19 nt, Homo sapiens
  misc_RNA (1)...(19): siRNA sense strand
guccagaccaaacucauua

SEQ ID NO: 438659 - RNA, 19 nt, Homo sapiens
  misc_RNA (1)...(19): siRNA sense strand
ugaauacccuuaacaccau

SEQ ID NO: 438660 - RNA, 19 nt, Homo sapiens
  misc_RNA (1)...(19): siRNA sense strand
ccaaccacaugaucaacaa

SEQ ID NO: 438661 - RNA, 19 nt, Homo sapiens
  misc_RNA (1)...(19): siRNA sense strand
ucauuucccuacuuacgua

SEQ ID NO: 438662 - RNA, 19 nt, Homo sapiens
  misc_RNA (1)...(19): siRNA sense strand
agacuucccuaaucauuuc

SEQ ID NO: 438663 - RNA, 19 nt, Homo sapiens
  misc_RNA (1)...(19): siRNA sense strand
cuggagagaugccuuaugu

SEQ ID NO: 438664 - RNA, 19 nt, Homo sapiens
  misc_RNA (1)...(19): siRNA sense strand
aaugcucaauuucguguua

SEQ ID NO: 438665 - RNA, 19 nt, Homo sapiens
  misc_RNA (1)...(19): siRNA sense strand
uuuaagaucuccuaugagu

SEQ ID NO: 438666 - RNA, 19 nt, Homo sapiens
  misc_RNA (1)...(19): siRNA sense strand
guuuaucacugcaacaaau

SEQ ID NO: 438667 - RNA, 19 nt, Homo sapiens
  misc_RNA (1)...(19): siRNA sense strand
ugagguagauguccauuuu

SEQ ID NO: 438668 - RNA, 19 nt, Homo sapiens
  misc_RNA (1)...(19): siRNA sense strand
gugaagcgaccugguguua

SEQ ID NO: 438669 - RNA, 19 nt, Homo sapiens
  misc_RNA (1)...(19): siRNA sense strand
guaguacuguuugcucuau

SEQ ID NO: 438670 - RNA, 19 nt, Homo sapiens
  misc_RNA (1)...(19): siRNA sense strand
ccgcugaccuccucaaugg

SEQ ID NO: 438671 - RNA, 19 nt, Homo sapiens
  misc_RNA (1)...(19): siRNA sense strand
gaaugggcguuugaaagug

SEQ ID NO: 438672 - RNA, 19 nt, Homo sapiens
  misc_RNA (1)...(19): siRNA sense strand
gcucacaaauuucccuaag

SEQ ID NO: 438673 - RNA, 19 nt, Homo sapiens
  misc_RNA (1)...(19): siRNA sense strand
ggauugugcugaacguaca

SEQ ID NO: 438674 - RNA, 19 nt, Homo sapiens
  misc_RNA (1)...(19): siRNA sense strand
acucuguaguugaagauua

SEQ ID NO: 438675 - RNA, 19 nt, Homo sapiens
  misc_RNA (1)...(19): siRNA sense strand
gaagagaaacuggcugagu

SEQ ID NO: 438676 - RNA, 19 nt, Homo sapiens
  misc_RNA (1)...(19): siRNA sense strand
ccacucacccgcaggcuuu

SEQ ID NO: 438677 - RNA, 19 nt, Homo sapiens
  misc_RNA (1)...(19): siRNA sense strand
ggaacgugaagaauaugua

SEQ ID NO: 438678 - RNA, 19 nt, Homo sapiens
  misc_RNA (1)...(19): siRNA sense strand
ggacaaaauugaacacaag

SEQ ID NO: 438679 - RNA, 19 nt, Homo sapiens
  misc_RNA (1)...(19): siRNA sense strand
acaccgaccuguucaugga

SEQ ID NO: 438680 - RNA, 19 nt, Homo sapiens
  misc_RNA (1)...(19): siRNA sense strand
caccagaagagaaauguuu

SEQ ID NO: 438681 - RNA, 19 nt, Homo sapiens
  misc_RNA (1)...(19): siRNA sense strand
gcucuaugcugcaauacag

SEQ ID NO: 438682 - RNA, 19 nt, Homo sapiens
  misc_RNA (1)...(19): siRNA sense strand
gcagaaugccaaucaugug

SEQ ID NO: 438683 - RNA, 19 nt, Homo sapiens
  misc_RNA (1)...(19): siRNA sense strand
uaugaaacaccacguagaa

SEQ ID NO: 438684 - RNA, 19 nt, Homo sapiens
  misc_RNA (1)...(19): siRNA sense strand
ccuaaucauuucccuacuu

SEQ ID NO: 438685 - RNA, 19 nt, Homo sapiens
  misc_RNA (1)...(19): siRNA sense strand
gccguuggcuucgacguuu

SEQ ID NO: 438686 - RNA, 19 nt, Homo sapiens
  misc_RNA (1)...(19): siRNA sense strand
acgauguaaugcucaauuu

SEQ ID NO: 438687 - RNA, 19 nt, Homo sapiens
  misc_RNA (1)...(19): siRNA sense strand
ccacagcuggcaauccuuu

SEQ ID NO: 438688 - RNA, 19 nt, Homo sapiens
  misc_RNA (1)...(19): siRNA sense strand
ucaccagccucaacugcaa

SEQ ID NO: 438689 - RNA, 19 nt, Homo sapiens
  misc_RNA (1)...(19): siRNA sense strand
guuccuguauccucuaaug

SEQ ID NO: 438690 - RNA, 19 nt, Homo sapiens
  misc_RNA (1)...(19): siRNA sense strand
ugaaugggcguuugaaagu

SEQ ID NO: 438691 - RNA, 19 nt, Homo sapiens
  misc_RNA (1)...(19): siRNA sense strand
ugagguagauggucacacu

SEQ ID NO: 438692 - RNA, 19 nt, Homo sapiens
  misc_RNA (1)...(19): siRNA sense strand
ccaggaugguggacggaaa

SEQ ID NO: 438693 - RNA, 19 nt, Homo sapiens
  misc_RNA (1)...(19): siRNA sense strand
ccagaaggccaccaaaaua

SEQ ID NO: 438694 - RNA, 19 nt, Homo sapiens
  misc_RNA (1)...(19): siRNA sense strand
cagcugaacacuuccgaaa

SEQ ID NO: 438695 - RNA, 19 nt, Homo sapiens
  misc_RNA (1)...(19): siRNA sense strand
ggagccgaaugucugaaug

SEQ ID NO: 438696 - RNA, 19 nt, Homo sapiens
  misc_RNA (1)...(19): siRNA sense strand
caaagcugccacugugaaa

SEQ ID NO: 438697 - RNA, 19 nt, Homo sapiens
  misc_RNA (1)...(19): siRNA sense strand
cauaaaaccuuccguaaac

SEQ ID NO: 438698 - RNA, 19 nt, Homo sapiens
  misc_RNA (1)...(19): siRNA sense strand
agagaugccuuauguuugc

SEQ ID NO: 438699 - RNA, 19 nt, Homo sapiens
  misc_RNA (1)...(19): siRNA sense strand
caaacucauuaugcuugua

SEQ ID NO: 438700 - RNA, 19 nt, Homo sapiens
  misc_RNA (1)...(19): siRNA sense strand
ucaauuucguguuacugaa

SEQ ID NO: 438701 - RNA, 19 nt, Homo sapiens
  misc_RNA (1)...(19): siRNA sense strand
cagcggaccugagucuuca

SEQ ID NO: 438702 - RNA, 19 nt, Homo sapiens
  misc_RNA (1)...(19): siRNA sense strand
ggacaccgaccuguucaug

SEQ ID NO: 438703 - RNA, 19 nt, Homo sapiens
  misc_RNA (1)...(19): siRNA sense strand
uuugagaggucacaugugu

SEQ ID NO: 438704 - RNA, 19 nt, Homo sapiens
  misc_RNA (1)...(19): siRNA sense strand
ccucacaaccaauauuuau

SEQ ID NO: 438705 - RNA, 19 nt, Homo sapiens
  misc_RNA (1)...(19): siRNA sense strand
ccaaacucauuaugcuugu

SEQ ID NO: 438706 - RNA, 19 nt, Homo sapiens
  misc_RNA (1)...(19): siRNA sense strand
cuagagggcaaauaucuga

SEQ ID NO: 438707 - RNA, 19 nt, Homo sapiens
  misc_RNA (1)...(19): siRNA sense strand
gaacgugaagaauauguac

SEQ ID NO: 438708 - RNA, 19 nt, Homo sapiens
  misc_RNA (1)...(19): siRNA sense strand
guaccuuuguuaccucugu

SEQ ID NO: 438709 - RNA, 19 nt, Homo sapiens
  misc_RNA (1)...(19): siRNA sense strand
cagaaugccaaucauguga

SEQ ID NO: 438710 - RNA, 19 nt, Homo sapiens
  misc_RNA (1)...(19): siRNA sense strand
gcaggacucuuucuguuca

SEQ ID NO: 438711 - RNA, 19 nt, Homo sapiens
  misc_RNA (1)...(19): siRNA sense strand
ggagcugccugaugaguuc

SEQ ID NO: 438712 - RNA, 19 nt, Homo sapiens
  misc_RNA (1)...(19): siRNA sense strand
gacaucaucuucagcuaag

SEQ ID NO: 438713 - RNA, 19 nt, Homo sapiens
  misc_RNA (1)...(19): siRNA sense strand
gugaauaugaucugaaguu

SEQ ID NO: 438714 - RNA, 19 nt, Homo sapiens
  misc_RNA (1)...(19): siRNA sense strand
cagcuaaguugccgaaguc

SEQ ID NO: 438715 - RNA, 19 nt, Homo sapiens
  misc_RNA (1)...(19): siRNA sense strand
ucagggaggcgcagauaaa

SEQ ID NO: 438716 - RNA, 19 nt, Homo sapiens
  misc_RNA (1)...(19): siRNA sense strand
gaauaugaucugaaguuuc

SEQ ID NO: 438717 - RNA, 19 nt, Homo sapiens
  misc_RNA (1)...(19): siRNA sense strand
uggcccagcucaagaguga

SEQ ID NO: 438718 - RNA, 19 nt, Homo sapiens
  misc_RNA (1)...(19): siRNA sense strand
ugacaucaucuucagcuaa

SEQ ID NO: 438719 - RNA, 19 nt, Homo sapiens
  misc_RNA (1)...(19): siRNA sense strand
ccacgaggccucugacauc

SEQ ID NO: 438720 - RNA, 19 nt, Homo sapiens
  misc_RNA (1)...(19): siRNA sense strand
gggaggcgcagauaaagga

SEQ ID NO: 438721 - RNA, 19 nt, Homo sapiens
  misc_RNA (1)...(19): siRNA sense strand
cgagguugcaggacucuuu

SEQ ID NO: 438722 - RNA, 19 nt, Homo sapiens
  misc_RNA (1)...(19): siRNA sense strand
caucagguuugucaugaag

SEQ ID NO: 438723 - RNA, 19 nt, Homo sapiens
  misc_RNA (1)...(19): siRNA sense strand
gggagcuucucagccauuu

SEQ ID NO: 438724 - RNA, 19 nt, Homo sapiens
  misc_RNA (1)...(19): siRNA sense strand
cgaggccucugacaucauc

SEQ ID NO: 438725 - RNA, 19 nt, Homo sapiens
  misc_RNA (1)...(19): siRNA sense strand
uugcaggacucuuucuguu

SEQ ID NO: 438726 - RNA, 19 nt, Homo sapiens
  misc_RNA (1)...(19): siRNA sense strand
ucagguuugucaugaagug

SEQ ID NO: 438727 - RNA, 19 nt, Homo sapiens
  misc_RNA (1)...(19): siRNA sense strand
ccaucagguuugucaugaa

SEQ ID NO: 438728 - RNA, 19 nt, Homo sapiens
  misc_RNA (1)...(19): siRNA sense strand
ucagcuaaguugccgaagu

SEQ ID NO: 438729 - RNA, 19 nt, Homo sapiens
  misc_RNA (1)...(19): siRNA sense strand
gguuugucaugaagugcua

SEQ ID NO: 438730 - RNA, 19 nt, Homo sapiens
  misc_RNA (1)...(19): siRNA sense strand
gcgagcacacucaggagaa

SEQ ID NO: 438731 - RNA, 19 nt, Homo sapiens
  misc_RNA (1)...(19): siRNA sense strand
uugccaaccugcccaacaa

SEQ ID NO: 438732 - RNA, 19 nt, Homo sapiens
  misc_RNA (1)...(19): siRNA sense strand
acacgcagacccucuuuca

SEQ ID NO: 438733 - RNA, 19 nt, Homo sapiens
  misc_RNA (1)...(19): siRNA sense strand
accccgagcugucauuuua

SEQ ID NO: 438734 - RNA, 19 nt, Homo sapiens
  misc_RNA (1)...(19): siRNA sense strand
caucaucuucagcuaaguu

SEQ ID NO: 438735 - RNA, 19 nt, Homo sapiens
  misc_RNA (1)...(19): siRNA sense strand
cacgaggccucugacauca

SEQ ID NO: 438736 - RNA, 19 nt, Homo sapiens
  misc_RNA (1)...(19): siRNA sense strand
gcagcgccaccaucagguu

SEQ ID NO: 438737 - RNA, 19 nt, Homo sapiens
  misc_RNA (1)...(19): siRNA sense strand
aggcgcagauaaaggagaa

SEQ ID NO: 438738 - RNA, 19 nt, Homo sapiens
  misc_RNA (1)...(19): siRNA sense strand
gacgguggacgacgugaga

SEQ ID NO: 438739 - RNA, 19 nt, Homo sapiens
  misc_RNA (1)...(19): siRNA sense strand
ccacacgcagacccucuuu

SEQ ID NO: 438740 - RNA, 19 nt, Homo sapiens
  misc_RNA (1)...(19): siRNA sense strand
accaucagguuugucauga

SEQ ID NO: 438741 - RNA, 19 nt, Homo sapiens
  misc_RNA (1)...(19): siRNA sense strand
gcugccugaugaguucuuu

SEQ ID NO: 438742 - RNA, 19 nt, Homo sapiens
  misc_RNA (1)...(19): siRNA sense strand
aaacugcgcucgcugacuu

SEQ ID NO: 438743 - RNA, 19 nt, Homo sapiens
  misc_RNA (1)...(19): siRNA sense strand
gaaggaggagaaugagaaa

SEQ ID NO: 438744 - RNA, 19 nt, Homo sapiens
  misc_RNA (1)...(19): siRNA sense strand
gagcaguacugggaagaga

SEQ ID NO: 438745 - RNA, 19 nt, Homo sapiens
  misc_RNA (1)...(19): siRNA sense strand
gcacccagauugugauggu

SEQ ID NO: 438746 - RNA, 19 nt, Homo sapiens
  misc_RNA (1)...(19): siRNA sense strand
gcagcgagccaacaugguu

SEQ ID NO: 438747 - RNA, 19 nt, Homo sapiens
  misc_RNA (1)...(19): siRNA sense strand
acccacaccuggauuauga

SEQ ID NO: 438748 - RNA, 19 nt, Homo sapiens
  misc_RNA (1)...(19): siRNA sense strand
gaaccucacgggcaucuuc

SEQ ID NO: 438749 - RNA, 19 nt, Homo sapiens
  misc_RNA (1)...(19): siRNA sense strand
ugaaggaggagaaugagaa

SEQ ID NO: 438750 - RNA, 19 nt, Homo sapiens
  misc_RNA (1)...(19): siRNA sense strand
ccugugagcuggaauugca

SEQ ID NO: 438751 - RNA, 19 nt, Homo sapiens
  misc_RNA (1)...(19): siRNA sense strand
ggaggagaaugagaaacug

SEQ ID NO: 438752 - RNA, 19 nt, Homo sapiens
  misc_RNA (1)...(19): siRNA sense strand
ugugcgagcugcagaagga

SEQ ID NO: 438753 - RNA, 19 nt, Homo sapiens
  misc_RNA (1)...(19): siRNA sense strand
gcgacccacaccuggauua

SEQ ID NO: 438754 - RNA, 19 nt, Homo sapiens
  misc_RNA (1)...(19): siRNA sense strand
guacugggaagagaaggaa

SEQ ID NO: 438755 - RNA, 19 nt, Homo sapiens
  misc_RNA (1)...(19): siRNA sense strand
gccugaaggaggagaauga

SEQ ID NO: 438756 - RNA, 19 nt, Homo sapiens
  misc_RNA (1)...(19): siRNA sense strand
gauuaugagcuccuagaca

SEQ ID NO: 438757 - RNA, 19 nt, Homo sapiens
  misc_RNA (1)...(19): siRNA sense strand
ccagccagcagucccugua

SEQ ID NO: 438758 - RNA, 19 nt, Homo sapiens
  misc_RNA (1)...(19): siRNA sense strand
ucacgggcaucuucaucca

SEQ ID NO: 438759 - RNA, 19 nt, Homo sapiens
  misc_RNA (1)...(19): siRNA sense strand
agaggcagcgagagcagua

SEQ ID NO: 438760 - RNA, 19 nt, Homo sapiens
  misc_RNA (1)...(19): siRNA sense strand
cagcgagccaacaugguuu

SEQ ID NO: 438761 - RNA, 19 nt, Homo sapiens
  misc_RNA (1)...(19): siRNA sense strand
gcaguacugggaagagaag

SEQ ID NO: 438762 - RNA, 19 nt, Homo sapiens
  misc_RNA (1)...(19): siRNA sense strand
gcucuugucggaccugagu

SEQ ID NO: 438763 - RNA, 19 nt, Homo sapiens
  misc_RNA (1)...(19): siRNA sense strand
gugcucagagggagauuuc

SEQ ID NO: 438764 - RNA, 19 nt, Homo sapiens
  misc_RNA (1)...(19): siRNA sense strand
aaacugcgcucgcugacuu

SEQ ID NO: 438765 - RNA, 19 nt, Homo sapiens
  misc_RNA (1)...(19): siRNA sense strand
gaaggaggagaaugagaaa

SEQ ID NO: 438766 - RNA, 19 nt, Homo sapiens
  misc_RNA (1)...(19): siRNA sense strand
gagcaguacugggaagaga

SEQ ID NO: 438767 - RNA, 19 nt, Homo sapiens
  misc_RNA (1)...(19): siRNA sense strand
gcacccagauugugauggu

SEQ ID NO: 438768 - RNA, 19 nt, Homo sapiens
  misc_RNA (1)...(19): siRNA sense strand
acccacaccuggauuauga

SEQ ID NO: 438769 - RNA, 19 nt, Homo sapiens
  misc_RNA (1)...(19): siRNA sense strand
gaaccucacgggcaucuuc

SEQ ID NO: 438770 - RNA, 19 nt, Homo sapiens
  misc_RNA (1)...(19): siRNA sense strand
ugaaggaggagaaugagaa

SEQ ID NO: 438771 - RNA, 19 nt, Homo sapiens
  misc_RNA (1)...(19): siRNA sense strand
ggaggagaaugagaaacug

SEQ ID NO: 438772 - RNA, 19 nt, Homo sapiens
  misc_RNA (1)...(19): siRNA sense strand
ccugugagcuggaauugca

SEQ ID NO: 438773 - RNA, 19 nt, Homo sapiens
  misc_RNA (1)...(19): siRNA sense strand
ugugcgagcugcagaagga

SEQ ID NO: 438774 - RNA, 19 nt, Homo sapiens
  misc_RNA (1)...(19): siRNA sense strand
gcgacccacaccuggauua

SEQ ID NO: 438775 - RNA, 19 nt, Homo sapiens
  misc_RNA (1)...(19): siRNA sense strand
guacugggaagagaaggaa

SEQ ID NO: 438776 - RNA, 19 nt, Homo sapiens
  misc_RNA (1)...(19): siRNA sense strand
gccugaaggaggagaauga

SEQ ID NO: 438777 - RNA, 19 nt, Homo sapiens
  misc_RNA (1)...(19): siRNA sense strand
gauuaugagcuccuagaca

SEQ ID NO: 438778 - RNA, 19 nt, Homo sapiens
  misc_RNA (1)...(19): siRNA sense strand
ccagccagcagucccugua

SEQ ID NO: 438779 - RNA, 19 nt, Homo sapiens
  misc_RNA (1)...(19): siRNA sense strand
ucacgggcaucuucaucca

SEQ ID NO: 438780 - RNA, 19 nt, Homo sapiens
  misc_RNA (1)...(19): siRNA sense strand
agaggcagcgagagcagua

SEQ ID NO: 438781 - RNA, 19 nt, Homo sapiens
  misc_RNA (1)...(19): siRNA sense strand
gcaguacugggaagagaag

SEQ ID NO: 438782 - RNA, 19 nt, Homo sapiens
  misc_RNA (1)...(19): siRNA sense strand
gcucuugucggaccugagu

SEQ ID NO: 438783 - RNA, 19 nt, Homo sapiens
  misc_RNA (1)...(19): siRNA sense strand
gugcucagagggagauuuc

SEQ ID NO: 438784 - RNA, 19 nt, Homo sapiens
  misc_RNA (1)...(19): siRNA sense strand
caauagacauggcuggauu

SEQ ID NO: 438785 - RNA, 19 nt, Homo sapiens
  misc_RNA (1)...(19): siRNA sense strand
gaagggaggcuaccaggaa

SEQ ID NO: 438786 - RNA, 19 nt, Homo sapiens
  misc_RNA (1)...(19): siRNA sense strand
gaagagacgggacauccua

SEQ ID NO: 438787 - RNA, 19 nt, Homo sapiens
  misc_RNA (1)...(19): siRNA sense strand
ggacucugcucaucacugu

SEQ ID NO: 438788 - RNA, 19 nt, Homo sapiens
  misc_RNA (1)...(19): siRNA sense strand
gcuggaagacgguguuuga

SEQ ID NO: 438789 - RNA, 19 nt, Homo sapiens
  misc_RNA (1)...(19): siRNA sense strand
ccaccggccauuugcaaua

SEQ ID NO: 438790 - RNA, 19 nt, Homo sapiens
  misc_RNA (1)...(19): siRNA sense strand
ggaaagcagccuccuucga

SEQ ID NO: 438791 - RNA, 19 nt, Homo sapiens
  misc_RNA (1)...(19): siRNA sense strand
gagaacuugucacccucaa

SEQ ID NO: 438792 - RNA, 19 nt, Homo sapiens
  misc_RNA (1)...(19): siRNA sense strand
aagggaggcuaccaggaaa

SEQ ID NO: 438793 - RNA, 19 nt, Homo sapiens
  misc_RNA (1)...(19): siRNA sense strand
gcaauagacauggcuggau

SEQ ID NO: 438794 - RNA, 19 nt, Homo sapiens
  misc_RNA (1)...(19): siRNA sense strand
gggaguacugcacgucuga

SEQ ID NO: 438795 - RNA, 19 nt, Homo sapiens
  misc_RNA (1)...(19): siRNA sense strand
gcacacacggacagagaag

SEQ ID NO: 438796 - RNA, 19 nt, Homo sapiens
  misc_RNA (1)...(19): siRNA sense strand
cgacaccggccucaacuac

SEQ ID NO: 438797 - RNA, 19 nt, Homo sapiens
  misc_RNA (1)...(19): siRNA sense strand
gcccuggacucugcucauc

SEQ ID NO: 438798 - RNA, 19 nt, Homo sapiens
  misc_RNA (1)...(19): siRNA sense strand
cagccuccuucgagaacuu

SEQ ID NO: 438799 - RNA, 19 nt, Homo sapiens
  misc_RNA (1)...(19): siRNA sense strand
caccggccauuugcaauag

SEQ ID NO: 438800 - RNA, 19 nt, Homo sapiens
  misc_RNA (1)...(19): siRNA sense strand
caauagacauggcuggauu

SEQ ID NO: 438801 - RNA, 19 nt, Homo sapiens
  misc_RNA (1)...(19): siRNA sense strand
gaagggaggcuaccaggaa

SEQ ID NO: 438802 - RNA, 19 nt, Homo sapiens
  misc_RNA (1)...(19): siRNA sense strand
gaagagacgggacauccua

SEQ ID NO: 438803 - RNA, 19 nt, Homo sapiens
  misc_RNA (1)...(19): siRNA sense strand
ggacucugcucaucacugu

SEQ ID NO: 438804 - RNA, 19 nt, Homo sapiens
  misc_RNA (1)...(19): siRNA sense strand
gcuggaagacgguguuuga

SEQ ID NO: 438805 - RNA, 19 nt, Homo sapiens
  misc_RNA (1)...(19): siRNA sense strand
ccaccggccauuugcaaua

SEQ ID NO: 438806 - RNA, 19 nt, Homo sapiens
  misc_RNA (1)...(19): siRNA sense strand
ggaaagcagccuccuucga

SEQ ID NO: 438807 - RNA, 19 nt, Homo sapiens
  misc_RNA (1)...(19): siRNA sense strand
gagaacuugucacccucaa

SEQ ID NO: 438808 - RNA, 19 nt, Homo sapiens
  misc_RNA (1)...(19): siRNA sense strand
aagggaggcuaccaggaaa

SEQ ID NO: 438809 - RNA, 19 nt, Homo sapiens
  misc_RNA (1)...(19): siRNA sense strand
gcaauagacauggcuggau

SEQ ID NO: 438810 - RNA, 19 nt, Homo sapiens
  misc_RNA (1)...(19): siRNA sense strand
gggaguacugcacgucuga

SEQ ID NO: 438811 - RNA, 19 nt, Homo sapiens
  misc_RNA (1)...(19): siRNA sense strand
gcacacacggacagagaag

SEQ ID NO: 438812 - RNA, 19 nt, Homo sapiens
  misc_RNA (1)...(19): siRNA sense strand
cgacaccggccucaacuac

SEQ ID NO: 438813 - RNA, 19 nt, Homo sapiens
  misc_RNA (1)...(19): siRNA sense strand
gcccuggacucugcucauc

SEQ ID NO: 438814 - RNA, 19 nt, Homo sapiens
  misc_RNA (1)...(19): siRNA sense strand
cagccuccuucgagaacuu

SEQ ID NO: 438815 - RNA, 19 nt, Homo sapiens
  misc_RNA (1)...(19): siRNA sense strand
caccggccauuugcaauag

SEQ ID NO: 438816 - RNA, 19 nt, Homo sapiens
  misc_RNA (1)...(19): siRNA sense strand
gaacuugacuucuuugaga

SEQ ID NO: 438817 - RNA, 19 nt, Homo sapiens
  misc_RNA (1)...(19): siRNA sense strand
uaacuugccugaagaagaa

SEQ ID NO: 438818 - RNA, 19 nt, Homo sapiens
  misc_RNA (1)...(19): siRNA sense strand
ggagguggcagaacaguua

SEQ ID NO: 438819 - RNA, 19 nt, Homo sapiens
  misc_RNA (1)...(19): siRNA sense strand
ggcaggaucugauucauug

SEQ ID NO: 438820 - RNA, 19 nt, Homo sapiens
  misc_RNA (1)...(19): siRNA sense strand
gcaaugcugacuaucaaua

SEQ ID NO: 438821 - RNA, 19 nt, Homo sapiens
  misc_RNA (1)...(19): siRNA sense strand
gaagaaaauucgucaaguu

SEQ ID NO: 438822 - RNA, 19 nt, Homo sapiens
  misc_RNA (1)...(19): siRNA sense strand
ucauagcgguuacgacuuu

SEQ ID NO: 438823 - RNA, 19 nt, Homo sapiens
  misc_RNA (1)...(19): siRNA sense strand
gaugugaaguaccucauga

SEQ ID NO: 438824 - RNA, 19 nt, Homo sapiens
  misc_RNA (1)...(19): siRNA sense strand
ugaaguaccucaugaagag

SEQ ID NO: 438825 - RNA, 19 nt, Homo sapiens
  misc_RNA (1)...(19): siRNA sense strand
cagcuaggacugacauuua

SEQ ID NO: 438826 - RNA, 19 nt, Homo sapiens
  misc_RNA (1)...(19): siRNA sense strand
uuacgacuuuggcuacuua

SEQ ID NO: 438827 - RNA, 19 nt, Homo sapiens
  misc_RNA (1)...(19): siRNA sense strand
ugagauccuucgauuguuu

SEQ ID NO: 438828 - RNA, 19 nt, Homo sapiens
  misc_RNA (1)...(19): siRNA sense strand
gaauugaaacccaguacuu

SEQ ID NO: 438829 - RNA, 19 nt, Homo sapiens
  misc_RNA (1)...(19): siRNA sense strand
gacuuuggcuacuuaauca

SEQ ID NO: 438830 - RNA, 19 nt, Homo sapiens
  misc_RNA (1)...(19): siRNA sense strand
gguguaauguagacuuguu

SEQ ID NO: 438831 - RNA, 19 nt, Homo sapiens
  misc_RNA (1)...(19): siRNA sense strand
ugaaugagcaaggagaaua

SEQ ID NO: 438832 - RNA, 19 nt, Homo sapiens
  misc_RNA (1)...(19): siRNA sense strand
caagacccauuggagaauu

SEQ ID NO: 438833 - RNA, 19 nt, Homo sapiens
  misc_RNA (1)...(19): siRNA sense strand
aaagauaauucagcuagga

SEQ ID NO: 438834 - RNA, 19 nt, Homo sapiens
  misc_RNA (1)...(19): siRNA sense strand
gaaaauucgucaaguuauc

SEQ ID NO: 438835 - RNA, 19 nt, Homo sapiens
  misc_RNA (1)...(19): siRNA sense strand
auaauuacguugcuaugga

SEQ ID NO: 438836 - RNA, 19 nt, Homo sapiens
  misc_RNA (1)...(19): siRNA sense strand
uaccaacuauugcggugua

SEQ ID NO: 438837 - RNA, 19 nt, Homo sapiens
  misc_RNA (1)...(19): siRNA sense strand
ucucaaagguggauuacag

SEQ ID NO: 438838 - RNA, 19 nt, Homo sapiens
  misc_RNA (1)...(19): siRNA sense strand
gaggaggaaggaauugaaa

SEQ ID NO: 438839 - RNA, 19 nt, Homo sapiens
  misc_RNA (1)...(19): siRNA sense strand
cuacuaacaacaucuggua

SEQ ID NO: 438840 - RNA, 19 nt, Homo sapiens
  misc_RNA (1)...(19): siRNA sense strand
cuauagagcuacuaacaac

SEQ ID NO: 438841 - RNA, 19 nt, Homo sapiens
  misc_RNA (1)...(19): siRNA sense strand
gacuaucaauaccaacuau

SEQ ID NO: 438842 - RNA, 19 nt, Homo sapiens
  misc_RNA (1)...(19): siRNA sense strand
ggagaauucaggagcaaug

SEQ ID NO: 438843 - RNA, 19 nt, Homo sapiens
  misc_RNA (1)...(19): siRNA sense strand
ggauaggaccacaacauca

SEQ ID NO: 438844 - RNA, 19 nt, Homo sapiens
  misc_RNA (1)...(19): siRNA sense strand
gaacggauaggaccacaac

SEQ ID NO: 438845 - RNA, 19 nt, Homo sapiens
  misc_RNA (1)...(19): siRNA sense strand
caacuauugcgguguaaug

SEQ ID NO: 438846 - RNA, 19 nt, Homo sapiens
  misc_RNA (1)...(19): siRNA sense strand
ccaguacuuugcagaacuu

SEQ ID NO: 438847 - RNA, 19 nt, Homo sapiens
  misc_RNA (1)...(19): siRNA sense strand
gcgguguaauguagacuug

SEQ ID NO: 438848 - RNA, 19 nt, Homo sapiens
  misc_RNA (1)...(19): siRNA sense strand
ggagugguccucugugaag

SEQ ID NO: 438849 - RNA, 19 nt, Homo sapiens
  misc_RNA (1)...(19): siRNA sense strand
ucuuugagauccuucgauu

SEQ ID NO: 438850 - RNA, 19 nt, Homo sapiens
  misc_RNA (1)...(19): siRNA sense strand
uacaggagguggcagaaca

SEQ ID NO: 438851 - RNA, 19 nt, Homo sapiens
  misc_RNA (1)...(19): siRNA sense strand
cuauugcgguguaauguag

SEQ ID NO: 438852 - RNA, 19 nt, Homo sapiens
  misc_RNA (1)...(19): siRNA sense strand
cgacuuuggcuacuuaauc

SEQ ID NO: 438853 - RNA, 19 nt, Homo sapiens
  misc_RNA (1)...(19): siRNA sense strand
gcaagacccauuggagaau

SEQ ID NO: 438854 - RNA, 19 nt, Homo sapiens
  misc_RNA (1)...(19): siRNA sense strand
agaauacccuccaggaacu

SEQ ID NO: 438855 - RNA, 19 nt, Homo sapiens
  misc_RNA (1)...(19): siRNA sense strand
gaacuucuuaugacuucug

SEQ ID NO: 438856 - RNA, 19 nt, Homo sapiens
  misc_RNA (1)...(19): siRNA sense strand
gugaaguaccucaugaaga

SEQ ID NO: 438857 - RNA, 19 nt, Homo sapiens
  misc_RNA (1)...(19): siRNA sense strand
gaaugagcaaggagaauac

SEQ ID NO: 438858 - RNA, 19 nt, Homo sapiens
  misc_RNA (1)...(19): siRNA sense strand
acucuaacuugccugaaga

SEQ ID NO: 438859 - RNA, 19 nt, Homo sapiens
  misc_RNA (1)...(19): siRNA sense strand
gauaggaccacaacaucag

SEQ ID NO: 438860 - RNA, 19 nt, Homo sapiens
  misc_RNA (1)...(19): siRNA sense strand
cuaggacugacauuuauga

SEQ ID NO: 438861 - RNA, 19 nt, Homo sapiens
  misc_RNA (1)...(19): siRNA sense strand
gugaaggggucaaaugguu

SEQ ID NO: 438862 - RNA, 19 nt, Homo sapiens
  misc_RNA (1)...(19): siRNA sense strand
ugacuaucaauaccaacua

SEQ ID NO: 438863 - RNA, 19 nt, Homo sapiens
  misc_RNA (1)...(19): siRNA sense strand
cuaacuugccugaagaaga

SEQ ID NO: 438864 - RNA, 19 nt, Homo sapiens
  misc_RNA (1)...(19): siRNA sense strand
ugacggaggacauguaugc

SEQ ID NO: 438865 - RNA, 19 nt, Homo sapiens
  misc_RNA (1)...(19): siRNA sense strand
ccuaaccaacucuaacuug

SEQ ID NO: 438866 - RNA, 19 nt, Homo sapiens
  misc_RNA (1)...(19): siRNA sense strand
cuggagugguccucuguga

SEQ ID NO: 438867 - RNA, 19 nt, Homo sapiens
  misc_RNA (1)...(19): siRNA sense strand
guguaauguagacuuguua

SEQ ID NO: 438868 - RNA, 19 nt, Homo sapiens
  misc_RNA (1)...(19): siRNA sense strand
ugacuucuuugagauccuu

SEQ ID NO: 438869 - RNA, 19 nt, Homo sapiens
  misc_RNA (1)...(19): siRNA sense strand
aauugaaacccaguacuuu

SEQ ID NO: 438870 - RNA, 19 nt, Homo sapiens
  misc_RNA (1)...(19): siRNA sense strand
ugaggaggaaggaauugaa

SEQ ID NO: 438871 - RNA, 19 nt, Homo sapiens
  misc_RNA (1)...(19): siRNA sense strand
agcuaggacugacauuuau

SEQ ID NO: 438872 - RNA, 19 nt, Homo sapiens
  misc_RNA (1)...(19): siRNA sense strand
uuugagauccuucgauugu

SEQ ID NO: 438873 - RNA, 19 nt, Homo sapiens
  misc_RNA (1)...(19): siRNA sense strand
gagcuacuaacaacaucug

SEQ ID NO: 438874 - RNA, 19 nt, Homo sapiens
  misc_RNA (1)...(19): siRNA sense strand
gcucacaggaauggccuuu

SEQ ID NO: 438875 - RNA, 19 nt, Homo sapiens
  misc_RNA (1)...(19): siRNA sense strand
ugcaagacccauuggagaa

SEQ ID NO: 438876 - RNA, 19 nt, Homo sapiens
  misc_RNA (1)...(19): siRNA sense strand
ucuauagagcuacuaacaa

SEQ ID NO: 438877 - RNA, 19 nt, Homo sapiens
  misc_RNA (1)...(19): siRNA sense strand
guuacgacuuuggcuacuu

SEQ ID NO: 438878 - RNA, 19 nt, Homo sapiens
  misc_RNA (1)...(19): siRNA sense strand
ggaauugaaacccaguacu

SEQ ID NO: 438879 - RNA, 19 nt, Homo sapiens
  misc_RNA (1)...(19): siRNA sense strand
ugucauuucauagcgguua

SEQ ID NO: 438880 - RNA, 19 nt, Homo sapiens
  misc_RNA (1)...(19): siRNA sense strand
gaacuugacuucuuugaga

SEQ ID NO: 438881 - RNA, 19 nt, Homo sapiens
  misc_RNA (1)...(19): siRNA sense strand
uaacuugccugaagaagaa

SEQ ID NO: 438882 - RNA, 19 nt, Homo sapiens
  misc_RNA (1)...(19): siRNA sense strand
ggagguggcagaacaguua

SEQ ID NO: 438883 - RNA, 19 nt, Homo sapiens
  misc_RNA (1)...(19): siRNA sense strand
ggcaggaucugauucauug

SEQ ID NO: 438884 - RNA, 19 nt, Homo sapiens
  misc_RNA (1)...(19): siRNA sense strand
gcaaugcugacuaucaaua

SEQ ID NO: 438885 - RNA, 19 nt, Homo sapiens
  misc_RNA (1)...(19): siRNA sense strand
gaagaaaauucgucaaguu

SEQ ID NO: 438886 - RNA, 19 nt, Homo sapiens
  misc_RNA (1)...(19): siRNA sense strand
ucauagcgguuacgacuuu

SEQ ID NO: 438887 - RNA, 19 nt, Homo sapiens
  misc_RNA (1)...(19): siRNA sense strand
gaugugaaguaccucauga

SEQ ID NO: 438888 - RNA, 19 nt, Homo sapiens
  misc_RNA (1)...(19): siRNA sense strand
ugaaguaccucaugaagag

SEQ ID NO: 438889 - RNA, 19 nt, Homo sapiens
  misc_RNA (1)...(19): siRNA sense strand
cagcuaggacugacauuua

SEQ ID NO: 438890 - RNA, 19 nt, Homo sapiens
  misc_RNA (1)...(19): siRNA sense strand
uuacgacuuuggcuacuua

SEQ ID NO: 438891 - RNA, 19 nt, Homo sapiens
  misc_RNA (1)...(19): siRNA sense strand
ugagauccuucgauuguuu

SEQ ID NO: 438892 - RNA, 19 nt, Homo sapiens
  misc_RNA (1)...(19): siRNA sense strand
gaauugaaacccaguacuu

SEQ ID NO: 438893 - RNA, 19 nt, Homo sapiens
  misc_RNA (1)...(19): siRNA sense strand
gacuuuggcuacuuaauca

SEQ ID NO: 438894 - RNA, 19 nt, Homo sapiens
  misc_RNA (1)...(19): siRNA sense strand
gguguaauguagacuuguu

SEQ ID NO: 438895 - RNA, 19 nt, Homo sapiens
  misc_RNA (1)...(19): siRNA sense strand
ugaaugagcaaggagaaua

SEQ ID NO: 438896 - RNA, 19 nt, Homo sapiens
  misc_RNA (1)...(19): siRNA sense strand
caagacccauuggagaauu

SEQ ID NO: 438897 - RNA, 19 nt, Homo sapiens
  misc_RNA (1)...(19): siRNA sense strand
aaagauaauucagcuagga

SEQ ID NO: 438898 - RNA, 19 nt, Homo sapiens
  misc_RNA (1)...(19): siRNA sense strand
gaaaauucgucaaguuauc

SEQ ID NO: 438899 - RNA, 19 nt, Homo sapiens
  misc_RNA (1)...(19): siRNA sense strand
auaauuacguugcuaugga

SEQ ID NO: 438900 - RNA, 19 nt, Homo sapiens
  misc_RNA (1)...(19): siRNA sense strand
uaccaacuauugcggugua

SEQ ID NO: 438901 - RNA, 19 nt, Homo sapiens
  misc_RNA (1)...(19): siRNA sense strand
ucucaaagguggauuacag

SEQ ID NO: 438902 - RNA, 19 nt, Homo sapiens
  misc_RNA (1)...(19): siRNA sense strand
gaggaggaaggaauugaaa

SEQ ID NO: 438903 - RNA, 19 nt, Homo sapiens
  misc_RNA (1)...(19): siRNA sense strand
cuacuaacaacaucuggua

SEQ ID NO: 438904 - RNA, 19 nt, Homo sapiens
  misc_RNA (1)...(19): siRNA sense strand
cuauagagcuacuaacaac

SEQ ID NO: 438905 - RNA, 19 nt, Homo sapiens
  misc_RNA (1)...(19): siRNA sense strand
gacuaucaauaccaacuau

SEQ ID NO: 438906 - RNA, 19 nt, Homo sapiens
  misc_RNA (1)...(19): siRNA sense strand
ggagaauucaggagcaaug

SEQ ID NO: 438907 - RNA, 19 nt, Homo sapiens
  misc_RNA (1)...(19): siRNA sense strand
ggauaggaccacaacauca

SEQ ID NO: 438908 - RNA, 19 nt, Homo sapiens
  misc_RNA (1)...(19): siRNA sense strand
gaacggauaggaccacaac

SEQ ID NO: 438909 - RNA, 19 nt, Homo sapiens
  misc_RNA (1)...(19): siRNA sense strand
caacuauugcgguguaaug

SEQ ID NO: 438910 - RNA, 19 nt, Homo sapiens
  misc_RNA (1)...(19): siRNA sense strand
ccaguacuuugcagaacuu

SEQ ID NO: 438911 - RNA, 19 nt, Homo sapiens
  misc_RNA (1)...(19): siRNA sense strand
gcgguguaauguagacuug

SEQ ID NO: 438912 - RNA, 19 nt, Homo sapiens
  misc_RNA (1)...(19): siRNA sense strand
ggagugguccucugugaag

SEQ ID NO: 438913 - RNA, 19 nt, Homo sapiens
  misc_RNA (1)...(19): siRNA sense strand
ucuuugagauccuucgauu

SEQ ID NO: 438914 - RNA, 19 nt, Homo sapiens
  misc_RNA (1)...(19): siRNA sense strand
uacaggagguggcagaaca

SEQ ID NO: 438915 - RNA, 19 nt, Homo sapiens
  misc_RNA (1)...(19): siRNA sense strand
cuauugcgguguaauguag

SEQ ID NO: 438916 - RNA, 19 nt, Homo sapiens
  misc_RNA (1)...(19): siRNA sense strand
cgacuuuggcuacuuaauc

SEQ ID NO: 438917 - RNA, 19 nt, Homo sapiens
  misc_RNA (1)...(19): siRNA sense strand
gcaagacccauuggagaau

SEQ ID NO: 438918 - RNA, 19 nt, Homo sapiens
  misc_RNA (1)...(19): siRNA sense strand
agaauacccuccaggaacu

SEQ ID NO: 438919 - RNA, 19 nt, Homo sapiens
  misc_RNA (1)...(19): siRNA sense strand
gaacuucuuaugacuucug

SEQ ID NO: 438920 - RNA, 19 nt, Homo sapiens
  misc_RNA (1)...(19): siRNA sense strand
gugaaguaccucaugaaga

SEQ ID NO: 438921 - RNA, 19 nt, Homo sapiens
  misc_RNA (1)...(19): siRNA sense strand
gaaugagcaaggagaauac

SEQ ID NO: 438922 - RNA, 19 nt, Homo sapiens
  misc_RNA (1)...(19): siRNA sense strand
acucuaacuugccugaaga

SEQ ID NO: 438923 - RNA, 19 nt, Homo sapiens
  misc_RNA (1)...(19): siRNA sense strand
gauaggaccacaacaucag

SEQ ID NO: 438924 - RNA, 19 nt, Homo sapiens
  misc_RNA (1)...(19): siRNA sense strand
cuaggacugacauuuauga

SEQ ID NO: 438925 - RNA, 19 nt, Homo sapiens
  misc_RNA (1)...(19): siRNA sense strand
gugaaggggucaaaugguu

SEQ ID NO: 438926 - RNA, 19 nt, Homo sapiens
  misc_RNA (1)...(19): siRNA sense strand
ugacuaucaauaccaacua

SEQ ID NO: 438927 - RNA, 19 nt, Homo sapiens
  misc_RNA (1)...(19): siRNA sense strand
cuaacuugccugaagaaga

SEQ ID NO: 438928 - RNA, 19 nt, Homo sapiens
  misc_RNA (1)...(19): siRNA sense strand
ugacggaggacauguaugc

SEQ ID NO: 438929 - RNA, 19 nt, Homo sapiens
  misc_RNA (1)...(19): siRNA sense strand
ccuaaccaacucuaacuug

SEQ ID NO: 438930 - RNA, 19 nt, Homo sapiens
  misc_RNA (1)...(19): siRNA sense strand
cuggagugguccucuguga

SEQ ID NO: 438931 - RNA, 19 nt, Homo sapiens
  misc_RNA (1)...(19): siRNA sense strand
guguaauguagacuuguua

SEQ ID NO: 438932 - RNA, 19 nt, Homo sapiens
  misc_RNA (1)...(19): siRNA sense strand
ugacuucuuugagauccuu

SEQ ID NO: 438933 - RNA, 19 nt, Homo sapiens
  misc_RNA (1)...(19): siRNA sense strand
aauugaaacccaguacuuu

SEQ ID NO: 438934 - RNA, 19 nt, Homo sapiens
  misc_RNA (1)...(19): siRNA sense strand
ugaggaggaaggaauugaa

SEQ ID NO: 438935 - RNA, 19 nt, Homo sapiens
  misc_RNA (1)...(19): siRNA sense strand
agcuaggacugacauuuau

SEQ ID NO: 438936 - RNA, 19 nt, Homo sapiens
  misc_RNA (1)...(19): siRNA sense strand
uuugagauccuucgauugu

SEQ ID NO: 438937 - RNA, 19 nt, Homo sapiens
  misc_RNA (1)...(19): siRNA sense strand
gagcuacuaacaacaucug

SEQ ID NO: 438938 - RNA, 19 nt, Homo sapiens
  misc_RNA (1)...(19): siRNA sense strand
gcucacaggaauggccuuu

SEQ ID NO: 438939 - RNA, 19 nt, Homo sapiens
  misc_RNA (1)...(19): siRNA sense strand
ugcaagacccauuggagaa

SEQ ID NO: 438940 - RNA, 19 nt, Homo sapiens
  misc_RNA (1)...(19): siRNA sense strand
ucuauagagcuacuaacaa

SEQ ID NO: 438941 - RNA, 19 nt, Homo sapiens
  misc_RNA (1)...(19): siRNA sense strand
guuacgacuuuggcuacuu

SEQ ID NO: 438942 - RNA, 19 nt, Homo sapiens
  misc_RNA (1)...(19): siRNA sense strand
ggaauugaaacccaguacu

SEQ ID NO: 438943 - RNA, 19 nt, Homo sapiens
  misc_RNA (1)...(19): siRNA sense strand
ugucauuucauagcgguua

SEQ ID NO: 438944 - RNA, 19 nt, Homo sapiens
  misc_RNA (1)...(19): siRNA sense strand
ggaaauccgugcuguguau

SEQ ID NO: 438945 - RNA, 19 nt, Homo sapiens
  misc_RNA (1)...(19): siRNA sense strand
ggccaucgcugccgucuuu

SEQ ID NO: 438946 - RNA, 19 nt, Homo sapiens
  misc_RNA (1)...(19): siRNA sense strand
uaagaaagaugcugagcuu

SEQ ID NO: 438947 - RNA, 19 nt, Homo sapiens
  misc_RNA (1)...(19): siRNA sense strand
caacauagccaucgacuuc

SEQ ID NO: 438948 - RNA, 19 nt, Homo sapiens
  misc_RNA (1)...(19): siRNA sense strand
ucaauaaacugcaccaugu

SEQ ID NO: 438949 - RNA, 19 nt, Homo sapiens
  misc_RNA (1)...(19): siRNA sense strand
ggaagacucugccaugaca

SEQ ID NO: 438950 - RNA, 19 nt, Homo sapiens
  misc_RNA (1)...(19): siRNA sense strand
ugacagacaucguggaaau

SEQ ID NO: 438951 - RNA, 19 nt, Homo sapiens
  misc_RNA (1)...(19): siRNA sense strand
ccaaagccguccuguguau

SEQ ID NO: 438952 - RNA, 19 nt, Homo sapiens
  misc_RNA (1)...(19): siRNA sense strand
aaaagaagauggagaauga

SEQ ID NO: 438953 - RNA, 19 nt, Homo sapiens
  misc_RNA (1)...(19): siRNA sense strand
ugagagaggagaaugaaua

SEQ ID NO: 438954 - RNA, 19 nt, Homo sapiens
  misc_RNA (1)...(19): siRNA sense strand
gaccaaagccguccugugu

SEQ ID NO: 438955 - RNA, 19 nt, Homo sapiens
  misc_RNA (1)...(19): siRNA sense strand
ggacuuugccuuugcagaa

SEQ ID NO: 438956 - RNA, 19 nt, Homo sapiens
  misc_RNA (1)...(19): siRNA sense strand
gagaaaaucuugauagaca

SEQ ID NO: 438957 - RNA, 19 nt, Homo sapiens
  misc_RNA (1)...(19): siRNA sense strand
gaaagaugcugagcuucug

SEQ ID NO: 438958 - RNA, 19 nt, Homo sapiens
  misc_RNA (1)...(19): siRNA sense strand
gagagaggagaaugaauaa

SEQ ID NO: 438959 - RNA, 19 nt, Homo sapiens
  misc_RNA (1)...(19): siRNA sense strand
ugucauagcucagguuguu

SEQ ID NO: 438960 - RNA, 19 nt, Homo sapiens
  misc_RNA (1)...(19): siRNA sense strand
ggaguggacuuugccuuug

SEQ ID NO: 438961 - RNA, 19 nt, Homo sapiens
  misc_RNA (1)...(19): siRNA sense strand
ggagaugcaacaauaagaa

SEQ ID NO: 438962 - RNA, 19 nt, Homo sapiens
  misc_RNA (1)...(19): siRNA sense strand
caucaucccugacagaagu

SEQ ID NO: 438963 - RNA, 19 nt, Homo sapiens
  misc_RNA (1)...(19): siRNA sense strand
gagaaucagucggccuauu

SEQ ID NO: 438964 - RNA, 19 nt, Homo sapiens
  misc_RNA (1)...(19): siRNA sense strand
gggcauugcugcugucaag

SEQ ID NO: 438965 - RNA, 19 nt, Homo sapiens
  misc_RNA (1)...(19): siRNA sense strand
gaacauucacgacaucauc

SEQ ID NO: 438966 - RNA, 19 nt, Homo sapiens
  misc_RNA (1)...(19): siRNA sense strand
caagaacauucacgacauc

SEQ ID NO: 438967 - RNA, 19 nt, Homo sapiens
  misc_RNA (1)...(19): siRNA sense strand
cgacagaggaggugacaga

SEQ ID NO: 438968 - RNA, 19 nt, Homo sapiens
  misc_RNA (1)...(19): siRNA sense strand
gaaaugagagaggagaaug

SEQ ID NO: 438969 - RNA, 19 nt, Homo sapiens
  misc_RNA (1)...(19): siRNA sense strand
gagaugcaacaauaagaaa

SEQ ID NO: 438970 - RNA, 19 nt, Homo sapiens
  misc_RNA (1)...(19): siRNA sense strand
acugauagcuuauagugau

SEQ ID NO: 438971 - RNA, 19 nt, Homo sapiens
  misc_RNA (1)...(19): siRNA sense strand
cguacucccucaugaaguu

SEQ ID NO: 438972 - RNA, 19 nt, Homo sapiens
  misc_RNA (1)...(19): siRNA sense strand
cagaggaggugacagacau

SEQ ID NO: 438973 - RNA, 19 nt, Homo sapiens
  misc_RNA (1)...(19): siRNA sense strand
guacaugggcgcacuugug

SEQ ID NO: 438974 - RNA, 19 nt, Homo sapiens
  misc_RNA (1)...(19): siRNA sense strand
ggugggaugugccucaauc

SEQ ID NO: 438975 - RNA, 19 nt, Homo sapiens
  misc_RNA (1)...(19): siRNA sense strand
cagcccacaucaagaaguu

SEQ ID NO: 438976 - RNA, 19 nt, Homo sapiens
  misc_RNA (1)...(19): siRNA sense strand
acaagaacauucacgacau

SEQ ID NO: 438977 - RNA, 19 nt, Homo sapiens
  misc_RNA (1)...(19): siRNA sense strand
caagagagacaggaccaaa

SEQ ID NO: 438978 - RNA, 19 nt, Homo sapiens
  misc_RNA (1)...(19): siRNA sense strand
gaugcaacaauaagaaaga

SEQ ID NO: 438979 - RNA, 19 nt, Homo sapiens
  misc_RNA (1)...(19): siRNA sense strand
ucccaugagugacuucaaa

SEQ ID NO: 438980 - RNA, 19 nt, Homo sapiens
  misc_RNA (1)...(19): siRNA sense strand
gggaugugccucaaucuca

SEQ ID NO: 438981 - RNA, 19 nt, Homo sapiens
  misc_RNA (1)...(19): siRNA sense strand
acacacugauagcuuauag

SEQ ID NO: 438982 - RNA, 19 nt, Homo sapiens
  misc_RNA (1)...(19): siRNA sense strand
ggaggaugcagucgagaug

SEQ ID NO: 438983 - RNA, 19 nt, Homo sapiens
  misc_RNA (1)...(19): siRNA sense strand
agaaucagucggccuauug

SEQ ID NO: 438984 - RNA, 19 nt, Homo sapiens
  misc_RNA (1)...(19): siRNA sense strand
ggaaaugagagaggagaau

SEQ ID NO: 438985 - RNA, 19 nt, Homo sapiens
  misc_RNA (1)...(19): siRNA sense strand
uucacacacugauagcuua

SEQ ID NO: 438986 - RNA, 19 nt, Homo sapiens
  misc_RNA (1)...(19): siRNA sense strand
cgacaucaucccugacaga

SEQ ID NO: 438987 - RNA, 19 nt, Homo sapiens
  misc_RNA (1)...(19): siRNA sense strand
caucaucggaguggacuuu

SEQ ID NO: 438988 - RNA, 19 nt, Homo sapiens
  misc_RNA (1)...(19): siRNA sense strand
cacccaacgugucugagaa

SEQ ID NO: 438989 - RNA, 19 nt, Homo sapiens
  misc_RNA (1)...(19): siRNA sense strand
gggagaugcaacaauaaga

SEQ ID NO: 438990 - RNA, 19 nt, Homo sapiens
  misc_RNA (1)...(19): siRNA sense strand
caacgugucugagaaaauc

SEQ ID NO: 438991 - RNA, 19 nt, Homo sapiens
  misc_RNA (1)...(19): siRNA sense strand
ggaccuugguggcaguucu

SEQ ID NO: 438992 - RNA, 19 nt, Homo sapiens
  misc_RNA (1)...(19): siRNA sense strand
gcauugcugcugucaagga

SEQ ID NO: 438993 - RNA, 19 nt, Homo sapiens
  misc_RNA (1)...(19): siRNA sense strand
gcugaugacacugaagaaa

SEQ ID NO: 438994 - RNA, 19 nt, Homo sapiens
  misc_RNA (1)...(19): siRNA sense strand
cggaguggacuuugccuuu

SEQ ID NO: 438995 - RNA, 19 nt, Homo sapiens
  misc_RNA (1)...(19): siRNA sense strand
gccuuuggcucuaauucug

SEQ ID NO: 438996 - RNA, 19 nt, Homo sapiens
  misc_RNA (1)...(19): siRNA sense strand
ggugacagacaucguggaa

SEQ ID NO: 438997 - RNA, 19 nt, Homo sapiens
  misc_RNA (1)...(19): siRNA sense strand
gaauaaccccagcaacaaa

SEQ ID NO: 438998 - RNA, 19 nt, Homo sapiens
  misc_RNA (1)...(19): siRNA sense strand
gaaucagucggccuauugu

SEQ ID NO: 438999 - RNA, 19 nt, Homo sapiens
  misc_RNA (1)...(19): siRNA sense strand
gacaucaucccugacagaa

SEQ ID NO: 439000 - RNA, 19 nt, Homo sapiens
  misc_RNA (1)...(19): siRNA sense strand
acagacaucguggaaauga

SEQ ID NO: 439001 - RNA, 19 nt, Homo sapiens
  misc_RNA (1)...(19): siRNA sense strand
cgccaucgcugcgugcuau

SEQ ID NO: 439002 - RNA, 19 nt, Homo sapiens
  misc_RNA (1)...(19): siRNA sense strand
cggcagcccacaucaagaa

SEQ ID NO: 439003 - RNA, 19 nt, Homo sapiens
  misc_RNA (1)...(19): siRNA sense strand
gauccucuccuuguacaug

SEQ ID NO: 439004 - RNA, 19 nt, Homo sapiens
  misc_RNA (1)...(19): siRNA sense strand
gcuacuacaagaacauuca

SEQ ID NO: 439005 - RNA, 19 nt, Homo sapiens
  misc_RNA (1)...(19): siRNA sense strand
ugccugggcuacuacaaga

SEQ ID NO: 439006 - RNA, 19 nt, Homo sapiens
  misc_RNA (1)...(19): siRNA sense strand
agacaucguggaaaugaga

SEQ ID NO: 439007 - RNA, 19 nt, Homo sapiens
  misc_RNA (1)...(19): siRNA sense strand
ucccgauccucuccuugua

SEQ ID NO: 439008 - RNA, 19 nt, Homo sapiens
  misc_RNA (1)...(19): siRNA sense strand
ucaccaacauagccaucga

SEQ ID NO: 439009 - RNA, 19 nt, Homo sapiens
  misc_RNA (1)...(19): siRNA sense strand
cagaggcaguggcgauuuu

SEQ ID NO: 439010 - RNA, 19 nt, Homo sapiens
  misc_RNA (1)...(19): siRNA sense strand
aaaugagagaggagaauga

SEQ ID NO: 439011 - RNA, 19 nt, Homo sapiens
  misc_RNA (1)...(19): siRNA sense strand
caauaaacugcaccaugug

SEQ ID NO: 439012 - RNA, 19 nt, Homo sapiens
  misc_RNA (1)...(19): siRNA sense strand
gugaacagcaagagagaca

SEQ ID NO: 439013 - RNA, 19 nt, Homo sapiens
  misc_RNA (1)...(19): siRNA sense strand
gaguggacuuugccuuugc

SEQ ID NO: 439014 - RNA, 19 nt, Homo sapiens
  misc_RNA (1)...(19): siRNA sense strand
cugauagcuuauagugauu

SEQ ID NO: 439015 - RNA, 19 nt, Homo sapiens
  misc_RNA (1)...(19): siRNA sense strand
gcucugugcugcggaucau

SEQ ID NO: 439016 - RNA, 19 nt, Homo sapiens
  misc_RNA (1)...(19): siRNA sense strand
gguggcugaugacacugaa

SEQ ID NO: 439017 - RNA, 19 nt, Homo sapiens
  misc_RNA (1)...(19): siRNA sense strand
gcuucacagucaccuggaa

SEQ ID NO: 439018 - RNA, 19 nt, Homo sapiens
  misc_RNA (1)...(19): siRNA sense strand
ggcauucucuuaaaacaca

SEQ ID NO: 439019 - RNA, 19 nt, Homo sapiens
  misc_RNA (1)...(19): siRNA sense strand
ggggaagacucugccauga

SEQ ID NO: 439020 - RNA, 19 nt, Homo sapiens
  misc_RNA (1)...(19): siRNA sense strand
ccggguggcugaugacacu

SEQ ID NO: 439021 - RNA, 19 nt, Homo sapiens
  misc_RNA (1)...(19): siRNA sense strand
gcggaucuucuccuucuuc

SEQ ID NO: 439022 - RNA, 19 nt, Homo sapiens
  misc_RNA (1)...(19): siRNA sense strand
uugcggaucuucuccuucu

SEQ ID NO: 439023 - RNA, 19 nt, Homo sapiens
  misc_RNA (1)...(19): siRNA sense strand
aaaugugggccugguguuu

SEQ ID NO: 439024 - RNA, 19 nt, Homo sapiens
  misc_RNA (1)...(19): siRNA sense strand
ccgauccucuccuuguaca

SEQ ID NO: 439025 - RNA, 19 nt, Homo sapiens
  misc_RNA (1)...(19): siRNA sense strand
auugucaaccucuuuguuu

SEQ ID NO: 439026 - RNA, 19 nt, Homo sapiens
  misc_RNA (1)...(19): siRNA sense strand
cagacaugccuccgacaga

SEQ ID NO: 439027 - RNA, 19 nt, Homo sapiens
  misc_RNA (1)...(19): siRNA sense strand
gcaagagagacaggaccaa

SEQ ID NO: 439028 - RNA, 19 nt, Homo sapiens
  misc_RNA (1)...(19): siRNA sense strand
guauccugcuuucgacaag

SEQ ID NO: 439029 - RNA, 19 nt, Homo sapiens
  misc_RNA (1)...(19): siRNA sense strand
ccagugaccuccugaguug

SEQ ID NO: 439030 - RNA, 19 nt, Homo sapiens
  misc_RNA (1)...(19): siRNA sense strand
ccuauugcccugcuacuua

SEQ ID NO: 439031 - RNA, 19 nt, Homo sapiens
  misc_RNA (1)...(19): siRNA sense strand
cgagugguguggacuguug

SEQ ID NO: 439032 - RNA, 19 nt, Homo sapiens
  misc_RNA (1)...(19): siRNA sense strand
cuauugcccugcuacuuaa

SEQ ID NO: 439033 - RNA, 19 nt, Homo sapiens
  misc_RNA (1)...(19): siRNA sense strand
gcucaacguccucagcauu

SEQ ID NO: 439034 - RNA, 19 nt, Homo sapiens
  misc_RNA (1)...(19): siRNA sense strand
ggugugcgcuguccugcau

SEQ ID NO: 439035 - RNA, 19 nt, Homo sapiens
  misc_RNA (1)...(19): siRNA sense strand
caacaguggccuuccuauc

SEQ ID NO: 439036 - RNA, 19 nt, Homo sapiens
  misc_RNA (1)...(19): siRNA sense strand
ggcagcauccuaggacuaa

SEQ ID NO: 439037 - RNA, 19 nt, Homo sapiens
  misc_RNA (1)...(19): siRNA sense strand
ggcacuuucugacaucaug

SEQ ID NO: 439038 - RNA, 19 nt, Homo sapiens
  misc_RNA (1)...(19): siRNA sense strand
ucugggaccuccugacauc

SEQ ID NO: 439039 - RNA, 19 nt, Homo sapiens
  misc_RNA (1)...(19): siRNA sense strand
gggcagcauccuaggacua

SEQ ID NO: 439040 - RNA, 19 nt, Homo sapiens
  misc_RNA (1)...(19): siRNA sense strand
acaguggccuuccuaucug

SEQ ID NO: 439041 - RNA, 19 nt, Homo sapiens
  misc_RNA (1)...(19): siRNA sense strand
cauuggaugugccuacagu

SEQ ID NO: 439042 - RNA, 19 nt, Homo sapiens
  misc_RNA (1)...(19): siRNA sense strand
acaccacccugggcuaugu

SEQ ID NO: 439043 - RNA, 19 nt, Homo sapiens
  misc_RNA (1)...(19): siRNA sense strand
cagcauugccaucauuaca

SEQ ID NO: 439044 - RNA, 19 nt, Homo sapiens
  misc_RNA (1)...(19): siRNA sense strand
ugggcuaugugcaggcuuu

SEQ ID NO: 439045 - RNA, 19 nt, Homo sapiens
  misc_RNA (1)...(19): siRNA sense strand
gguuguggcccuuauacug

SEQ ID NO: 439046 - RNA, 19 nt, Homo sapiens
  misc_RNA (1)...(19): siRNA sense strand
cccggaaccucagcuguga

SEQ ID NO: 439047 - RNA, 19 nt, Homo sapiens
  misc_RNA (1)...(19): siRNA sense strand
ccuggacucuggacacuac

SEQ ID NO: 439048 - RNA, 19 nt, Homo sapiens
  misc_RNA (1)...(19): siRNA sense strand
ccaugagacuguggcacuu

SEQ ID NO: 439049 - RNA, 19 nt, Homo sapiens
  misc_RNA (1)...(19): siRNA sense strand
cauccuaggacuaaucauc

SEQ ID NO: 439050 - RNA, 19 nt, Homo sapiens
  misc_RNA (1)...(19): siRNA sense strand
gggcuucuggucuaucguu

SEQ ID NO: 439051 - RNA, 19 nt, Homo sapiens
  misc_RNA (1)...(19): siRNA sense strand
gaccuggacucuggacacu

SEQ ID NO: 439052 - RNA, 19 nt, Homo sapiens
  misc_RNA (1)...(19): siRNA sense strand
aaagguucuuccaccguau

SEQ ID NO: 439053 - RNA, 19 nt, Homo sapiens
  misc_RNA (1)...(19): siRNA sense strand
ccuccugccucccaacagu

SEQ ID NO: 439054 - RNA, 19 nt, Homo sapiens
  misc_RNA (1)...(19): siRNA sense strand
ccaaggacaucaagaagau

SEQ ID NO: 439055 - RNA, 19 nt, Homo sapiens
  misc_RNA (1)...(19): siRNA sense strand
gacaugggauuuggccuuu

SEQ ID NO: 439056 - RNA, 19 nt, Homo sapiens
  misc_RNA (1)...(19): siRNA sense strand
aaacauugaagacgucauu

SEQ ID NO: 439057 - RNA, 19 nt, Homo sapiens
  misc_RNA (1)...(19): siRNA sense strand
gaugaugacaugggauuug

SEQ ID NO: 439058 - RNA, 19 nt, Homo sapiens
  misc_RNA (1)...(19): siRNA sense strand
gcgccaaggacaucaagaa

SEQ ID NO: 439059 - RNA, 19 nt, Homo sapiens
  misc_RNA (1)...(19): siRNA sense strand
gccaaggacaucaagaaga

SEQ ID NO: 439060 - RNA, 19 nt, Homo sapiens
  misc_RNA (1)...(19): siRNA sense strand
cagaugaugacaugggauu

SEQ ID NO: 439061 - RNA, 19 nt, Homo sapiens
  misc_RNA (1)...(19): siRNA sense strand
aaacaaaccuuucaaguuc

SEQ ID NO: 439062 - RNA, 19 nt, Homo sapiens
  misc_RNA (1)...(19): siRNA sense strand
ggaagaaguuugauucauc

SEQ ID NO: 439063 - RNA, 19 nt, Homo sapiens
  misc_RNA (1)...(19): siRNA sense strand
aaacguguguggugcacua

SEQ ID NO: 439064 - RNA, 19 nt, Homo sapiens
  misc_RNA (1)...(19): siRNA sense strand
caaacaggaagucaucaaa

SEQ ID NO: 439065 - RNA, 19 nt, Homo sapiens
  misc_RNA (1)...(19): siRNA sense strand
gcaaacaggaagucaucaa

SEQ ID NO: 439066 - RNA, 19 nt, Homo sapiens
  misc_RNA (1)...(19): siRNA sense strand
gggaagaaguuugauucau

SEQ ID NO: 439067 - RNA, 19 nt, Homo sapiens
  misc_RNA (1)...(19): siRNA sense strand
caaugccacccucaucuuu

SEQ ID NO: 439068 - RNA, 19 nt, Homo sapiens
  misc_RNA (1)...(19): siRNA sense strand
ccuuucaaguucagaauug

SEQ ID NO: 439069 - RNA, 19 nt, Homo sapiens
  misc_RNA (1)...(19): siRNA sense strand
gaaggacauuccccaagaa

SEQ ID NO: 439070 - RNA, 19 nt, Homo sapiens
  misc_RNA (1)...(19): siRNA sense strand
guucagaauuggcaaacag

SEQ ID NO: 439071 - RNA, 19 nt, Homo sapiens
  misc_RNA (1)...(19): siRNA sense strand
gagacagaaacaaaccuuu

SEQ ID NO: 439072 - RNA, 19 nt, Homo sapiens
  misc_RNA (1)...(19): siRNA sense strand
aggaagucaucaaagguuu

SEQ ID NO: 439073 - RNA, 19 nt, Homo sapiens
  misc_RNA (1)...(19): siRNA sense strand
guggugcacuacacaggaa

SEQ ID NO: 439074 - RNA, 19 nt, Homo sapiens
  misc_RNA (1)...(19): siRNA sense strand
caggaagucaucaaagguu

SEQ ID NO: 439075 - RNA, 19 nt, Homo sapiens
  misc_RNA (1)...(19): siRNA sense strand
acacaggaaugcuccaaaa

SEQ ID NO: 439076 - RNA, 19 nt, Homo sapiens
  misc_RNA (1)...(19): siRNA sense strand
ggugucaucccucccaaug

SEQ ID NO: 439077 - RNA, 19 nt, Homo sapiens
  misc_RNA (1)...(19): siRNA sense strand
gcguggagaucgagaccau

SEQ ID NO: 439078 - RNA, 19 nt, Homo sapiens
  misc_RNA (1)...(19): siRNA sense strand
aaacaggaagucaucaaag

SEQ ID NO: 439079 - RNA, 19 nt, Homo sapiens
  misc_RNA (1)...(19): siRNA sense strand
cagaauuggcaaacaggaa

SEQ ID NO: 439080 - RNA, 19 nt, Homo sapiens
  misc_RNA (1)...(19): siRNA sense strand
ccaaugccacccucaucuu

SEQ ID NO: 439081 - RNA, 19 nt, Homo sapiens
  misc_RNA (1)...(19): siRNA sense strand
aacaggaagucaucaaagg

SEQ ID NO: 439082 - RNA, 19 nt, Homo sapiens
  misc_RNA (1)...(19): siRNA sense strand
caaguucagaauuggcaaa

SEQ ID NO: 439083 - RNA, 19 nt, Homo sapiens
  misc_RNA (1)...(19): siRNA sense strand
gcugcucaacuuagaguga

SEQ ID NO: 439084 - RNA, 19 nt, Homo sapiens
  misc_RNA (1)...(19): siRNA sense strand
aacaaaccuuucaaguuca

SEQ ID NO: 439085 - RNA, 19 nt, Homo sapiens
  misc_RNA (1)...(19): siRNA sense strand
augccacccucaucuuuga

SEQ ID NO: 439086 - RNA, 19 nt, Homo sapiens
  misc_RNA (1)...(19): siRNA sense strand
caggaaugcuccaaaaugg

SEQ ID NO: 439087 - RNA, 19 nt, Homo sapiens
  misc_RNA (1)...(19): siRNA sense strand
aaacaaaccuuucaaguuc

SEQ ID NO: 439088 - RNA, 19 nt, Homo sapiens
  misc_RNA (1)...(19): siRNA sense strand
ggaagaaguuugauucauc

SEQ ID NO: 439089 - RNA, 19 nt, Homo sapiens
  misc_RNA (1)...(19): siRNA sense strand
aaacguguguggugcacua

SEQ ID NO: 439090 - RNA, 19 nt, Homo sapiens
  misc_RNA (1)...(19): siRNA sense strand
caaacaggaagucaucaaa

SEQ ID NO: 439091 - RNA, 19 nt, Homo sapiens
  misc_RNA (1)...(19): siRNA sense strand
gcaaacaggaagucaucaa

SEQ ID NO: 439092 - RNA, 19 nt, Homo sapiens
  misc_RNA (1)...(19): siRNA sense strand
gggaagaaguuugauucau

SEQ ID NO: 439093 - RNA, 19 nt, Homo sapiens
  misc_RNA (1)...(19): siRNA sense strand
ccuuucaaguucagaauug

SEQ ID NO: 439094 - RNA, 19 nt, Homo sapiens
  misc_RNA (1)...(19): siRNA sense strand
gaaggacauuccccaagaa

SEQ ID NO: 439095 - RNA, 19 nt, Homo sapiens
  misc_RNA (1)...(19): siRNA sense strand
guucagaauuggcaaacag

SEQ ID NO: 439096 - RNA, 19 nt, Homo sapiens
  misc_RNA (1)...(19): siRNA sense strand
gagacagaaacaaaccuuu

SEQ ID NO: 439097 - RNA, 19 nt, Homo sapiens
  misc_RNA (1)...(19): siRNA sense strand
aggaagucaucaaagguuu

SEQ ID NO: 439098 - RNA, 19 nt, Homo sapiens
  misc_RNA (1)...(19): siRNA sense strand
guggugcacuacacaggaa

SEQ ID NO: 439099 - RNA, 19 nt, Homo sapiens
  misc_RNA (1)...(19): siRNA sense strand
caggaagucaucaaagguu

SEQ ID NO: 439100 - RNA, 19 nt, Homo sapiens
  misc_RNA (1)...(19): siRNA sense strand
acacaggaaugcuccaaaa

SEQ ID NO: 439101 - RNA, 19 nt, Homo sapiens
  misc_RNA (1)...(19): siRNA sense strand
gcguggagaucgagaccau

SEQ ID NO: 439102 - RNA, 19 nt, Homo sapiens
  misc_RNA (1)...(19): siRNA sense strand
aaacaggaagucaucaaag

SEQ ID NO: 439103 - RNA, 19 nt, Homo sapiens
  misc_RNA (1)...(19): siRNA sense strand
cagaauuggcaaacaggaa

SEQ ID NO: 439104 - RNA, 19 nt, Homo sapiens
  misc_RNA (1)...(19): siRNA sense strand
aacaggaagucaucaaagg

SEQ ID NO: 439105 - RNA, 19 nt, Homo sapiens
  misc_RNA (1)...(19): siRNA sense strand
caaguucagaauuggcaaa

SEQ ID NO: 439106 - RNA, 19 nt, Homo sapiens
  misc_RNA (1)...(19): siRNA sense strand
aacaaaccuuucaaguuca

SEQ ID NO: 439107 - RNA, 19 nt, Homo sapiens
  misc_RNA (1)...(19): siRNA sense strand
caggaaugcuccaaaaugg

SEQ ID NO: 439108 - RNA, 19 nt, Homo sapiens
  misc_RNA (1)...(19): siRNA sense strand
cgaaacagcucaucagugu

SEQ ID NO: 439109 - RNA, 19 nt, Homo sapiens
  misc_RNA (1)...(19): siRNA sense strand
gcucaucagugucaucaua

SEQ ID NO: 439110 - RNA, 19 nt, Homo sapiens
  misc_RNA (1)...(19): siRNA sense strand
acacagggcuccucagaaa

SEQ ID NO: 439111 - RNA, 19 nt, Homo sapiens
  misc_RNA (1)...(19): siRNA sense strand
ccaaugaccuggacucugu

SEQ ID NO: 439112 - RNA, 19 nt, Homo sapiens
  misc_RNA (1)...(19): siRNA sense strand
gcaaagccaucgacuacga

SEQ ID NO: 439113 - RNA, 19 nt, Homo sapiens
  misc_RNA (1)...(19): siRNA sense strand
agacacaccucaacaucua

SEQ ID NO: 439114 - RNA, 19 nt, Homo sapiens
  misc_RNA (1)...(19): siRNA sense strand
gggcagaccucuuccaagu

SEQ ID NO: 439115 - RNA, 19 nt, Homo sapiens
  misc_RNA (1)...(19): siRNA sense strand
ugaaagacgugaacgacaa

SEQ ID NO: 439116 - RNA, 19 nt, Homo sapiens
  misc_RNA (1)...(19): siRNA sense strand
ggacuacaguauacauugu

SEQ ID NO: 439117 - RNA, 19 nt, Homo sapiens
  misc_RNA (1)...(19): siRNA sense strand
caaggcaccuaccaaguga

SEQ ID NO: 439118 - RNA, 19 nt, Homo sapiens
  misc_RNA (1)...(19): siRNA sense strand
gaaugacaaugcacccuau

SEQ ID NO: 439119 - RNA, 19 nt, Homo sapiens
  misc_RNA (1)...(19): siRNA sense strand
ggacuaacauguacaacac

SEQ ID NO: 439120 - RNA, 19 nt, Homo sapiens
  misc_RNA (1)...(19): siRNA sense strand
ccaaguggaucccgucuca

SEQ ID NO: 439121 - RNA, 19 nt, Homo sapiens
  misc_RNA (1)...(19): siRNA sense strand
ucaaugacccugugaucua

SEQ ID NO: 439122 - RNA, 19 nt, Homo sapiens
  misc_RNA (1)...(19): siRNA sense strand
cuaccucgaugccuacuuu

SEQ ID NO: 439123 - RNA, 19 nt, Homo sapiens
  misc_RNA (1)...(19): siRNA sense strand
caaccaggacuacaguaua

SEQ ID NO: 439124 - RNA, 19 nt, Homo sapiens
  misc_RNA (1)...(19): siRNA sense strand
gagcaaagccaucgacuac

SEQ ID NO: 439125 - RNA, 19 nt, Homo sapiens
  misc_RNA (1)...(19): siRNA sense strand
ggacgugaaugacaaugca

SEQ ID NO: 439126 - RNA, 19 nt, Homo sapiens
  misc_RNA (1)...(19): siRNA sense strand
gacaagaacagucaggaaa

SEQ ID NO: 439127 - RNA, 19 nt, Homo sapiens
  misc_RNA (1)...(19): siRNA sense strand
ggacagcgagcaucucuuc

SEQ ID NO: 439128 - RNA, 19 nt, Homo sapiens
  misc_RNA (1)...(19): siRNA sense strand
gcugaaggccugugacuug

SEQ ID NO: 439129 - RNA, 19 nt, Homo sapiens
  misc_RNA (1)...(19): siRNA sense strand
gggagaugcuggugauugu

SEQ ID NO: 439130 - RNA, 19 nt, Homo sapiens
  misc_RNA (1)...(19): siRNA sense strand
gagacacucuacacauuca

SEQ ID NO: 439131 - RNA, 19 nt, Homo sapiens
  misc_RNA (1)...(19): siRNA sense strand
caacagccgucugcucuuc

SEQ ID NO: 439132 - RNA, 19 nt, Homo sapiens
  misc_RNA (1)...(19): siRNA sense strand
ggacaccacggaccuguga

SEQ ID NO: 439133 - RNA, 19 nt, Homo sapiens
  misc_RNA (1)...(19): siRNA sense strand
caagaacagucaggaaauc

SEQ ID NO: 439134 - RNA, 19 nt, Homo sapiens
  misc_RNA (1)...(19): siRNA sense strand
agucagaccugucgaaaca

SEQ ID NO: 439135 - RNA, 19 nt, Homo sapiens
  misc_RNA (1)...(19): siRNA sense strand
gaauaagacuuuugugauc

SEQ ID NO: 439136 - RNA, 19 nt, Homo sapiens
  misc_RNA (1)...(19): siRNA sense strand
caacggcucuguguacauc

SEQ ID NO: 439137 - RNA, 19 nt, Homo sapiens
  misc_RNA (1)...(19): siRNA sense strand
ggacaagaacagucaggaa

SEQ ID NO: 439138 - RNA, 19 nt, Homo sapiens
  misc_RNA (1)...(19): siRNA sense strand
cgacaacucuguggaugug

SEQ ID NO: 439139 - RNA, 19 nt, Homo sapiens
  misc_RNA (1)...(19): siRNA sense strand
gaccauggccuucgugugu

SEQ ID NO: 439140 - RNA, 19 nt, Homo sapiens
  misc_RNA (1)...(19): siRNA sense strand
cggaagaccaggacaauga

SEQ ID NO: 439141 - RNA, 19 nt, Homo sapiens
  misc_RNA (1)...(19): siRNA sense strand
gagccuggauuacgagaca

SEQ ID NO: 439142 - RNA, 19 nt, Homo sapiens
  misc_RNA (1)...(19): siRNA sense strand
acaaugacccucugaccua

SEQ ID NO: 439143 - RNA, 19 nt, Homo sapiens
  misc_RNA (1)...(19): siRNA sense strand
acaaagaccugggcuugga

SEQ ID NO: 439144 - RNA, 19 nt, Homo sapiens
  misc_RNA (1)...(19): siRNA sense strand
caacaugacgucagugauc

SEQ ID NO: 439145 - RNA, 19 nt, Homo sapiens
  misc_RNA (1)...(19): siRNA sense strand
caguccagcuacaacuuua

SEQ ID NO: 439146 - RNA, 19 nt, Homo sapiens
  misc_RNA (1)...(19): siRNA sense strand
guaccucucucccuccaau

SEQ ID NO: 439147 - RNA, 19 nt, Homo sapiens
  misc_RNA (1)...(19): siRNA sense strand
agauacagcuugugaacau

SEQ ID NO: 439148 - RNA, 19 nt, Homo sapiens
  misc_RNA (1)...(19): siRNA sense strand
uauccgcgcugguggacua

SEQ ID NO: 439149 - RNA, 19 nt, Homo sapiens
  misc_RNA (1)...(19): siRNA sense strand
ggccagagacgaugauuca

SEQ ID NO: 439150 - RNA, 19 nt, Homo sapiens
  misc_RNA (1)...(19): siRNA sense strand
acgagacacucuacacauu

SEQ ID NO: 439151 - RNA, 19 nt, Homo sapiens
  misc_RNA (1)...(19): siRNA sense strand
gcacaggccaccacacaca

SEQ ID NO: 439152 - RNA, 19 nt, Homo sapiens
  misc_RNA (1)...(19): siRNA sense strand
gcaaccaggacuacaguau

SEQ ID NO: 439153 - RNA, 19 nt, Homo sapiens
  misc_RNA (1)...(19): siRNA sense strand
ccagguggcuguggugguu

SEQ ID NO: 439154 - RNA, 19 nt, Homo sapiens
  misc_RNA (1)...(19): siRNA sense strand
ggacaucaacgacaaugca

SEQ ID NO: 439155 - RNA, 19 nt, Homo sapiens
  misc_RNA (1)...(19): siRNA sense strand
ggugccaacuacuucauga

SEQ ID NO: 439156 - RNA, 19 nt, Homo sapiens
  misc_RNA (1)...(19): siRNA sense strand
aaacagcucaucaguguca

SEQ ID NO: 439157 - RNA, 19 nt, Homo sapiens
  misc_RNA (1)...(19): siRNA sense strand
guagacgucugcgugaaug

SEQ ID NO: 439158 - RNA, 19 nt, Homo sapiens
  misc_RNA (1)...(19): siRNA sense strand
caacaagagcgcuuucuac

SEQ ID NO: 439159 - RNA, 19 nt, Homo sapiens
  misc_RNA (1)...(19): siRNA sense strand
gcaauggcaccuuccuguu

SEQ ID NO: 439160 - RNA, 19 nt, Homo sapiens
  misc_RNA (1)...(19): siRNA sense strand
gagcacaggccaccacaca

SEQ ID NO: 439161 - RNA, 19 nt, Homo sapiens
  misc_RNA (1)...(19): siRNA sense strand
ccaacagacaggcgauuaa

SEQ ID NO: 439162 - RNA, 19 nt, Homo sapiens
  misc_RNA (1)...(19): siRNA sense strand
ccaaggcaccuaccaagug

SEQ ID NO: 439163 - RNA, 19 nt, Homo sapiens
  misc_RNA (1)...(19): siRNA sense strand
caauggcaccuuccuguug

SEQ ID NO: 439164 - RNA, 19 nt, Homo sapiens
  misc_RNA (1)...(19): siRNA sense strand
gagaaggucaucccuagca

SEQ ID NO: 439165 - RNA, 19 nt, Homo sapiens
  misc_RNA (1)...(19): siRNA sense strand
gaacagucaggaaaucaag

SEQ ID NO: 439166 - RNA, 19 nt, Homo sapiens
  misc_RNA (1)...(19): siRNA sense strand
ucaacucccuggacgacaa

SEQ ID NO: 439167 - RNA, 19 nt, Homo sapiens
  misc_RNA (1)...(19): siRNA sense strand
gaaagacgugaacgacaau

SEQ ID NO: 439168 - RNA, 19 nt, Homo sapiens
  misc_RNA (1)...(19): siRNA sense strand
gcuacaacuuuacggugaa

SEQ ID NO: 439169 - RNA, 19 nt, Homo sapiens
  misc_RNA (1)...(19): siRNA sense strand
guuagcggcuccuacaaca

SEQ ID NO: 439170 - RNA, 19 nt, Homo sapiens
  misc_RNA (1)...(19): siRNA sense strand
gacaaugcacccgugguua

SEQ ID NO: 439171 - RNA, 19 nt, Homo sapiens
  misc_RNA (1)...(19): siRNA sense strand
ggacggugacggugaggaa

SEQ ID NO: 439172 - RNA, 19 nt, Homo sapiens
  misc_RNA (1)...(19): siRNA sense strand
gcgacaaaggcaucaauga

SEQ ID NO: 439173 - RNA, 19 nt, Homo sapiens
  misc_RNA (1)...(19): siRNA sense strand
ccucugaccuaugggauga

SEQ ID NO: 439174 - RNA, 19 nt, Homo sapiens
  misc_RNA (1)...(19): siRNA sense strand
caaugacccucugaccuau

SEQ ID NO: 439175 - RNA, 19 nt, Homo sapiens
  misc_RNA (1)...(19): siRNA sense strand
ccaccacccugaaucucuu

SEQ ID NO: 439176 - RNA, 19 nt, Homo sapiens
  misc_RNA (1)...(19): siRNA sense strand
gauacagcuugugaacauu

SEQ ID NO: 439177 - RNA, 19 nt, Homo sapiens
  misc_RNA (1)...(19): siRNA sense strand
ggaguggugccaacuacuu

SEQ ID NO: 439178 - RNA, 19 nt, Homo sapiens
  misc_RNA (1)...(19): siRNA sense strand
ggccguggauaaagacaug

SEQ ID NO: 439179 - RNA, 19 nt, Homo sapiens
  misc_RNA (1)...(19): siRNA sense strand
ggacgacaacucuguggau

SEQ ID NO: 439180 - RNA, 19 nt, Homo sapiens
  misc_RNA (1)...(19): siRNA sense strand
ggacauucaggacauagau

SEQ ID NO: 439181 - RNA, 19 nt, Homo sapiens
  misc_RNA (1)...(19): siRNA sense strand
caacagacaggcgauuaau

SEQ ID NO: 439182 - RNA, 19 nt, Homo sapiens
  misc_RNA (1)...(19): siRNA sense strand
guacaucaaccagagcaaa

SEQ ID NO: 439183 - RNA, 19 nt, Homo sapiens
  misc_RNA (1)...(19): siRNA sense strand
ggaccagccugaccuugac

SEQ ID NO: 439184 - RNA, 19 nt, Homo sapiens
  misc_RNA (1)...(19): siRNA sense strand
gcauguaccacaacaccuu

SEQ ID NO: 439185 - RNA, 19 nt, Homo sapiens
  misc_RNA (1)...(19): siRNA sense strand
cgacaaugcacccgugguu

SEQ ID NO: 439186 - RNA, 19 nt, Homo sapiens
  misc_RNA (1)...(19): siRNA sense strand
gccaacagacaggcgauua

SEQ ID NO: 439187 - RNA, 19 nt, Homo sapiens
  misc_RNA (1)...(19): siRNA sense strand
gagaauaagacuuuuguga

SEQ ID NO: 439188 - RNA, 19 nt, Homo sapiens
  misc_RNA (1)...(19): siRNA sense strand
gugcccagcuggagauaca

SEQ ID NO: 439189 - RNA, 19 nt, Homo sapiens
  misc_RNA (1)...(19): siRNA sense strand
ggagucagaccugucgaaa

SEQ ID NO: 439190 - RNA, 19 nt, Homo sapiens
  misc_RNA (1)...(19): siRNA sense strand
gcgauuaaugcggcucuua

SEQ ID NO: 439191 - RNA, 19 nt, Homo sapiens
  misc_RNA (1)...(19): siRNA sense strand
ggagauacagcuugugaac

SEQ ID NO: 439192 - RNA, 19 nt, Homo sapiens
  misc_RNA (1)...(19): siRNA sense strand
acaauggcgucauccuguu

SEQ ID NO: 439193 - RNA, 19 nt, Homo sapiens
  misc_RNA (1)...(19): siRNA sense strand
ggcuguggauggcgacaaa

SEQ ID NO: 439194 - RNA, 19 nt, Homo sapiens
  misc_RNA (1)...(19): siRNA sense strand
ucagugucaucauaggauu

SEQ ID NO: 439195 - RNA, 19 nt, Homo sapiens
  misc_RNA (1)...(19): siRNA sense strand
caguauacauuguggacau

SEQ ID NO: 439196 - RNA, 19 nt, Homo sapiens
  misc_RNA (1)...(19): siRNA sense strand
ggaagccuccucauuacca

SEQ ID NO: 439197 - RNA, 19 nt, Homo sapiens
  misc_RNA (1)...(19): siRNA sense strand
ccgaagaggcccaagugaa

SEQ ID NO: 439198 - RNA, 19 nt, Homo sapiens
  misc_RNA (1)...(19): siRNA sense strand
gaaguuccuagccaacaug

SEQ ID NO: 439199 - RNA, 19 nt, Homo sapiens
  misc_RNA (1)...(19): siRNA sense strand
agagggagaugcuggugau

SEQ ID NO: 439200 - RNA, 19 nt, Homo sapiens
  misc_RNA (1)...(19): siRNA sense strand
cagggugucuucucgaucu

SEQ ID NO: 439201 - RNA, 19 nt, Homo sapiens
  misc_RNA (1)...(19): siRNA sense strand
cgaaguuccuagccaacau

SEQ ID NO: 439202 - RNA, 19 nt, Homo sapiens
  misc_RNA (1)...(19): siRNA sense strand
ugacacagggcuccucaga

SEQ ID NO: 439203 - RNA, 19 nt, Homo sapiens
  misc_RNA (1)...(19): siRNA sense strand
cgaagaggcccaagugaac

SEQ ID NO: 439204 - RNA, 19 nt, Homo sapiens
  misc_RNA (1)...(19): siRNA sense strand
caaugacccugugaucuac

SEQ ID NO: 439205 - RNA, 19 nt, Homo sapiens
  misc_RNA (1)...(19): siRNA sense strand
gaagccuccucauuaccau

SEQ ID NO: 439206 - RNA, 19 nt, Homo sapiens
  misc_RNA (1)...(19): siRNA sense strand
gaccacaggcccacguuuc

SEQ ID NO: 439207 - RNA, 19 nt, Homo sapiens
  misc_RNA (1)...(19): siRNA sense strand
ugagagugauggacgucaa

SEQ ID NO: 439208 - RNA, 19 nt, Homo sapiens
  misc_RNA (1)...(19): siRNA sense strand
ggagucagcugccaagaga

SEQ ID NO: 439209 - RNA, 19 nt, Homo sapiens
  misc_RNA (1)...(19): siRNA sense strand
ggagacaccuggagcaaga

SEQ ID NO: 439210 - RNA, 19 nt, Homo sapiens
  misc_RNA (1)...(19): siRNA sense strand
ccacagccaucucacauuu

SEQ ID NO: 439211 - RNA, 19 nt, Homo sapiens
  misc_RNA (1)...(19): siRNA sense strand
gaagagacuugcuuugaca

SEQ ID NO: 439212 - RNA, 19 nt, Homo sapiens
  misc_RNA (1)...(19): siRNA sense strand
gcaaaccgcugccaugaag

SEQ ID NO: 439213 - RNA, 19 nt, Homo sapiens
  misc_RNA (1)...(19): siRNA sense strand
gcacaacuucgaauuauga

SEQ ID NO: 439214 - RNA, 19 nt, Homo sapiens
  misc_RNA (1)...(19): siRNA sense strand
gaguaaaccugaagcugaa

SEQ ID NO: 439215 - RNA, 19 nt, Homo sapiens
  misc_RNA (1)...(19): siRNA sense strand
caucucacauuuccaagua

SEQ ID NO: 439216 - RNA, 19 nt, Homo sapiens
  misc_RNA (1)...(19): siRNA sense strand
gaggaaaucugcacaacca

SEQ ID NO: 439217 - RNA, 19 nt, Homo sapiens
  misc_RNA (1)...(19): siRNA sense strand
gaagagacaacaugaagug

SEQ ID NO: 439218 - RNA, 19 nt, Homo sapiens
  misc_RNA (1)...(19): siRNA sense strand
cgagaucagugcauuguug

SEQ ID NO: 439219 - RNA, 19 nt, Homo sapiens
  misc_RNA (1)...(19): siRNA sense strand
ggacaugcauugccuacuc

SEQ ID NO: 439220 - RNA, 19 nt, Homo sapiens
  misc_RNA (1)...(19): siRNA sense strand
gcaaugcguugguuuguac

SEQ ID NO: 439221 - RNA, 19 nt, Homo sapiens
  misc_RNA (1)...(19): siRNA sense strand
gcccauagcugagaagugu

SEQ ID NO: 439222 - RNA, 19 nt, Homo sapiens
  misc_RNA (1)...(19): siRNA sense strand
cagcacaacuucgaauuau

SEQ ID NO: 439223 - RNA, 19 nt, Homo sapiens
  misc_RNA (1)...(19): siRNA sense strand
ggaccacacagaacuauga

SEQ ID NO: 439224 - RNA, 19 nt, Homo sapiens
  misc_RNA (1)...(19): siRNA sense strand
ggucaguccuacaagauug

SEQ ID NO: 439225 - RNA, 19 nt, Homo sapiens
  misc_RNA (1)...(19): siRNA sense strand
gacuggugguuacauguua

SEQ ID NO: 439226 - RNA, 19 nt, Homo sapiens
  misc_RNA (1)...(19): siRNA sense strand
aaagcaagcccgguuguua

SEQ ID NO: 439227 - RNA, 19 nt, Homo sapiens
  misc_RNA (1)...(19): siRNA sense strand
gaaggcagcggacgcauca

SEQ ID NO: 439228 - RNA, 19 nt, Homo sapiens
  misc_RNA (1)...(19): siRNA sense strand
gagugugugugucuuggua

SEQ ID NO: 439229 - RNA, 19 nt, Homo sapiens
  misc_RNA (1)...(19): siRNA sense strand
gaaaucugcacaaccaaug

SEQ ID NO: 439230 - RNA, 19 nt, Homo sapiens
  misc_RNA (1)...(19): siRNA sense strand
gaacgacacauuccacaag

SEQ ID NO: 439231 - RNA, 19 nt, Homo sapiens
  misc_RNA (1)...(19): siRNA sense strand
ccacaagcgucaugaagag

SEQ ID NO: 439232 - RNA, 19 nt, Homo sapiens
  misc_RNA (1)...(19): siRNA sense strand
ggaggaagccgagguuuua

SEQ ID NO: 439233 - RNA, 19 nt, Homo sapiens
  misc_RNA (1)...(19): siRNA sense strand
ccaugugucuuaccauuca

SEQ ID NO: 439234 - RNA, 19 nt, Homo sapiens
  misc_RNA (1)...(19): siRNA sense strand
gaggcaggcucagcaaaug

SEQ ID NO: 439235 - RNA, 19 nt, Homo sapiens
  misc_RNA (1)...(19): siRNA sense strand
gaggagaguggaaguguga

SEQ ID NO: 439236 - RNA, 19 nt, Homo sapiens
  misc_RNA (1)...(19): siRNA sense strand
gcuggaugaugguagauug

SEQ ID NO: 439237 - RNA, 19 nt, Homo sapiens
  misc_RNA (1)...(19): siRNA sense strand
gcaagcccauagcugagaa

SEQ ID NO: 439238 - RNA, 19 nt, Homo sapiens
  misc_RNA (1)...(19): siRNA sense strand
ccuaaagacuccaugaucu

SEQ ID NO: 439239 - RNA, 19 nt, Homo sapiens
  misc_RNA (1)...(19): siRNA sense strand
gcacguguguugggaaugg

SEQ ID NO: 439240 - RNA, 19 nt, Homo sapiens
  misc_RNA (1)...(19): siRNA sense strand
gggaugcaguggcugaaga

SEQ ID NO: 439241 - RNA, 19 nt, Homo sapiens
  misc_RNA (1)...(19): siRNA sense strand
gaaauagaugcaacgauca

SEQ ID NO: 439242 - RNA, 19 nt, Homo sapiens
  misc_RNA (1)...(19): siRNA sense strand
ggcaaugcguugguuugua

SEQ ID NO: 439243 - RNA, 19 nt, Homo sapiens
  misc_RNA (1)...(19): siRNA sense strand
gaaaccugcuccagugcau

SEQ ID NO: 439244 - RNA, 19 nt, Homo sapiens
  misc_RNA (1)...(19): siRNA sense strand
gaagacacaaggaaauaag

SEQ ID NO: 439245 - RNA, 19 nt, Homo sapiens
  misc_RNA (1)...(19): siRNA sense strand
gcagaagagacaacaugaa

SEQ ID NO: 439246 - RNA, 19 nt, Homo sapiens
  misc_RNA (1)...(19): siRNA sense strand
gaaggauaaucgaggaaac

SEQ ID NO: 439247 - RNA, 19 nt, Homo sapiens
  misc_RNA (1)...(19): siRNA sense strand
gagauucaugggagaagua

SEQ ID NO: 439248 - RNA, 19 nt, Homo sapiens
  misc_RNA (1)...(19): siRNA sense strand
ggacgcaucacuugcacuu

SEQ ID NO: 439249 - RNA, 19 nt, Homo sapiens
  misc_RNA (1)...(19): siRNA sense strand
acaaggaaauaagcaaaug

SEQ ID NO: 439250 - RNA, 19 nt, Homo sapiens
  misc_RNA (1)...(19): siRNA sense strand
cgagggagaauaagcugua

SEQ ID NO: 439251 - RNA, 19 nt, Homo sapiens
  misc_RNA (1)...(19): siRNA sense strand
guaugugcauggugucaga

SEQ ID NO: 439252 - RNA, 19 nt, Homo sapiens
  misc_RNA (1)...(19): siRNA sense strand
gggcacaugcugaacugua

SEQ ID NO: 439253 - RNA, 19 nt, Homo sapiens
  misc_RNA (1)...(19): siRNA sense strand
ggaaaucugcacaaccaau

SEQ ID NO: 439254 - RNA, 19 nt, Homo sapiens
  misc_RNA (1)...(19): siRNA sense strand
caaccacaauuacacugau

SEQ ID NO: 439255 - RNA, 19 nt, Homo sapiens
  misc_RNA (1)...(19): siRNA sense strand
ucacuugcacuucuagaaa

SEQ ID NO: 439256 - RNA, 19 nt, Homo sapiens
  misc_RNA (1)...(19): siRNA sense strand
gcugggcgagggagaauaa

SEQ ID NO: 439257 - RNA, 19 nt, Homo sapiens
  misc_RNA (1)...(19): siRNA sense strand
uuacagaccuauccaagcu

SEQ ID NO: 439258 - RNA, 19 nt, Homo sapiens
  misc_RNA (1)...(19): siRNA sense strand
gcaacgaucaggacacaag

SEQ ID NO: 439259 - RNA, 19 nt, Homo sapiens
  misc_RNA (1)...(19): siRNA sense strand
cuuaugagcguccuaaaga

SEQ ID NO: 439260 - RNA, 19 nt, Homo sapiens
  misc_RNA (1)...(19): siRNA sense strand
ggagaaguaugugcauggu

SEQ ID NO: 439261 - RNA, 19 nt, Homo sapiens
  misc_RNA (1)...(19): siRNA sense strand
gggcagaagagacaacaug

SEQ ID NO: 439262 - RNA, 19 nt, Homo sapiens
  misc_RNA (1)...(19): siRNA sense strand
cacaugagacuggugguua

SEQ ID NO: 439263 - RNA, 19 nt, Homo sapiens
  misc_RNA (1)...(19): siRNA sense strand
ugaagagacuugcuuugac

SEQ ID NO: 439264 - RNA, 19 nt, Homo sapiens
  misc_RNA (1)...(19): siRNA sense strand
cagcuguaacccagacuua

SEQ ID NO: 439265 - RNA, 19 nt, Homo sapiens
  misc_RNA (1)...(19): siRNA sense strand
gacuuacgguggcaacuca

SEQ ID NO: 439266 - RNA, 19 nt, Homo sapiens
  misc_RNA (1)...(19): siRNA sense strand
gagaucagugcauuguuga

SEQ ID NO: 439267 - RNA, 19 nt, Homo sapiens
  misc_RNA (1)...(19): siRNA sense strand
gggauaagcagcaugacau

SEQ ID NO: 439268 - RNA, 19 nt, Homo sapiens
  misc_RNA (1)...(19): siRNA sense strand
uggagagccaugugucuua

SEQ ID NO: 439269 - RNA, 19 nt, Homo sapiens
  misc_RNA (1)...(19): siRNA sense strand
ugaagacacaaggaaauaa

SEQ ID NO: 439270 - RNA, 19 nt, Homo sapiens
  misc_RNA (1)...(19): siRNA sense strand
ggagaucagugggauaagc

SEQ ID NO: 439271 - RNA, 19 nt, Homo sapiens
  misc_RNA (1)...(19): siRNA sense strand
cagaagagacaacaugaag

SEQ ID NO: 439272 - RNA, 19 nt, Homo sapiens
  misc_RNA (1)...(19): siRNA sense strand
ggagagccaugugucuuac

SEQ ID NO: 439273 - RNA, 19 nt, Homo sapiens
  misc_RNA (1)...(19): siRNA sense strand
ugagacuggugguuacaug

SEQ ID NO: 439274 - RNA, 19 nt, Homo sapiens
  misc_RNA (1)...(19): siRNA sense strand
gcagcggacgcaucacuug

SEQ ID NO: 439275 - RNA, 19 nt, Homo sapiens
  misc_RNA (1)...(19): siRNA sense strand
ucgaaguauuuaucacuga

SEQ ID NO: 439276 - RNA, 19 nt, Homo sapiens
  misc_RNA (1)...(19): siRNA sense strand
caagugguccugucgaagu

SEQ ID NO: 439277 - RNA, 19 nt, Homo sapiens
  misc_RNA (1)...(19): siRNA sense strand
ggagauucaugggagaagu

SEQ ID NO: 439278 - RNA, 19 nt, Homo sapiens
  misc_RNA (1)...(19): siRNA sense strand
gcugaagacacaaggaaau

SEQ ID NO: 439279 - RNA, 19 nt, Homo sapiens
  misc_RNA (1)...(19): siRNA sense strand
gaucaggacacaaggacau

SEQ ID NO: 439280 - RNA, 19 nt, Homo sapiens
  misc_RNA (1)...(19): siRNA sense strand
caaguacacugggaacacu

SEQ ID NO: 439281 - RNA, 19 nt, Homo sapiens
  misc_RNA (1)...(19): siRNA sense strand
gguuuguacuuguuaugga

SEQ ID NO: 439282 - RNA, 19 nt, Homo sapiens
  misc_RNA (1)...(19): siRNA sense strand
ccauagcugagaaguguuu

SEQ ID NO: 439283 - RNA, 19 nt, Homo sapiens
  misc_RNA (1)...(19): siRNA sense strand
ggaugaugguagauuguac

SEQ ID NO: 439284 - RNA, 19 nt, Homo sapiens
  misc_RNA (1)...(19): siRNA sense strand
ggucauguaccgcauugga

SEQ ID NO: 439285 - RNA, 19 nt, Homo sapiens
  misc_RNA (1)...(19): siRNA sense strand
ggcagaagagacaacauga

SEQ ID NO: 439286 - RNA, 19 nt, Homo sapiens
  misc_RNA (1)...(19): siRNA sense strand
uccaugaucugggacugua

SEQ ID NO: 439287 - RNA, 19 nt, Homo sapiens
  misc_RNA (1)...(19): siRNA sense strand
gaaguauuuaucacugaga

SEQ ID NO: 439288 - RNA, 19 nt, Homo sapiens
  misc_RNA (1)...(19): siRNA sense strand
acacaaggaaauaagcaaa

SEQ ID NO: 439289 - RNA, 19 nt, Homo sapiens
  misc_RNA (1)...(19): siRNA sense strand
gagcaagaaggauaaucga

SEQ ID NO: 439290 - RNA, 19 nt, Homo sapiens
  misc_RNA (1)...(19): siRNA sense strand
ggagcaagaaggauaaucg

SEQ ID NO: 439291 - RNA, 19 nt, Homo sapiens
  misc_RNA (1)...(19): siRNA sense strand
gaggagaccacaugagacu

SEQ ID NO: 439292 - RNA, 19 nt, Homo sapiens
  misc_RNA (1)...(19): siRNA sense strand
cacuugcacuucuagaaau

SEQ ID NO: 439293 - RNA, 19 nt, Homo sapiens
  misc_RNA (1)...(19): siRNA sense strand
aagugguccugucgaagua

SEQ ID NO: 439294 - RNA, 19 nt, Homo sapiens
  misc_RNA (1)...(19): siRNA sense strand
gagcaggaccagaaauacu

SEQ ID NO: 439295 - RNA, 19 nt, Homo sapiens
  misc_RNA (1)...(19): siRNA sense strand
gcaagcccgguuguuauga

SEQ ID NO: 439296 - RNA, 19 nt, Homo sapiens
  misc_RNA (1)...(19): siRNA sense strand
cugaagagacuugcuuuga

SEQ ID NO: 439297 - RNA, 19 nt, Homo sapiens
  misc_RNA (1)...(19): siRNA sense strand
cugaagacacaaggaaaua

SEQ ID NO: 439298 - RNA, 19 nt, Homo sapiens
  misc_RNA (1)...(19): siRNA sense strand
gacauccuauagaauugga

SEQ ID NO: 439299 - RNA, 19 nt, Homo sapiens
  misc_RNA (1)...(19): siRNA sense strand
cauguuagagugugugugu

SEQ ID NO: 439300 - RNA, 19 nt, Homo sapiens
  misc_RNA (1)...(19): siRNA sense strand
gcuucgagaucagugcauu

SEQ ID NO: 439301 - RNA, 19 nt, Homo sapiens
  misc_RNA (1)...(19): siRNA sense strand
caacaaccacaauuacacu

SEQ ID NO: 439302 - RNA, 19 nt, Homo sapiens
  misc_RNA (1)...(19): siRNA sense strand
ugcaguggcugaagacaca

SEQ ID NO: 439303 - RNA, 19 nt, Homo sapiens
  misc_RNA (1)...(19): siRNA sense strand
acuugcacuucuagaaaua

SEQ ID NO: 439304 - RNA, 19 nt, Homo sapiens
  misc_RNA (1)...(19): siRNA sense strand
uggaggagaccacaugaga

SEQ ID NO: 439305 - RNA, 19 nt, Homo sapiens
  misc_RNA (1)...(19): siRNA sense strand
gguccugucgaaguauuua

SEQ ID NO: 439306 - RNA, 19 nt, Homo sapiens
  misc_RNA (1)...(19): siRNA sense strand
aagcaagcccgguuguuau

SEQ ID NO: 439307 - RNA, 19 nt, Homo sapiens
  misc_RNA (1)...(19): siRNA sense strand
gcugagaaguguuuugauc

SEQ ID NO: 439308 - RNA, 19 nt, Homo sapiens
  misc_RNA (1)...(19): siRNA sense strand
ggagucagcugccaagaga

SEQ ID NO: 439309 - RNA, 19 nt, Homo sapiens
  misc_RNA (1)...(19): siRNA sense strand
ggagacaccuggagcaaga

SEQ ID NO: 439310 - RNA, 19 nt, Homo sapiens
  misc_RNA (1)...(19): siRNA sense strand
ccacagccaucucacauuu

SEQ ID NO: 439311 - RNA, 19 nt, Homo sapiens
  misc_RNA (1)...(19): siRNA sense strand
gaagagacuugcuuugaca

SEQ ID NO: 439312 - RNA, 19 nt, Homo sapiens
  misc_RNA (1)...(19): siRNA sense strand
gcaaaccgcugccaugaag

SEQ ID NO: 439313 - RNA, 19 nt, Homo sapiens
  misc_RNA (1)...(19): siRNA sense strand
gcacaacuucgaauuauga

SEQ ID NO: 439314 - RNA, 19 nt, Homo sapiens
  misc_RNA (1)...(19): siRNA sense strand
gaguaaaccugaagcugaa

SEQ ID NO: 439315 - RNA, 19 nt, Homo sapiens
  misc_RNA (1)...(19): siRNA sense strand
caucucacauuuccaagua

SEQ ID NO: 439316 - RNA, 19 nt, Homo sapiens
  misc_RNA (1)...(19): siRNA sense strand
gaggaaaucugcacaacca

SEQ ID NO: 439317 - RNA, 19 nt, Homo sapiens
  misc_RNA (1)...(19): siRNA sense strand
gaagagacaacaugaagug

SEQ ID NO: 439318 - RNA, 19 nt, Homo sapiens
  misc_RNA (1)...(19): siRNA sense strand
cgagaucagugcauuguug

SEQ ID NO: 439319 - RNA, 19 nt, Homo sapiens
  misc_RNA (1)...(19): siRNA sense strand
ggacaugcauugccuacuc

SEQ ID NO: 439320 - RNA, 19 nt, Homo sapiens
  misc_RNA (1)...(19): siRNA sense strand
gcaaugcguugguuuguac

SEQ ID NO: 439321 - RNA, 19 nt, Homo sapiens
  misc_RNA (1)...(19): siRNA sense strand
gcccauagcugagaagugu

SEQ ID NO: 439322 - RNA, 19 nt, Homo sapiens
  misc_RNA (1)...(19): siRNA sense strand
cagcacaacuucgaauuau

SEQ ID NO: 439323 - RNA, 19 nt, Homo sapiens
  misc_RNA (1)...(19): siRNA sense strand
ggaccacacagaacuauga

SEQ ID NO: 439324 - RNA, 19 nt, Homo sapiens
  misc_RNA (1)...(19): siRNA sense strand
ggucaguccuacaagauug

SEQ ID NO: 439325 - RNA, 19 nt, Homo sapiens
  misc_RNA (1)...(19): siRNA sense strand
gacuggugguuacauguua

SEQ ID NO: 439326 - RNA, 19 nt, Homo sapiens
  misc_RNA (1)...(19): siRNA sense strand
aaagcaagcccgguuguua

SEQ ID NO: 439327 - RNA, 19 nt, Homo sapiens
  misc_RNA (1)...(19): siRNA sense strand
gaaggcagcggacgcauca

SEQ ID NO: 439328 - RNA, 19 nt, Homo sapiens
  misc_RNA (1)...(19): siRNA sense strand
gagugugugugucuuggua

SEQ ID NO: 439329 - RNA, 19 nt, Homo sapiens
  misc_RNA (1)...(19): siRNA sense strand
gaaaucugcacaaccaaug

SEQ ID NO: 439330 - RNA, 19 nt, Homo sapiens
  misc_RNA (1)...(19): siRNA sense strand
gaacgacacauuccacaag

SEQ ID NO: 439331 - RNA, 19 nt, Homo sapiens
  misc_RNA (1)...(19): siRNA sense strand
ccacaagcgucaugaagag

SEQ ID NO: 439332 - RNA, 19 nt, Homo sapiens
  misc_RNA (1)...(19): siRNA sense strand
ggaggaagccgagguuuua

SEQ ID NO: 439333 - RNA, 19 nt, Homo sapiens
  misc_RNA (1)...(19): siRNA sense strand
ccaugugucuuaccauuca

SEQ ID NO: 439334 - RNA, 19 nt, Homo sapiens
  misc_RNA (1)...(19): siRNA sense strand
gaggcaggcucagcaaaug

SEQ ID NO: 439335 - RNA, 19 nt, Homo sapiens
  misc_RNA (1)...(19): siRNA sense strand
gaggagaguggaaguguga

SEQ ID NO: 439336 - RNA, 19 nt, Homo sapiens
  misc_RNA (1)...(19): siRNA sense strand
gcuggaugaugguagauug

SEQ ID NO: 439337 - RNA, 19 nt, Homo sapiens
  misc_RNA (1)...(19): siRNA sense strand
gcaagcccauagcugagaa

SEQ ID NO: 439338 - RNA, 19 nt, Homo sapiens
  misc_RNA (1)...(19): siRNA sense strand
ccuaaagacuccaugaucu

SEQ ID NO: 439339 - RNA, 19 nt, Homo sapiens
  misc_RNA (1)...(19): siRNA sense strand
gcacguguguugggaaugg

SEQ ID NO: 439340 - RNA, 19 nt, Homo sapiens
  misc_RNA (1)...(19): siRNA sense strand
gggaugcaguggcugaaga

SEQ ID NO: 439341 - RNA, 19 nt, Homo sapiens
  misc_RNA (1)...(19): siRNA sense strand
gaaauagaugcaacgauca

SEQ ID NO: 439342 - RNA, 19 nt, Homo sapiens
  misc_RNA (1)...(19): siRNA sense strand
ggcaaugcguugguuugua

SEQ ID NO: 439343 - RNA, 19 nt, Homo sapiens
  misc_RNA (1)...(19): siRNA sense strand
gaaaccugcuccagugcau

SEQ ID NO: 439344 - RNA, 19 nt, Homo sapiens
  misc_RNA (1)...(19): siRNA sense strand
gaagacacaaggaaauaag

SEQ ID NO: 439345 - RNA, 19 nt, Homo sapiens
  misc_RNA (1)...(19): siRNA sense strand
gcagaagagacaacaugaa

SEQ ID NO: 439346 - RNA, 19 nt, Homo sapiens
  misc_RNA (1)...(19): siRNA sense strand
gaaggauaaucgaggaaac

SEQ ID NO: 439347 - RNA, 19 nt, Homo sapiens
  misc_RNA (1)...(19): siRNA sense strand
gagauucaugggagaagua

SEQ ID NO: 439348 - RNA, 19 nt, Homo sapiens
  misc_RNA (1)...(19): siRNA sense strand
ggacgcaucacuugcacuu

SEQ ID NO: 439349 - RNA, 19 nt, Homo sapiens
  misc_RNA (1)...(19): siRNA sense strand
acaaggaaauaagcaaaug

SEQ ID NO: 439350 - RNA, 19 nt, Homo sapiens
  misc_RNA (1)...(19): siRNA sense strand
cgagggagaauaagcugua

SEQ ID NO: 439351 - RNA, 19 nt, Homo sapiens
  misc_RNA (1)...(19): siRNA sense strand
guaugugcauggugucaga

SEQ ID NO: 439352 - RNA, 19 nt, Homo sapiens
  misc_RNA (1)...(19): siRNA sense strand
gggcacaugcugaacugua

SEQ ID NO: 439353 - RNA, 19 nt, Homo sapiens
  misc_RNA (1)...(19): siRNA sense strand
ggaaaucugcacaaccaau

SEQ ID NO: 439354 - RNA, 19 nt, Homo sapiens
  misc_RNA (1)...(19): siRNA sense strand
caaccacaauuacacugau

SEQ ID NO: 439355 - RNA, 19 nt, Homo sapiens
  misc_RNA (1)...(19): siRNA sense strand
ucacuugcacuucuagaaa

SEQ ID NO: 439356 - RNA, 19 nt, Homo sapiens
  misc_RNA (1)...(19): siRNA sense strand
gcugggcgagggagaauaa

SEQ ID NO: 439357 - RNA, 19 nt, Homo sapiens
  misc_RNA (1)...(19): siRNA sense strand
uuacagaccuauccaagcu

SEQ ID NO: 439358 - RNA, 19 nt, Homo sapiens
  misc_RNA (1)...(19): siRNA sense strand
gcaacgaucaggacacaag

SEQ ID NO: 439359 - RNA, 19 nt, Homo sapiens
  misc_RNA (1)...(19): siRNA sense strand
cuuaugagcguccuaaaga

SEQ ID NO: 439360 - RNA, 19 nt, Homo sapiens
  misc_RNA (1)...(19): siRNA sense strand
ggagaaguaugugcauggu

SEQ ID NO: 439361 - RNA, 19 nt, Homo sapiens
  misc_RNA (1)...(19): siRNA sense strand
gggcagaagagacaacaug

SEQ ID NO: 439362 - RNA, 19 nt, Homo sapiens
  misc_RNA (1)...(19): siRNA sense strand
cacaugagacuggugguua

SEQ ID NO: 439363 - RNA, 19 nt, Homo sapiens
  misc_RNA (1)...(19): siRNA sense strand
ugaagagacuugcuuugac

SEQ ID NO: 439364 - RNA, 19 nt, Homo sapiens
  misc_RNA (1)...(19): siRNA sense strand
cagcuguaacccagacuua

SEQ ID NO: 439365 - RNA, 19 nt, Homo sapiens
  misc_RNA (1)...(19): siRNA sense strand
gacuuacgguggcaacuca

SEQ ID NO: 439366 - RNA, 19 nt, Homo sapiens
  misc_RNA (1)...(19): siRNA sense strand
gagaucagugcauuguuga

SEQ ID NO: 439367 - RNA, 19 nt, Homo sapiens
  misc_RNA (1)...(19): siRNA sense strand
gggauaagcagcaugacau

SEQ ID NO: 439368 - RNA, 19 nt, Homo sapiens
  misc_RNA (1)...(19): siRNA sense strand
uggagagccaugugucuua

SEQ ID NO: 439369 - RNA, 19 nt, Homo sapiens
  misc_RNA (1)...(19): siRNA sense strand
ugaagacacaaggaaauaa

SEQ ID NO: 439370 - RNA, 19 nt, Homo sapiens
  misc_RNA (1)...(19): siRNA sense strand
ggagaucagugggauaagc

SEQ ID NO: 439371 - RNA, 19 nt, Homo sapiens
  misc_RNA (1)...(19): siRNA sense strand
cagaagagacaacaugaag

SEQ ID NO: 439372 - RNA, 19 nt, Homo sapiens
  misc_RNA (1)...(19): siRNA sense strand
ggagagccaugugucuuac

SEQ ID NO: 439373 - RNA, 19 nt, Homo sapiens
  misc_RNA (1)...(19): siRNA sense strand
ugagacuggugguuacaug

SEQ ID NO: 439374 - RNA, 19 nt, Homo sapiens
  misc_RNA (1)...(19): siRNA sense strand
gcagcggacgcaucacuug

SEQ ID NO: 439375 - RNA, 19 nt, Homo sapiens
  misc_RNA (1)...(19): siRNA sense strand
ucgaaguauuuaucacuga

SEQ ID NO: 439376 - RNA, 19 nt, Homo sapiens
  misc_RNA (1)...(19): siRNA sense strand
caagugguccugucgaagu

SEQ ID NO: 439377 - RNA, 19 nt, Homo sapiens
  misc_RNA (1)...(19): siRNA sense strand
ggagauucaugggagaagu

SEQ ID NO: 439378 - RNA, 19 nt, Homo sapiens
  misc_RNA (1)...(19): siRNA sense strand
gcugaagacacaaggaaau

SEQ ID NO: 439379 - RNA, 19 nt, Homo sapiens
  misc_RNA (1)...(19): siRNA sense strand
gaucaggacacaaggacau

SEQ ID NO: 439380 - RNA, 19 nt, Homo sapiens
  misc_RNA (1)...(19): siRNA sense strand
caaguacacugggaacacu

SEQ ID NO: 439381 - RNA, 19 nt, Homo sapiens
  misc_RNA (1)...(19): siRNA sense strand
gguuuguacuuguuaugga

SEQ ID NO: 439382 - RNA, 19 nt, Homo sapiens
  misc_RNA (1)...(19): siRNA sense strand
ccauagcugagaaguguuu

SEQ ID NO: 439383 - RNA, 19 nt, Homo sapiens
  misc_RNA (1)...(19): siRNA sense strand
ggaugaugguagauuguac

SEQ ID NO: 439384 - RNA, 19 nt, Homo sapiens
  misc_RNA (1)...(19): siRNA sense strand
ggucauguaccgcauugga

SEQ ID NO: 439385 - RNA, 19 nt, Homo sapiens
  misc_RNA (1)...(19): siRNA sense strand
ggcagaagagacaacauga

SEQ ID NO: 439386 - RNA, 19 nt, Homo sapiens
  misc_RNA (1)...(19): siRNA sense strand
uccaugaucugggacugua

SEQ ID NO: 439387 - RNA, 19 nt, Homo sapiens
  misc_RNA (1)...(19): siRNA sense strand
gaaguauuuaucacugaga

SEQ ID NO: 439388 - RNA, 19 nt, Homo sapiens
  misc_RNA (1)...(19): siRNA sense strand
acacaaggaaauaagcaaa

SEQ ID NO: 439389 - RNA, 19 nt, Homo sapiens
  misc_RNA (1)...(19): siRNA sense strand
gagcaagaaggauaaucga

SEQ ID NO: 439390 - RNA, 19 nt, Homo sapiens
  misc_RNA (1)...(19): siRNA sense strand
ggagcaagaaggauaaucg

SEQ ID NO: 439391 - RNA, 19 nt, Homo sapiens
  misc_RNA (1)...(19): siRNA sense strand
gaggagaccacaugagacu

SEQ ID NO: 439392 - RNA, 19 nt, Homo sapiens
  misc_RNA (1)...(19): siRNA sense strand
cacuugcacuucuagaaau

SEQ ID NO: 439393 - RNA, 19 nt, Homo sapiens
  misc_RNA (1)...(19): siRNA sense strand
aagugguccugucgaagua

SEQ ID NO: 439394 - RNA, 19 nt, Homo sapiens
  misc_RNA (1)...(19): siRNA sense strand
gagcaggaccagaaauacu

SEQ ID NO: 439395 - RNA, 19 nt, Homo sapiens
  misc_RNA (1)...(19): siRNA sense strand
gcaagcccgguuguuauga

SEQ ID NO: 439396 - RNA, 19 nt, Homo sapiens
  misc_RNA (1)...(19): siRNA sense strand
cugaagagacuugcuuuga

SEQ ID NO: 439397 - RNA, 19 nt, Homo sapiens
  misc_RNA (1)...(19): siRNA sense strand
cugaagacacaaggaaaua

SEQ ID NO: 439398 - RNA, 19 nt, Homo sapiens
  misc_RNA (1)...(19): siRNA sense strand
gacauccuauagaauugga

SEQ ID NO: 439399 - RNA, 19 nt, Homo sapiens
  misc_RNA (1)...(19): siRNA sense strand
cauguuagagugugugugu

SEQ ID NO: 439400 - RNA, 19 nt, Homo sapiens
  misc_RNA (1)...(19): siRNA sense strand
gcuucgagaucagugcauu

SEQ ID NO: 439401 - RNA, 19 nt, Homo sapiens
  misc_RNA (1)...(19): siRNA sense strand
caacaaccacaauuacacu

SEQ ID NO: 439402 - RNA, 19 nt, Homo sapiens
  misc_RNA (1)...(19): siRNA sense strand
ugcaguggcugaagacaca

SEQ ID NO: 439403 - RNA, 19 nt, Homo sapiens
  misc_RNA (1)...(19): siRNA sense strand
acuugcacuucuagaaaua

SEQ ID NO: 439404 - RNA, 19 nt, Homo sapiens
  misc_RNA (1)...(19): siRNA sense strand
uggaggagaccacaugaga

SEQ ID NO: 439405 - RNA, 19 nt, Homo sapiens
  misc_RNA (1)...(19): siRNA sense strand
gguccugucgaaguauuua

SEQ ID NO: 439406 - RNA, 19 nt, Homo sapiens
  misc_RNA (1)...(19): siRNA sense strand
aagcaagcccgguuguuau

SEQ ID NO: 439407 - RNA, 19 nt, Homo sapiens
  misc_RNA (1)...(19): siRNA sense strand
gcugagaaguguuuugauc

SEQ ID NO: 439408 - RNA, 19 nt, Homo sapiens
  misc_RNA (1)...(19): siRNA sense strand
gcacuguccucuuugaaau

SEQ ID NO: 439409 - RNA, 19 nt, Homo sapiens
  misc_RNA (1)...(19): siRNA sense strand
gaucgacuuugucagguuu

SEQ ID NO: 439410 - RNA, 19 nt, Homo sapiens
  misc_RNA (1)...(19): siRNA sense strand
gucaacaacuuccgcauga

SEQ ID NO: 439411 - RNA, 19 nt, Homo sapiens
  misc_RNA (1)...(19): siRNA sense strand
ucagaacgguugcccauca

SEQ ID NO: 439412 - RNA, 19 nt, Homo sapiens
  misc_RNA (1)...(19): siRNA sense strand
gcacaauaaagcagacuau

SEQ ID NO: 439413 - RNA, 19 nt, Homo sapiens
  misc_RNA (1)...(19): siRNA sense strand
gaacaccugcgagcacauu

SEQ ID NO: 439414 - RNA, 19 nt, Homo sapiens
  misc_RNA (1)...(19): siRNA sense strand
gcgagcacauuuacgacuu

SEQ ID NO: 439415 - RNA, 19 nt, Homo sapiens
  misc_RNA (1)...(19): siRNA sense strand
ggcuggugaugcacaauaa

SEQ ID NO: 439416 - RNA, 19 nt, Homo sapiens
  misc_RNA (1)...(19): siRNA sense strand
gaggagaauaucuacaaga

SEQ ID NO: 439417 - RNA, 19 nt, Homo sapiens
  misc_RNA (1)...(19): siRNA sense strand
aagcuucgacuuccacuuu

SEQ ID NO: 439418 - RNA, 19 nt, Homo sapiens
  misc_RNA (1)...(19): siRNA sense strand
cucaggcacuguccucuuu

SEQ ID NO: 439419 - RNA, 19 nt, Homo sapiens
  misc_RNA (1)...(19): siRNA sense strand
caacaacuuccgcaugauc

SEQ ID NO: 439420 - RNA, 19 nt, Homo sapiens
  misc_RNA (1)...(19): siRNA sense strand
gcaaccagcuacucaaaag

SEQ ID NO: 439421 - RNA, 19 nt, Homo sapiens
  misc_RNA (1)...(19): siRNA sense strand
acaagccugucaacaacuu

SEQ ID NO: 439422 - RNA, 19 nt, Homo sapiens
  misc_RNA (1)...(19): siRNA sense strand
cagaacgguugcccaucaa

SEQ ID NO: 439423 - RNA, 19 nt, Homo sapiens
  misc_RNA (1)...(19): siRNA sense strand
gcuucuacuucguggauga

SEQ ID NO: 439424 - RNA, 19 nt, Homo sapiens
  misc_RNA (1)...(19): siRNA sense strand
gaugauccgccacccguau

SEQ ID NO: 439425 - RNA, 19 nt, Homo sapiens
  misc_RNA (1)...(19): siRNA sense strand
caggcacuguccucuuuga

SEQ ID NO: 439426 - RNA, 19 nt, Homo sapiens
  misc_RNA (1)...(19): siRNA sense strand
ggcacuguccucuuugaaa

SEQ ID NO: 439427 - RNA, 19 nt, Homo sapiens
  misc_RNA (1)...(19): siRNA sense strand
gaucgagaggcacuacuuc

SEQ ID NO: 439428 - RNA, 19 nt, Homo sapiens
  misc_RNA (1)...(19): siRNA sense strand
uuugucagguuuaagauuc

SEQ ID NO: 439429 - RNA, 19 nt, Homo sapiens
  misc_RNA (1)...(19): siRNA sense strand
gacuuugucagguuuaaga

SEQ ID NO: 439430 - RNA, 19 nt, Homo sapiens
  misc_RNA (1)...(19): siRNA sense strand
cgagcacauuuacgacuuc

SEQ ID NO: 439431 - RNA, 19 nt, Homo sapiens
  misc_RNA (1)...(19): siRNA sense strand
acaccugcgagcacauuua

SEQ ID NO: 439432 - RNA, 19 nt, Homo sapiens
  misc_RNA (1)...(19): siRNA sense strand
ugaggagaauaucuacaag

SEQ ID NO: 439433 - RNA, 19 nt, Homo sapiens
  misc_RNA (1)...(19): siRNA sense strand
gguuuaagauucgggacau

SEQ ID NO: 439434 - RNA, 19 nt, Homo sapiens
  misc_RNA (1)...(19): siRNA sense strand
auaaagcagacuauuccua

SEQ ID NO: 439435 - RNA, 19 nt, Homo sapiens
  misc_RNA (1)...(19): siRNA sense strand
aaagcagacuauuccuaca

SEQ ID NO: 439436 - RNA, 19 nt, Homo sapiens
  misc_RNA (1)...(19): siRNA sense strand
cggcuggugaugcacaaua

SEQ ID NO: 439437 - RNA, 19 nt, Homo sapiens
  misc_RNA (1)...(19): siRNA sense strand
cugaggagaauaucuacaa

SEQ ID NO: 439438 - RNA, 19 nt, Homo sapiens
  misc_RNA (1)...(19): siRNA sense strand
ccgcaaccagcuacucaaa

SEQ ID NO: 439439 - RNA, 19 nt, Homo sapiens
  misc_RNA (1)...(19): siRNA sense strand
gcacuguccucuuugaaau

SEQ ID NO: 439440 - RNA, 19 nt, Homo sapiens
  misc_RNA (1)...(19): siRNA sense strand
gaucgacuuugucagguuu

SEQ ID NO: 439441 - RNA, 19 nt, Homo sapiens
  misc_RNA (1)...(19): siRNA sense strand
gucaacaacuuccgcauga

SEQ ID NO: 439442 - RNA, 19 nt, Homo sapiens
  misc_RNA (1)...(19): siRNA sense strand
ucagaacgguugcccauca

SEQ ID NO: 439443 - RNA, 19 nt, Homo sapiens
  misc_RNA (1)...(19): siRNA sense strand
gaacaccugcgagcacauu

SEQ ID NO: 439444 - RNA, 19 nt, Homo sapiens
  misc_RNA (1)...(19): siRNA sense strand
gcgagcacauuuacgacuu

SEQ ID NO: 439445 - RNA, 19 nt, Homo sapiens
  misc_RNA (1)...(19): siRNA sense strand
gaggagaauaucuacaaga

SEQ ID NO: 439446 - RNA, 19 nt, Homo sapiens
  misc_RNA (1)...(19): siRNA sense strand
aagcuucgacuuccacuuu

SEQ ID NO: 439447 - RNA, 19 nt, Homo sapiens
  misc_RNA (1)...(19): siRNA sense strand
cucaggcacuguccucuuu

SEQ ID NO: 439448 - RNA, 19 nt, Homo sapiens
  misc_RNA (1)...(19): siRNA sense strand
caacaacuuccgcaugauc

SEQ ID NO: 439449 - RNA, 19 nt, Homo sapiens
  misc_RNA (1)...(19): siRNA sense strand
gcaaccagcuacucaaaag

SEQ ID NO: 439450 - RNA, 19 nt, Homo sapiens
  misc_RNA (1)...(19): siRNA sense strand
acaagccugucaacaacuu

SEQ ID NO: 439451 - RNA, 19 nt, Homo sapiens
  misc_RNA (1)...(19): siRNA sense strand
cagaacgguugcccaucaa

SEQ ID NO: 439452 - RNA, 19 nt, Homo sapiens
  misc_RNA (1)...(19): siRNA sense strand
caggcacuguccucuuuga

SEQ ID NO: 439453 - RNA, 19 nt, Homo sapiens
  misc_RNA (1)...(19): siRNA sense strand
ggcacuguccucuuugaaa

SEQ ID NO: 439454 - RNA, 19 nt, Homo sapiens
  misc_RNA (1)...(19): siRNA sense strand
gaucgagaggcacuacuuc

SEQ ID NO: 439455 - RNA, 19 nt, Homo sapiens
  misc_RNA (1)...(19): siRNA sense strand
uuugucagguuuaagauuc

SEQ ID NO: 439456 - RNA, 19 nt, Homo sapiens
  misc_RNA (1)...(19): siRNA sense strand
gacuuugucagguuuaaga

SEQ ID NO: 439457 - RNA, 19 nt, Homo sapiens
  misc_RNA (1)...(19): siRNA sense strand
cgagcacauuuacgacuuc

SEQ ID NO: 439458 - RNA, 19 nt, Homo sapiens
  misc_RNA (1)...(19): siRNA sense strand
acaccugcgagcacauuua

SEQ ID NO: 439459 - RNA, 19 nt, Homo sapiens
  misc_RNA (1)...(19): siRNA sense strand
ugaggagaauaucuacaag

SEQ ID NO: 439460 - RNA, 19 nt, Homo sapiens
  misc_RNA (1)...(19): siRNA sense strand
gguuuaagauucgggacau

SEQ ID NO: 439461 - RNA, 19 nt, Homo sapiens
  misc_RNA (1)...(19): siRNA sense strand
cugaggagaauaucuacaa

SEQ ID NO: 439462 - RNA, 19 nt, Homo sapiens
  misc_RNA (1)...(19): siRNA sense strand
ccgcaaccagcuacucaaa

SEQ ID NO: 439463 - RNA, 19 nt, Homo sapiens
  misc_RNA (1)...(19): siRNA sense strand
uaacaacgacgacuacauu

SEQ ID NO: 439464 - RNA, 19 nt, Homo sapiens
  misc_RNA (1)...(19): siRNA sense strand
gugagaaggugcuggauga

SEQ ID NO: 439465 - RNA, 19 nt, Homo sapiens
  misc_RNA (1)...(19): siRNA sense strand
gaagauuuccagaacauga

SEQ ID NO: 439466 - RNA, 19 nt, Homo sapiens
  misc_RNA (1)...(19): siRNA sense strand
caacgacgacuacauuugu

SEQ ID NO: 439467 - RNA, 19 nt, Homo sapiens
  misc_RNA (1)...(19): siRNA sense strand
ccagaggauugcccaggua

SEQ ID NO: 439468 - RNA, 19 nt, Homo sapiens
  misc_RNA (1)...(19): siRNA sense strand
gaucaugaggcucuucuau

SEQ ID NO: 439469 - RNA, 19 nt, Homo sapiens
  misc_RNA (1)...(19): siRNA sense strand
uaucaggacugcacauuuu

SEQ ID NO: 439470 - RNA, 19 nt, Homo sapiens
  misc_RNA (1)...(19): siRNA sense strand
ggcugucccuggaagauuu

SEQ ID NO: 439471 - RNA, 19 nt, Homo sapiens
  misc_RNA (1)...(19): siRNA sense strand
ggacauguuuuccgugaug

SEQ ID NO: 439472 - RNA, 19 nt, Homo sapiens
  misc_RNA (1)...(19): siRNA sense strand
ccucaaggcuuacuaugcu

SEQ ID NO: 439473 - RNA, 19 nt, Homo sapiens
  misc_RNA (1)...(19): siRNA sense strand
cccgcgaccucaaggcuua

SEQ ID NO: 439474 - RNA, 19 nt, Homo sapiens
  misc_RNA (1)...(19): siRNA sense strand
ucaugaggcucuucuaucg

SEQ ID NO: 439475 - RNA, 19 nt, Homo sapiens
  misc_RNA (1)...(19): siRNA sense strand
gaggauugcccagguauuc

SEQ ID NO: 439476 - RNA, 19 nt, Homo sapiens
  misc_RNA (1)...(19): siRNA sense strand
guaucaggacugcacauuu

SEQ ID NO: 439477 - RNA, 19 nt, Homo sapiens
  misc_RNA (1)...(19): siRNA sense strand
gaggugagccugguaugug

SEQ ID NO: 439478 - RNA, 19 nt, Homo sapiens
  misc_RNA (1)...(19): siRNA sense strand
acaugacccuggacaacuu

SEQ ID NO: 439479 - RNA, 19 nt, Homo sapiens
  misc_RNA (1)...(19): siRNA sense strand
caaggaaggagaucaugag

SEQ ID NO: 439480 - RNA, 19 nt, Homo sapiens
  misc_RNA (1)...(19): siRNA sense strand
ugcccgagcugaaggacaa

SEQ ID NO: 439481 - RNA, 19 nt, Homo sapiens
  misc_RNA (1)...(19): siRNA sense strand
gagcagacggugaccaaac

SEQ ID NO: 439482 - RNA, 19 nt, Homo sapiens
  misc_RNA (1)...(19): siRNA sense strand
ggaggugagccugguaugu

SEQ ID NO: 439483 - RNA, 19 nt, Homo sapiens
  misc_RNA (1)...(19): siRNA sense strand
acaaggaaggagaucauga

SEQ ID NO: 439484 - RNA, 19 nt, Homo sapiens
  misc_RNA (1)...(19): siRNA sense strand
ucaaggcuuacuaugcuuu

SEQ ID NO: 439485 - RNA, 19 nt, Homo sapiens
  misc_RNA (1)...(19): siRNA sense strand
ccucagcaccuuccacauc

SEQ ID NO: 439486 - RNA, 19 nt, Homo sapiens
  misc_RNA (1)...(19): siRNA sense strand
acaacgacgacuacauuug

SEQ ID NO: 439487 - RNA, 19 nt, Homo sapiens
  misc_RNA (1)...(19): siRNA sense strand
gaggaggugagccugguau

SEQ ID NO: 439488 - RNA, 19 nt, Homo sapiens
  misc_RNA (1)...(19): siRNA sense strand
ggauggggauggccacaug

SEQ ID NO: 439489 - RNA, 19 nt, Homo sapiens
  misc_RNA (1)...(19): siRNA sense strand
aggugagccugguauguga

SEQ ID NO: 439490 - RNA, 19 nt, Homo sapiens
  misc_RNA (1)...(19): siRNA sense strand
ucacaaggaaggagaucau

SEQ ID NO: 439491 - RNA, 19 nt, Homo sapiens
  misc_RNA (1)...(19): siRNA sense strand
cgaccucaaggcuuacuau

SEQ ID NO: 439492 - RNA, 19 nt, Homo sapiens
  misc_RNA (1)...(19): siRNA sense strand
ccagguauucucugaggau

SEQ ID NO: 439493 - RNA, 19 nt, Homo sapiens
  misc_RNA (1)...(19): siRNA sense strand
caaaguggaugccuugaua

SEQ ID NO: 439494 - RNA, 19 nt, Homo sapiens
  misc_RNA (1)...(19): siRNA sense strand
gaagaaauaugaggaugaa

SEQ ID NO: 439495 - RNA, 19 nt, Homo sapiens
  misc_RNA (1)...(19): siRNA sense strand
ucauagagcucaacagaau

SEQ ID NO: 439496 - RNA, 19 nt, Homo sapiens
  misc_RNA (1)...(19): siRNA sense strand
gagaucgacuucuuaagga

SEQ ID NO: 439497 - RNA, 19 nt, Homo sapiens
  misc_RNA (1)...(19): siRNA sense strand
gaucauagagcucaacaga

SEQ ID NO: 439498 - RNA, 19 nt, Homo sapiens
  misc_RNA (1)...(19): siRNA sense strand
gaagaaggauguggacagu

SEQ ID NO: 439499 - RNA, 19 nt, Homo sapiens
  misc_RNA (1)...(19): siRNA sense strand
ucaagacccucaacaacaa

SEQ ID NO: 439500 - RNA, 19 nt, Homo sapiens
  misc_RNA (1)...(19): siRNA sense strand
gagcggagcagguggcuuu

SEQ ID NO: 439501 - RNA, 19 nt, Homo sapiens
  misc_RNA (1)...(19): siRNA sense strand
ggagcuaccuggacaacau

SEQ ID NO: 439502 - RNA, 19 nt, Homo sapiens
  misc_RNA (1)...(19): siRNA sense strand
gggcaguccugguggcuuu

SEQ ID NO: 439503 - RNA, 19 nt, Homo sapiens
  misc_RNA (1)...(19): siRNA sense strand
gaugagaucgacuucuuaa

SEQ ID NO: 439504 - RNA, 19 nt, Homo sapiens
  misc_RNA (1)...(19): siRNA sense strand
gggcacaaguuccaucuca

SEQ ID NO: 439505 - RNA, 19 nt, Homo sapiens
  misc_RNA (1)...(19): siRNA sense strand
gaucgagggugucaagaag

SEQ ID NO: 439506 - RNA, 19 nt, Homo sapiens
  misc_RNA (1)...(19): siRNA sense strand
gaaauaugaggaugaaauc

SEQ ID NO: 439507 - RNA, 19 nt, Homo sapiens
  misc_RNA (1)...(19): siRNA sense strand
uagaugagaucgacuucuu

SEQ ID NO: 439508 - RNA, 19 nt, Homo sapiens
  misc_RNA (1)...(19): siRNA sense strand
gaggauaucgcucagagaa

SEQ ID NO: 439509 - RNA, 19 nt, Homo sapiens
  misc_RNA (1)...(19): siRNA sense strand
caaguuugccuccuucauu

SEQ ID NO: 439510 - RNA, 19 nt, Homo sapiens
  misc_RNA (1)...(19): siRNA sense strand
guggaugccuugauagaug

SEQ ID NO: 439511 - RNA, 19 nt, Homo sapiens
  misc_RNA (1)...(19): siRNA sense strand
ccacaucagugacacaucu

SEQ ID NO: 439512 - RNA, 19 nt, Homo sapiens
  misc_RNA (1)...(19): siRNA sense strand
ugaaguuggugcacaguau

SEQ ID NO: 439513 - RNA, 19 nt, Homo sapiens
  misc_RNA (1)...(19): siRNA sense strand
ggacagugccuauaugaac

SEQ ID NO: 439514 - RNA, 19 nt, Homo sapiens
  misc_RNA (1)...(19): siRNA sense strand
caggaugucuggagagugu

SEQ ID NO: 439515 - RNA, 19 nt, Homo sapiens
  misc_RNA (1)...(19): siRNA sense strand
gggaugaccuaagaaauac

SEQ ID NO: 439516 - RNA, 19 nt, Homo sapiens
  misc_RNA (1)...(19): siRNA sense strand
gagcagcugugccuuugca

SEQ ID NO: 439517 - RNA, 19 nt, Homo sapiens
  misc_RNA (1)...(19): siRNA sense strand
accaggagcugaugaaugu

SEQ ID NO: 439518 - RNA, 19 nt, Homo sapiens
  misc_RNA (1)...(19): siRNA sense strand
caucauugcugaaguuggu

SEQ ID NO: 439519 - RNA, 19 nt, Homo sapiens
  misc_RNA (1)...(19): siRNA sense strand
ucaacuaccugcggagcua

SEQ ID NO: 439520 - RNA, 19 nt, Homo sapiens
  misc_RNA (1)...(19): siRNA sense strand
gacagugccuauaugaaca

SEQ ID NO: 439521 - RNA, 19 nt, Homo sapiens
  misc_RNA (1)...(19): siRNA sense strand
uggaggaccugguggaaga

SEQ ID NO: 439522 - RNA, 19 nt, Homo sapiens
  misc_RNA (1)...(19): siRNA sense strand
acucugagcugaagaacau

SEQ ID NO: 439523 - RNA, 19 nt, Homo sapiens
  misc_RNA (1)...(19): siRNA sense strand
ugguggagcugguggcuuu

SEQ ID NO: 439524 - RNA, 19 nt, Homo sapiens
  misc_RNA (1)...(19): siRNA sense strand
ggaccuggacagcaucauu

SEQ ID NO: 439525 - RNA, 19 nt, Homo sapiens
  misc_RNA (1)...(19): siRNA sense strand
acaaaguccuggagaccaa

SEQ ID NO: 439526 - RNA, 19 nt, Homo sapiens
  misc_RNA (1)...(19): siRNA sense strand
gaucaagacccucaacaac

SEQ ID NO: 439527 - RNA, 19 nt, Homo sapiens
  misc_RNA (1)...(19): siRNA sense strand
cuacgacgcugagcuaucu

SEQ ID NO: 439528 - RNA, 19 nt, Homo sapiens
  misc_RNA (1)...(19): siRNA sense strand
caugggcggugguuuagga

SEQ ID NO: 439529 - RNA, 19 nt, Homo sapiens
  misc_RNA (1)...(19): siRNA sense strand
agaaugaauuugugacucu

SEQ ID NO: 439530 - RNA, 19 nt, Homo sapiens
  misc_RNA (1)...(19): siRNA sense strand
ggggaugaccuaagaaaua

SEQ ID NO: 439531 - RNA, 19 nt, Homo sapiens
  misc_RNA (1)...(19): siRNA sense strand
uucaggaagugacuacuaa

SEQ ID NO: 439532 - RNA, 19 nt, Homo sapiens
  misc_RNA (1)...(19): siRNA sense strand
gaauuugugacucugaaga

SEQ ID NO: 439533 - RNA, 19 nt, Homo sapiens
  misc_RNA (1)...(19): siRNA sense strand
acaacaaguuugccuccuu

SEQ ID NO: 439534 - RNA, 19 nt, Homo sapiens
  misc_RNA (1)...(19): siRNA sense strand
gaccuaagaaauaccaaga

SEQ ID NO: 439535 - RNA, 19 nt, Homo sapiens
  misc_RNA (1)...(19): siRNA sense strand
gaccuggacagcaucauug

SEQ ID NO: 439536 - RNA, 19 nt, Homo sapiens
  misc_RNA (1)...(19): siRNA sense strand
gaaguuggugcacaguaug

SEQ ID NO: 439537 - RNA, 19 nt, Homo sapiens
  misc_RNA (1)...(19): siRNA sense strand
aaguuugccuccuucauug

SEQ ID NO: 439538 - RNA, 19 nt, Homo sapiens
  misc_RNA (1)...(19): siRNA sense strand
gcauggggaugaccuaaga

SEQ ID NO: 439539 - RNA, 19 nt, Homo sapiens
  misc_RNA (1)...(19): siRNA sense strand
gcaacaagagcaucuccau

SEQ ID NO: 439540 - RNA, 19 nt, Homo sapiens
  misc_RNA (1)...(19): siRNA sense strand
caagaagaaauaugaggau

SEQ ID NO: 439541 - RNA, 19 nt, Homo sapiens
  misc_RNA (1)...(19): siRNA sense strand
aacaagagcaucuccauca

SEQ ID NO: 439542 - RNA, 19 nt, Homo sapiens
  misc_RNA (1)...(19): siRNA sense strand
cggagcagcugugccuuug

SEQ ID NO: 439543 - RNA, 19 nt, Homo sapiens
  misc_RNA (1)...(19): siRNA sense strand
gugccuauaugaacaaggu

SEQ ID NO: 439544 - RNA, 19 nt, Homo sapiens
  misc_RNA (1)...(19): siRNA sense strand
gcagagaucgaggguguca

SEQ ID NO: 439545 - RNA, 19 nt, Homo sapiens
  misc_RNA (1)...(19): siRNA sense strand
aggcaugggcggugguuua

SEQ ID NO: 439546 - RNA, 19 nt, Homo sapiens
  misc_RNA (1)...(19): siRNA sense strand
gagagauggcccucaagga

SEQ ID NO: 439547 - RNA, 19 nt, Homo sapiens
  misc_RNA (1)...(19): siRNA sense strand
ggaaugggagguggcuuug

SEQ ID NO: 439548 - RNA, 19 nt, Homo sapiens
  misc_RNA (1)...(19): siRNA sense strand
uggaugccuugauagauga

SEQ ID NO: 439549 - RNA, 19 nt, Homo sapiens
  misc_RNA (1)...(19): siRNA sense strand
agaagaaauaugaggauga

SEQ ID NO: 439550 - RNA, 19 nt, Homo sapiens
  misc_RNA (1)...(19): siRNA sense strand
uggcuuuggugguggcuuu

SEQ ID NO: 439551 - RNA, 19 nt, Homo sapiens
  misc_RNA (1)...(19): siRNA sense strand
cgagcagcauggagagaug

SEQ ID NO: 439552 - RNA, 19 nt, Homo sapiens
  misc_RNA (1)...(19): siRNA sense strand
gcggagcagcugugccuuu

SEQ ID NO: 439553 - RNA, 19 nt, Homo sapiens
  misc_RNA (1)...(19): siRNA sense strand
ugagaucgacuucuuaagg

SEQ ID NO: 439554 - RNA, 19 nt, Homo sapiens
  misc_RNA (1)...(19): siRNA sense strand
gauguggacagugccuaua

SEQ ID NO: 439555 - RNA, 19 nt, Homo sapiens
  misc_RNA (1)...(19): siRNA sense strand
gaggaugaaaucaauaaac

SEQ ID NO: 439556 - RNA, 19 nt, Homo sapiens
  misc_RNA (1)...(19): siRNA sense strand
gcucaggcauuggcuuugg

SEQ ID NO: 439557 - RNA, 19 nt, Homo sapiens
  misc_RNA (1)...(19): siRNA sense strand
agagauggcccucaaggau

SEQ ID NO: 439558 - RNA, 19 nt, Homo sapiens
  misc_RNA (1)...(19): siRNA sense strand
gcugagaaugaauuuguga

SEQ ID NO: 439559 - RNA, 19 nt, Homo sapiens
  misc_RNA (1)...(19): siRNA sense strand
gagcgggaacagaucaaga

SEQ ID NO: 439560 - RNA, 19 nt, Homo sapiens
  misc_RNA (1)...(19): siRNA sense strand
ccagcgcuacuccagauaa

SEQ ID NO: 439561 - RNA, 19 nt, Homo sapiens
  misc_RNA (1)...(19): siRNA sense strand
gaaauaccaagagcgagau

SEQ ID NO: 439562 - RNA, 19 nt, Homo sapiens
  misc_RNA (1)...(19): siRNA sense strand
guggacagugccuauauga

SEQ ID NO: 439563 - RNA, 19 nt, Homo sapiens
  misc_RNA (1)...(19): siRNA sense strand
uuuaggagguggcuucagu

SEQ ID NO: 439564 - RNA, 19 nt, Homo sapiens
  misc_RNA (1)...(19): siRNA sense strand
gacccucaacaacaaguuu

SEQ ID NO: 439565 - RNA, 19 nt, Homo sapiens
  misc_RNA (1)...(19): siRNA sense strand
ccaagagcgagaucauaga

SEQ ID NO: 439566 - RNA, 19 nt, Homo sapiens
  misc_RNA (1)...(19): siRNA sense strand
gugcacaguaugaggauau

SEQ ID NO: 439567 - RNA, 19 nt, Homo sapiens
  misc_RNA (1)...(19): siRNA sense strand
cagcagcagggcacaaguu

SEQ ID NO: 439568 - RNA, 19 nt, Homo sapiens
  misc_RNA (1)...(19): siRNA sense strand
agaugagaucgacuucuua

SEQ ID NO: 439569 - RNA, 19 nt, Homo sapiens
  misc_RNA (1)...(19): siRNA sense strand
ggaauucaggaagugacua

SEQ ID NO: 439570 - RNA, 19 nt, Homo sapiens
  misc_RNA (1)...(19): siRNA sense strand
ggauguggacagugccuau

SEQ ID NO: 439571 - RNA, 19 nt, Homo sapiens
  misc_RNA (1)...(19): siRNA sense strand
ccucuacgacgcugagcua

SEQ ID NO: 439572 - RNA, 19 nt, Homo sapiens
  misc_RNA (1)...(19): siRNA sense strand
gaggaguacagcaggaugu

SEQ ID NO: 439573 - RNA, 19 nt, Homo sapiens
  misc_RNA (1)...(19): siRNA sense strand
ccaaugccaagcuccaaga

SEQ ID NO: 439574 - RNA, 19 nt, Homo sapiens
  misc_RNA (1)...(19): siRNA sense strand
cagacaagccagcaagaca

SEQ ID NO: 439575 - RNA, 19 nt, Homo sapiens
  misc_RNA (1)...(19): siRNA sense strand
caagagcgagaucauagag

SEQ ID NO: 439576 - RNA, 19 nt, Homo sapiens
  misc_RNA (1)...(19): siRNA sense strand
cuauggagguggcuuuggu

SEQ ID NO: 439577 - RNA, 19 nt, Homo sapiens
  misc_RNA (1)...(19): siRNA sense strand
aaacaaccuugagccucuu

SEQ ID NO: 439578 - RNA, 19 nt, Homo sapiens
  misc_RNA (1)...(19): siRNA sense strand
auagagcucaacagaauga

SEQ ID NO: 439579 - RNA, 19 nt, Homo sapiens
  misc_RNA (1)...(19): siRNA sense strand
gaauucaggaagugacuac

SEQ ID NO: 439580 - RNA, 19 nt, Homo sapiens
  misc_RNA (1)...(19): siRNA sense strand
aggaugaaaucaauaaacg

SEQ ID NO: 439581 - RNA, 19 nt, Homo sapiens
  misc_RNA (1)...(19): siRNA sense strand
uggugggucugguggcuuu

SEQ ID NO: 439582 - RNA, 19 nt, Homo sapiens
  misc_RNA (1)...(19): siRNA sense strand
gaaaucaauaaacguacag

SEQ ID NO: 439583 - RNA, 19 nt, Homo sapiens
  misc_RNA (1)...(19): siRNA sense strand
uacagcaggcgaaggauga

SEQ ID NO: 439584 - RNA, 19 nt, Homo sapiens
  misc_RNA (1)...(19): siRNA sense strand
aaugggagguggcuuuggu

SEQ ID NO: 439585 - RNA, 19 nt, Homo sapiens
  misc_RNA (1)...(19): siRNA sense strand
uaccaagagcgagaucaua

SEQ ID NO: 439586 - RNA, 19 nt, Homo sapiens
  misc_RNA (1)...(19): siRNA sense strand
gauagaugagaucgacuuc

SEQ ID NO: 439587 - RNA, 19 nt, Homo sapiens
  misc_RNA (1)...(19): siRNA sense strand
agaaucacaucaacuaccu

SEQ ID NO: 439588 - RNA, 19 nt, Homo sapiens
  misc_RNA (1)...(19): siRNA sense strand
ucccagcgcuacuccagau

SEQ ID NO: 439589 - RNA, 19 nt, Homo sapiens
  misc_RNA (1)...(19): siRNA sense strand
caucuguggugcuguccau

SEQ ID NO: 439590 - RNA, 19 nt, Homo sapiens
  misc_RNA (1)...(19): siRNA sense strand
ggugcacaguaugaggaua

SEQ ID NO: 439591 - RNA, 19 nt, Homo sapiens
  misc_RNA (1)...(19): siRNA sense strand
ccagauugggcaaguaaag

SEQ ID NO: 439592 - RNA, 19 nt, Homo sapiens
  misc_RNA (1)...(19): siRNA sense strand
gacaagccagcaagacauc

SEQ ID NO: 439593 - RNA, 19 nt, Homo sapiens
  misc_RNA (1)...(19): siRNA sense strand
ggacaucaucuucaacuuu

SEQ ID NO: 439594 - RNA, 19 nt, Homo sapiens
  misc_RNA (1)...(19): siRNA sense strand
gacaucaucuucaacuuug

SEQ ID NO: 439595 - RNA, 19 nt, Homo sapiens
  misc_RNA (1)...(19): siRNA sense strand
gcucuuagacaaauacuuu

SEQ ID NO: 439596 - RNA, 19 nt, Homo sapiens
  misc_RNA (1)...(19): siRNA sense strand
ccucaaaguugucuauaag

SEQ ID NO: 439597 - RNA, 19 nt, Homo sapiens
  misc_RNA (1)...(19): siRNA sense strand
ucaaaguugucuauaagag

SEQ ID NO: 439598 - RNA, 19 nt, Homo sapiens
  misc_RNA (1)...(19): siRNA sense strand
aaugguaccuggccacuuc

SEQ ID NO: 439599 - RNA, 19 nt, Homo sapiens
  misc_RNA (1)...(19): siRNA sense strand
caaaguugucuauaagaga

SEQ ID NO: 439600 - RNA, 19 nt, Homo sapiens
  misc_RNA (1)...(19): siRNA sense strand
gacaaggaacggaagaaga

SEQ ID NO: 439601 - RNA, 19 nt, Homo sapiens
  misc_RNA (1)...(19): siRNA sense strand
ggaccucaaaguugucuau

SEQ ID NO: 439602 - RNA, 19 nt, Homo sapiens
  misc_RNA (1)...(19): siRNA sense strand
gcucgaaagcccaagaugu

SEQ ID NO: 439603 - RNA, 19 nt, Homo sapiens
  misc_RNA (1)...(19): siRNA sense strand
guggagcucuuagacaaau

SEQ ID NO: 439604 - RNA, 19 nt, Homo sapiens
  misc_RNA (1)...(19): siRNA sense strand
acaaggaacggaagaagau

SEQ ID NO: 439605 - RNA, 19 nt, Homo sapiens
  misc_RNA (1)...(19): siRNA sense strand
gagcuggacaucaucuuca

SEQ ID NO: 439606 - RNA, 19 nt, Homo sapiens
  misc_RNA (1)...(19): siRNA sense strand
gaaaacugcggcugcaaaa

SEQ ID NO: 439607 - RNA, 19 nt, Homo sapiens
  misc_RNA (1)...(19): siRNA sense strand
ggacaaggaacggaagaag

SEQ ID NO: 439608 - RNA, 19 nt, Homo sapiens
  misc_RNA (1)...(19): siRNA sense strand
gauaugccagccucuacuu

SEQ ID NO: 439609 - RNA, 19 nt, Homo sapiens
  misc_RNA (1)...(19): siRNA sense strand
acguggagcucuuagacaa

SEQ ID NO: 439610 - RNA, 19 nt, Homo sapiens
  misc_RNA (1)...(19): siRNA sense strand
caucgagggccaagacaau

SEQ ID NO: 439611 - RNA, 19 nt, Homo sapiens
  misc_RNA (1)...(19): siRNA sense strand
ggaaaacugcggcugcaaa

SEQ ID NO: 439612 - RNA, 19 nt, Homo sapiens
  misc_RNA (1)...(19): siRNA sense strand
gagauaugccagccucuac

SEQ ID NO: 439613 - RNA, 19 nt, Homo sapiens
  misc_RNA (1)...(19): siRNA sense strand
gaccucaaaguugucuaua

SEQ ID NO: 439614 - RNA, 19 nt, Homo sapiens
  misc_RNA (1)...(19): siRNA sense strand
accucaaaguugucuauaa

SEQ ID NO: 439615 - RNA, 19 nt, Homo sapiens
  misc_RNA (1)...(19): siRNA sense strand
gaugcgguucaugcuauua

SEQ ID NO: 439616 - RNA, 19 nt, Homo sapiens
  misc_RNA (1)...(19): siRNA sense strand
ugugcgagcuggacaucau

SEQ ID NO: 439617 - RNA, 19 nt, Homo sapiens
  misc_RNA (1)...(19): siRNA sense strand
gagcugauccaccgauacg

SEQ ID NO: 439618 - RNA, 19 nt, Homo sapiens
  misc_RNA (1)...(19): siRNA sense strand
gauacguggagcucuuaga

SEQ ID NO: 439619 - RNA, 19 nt, Homo sapiens
  misc_RNA (1)...(19): siRNA sense strand
ggacaucaucuucaacuuu

SEQ ID NO: 439620 - RNA, 19 nt, Homo sapiens
  misc_RNA (1)...(19): siRNA sense strand
gacaucaucuucaacuuug

SEQ ID NO: 439621 - RNA, 19 nt, Homo sapiens
  misc_RNA (1)...(19): siRNA sense strand
gcucuuagacaaauacuuu

SEQ ID NO: 439622 - RNA, 19 nt, Homo sapiens
  misc_RNA (1)...(19): siRNA sense strand
ccucaaaguugucuauaag

SEQ ID NO: 439623 - RNA, 19 nt, Homo sapiens
  misc_RNA (1)...(19): siRNA sense strand
ucaaaguugucuauaagag

SEQ ID NO: 439624 - RNA, 19 nt, Homo sapiens
  misc_RNA (1)...(19): siRNA sense strand
aaugguaccuggccacuuc

SEQ ID NO: 439625 - RNA, 19 nt, Homo sapiens
  misc_RNA (1)...(19): siRNA sense strand
caaaguugucuauaagaga

SEQ ID NO: 439626 - RNA, 19 nt, Homo sapiens
  misc_RNA (1)...(19): siRNA sense strand
gacaaggaacggaagaaga

SEQ ID NO: 439627 - RNA, 19 nt, Homo sapiens
  misc_RNA (1)...(19): siRNA sense strand
ggaccucaaaguugucuau

SEQ ID NO: 439628 - RNA, 19 nt, Homo sapiens
  misc_RNA (1)...(19): siRNA sense strand
gcucgaaagcccaagaugu

SEQ ID NO: 439629 - RNA, 19 nt, Homo sapiens
  misc_RNA (1)...(19): siRNA sense strand
guggagcucuuagacaaau

SEQ ID NO: 439630 - RNA, 19 nt, Homo sapiens
  misc_RNA (1)...(19): siRNA sense strand
acaaggaacggaagaagau

SEQ ID NO: 439631 - RNA, 19 nt, Homo sapiens
  misc_RNA (1)...(19): siRNA sense strand
gagcuggacaucaucuuca

SEQ ID NO: 439632 - RNA, 19 nt, Homo sapiens
  misc_RNA (1)...(19): siRNA sense strand
gaaaacugcggcugcaaaa

SEQ ID NO: 439633 - RNA, 19 nt, Homo sapiens
  misc_RNA (1)...(19): siRNA sense strand
ggacaaggaacggaagaag

SEQ ID NO: 439634 - RNA, 19 nt, Homo sapiens
  misc_RNA (1)...(19): siRNA sense strand
gauaugccagccucuacuu

SEQ ID NO: 439635 - RNA, 19 nt, Homo sapiens
  misc_RNA (1)...(19): siRNA sense strand
acguggagcucuuagacaa

SEQ ID NO: 439636 - RNA, 19 nt, Homo sapiens
  misc_RNA (1)...(19): siRNA sense strand
caucgagggccaagacaau

SEQ ID NO: 439637 - RNA, 19 nt, Homo sapiens
  misc_RNA (1)...(19): siRNA sense strand
ggaaaacugcggcugcaaa

SEQ ID NO: 439638 - RNA, 19 nt, Homo sapiens
  misc_RNA (1)...(19): siRNA sense strand
gagauaugccagccucuac

SEQ ID NO: 439639 - RNA, 19 nt, Homo sapiens
  misc_RNA (1)...(19): siRNA sense strand
gaccucaaaguugucuaua

SEQ ID NO: 439640 - RNA, 19 nt, Homo sapiens
  misc_RNA (1)...(19): siRNA sense strand
accucaaaguugucuauaa

SEQ ID NO: 439641 - RNA, 19 nt, Homo sapiens
  misc_RNA (1)...(19): siRNA sense strand
gaugcgguucaugcuauua

SEQ ID NO: 439642 - RNA, 19 nt, Homo sapiens
  misc_RNA (1)...(19): siRNA sense strand
ugugcgagcuggacaucau

SEQ ID NO: 439643 - RNA, 19 nt, Homo sapiens
  misc_RNA (1)...(19): siRNA sense strand
gagcugauccaccgauacg

SEQ ID NO: 439644 - RNA, 19 nt, Homo sapiens
  misc_RNA (1)...(19): siRNA sense strand
gauacguggagcucuuaga

SEQ ID NO: 439645 - RNA, 19 nt, Homo sapiens
  misc_RNA (1)...(19): siRNA sense strand
gagagaaaguugccuguua

SEQ ID NO: 439646 - RNA, 19 nt, Homo sapiens
  misc_RNA (1)...(19): siRNA sense strand
ccagauaacuuuacauuca

SEQ ID NO: 439647 - RNA, 19 nt, Homo sapiens
  misc_RNA (1)...(19): siRNA sense strand
gcaagaagccuuugaagug

SEQ ID NO: 439648 - RNA, 19 nt, Homo sapiens
  misc_RNA (1)...(19): siRNA sense strand
gaaaguugccuguuaguuc

SEQ ID NO: 439649 - RNA, 19 nt, Homo sapiens
  misc_RNA (1)...(19): siRNA sense strand
caacuucucucccucuaug

SEQ ID NO: 439650 - RNA, 19 nt, Homo sapiens
  misc_RNA (1)...(19): siRNA sense strand
caacaugccucugauaugg

SEQ ID NO: 439651 - RNA, 19 nt, Homo sapiens
  misc_RNA (1)...(19): siRNA sense strand
uuaacaauaucacggcuua

SEQ ID NO: 439652 - RNA, 19 nt, Homo sapiens
  misc_RNA (1)...(19): siRNA sense strand
aguccaagcuuccucaaua

SEQ ID NO: 439653 - RNA, 19 nt, Homo sapiens
  misc_RNA (1)...(19): siRNA sense strand
ugacagagcccuucaagug

SEQ ID NO: 439654 - RNA, 19 nt, Homo sapiens
  misc_RNA (1)...(19): siRNA sense strand
gaucuugcaucuuuaaugg

SEQ ID NO: 439655 - RNA, 19 nt, Homo sapiens
  misc_RNA (1)...(19): siRNA sense strand
uugcugaucuugcaucuuu

SEQ ID NO: 439656 - RNA, 19 nt, Homo sapiens
  misc_RNA (1)...(19): siRNA sense strand
acugauggauucuuucaua

SEQ ID NO: 439657 - RNA, 19 nt, Homo sapiens
  misc_RNA (1)...(19): siRNA sense strand
caagacaaagcccuauaua

SEQ ID NO: 439658 - RNA, 19 nt, Homo sapiens
  misc_RNA (1)...(19): siRNA sense strand
gauagaucaugcagaguau

SEQ ID NO: 439659 - RNA, 19 nt, Homo sapiens
  misc_RNA (1)...(19): siRNA sense strand
uaucacggcuuauagacaa

SEQ ID NO: 439660 - RNA, 19 nt, Homo sapiens
  misc_RNA (1)...(19): siRNA sense strand
ucaauuuacugauggauuc

SEQ ID NO: 439661 - RNA, 19 nt, Homo sapiens
  misc_RNA (1)...(19): siRNA sense strand
acauaaagcuguguagaga

SEQ ID NO: 439662 - RNA, 19 nt, Homo sapiens
  misc_RNA (1)...(19): siRNA sense strand
gcaguuagacaucgaggaa

SEQ ID NO: 439663 - RNA, 19 nt, Homo sapiens
  misc_RNA (1)...(19): siRNA sense strand
cagaggacaucgccaccua

SEQ ID NO: 439664 - RNA, 19 nt, Homo sapiens
  misc_RNA (1)...(19): siRNA sense strand
gcaguggcaucuagaccuu

SEQ ID NO: 439665 - RNA, 19 nt, Homo sapiens
  misc_RNA (1)...(19): siRNA sense strand
gaagaggagaggaacuuug

SEQ ID NO: 439666 - RNA, 19 nt, Homo sapiens
  misc_RNA (1)...(19): siRNA sense strand
gaagacauaaagcugugua

SEQ ID NO: 439667 - RNA, 19 nt, Homo sapiens
  misc_RNA (1)...(19): siRNA sense strand
gagaggaacuuuggugcau

SEQ ID NO: 439668 - RNA, 19 nt, Homo sapiens
  misc_RNA (1)...(19): siRNA sense strand
caaaugggaagcaagagaa

SEQ ID NO: 439669 - RNA, 19 nt, Homo sapiens
  misc_RNA (1)...(19): siRNA sense strand
cucaauaccuggaacgauu

SEQ ID NO: 439670 - RNA, 19 nt, Homo sapiens
  misc_RNA (1)...(19): siRNA sense strand
uagaucaugcagaguauua

SEQ ID NO: 439671 - RNA, 19 nt, Homo sapiens
  misc_RNA (1)...(19): siRNA sense strand
ccacaaaugggaagcaaga

SEQ ID NO: 439672 - RNA, 19 nt, Homo sapiens
  misc_RNA (1)...(19): siRNA sense strand
gacagagcccuucaaguga

SEQ ID NO: 439673 - RNA, 19 nt, Homo sapiens
  misc_RNA (1)...(19): siRNA sense strand
ggacaucgccaccuaugag

SEQ ID NO: 439674 - RNA, 19 nt, Homo sapiens
  misc_RNA (1)...(19): siRNA sense strand
agagaaaguugccuguuag

SEQ ID NO: 439675 - RNA, 19 nt, Homo sapiens
  misc_RNA (1)...(19): siRNA sense strand
gaaggucuuuuaagucuga

SEQ ID NO: 439676 - RNA, 19 nt, Homo sapiens
  misc_RNA (1)...(19): siRNA sense strand
ccacaacaugccucugaua

SEQ ID NO: 439677 - RNA, 19 nt, Homo sapiens
  misc_RNA (1)...(19): siRNA sense strand
guaccaggcucagaaagca

SEQ ID NO: 439678 - RNA, 19 nt, Homo sapiens
  misc_RNA (1)...(19): siRNA sense strand
guagagaagcgcucgaugu

SEQ ID NO: 439679 - RNA, 19 nt, Homo sapiens
  misc_RNA (1)...(19): siRNA sense strand
caauaucacggcuuauaga

SEQ ID NO: 439680 - RNA, 19 nt, Homo sapiens
  misc_RNA (1)...(19): siRNA sense strand
agauagaucaugcagagua

SEQ ID NO: 439681 - RNA, 19 nt, Homo sapiens
  misc_RNA (1)...(19): siRNA sense strand
aaaccaggcuaccuugaca

SEQ ID NO: 439682 - RNA, 19 nt, Homo sapiens
  misc_RNA (1)...(19): siRNA sense strand
gcugguaccugagaaacug

SEQ ID NO: 439683 - RNA, 19 nt, Homo sapiens
  misc_RNA (1)...(19): siRNA sense strand
aaacagagcaguccaagcu

SEQ ID NO: 439684 - RNA, 19 nt, Homo sapiens
  misc_RNA (1)...(19): siRNA sense strand
gaacucaguggguuucagu

SEQ ID NO: 439685 - RNA, 19 nt, Homo sapiens
  misc_RNA (1)...(19): siRNA sense strand
ggaagaggagaggaacuuu

SEQ ID NO: 439686 - RNA, 19 nt, Homo sapiens
  misc_RNA (1)...(19): siRNA sense strand
aaaguugccuguuaguucu

SEQ ID NO: 439687 - RNA, 19 nt, Homo sapiens
  misc_RNA (1)...(19): siRNA sense strand
cugauggauucuuucauaa

SEQ ID NO: 439688 - RNA, 19 nt, Homo sapiens
  misc_RNA (1)...(19): siRNA sense strand
ggaaaccaggcuaccuuga

SEQ ID NO: 439689 - RNA, 19 nt, Homo sapiens
  misc_RNA (1)...(19): siRNA sense strand
ggaguaccaggcucagaaa

SEQ ID NO: 439690 - RNA, 19 nt, Homo sapiens
  misc_RNA (1)...(19): siRNA sense strand
gcucucuccugcagguaaa

SEQ ID NO: 439691 - RNA, 19 nt, Homo sapiens
  misc_RNA (1)...(19): siRNA sense strand
ggguuucaguucccaguug

SEQ ID NO: 439692 - RNA, 19 nt, Homo sapiens
  misc_RNA (1)...(19): siRNA sense strand
gcagaguauuaccuuuaca

SEQ ID NO: 439693 - RNA, 19 nt, Homo sapiens
  misc_RNA (1)...(19): siRNA sense strand
acagagcccuucaagugau

SEQ ID NO: 439694 - RNA, 19 nt, Homo sapiens
  misc_RNA (1)...(19): siRNA sense strand
guauggcuaugcacuucuu

SEQ ID NO: 439695 - RNA, 19 nt, Homo sapiens
  misc_RNA (1)...(19): siRNA sense strand
gaugcaagaagccuuugaa

SEQ ID NO: 439696 - RNA, 19 nt, Homo sapiens
  misc_RNA (1)...(19): siRNA sense strand
gcugaucuugcaucuuuaa

SEQ ID NO: 439697 - RNA, 19 nt, Homo sapiens
  misc_RNA (1)...(19): siRNA sense strand
caauaccuggaacgauuua

SEQ ID NO: 439698 - RNA, 19 nt, Homo sapiens
  misc_RNA (1)...(19): siRNA sense strand
auaaagcuguguagagaag

SEQ ID NO: 439699 - RNA, 19 nt, Homo sapiens
  misc_RNA (1)...(19): siRNA sense strand
aacaauaucacggcuuaua

SEQ ID NO: 439700 - RNA, 19 nt, Homo sapiens
  misc_RNA (1)...(19): siRNA sense strand
gaaagcagcaaaggcaucu

SEQ ID NO: 439701 - RNA, 19 nt, Homo sapiens
  misc_RNA (1)...(19): siRNA sense strand
gacauaaagcuguguagag

SEQ ID NO: 439702 - RNA, 19 nt, Homo sapiens
  misc_RNA (1)...(19): siRNA sense strand
gcacaagacaaagcccuau

SEQ ID NO: 439703 - RNA, 19 nt, Homo sapiens
  misc_RNA (1)...(19): siRNA sense strand
caacugcugguaccugaga

SEQ ID NO: 439704 - RNA, 19 nt, Homo sapiens
  misc_RNA (1)...(19): siRNA sense strand
ggcagugucuaaaauauga

SEQ ID NO: 439705 - RNA, 19 nt, Homo sapiens
  misc_RNA (1)...(19): siRNA sense strand
gaggagcagucccaaaaug

SEQ ID NO: 439706 - RNA, 19 nt, Homo sapiens
  misc_RNA (1)...(19): siRNA sense strand
ggauaaaacauuugagaga

SEQ ID NO: 439707 - RNA, 19 nt, Homo sapiens
  misc_RNA (1)...(19): siRNA sense strand
gggaagaggagaggaacuu

SEQ ID NO: 439708 - RNA, 19 nt, Homo sapiens
  misc_RNA (1)...(19): siRNA sense strand
ccaguuguauggcuaugca

SEQ ID NO: 439709 - RNA, 19 nt, Homo sapiens
  misc_RNA (1)...(19): siRNA sense strand
agacaaagcccuauauacc

SEQ ID NO: 439710 - RNA, 19 nt, Homo sapiens
  misc_RNA (1)...(19): siRNA sense strand
ucuagaccuuguacaguug

SEQ ID NO: 439711 - RNA, 19 nt, Homo sapiens
  misc_RNA (1)...(19): siRNA sense strand
gaggacaucgccaccuaug

SEQ ID NO: 439712 - RNA, 19 nt, Homo sapiens
  misc_RNA (1)...(19): siRNA sense strand
ucaauaccuggaacgauuu

SEQ ID NO: 439713 - RNA, 19 nt, Homo sapiens
  misc_RNA (1)...(19): siRNA sense strand
uagagaagcgcucgaugug

SEQ ID NO: 439714 - RNA, 19 nt, Homo sapiens
  misc_RNA (1)...(19): siRNA sense strand
gaaaccaggcuaccuugac

SEQ ID NO: 439715 - RNA, 19 nt, Homo sapiens
  misc_RNA (1)...(19): siRNA sense strand
caugcagaguauuaccuuu

SEQ ID NO: 439716 - RNA, 19 nt, Homo sapiens
  misc_RNA (1)...(19): siRNA sense strand
cacaacaugccucugauau

SEQ ID NO: 439717 - RNA, 19 nt, Homo sapiens
  misc_RNA (1)...(19): siRNA sense strand
cggcuuauagacaacauuu

SEQ ID NO: 439718 - RNA, 19 nt, Homo sapiens
  misc_RNA (1)...(19): siRNA sense strand
uacaguugauccagagaga

SEQ ID NO: 439719 - RNA, 19 nt, Homo sapiens
  misc_RNA (1)...(19): siRNA sense strand
acaugccucugauauggaa

SEQ ID NO: 439720 - RNA, 19 nt, Homo sapiens
  misc_RNA (1)...(19): siRNA sense strand
gaugcuuuaucugugguuu

SEQ ID NO: 439721 - RNA, 19 nt, Homo sapiens
  misc_RNA (1)...(19): siRNA sense strand
acaagacaaagcccuauau

SEQ ID NO: 439722 - RNA, 19 nt, Homo sapiens
  misc_RNA (1)...(19): siRNA sense strand
gaguauuaccuuuacaagu

SEQ ID NO: 439723 - RNA, 19 nt, Homo sapiens
  misc_RNA (1)...(19): siRNA sense strand
augcagaguauuaccuuua

SEQ ID NO: 439724 - RNA, 19 nt, Homo sapiens
  misc_RNA (1)...(19): siRNA sense strand
cugagaaacuggacuaucc

SEQ ID NO: 439725 - RNA, 19 nt, Homo sapiens
  misc_RNA (1)...(19): siRNA sense strand
cagaaggucuuuuaagucu

SEQ ID NO: 439726 - RNA, 19 nt, Homo sapiens
  misc_RNA (1)...(19): siRNA sense strand
ccuauauacccuuguaaau

SEQ ID NO: 439727 - RNA, 19 nt, Homo sapiens
  misc_RNA (1)...(19): siRNA sense strand
cacaagacaaagcccuaua

SEQ ID NO: 439728 - RNA, 19 nt, Homo sapiens
  misc_RNA (1)...(19): siRNA sense strand
cagaguauuaccuuuacaa

SEQ ID NO: 439729 - RNA, 19 nt, Homo sapiens
  misc_RNA (1)...(19): siRNA sense strand
uaccacaacaugccucuga

SEQ ID NO: 439730 - RNA, 19 nt, Homo sapiens
  misc_RNA (1)...(19): siRNA sense strand
caugaugcaagaagccuuu

SEQ ID NO: 439731 - RNA, 19 nt, Homo sapiens
  misc_RNA (1)...(19): siRNA sense strand
cuauguagacagccacaaa

SEQ ID NO: 439732 - RNA, 19 nt, Homo sapiens
  misc_RNA (1)...(19): siRNA sense strand
guccaagcuuccucaauac

SEQ ID NO: 439733 - RNA, 19 nt, Homo sapiens
  misc_RNA (1)...(19): siRNA sense strand
uggcaaagaagacagacuu

SEQ ID NO: 439734 - RNA, 19 nt, Homo sapiens
  misc_RNA (1)...(19): siRNA sense strand
gcaucuagaccuuguacag

SEQ ID NO: 439735 - RNA, 19 nt, Homo sapiens
  misc_RNA (1)...(19): siRNA sense strand
acaaaugggaagcaagaga

SEQ ID NO: 439736 - RNA, 19 nt, Homo sapiens
  misc_RNA (1)...(19): siRNA sense strand
gagaaaguugccuguuagu

SEQ ID NO: 439737 - RNA, 19 nt, Homo sapiens
  misc_RNA (1)...(19): siRNA sense strand
cauaaagcuguguagagaa

SEQ ID NO: 439738 - RNA, 19 nt, Homo sapiens
  misc_RNA (1)...(19): siRNA sense strand
gguuucaguucccaguugu

SEQ ID NO: 439739 - RNA, 19 nt, Homo sapiens
  misc_RNA (1)...(19): siRNA sense strand
acaacaugccucugauaug

SEQ ID NO: 439740 - RNA, 19 nt, Homo sapiens
  misc_RNA (1)...(19): siRNA sense strand
cagagcccuucaagugaug

SEQ ID NO: 439741 - RNA, 19 nt, Homo sapiens
  misc_RNA (1)...(19): siRNA sense strand
ucuugcaucuuuaauggau

SEQ ID NO: 439742 - RNA, 19 nt, Homo sapiens
  misc_RNA (1)...(19): siRNA sense strand
gucagaaggucuuuuaagu

SEQ ID NO: 439743 - RNA, 19 nt, Homo sapiens
  misc_RNA (1)...(19): siRNA sense strand
gggcaaaauugagucagaa

SEQ ID NO: 439744 - RNA, 19 nt, Homo sapiens
  misc_RNA (1)...(19): siRNA sense strand
ccaccuaugagcagaaucu

SEQ ID NO: 439745 - RNA, 19 nt, Homo sapiens
  misc_RNA (1)...(19): siRNA sense strand
gcaaagagcuguucaggaa

SEQ ID NO: 439746 - RNA, 19 nt, Homo sapiens
  misc_RNA (1)...(19): siRNA sense strand
gaacaaacagucccaauua

SEQ ID NO: 439747 - RNA, 19 nt, Homo sapiens
  misc_RNA (1)...(19): siRNA sense strand
gcacuucgauguuuaauga

SEQ ID NO: 439748 - RNA, 19 nt, Homo sapiens
  misc_RNA (1)...(19): siRNA sense strand
gaagaucaguugaaagaaa

SEQ ID NO: 439749 - RNA, 19 nt, Homo sapiens
  misc_RNA (1)...(19): siRNA sense strand
gaacacaguuucuaacaga

SEQ ID NO: 439750 - RNA, 19 nt, Homo sapiens
  misc_RNA (1)...(19): siRNA sense strand
gaacugccaucuguuaaua

SEQ ID NO: 439751 - RNA, 19 nt, Homo sapiens
  misc_RNA (1)...(19): siRNA sense strand
gaaauugaacguugcauua

SEQ ID NO: 439752 - RNA, 19 nt, Homo sapiens
  misc_RNA (1)...(19): siRNA sense strand
gaagcuagcugcacuugaa

SEQ ID NO: 439753 - RNA, 19 nt, Homo sapiens
  misc_RNA (1)...(19): siRNA sense strand
ucacaggucuuucuacuuu

SEQ ID NO: 439754 - RNA, 19 nt, Homo sapiens
  misc_RNA (1)...(19): siRNA sense strand
gaagaagucugaaacauac

SEQ ID NO: 439755 - RNA, 19 nt, Homo sapiens
  misc_RNA (1)...(19): siRNA sense strand
gaggaacucugcaguauga

SEQ ID NO: 439756 - RNA, 19 nt, Homo sapiens
  misc_RNA (1)...(19): siRNA sense strand
uggaagagcucaucuguaa

SEQ ID NO: 439757 - RNA, 19 nt, Homo sapiens
  misc_RNA (1)...(19): siRNA sense strand
gaugaaugguggagaguua

SEQ ID NO: 439758 - RNA, 19 nt, Homo sapiens
  misc_RNA (1)...(19): siRNA sense strand
gcagcaauaucauucauuu

SEQ ID NO: 439759 - RNA, 19 nt, Homo sapiens
  misc_RNA (1)...(19): siRNA sense strand
gcagaaaggugguugacaa

SEQ ID NO: 439760 - RNA, 19 nt, Homo sapiens
  misc_RNA (1)...(19): siRNA sense strand
gaagguguauuuaggcuuu

SEQ ID NO: 439761 - RNA, 19 nt, Homo sapiens
  misc_RNA (1)...(19): siRNA sense strand
ucaaaggacuggaggauuu

SEQ ID NO: 439762 - RNA, 19 nt, Homo sapiens
  misc_RNA (1)...(19): siRNA sense strand
ggaacaagaucaggacuaa

SEQ ID NO: 439763 - RNA, 19 nt, Homo sapiens
  misc_RNA (1)...(19): siRNA sense strand
aaacaucucuugaaagcua

SEQ ID NO: 439764 - RNA, 19 nt, Homo sapiens
  misc_RNA (1)...(19): siRNA sense strand
gaacauaacauccagauag

SEQ ID NO: 439765 - RNA, 19 nt, Homo sapiens
  misc_RNA (1)...(19): siRNA sense strand
caagauuucucugauguua

SEQ ID NO: 439766 - RNA, 19 nt, Homo sapiens
  misc_RNA (1)...(19): siRNA sense strand
gaacagggaaggacaauug

SEQ ID NO: 439767 - RNA, 19 nt, Homo sapiens
  misc_RNA (1)...(19): siRNA sense strand
gaauacacguuagaaagua

SEQ ID NO: 439768 - RNA, 19 nt, Homo sapiens
  misc_RNA (1)...(19): siRNA sense strand
gaacguugcauuaaaguuu

SEQ ID NO: 439769 - RNA, 19 nt, Homo sapiens
  misc_RNA (1)...(19): siRNA sense strand
ggagaagaauugcugguuu

SEQ ID NO: 439770 - RNA, 19 nt, Homo sapiens
  misc_RNA (1)...(19): siRNA sense strand
cuagaaagcugauccagaa

SEQ ID NO: 439771 - RNA, 19 nt, Homo sapiens
  misc_RNA (1)...(19): siRNA sense strand
cgaagaagaugacaugguu

SEQ ID NO: 439772 - RNA, 19 nt, Homo sapiens
  misc_RNA (1)...(19): siRNA sense strand
gaaugggccuguacagauu

SEQ ID NO: 439773 - RNA, 19 nt, Homo sapiens
  misc_RNA (1)...(19): siRNA sense strand
guaaaguacuugaagcaaa

SEQ ID NO: 439774 - RNA, 19 nt, Homo sapiens
  misc_RNA (1)...(19): siRNA sense strand
gugaagauguucccuauga

SEQ ID NO: 439775 - RNA, 19 nt, Homo sapiens
  misc_RNA (1)...(19): siRNA sense strand
agaaagcgguggaacauaa

SEQ ID NO: 439776 - RNA, 19 nt, Homo sapiens
  misc_RNA (1)...(19): siRNA sense strand
gagaacagcugguugaucu

SEQ ID NO: 439777 - RNA, 19 nt, Homo sapiens
  misc_RNA (1)...(19): siRNA sense strand
gaggaaaguuguagauaga

SEQ ID NO: 439778 - RNA, 19 nt, Homo sapiens
  misc_RNA (1)...(19): siRNA sense strand
gaucagaaguggcagucua

SEQ ID NO: 439779 - RNA, 19 nt, Homo sapiens
  misc_RNA (1)...(19): siRNA sense strand
gaacuggacggucuuauug

SEQ ID NO: 439780 - RNA, 19 nt, Homo sapiens
  misc_RNA (1)...(19): siRNA sense strand
gcaauaaggaugaaccuaa

SEQ ID NO: 439781 - RNA, 19 nt, Homo sapiens
  misc_RNA (1)...(19): siRNA sense strand
ucucgcagcucacacauua

SEQ ID NO: 439782 - RNA, 19 nt, Homo sapiens
  misc_RNA (1)...(19): siRNA sense strand
gcgaaagauugacaucaua

SEQ ID NO: 439783 - RNA, 19 nt, Homo sapiens
  misc_RNA (1)...(19): siRNA sense strand
gcacacagcuuugaugaag

SEQ ID NO: 439784 - RNA, 19 nt, Homo sapiens
  misc_RNA (1)...(19): siRNA sense strand
gcauuaagguauacuaugu

SEQ ID NO: 439785 - RNA, 19 nt, Homo sapiens
  misc_RNA (1)...(19): siRNA sense strand
ggaagcaacuaaucuagau

SEQ ID NO: 439786 - RNA, 19 nt, Homo sapiens
  misc_RNA (1)...(19): siRNA sense strand
gucaagagcucuauaggaa

SEQ ID NO: 439787 - RNA, 19 nt, Homo sapiens
  misc_RNA (1)...(19): siRNA sense strand
ggauuggccucuucaugua

SEQ ID NO: 439788 - RNA, 19 nt, Homo sapiens
  misc_RNA (1)...(19): siRNA sense strand
gcacuucccucaaccugaa

SEQ ID NO: 439789 - RNA, 19 nt, Homo sapiens
  misc_RNA (1)...(19): siRNA sense strand
gggaagagcuauccuuauc

SEQ ID NO: 439790 - RNA, 19 nt, Homo sapiens
  misc_RNA (1)...(19): siRNA sense strand
ggaggaaaguuguagauag

SEQ ID NO: 439791 - RNA, 19 nt, Homo sapiens
  misc_RNA (1)...(19): siRNA sense strand
ccacugcaauuccaacuuu

SEQ ID NO: 439792 - RNA, 19 nt, Homo sapiens
  misc_RNA (1)...(19): siRNA sense strand
guuagagcuucguuuauua

SEQ ID NO: 439793 - RNA, 19 nt, Homo sapiens
  misc_RNA (1)...(19): siRNA sense strand
gcagaaacaccucaugaaa

SEQ ID NO: 439794 - RNA, 19 nt, Homo sapiens
  misc_RNA (1)...(19): siRNA sense strand
caauaaggaugaaccuaaa

SEQ ID NO: 439795 - RNA, 19 nt, Homo sapiens
  misc_RNA (1)...(19): siRNA sense strand
uaauagaacugccaucugu

SEQ ID NO: 439796 - RNA, 19 nt, Homo sapiens
  misc_RNA (1)...(19): siRNA sense strand
uagcuuagaugaauaccua

SEQ ID NO: 439797 - RNA, 19 nt, Homo sapiens
  misc_RNA (1)...(19): siRNA sense strand
gcacaacaccugaugaaug

SEQ ID NO: 439798 - RNA, 19 nt, Homo sapiens
  misc_RNA (1)...(19): siRNA sense strand
gcucgacacuauucuguaa

SEQ ID NO: 439799 - RNA, 19 nt, Homo sapiens
  misc_RNA (1)...(19): siRNA sense strand
ggaagcagcuguuuuaaug

SEQ ID NO: 439800 - RNA, 19 nt, Homo sapiens
  misc_RNA (1)...(19): siRNA sense strand
gaagcugaaugaauuugaa

SEQ ID NO: 439801 - RNA, 19 nt, Homo sapiens
  misc_RNA (1)...(19): siRNA sense strand
gagaugagaugcugguugu

SEQ ID NO: 439802 - RNA, 19 nt, Homo sapiens
  misc_RNA (1)...(19): siRNA sense strand
ccaaagagcucuggucauc

SEQ ID NO: 439803 - RNA, 19 nt, Homo sapiens
  misc_RNA (1)...(19): siRNA sense strand
gaagagaaagagagaauau

SEQ ID NO: 439804 - RNA, 19 nt, Homo sapiens
  misc_RNA (1)...(19): siRNA sense strand
caagacaccuuccagacaa

SEQ ID NO: 439805 - RNA, 19 nt, Homo sapiens
  misc_RNA (1)...(19): siRNA sense strand
uaacuuggcucagcuguau

SEQ ID NO: 439806 - RNA, 19 nt, Homo sapiens
  misc_RNA (1)...(19): siRNA sense strand
gaaacggucugugaaacaa

SEQ ID NO: 439807 - RNA, 19 nt, Homo sapiens
  misc_RNA (1)...(19): siRNA sense strand
ggaaguaaccauuaugaug

SEQ ID NO: 439808 - RNA, 19 nt, Homo sapiens
  misc_RNA (1)...(19): siRNA sense strand
gauguuguccuaagcaaua

SEQ ID NO: 439809 - RNA, 19 nt, Homo sapiens
  misc_RNA (1)...(19): siRNA sense strand
gagcuucguuuauuacaga

SEQ ID NO: 439810 - RNA, 19 nt, Homo sapiens
  misc_RNA (1)...(19): siRNA sense strand
caacaugaagaucuacuua

SEQ ID NO: 439811 - RNA, 19 nt, Homo sapiens
  misc_RNA (1)...(19): siRNA sense strand
gaaguucucucagcugguu

SEQ ID NO: 439812 - RNA, 19 nt, Homo sapiens
  misc_RNA (1)...(19): siRNA sense strand
gaugaucucuguaagaaag

SEQ ID NO: 439813 - RNA, 19 nt, Homo sapiens
  misc_RNA (1)...(19): siRNA sense strand
gcuuucagcuuauuaguug

SEQ ID NO: 439814 - RNA, 19 nt, Homo sapiens
  misc_RNA (1)...(19): siRNA sense strand
ucagaaacaucgaauugaa

SEQ ID NO: 439815 - RNA, 19 nt, Homo sapiens
  misc_RNA (1)...(19): siRNA sense strand
gaaugaauuugaacaaugg

SEQ ID NO: 439816 - RNA, 19 nt, Homo sapiens
  misc_RNA (1)...(19): siRNA sense strand
caacaacaccuuacgcaaa

SEQ ID NO: 439817 - RNA, 19 nt, Homo sapiens
  misc_RNA (1)...(19): siRNA sense strand
acucaacgcuggucaaauu

SEQ ID NO: 439818 - RNA, 19 nt, Homo sapiens
  misc_RNA (1)...(19): siRNA sense strand
cgagggaacuucagaaauc

SEQ ID NO: 439819 - RNA, 19 nt, Homo sapiens
  misc_RNA (1)...(19): siRNA sense strand
gggaaugaauuggaaguaa

SEQ ID NO: 439820 - RNA, 19 nt, Homo sapiens
  misc_RNA (1)...(19): siRNA sense strand
caagagcucuauaggaaau

SEQ ID NO: 439821 - RNA, 19 nt, Homo sapiens
  misc_RNA (1)...(19): siRNA sense strand
gcaaacuacuggaggaaau

SEQ ID NO: 439822 - RNA, 19 nt, Homo sapiens
  misc_RNA (1)...(19): siRNA sense strand
caacuuuacuuggcaauau

SEQ ID NO: 439823 - RNA, 19 nt, Homo sapiens
  misc_RNA (1)...(19): siRNA sense strand
gaacagagcacugaugaca

SEQ ID NO: 439824 - RNA, 19 nt, Homo sapiens
  misc_RNA (1)...(19): siRNA sense strand
gaauuggaaguaaccauua

SEQ ID NO: 439825 - RNA, 19 nt, Homo sapiens
  misc_RNA (1)...(19): siRNA sense strand
ugaagaagucugaaacaua

SEQ ID NO: 439826 - RNA, 19 nt, Homo sapiens
  misc_RNA (1)...(19): siRNA sense strand
gagaagaauugcugguuuc

SEQ ID NO: 439827 - RNA, 19 nt, Homo sapiens
  misc_RNA (1)...(19): siRNA sense strand
gaaaggugguugacaaugc

SEQ ID NO: 439828 - RNA, 19 nt, Homo sapiens
  misc_RNA (1)...(19): siRNA sense strand
gaaagacuguucuauagcu

SEQ ID NO: 439829 - RNA, 19 nt, Homo sapiens
  misc_RNA (1)...(19): siRNA sense strand
gagcacugaugacaugauu

SEQ ID NO: 439830 - RNA, 19 nt, Homo sapiens
  misc_RNA (1)...(19): siRNA sense strand
agacaucauugcucaagua

SEQ ID NO: 439831 - RNA, 19 nt, Homo sapiens
  misc_RNA (1)...(19): siRNA sense strand
caauaacaaucacacagaa

SEQ ID NO: 439832 - RNA, 19 nt, Homo sapiens
  misc_RNA (1)...(19): siRNA sense strand
cagcagauguguucguuug

SEQ ID NO: 439833 - RNA, 19 nt, Homo sapiens
  misc_RNA (1)...(19): siRNA sense strand
gaaaguuuacgaacaagaa

SEQ ID NO: 439834 - RNA, 19 nt, Homo sapiens
  misc_RNA (1)...(19): siRNA sense strand
ggaguacucaaguuaauuu

SEQ ID NO: 439835 - RNA, 19 nt, Homo sapiens
  misc_RNA (1)...(19): siRNA sense strand
ggucaggcccacuugauua

SEQ ID NO: 439836 - RNA, 19 nt, Homo sapiens
  misc_RNA (1)...(19): siRNA sense strand
caaguuggacgguagcuua

SEQ ID NO: 439837 - RNA, 19 nt, Homo sapiens
  misc_RNA (1)...(19): siRNA sense strand
uggagaaguuguucacaua

SEQ ID NO: 439838 - RNA, 19 nt, Homo sapiens
  misc_RNA (1)...(19): siRNA sense strand
ggagaguuacgcagucuua

SEQ ID NO: 439839 - RNA, 19 nt, Homo sapiens
  misc_RNA (1)...(19): siRNA sense strand
ucagaauccuggaauugua

SEQ ID NO: 439840 - RNA, 19 nt, Homo sapiens
  misc_RNA (1)...(19): siRNA sense strand
gauguuaucuggcgucagu

SEQ ID NO: 439841 - RNA, 19 nt, Homo sapiens
  misc_RNA (1)...(19): siRNA sense strand
ggaugaagauauaacacuu

SEQ ID NO: 439842 - RNA, 19 nt, Homo sapiens
  misc_RNA (1)...(19): siRNA sense strand
caucaucuauuguuggaaa

SEQ ID NO: 439843 - RNA, 19 nt, Homo sapiens
  misc_RNA (1)...(19): siRNA sense strand
ggacaacugcagacaauga

SEQ ID NO: 439844 - RNA, 19 nt, Homo sapiens
  misc_RNA (1)...(19): siRNA sense strand
caacgucaucugcuacuua

SEQ ID NO: 439845 - RNA, 19 nt, Homo sapiens
  misc_RNA (1)...(19): siRNA sense strand
gcaaagagcuguucaggaa

SEQ ID NO: 439846 - RNA, 19 nt, Homo sapiens
  misc_RNA (1)...(19): siRNA sense strand
gaacaaacagucccaauua

SEQ ID NO: 439847 - RNA, 19 nt, Homo sapiens
  misc_RNA (1)...(19): siRNA sense strand
gcacuucgauguuuaauga

SEQ ID NO: 439848 - RNA, 19 nt, Homo sapiens
  misc_RNA (1)...(19): siRNA sense strand
gaagaucaguugaaagaaa

SEQ ID NO: 439849 - RNA, 19 nt, Homo sapiens
  misc_RNA (1)...(19): siRNA sense strand
gaacacaguuucuaacaga

SEQ ID NO: 439850 - RNA, 19 nt, Homo sapiens
  misc_RNA (1)...(19): siRNA sense strand
gaacugccaucuguuaaua

SEQ ID NO: 439851 - RNA, 19 nt, Homo sapiens
  misc_RNA (1)...(19): siRNA sense strand
gaaauugaacguugcauua

SEQ ID NO: 439852 - RNA, 19 nt, Homo sapiens
  misc_RNA (1)...(19): siRNA sense strand
gaagcuagcugcacuugaa

SEQ ID NO: 439853 - RNA, 19 nt, Homo sapiens
  misc_RNA (1)...(19): siRNA sense strand
ucacaggucuuucuacuuu

SEQ ID NO: 439854 - RNA, 19 nt, Homo sapiens
  misc_RNA (1)...(19): siRNA sense strand
gaagaagucugaaacauac

SEQ ID NO: 439855 - RNA, 19 nt, Homo sapiens
  misc_RNA (1)...(19): siRNA sense strand
gaggaacucugcaguauga

SEQ ID NO: 439856 - RNA, 19 nt, Homo sapiens
  misc_RNA (1)...(19): siRNA sense strand
uggaagagcucaucuguaa

SEQ ID NO: 439857 - RNA, 19 nt, Homo sapiens
  misc_RNA (1)...(19): siRNA sense strand
gaugaaugguggagaguua

SEQ ID NO: 439858 - RNA, 19 nt, Homo sapiens
  misc_RNA (1)...(19): siRNA sense strand
gcagcaauaucauucauuu

SEQ ID NO: 439859 - RNA, 19 nt, Homo sapiens
  misc_RNA (1)...(19): siRNA sense strand
gcagaaaggugguugacaa

SEQ ID NO: 439860 - RNA, 19 nt, Homo sapiens
  misc_RNA (1)...(19): siRNA sense strand
gaagguguauuuaggcuuu

SEQ ID NO: 439861 - RNA, 19 nt, Homo sapiens
  misc_RNA (1)...(19): siRNA sense strand
ucaaaggacuggaggauuu

SEQ ID NO: 439862 - RNA, 19 nt, Homo sapiens
  misc_RNA (1)...(19): siRNA sense strand
ggaacaagaucaggacuaa

SEQ ID NO: 439863 - RNA, 19 nt, Homo sapiens
  misc_RNA (1)...(19): siRNA sense strand
aaacaucucuugaaagcua

SEQ ID NO: 439864 - RNA, 19 nt, Homo sapiens
  misc_RNA (1)...(19): siRNA sense strand
gaacauaacauccagauag

SEQ ID NO: 439865 - RNA, 19 nt, Homo sapiens
  misc_RNA (1)...(19): siRNA sense strand
caagauuucucugauguua

SEQ ID NO: 439866 - RNA, 19 nt, Homo sapiens
  misc_RNA (1)...(19): siRNA sense strand
gaacagggaaggacaauug

SEQ ID NO: 439867 - RNA, 19 nt, Homo sapiens
  misc_RNA (1)...(19): siRNA sense strand
gaauacacguuagaaagua

SEQ ID NO: 439868 - RNA, 19 nt, Homo sapiens
  misc_RNA (1)...(19): siRNA sense strand
gaacguugcauuaaaguuu

SEQ ID NO: 439869 - RNA, 19 nt, Homo sapiens
  misc_RNA (1)...(19): siRNA sense strand
ggagaagaauugcugguuu

SEQ ID NO: 439870 - RNA, 19 nt, Homo sapiens
  misc_RNA (1)...(19): siRNA sense strand
cuagaaagcugauccagaa

SEQ ID NO: 439871 - RNA, 19 nt, Homo sapiens
  misc_RNA (1)...(19): siRNA sense strand
cgaagaagaugacaugguu

SEQ ID NO: 439872 - RNA, 19 nt, Homo sapiens
  misc_RNA (1)...(19): siRNA sense strand
gaaugggccuguacagauu

SEQ ID NO: 439873 - RNA, 19 nt, Homo sapiens
  misc_RNA (1)...(19): siRNA sense strand
guaaaguacuugaagcaaa

SEQ ID NO: 439874 - RNA, 19 nt, Homo sapiens
  misc_RNA (1)...(19): siRNA sense strand
gugaagauguucccuauga

SEQ ID NO: 439875 - RNA, 19 nt, Homo sapiens
  misc_RNA (1)...(19): siRNA sense strand
agaaagcgguggaacauaa

SEQ ID NO: 439876 - RNA, 19 nt, Homo sapiens
  misc_RNA (1)...(19): siRNA sense strand
gagaacagcugguugaucu

SEQ ID NO: 439877 - RNA, 19 nt, Homo sapiens
  misc_RNA (1)...(19): siRNA sense strand
gaggaaaguuguagauaga

SEQ ID NO: 439878 - RNA, 19 nt, Homo sapiens
  misc_RNA (1)...(19): siRNA sense strand
gaucagaaguggcagucua

SEQ ID NO: 439879 - RNA, 19 nt, Homo sapiens
  misc_RNA (1)...(19): siRNA sense strand
gaacuggacggucuuauug

SEQ ID NO: 439880 - RNA, 19 nt, Homo sapiens
  misc_RNA (1)...(19): siRNA sense strand
gcaauaaggaugaaccuaa

SEQ ID NO: 439881 - RNA, 19 nt, Homo sapiens
  misc_RNA (1)...(19): siRNA sense strand
ucucgcagcucacacauua

SEQ ID NO: 439882 - RNA, 19 nt, Homo sapiens
  misc_RNA (1)...(19): siRNA sense strand
gcgaaagauugacaucaua

SEQ ID NO: 439883 - RNA, 19 nt, Homo sapiens
  misc_RNA (1)...(19): siRNA sense strand
gcacacagcuuugaugaag

SEQ ID NO: 439884 - RNA, 19 nt, Homo sapiens
  misc_RNA (1)...(19): siRNA sense strand
gcauuaagguauacuaugu

SEQ ID NO: 439885 - RNA, 19 nt, Homo sapiens
  misc_RNA (1)...(19): siRNA sense strand
ggaagcaacuaaucuagau

SEQ ID NO: 439886 - RNA, 19 nt, Homo sapiens
  misc_RNA (1)...(19): siRNA sense strand
gucaagagcucuauaggaa

SEQ ID NO: 439887 - RNA, 19 nt, Homo sapiens
  misc_RNA (1)...(19): siRNA sense strand
ggauuggccucuucaugua

SEQ ID NO: 439888 - RNA, 19 nt, Homo sapiens
  misc_RNA (1)...(19): siRNA sense strand
gcacuucccucaaccugaa

SEQ ID NO: 439889 - RNA, 19 nt, Homo sapiens
  misc_RNA (1)...(19): siRNA sense strand
gggaagagcuauccuuauc

SEQ ID NO: 439890 - RNA, 19 nt, Homo sapiens
  misc_RNA (1)...(19): siRNA sense strand
ggaggaaaguuguagauag

SEQ ID NO: 439891 - RNA, 19 nt, Homo sapiens
  misc_RNA (1)...(19): siRNA sense strand
ccacugcaauuccaacuuu

SEQ ID NO: 439892 - RNA, 19 nt, Homo sapiens
  misc_RNA (1)...(19): siRNA sense strand
guuagagcuucguuuauua

SEQ ID NO: 439893 - RNA, 19 nt, Homo sapiens
  misc_RNA (1)...(19): siRNA sense strand
gcagaaacaccucaugaaa

SEQ ID NO: 439894 - RNA, 19 nt, Homo sapiens
  misc_RNA (1)...(19): siRNA sense strand
caauaaggaugaaccuaaa

SEQ ID NO: 439895 - RNA, 19 nt, Homo sapiens
  misc_RNA (1)...(19): siRNA sense strand
uaauagaacugccaucugu

SEQ ID NO: 439896 - RNA, 19 nt, Homo sapiens
  misc_RNA (1)...(19): siRNA sense strand
uagcuuagaugaauaccua

SEQ ID NO: 439897 - RNA, 19 nt, Homo sapiens
  misc_RNA (1)...(19): siRNA sense strand
gcacaacaccugaugaaug

SEQ ID NO: 439898 - RNA, 19 nt, Homo sapiens
  misc_RNA (1)...(19): siRNA sense strand
gcucgacacuauucuguaa

SEQ ID NO: 439899 - RNA, 19 nt, Homo sapiens
  misc_RNA (1)...(19): siRNA sense strand
ggaagcagcuguuuuaaug

SEQ ID NO: 439900 - RNA, 19 nt, Homo sapiens
  misc_RNA (1)...(19): siRNA sense strand
gaagcugaaugaauuugaa

SEQ ID NO: 439901 - RNA, 19 nt, Homo sapiens
  misc_RNA (1)...(19): siRNA sense strand
gagaugagaugcugguugu

SEQ ID NO: 439902 - RNA, 19 nt, Homo sapiens
  misc_RNA (1)...(19): siRNA sense strand
ccaaagagcucuggucauc

SEQ ID NO: 439903 - RNA, 19 nt, Homo sapiens
  misc_RNA (1)...(19): siRNA sense strand
gaagagaaagagagaauau

SEQ ID NO: 439904 - RNA, 19 nt, Homo sapiens
  misc_RNA (1)...(19): siRNA sense strand
caagacaccuuccagacaa

SEQ ID NO: 439905 - RNA, 19 nt, Homo sapiens
  misc_RNA (1)...(19): siRNA sense strand
uaacuuggcucagcuguau

SEQ ID NO: 439906 - RNA, 19 nt, Homo sapiens
  misc_RNA (1)...(19): siRNA sense strand
gaaacggucugugaaacaa

SEQ ID NO: 439907 - RNA, 19 nt, Homo sapiens
  misc_RNA (1)...(19): siRNA sense strand
ggaaguaaccauuaugaug

SEQ ID NO: 439908 - RNA, 19 nt, Homo sapiens
  misc_RNA (1)...(19): siRNA sense strand
gauguuguccuaagcaaua

SEQ ID NO: 439909 - RNA, 19 nt, Homo sapiens
  misc_RNA (1)...(19): siRNA sense strand
gagcuucguuuauuacaga

SEQ ID NO: 439910 - RNA, 19 nt, Homo sapiens
  misc_RNA (1)...(19): siRNA sense strand
caacaugaagaucuacuua

SEQ ID NO: 439911 - RNA, 19 nt, Homo sapiens
  misc_RNA (1)...(19): siRNA sense strand
gaaguucucucagcugguu

SEQ ID NO: 439912 - RNA, 19 nt, Homo sapiens
  misc_RNA (1)...(19): siRNA sense strand
gaugaucucuguaagaaag

SEQ ID NO: 439913 - RNA, 19 nt, Homo sapiens
  misc_RNA (1)...(19): siRNA sense strand
gcuuucagcuuauuaguug

SEQ ID NO: 439914 - RNA, 19 nt, Homo sapiens
  misc_RNA (1)...(19): siRNA sense strand
ucagaaacaucgaauugaa

SEQ ID NO: 439915 - RNA, 19 nt, Homo sapiens
  misc_RNA (1)...(19): siRNA sense strand
gaaugaauuugaacaaugg

SEQ ID NO: 439916 - RNA, 19 nt, Homo sapiens
  misc_RNA (1)...(19): siRNA sense strand
caacaacaccuuacgcaaa

SEQ ID NO: 439917 - RNA, 19 nt, Homo sapiens
  misc_RNA (1)...(19): siRNA sense strand
acucaacgcuggucaaauu

SEQ ID NO: 439918 - RNA, 19 nt, Homo sapiens
  misc_RNA (1)...(19): siRNA sense strand
cgagggaacuucagaaauc

SEQ ID NO: 439919 - RNA, 19 nt, Homo sapiens
  misc_RNA (1)...(19): siRNA sense strand
gggaaugaauuggaaguaa

SEQ ID NO: 439920 - RNA, 19 nt, Homo sapiens
  misc_RNA (1)...(19): siRNA sense strand
caagagcucuauaggaaau

SEQ ID NO: 439921 - RNA, 19 nt, Homo sapiens
  misc_RNA (1)...(19): siRNA sense strand
gcaaacuacuggaggaaau

SEQ ID NO: 439922 - RNA, 19 nt, Homo sapiens
  misc_RNA (1)...(19): siRNA sense strand
caacuuuacuuggcaauau

SEQ ID NO: 439923 - RNA, 19 nt, Homo sapiens
  misc_RNA (1)...(19): siRNA sense strand
gaacagagcacugaugaca

SEQ ID NO: 439924 - RNA, 19 nt, Homo sapiens
  misc_RNA (1)...(19): siRNA sense strand
gaauuggaaguaaccauua

SEQ ID NO: 439925 - RNA, 19 nt, Homo sapiens
  misc_RNA (1)...(19): siRNA sense strand
ugaagaagucugaaacaua

SEQ ID NO: 439926 - RNA, 19 nt, Homo sapiens
  misc_RNA (1)...(19): siRNA sense strand
gagaagaauugcugguuuc

SEQ ID NO: 439927 - RNA, 19 nt, Homo sapiens
  misc_RNA (1)...(19): siRNA sense strand
gaaaggugguugacaaugc

SEQ ID NO: 439928 - RNA, 19 nt, Homo sapiens
  misc_RNA (1)...(19): siRNA sense strand
gaaagacuguucuauagcu

SEQ ID NO: 439929 - RNA, 19 nt, Homo sapiens
  misc_RNA (1)...(19): siRNA sense strand
gagcacugaugacaugauu

SEQ ID NO: 439930 - RNA, 19 nt, Homo sapiens
  misc_RNA (1)...(19): siRNA sense strand
agacaucauugcucaagua

SEQ ID NO: 439931 - RNA, 19 nt, Homo sapiens
  misc_RNA (1)...(19): siRNA sense strand
caauaacaaucacacagaa

SEQ ID NO: 439932 - RNA, 19 nt, Homo sapiens
  misc_RNA (1)...(19): siRNA sense strand
cagcagauguguucguuug

SEQ ID NO: 439933 - RNA, 19 nt, Homo sapiens
  misc_RNA (1)...(19): siRNA sense strand
gaaaguuuacgaacaagaa

SEQ ID NO: 439934 - RNA, 19 nt, Homo sapiens
  misc_RNA (1)...(19): siRNA sense strand
ggaguacucaaguuaauuu

SEQ ID NO: 439935 - RNA, 19 nt, Homo sapiens
  misc_RNA (1)...(19): siRNA sense strand
ggucaggcccacuugauua

SEQ ID NO: 439936 - RNA, 19 nt, Homo sapiens
  misc_RNA (1)...(19): siRNA sense strand
caaguuggacgguagcuua

SEQ ID NO: 439937 - RNA, 19 nt, Homo sapiens
  misc_RNA (1)...(19): siRNA sense strand
uggagaaguuguucacaua

SEQ ID NO: 439938 - RNA, 19 nt, Homo sapiens
  misc_RNA (1)...(19): siRNA sense strand
ggagaguuacgcagucuua

SEQ ID NO: 439939 - RNA, 19 nt, Homo sapiens
  misc_RNA (1)...(19): siRNA sense strand
ucagaauccuggaauugua

SEQ ID NO: 439940 - RNA, 19 nt, Homo sapiens
  misc_RNA (1)...(19): siRNA sense strand
gauguuaucuggcgucagu

SEQ ID NO: 439941 - RNA, 19 nt, Homo sapiens
  misc_RNA (1)...(19): siRNA sense strand
ggaugaagauauaacacuu

SEQ ID NO: 439942 - RNA, 19 nt, Homo sapiens
  misc_RNA (1)...(19): siRNA sense strand
caucaucuauuguuggaaa

SEQ ID NO: 439943 - RNA, 19 nt, Homo sapiens
  misc_RNA (1)...(19): siRNA sense strand
ggacaacugcagacaauga

SEQ ID NO: 439944 - RNA, 19 nt, Homo sapiens
  misc_RNA (1)...(19): siRNA sense strand
caacgucaucugcuacuua

SEQ ID NO: 439945 - RNA, 19 nt, Homo sapiens
  misc_RNA (1)...(19): siRNA sense strand
gauggcagcuuucucauua

SEQ ID NO: 439946 - RNA, 19 nt, Homo sapiens
  misc_RNA (1)...(19): siRNA sense strand
ggaugaagcuagaauuaaa

SEQ ID NO: 439947 - RNA, 19 nt, Homo sapiens
  misc_RNA (1)...(19): siRNA sense strand
ggaaguggcuggcaaaggu

SEQ ID NO: 439948 - RNA, 19 nt, Homo sapiens
  misc_RNA (1)...(19): siRNA sense strand
caaaugucaugcagacuuu

SEQ ID NO: 439949 - RNA, 19 nt, Homo sapiens
  misc_RNA (1)...(19): siRNA sense strand
gauuggagauggcagcuuu

SEQ ID NO: 439950 - RNA, 19 nt, Homo sapiens
  misc_RNA (1)...(19): siRNA sense strand
gaagagaggcuaugugaag

SEQ ID NO: 439951 - RNA, 19 nt, Homo sapiens
  misc_RNA (1)...(19): siRNA sense strand
gagaagagaggcuauguga

SEQ ID NO: 439952 - RNA, 19 nt, Homo sapiens
  misc_RNA (1)...(19): siRNA sense strand
cgauggagcucaugaagga

SEQ ID NO: 439953 - RNA, 19 nt, Homo sapiens
  misc_RNA (1)...(19): siRNA sense strand
gaaagcaagugggaagaug

SEQ ID NO: 439954 - RNA, 19 nt, Homo sapiens
  misc_RNA (1)...(19): siRNA sense strand
ccagaaggaugaagcuaga

SEQ ID NO: 439955 - RNA, 19 nt, Homo sapiens
  misc_RNA (1)...(19): siRNA sense strand
acaaauaccagaaggauga

SEQ ID NO: 439956 - RNA, 19 nt, Homo sapiens
  misc_RNA (1)...(19): siRNA sense strand
ggagacaugcaugauauaa

SEQ ID NO: 439957 - RNA, 19 nt, Homo sapiens
  misc_RNA (1)...(19): siRNA sense strand
gcaguuaccaugugcauag

SEQ ID NO: 439958 - RNA, 19 nt, Homo sapiens
  misc_RNA (1)...(19): siRNA sense strand
gagggagacaugcaugaua

SEQ ID NO: 439959 - RNA, 19 nt, Homo sapiens
  misc_RNA (1)...(19): siRNA sense strand
gaaggaugaagcuagaauu

SEQ ID NO: 439960 - RNA, 19 nt, Homo sapiens
  misc_RNA (1)...(19): siRNA sense strand
gauagacccguggcaguua

SEQ ID NO: 439961 - RNA, 19 nt, Homo sapiens
  misc_RNA (1)...(19): siRNA sense strand
gacaacagcuagaaguuuu

SEQ ID NO: 439962 - RNA, 19 nt, Homo sapiens
  misc_RNA (1)...(19): siRNA sense strand
gcugaaagcgcaccucaug

SEQ ID NO: 439963 - RNA, 19 nt, Homo sapiens
  misc_RNA (1)...(19): siRNA sense strand
aauguggacuucuugauug

SEQ ID NO: 439964 - RNA, 19 nt, Homo sapiens
  misc_RNA (1)...(19): siRNA sense strand
cgacaacagcuagaaguuu

SEQ ID NO: 439965 - RNA, 19 nt, Homo sapiens
  misc_RNA (1)...(19): siRNA sense strand
gaagugguuuggacaugca

SEQ ID NO: 439966 - RNA, 19 nt, Homo sapiens
  misc_RNA (1)...(19): siRNA sense strand
ggcgugaacugccgcuuug

SEQ ID NO: 439967 - RNA, 19 nt, Homo sapiens
  misc_RNA (1)...(19): siRNA sense strand
uaaaugcugcugccuguga

SEQ ID NO: 439968 - RNA, 19 nt, Homo sapiens
  misc_RNA (1)...(19): siRNA sense strand
ugucaaagccagacuucua

SEQ ID NO: 439969 - RNA, 19 nt, Homo sapiens
  misc_RNA (1)...(19): siRNA sense strand
ucacauggaauucuugaga

SEQ ID NO: 439970 - RNA, 19 nt, Homo sapiens
  misc_RNA (1)...(19): siRNA sense strand
aaggaugaagcuagaauua

SEQ ID NO: 439971 - RNA, 19 nt, Homo sapiens
  misc_RNA (1)...(19): siRNA sense strand
ccagacaucaauauacaaa

SEQ ID NO: 439972 - RNA, 19 nt, Homo sapiens
  misc_RNA (1)...(19): siRNA sense strand
caagugggaagauguaaau

SEQ ID NO: 439973 - RNA, 19 nt, Homo sapiens
  misc_RNA (1)...(19): siRNA sense strand
gcaagugggaagauguaaa

SEQ ID NO: 439974 - RNA, 19 nt, Homo sapiens
  misc_RNA (1)...(19): siRNA sense strand
gcagcuuucucauuacucu

SEQ ID NO: 439975 - RNA, 19 nt, Homo sapiens
  misc_RNA (1)...(19): siRNA sense strand
uuguggaucucccagaaua

SEQ ID NO: 439976 - RNA, 19 nt, Homo sapiens
  misc_RNA (1)...(19): siRNA sense strand
agggagacaugcaugauau

SEQ ID NO: 439977 - RNA, 19 nt, Homo sapiens
  misc_RNA (1)...(19): siRNA sense strand
gggaagugguuuggacaug

SEQ ID NO: 439978 - RNA, 19 nt, Homo sapiens
  misc_RNA (1)...(19): siRNA sense strand
gaagggaguauugggagaa

SEQ ID NO: 439979 - RNA, 19 nt, Homo sapiens
  misc_RNA (1)...(19): siRNA sense strand
gucaaagccagacuucuaa

SEQ ID NO: 439980 - RNA, 19 nt, Homo sapiens
  misc_RNA (1)...(19): siRNA sense strand
ucaaaugucaugcagacuu

SEQ ID NO: 439981 - RNA, 19 nt, Homo sapiens
  misc_RNA (1)...(19): siRNA sense strand
cagaggcagugauagaaca

SEQ ID NO: 439982 - RNA, 19 nt, Homo sapiens
  misc_RNA (1)...(19): siRNA sense strand
gcacaccaaacccuggauu

SEQ ID NO: 439983 - RNA, 19 nt, Homo sapiens
  misc_RNA (1)...(19): siRNA sense strand
aaauguggacuucuugauu

SEQ ID NO: 439984 - RNA, 19 nt, Homo sapiens
  misc_RNA (1)...(19): siRNA sense strand
gauuugagcccuaccacau

SEQ ID NO: 439985 - RNA, 19 nt, Homo sapiens
  misc_RNA (1)...(19): siRNA sense strand
agagcaggaucaaauguca

SEQ ID NO: 439986 - RNA, 19 nt, Homo sapiens
  misc_RNA (1)...(19): siRNA sense strand
gggagacaugcaugauaua

SEQ ID NO: 439987 - RNA, 19 nt, Homo sapiens
  misc_RNA (1)...(19): siRNA sense strand
ugccagacaucaauauaca

SEQ ID NO: 439988 - RNA, 19 nt, Homo sapiens
  misc_RNA (1)...(19): siRNA sense strand
ggaaagcaagugggaagau

SEQ ID NO: 439989 - RNA, 19 nt, Homo sapiens
  misc_RNA (1)...(19): siRNA sense strand
guuuguggaucucccagaa

SEQ ID NO: 439990 - RNA, 19 nt, Homo sapiens
  misc_RNA (1)...(19): siRNA sense strand
ugaagacgauggagcucau

SEQ ID NO: 439991 - RNA, 19 nt, Homo sapiens
  misc_RNA (1)...(19): siRNA sense strand
ccagugaggacaauaugga

SEQ ID NO: 439992 - RNA, 19 nt, Homo sapiens
  misc_RNA (1)...(19): siRNA sense strand
ggagaagagaggcuaugug

SEQ ID NO: 439993 - RNA, 19 nt, Homo sapiens
  misc_RNA (1)...(19): siRNA sense strand
cccagaauaucccuuugga

SEQ ID NO: 439994 - RNA, 19 nt, Homo sapiens
  misc_RNA (1)...(19): siRNA sense strand
caccaaacccuggauuaga

SEQ ID NO: 439995 - RNA, 19 nt, Homo sapiens
  misc_RNA (1)...(19): siRNA sense strand
agacaugcaugauauaacc

SEQ ID NO: 439996 - RNA, 19 nt, Homo sapiens
  misc_RNA (1)...(19): siRNA sense strand
cacaccaaacccuggauua

SEQ ID NO: 439997 - RNA, 19 nt, Homo sapiens
  misc_RNA (1)...(19): siRNA sense strand
gccaccagaugggauauuc

SEQ ID NO: 439998 - RNA, 19 nt, Homo sapiens
  misc_RNA (1)...(19): siRNA sense strand
gugggaagauguaaaugcu

SEQ ID NO: 439999 - RNA, 19 nt, Homo sapiens
  misc_RNA (1)...(19): siRNA sense strand
ugaaagcgcaccucauggu

SEQ ID NO: 440000 - RNA, 19 nt, Homo sapiens
  misc_RNA (1)...(19): siRNA sense strand
gagagcaggaucaaauguc

SEQ ID NO: 440001 - RNA, 19 nt, Homo sapiens
  misc_RNA (1)...(19): siRNA sense strand
gacaauauggaaagcaagu

SEQ ID NO: 440002 - RNA, 19 nt, Homo sapiens
  misc_RNA (1)...(19): siRNA sense strand
aagcaagugggaagaugua

SEQ ID NO: 440003 - RNA, 19 nt, Homo sapiens
  misc_RNA (1)...(19): siRNA sense strand
cuucuugauugcagaguau

SEQ ID NO: 440004 - RNA, 19 nt, Homo sapiens
  misc_RNA (1)...(19): siRNA sense strand
caacuucacauggaauucu

SEQ ID NO: 440005 - RNA, 19 nt, Homo sapiens
  misc_RNA (1)...(19): siRNA sense strand
ggcgggugcuguggauuug

SEQ ID NO: 440006 - RNA, 19 nt, Homo sapiens
  misc_RNA (1)...(19): siRNA sense strand
aggacaauauggaaagcaa

SEQ ID NO: 440007 - RNA, 19 nt, Homo sapiens
  misc_RNA (1)...(19): siRNA sense strand
aggaugaagcuagaauuaa

SEQ ID NO: 440008 - RNA, 19 nt, Homo sapiens
  misc_RNA (1)...(19): siRNA sense strand
accaaacccuggauuagag

SEQ ID NO: 440009 - RNA, 19 nt, Homo sapiens
  misc_RNA (1)...(19): siRNA sense strand
ccagagaggccuacaaccu

SEQ ID NO: 440010 - RNA, 19 nt, Homo sapiens
  misc_RNA (1)...(19): siRNA sense strand
ggcaggggcuuccaucguu

SEQ ID NO: 440011 - RNA, 19 nt, Homo sapiens
  misc_RNA (1)...(19): siRNA sense strand
cagagggagacaugcauga

SEQ ID NO: 440012 - RNA, 19 nt, Homo sapiens
  misc_RNA (1)...(19): siRNA sense strand
gggcucgaagggaguauug

SEQ ID NO: 440013 - RNA, 19 nt, Homo sapiens
  misc_RNA (1)...(19): siRNA sense strand
caccagaugggauauucaa

SEQ ID NO: 440014 - RNA, 19 nt, Homo sapiens
  misc_RNA (1)...(19): siRNA sense strand
caugcagacuuuuaccuuu

SEQ ID NO: 440015 - RNA, 19 nt, Homo sapiens
  misc_RNA (1)...(19): siRNA sense strand
gcgccugacuguggcaaag

SEQ ID NO: 440016 - RNA, 19 nt, Homo sapiens
  misc_RNA (1)...(19): siRNA sense strand
gggaguauugggagaaucu

SEQ ID NO: 440017 - RNA, 19 nt, Homo sapiens
  misc_RNA (1)...(19): siRNA sense strand
caagggcucgaagggagua

SEQ ID NO: 440018 - RNA, 19 nt, Homo sapiens
  misc_RNA (1)...(19): siRNA sense strand
gacgauggagcucaugaag

SEQ ID NO: 440019 - RNA, 19 nt, Homo sapiens
  misc_RNA (1)...(19): siRNA sense strand
uuugagcccuaccacauca

SEQ ID NO: 440020 - RNA, 19 nt, Homo sapiens
  misc_RNA (1)...(19): siRNA sense strand
ccagaugggauauucaaaa

SEQ ID NO: 440021 - RNA, 19 nt, Homo sapiens
  misc_RNA (1)...(19): siRNA sense strand
ugagugggcagggcugaaa

SEQ ID NO: 440022 - RNA, 19 nt, Homo sapiens
  misc_RNA (1)...(19): siRNA sense strand
ggagagagauuaagaagag

SEQ ID NO: 440023 - RNA, 19 nt, Homo sapiens
  misc_RNA (1)...(19): siRNA sense strand
ggacagguucuaugaauuu

SEQ ID NO: 440024 - RNA, 19 nt, Homo sapiens
  misc_RNA (1)...(19): siRNA sense strand
gaagaggaaauguuuguuu

SEQ ID NO: 440025 - RNA, 19 nt, Homo sapiens
  misc_RNA (1)...(19): siRNA sense strand
gaacuccucuguugugucu

SEQ ID NO: 440026 - RNA, 19 nt, Homo sapiens
  misc_RNA (1)...(19): siRNA sense strand
gaauuugaaugcugugugu

SEQ ID NO: 440027 - RNA, 19 nt, Homo sapiens
  misc_RNA (1)...(19): siRNA sense strand
ggacugaugggcugcuaua

SEQ ID NO: 440028 - RNA, 19 nt, Homo sapiens
  misc_RNA (1)...(19): siRNA sense strand
ccacaaggaccguuucauu

SEQ ID NO: 440029 - RNA, 19 nt, Homo sapiens
  misc_RNA (1)...(19): siRNA sense strand
ggacugggaugcuggacau

SEQ ID NO: 440030 - RNA, 19 nt, Homo sapiens
  misc_RNA (1)...(19): siRNA sense strand
caaggaccguuucauuuca

SEQ ID NO: 440031 - RNA, 19 nt, Homo sapiens
  misc_RNA (1)...(19): siRNA sense strand
gcaaccgacagcagaguua

SEQ ID NO: 440032 - RNA, 19 nt, Homo sapiens
  misc_RNA (1)...(19): siRNA sense strand
gaagcuuucucugccauau

SEQ ID NO: 440033 - RNA, 19 nt, Homo sapiens
  misc_RNA (1)...(19): siRNA sense strand
aagaggaaauguuuguuug

SEQ ID NO: 440034 - RNA, 19 nt, Homo sapiens
  misc_RNA (1)...(19): siRNA sense strand
cacaaggaccguuucauuu

SEQ ID NO: 440035 - RNA, 19 nt, Homo sapiens
  misc_RNA (1)...(19): siRNA sense strand
gggacagguucuaugaauu

SEQ ID NO: 440036 - RNA, 19 nt, Homo sapiens
  misc_RNA (1)...(19): siRNA sense strand
caccaggacugccauguuc

SEQ ID NO: 440037 - RNA, 19 nt, Homo sapiens
  misc_RNA (1)...(19): siRNA sense strand
cagguucuaugaauuugaa

SEQ ID NO: 440038 - RNA, 19 nt, Homo sapiens
  misc_RNA (1)...(19): siRNA sense strand
cugaugggcugcuauacuu

SEQ ID NO: 440039 - RNA, 19 nt, Homo sapiens
  misc_RNA (1)...(19): siRNA sense strand
gaggaaauguuuguuuggu

SEQ ID NO: 440040 - RNA, 19 nt, Homo sapiens
  misc_RNA (1)...(19): siRNA sense strand
gaggaugauucgcaguuuc

SEQ ID NO: 440041 - RNA, 19 nt, Homo sapiens
  misc_RNA (1)...(19): siRNA sense strand
agaagugucgccaugcuua

SEQ ID NO: 440042 - RNA, 19 nt, Homo sapiens
  misc_RNA (1)...(19): siRNA sense strand
auacuuggguaccaucaaa

SEQ ID NO: 440043 - RNA, 19 nt, Homo sapiens
  misc_RNA (1)...(19): siRNA sense strand
ucuggugccuccucacuuu

SEQ ID NO: 440044 - RNA, 19 nt, Homo sapiens
  misc_RNA (1)...(19): siRNA sense strand
aagcuccucucugcucuua

SEQ ID NO: 440045 - RNA, 19 nt, Homo sapiens
  misc_RNA (1)...(19): siRNA sense strand
gcuguaagaagaaauacuu

SEQ ID NO: 440046 - RNA, 19 nt, Homo sapiens
  misc_RNA (1)...(19): siRNA sense strand
gagggcacauccuggguau

SEQ ID NO: 440047 - RNA, 19 nt, Homo sapiens
  misc_RNA (1)...(19): siRNA sense strand
ggucagcugugagaagugu

SEQ ID NO: 440048 - RNA, 19 nt, Homo sapiens
  misc_RNA (1)...(19): siRNA sense strand
ugaggaugauucgcaguuu

SEQ ID NO: 440049 - RNA, 19 nt, Homo sapiens
  misc_RNA (1)...(19): siRNA sense strand
ccacagacaucccuaaaag

SEQ ID NO: 440050 - RNA, 19 nt, Homo sapiens
  misc_RNA (1)...(19): siRNA sense strand
gcagaguuacuguuacugu

SEQ ID NO: 440051 - RNA, 19 nt, Homo sapiens
  misc_RNA (1)...(19): siRNA sense strand
acaaggaccguuucauuuc

SEQ ID NO: 440052 - RNA, 19 nt, Homo sapiens
  misc_RNA (1)...(19): siRNA sense strand
aagaugugcuggccagaug

SEQ ID NO: 440053 - RNA, 19 nt, Homo sapiens
  misc_RNA (1)...(19): siRNA sense strand
gagauuaagaagaggaaau

SEQ ID NO: 440054 - RNA, 19 nt, Homo sapiens
  misc_RNA (1)...(19): siRNA sense strand
gacagguucuaugaauuug

SEQ ID NO: 440055 - RNA, 19 nt, Homo sapiens
  misc_RNA (1)...(19): siRNA sense strand
cagcagaguuacuguuacu

SEQ ID NO: 440056 - RNA, 19 nt, Homo sapiens
  misc_RNA (1)...(19): siRNA sense strand
gaagugucgccaugcuuau

SEQ ID NO: 440057 - RNA, 19 nt, Homo sapiens
  misc_RNA (1)...(19): siRNA sense strand
uggcccaucuuguccugua

SEQ ID NO: 440058 - RNA, 19 nt, Homo sapiens
  misc_RNA (1)...(19): siRNA sense strand
ucagggagagagauuaaga

SEQ ID NO: 440059 - RNA, 19 nt, Homo sapiens
  misc_RNA (1)...(19): siRNA sense strand
gcuccucucugcucuuaac

SEQ ID NO: 440060 - RNA, 19 nt, Homo sapiens
  misc_RNA (1)...(19): siRNA sense strand
aguguuugcuguaagaaga

SEQ ID NO: 440061 - RNA, 19 nt, Homo sapiens
  misc_RNA (1)...(19): siRNA sense strand
gggccaugcuggguaugaa

SEQ ID NO: 440062 - RNA, 19 nt, Homo sapiens
  misc_RNA (1)...(19): siRNA sense strand
ccucagcagugcgcaauca

SEQ ID NO: 440063 - RNA, 19 nt, Homo sapiens
  misc_RNA (1)...(19): siRNA sense strand
uguaucaccucaguguuug

SEQ ID NO: 440064 - RNA, 19 nt, Homo sapiens
  misc_RNA (1)...(19): siRNA sense strand
gcaagccccuccucuaugg

SEQ ID NO: 440065 - RNA, 19 nt, Homo sapiens
  misc_RNA (1)...(19): siRNA sense strand
gggagagagauuaagaaga

SEQ ID NO: 440066 - RNA, 19 nt, Homo sapiens
  misc_RNA (1)...(19): siRNA sense strand
uaagaagaggaaauguuug

SEQ ID NO: 440067 - RNA, 19 nt, Homo sapiens
  misc_RNA (1)...(19): siRNA sense strand
gagaagugucgccaugcuu

SEQ ID NO: 440068 - RNA, 19 nt, Homo sapiens
  misc_RNA (1)...(19): siRNA sense strand
gagagauuaagaagaggaa

SEQ ID NO: 440069 - RNA, 19 nt, Homo sapiens
  misc_RNA (1)...(19): siRNA sense strand
ggggacagguucuaugaau

SEQ ID NO: 440070 - RNA, 19 nt, Homo sapiens
  misc_RNA (1)...(19): siRNA sense strand
gagcaagccccuccucuau

SEQ ID NO: 440071 - RNA, 19 nt, Homo sapiens
  misc_RNA (1)...(19): siRNA sense strand
aagaagaggaaauguuugu

SEQ ID NO: 440072 - RNA, 19 nt, Homo sapiens
  misc_RNA (1)...(19): siRNA sense strand
ucaccaggacugccauguu

SEQ ID NO: 440073 - RNA, 19 nt, Homo sapiens
  misc_RNA (1)...(19): siRNA sense strand
gaacuucacauugguuucc

SEQ ID NO: 440074 - RNA, 19 nt, Homo sapiens
  misc_RNA (1)...(19): siRNA sense strand
cuguaucaccucaguguuu

SEQ ID NO: 440075 - RNA, 19 nt, Homo sapiens
  misc_RNA (1)...(19): siRNA sense strand
gcacccagugucugagcaa

SEQ ID NO: 440076 - RNA, 19 nt, Homo sapiens
  misc_RNA (1)...(19): siRNA sense strand
ucugagaauugggacaguu

SEQ ID NO: 440077 - RNA, 19 nt, Homo sapiens
  misc_RNA (1)...(19): siRNA sense strand
ugagaagugucgccaugcu

SEQ ID NO: 440078 - RNA, 19 nt, Homo sapiens
  misc_RNA (1)...(19): siRNA sense strand
cagggagagagauuaagaa

SEQ ID NO: 440079 - RNA, 19 nt, Homo sapiens
  misc_RNA (1)...(19): siRNA sense strand
cgcaguuucugguucuaug

SEQ ID NO: 440080 - RNA, 19 nt, Homo sapiens
  misc_RNA (1)...(19): siRNA sense strand
guucuauggaaagacauua

SEQ ID NO: 440081 - RNA, 19 nt, Homo sapiens
  misc_RNA (1)...(19): siRNA sense strand
gggcacauccuggguaugc

SEQ ID NO: 440082 - RNA, 19 nt, Homo sapiens
  misc_RNA (1)...(19): siRNA sense strand
ggagagagauuaagaagag

SEQ ID NO: 440083 - RNA, 19 nt, Homo sapiens
  misc_RNA (1)...(19): siRNA sense strand
ggacagguucuaugaauuu

SEQ ID NO: 440084 - RNA, 19 nt, Homo sapiens
  misc_RNA (1)...(19): siRNA sense strand
gaagaggaaauguuuguuu

SEQ ID NO: 440085 - RNA, 19 nt, Homo sapiens
  misc_RNA (1)...(19): siRNA sense strand
gaacuccucuguugugucu

SEQ ID NO: 440086 - RNA, 19 nt, Homo sapiens
  misc_RNA (1)...(19): siRNA sense strand
gaauuugaaugcugugugu

SEQ ID NO: 440087 - RNA, 19 nt, Homo sapiens
  misc_RNA (1)...(19): siRNA sense strand
ggacugaugggcugcuaua

SEQ ID NO: 440088 - RNA, 19 nt, Homo sapiens
  misc_RNA (1)...(19): siRNA sense strand
ccacaaggaccguuucauu

SEQ ID NO: 440089 - RNA, 19 nt, Homo sapiens
  misc_RNA (1)...(19): siRNA sense strand
ggacugggaugcuggacau

SEQ ID NO: 440090 - RNA, 19 nt, Homo sapiens
  misc_RNA (1)...(19): siRNA sense strand
caaggaccguuucauuuca

SEQ ID NO: 440091 - RNA, 19 nt, Homo sapiens
  misc_RNA (1)...(19): siRNA sense strand
gcaaccgacagcagaguua

SEQ ID NO: 440092 - RNA, 19 nt, Homo sapiens
  misc_RNA (1)...(19): siRNA sense strand
gaagcuuucucugccauau

SEQ ID NO: 440093 - RNA, 19 nt, Homo sapiens
  misc_RNA (1)...(19): siRNA sense strand
aagaggaaauguuuguuug

SEQ ID NO: 440094 - RNA, 19 nt, Homo sapiens
  misc_RNA (1)...(19): siRNA sense strand
cacaaggaccguuucauuu

SEQ ID NO: 440095 - RNA, 19 nt, Homo sapiens
  misc_RNA (1)...(19): siRNA sense strand
gggacagguucuaugaauu

SEQ ID NO: 440096 - RNA, 19 nt, Homo sapiens
  misc_RNA (1)...(19): siRNA sense strand
caccaggacugccauguuc

SEQ ID NO: 440097 - RNA, 19 nt, Homo sapiens
  misc_RNA (1)...(19): siRNA sense strand
cagguucuaugaauuugaa

SEQ ID NO: 440098 - RNA, 19 nt, Homo sapiens
  misc_RNA (1)...(19): siRNA sense strand
cugaugggcugcuauacuu

SEQ ID NO: 440099 - RNA, 19 nt, Homo sapiens
  misc_RNA (1)...(19): siRNA sense strand
gaggaaauguuuguuuggu

SEQ ID NO: 440100 - RNA, 19 nt, Homo sapiens
  misc_RNA (1)...(19): siRNA sense strand
gaggaugauucgcaguuuc

SEQ ID NO: 440101 - RNA, 19 nt, Homo sapiens
  misc_RNA (1)...(19): siRNA sense strand
agaagugucgccaugcuua

SEQ ID NO: 440102 - RNA, 19 nt, Homo sapiens
  misc_RNA (1)...(19): siRNA sense strand
auacuuggguaccaucaaa

SEQ ID NO: 440103 - RNA, 19 nt, Homo sapiens
  misc_RNA (1)...(19): siRNA sense strand
ucuggugccuccucacuuu

SEQ ID NO: 440104 - RNA, 19 nt, Homo sapiens
  misc_RNA (1)...(19): siRNA sense strand
aagcuccucucugcucuua

SEQ ID NO: 440105 - RNA, 19 nt, Homo sapiens
  misc_RNA (1)...(19): siRNA sense strand
gcuguaagaagaaauacuu

SEQ ID NO: 440106 - RNA, 19 nt, Homo sapiens
  misc_RNA (1)...(19): siRNA sense strand
gagggcacauccuggguau

SEQ ID NO: 440107 - RNA, 19 nt, Homo sapiens
  misc_RNA (1)...(19): siRNA sense strand
gguccuugcucggagagua

SEQ ID NO: 440108 - RNA, 19 nt, Homo sapiens
  misc_RNA (1)...(19): siRNA sense strand
ggucagcugugagaagugu

SEQ ID NO: 440109 - RNA, 19 nt, Homo sapiens
  misc_RNA (1)...(19): siRNA sense strand
ugaggaugauucgcaguuu

SEQ ID NO: 440110 - RNA, 19 nt, Homo sapiens
  misc_RNA (1)...(19): siRNA sense strand
ccacagacaucccuaaaag

SEQ ID NO: 440111 - RNA, 19 nt, Homo sapiens
  misc_RNA (1)...(19): siRNA sense strand
gcagaguuacuguuacugu

SEQ ID NO: 440112 - RNA, 19 nt, Homo sapiens
  misc_RNA (1)...(19): siRNA sense strand
acaaggaccguuucauuuc

SEQ ID NO: 440113 - RNA, 19 nt, Homo sapiens
  misc_RNA (1)...(19): siRNA sense strand
aagaugugcuggccagaug

SEQ ID NO: 440114 - RNA, 19 nt, Homo sapiens
  misc_RNA (1)...(19): siRNA sense strand
gagauuaagaagaggaaau

SEQ ID NO: 440115 - RNA, 19 nt, Homo sapiens
  misc_RNA (1)...(19): siRNA sense strand
gacagguucuaugaauuug

SEQ ID NO: 440116 - RNA, 19 nt, Homo sapiens
  misc_RNA (1)...(19): siRNA sense strand
cagcagaguuacuguuacu

SEQ ID NO: 440117 - RNA, 19 nt, Homo sapiens
  misc_RNA (1)...(19): siRNA sense strand
gaagugucgccaugcuuau

SEQ ID NO: 440118 - RNA, 19 nt, Homo sapiens
  misc_RNA (1)...(19): siRNA sense strand
uggcccaucuuguccugua

SEQ ID NO: 440119 - RNA, 19 nt, Homo sapiens
  misc_RNA (1)...(19): siRNA sense strand
ucagggagagagauuaaga

SEQ ID NO: 440120 - RNA, 19 nt, Homo sapiens
  misc_RNA (1)...(19): siRNA sense strand
gcuccucucugcucuuaac

SEQ ID NO: 440121 - RNA, 19 nt, Homo sapiens
  misc_RNA (1)...(19): siRNA sense strand
aguguuugcuguaagaaga

SEQ ID NO: 440122 - RNA, 19 nt, Homo sapiens
  misc_RNA (1)...(19): siRNA sense strand
ugccucaucuuccucaguu

SEQ ID NO: 440123 - RNA, 19 nt, Homo sapiens
  misc_RNA (1)...(19): siRNA sense strand
gggccaugcuggguaugaa

SEQ ID NO: 440124 - RNA, 19 nt, Homo sapiens
  misc_RNA (1)...(19): siRNA sense strand
ccucagcagugcgcaauca

SEQ ID NO: 440125 - RNA, 19 nt, Homo sapiens
  misc_RNA (1)...(19): siRNA sense strand
uguaucaccucaguguuug

SEQ ID NO: 440126 - RNA, 19 nt, Homo sapiens
  misc_RNA (1)...(19): siRNA sense strand
gcaagccccuccucuaugg

SEQ ID NO: 440127 - RNA, 19 nt, Homo sapiens
  misc_RNA (1)...(19): siRNA sense strand
gggagagagauuaagaaga

SEQ ID NO: 440128 - RNA, 19 nt, Homo sapiens
  misc_RNA (1)...(19): siRNA sense strand
uaagaagaggaaauguuug

SEQ ID NO: 440129 - RNA, 19 nt, Homo sapiens
  misc_RNA (1)...(19): siRNA sense strand
gagaagugucgccaugcuu

SEQ ID NO: 440130 - RNA, 19 nt, Homo sapiens
  misc_RNA (1)...(19): siRNA sense strand
gagagauuaagaagaggaa

SEQ ID NO: 440131 - RNA, 19 nt, Homo sapiens
  misc_RNA (1)...(19): siRNA sense strand
ggggacagguucuaugaau

SEQ ID NO: 440132 - RNA, 19 nt, Homo sapiens
  misc_RNA (1)...(19): siRNA sense strand
gagcaagccccuccucuau

SEQ ID NO: 440133 - RNA, 19 nt, Homo sapiens
  misc_RNA (1)...(19): siRNA sense strand
aagaagaggaaauguuugu

SEQ ID NO: 440134 - RNA, 19 nt, Homo sapiens
  misc_RNA (1)...(19): siRNA sense strand
ucaccaggacugccauguu

SEQ ID NO: 440135 - RNA, 19 nt, Homo sapiens
  misc_RNA (1)...(19): siRNA sense strand
gaacuucacauugguuucc

SEQ ID NO: 440136 - RNA, 19 nt, Homo sapiens
  misc_RNA (1)...(19): siRNA sense strand
cuguaucaccucaguguuu

SEQ ID NO: 440137 - RNA, 19 nt, Homo sapiens
  misc_RNA (1)...(19): siRNA sense strand
gcacccagugucugagcaa

SEQ ID NO: 440138 - RNA, 19 nt, Homo sapiens
  misc_RNA (1)...(19): siRNA sense strand
ucugagaauugggacaguu

SEQ ID NO: 440139 - RNA, 19 nt, Homo sapiens
  misc_RNA (1)...(19): siRNA sense strand
ugagaagugucgccaugcu

SEQ ID NO: 440140 - RNA, 19 nt, Homo sapiens
  misc_RNA (1)...(19): siRNA sense strand
cgcaguuucugguucuaug

SEQ ID NO: 440141 - RNA, 19 nt, Homo sapiens
  misc_RNA (1)...(19): siRNA sense strand
cagggagagagauuaagaa

SEQ ID NO: 440142 - RNA, 19 nt, Homo sapiens
  misc_RNA (1)...(19): siRNA sense strand
guucuauggaaagacauua

SEQ ID NO: 440143 - RNA, 19 nt, Homo sapiens
  misc_RNA (1)...(19): siRNA sense strand
gggcacauccuggguaugc

SEQ ID NO: 440144 - RNA, 19 nt, Homo sapiens
  misc_RNA (1)...(19): siRNA sense strand
caggaaagcuguucacuga

SEQ ID NO: 440145 - RNA, 19 nt, Homo sapiens
  misc_RNA (1)...(19): siRNA sense strand
gaggaucagugacuuguuu

SEQ ID NO: 440146 - RNA, 19 nt, Homo sapiens
  misc_RNA (1)...(19): siRNA sense strand
uuacagauaccaacaguua

SEQ ID NO: 440147 - RNA, 19 nt, Homo sapiens
  misc_RNA (1)...(19): siRNA sense strand
gcaaggaggcggaggcauu

SEQ ID NO: 440148 - RNA, 19 nt, Homo sapiens
  misc_RNA (1)...(19): siRNA sense strand
guaagaaacgcuuugcaaa

SEQ ID NO: 440149 - RNA, 19 nt, Homo sapiens
  misc_RNA (1)...(19): siRNA sense strand
ggaaagcuguucacugacu

SEQ ID NO: 440150 - RNA, 19 nt, Homo sapiens
  misc_RNA (1)...(19): siRNA sense strand
ggagauuucuacuucuuca

SEQ ID NO: 440151 - RNA, 19 nt, Homo sapiens
  misc_RNA (1)...(19): siRNA sense strand
gaacuggccugagcaucug

SEQ ID NO: 440152 - RNA, 19 nt, Homo sapiens
  misc_RNA (1)...(19): siRNA sense strand
ugauggagauuucuacuuc

SEQ ID NO: 440153 - RNA, 19 nt, Homo sapiens
  misc_RNA (1)...(19): siRNA sense strand
aaacgcagggcccuaaaua

SEQ ID NO: 440154 - RNA, 19 nt, Homo sapiens
  misc_RNA (1)...(19): siRNA sense strand
guacggauaccucaaugaa

SEQ ID NO: 440155 - RNA, 19 nt, Homo sapiens
  misc_RNA (1)...(19): siRNA sense strand
gcaaagcaagguaacaaau

SEQ ID NO: 440156 - RNA, 19 nt, Homo sapiens
  misc_RNA (1)...(19): siRNA sense strand
gaaagcuguucacugacuu

SEQ ID NO: 440157 - RNA, 19 nt, Homo sapiens
  misc_RNA (1)...(19): siRNA sense strand
gaaguacggauaccucaau

SEQ ID NO: 440158 - RNA, 19 nt, Homo sapiens
  misc_RNA (1)...(19): siRNA sense strand
caaagcaagguaacaaaug

SEQ ID NO: 440159 - RNA, 19 nt, Homo sapiens
  misc_RNA (1)...(19): siRNA sense strand
gcggaggcauuccuagaga

SEQ ID NO: 440160 - RNA, 19 nt, Homo sapiens
  misc_RNA (1)...(19): siRNA sense strand
aaagcaagguaacaaaugg

SEQ ID NO: 440161 - RNA, 19 nt, Homo sapiens
  misc_RNA (1)...(19): siRNA sense strand
aggcauuccuagagaagua

SEQ ID NO: 440162 - RNA, 19 nt, Homo sapiens
  misc_RNA (1)...(19): siRNA sense strand
acggauaccucaaugaaca

SEQ ID NO: 440163 - RNA, 19 nt, Homo sapiens
  misc_RNA (1)...(19): siRNA sense strand
gaaacgcagggcccuaaau

SEQ ID NO: 440164 - RNA, 19 nt, Homo sapiens
  misc_RNA (1)...(19): siRNA sense strand
gcacuucgaccaagaugag

SEQ ID NO: 440165 - RNA, 19 nt, Homo sapiens
  misc_RNA (1)...(19): siRNA sense strand
ucucagcgcuggaguucug

SEQ ID NO: 440166 - RNA, 19 nt, Homo sapiens
  misc_RNA (1)...(19): siRNA sense strand
gcuguucacugacuuugag

SEQ ID NO: 440167 - RNA, 19 nt, Homo sapiens
  misc_RNA (1)...(19): siRNA sense strand
gcaaguggagcccuacuac

SEQ ID NO: 440168 - RNA, 19 nt, Homo sapiens
  misc_RNA (1)...(19): siRNA sense strand
acaagcagcaccucuccua

SEQ ID NO: 440169 - RNA, 19 nt, Homo sapiens
  misc_RNA (1)...(19): siRNA sense strand
gcucccaccuccacucgau

SEQ ID NO: 440170 - RNA, 19 nt, Homo sapiens
  misc_RNA (1)...(19): siRNA sense strand
ggaccaaaaugaggcguaa

SEQ ID NO: 440171 - RNA, 19 nt, Homo sapiens
  misc_RNA (1)...(19): siRNA sense strand
gguuacagauaccaacagu

SEQ ID NO: 440172 - RNA, 19 nt, Homo sapiens
  misc_RNA (1)...(19): siRNA sense strand
cguaagaaacgcuuugcaa

SEQ ID NO: 440173 - RNA, 19 nt, Homo sapiens
  misc_RNA (1)...(19): siRNA sense strand
ugaaugauggagauuucua

SEQ ID NO: 440174 - RNA, 19 nt, Homo sapiens
  misc_RNA (1)...(19): siRNA sense strand
ccuaaauacugccacucuu

SEQ ID NO: 440175 - RNA, 19 nt, Homo sapiens
  misc_RNA (1)...(19): siRNA sense strand
acagauaccaacaguuaug

SEQ ID NO: 440176 - RNA, 19 nt, Homo sapiens
  misc_RNA (1)...(19): siRNA sense strand
gauuucuacuucuucaaag

SEQ ID NO: 440177 - RNA, 19 nt, Homo sapiens
  misc_RNA (1)...(19): siRNA sense strand
gauggagauuucuacuucu

SEQ ID NO: 440178 - RNA, 19 nt, Homo sapiens
  misc_RNA (1)...(19): siRNA sense strand
gagaggaucagugacuugu

SEQ ID NO: 440179 - RNA, 19 nt, Homo sapiens
  misc_RNA (1)...(19): siRNA sense strand
cuaaauacugccacucuuc

SEQ ID NO: 440180 - RNA, 19 nt, Homo sapiens
  misc_RNA (1)...(19): siRNA sense strand
caagguaacaaaugguaca

SEQ ID NO: 440181 - RNA, 19 nt, Homo sapiens
  misc_RNA (1)...(19): siRNA sense strand
ggaggcggaggcauuccua

SEQ ID NO: 440182 - RNA, 19 nt, Homo sapiens
  misc_RNA (1)...(19): siRNA sense strand
caaaaugaggcguaagaaa

SEQ ID NO: 440183 - RNA, 19 nt, Homo sapiens
  misc_RNA (1)...(19): siRNA sense strand
cggaggcauuccuagagaa

SEQ ID NO: 440184 - RNA, 19 nt, Homo sapiens
  misc_RNA (1)...(19): siRNA sense strand
caaggaggcggaggcauuc

SEQ ID NO: 440185 - RNA, 19 nt, Homo sapiens
  misc_RNA (1)...(19): siRNA sense strand
caagggugcccgcuacuac

SEQ ID NO: 440186 - RNA, 19 nt, Homo sapiens
  misc_RNA (1)...(19): siRNA sense strand
gaaugauggagauuucuac

SEQ ID NO: 440187 - RNA, 19 nt, Homo sapiens
  misc_RNA (1)...(19): siRNA sense strand
aucagugacuuguuugcua

SEQ ID NO: 440188 - RNA, 19 nt, Homo sapiens
  misc_RNA (1)...(19): siRNA sense strand
ugaacuggccugagcaucu

SEQ ID NO: 440189 - RNA, 19 nt, Homo sapiens
  misc_RNA (1)...(19): siRNA sense strand
guaacaaaugguacaagca

SEQ ID NO: 440190 - RNA, 19 nt, Homo sapiens
  misc_RNA (1)...(19): siRNA sense strand
ccguccagcucccaggaaa

SEQ ID NO: 440191 - RNA, 19 nt, Homo sapiens
  misc_RNA (1)...(19): siRNA sense strand
aagcgcacuucgaccaaga

SEQ ID NO: 440192 - RNA, 19 nt, Homo sapiens
  misc_RNA (1)...(19): siRNA sense strand
ggaggcauuccuagagaag

SEQ ID NO: 440193 - RNA, 19 nt, Homo sapiens
  misc_RNA (1)...(19): siRNA sense strand
ucaagggugcccgcuacua

SEQ ID NO: 440194 - RNA, 19 nt, Homo sapiens
  misc_RNA (1)...(19): siRNA sense strand
caggaaagcuguucacuga

SEQ ID NO: 440195 - RNA, 19 nt, Homo sapiens
  misc_RNA (1)...(19): siRNA sense strand
gaggaucagugacuuguuu

SEQ ID NO: 440196 - RNA, 19 nt, Homo sapiens
  misc_RNA (1)...(19): siRNA sense strand
uuacagauaccaacaguua

SEQ ID NO: 440197 - RNA, 19 nt, Homo sapiens
  misc_RNA (1)...(19): siRNA sense strand
gcaaggaggcggaggcauu

SEQ ID NO: 440198 - RNA, 19 nt, Homo sapiens
  misc_RNA (1)...(19): siRNA sense strand
guaagaaacgcuuugcaaa

SEQ ID NO: 440199 - RNA, 19 nt, Homo sapiens
  misc_RNA (1)...(19): siRNA sense strand
ggaaagcuguucacugacu

SEQ ID NO: 440200 - RNA, 19 nt, Homo sapiens
  misc_RNA (1)...(19): siRNA sense strand
ggagauuucuacuucuuca

SEQ ID NO: 440201 - RNA, 19 nt, Homo sapiens
  misc_RNA (1)...(19): siRNA sense strand
gaacuggccugagcaucug

SEQ ID NO: 440202 - RNA, 19 nt, Homo sapiens
  misc_RNA (1)...(19): siRNA sense strand
ugauggagauuucuacuuc

SEQ ID NO: 440203 - RNA, 19 nt, Homo sapiens
  misc_RNA (1)...(19): siRNA sense strand
aaacgcagggcccuaaaua

SEQ ID NO: 440204 - RNA, 19 nt, Homo sapiens
  misc_RNA (1)...(19): siRNA sense strand
guacggauaccucaaugaa

SEQ ID NO: 440205 - RNA, 19 nt, Homo sapiens
  misc_RNA (1)...(19): siRNA sense strand
gcaaagcaagguaacaaau

SEQ ID NO: 440206 - RNA, 19 nt, Homo sapiens
  misc_RNA (1)...(19): siRNA sense strand
gaaagcuguucacugacuu

SEQ ID NO: 440207 - RNA, 19 nt, Homo sapiens
  misc_RNA (1)...(19): siRNA sense strand
gaaguacggauaccucaau

SEQ ID NO: 440208 - RNA, 19 nt, Homo sapiens
  misc_RNA (1)...(19): siRNA sense strand
caaagcaagguaacaaaug

SEQ ID NO: 440209 - RNA, 19 nt, Homo sapiens
  misc_RNA (1)...(19): siRNA sense strand
gcggaggcauuccuagaga

SEQ ID NO: 440210 - RNA, 19 nt, Homo sapiens
  misc_RNA (1)...(19): siRNA sense strand
aaagcaagguaacaaaugg

SEQ ID NO: 440211 - RNA, 19 nt, Homo sapiens
  misc_RNA (1)...(19): siRNA sense strand
aggcauuccuagagaagua

SEQ ID NO: 440212 - RNA, 19 nt, Homo sapiens
  misc_RNA (1)...(19): siRNA sense strand
acggauaccucaaugaaca

SEQ ID NO: 440213 - RNA, 19 nt, Homo sapiens
  misc_RNA (1)...(19): siRNA sense strand
gaaacgcagggcccuaaau

SEQ ID NO: 440214 - RNA, 19 nt, Homo sapiens
  misc_RNA (1)...(19): siRNA sense strand
gcacuucgaccaagaugag

SEQ ID NO: 440215 - RNA, 19 nt, Homo sapiens
  misc_RNA (1)...(19): siRNA sense strand
ucucagcgcuggaguucug

SEQ ID NO: 440216 - RNA, 19 nt, Homo sapiens
  misc_RNA (1)...(19): siRNA sense strand
gcuguucacugacuuugag

SEQ ID NO: 440217 - RNA, 19 nt, Homo sapiens
  misc_RNA (1)...(19): siRNA sense strand
acaagcagcaccucuccua

SEQ ID NO: 440218 - RNA, 19 nt, Homo sapiens
  misc_RNA (1)...(19): siRNA sense strand
gcucccaccuccacucgau

SEQ ID NO: 440219 - RNA, 19 nt, Homo sapiens
  misc_RNA (1)...(19): siRNA sense strand
ggaccaaaaugaggcguaa

SEQ ID NO: 440220 - RNA, 19 nt, Homo sapiens
  misc_RNA (1)...(19): siRNA sense strand
gguuacagauaccaacagu

SEQ ID NO: 440221 - RNA, 19 nt, Homo sapiens
  misc_RNA (1)...(19): siRNA sense strand
cguaagaaacgcuuugcaa

SEQ ID NO: 440222 - RNA, 19 nt, Homo sapiens
  misc_RNA (1)...(19): siRNA sense strand
ugaaugauggagauuucua

SEQ ID NO: 440223 - RNA, 19 nt, Homo sapiens
  misc_RNA (1)...(19): siRNA sense strand
ccuaaauacugccacucuu

SEQ ID NO: 440224 - RNA, 19 nt, Homo sapiens
  misc_RNA (1)...(19): siRNA sense strand
acagauaccaacaguuaug

SEQ ID NO: 440225 - RNA, 19 nt, Homo sapiens
  misc_RNA (1)...(19): siRNA sense strand
gauuucuacuucuucaaag

SEQ ID NO: 440226 - RNA, 19 nt, Homo sapiens
  misc_RNA (1)...(19): siRNA sense strand
gauggagauuucuacuucu

SEQ ID NO: 440227 - RNA, 19 nt, Homo sapiens
  misc_RNA (1)...(19): siRNA sense strand
gagaggaucagugacuugu

SEQ ID NO: 440228 - RNA, 19 nt, Homo sapiens
  misc_RNA (1)...(19): siRNA sense strand
cuaaauacugccacucuuc

SEQ ID NO: 440229 - RNA, 19 nt, Homo sapiens
  misc_RNA (1)...(19): siRNA sense strand
caagguaacaaaugguaca

SEQ ID NO: 440230 - RNA, 19 nt, Homo sapiens
  misc_RNA (1)...(19): siRNA sense strand
ggaggcggaggcauuccua

SEQ ID NO: 440231 - RNA, 19 nt, Homo sapiens
  misc_RNA (1)...(19): siRNA sense strand
caaaaugaggcguaagaaa

SEQ ID NO: 440232 - RNA, 19 nt, Homo sapiens
  misc_RNA (1)...(19): siRNA sense strand
cggaggcauuccuagagaa

SEQ ID NO: 440233 - RNA, 19 nt, Homo sapiens
  misc_RNA (1)...(19): siRNA sense strand
caaggaggcggaggcauuc

SEQ ID NO: 440234 - RNA, 19 nt, Homo sapiens
  misc_RNA (1)...(19): siRNA sense strand
gaaugauggagauuucuac

SEQ ID NO: 440235 - RNA, 19 nt, Homo sapiens
  misc_RNA (1)...(19): siRNA sense strand
aucagugacuuguuugcua

SEQ ID NO: 440236 - RNA, 19 nt, Homo sapiens
  misc_RNA (1)...(19): siRNA sense strand
ugaacuggccugagcaucu

SEQ ID NO: 440237 - RNA, 19 nt, Homo sapiens
  misc_RNA (1)...(19): siRNA sense strand
guaacaaaugguacaagca

SEQ ID NO: 440238 - RNA, 19 nt, Homo sapiens
  misc_RNA (1)...(19): siRNA sense strand
ccguccagcucccaggaaa

SEQ ID NO: 440239 - RNA, 19 nt, Homo sapiens
  misc_RNA (1)...(19): siRNA sense strand
aagcgcacuucgaccaaga

SEQ ID NO: 440240 - RNA, 19 nt, Homo sapiens
  misc_RNA (1)...(19): siRNA sense strand
ggaggcauuccuagagaag

SEQ ID NO: 440241 - RNA, 19 nt, Homo sapiens
  misc_RNA (1)...(19): siRNA sense strand
uaacuggacucuguucaua

SEQ ID NO: 440242 - RNA, 19 nt, Homo sapiens
  misc_RNA (1)...(19): siRNA sense strand
ggauuuaacuggacucugu

SEQ ID NO: 440243 - RNA, 19 nt, Homo sapiens
  misc_RNA (1)...(19): siRNA sense strand
cagaggaccuguacuuuga

SEQ ID NO: 440244 - RNA, 19 nt, Homo sapiens
  misc_RNA (1)...(19): siRNA sense strand
ccacaggccuugaacuuug

SEQ ID NO: 440245 - RNA, 19 nt, Homo sapiens
  misc_RNA (1)...(19): siRNA sense strand
ucagagaacucauugacaa

SEQ ID NO: 440246 - RNA, 19 nt, Homo sapiens
  misc_RNA (1)...(19): siRNA sense strand
gcaagagcauggucagaga

SEQ ID NO: 440247 - RNA, 19 nt, Homo sapiens
  misc_RNA (1)...(19): siRNA sense strand
gaggagaggaccuuuguaa

SEQ ID NO: 440248 - RNA, 19 nt, Homo sapiens
  misc_RNA (1)...(19): siRNA sense strand
ucaaagcggugcuggagaa

SEQ ID NO: 440249 - RNA, 19 nt, Homo sapiens
  misc_RNA (1)...(19): siRNA sense strand
cgacaagaauggcaacaug

SEQ ID NO: 440250 - RNA, 19 nt, Homo sapiens
  misc_RNA (1)...(19): siRNA sense strand
gaggugcgcuggcgugaau

SEQ ID NO: 440251 - RNA, 19 nt, Homo sapiens
  misc_RNA (1)...(19): siRNA sense strand
gagaccaacucaagauaca

SEQ ID NO: 440252 - RNA, 19 nt, Homo sapiens
  misc_RNA (1)...(19): siRNA sense strand
gcacggcuuugacgacaau

SEQ ID NO: 440253 - RNA, 19 nt, Homo sapiens
  misc_RNA (1)...(19): siRNA sense strand
ucaagcugcugccagauga

SEQ ID NO: 440254 - RNA, 19 nt, Homo sapiens
  misc_RNA (1)...(19): siRNA sense strand
ggagaggaccuuuguaaaa

SEQ ID NO: 440255 - RNA, 19 nt, Homo sapiens
  misc_RNA (1)...(19): siRNA sense strand
gacgaggaguccaagaaga

SEQ ID NO: 440256 - RNA, 19 nt, Homo sapiens
  misc_RNA (1)...(19): siRNA sense strand
aaacugugcuauccucugu

SEQ ID NO: 440257 - RNA, 19 nt, Homo sapiens
  misc_RNA (1)...(19): siRNA sense strand
ggagagacacgacgucauc

SEQ ID NO: 440258 - RNA, 19 nt, Homo sapiens
  misc_RNA (1)...(19): siRNA sense strand
ccaggaccauacagaacua

SEQ ID NO: 440259 - RNA, 19 nt, Homo sapiens
  misc_RNA (1)...(19): siRNA sense strand
gccuggaucucacccauga

SEQ ID NO: 440260 - RNA, 19 nt, Homo sapiens
  misc_RNA (1)...(19): siRNA sense strand
gggaaaagguggacccaaa

SEQ ID NO: 440261 - RNA, 19 nt, Homo sapiens
  misc_RNA (1)...(19): siRNA sense strand
ggaaccgugugacgacuuc

SEQ ID NO: 440262 - RNA, 19 nt, Homo sapiens
  misc_RNA (1)...(19): siRNA sense strand
ggccggaacuucgacaaga

SEQ ID NO: 440263 - RNA, 19 nt, Homo sapiens
  misc_RNA (1)...(19): siRNA sense strand
gaaccagagugugauagag

SEQ ID NO: 440264 - RNA, 19 nt, Homo sapiens
  misc_RNA (1)...(19): siRNA sense strand
aagcggugcuggagaauuc

SEQ ID NO: 440265 - RNA, 19 nt, Homo sapiens
  misc_RNA (1)...(19): siRNA sense strand
gacaagaauggcaacauga

SEQ ID NO: 440266 - RNA, 19 nt, Homo sapiens
  misc_RNA (1)...(19): siRNA sense strand
gaagaaggcgcaggagaag

SEQ ID NO: 440267 - RNA, 19 nt, Homo sapiens
  misc_RNA (1)...(19): siRNA sense strand
gaggaccuguacuuugaga

SEQ ID NO: 440268 - RNA, 19 nt, Homo sapiens
  misc_RNA (1)...(19): siRNA sense strand
agaagaaggcgcaggagaa

SEQ ID NO: 440269 - RNA, 19 nt, Homo sapiens
  misc_RNA (1)...(19): siRNA sense strand
caagacagacguccacagu

SEQ ID NO: 440270 - RNA, 19 nt, Homo sapiens
  misc_RNA (1)...(19): siRNA sense strand
uauaaggccuaccucaagu

SEQ ID NO: 440271 - RNA, 19 nt, Homo sapiens
  misc_RNA (1)...(19): siRNA sense strand
cgagaucacgcacggcuuu

SEQ ID NO: 440272 - RNA, 19 nt, Homo sapiens
  misc_RNA (1)...(19): siRNA sense strand
ucagaggaccuguacuuug

SEQ ID NO: 440273 - RNA, 19 nt, Homo sapiens
  misc_RNA (1)...(19): siRNA sense strand
gcgacgagcuggaggucau

SEQ ID NO: 440274 - RNA, 19 nt, Homo sapiens
  misc_RNA (1)...(19): siRNA sense strand
gccggaacuucgacaagaa

SEQ ID NO: 440275 - RNA, 19 nt, Homo sapiens
  misc_RNA (1)...(19): siRNA sense strand
gagaacucauugacaaggu

SEQ ID NO: 440276 - RNA, 19 nt, Homo sapiens
  misc_RNA (1)...(19): siRNA sense strand
gugcuggaccgcauuggua

SEQ ID NO: 440277 - RNA, 19 nt, Homo sapiens
  misc_RNA (1)...(19): siRNA sense strand
guacuccaaucugaacuuc

SEQ ID NO: 440278 - RNA, 19 nt, Homo sapiens
  misc_RNA (1)...(19): siRNA sense strand
gggaaaacauugcugacaa

SEQ ID NO: 440279 - RNA, 19 nt, Homo sapiens
  misc_RNA (1)...(19): siRNA sense strand
ugacgacuucuaccaguuu

SEQ ID NO: 440280 - RNA, 19 nt, Homo sapiens
  misc_RNA (1)...(19): siRNA sense strand
caacaggcgcguccucauc

SEQ ID NO: 440281 - RNA, 19 nt, Homo sapiens
  misc_RNA (1)...(19): siRNA sense strand
aacagaacgugaacggauu

SEQ ID NO: 440282 - RNA, 19 nt, Homo sapiens
  misc_RNA (1)...(19): siRNA sense strand
ggacucuguucauacaaac

SEQ ID NO: 440283 - RNA, 19 nt, Homo sapiens
  misc_RNA (1)...(19): siRNA sense strand
gcagucagagugcaugauc

SEQ ID NO: 440284 - RNA, 19 nt, Homo sapiens
  misc_RNA (1)...(19): siRNA sense strand
caagaauggcaacaugaug

SEQ ID NO: 440285 - RNA, 19 nt, Homo sapiens
  misc_RNA (1)...(19): siRNA sense strand
agaauucgacugccaagga

SEQ ID NO: 440286 - RNA, 19 nt, Homo sapiens
  misc_RNA (1)...(19): siRNA sense strand
gccauccaauccaucaaga

SEQ ID NO: 440287 - RNA, 19 nt, Homo sapiens
  misc_RNA (1)...(19): siRNA sense strand
aaaccgaaaccagauugua

SEQ ID NO: 440288 - RNA, 19 nt, Homo sapiens
  misc_RNA (1)...(19): siRNA sense strand
ucaggaagcuucgggaaaa

SEQ ID NO: 440289 - RNA, 19 nt, Homo sapiens
  misc_RNA (1)...(19): siRNA sense strand
uggacucuguucauacaaa

SEQ ID NO: 440290 - RNA, 19 nt, Homo sapiens
  misc_RNA (1)...(19): siRNA sense strand
gugacgacuucuaccaguu

SEQ ID NO: 440291 - RNA, 19 nt, Homo sapiens
  misc_RNA (1)...(19): siRNA sense strand
uccaauccaucaagacaga

SEQ ID NO: 440292 - RNA, 19 nt, Homo sapiens
  misc_RNA (1)...(19): siRNA sense strand
ggccuuggguguccucuac

SEQ ID NO: 440293 - RNA, 19 nt, Homo sapiens
  misc_RNA (1)...(19): siRNA sense strand
ccaggauccuccagaacau

SEQ ID NO: 440294 - RNA, 19 nt, Homo sapiens
  misc_RNA (1)...(19): siRNA sense strand
ggaggagaggaccuuugua

SEQ ID NO: 440295 - RNA, 19 nt, Homo sapiens
  misc_RNA (1)...(19): siRNA sense strand
caucaucgacaccuacuca

SEQ ID NO: 440296 - RNA, 19 nt, Homo sapiens
  misc_RNA (1)...(19): siRNA sense strand
guucauacaaacugugcua

SEQ ID NO: 440297 - RNA, 19 nt, Homo sapiens
  misc_RNA (1)...(19): siRNA sense strand
ccaaaccgaaaccagauug

SEQ ID NO: 440298 - RNA, 19 nt, Homo sapiens
  misc_RNA (1)...(19): siRNA sense strand
gccaggauccuccagaaca

SEQ ID NO: 440299 - RNA, 19 nt, Homo sapiens
  misc_RNA (1)...(19): siRNA sense strand
cagagugcaugaucuacca

SEQ ID NO: 440300 - RNA, 19 nt, Homo sapiens
  misc_RNA (1)...(19): siRNA sense strand
gaccuguacuuugagaaca

SEQ ID NO: 440301 - RNA, 19 nt, Homo sapiens
  misc_RNA (1)...(19): siRNA sense strand
gacaaggugcggacagugu

SEQ ID NO: 440302 - RNA, 19 nt, Homo sapiens
  misc_RNA (1)...(19): siRNA sense strand
cuacucagccaggaccaua

SEQ ID NO: 440303 - RNA, 19 nt, Homo sapiens
  misc_RNA (1)...(19): siRNA sense strand
gagaggaccuuuguaaaac

SEQ ID NO: 440304 - RNA, 19 nt, Homo sapiens
  misc_RNA (1)...(19): siRNA sense strand
gccacaggccuugaacuuu

SEQ ID NO: 440305 - RNA, 19 nt, Homo sapiens
  misc_RNA (1)...(19): siRNA sense strand
gacgacuucuaccaguuug

SEQ ID NO: 440306 - RNA, 19 nt, Homo sapiens
  misc_RNA (1)...(19): siRNA sense strand
caugaaccagagugugaua

SEQ ID NO: 440307 - RNA, 19 nt, Homo sapiens
  misc_RNA (1)...(19): siRNA sense strand
ccgccaggauccuccagaa

SEQ ID NO: 440308 - RNA, 19 nt, Homo sapiens
  misc_RNA (1)...(19): siRNA sense strand
ucucagaggaccuguacuu

SEQ ID NO: 440309 - RNA, 19 nt, Homo sapiens
  misc_RNA (1)...(19): siRNA sense strand
caaggugcggacaguguuu

SEQ ID NO: 440310 - RNA, 19 nt, Homo sapiens
  misc_RNA (1)...(19): siRNA sense strand
caagagcauggucagagaa

SEQ ID NO: 440311 - RNA, 19 nt, Homo sapiens
  misc_RNA (1)...(19): siRNA sense strand
ggacuggaggagcugcaaa

SEQ ID NO: 440312 - RNA, 19 nt, Homo sapiens
  misc_RNA (1)...(19): siRNA sense strand
cuguaccgcuccugcauga

SEQ ID NO: 440313 - RNA, 19 nt, Homo sapiens
  misc_RNA (1)...(19): siRNA sense strand
ucaucgaccucuucaucug

SEQ ID NO: 440314 - RNA, 19 nt, Homo sapiens
  misc_RNA (1)...(19): siRNA sense strand
gcagaaccuugaaaacauc

SEQ ID NO: 440315 - RNA, 19 nt, Homo sapiens
  misc_RNA (1)...(19): siRNA sense strand
cauacaaacugugcuaucc

SEQ ID NO: 440316 - RNA, 19 nt, Homo sapiens
  misc_RNA (1)...(19): siRNA sense strand
ggaccuggcagacgaacag

SEQ ID NO: 440317 - RNA, 19 nt, Homo sapiens
  misc_RNA (1)...(19): siRNA sense strand
ccucaucgaccucuucauc

SEQ ID NO: 440318 - RNA, 19 nt, Homo sapiens
  misc_RNA (1)...(19): siRNA sense strand
cuauaaggccuaccucaag

SEQ ID NO: 440319 - RNA, 19 nt, Homo sapiens
  misc_RNA (1)...(19): siRNA sense strand
ggaaaacauugcugacaac

SEQ ID NO: 440320 - RNA, 19 nt, Homo sapiens
  misc_RNA (1)...(19): siRNA sense strand
gcuauccucugucaaaauc

SEQ ID NO: 440321 - RNA, 19 nt, Homo sapiens
  misc_RNA (1)...(19): siRNA sense strand
aagccuaccugcaguucau

SEQ ID NO: 440322 - RNA, 19 nt, Homo sapiens
  misc_RNA (1)...(19): siRNA sense strand
cggcacaucaucuacauag

SEQ ID NO: 440323 - RNA, 19 nt, Homo sapiens
  misc_RNA (1)...(19): siRNA sense strand
ggagcugcaaagccaguuu

SEQ ID NO: 440324 - RNA, 19 nt, Homo sapiens
  misc_RNA (1)...(19): siRNA sense strand
ccuauaaggccuaccucaa

SEQ ID NO: 440325 - RNA, 19 nt, Homo sapiens
  misc_RNA (1)...(19): siRNA sense strand
gagcagucagagugcauga

SEQ ID NO: 440326 - RNA, 19 nt, Homo sapiens
  misc_RNA (1)...(19): siRNA sense strand
ggaccuguacuuugagaac

SEQ ID NO: 440327 - RNA, 19 nt, Homo sapiens
  misc_RNA (1)...(19): siRNA sense strand
ugugcuauccucugucaaa

SEQ ID NO: 440328 - RNA, 19 nt, Homo sapiens
  misc_RNA (1)...(19): siRNA sense strand
ugaaccagagugugauaga

SEQ ID NO: 440329 - RNA, 19 nt, Homo sapiens
  misc_RNA (1)...(19): siRNA sense strand
gcucuucuucaucaacuau

SEQ ID NO: 440330 - RNA, 19 nt, Homo sapiens
  misc_RNA (1)...(19): siRNA sense strand
aaccgaaaccagauuguau

SEQ ID NO: 440331 - RNA, 19 nt, Homo sapiens
  misc_RNA (1)...(19): siRNA sense strand
ggacacacgagugaacuac

SEQ ID NO: 440332 - RNA, 19 nt, Homo sapiens
  misc_RNA (1)...(19): siRNA sense strand
cagccaggaccauacagaa

SEQ ID NO: 440333 - RNA, 19 nt, Homo sapiens
  misc_RNA (1)...(19): siRNA sense strand
aggaagugguggucuaugg

SEQ ID NO: 440334 - RNA, 19 nt, Homo sapiens
  misc_RNA (1)...(19): siRNA sense strand
gcugccagaugaggaagug

SEQ ID NO: 440335 - RNA, 19 nt, Homo sapiens
  misc_RNA (1)...(19): siRNA sense strand
gagcauggucagagaacuc

SEQ ID NO: 440336 - RNA, 19 nt, Homo sapiens
  misc_RNA (1)...(19): siRNA sense strand
cauccaauccaucaagaca

SEQ ID NO: 440337 - RNA, 19 nt, Homo sapiens
  misc_RNA (1)...(19): siRNA sense strand
aggccuaccucaaguggau

SEQ ID NO: 440338 - RNA, 19 nt, Homo sapiens
  misc_RNA (1)...(19): siRNA sense strand
cagacgaacagaacgugaa

SEQ ID NO: 440339 - RNA, 19 nt, Homo sapiens
  misc_RNA (1)...(19): siRNA sense strand
gaucgggcacccugacuac

SEQ ID NO: 440340 - RNA, 19 nt, Homo sapiens
  misc_RNA (1)...(19): siRNA sense strand
acgaggaguccaagaagaa

SEQ ID NO: 440341 - RNA, 19 nt, Homo sapiens
  misc_RNA (1)...(19): siRNA sense strand
ggagauugcucaagaaauu

SEQ ID NO: 440342 - RNA, 19 nt, Homo sapiens
  misc_RNA (1)...(19): siRNA sense strand
gaugggcugucuuucauua

SEQ ID NO: 440343 - RNA, 19 nt, Homo sapiens
  misc_RNA (1)...(19): siRNA sense strand
gaaaugaugggcugucuuu

SEQ ID NO: 440344 - RNA, 19 nt, Homo sapiens
  misc_RNA (1)...(19): siRNA sense strand
guacaaaugaugacaagua

SEQ ID NO: 440345 - RNA, 19 nt, Homo sapiens
  misc_RNA (1)...(19): siRNA sense strand
ggagcagacugaauuuauu

SEQ ID NO: 440346 - RNA, 19 nt, Homo sapiens
  misc_RNA (1)...(19): siRNA sense strand
gaaaguauagagaagagua

SEQ ID NO: 440347 - RNA, 19 nt, Homo sapiens
  misc_RNA (1)...(19): siRNA sense strand
gcagauagcuacagcaaaa

SEQ ID NO: 440348 - RNA, 19 nt, Homo sapiens
  misc_RNA (1)...(19): siRNA sense strand
gauagaaucaacuugguua

SEQ ID NO: 440349 - RNA, 19 nt, Homo sapiens
  misc_RNA (1)...(19): siRNA sense strand
gaacggauucccuuugauu

SEQ ID NO: 440350 - RNA, 19 nt, Homo sapiens
  misc_RNA (1)...(19): siRNA sense strand
gcauaaacuugagaucuuu

SEQ ID NO: 440351 - RNA, 19 nt, Homo sapiens
  misc_RNA (1)...(19): siRNA sense strand
gggaggagauugcucaaga

SEQ ID NO: 440352 - RNA, 19 nt, Homo sapiens
  misc_RNA (1)...(19): siRNA sense strand
ggaagaauuucaggaguug

SEQ ID NO: 440353 - RNA, 19 nt, Homo sapiens
  misc_RNA (1)...(19): siRNA sense strand
cuacucauauguacgauaa

SEQ ID NO: 440354 - RNA, 19 nt, Homo sapiens
  misc_RNA (1)...(19): siRNA sense strand
guucauggguacauuguuu

SEQ ID NO: 440355 - RNA, 19 nt, Homo sapiens
  misc_RNA (1)...(19): siRNA sense strand
ucagcgagauccaauguaa

SEQ ID NO: 440356 - RNA, 19 nt, Homo sapiens
  misc_RNA (1)...(19): siRNA sense strand
ggacgcaacauuaaugaaa

SEQ ID NO: 440357 - RNA, 19 nt, Homo sapiens
  misc_RNA (1)...(19): siRNA sense strand
gaagauggguguuauucag

SEQ ID NO: 440358 - RNA, 19 nt, Homo sapiens
  misc_RNA (1)...(19): siRNA sense strand
cgaagggcguuuaaagaaa

SEQ ID NO: 440359 - RNA, 19 nt, Homo sapiens
  misc_RNA (1)...(19): siRNA sense strand
ggagaggaacagcgauuua

SEQ ID NO: 440360 - RNA, 19 nt, Homo sapiens
  misc_RNA (1)...(19): siRNA sense strand
agaguaaacugaacaacaa

SEQ ID NO: 440361 - RNA, 19 nt, Homo sapiens
  misc_RNA (1)...(19): siRNA sense strand
aaagcaagauguccgaauu

SEQ ID NO: 440362 - RNA, 19 nt, Homo sapiens
  misc_RNA (1)...(19): siRNA sense strand
ucaaguaugucaucucuca

SEQ ID NO: 440363 - RNA, 19 nt, Homo sapiens
  misc_RNA (1)...(19): siRNA sense strand
gaagaggcccguaguuuua

SEQ ID NO: 440364 - RNA, 19 nt, Homo sapiens
  misc_RNA (1)...(19): siRNA sense strand
acagcaaggucaacaaauu

SEQ ID NO: 440365 - RNA, 19 nt, Homo sapiens
  misc_RNA (1)...(19): siRNA sense strand
gcgaagggcguuuaaagaa

SEQ ID NO: 440366 - RNA, 19 nt, Homo sapiens
  misc_RNA (1)...(19): siRNA sense strand
gccaaggaaugaagaagaa

SEQ ID NO: 440367 - RNA, 19 nt, Homo sapiens
  misc_RNA (1)...(19): siRNA sense strand
ggaggagauugcucaagaa

SEQ ID NO: 440368 - RNA, 19 nt, Homo sapiens
  misc_RNA (1)...(19): siRNA sense strand
gagggcgaguggucaauaa

SEQ ID NO: 440369 - RNA, 19 nt, Homo sapiens
  misc_RNA (1)...(19): siRNA sense strand
gaaguugcaugcccuuaag

SEQ ID NO: 440370 - RNA, 19 nt, Homo sapiens
  misc_RNA (1)...(19): siRNA sense strand
ugagaucuuucacccauuu

SEQ ID NO: 440371 - RNA, 19 nt, Homo sapiens
  misc_RNA (1)...(19): siRNA sense strand
caaagccuccuguccauuu

SEQ ID NO: 440372 - RNA, 19 nt, Homo sapiens
  misc_RNA (1)...(19): siRNA sense strand
gaagugguuuguugugcuu

SEQ ID NO: 440373 - RNA, 19 nt, Homo sapiens
  misc_RNA (1)...(19): siRNA sense strand
gaaauugacggaagguuca

SEQ ID NO: 440374 - RNA, 19 nt, Homo sapiens
  misc_RNA (1)...(19): siRNA sense strand
caaaugaugacaaguaugu

SEQ ID NO: 440375 - RNA, 19 nt, Homo sapiens
  misc_RNA (1)...(19): siRNA sense strand
gaaugguucugacagugaa

SEQ ID NO: 440376 - RNA, 19 nt, Homo sapiens
  misc_RNA (1)...(19): siRNA sense strand
uugaagcucuuauaccuaa

SEQ ID NO: 440377 - RNA, 19 nt, Homo sapiens
  misc_RNA (1)...(19): siRNA sense strand
uaugucaucucucaccuaa

SEQ ID NO: 440378 - RNA, 19 nt, Homo sapiens
  misc_RNA (1)...(19): siRNA sense strand
ugaaagauguauugaguac

SEQ ID NO: 440379 - RNA, 19 nt, Homo sapiens
  misc_RNA (1)...(19): siRNA sense strand
aagcaaaucagucaaguuu

SEQ ID NO: 440380 - RNA, 19 nt, Homo sapiens
  misc_RNA (1)...(19): siRNA sense strand
uugauuaguucucgguuua

SEQ ID NO: 440381 - RNA, 19 nt, Homo sapiens
  misc_RNA (1)...(19): siRNA sense strand
gagaggaacagcgauuuaa

SEQ ID NO: 440382 - RNA, 19 nt, Homo sapiens
  misc_RNA (1)...(19): siRNA sense strand
uagugcaacucauugauaa

SEQ ID NO: 440383 - RNA, 19 nt, Homo sapiens
  misc_RNA (1)...(19): siRNA sense strand
gaguuucacuuggaccaua

SEQ ID NO: 440384 - RNA, 19 nt, Homo sapiens
  misc_RNA (1)...(19): siRNA sense strand
acucaaaccugcaggauuc

SEQ ID NO: 440385 - RNA, 19 nt, Homo sapiens
  misc_RNA (1)...(19): siRNA sense strand
caaucggacugcacaagaa

SEQ ID NO: 440386 - RNA, 19 nt, Homo sapiens
  misc_RNA (1)...(19): siRNA sense strand
gggaagaggcccguaguuu

SEQ ID NO: 440387 - RNA, 19 nt, Homo sapiens
  misc_RNA (1)...(19): siRNA sense strand
gaagggcguuuaaagaaaa

SEQ ID NO: 440388 - RNA, 19 nt, Homo sapiens
  misc_RNA (1)...(19): siRNA sense strand
cggauucccuuugauuuaa

SEQ ID NO: 440389 - RNA, 19 nt, Homo sapiens
  misc_RNA (1)...(19): siRNA sense strand
gcaggccucuccagaauac

SEQ ID NO: 440390 - RNA, 19 nt, Homo sapiens
  misc_RNA (1)...(19): siRNA sense strand
ggcgaguggucaauaauga

SEQ ID NO: 440391 - RNA, 19 nt, Homo sapiens
  misc_RNA (1)...(19): siRNA sense strand
acggaaagcugcugguuga

SEQ ID NO: 440392 - RNA, 19 nt, Homo sapiens
  misc_RNA (1)...(19): siRNA sense strand
guagggaacagcuaacuga

SEQ ID NO: 440393 - RNA, 19 nt, Homo sapiens
  misc_RNA (1)...(19): siRNA sense strand
guugaucugcgaauuguua

SEQ ID NO: 440394 - RNA, 19 nt, Homo sapiens
  misc_RNA (1)...(19): siRNA sense strand
gcagcagagucagcagaua

SEQ ID NO: 440395 - RNA, 19 nt, Homo sapiens
  misc_RNA (1)...(19): siRNA sense strand
ucuccaaucucuacaauca

SEQ ID NO: 440396 - RNA, 19 nt, Homo sapiens
  misc_RNA (1)...(19): siRNA sense strand
gggcaugaauaggaacuuu

SEQ ID NO: 440397 - RNA, 19 nt, Homo sapiens
  misc_RNA (1)...(19): siRNA sense strand
gagcagacugaauuuauug

SEQ ID NO: 440398 - RNA, 19 nt, Homo sapiens
  misc_RNA (1)...(19): siRNA sense strand
gcaaacaaaggaacacuag

SEQ ID NO: 440399 - RNA, 19 nt, Homo sapiens
  misc_RNA (1)...(19): siRNA sense strand
ggaagaaagaggaggauca

SEQ ID NO: 440400 - RNA, 19 nt, Homo sapiens
  misc_RNA (1)...(19): siRNA sense strand
gaacuggagggaaaugaug

SEQ ID NO: 440401 - RNA, 19 nt, Homo sapiens
  misc_RNA (1)...(19): siRNA sense strand
gaaagagccgguugguuca

SEQ ID NO: 440402 - RNA, 19 nt, Homo sapiens
  misc_RNA (1)...(19): siRNA sense strand
gagcauaucgagcguagga

SEQ ID NO: 440403 - RNA, 19 nt, Homo sapiens
  misc_RNA (1)...(19): siRNA sense strand
ggaaugguucugacaguga

SEQ ID NO: 440404 - RNA, 19 nt, Homo sapiens
  misc_RNA (1)...(19): siRNA sense strand
ccgaagagguguuuaacuc

SEQ ID NO: 440405 - RNA, 19 nt, Homo sapiens
  misc_RNA (1)...(19): siRNA sense strand
gacggaagguucacaagca

SEQ ID NO: 440406 - RNA, 19 nt, Homo sapiens
  misc_RNA (1)...(19): siRNA sense strand
gaaucgcuauccuauguag

SEQ ID NO: 440407 - RNA, 19 nt, Homo sapiens
  misc_RNA (1)...(19): siRNA sense strand
cagcuuguguggacgcuaa

SEQ ID NO: 440408 - RNA, 19 nt, Homo sapiens
  misc_RNA (1)...(19): siRNA sense strand
gguguugagcgguacauua

SEQ ID NO: 440409 - RNA, 19 nt, Homo sapiens
  misc_RNA (1)...(19): siRNA sense strand
agagacaguuugaucaaga

SEQ ID NO: 440410 - RNA, 19 nt, Homo sapiens
  misc_RNA (1)...(19): siRNA sense strand
gcagagacaguuugaucaa

SEQ ID NO: 440411 - RNA, 19 nt, Homo sapiens
  misc_RNA (1)...(19): siRNA sense strand
gagaguaaacugaacaaca

SEQ ID NO: 440412 - RNA, 19 nt, Homo sapiens
  misc_RNA (1)...(19): siRNA sense strand
acacaucacugccuucucu

SEQ ID NO: 440413 - RNA, 19 nt, Homo sapiens
  misc_RNA (1)...(19): siRNA sense strand
gcaugaauaggaacuuuga

SEQ ID NO: 440414 - RNA, 19 nt, Homo sapiens
  misc_RNA (1)...(19): siRNA sense strand
uaaacaaggucagccacaa

SEQ ID NO: 440415 - RNA, 19 nt, Homo sapiens
  misc_RNA (1)...(19): siRNA sense strand
gagcgagggcgcaagguuu

SEQ ID NO: 440416 - RNA, 19 nt, Homo sapiens
  misc_RNA (1)...(19): siRNA sense strand
cuauggaacuggagggaaa

SEQ ID NO: 440417 - RNA, 19 nt, Homo sapiens
  misc_RNA (1)...(19): siRNA sense strand
uagagaagcugaggaacga

SEQ ID NO: 440418 - RNA, 19 nt, Homo sapiens
  misc_RNA (1)...(19): siRNA sense strand
ggacucagaaagccaagaa

SEQ ID NO: 440419 - RNA, 19 nt, Homo sapiens
  misc_RNA (1)...(19): siRNA sense strand
gcacauacuuuugccuuaa

SEQ ID NO: 440420 - RNA, 19 nt, Homo sapiens
  misc_RNA (1)...(19): siRNA sense strand
ugacaaguaugugauagau

SEQ ID NO: 440421 - RNA, 19 nt, Homo sapiens
  misc_RNA (1)...(19): siRNA sense strand
ucccaaaccuguaaaucuu

SEQ ID NO: 440422 - RNA, 19 nt, Homo sapiens
  misc_RNA (1)...(19): siRNA sense strand
cuagcaaacuucagugugu

SEQ ID NO: 440423 - RNA, 19 nt, Homo sapiens
  misc_RNA (1)...(19): siRNA sense strand
gcaggacuuugagcagaaa

SEQ ID NO: 440424 - RNA, 19 nt, Homo sapiens
  misc_RNA (1)...(19): siRNA sense strand
ccacagccuucccgaaaca

SEQ ID NO: 440425 - RNA, 19 nt, Homo sapiens
  misc_RNA (1)...(19): siRNA sense strand
ugacagcacccaaggcaaa

SEQ ID NO: 440426 - RNA, 19 nt, Homo sapiens
  misc_RNA (1)...(19): siRNA sense strand
gguuacggacgcaacauua

SEQ ID NO: 440427 - RNA, 19 nt, Homo sapiens
  misc_RNA (1)...(19): siRNA sense strand
gcuauccuauguaguggaa

SEQ ID NO: 440428 - RNA, 19 nt, Homo sapiens
  misc_RNA (1)...(19): siRNA sense strand
gagaagauggguguuauuc

SEQ ID NO: 440429 - RNA, 19 nt, Homo sapiens
  misc_RNA (1)...(19): siRNA sense strand
gaacuggagcuggaugcua

SEQ ID NO: 440430 - RNA, 19 nt, Homo sapiens
  misc_RNA (1)...(19): siRNA sense strand
gcucuuauaccuaaucuag

SEQ ID NO: 440431 - RNA, 19 nt, Homo sapiens
  misc_RNA (1)...(19): siRNA sense strand
ugaauaggaacuuugauga

SEQ ID NO: 440432 - RNA, 19 nt, Homo sapiens
  misc_RNA (1)...(19): siRNA sense strand
cugcuagcaucaaagauuu

SEQ ID NO: 440433 - RNA, 19 nt, Homo sapiens
  misc_RNA (1)...(19): siRNA sense strand
aggauuguguggaauguaa

SEQ ID NO: 440434 - RNA, 19 nt, Homo sapiens
  misc_RNA (1)...(19): siRNA sense strand
gcagaucgacuugguggaa

SEQ ID NO: 440435 - RNA, 19 nt, Homo sapiens
  misc_RNA (1)...(19): siRNA sense strand
aaucgaggcuacucauaug

SEQ ID NO: 440436 - RNA, 19 nt, Homo sapiens
  misc_RNA (1)...(19): siRNA sense strand
gaggagauugcucaagaaa

SEQ ID NO: 440437 - RNA, 19 nt, Homo sapiens
  misc_RNA (1)...(19): siRNA sense strand
uuacgugccuuucuuugug

SEQ ID NO: 440438 - RNA, 19 nt, Homo sapiens
  misc_RNA (1)...(19): siRNA sense strand
ggaagaggcccguaguuuu

SEQ ID NO: 440439 - RNA, 19 nt, Homo sapiens
  misc_RNA (1)...(19): siRNA sense strand
gcucaaguuugucuccaau

SEQ ID NO: 440440 - RNA, 19 nt, Homo sapiens
  misc_RNA (1)...(19): siRNA sense strand
cagacugaauuuauugaug

SEQ ID NO: 440441 - RNA, 19 nt, Homo sapiens
  misc_RNA (1)...(19): siRNA sense strand
ggagauugcucaagaaauu

SEQ ID NO: 440442 - RNA, 19 nt, Homo sapiens
  misc_RNA (1)...(19): siRNA sense strand
gaugggcugucuuucauua

SEQ ID NO: 440443 - RNA, 19 nt, Homo sapiens
  misc_RNA (1)...(19): siRNA sense strand
gaaaugaugggcugucuuu

SEQ ID NO: 440444 - RNA, 19 nt, Homo sapiens
  misc_RNA (1)...(19): siRNA sense strand
guacaaaugaugacaagua

SEQ ID NO: 440445 - RNA, 19 nt, Homo sapiens
  misc_RNA (1)...(19): siRNA sense strand
ggagcagacugaauuuauu

SEQ ID NO: 440446 - RNA, 19 nt, Homo sapiens
  misc_RNA (1)...(19): siRNA sense strand
gaaaguauagagaagagua

SEQ ID NO: 440447 - RNA, 19 nt, Homo sapiens
  misc_RNA (1)...(19): siRNA sense strand
gcagauagcuacagcaaaa

SEQ ID NO: 440448 - RNA, 19 nt, Homo sapiens
  misc_RNA (1)...(19): siRNA sense strand
gauagaaucaacuugguua

SEQ ID NO: 440449 - RNA, 19 nt, Homo sapiens
  misc_RNA (1)...(19): siRNA sense strand
gaacggauucccuuugauu

SEQ ID NO: 440450 - RNA, 19 nt, Homo sapiens
  misc_RNA (1)...(19): siRNA sense strand
gcauaaacuugagaucuuu

SEQ ID NO: 440451 - RNA, 19 nt, Homo sapiens
  misc_RNA (1)...(19): siRNA sense strand
gggaggagauugcucaaga

SEQ ID NO: 440452 - RNA, 19 nt, Homo sapiens
  misc_RNA (1)...(19): siRNA sense strand
ggaagaauuucaggaguug

SEQ ID NO: 440453 - RNA, 19 nt, Homo sapiens
  misc_RNA (1)...(19): siRNA sense strand
cuacucauauguacgauaa

SEQ ID NO: 440454 - RNA, 19 nt, Homo sapiens
  misc_RNA (1)...(19): siRNA sense strand
guucauggguacauuguuu

SEQ ID NO: 440455 - RNA, 19 nt, Homo sapiens
  misc_RNA (1)...(19): siRNA sense strand
ucagcgagauccaauguaa

SEQ ID NO: 440456 - RNA, 19 nt, Homo sapiens
  misc_RNA (1)...(19): siRNA sense strand
ggacgcaacauuaaugaaa

SEQ ID NO: 440457 - RNA, 19 nt, Homo sapiens
  misc_RNA (1)...(19): siRNA sense strand
gaagauggguguuauucag

SEQ ID NO: 440458 - RNA, 19 nt, Homo sapiens
  misc_RNA (1)...(19): siRNA sense strand
cgaagggcguuuaaagaaa

SEQ ID NO: 440459 - RNA, 19 nt, Homo sapiens
  misc_RNA (1)...(19): siRNA sense strand
ggagaggaacagcgauuua

SEQ ID NO: 440460 - RNA, 19 nt, Homo sapiens
  misc_RNA (1)...(19): siRNA sense strand
agaguaaacugaacaacaa

SEQ ID NO: 440461 - RNA, 19 nt, Homo sapiens
  misc_RNA (1)...(19): siRNA sense strand
aaagcaagauguccgaauu

SEQ ID NO: 440462 - RNA, 19 nt, Homo sapiens
  misc_RNA (1)...(19): siRNA sense strand
ucaaguaugucaucucuca

SEQ ID NO: 440463 - RNA, 19 nt, Homo sapiens
  misc_RNA (1)...(19): siRNA sense strand
gaagaggcccguaguuuua

SEQ ID NO: 440464 - RNA, 19 nt, Homo sapiens
  misc_RNA (1)...(19): siRNA sense strand
acagcaaggucaacaaauu

SEQ ID NO: 440465 - RNA, 19 nt, Homo sapiens
  misc_RNA (1)...(19): siRNA sense strand
gcgaagggcguuuaaagaa

SEQ ID NO: 440466 - RNA, 19 nt, Homo sapiens
  misc_RNA (1)...(19): siRNA sense strand
gccaaggaaugaagaagaa

SEQ ID NO: 440467 - RNA, 19 nt, Homo sapiens
  misc_RNA (1)...(19): siRNA sense strand
ggaggagauugcucaagaa

SEQ ID NO: 440468 - RNA, 19 nt, Homo sapiens
  misc_RNA (1)...(19): siRNA sense strand
gagggcgaguggucaauaa

SEQ ID NO: 440469 - RNA, 19 nt, Homo sapiens
  misc_RNA (1)...(19): siRNA sense strand
gaaguugcaugcccuuaag

SEQ ID NO: 440470 - RNA, 19 nt, Homo sapiens
  misc_RNA (1)...(19): siRNA sense strand
ugagaucuuucacccauuu

SEQ ID NO: 440471 - RNA, 19 nt, Homo sapiens
  misc_RNA (1)...(19): siRNA sense strand
caaagccuccuguccauuu

SEQ ID NO: 440472 - RNA, 19 nt, Homo sapiens
  misc_RNA (1)...(19): siRNA sense strand
gaagugguuuguugugcuu

SEQ ID NO: 440473 - RNA, 19 nt, Homo sapiens
  misc_RNA (1)...(19): siRNA sense strand
gaaauugacggaagguuca

SEQ ID NO: 440474 - RNA, 19 nt, Homo sapiens
  misc_RNA (1)...(19): siRNA sense strand
caaaugaugacaaguaugu

SEQ ID NO: 440475 - RNA, 19 nt, Homo sapiens
  misc_RNA (1)...(19): siRNA sense strand
gaaugguucugacagugaa

SEQ ID NO: 440476 - RNA, 19 nt, Homo sapiens
  misc_RNA (1)...(19): siRNA sense strand
uugaagcucuuauaccuaa

SEQ ID NO: 440477 - RNA, 19 nt, Homo sapiens
  misc_RNA (1)...(19): siRNA sense strand
uaugucaucucucaccuaa

SEQ ID NO: 440478 - RNA, 19 nt, Homo sapiens
  misc_RNA (1)...(19): siRNA sense strand
ugaaagauguauugaguac

SEQ ID NO: 440479 - RNA, 19 nt, Homo sapiens
  misc_RNA (1)...(19): siRNA sense strand
aagcaaaucagucaaguuu

SEQ ID NO: 440480 - RNA, 19 nt, Homo sapiens
  misc_RNA (1)...(19): siRNA sense strand
uugauuaguucucgguuua

SEQ ID NO: 440481 - RNA, 19 nt, Homo sapiens
  misc_RNA (1)...(19): siRNA sense strand
gagaggaacagcgauuuaa

SEQ ID NO: 440482 - RNA, 19 nt, Homo sapiens
  misc_RNA (1)...(19): siRNA sense strand
uagugcaacucauugauaa

SEQ ID NO: 440483 - RNA, 19 nt, Homo sapiens
  misc_RNA (1)...(19): siRNA sense strand
gaguuucacuuggaccaua

SEQ ID NO: 440484 - RNA, 19 nt, Homo sapiens
  misc_RNA (1)...(19): siRNA sense strand
acucaaaccugcaggauuc

SEQ ID NO: 440485 - RNA, 19 nt, Homo sapiens
  misc_RNA (1)...(19): siRNA sense strand
caaucggacugcacaagaa

SEQ ID NO: 440486 - RNA, 19 nt, Homo sapiens
  misc_RNA (1)...(19): siRNA sense strand
gggaagaggcccguaguuu

SEQ ID NO: 440487 - RNA, 19 nt, Homo sapiens
  misc_RNA (1)...(19): siRNA sense strand
gaagggcguuuaaagaaaa

SEQ ID NO: 440488 - RNA, 19 nt, Homo sapiens
  misc_RNA (1)...(19): siRNA sense strand
cggauucccuuugauuuaa

SEQ ID NO: 440489 - RNA, 19 nt, Homo sapiens
  misc_RNA (1)...(19): siRNA sense strand
gcaggccucuccagaauac

SEQ ID NO: 440490 - RNA, 19 nt, Homo sapiens
  misc_RNA (1)...(19): siRNA sense strand
ggcgaguggucaauaauga

SEQ ID NO: 440491 - RNA, 19 nt, Homo sapiens
  misc_RNA (1)...(19): siRNA sense strand
acggaaagcugcugguuga

SEQ ID NO: 440492 - RNA, 19 nt, Homo sapiens
  misc_RNA (1)...(19): siRNA sense strand
guagggaacagcuaacuga

SEQ ID NO: 440493 - RNA, 19 nt, Homo sapiens
  misc_RNA (1)...(19): siRNA sense strand
guugaucugcgaauuguua

SEQ ID NO: 440494 - RNA, 19 nt, Homo sapiens
  misc_RNA (1)...(19): siRNA sense strand
gcagcagagucagcagaua

SEQ ID NO: 440495 - RNA, 19 nt, Homo sapiens
  misc_RNA (1)...(19): siRNA sense strand
ucuccaaucucuacaauca

SEQ ID NO: 440496 - RNA, 19 nt, Homo sapiens
  misc_RNA (1)...(19): siRNA sense strand
gggcaugaauaggaacuuu

SEQ ID NO: 440497 - RNA, 19 nt, Homo sapiens
  misc_RNA (1)...(19): siRNA sense strand
gagcagacugaauuuauug

SEQ ID NO: 440498 - RNA, 19 nt, Homo sapiens
  misc_RNA (1)...(19): siRNA sense strand
ggaagaaagaggaggauca

SEQ ID NO: 440499 - RNA, 19 nt, Homo sapiens
  misc_RNA (1)...(19): siRNA sense strand
gaacuggagggaaaugaug

SEQ ID NO: 440500 - RNA, 19 nt, Homo sapiens
  misc_RNA (1)...(19): siRNA sense strand
gaaagagccgguugguuca

SEQ ID NO: 440501 - RNA, 19 nt, Homo sapiens
  misc_RNA (1)...(19): siRNA sense strand
gagcauaucgagcguagga

SEQ ID NO: 440502 - RNA, 19 nt, Homo sapiens
  misc_RNA (1)...(19): siRNA sense strand
ggaaugguucugacaguga

SEQ ID NO: 440503 - RNA, 19 nt, Homo sapiens
  misc_RNA (1)...(19): siRNA sense strand
ccgaagagguguuuaacuc

SEQ ID NO: 440504 - RNA, 19 nt, Homo sapiens
  misc_RNA (1)...(19): siRNA sense strand
gacggaagguucacaagca

SEQ ID NO: 440505 - RNA, 19 nt, Homo sapiens
  misc_RNA (1)...(19): siRNA sense strand
gaaucgcuauccuauguag

SEQ ID NO: 440506 - RNA, 19 nt, Homo sapiens
  misc_RNA (1)...(19): siRNA sense strand
cagcuuguguggacgcuaa

SEQ ID NO: 440507 - RNA, 19 nt, Homo sapiens
  misc_RNA (1)...(19): siRNA sense strand
gguguugagcgguacauua

SEQ ID NO: 440508 - RNA, 19 nt, Homo sapiens
  misc_RNA (1)...(19): siRNA sense strand
agagacaguuugaucaaga

SEQ ID NO: 440509 - RNA, 19 nt, Homo sapiens
  misc_RNA (1)...(19): siRNA sense strand
gcagagacaguuugaucaa

SEQ ID NO: 440510 - RNA, 19 nt, Homo sapiens
  misc_RNA (1)...(19): siRNA sense strand
gagaguaaacugaacaaca

SEQ ID NO: 440511 - RNA, 19 nt, Homo sapiens
  misc_RNA (1)...(19): siRNA sense strand
acacaucacugccuucucu

SEQ ID NO: 440512 - RNA, 19 nt, Homo sapiens
  misc_RNA (1)...(19): siRNA sense strand
gcaugaauaggaacuuuga

SEQ ID NO: 440513 - RNA, 19 nt, Homo sapiens
  misc_RNA (1)...(19): siRNA sense strand
uaaacaaggucagccacaa

SEQ ID NO: 440514 - RNA, 19 nt, Homo sapiens
  misc_RNA (1)...(19): siRNA sense strand
gagcgagggcgcaagguuu

SEQ ID NO: 440515 - RNA, 19 nt, Homo sapiens
  misc_RNA (1)...(19): siRNA sense strand
cuauggaacuggagggaaa

SEQ ID NO: 440516 - RNA, 19 nt, Homo sapiens
  misc_RNA (1)...(19): siRNA sense strand
uagagaagcugaggaacga

SEQ ID NO: 440517 - RNA, 19 nt, Homo sapiens
  misc_RNA (1)...(19): siRNA sense strand
ggacucagaaagccaagaa

SEQ ID NO: 440518 - RNA, 19 nt, Homo sapiens
  misc_RNA (1)...(19): siRNA sense strand
gcacauacuuuugccuuaa

SEQ ID NO: 440519 - RNA, 19 nt, Homo sapiens
  misc_RNA (1)...(19): siRNA sense strand
ugacaaguaugugauagau

SEQ ID NO: 440520 - RNA, 19 nt, Homo sapiens
  misc_RNA (1)...(19): siRNA sense strand
ucccaaaccuguaaaucuu

SEQ ID NO: 440521 - RNA, 19 nt, Homo sapiens
  misc_RNA (1)...(19): siRNA sense strand
cuagcaaacuucagugugu

SEQ ID NO: 440522 - RNA, 19 nt, Homo sapiens
  misc_RNA (1)...(19): siRNA sense strand
gcaggacuuugagcagaaa

SEQ ID NO: 440523 - RNA, 19 nt, Homo sapiens
  misc_RNA (1)...(19): siRNA sense strand
ugacagcacccaaggcaaa

SEQ ID NO: 440524 - RNA, 19 nt, Homo sapiens
  misc_RNA (1)...(19): siRNA sense strand
gguuacggacgcaacauua

SEQ ID NO: 440525 - RNA, 19 nt, Homo sapiens
  misc_RNA (1)...(19): siRNA sense strand
gcuauccuauguaguggaa

SEQ ID NO: 440526 - RNA, 19 nt, Homo sapiens
  misc_RNA (1)...(19): siRNA sense strand
gagaagauggguguuauuc

SEQ ID NO: 440527 - RNA, 19 nt, Homo sapiens
  misc_RNA (1)...(19): siRNA sense strand
gaacuggagcuggaugcua

SEQ ID NO: 440528 - RNA, 19 nt, Homo sapiens
  misc_RNA (1)...(19): siRNA sense strand
gcucuuauaccuaaucuag

SEQ ID NO: 440529 - RNA, 19 nt, Homo sapiens
  misc_RNA (1)...(19): siRNA sense strand
ugaauaggaacuuugauga

SEQ ID NO: 440530 - RNA, 19 nt, Homo sapiens
  misc_RNA (1)...(19): siRNA sense strand
cugcuagcaucaaagauuu

SEQ ID NO: 440531 - RNA, 19 nt, Homo sapiens
  misc_RNA (1)...(19): siRNA sense strand
aggauuguguggaauguaa

SEQ ID NO: 440532 - RNA, 19 nt, Homo sapiens
  misc_RNA (1)...(19): siRNA sense strand
gcagaucgacuugguggaa

SEQ ID NO: 440533 - RNA, 19 nt, Homo sapiens
  misc_RNA (1)...(19): siRNA sense strand
aaucgaggcuacucauaug

SEQ ID NO: 440534 - RNA, 19 nt, Homo sapiens
  misc_RNA (1)...(19): siRNA sense strand
gaggagauugcucaagaaa

SEQ ID NO: 440535 - RNA, 19 nt, Homo sapiens
  misc_RNA (1)...(19): siRNA sense strand
uuacgugccuuucuuugug

SEQ ID NO: 440536 - RNA, 19 nt, Homo sapiens
  misc_RNA (1)...(19): siRNA sense strand
ggaagaggcccguaguuuu

SEQ ID NO: 440537 - RNA, 19 nt, Homo sapiens
  misc_RNA (1)...(19): siRNA sense strand
gcucaaguuugucuccaau

SEQ ID NO: 440538 - RNA, 19 nt, Homo sapiens
  misc_RNA (1)...(19): siRNA sense strand
cagacugaauuuauugaug

SEQ ID NO: 440539 - RNA, 19 nt, Homo sapiens
  misc_RNA (1)...(19): siRNA sense strand
gguuugauccuucugacua

SEQ ID NO: 440540 - RNA, 19 nt, Homo sapiens
  misc_RNA (1)...(19): siRNA sense strand
ccugggagaguaacuauuu

SEQ ID NO: 440541 - RNA, 19 nt, Homo sapiens
  misc_RNA (1)...(19): siRNA sense strand
caacaauuccggaacauuu

SEQ ID NO: 440542 - RNA, 19 nt, Homo sapiens
  misc_RNA (1)...(19): siRNA sense strand
gaacaucgacuuugacagu

SEQ ID NO: 440543 - RNA, 19 nt, Homo sapiens
  misc_RNA (1)...(19): siRNA sense strand
cagaugagcucaagaaggu

SEQ ID NO: 440544 - RNA, 19 nt, Homo sapiens
  misc_RNA (1)...(19): siRNA sense strand
acaaggaccugaagacaca

SEQ ID NO: 440545 - RNA, 19 nt, Homo sapiens
  misc_RNA (1)...(19): siRNA sense strand
gcucugaucaggaaaguga

SEQ ID NO: 440546 - RNA, 19 nt, Homo sapiens
  misc_RNA (1)...(19): siRNA sense strand
ucaacaaccagcucuauga

SEQ ID NO: 440547 - RNA, 19 nt, Homo sapiens
  misc_RNA (1)...(19): siRNA sense strand
ggcugcagcucaccaugua

SEQ ID NO: 440548 - RNA, 19 nt, Homo sapiens
  misc_RNA (1)...(19): siRNA sense strand
ugacaaggauggagauggu

SEQ ID NO: 440549 - RNA, 19 nt, Homo sapiens
  misc_RNA (1)...(19): siRNA sense strand
acaugaacaucgacuuuga

SEQ ID NO: 440550 - RNA, 19 nt, Homo sapiens
  misc_RNA (1)...(19): siRNA sense strand
uggcagcucugaucaggaa

SEQ ID NO: 440551 - RNA, 19 nt, Homo sapiens
  misc_RNA (1)...(19): siRNA sense strand
cagcaacaauuccggaaca

SEQ ID NO: 440552 - RNA, 19 nt, Homo sapiens
  misc_RNA (1)...(19): siRNA sense strand
gcagauagcaggagaugac

SEQ ID NO: 440553 - RNA, 19 nt, Homo sapiens
  misc_RNA (1)...(19): siRNA sense strand
uaacacagucgugaacaaa

SEQ ID NO: 440554 - RNA, 19 nt, Homo sapiens
  misc_RNA (1)...(19): siRNA sense strand
gauuaaggccuggcagaaa

SEQ ID NO: 440555 - RNA, 19 nt, Homo sapiens
  misc_RNA (1)...(19): siRNA sense strand
gugaggaacagcaacaauu

SEQ ID NO: 440556 - RNA, 19 nt, Homo sapiens
  misc_RNA (1)...(19): siRNA sense strand
acaaacacaugaacaucga

SEQ ID NO: 440557 - RNA, 19 nt, Homo sapiens
  misc_RNA (1)...(19): siRNA sense strand
caccaccucuggaacaaga

SEQ ID NO: 440558 - RNA, 19 nt, Homo sapiens
  misc_RNA (1)...(19): siRNA sense strand
gagggcauguucagagcuu

SEQ ID NO: 440559 - RNA, 19 nt, Homo sapiens
  misc_RNA (1)...(19): siRNA sense strand
ggaaagugaggaacagcaa

SEQ ID NO: 440560 - RNA, 19 nt, Homo sapiens
  misc_RNA (1)...(19): siRNA sense strand
gauagcaggagaugacaug

SEQ ID NO: 440561 - RNA, 19 nt, Homo sapiens
  misc_RNA (1)...(19): siRNA sense strand
ugauugcgcucauggauac

SEQ ID NO: 440562 - RNA, 19 nt, Homo sapiens
  misc_RNA (1)...(19): siRNA sense strand
acacaugaacaucgacuuu

SEQ ID NO: 440563 - RNA, 19 nt, Homo sapiens
  misc_RNA (1)...(19): siRNA sense strand
acacagucgugaacaaaca

SEQ ID NO: 440564 - RNA, 19 nt, Homo sapiens
  misc_RNA (1)...(19): siRNA sense strand
guacgcagacaaacacaug

SEQ ID NO: 440565 - RNA, 19 nt, Homo sapiens
  misc_RNA (1)...(19): siRNA sense strand
gugcagaugagcucaagaa

SEQ ID NO: 440566 - RNA, 19 nt, Homo sapiens
  misc_RNA (1)...(19): siRNA sense strand
acaaccagcucuaugacau

SEQ ID NO: 440567 - RNA, 19 nt, Homo sapiens
  misc_RNA (1)...(19): siRNA sense strand
gcaacaauuccggaacauu

SEQ ID NO: 440568 - RNA, 19 nt, Homo sapiens
  misc_RNA (1)...(19): siRNA sense strand
guucagagcuuuucaugca

SEQ ID NO: 440569 - RNA, 19 nt, Homo sapiens
  misc_RNA (1)...(19): siRNA sense strand
gcagacaaacacaugaaca

SEQ ID NO: 440570 - RNA, 19 nt, Homo sapiens
  misc_RNA (1)...(19): siRNA sense strand
gaugcgaaaugcagucaac

SEQ ID NO: 440571 - RNA, 19 nt, Homo sapiens
  misc_RNA (1)...(19): siRNA sense strand
gaagacacacggguucaca

SEQ ID NO: 440572 - RNA, 19 nt, Homo sapiens
  misc_RNA (1)...(19): siRNA sense strand
ucaucaagcucaacguucu

SEQ ID NO: 440573 - RNA, 19 nt, Homo sapiens
  misc_RNA (1)...(19): siRNA sense strand
acaucgacuuugacaguuu

SEQ ID NO: 440574 - RNA, 19 nt, Homo sapiens
  misc_RNA (1)...(19): siRNA sense strand
gcuacgagaugcgaaaugc

SEQ ID NO: 440575 - RNA, 19 nt, Homo sapiens
  misc_RNA (1)...(19): siRNA sense strand
uuaacacagucgugaacaa

SEQ ID NO: 440576 - RNA, 19 nt, Homo sapiens
  misc_RNA (1)...(19): siRNA sense strand
ugaggaacagcaacaauuc

SEQ ID NO: 440577 - RNA, 19 nt, Homo sapiens
  misc_RNA (1)...(19): siRNA sense strand
caucgacuuugacaguuuc

SEQ ID NO: 440578 - RNA, 19 nt, Homo sapiens
  misc_RNA (1)...(19): siRNA sense strand
gauuccaccucaacaacca

SEQ ID NO: 440579 - RNA, 19 nt, Homo sapiens
  misc_RNA (1)...(19): siRNA sense strand
uucaucugcugcuucguua

SEQ ID NO: 440580 - RNA, 19 nt, Homo sapiens
  misc_RNA (1)...(19): siRNA sense strand
ucaaacacuaugacacaga

SEQ ID NO: 440581 - RNA, 19 nt, Homo sapiens
  misc_RNA (1)...(19): siRNA sense strand
aaacacaaggaccugaaga

SEQ ID NO: 440582 - RNA, 19 nt, Homo sapiens
  misc_RNA (1)...(19): siRNA sense strand
uaucaucaagcucaacguu

SEQ ID NO: 440583 - RNA, 19 nt, Homo sapiens
  misc_RNA (1)...(19): siRNA sense strand
guccugccguagcaugauu

SEQ ID NO: 440584 - RNA, 19 nt, Homo sapiens
  misc_RNA (1)...(19): siRNA sense strand
cagacaaacacaugaacau

SEQ ID NO: 440585 - RNA, 19 nt, Homo sapiens
  misc_RNA (1)...(19): siRNA sense strand
gcaggauuccaccucaaca

SEQ ID NO: 440586 - RNA, 19 nt, Homo sapiens
  misc_RNA (1)...(19): siRNA sense strand
gaccaguccggcaccauca

SEQ ID NO: 440587 - RNA, 19 nt, Homo sapiens
  misc_RNA (1)...(19): siRNA sense strand
caacaaccagcucuaugac

SEQ ID NO: 440588 - RNA, 19 nt, Homo sapiens
  misc_RNA (1)...(19): siRNA sense strand
ucaggaaagugaggaacag

SEQ ID NO: 440589 - RNA, 19 nt, Homo sapiens
  misc_RNA (1)...(19): siRNA sense strand
gacaaggauggagauggua

SEQ ID NO: 440590 - RNA, 19 nt, Homo sapiens
  misc_RNA (1)...(19): siRNA sense strand
cgacuuugacaguuucauc

SEQ ID NO: 440591 - RNA, 19 nt, Homo sapiens
  misc_RNA (1)...(19): siRNA sense strand
aaccagcucuaugacauca

SEQ ID NO: 440592 - RNA, 19 nt, Homo sapiens
  misc_RNA (1)...(19): siRNA sense strand
agucaacgacgcaggauuc

SEQ ID NO: 440593 - RNA, 19 nt, Homo sapiens
  misc_RNA (1)...(19): siRNA sense strand
uuucaaacacuaugacaca

SEQ ID NO: 440594 - RNA, 19 nt, Homo sapiens
  misc_RNA (1)...(19): siRNA sense strand
acaaacacaaggaccugaa

SEQ ID NO: 440595 - RNA, 19 nt, Homo sapiens
  misc_RNA (1)...(19): siRNA sense strand
caacaauuccggaacauuu

SEQ ID NO: 440596 - RNA, 19 nt, Homo sapiens
  misc_RNA (1)...(19): siRNA sense strand
gaacaucgacuuugacagu

SEQ ID NO: 440597 - RNA, 19 nt, Homo sapiens
  misc_RNA (1)...(19): siRNA sense strand
cagaugagcucaagaaggu

SEQ ID NO: 440598 - RNA, 19 nt, Homo sapiens
  misc_RNA (1)...(19): siRNA sense strand
acaaggaccugaagacaca

SEQ ID NO: 440599 - RNA, 19 nt, Homo sapiens
  misc_RNA (1)...(19): siRNA sense strand
gcucugaucaggaaaguga

SEQ ID NO: 440600 - RNA, 19 nt, Homo sapiens
  misc_RNA (1)...(19): siRNA sense strand
ucaacaaccagcucuauga

SEQ ID NO: 440601 - RNA, 19 nt, Homo sapiens
  misc_RNA (1)...(19): siRNA sense strand
ggcugcagcucaccaugua

SEQ ID NO: 440602 - RNA, 19 nt, Homo sapiens
  misc_RNA (1)...(19): siRNA sense strand
ugacaaggauggagauggu

SEQ ID NO: 440603 - RNA, 19 nt, Homo sapiens
  misc_RNA (1)...(19): siRNA sense strand
acaugaacaucgacuuuga

SEQ ID NO: 440604 - RNA, 19 nt, Homo sapiens
  misc_RNA (1)...(19): siRNA sense strand
uggcagcucugaucaggaa

SEQ ID NO: 440605 - RNA, 19 nt, Homo sapiens
  misc_RNA (1)...(19): siRNA sense strand
cagcaacaauuccggaaca

SEQ ID NO: 440606 - RNA, 19 nt, Homo sapiens
  misc_RNA (1)...(19): siRNA sense strand
gcagauagcaggagaugac

SEQ ID NO: 440607 - RNA, 19 nt, Homo sapiens
  misc_RNA (1)...(19): siRNA sense strand
uaacacagucgugaacaaa

SEQ ID NO: 440608 - RNA, 19 nt, Homo sapiens
  misc_RNA (1)...(19): siRNA sense strand
gauuaaggccuggcagaaa

SEQ ID NO: 440609 - RNA, 19 nt, Homo sapiens
  misc_RNA (1)...(19): siRNA sense strand
gugaggaacagcaacaauu

SEQ ID NO: 440610 - RNA, 19 nt, Homo sapiens
  misc_RNA (1)...(19): siRNA sense strand
acaaacacaugaacaucga

SEQ ID NO: 440611 - RNA, 19 nt, Homo sapiens
  misc_RNA (1)...(19): siRNA sense strand
caccaccucuggaacaaga

SEQ ID NO: 440612 - RNA, 19 nt, Homo sapiens
  misc_RNA (1)...(19): siRNA sense strand
gagggcauguucagagcuu

SEQ ID NO: 440613 - RNA, 19 nt, Homo sapiens
  misc_RNA (1)...(19): siRNA sense strand
ggaaagugaggaacagcaa

SEQ ID NO: 440614 - RNA, 19 nt, Homo sapiens
  misc_RNA (1)...(19): siRNA sense strand
gauagcaggagaugacaug

SEQ ID NO: 440615 - RNA, 19 nt, Homo sapiens
  misc_RNA (1)...(19): siRNA sense strand
ugauugcgcucauggauac

SEQ ID NO: 440616 - RNA, 19 nt, Homo sapiens
  misc_RNA (1)...(19): siRNA sense strand
acacaugaacaucgacuuu

SEQ ID NO: 440617 - RNA, 19 nt, Homo sapiens
  misc_RNA (1)...(19): siRNA sense strand
acacagucgugaacaaaca

SEQ ID NO: 440618 - RNA, 19 nt, Homo sapiens
  misc_RNA (1)...(19): siRNA sense strand
guacgcagacaaacacaug

SEQ ID NO: 440619 - RNA, 19 nt, Homo sapiens
  misc_RNA (1)...(19): siRNA sense strand
gugcagaugagcucaagaa

SEQ ID NO: 440620 - RNA, 19 nt, Homo sapiens
  misc_RNA (1)...(19): siRNA sense strand
acaaccagcucuaugacau

SEQ ID NO: 440621 - RNA, 19 nt, Homo sapiens
  misc_RNA (1)...(19): siRNA sense strand
gcaacaauuccggaacauu

SEQ ID NO: 440622 - RNA, 19 nt, Homo sapiens
  misc_RNA (1)...(19): siRNA sense strand
guucagagcuuuucaugca

SEQ ID NO: 440623 - RNA, 19 nt, Homo sapiens
  misc_RNA (1)...(19): siRNA sense strand
gcagacaaacacaugaaca

SEQ ID NO: 440624 - RNA, 19 nt, Homo sapiens
  misc_RNA (1)...(19): siRNA sense strand
gaugcgaaaugcagucaac

SEQ ID NO: 440625 - RNA, 19 nt, Homo sapiens
  misc_RNA (1)...(19): siRNA sense strand
gaagacacacggguucaca

SEQ ID NO: 440626 - RNA, 19 nt, Homo sapiens
  misc_RNA (1)...(19): siRNA sense strand
ucaucaagcucaacguucu

SEQ ID NO: 440627 - RNA, 19 nt, Homo sapiens
  misc_RNA (1)...(19): siRNA sense strand
acaucgacuuugacaguuu

SEQ ID NO: 440628 - RNA, 19 nt, Homo sapiens
  misc_RNA (1)...(19): siRNA sense strand
gcuacgagaugcgaaaugc

SEQ ID NO: 440629 - RNA, 19 nt, Homo sapiens
  misc_RNA (1)...(19): siRNA sense strand
uuaacacagucgugaacaa

SEQ ID NO: 440630 - RNA, 19 nt, Homo sapiens
  misc_RNA (1)...(19): siRNA sense strand
ugaggaacagcaacaauuc

SEQ ID NO: 440631 - RNA, 19 nt, Homo sapiens
  misc_RNA (1)...(19): siRNA sense strand
caucgacuuugacaguuuc

SEQ ID NO: 440632 - RNA, 19 nt, Homo sapiens
  misc_RNA (1)...(19): siRNA sense strand
gauuccaccucaacaacca

SEQ ID NO: 440633 - RNA, 19 nt, Homo sapiens
  misc_RNA (1)...(19): siRNA sense strand
uucaucugcugcuucguua

SEQ ID NO: 440634 - RNA, 19 nt, Homo sapiens
  misc_RNA (1)...(19): siRNA sense strand
ucaaacacuaugacacaga

SEQ ID NO: 440635 - RNA, 19 nt, Homo sapiens
  misc_RNA (1)...(19): siRNA sense strand
aaacacaaggaccugaaga

SEQ ID NO: 440636 - RNA, 19 nt, Homo sapiens
  misc_RNA (1)...(19): siRNA sense strand
uaucaucaagcucaacguu

SEQ ID NO: 440637 - RNA, 19 nt, Homo sapiens
  misc_RNA (1)...(19): siRNA sense strand
guccugccguagcaugauu

SEQ ID NO: 440638 - RNA, 19 nt, Homo sapiens
  misc_RNA (1)...(19): siRNA sense strand
cagacaaacacaugaacau

SEQ ID NO: 440639 - RNA, 19 nt, Homo sapiens
  misc_RNA (1)...(19): siRNA sense strand
gcaggauuccaccucaaca

SEQ ID NO: 440640 - RNA, 19 nt, Homo sapiens
  misc_RNA (1)...(19): siRNA sense strand
gaccaguccggcaccauca

SEQ ID NO: 440641 - RNA, 19 nt, Homo sapiens
  misc_RNA (1)...(19): siRNA sense strand
caacaaccagcucuaugac

SEQ ID NO: 440642 - RNA, 19 nt, Homo sapiens
  misc_RNA (1)...(19): siRNA sense strand
ucaggaaagugaggaacag

SEQ ID NO: 440643 - RNA, 19 nt, Homo sapiens
  misc_RNA (1)...(19): siRNA sense strand
gacaaggauggagauggua

SEQ ID NO: 440644 - RNA, 19 nt, Homo sapiens
  misc_RNA (1)...(19): siRNA sense strand
cgacuuugacaguuucauc

SEQ ID NO: 440645 - RNA, 19 nt, Homo sapiens
  misc_RNA (1)...(19): siRNA sense strand
aaccagcucuaugacauca

SEQ ID NO: 440646 - RNA, 19 nt, Homo sapiens
  misc_RNA (1)...(19): siRNA sense strand
agucaacgacgcaggauuc

SEQ ID NO: 440647 - RNA, 19 nt, Homo sapiens
  misc_RNA (1)...(19): siRNA sense strand
uuucaaacacuaugacaca

SEQ ID NO: 440648 - RNA, 19 nt, Homo sapiens
  misc_RNA (1)...(19): siRNA sense strand
acaaacacaaggaccugaa

SEQ ID NO: 440649 - RNA, 19 nt, Homo sapiens
  misc_RNA (1)...(19): siRNA sense strand
caacaauuccggaacauuu

SEQ ID NO: 440650 - RNA, 19 nt, Homo sapiens
  misc_RNA (1)...(19): siRNA sense strand
gaacaucgacuuugacagu

SEQ ID NO: 440651 - RNA, 19 nt, Homo sapiens
  misc_RNA (1)...(19): siRNA sense strand
cagaugagcucaagaaggu

SEQ ID NO: 440652 - RNA, 19 nt, Homo sapiens
  misc_RNA (1)...(19): siRNA sense strand
acaaggaccugaagacaca

SEQ ID NO: 440653 - RNA, 19 nt, Homo sapiens
  misc_RNA (1)...(19): siRNA sense strand
gcucugaucaggaaaguga

SEQ ID NO: 440654 - RNA, 19 nt, Homo sapiens
  misc_RNA (1)...(19): siRNA sense strand
ucaacaaccagcucuauga

SEQ ID NO: 440655 - RNA, 19 nt, Homo sapiens
  misc_RNA (1)...(19): siRNA sense strand
ggcugcagcucaccaugua

SEQ ID NO: 440656 - RNA, 19 nt, Homo sapiens
  misc_RNA (1)...(19): siRNA sense strand
ugacaaggauggagauggu

SEQ ID NO: 440657 - RNA, 19 nt, Homo sapiens
  misc_RNA (1)...(19): siRNA sense strand
acaugaacaucgacuuuga

SEQ ID NO: 440658 - RNA, 19 nt, Homo sapiens
  misc_RNA (1)...(19): siRNA sense strand
uggcagcucugaucaggaa

SEQ ID NO: 440659 - RNA, 19 nt, Homo sapiens
  misc_RNA (1)...(19): siRNA sense strand
cagcaacaauuccggaaca

SEQ ID NO: 440660 - RNA, 19 nt, Homo sapiens
  misc_RNA (1)...(19): siRNA sense strand
gcagauagcaggagaugac

SEQ ID NO: 440661 - RNA, 19 nt, Homo sapiens
  misc_RNA (1)...(19): siRNA sense strand
uaacacagucgugaacaaa

SEQ ID NO: 440662 - RNA, 19 nt, Homo sapiens
  misc_RNA (1)...(19): siRNA sense strand
gauuaaggccuggcagaaa

SEQ ID NO: 440663 - RNA, 19 nt, Homo sapiens
  misc_RNA (1)...(19): siRNA sense strand
gugaggaacagcaacaauu

SEQ ID NO: 440664 - RNA, 19 nt, Homo sapiens
  misc_RNA (1)...(19): siRNA sense strand
acaaacacaugaacaucga

SEQ ID NO: 440665 - RNA, 19 nt, Homo sapiens
  misc_RNA (1)...(19): siRNA sense strand
caccaccucuggaacaaga

SEQ ID NO: 440666 - RNA, 19 nt, Homo sapiens
  misc_RNA (1)...(19): siRNA sense strand
gagggcauguucagagcuu

SEQ ID NO: 440667 - RNA, 19 nt, Homo sapiens
  misc_RNA (1)...(19): siRNA sense strand
ggaaagugaggaacagcaa

SEQ ID NO: 440668 - RNA, 19 nt, Homo sapiens
  misc_RNA (1)...(19): siRNA sense strand
gauagcaggagaugacaug

SEQ ID NO: 440669 - RNA, 19 nt, Homo sapiens
  misc_RNA (1)...(19): siRNA sense strand
ugauugcgcucauggauac

SEQ ID NO: 440670 - RNA, 19 nt, Homo sapiens
  misc_RNA (1)...(19): siRNA sense strand
acacaugaacaucgacuuu

SEQ ID NO: 440671 - RNA, 19 nt, Homo sapiens
  misc_RNA (1)...(19): siRNA sense strand
acacagucgugaacaaaca

SEQ ID NO: 440672 - RNA, 19 nt, Homo sapiens
  misc_RNA (1)...(19): siRNA sense strand
guacgcagacaaacacaug

SEQ ID NO: 440673 - RNA, 19 nt, Homo sapiens
  misc_RNA (1)...(19): siRNA sense strand
gugcagaugagcucaagaa

SEQ ID NO: 440674 - RNA, 19 nt, Homo sapiens
  misc_RNA (1)...(19): siRNA sense strand
acaaccagcucuaugacau

SEQ ID NO: 440675 - RNA, 19 nt, Homo sapiens
  misc_RNA (1)...(19): siRNA sense strand
gcaacaauuccggaacauu

SEQ ID NO: 440676 - RNA, 19 nt, Homo sapiens
  misc_RNA (1)...(19): siRNA sense strand
guucagagcuuuucaugca

SEQ ID NO: 440677 - RNA, 19 nt, Homo sapiens
  misc_RNA (1)...(19): siRNA sense strand
gcagacaaacacaugaaca

SEQ ID NO: 440678 - RNA, 19 nt, Homo sapiens
  misc_RNA (1)...(19): siRNA sense strand
gaugcgaaaugcagucaac

SEQ ID NO: 440679 - RNA, 19 nt, Homo sapiens
  misc_RNA (1)...(19): siRNA sense strand
gaagacacacggguucaca

SEQ ID NO: 440680 - RNA, 19 nt, Homo sapiens
  misc_RNA (1)...(19): siRNA sense strand
ucaucaagcucaacguucu

SEQ ID NO: 440681 - RNA, 19 nt, Homo sapiens
  misc_RNA (1)...(19): siRNA sense strand
acaucgacuuugacaguuu

SEQ ID NO: 440682 - RNA, 19 nt, Homo sapiens
  misc_RNA (1)...(19): siRNA sense strand
gcuacgagaugcgaaaugc

SEQ ID NO: 440683 - RNA, 19 nt, Homo sapiens
  misc_RNA (1)...(19): siRNA sense strand
uuaacacagucgugaacaa

SEQ ID NO: 440684 - RNA, 19 nt, Homo sapiens
  misc_RNA (1)...(19): siRNA sense strand
ugaggaacagcaacaauuc

SEQ ID NO: 440685 - RNA, 19 nt, Homo sapiens
  misc_RNA (1)...(19): siRNA sense strand
caucgacuuugacaguuuc

SEQ ID NO: 440686 - RNA, 19 nt, Homo sapiens
  misc_RNA (1)...(19): siRNA sense strand
gauuccaccucaacaacca

SEQ ID NO: 440687 - RNA, 19 nt, Homo sapiens
  misc_RNA (1)...(19): siRNA sense strand
uucaucugcugcuucguua

SEQ ID NO: 440688 - RNA, 19 nt, Homo sapiens
  misc_RNA (1)...(19): siRNA sense strand
ucaaacacuaugacacaga

SEQ ID NO: 440689 - RNA, 19 nt, Homo sapiens
  misc_RNA (1)...(19): siRNA sense strand
aaacacaaggaccugaaga

SEQ ID NO: 440690 - RNA, 19 nt, Homo sapiens
  misc_RNA (1)...(19): siRNA sense strand
uaucaucaagcucaacguu

SEQ ID NO: 440691 - RNA, 19 nt, Homo sapiens
  misc_RNA (1)...(19): siRNA sense strand
guccugccguagcaugauu

SEQ ID NO: 440692 - RNA, 19 nt, Homo sapiens
  misc_RNA (1)...(19): siRNA sense strand
cagacaaacacaugaacau

SEQ ID NO: 440693 - RNA, 19 nt, Homo sapiens
  misc_RNA (1)...(19): siRNA sense strand
gcaggauuccaccucaaca

SEQ ID NO: 440694 - RNA, 19 nt, Homo sapiens
  misc_RNA (1)...(19): siRNA sense strand
gaccaguccggcaccauca

SEQ ID NO: 440695 - RNA, 19 nt, Homo sapiens
  misc_RNA (1)...(19): siRNA sense strand
caacaaccagcucuaugac

SEQ ID NO: 440696 - RNA, 19 nt, Homo sapiens
  misc_RNA (1)...(19): siRNA sense strand
ucaggaaagugaggaacag

SEQ ID NO: 440697 - RNA, 19 nt, Homo sapiens
  misc_RNA (1)...(19): siRNA sense strand
gacaaggauggagauggua

SEQ ID NO: 440698 - RNA, 19 nt, Homo sapiens
  misc_RNA (1)...(19): siRNA sense strand
cgacuuugacaguuucauc

SEQ ID NO: 440699 - RNA, 19 nt, Homo sapiens
  misc_RNA (1)...(19): siRNA sense strand
aaccagcucuaugacauca

SEQ ID NO: 440700 - RNA, 19 nt, Homo sapiens
  misc_RNA (1)...(19): siRNA sense strand
agucaacgacgcaggauuc

SEQ ID NO: 440701 - RNA, 19 nt, Homo sapiens
  misc_RNA (1)...(19): siRNA sense strand
uuucaaacacuaugacaca

SEQ ID NO: 440702 - RNA, 19 nt, Homo sapiens
  misc_RNA (1)...(19): siRNA sense strand
acaaacacaaggaccugaa

SEQ ID NO: 440703 - RNA, 19 nt, Homo sapiens
  misc_RNA (1)...(19): siRNA sense strand
caacaauuccggaacauuu

SEQ ID NO: 440704 - RNA, 19 nt, Homo sapiens
  misc_RNA (1)...(19): siRNA sense strand
gaacaucgacuuugacagu

SEQ ID NO: 440705 - RNA, 19 nt, Homo sapiens
  misc_RNA (1)...(19): siRNA sense strand
cagaugagcucaagaaggu

SEQ ID NO: 440706 - RNA, 19 nt, Homo sapiens
  misc_RNA (1)...(19): siRNA sense strand
acaaggaccugaagacaca

SEQ ID NO: 440707 - RNA, 19 nt, Homo sapiens
  misc_RNA (1)...(19): siRNA sense strand
gcucugaucaggaaaguga

SEQ ID NO: 440708 - RNA, 19 nt, Homo sapiens
  misc_RNA (1)...(19): siRNA sense strand
ucaacaaccagcucuauga

SEQ ID NO: 440709 - RNA, 19 nt, Homo sapiens
  misc_RNA (1)...(19): siRNA sense strand
ggcugcagcucaccaugua

SEQ ID NO: 440710 - RNA, 19 nt, Homo sapiens
  misc_RNA (1)...(19): siRNA sense strand
ugacaaggauggagauggu

SEQ ID NO: 440711 - RNA, 19 nt, Homo sapiens
  misc_RNA (1)...(19): siRNA sense strand
acaugaacaucgacuuuga

SEQ ID NO: 440712 - RNA, 19 nt, Homo sapiens
  misc_RNA (1)...(19): siRNA sense strand
uggcagcucugaucaggaa

SEQ ID NO: 440713 - RNA, 19 nt, Homo sapiens
  misc_RNA (1)...(19): siRNA sense strand
cagcaacaauuccggaaca

SEQ ID NO: 440714 - RNA, 19 nt, Homo sapiens
  misc_RNA (1)...(19): siRNA sense strand
gcagauagcaggagaugac

SEQ ID NO: 440715 - RNA, 19 nt, Homo sapiens
  misc_RNA (1)...(19): siRNA sense strand
uaacacagucgugaacaaa

SEQ ID NO: 440716 - RNA, 19 nt, Homo sapiens
  misc_RNA (1)...(19): siRNA sense strand
gauuaaggccuggcagaaa

SEQ ID NO: 440717 - RNA, 19 nt, Homo sapiens
  misc_RNA (1)...(19): siRNA sense strand
gugaggaacagcaacaauu

SEQ ID NO: 440718 - RNA, 19 nt, Homo sapiens
  misc_RNA (1)...(19): siRNA sense strand
acaaacacaugaacaucga

SEQ ID NO: 440719 - RNA, 19 nt, Homo sapiens
  misc_RNA (1)...(19): siRNA sense strand
caccaccucuggaacaaga

SEQ ID NO: 440720 - RNA, 19 nt, Homo sapiens
  misc_RNA (1)...(19): siRNA sense strand
gagggcauguucagagcuu

SEQ ID NO: 440721 - RNA, 19 nt, Homo sapiens
  misc_RNA (1)...(19): siRNA sense strand
ggaaagugaggaacagcaa

SEQ ID NO: 440722 - RNA, 19 nt, Homo sapiens
  misc_RNA (1)...(19): siRNA sense strand
gauagcaggagaugacaug

SEQ ID NO: 440723 - RNA, 19 nt, Homo sapiens
  misc_RNA (1)...(19): siRNA sense strand
ugauugcgcucauggauac

SEQ ID NO: 440724 - RNA, 19 nt, Homo sapiens
  misc_RNA (1)...(19): siRNA sense strand
acacaugaacaucgacuuu

SEQ ID NO: 440725 - RNA, 19 nt, Homo sapiens
  misc_RNA (1)...(19): siRNA sense strand
acacagucgugaacaaaca

SEQ ID NO: 440726 - RNA, 19 nt, Homo sapiens
  misc_RNA (1)...(19): siRNA sense strand
guacgcagacaaacacaug

SEQ ID NO: 440727 - RNA, 19 nt, Homo sapiens
  misc_RNA (1)...(19): siRNA sense strand
gugcagaugagcucaagaa

SEQ ID NO: 440728 - RNA, 19 nt, Homo sapiens
  misc_RNA (1)...(19): siRNA sense strand
acaaccagcucuaugacau

SEQ ID NO: 440729 - RNA, 19 nt, Homo sapiens
  misc_RNA (1)...(19): siRNA sense strand
gcaacaauuccggaacauu

SEQ ID NO: 440730 - RNA, 19 nt, Homo sapiens
  misc_RNA (1)...(19): siRNA sense strand
guucagagcuuuucaugca

SEQ ID NO: 440731 - RNA, 19 nt, Homo sapiens
  misc_RNA (1)...(19): siRNA sense strand
gcagacaaacacaugaaca

SEQ ID NO: 440732 - RNA, 19 nt, Homo sapiens
  misc_RNA (1)...(19): siRNA sense strand
gaugcgaaaugcagucaac

SEQ ID NO: 440733 - RNA, 19 nt, Homo sapiens
  misc_RNA (1)...(19): siRNA sense strand
gaagacacacggguucaca

SEQ ID NO: 440734 - RNA, 19 nt, Homo sapiens
  misc_RNA (1)...(19): siRNA sense strand
ucaucaagcucaacguucu

SEQ ID NO: 440735 - RNA, 19 nt, Homo sapiens
  misc_RNA (1)...(19): siRNA sense strand
acaucgacuuugacaguuu

SEQ ID NO: 440736 - RNA, 19 nt, Homo sapiens
  misc_RNA (1)...(19): siRNA sense strand
gcuacgagaugcgaaaugc

SEQ ID NO: 440737 - RNA, 19 nt, Homo sapiens
  misc_RNA (1)...(19): siRNA sense strand
uuaacacagucgugaacaa

SEQ ID NO: 440738 - RNA, 19 nt, Homo sapiens
  misc_RNA (1)...(19): siRNA sense strand
ugaggaacagcaacaauuc

SEQ ID NO: 440739 - RNA, 19 nt, Homo sapiens
  misc_RNA (1)...(19): siRNA sense strand
caucgacuuugacaguuuc

SEQ ID NO: 440740 - RNA, 19 nt, Homo sapiens
  misc_RNA (1)...(19): siRNA sense strand
gauuccaccucaacaacca

SEQ ID NO: 440741 - RNA, 19 nt, Homo sapiens
  misc_RNA (1)...(19): siRNA sense strand
uucaucugcugcuucguua

SEQ ID NO: 440742 - RNA, 19 nt, Homo sapiens
  misc_RNA (1)...(19): siRNA sense strand
ucaaacacuaugacacaga

SEQ ID NO: 440743 - RNA, 19 nt, Homo sapiens
  misc_RNA (1)...(19): siRNA sense strand
aaacacaaggaccugaaga

SEQ ID NO: 440744 - RNA, 19 nt, Homo sapiens
  misc_RNA (1)...(19): siRNA sense strand
uaucaucaagcucaacguu

SEQ ID NO: 440745 - RNA, 19 nt, Homo sapiens
  misc_RNA (1)...(19): siRNA sense strand
guccugccguagcaugauu

SEQ ID NO: 440746 - RNA, 19 nt, Homo sapiens
  misc_RNA (1)...(19): siRNA sense strand
cagacaaacacaugaacau

SEQ ID NO: 440747 - RNA, 19 nt, Homo sapiens
  misc_RNA (1)...(19): siRNA sense strand
gcaggauuccaccucaaca

SEQ ID NO: 440748 - RNA, 19 nt, Homo sapiens
  misc_RNA (1)...(19): siRNA sense strand
gaccaguccggcaccauca

SEQ ID NO: 440749 - RNA, 19 nt, Homo sapiens
  misc_RNA (1)...(19): siRNA sense strand
caacaaccagcucuaugac

SEQ ID NO: 440750 - RNA, 19 nt, Homo sapiens
  misc_RNA (1)...(19): siRNA sense strand
ucaggaaagugaggaacag

SEQ ID NO: 440751 - RNA, 19 nt, Homo sapiens
  misc_RNA (1)...(19): siRNA sense strand
gacaaggauggagauggua

SEQ ID NO: 440752 - RNA, 19 nt, Homo sapiens
  misc_RNA (1)...(19): siRNA sense strand
cgacuuugacaguuucauc

SEQ ID NO: 440753 - RNA, 19 nt, Homo sapiens
  misc_RNA (1)...(19): siRNA sense strand
aaccagcucuaugacauca

SEQ ID NO: 440754 - RNA, 19 nt, Homo sapiens
  misc_RNA (1)...(19): siRNA sense strand
agucaacgacgcaggauuc

SEQ ID NO: 440755 - RNA, 19 nt, Homo sapiens
  misc_RNA (1)...(19): siRNA sense strand
uuucaaacacuaugacaca

SEQ ID NO: 440756 - RNA, 19 nt, Homo sapiens
  misc_RNA (1)...(19): siRNA sense strand
acaaacacaaggaccugaa

SEQ ID NO: 440757 - RNA, 19 nt, Homo sapiens
  misc_RNA (1)...(19): siRNA sense strand
gaacaucgacuuugacagu

SEQ ID NO: 440758 - RNA, 19 nt, Homo sapiens
  misc_RNA (1)...(19): siRNA sense strand
cagaugagcucaagaaggu

SEQ ID NO: 440759 - RNA, 19 nt, Homo sapiens
  misc_RNA (1)...(19): siRNA sense strand
acaaggaccugaagacaca

SEQ ID NO: 440760 - RNA, 19 nt, Homo sapiens
  misc_RNA (1)...(19): siRNA sense strand
ucaacaaccagcucuauga

SEQ ID NO: 440761 - RNA, 19 nt, Homo sapiens
  misc_RNA (1)...(19): siRNA sense strand
ggcugcagcucaccaugua

SEQ ID NO: 440762 - RNA, 19 nt, Homo sapiens
  misc_RNA (1)...(19): siRNA sense strand
ugacaaggauggagauggu

SEQ ID NO: 440763 - RNA, 19 nt, Homo sapiens
  misc_RNA (1)...(19): siRNA sense strand
acaugaacaucgacuuuga

SEQ ID NO: 440764 - RNA, 19 nt, Homo sapiens
  misc_RNA (1)...(19): siRNA sense strand
uaacacagucgugaacaaa

SEQ ID NO: 440765 - RNA, 19 nt, Homo sapiens
  misc_RNA (1)...(19): siRNA sense strand
gauuaaggccuggcagaaa

SEQ ID NO: 440766 - RNA, 19 nt, Homo sapiens
  misc_RNA (1)...(19): siRNA sense strand
acaaacacaugaacaucga

SEQ ID NO: 440767 - RNA, 19 nt, Homo sapiens
  misc_RNA (1)...(19): siRNA sense strand
caccaccucuggaacaaga

SEQ ID NO: 440768 - RNA, 19 nt, Homo sapiens
  misc_RNA (1)...(19): siRNA sense strand
gagggcauguucagagcuu

SEQ ID NO: 440769 - RNA, 19 nt, Homo sapiens
  misc_RNA (1)...(19): siRNA sense strand
ugauugcgcucauggauac

SEQ ID NO: 440770 - RNA, 19 nt, Homo sapiens
  misc_RNA (1)...(19): siRNA sense strand
acacaugaacaucgacuuu

SEQ ID NO: 440771 - RNA, 19 nt, Homo sapiens
  misc_RNA (1)...(19): siRNA sense strand
acacagucgugaacaaaca

SEQ ID NO: 440772 - RNA, 19 nt, Homo sapiens
  misc_RNA (1)...(19): siRNA sense strand
guacgcagacaaacacaug

SEQ ID NO: 440773 - RNA, 19 nt, Homo sapiens
  misc_RNA (1)...(19): siRNA sense strand
gugcagaugagcucaagaa

SEQ ID NO: 440774 - RNA, 19 nt, Homo sapiens
  misc_RNA (1)...(19): siRNA sense strand
acaaccagcucuaugacau

SEQ ID NO: 440775 - RNA, 19 nt, Homo sapiens
  misc_RNA (1)...(19): siRNA sense strand
guucagagcuuuucaugca

SEQ ID NO: 440776 - RNA, 19 nt, Homo sapiens
  misc_RNA (1)...(19): siRNA sense strand
gcagacaaacacaugaaca

SEQ ID NO: 440777 - RNA, 19 nt, Homo sapiens
  misc_RNA (1)...(19): siRNA sense strand
gaugcgaaaugcagucaac

SEQ ID NO: 440778 - RNA, 19 nt, Homo sapiens
  misc_RNA (1)...(19): siRNA sense strand
gaagacacacggguucaca

SEQ ID NO: 440779 - RNA, 19 nt, Homo sapiens
  misc_RNA (1)...(19): siRNA sense strand
ucaucaagcucaacguucu

SEQ ID NO: 440780 - RNA, 19 nt, Homo sapiens
  misc_RNA (1)...(19): siRNA sense strand
acaucgacuuugacaguuu

SEQ ID NO: 440781 - RNA, 19 nt, Homo sapiens
  misc_RNA (1)...(19): siRNA sense strand
gcuacgagaugcgaaaugc

SEQ ID NO: 440782 - RNA, 19 nt, Homo sapiens
  misc_RNA (1)...(19): siRNA sense strand
uuaacacagucgugaacaa

SEQ ID NO: 440783 - RNA, 19 nt, Homo sapiens
  misc_RNA (1)...(19): siRNA sense strand
caucgacuuugacaguuuc

SEQ ID NO: 440784 - RNA, 19 nt, Homo sapiens
  misc_RNA (1)...(19): siRNA sense strand
gauuccaccucaacaacca

SEQ ID NO: 440785 - RNA, 19 nt, Homo sapiens
  misc_RNA (1)...(19): siRNA sense strand
uucaucugcugcuucguua

SEQ ID NO: 440786 - RNA, 19 nt, Homo sapiens
  misc_RNA (1)...(19): siRNA sense strand
ucaaacacuaugacacaga

SEQ ID NO: 440787 - RNA, 19 nt, Homo sapiens
  misc_RNA (1)...(19): siRNA sense strand
aaacacaaggaccugaaga

SEQ ID NO: 440788 - RNA, 19 nt, Homo sapiens
  misc_RNA (1)...(19): siRNA sense strand
uaucaucaagcucaacguu

SEQ ID NO: 440789 - RNA, 19 nt, Homo sapiens
  misc_RNA (1)...(19): siRNA sense strand
guccugccguagcaugauu

SEQ ID NO: 440790 - RNA, 19 nt, Homo sapiens
  misc_RNA (1)...(19): siRNA sense strand
cagacaaacacaugaacau

SEQ ID NO: 440791 - RNA, 19 nt, Homo sapiens
  misc_RNA (1)...(19): siRNA sense strand
gcaggauuccaccucaaca

SEQ ID NO: 440792 - RNA, 19 nt, Homo sapiens
  misc_RNA (1)...(19): siRNA sense strand
gaccaguccggcaccauca

SEQ ID NO: 440793 - RNA, 19 nt, Homo sapiens
  misc_RNA (1)...(19): siRNA sense strand
caacaaccagcucuaugac

SEQ ID NO: 440794 - RNA, 19 nt, Homo sapiens
  misc_RNA (1)...(19): siRNA sense strand
uuucaaacacuaugacaca

SEQ ID NO: 440795 - RNA, 19 nt, Homo sapiens
  misc_RNA (1)...(19): siRNA sense strand
gacaaggauggagauggua

SEQ ID NO: 440796 - RNA, 19 nt, Homo sapiens
  misc_RNA (1)...(19): siRNA sense strand
cgacuuugacaguuucauc

SEQ ID NO: 440797 - RNA, 19 nt, Homo sapiens
  misc_RNA (1)...(19): siRNA sense strand
acaaacacaaggaccugaa

SEQ ID NO: 440798 - RNA, 19 nt, Homo sapiens
  misc_RNA (1)...(19): siRNA sense strand
aaccagcucuaugacauca

SEQ ID NO: 440799 - RNA, 19 nt, Homo sapiens
  misc_RNA (1)...(19): siRNA sense strand
agucaacgacgcaggauuc

SEQ ID NO: 440800 - RNA, 19 nt, Homo sapiens
  misc_RNA (1)...(19): siRNA sense strand
gaacaucgacuuugacagu

SEQ ID NO: 440801 - RNA, 19 nt, Homo sapiens
  misc_RNA (1)...(19): siRNA sense strand
cagaugagcucaagaaggu

SEQ ID NO: 440802 - RNA, 19 nt, Homo sapiens
  misc_RNA (1)...(19): siRNA sense strand
acaaggaccugaagacaca

SEQ ID NO: 440803 - RNA, 19 nt, Homo sapiens
  misc_RNA (1)...(19): siRNA sense strand
ucaacaaccagcucuauga

SEQ ID NO: 440804 - RNA, 19 nt, Homo sapiens
  misc_RNA (1)...(19): siRNA sense strand
ggcugcagcucaccaugua

SEQ ID NO: 440805 - RNA, 19 nt, Homo sapiens
  misc_RNA (1)...(19): siRNA sense strand
ugacaaggauggagauggu

SEQ ID NO: 440806 - RNA, 19 nt, Homo sapiens
  misc_RNA (1)...(19): siRNA sense strand
acaugaacaucgacuuuga

SEQ ID NO: 440807 - RNA, 19 nt, Homo sapiens
  misc_RNA (1)...(19): siRNA sense strand
uaacacagucgugaacaaa

SEQ ID NO: 440808 - RNA, 19 nt, Homo sapiens
  misc_RNA (1)...(19): siRNA sense strand
gauuaaggccuggcagaaa

SEQ ID NO: 440809 - RNA, 19 nt, Homo sapiens
  misc_RNA (1)...(19): siRNA sense strand
acaaacacaugaacaucga

SEQ ID NO: 440810 - RNA, 19 nt, Homo sapiens
  misc_RNA (1)...(19): siRNA sense strand
caccaccucuggaacaaga

SEQ ID NO: 440811 - RNA, 19 nt, Homo sapiens
  misc_RNA (1)...(19): siRNA sense strand
gagggcauguucagagcuu

SEQ ID NO: 440812 - RNA, 19 nt, Homo sapiens
  misc_RNA (1)...(19): siRNA sense strand
ugauugcgcucauggauac

SEQ ID NO: 440813 - RNA, 19 nt, Homo sapiens
  misc_RNA (1)...(19): siRNA sense strand
acacaugaacaucgacuuu

SEQ ID NO: 440814 - RNA, 19 nt, Homo sapiens
  misc_RNA (1)...(19): siRNA sense strand
acacagucgugaacaaaca

SEQ ID NO: 440815 - RNA, 19 nt, Homo sapiens
  misc_RNA (1)...(19): siRNA sense strand
guacgcagacaaacacaug

SEQ ID NO: 440816 - RNA, 19 nt, Homo sapiens
  misc_RNA (1)...(19): siRNA sense strand
gugcagaugagcucaagaa

SEQ ID NO: 440817 - RNA, 19 nt, Homo sapiens
  misc_RNA (1)...(19): siRNA sense strand
acaaccagcucuaugacau

SEQ ID NO: 440818 - RNA, 19 nt, Homo sapiens
  misc_RNA (1)...(19): siRNA sense strand
guucagagcuuuucaugca

SEQ ID NO: 440819 - RNA, 19 nt, Homo sapiens
  misc_RNA (1)...(19): siRNA sense strand
gcagacaaacacaugaaca

SEQ ID NO: 440820 - RNA, 19 nt, Homo sapiens
  misc_RNA (1)...(19): siRNA sense strand
gaugcgaaaugcagucaac

SEQ ID NO: 440821 - RNA, 19 nt, Homo sapiens
  misc_RNA (1)...(19): siRNA sense strand
gaagacacacggguucaca

SEQ ID NO: 440822 - RNA, 19 nt, Homo sapiens
  misc_RNA (1)...(19): siRNA sense strand
ucaucaagcucaacguucu

SEQ ID NO: 440823 - RNA, 19 nt, Homo sapiens
  misc_RNA (1)...(19): siRNA sense strand
acaucgacuuugacaguuu

SEQ ID NO: 440824 - RNA, 19 nt, Homo sapiens
  misc_RNA (1)...(19): siRNA sense strand
gcuacgagaugcgaaaugc

SEQ ID NO: 440825 - RNA, 19 nt, Homo sapiens
  misc_RNA (1)...(19): siRNA sense strand
uuaacacagucgugaacaa

SEQ ID NO: 440826 - RNA, 19 nt, Homo sapiens
  misc_RNA (1)...(19): siRNA sense strand
caucgacuuugacaguuuc

SEQ ID NO: 440827 - RNA, 19 nt, Homo sapiens
  misc_RNA (1)...(19): siRNA sense strand
gauuccaccucaacaacca

SEQ ID NO: 440828 - RNA, 19 nt, Homo sapiens
  misc_RNA (1)...(19): siRNA sense strand
uucaucugcugcuucguua

SEQ ID NO: 440829 - RNA, 19 nt, Homo sapiens
  misc_RNA (1)...(19): siRNA sense strand
ucaaacacuaugacacaga

SEQ ID NO: 440830 - RNA, 19 nt, Homo sapiens
  misc_RNA (1)...(19): siRNA sense strand
aaacacaaggaccugaaga

SEQ ID NO: 440831 - RNA, 19 nt, Homo sapiens
  misc_RNA (1)...(19): siRNA sense strand
uaucaucaagcucaacguu

SEQ ID NO: 440832 - RNA, 19 nt, Homo sapiens
  misc_RNA (1)...(19): siRNA sense strand
guccugccguagcaugauu

SEQ ID NO: 440833 - RNA, 19 nt, Homo sapiens
  misc_RNA (1)...(19): siRNA sense strand
cagacaaacacaugaacau

SEQ ID NO: 440834 - RNA, 19 nt, Homo sapiens
  misc_RNA (1)...(19): siRNA sense strand
gcaggauuccaccucaaca

SEQ ID NO: 440835 - RNA, 19 nt, Homo sapiens
  misc_RNA (1)...(19): siRNA sense strand
gaccaguccggcaccauca

SEQ ID NO: 440836 - RNA, 19 nt, Homo sapiens
  misc_RNA (1)...(19): siRNA sense strand
caacaaccagcucuaugac

SEQ ID NO: 440837 - RNA, 19 nt, Homo sapiens
  misc_RNA (1)...(19): siRNA sense strand
uuucaaacacuaugacaca

SEQ ID NO: 440838 - RNA, 19 nt, Homo sapiens
  misc_RNA (1)...(19): siRNA sense strand
gacaaggauggagauggua

SEQ ID NO: 440839 - RNA, 19 nt, Homo sapiens
  misc_RNA (1)...(19): siRNA sense strand
cgacuuugacaguuucauc

SEQ ID NO: 440840 - RNA, 19 nt, Homo sapiens
  misc_RNA (1)...(19): siRNA sense strand
acaaacacaaggaccugaa

SEQ ID NO: 440841 - RNA, 19 nt, Homo sapiens
  misc_RNA (1)...(19): siRNA sense strand
aaccagcucuaugacauca

SEQ ID NO: 440842 - RNA, 19 nt, Homo sapiens
  misc_RNA (1)...(19): siRNA sense strand
agucaacgacgcaggauuc

SEQ ID NO: 440843 - RNA, 19 nt, Homo sapiens
  misc_RNA (1)...(19): siRNA sense strand
ggacagugcucacaucaaa

SEQ ID NO: 440844 - RNA, 19 nt, Homo sapiens
  misc_RNA (1)...(19): siRNA sense strand
caacaagacuacaaugcuu

SEQ ID NO: 440845 - RNA, 19 nt, Homo sapiens
  misc_RNA (1)...(19): siRNA sense strand
gggugaagauucucuacaa

SEQ ID NO: 440846 - RNA, 19 nt, Homo sapiens
  misc_RNA (1)...(19): siRNA sense strand
ggugaagauucucuacaaa

SEQ ID NO: 440847 - RNA, 19 nt, Homo sapiens
  misc_RNA (1)...(19): siRNA sense strand
gcagugggaugagcuacuu

SEQ ID NO: 440848 - RNA, 19 nt, Homo sapiens
  misc_RNA (1)...(19): siRNA sense strand
ccucuaagcugcaauucau

SEQ ID NO: 440849 - RNA, 19 nt, Homo sapiens
  misc_RNA (1)...(19): siRNA sense strand
gaauacaacaagacuacaa

SEQ ID NO: 440850 - RNA, 19 nt, Homo sapiens
  misc_RNA (1)...(19): siRNA sense strand
gggagagggugaagauucu

SEQ ID NO: 440851 - RNA, 19 nt, Homo sapiens
  misc_RNA (1)...(19): siRNA sense strand
uagcagaggagcaguuuau

SEQ ID NO: 440852 - RNA, 19 nt, Homo sapiens
  misc_RNA (1)...(19): siRNA sense strand
ggaccaguguguggaaauc

SEQ ID NO: 440853 - RNA, 19 nt, Homo sapiens
  misc_RNA (1)...(19): siRNA sense strand
gaagccagcagaggaguga

SEQ ID NO: 440854 - RNA, 19 nt, Homo sapiens
  misc_RNA (1)...(19): siRNA sense strand
gcuacaggcccgaguggaa

SEQ ID NO: 440855 - RNA, 19 nt, Homo sapiens
  misc_RNA (1)...(19): siRNA sense strand
caaagccguuccugagcau

SEQ ID NO: 440856 - RNA, 19 nt, Homo sapiens
  misc_RNA (1)...(19): siRNA sense strand
ucaaggugcagguggcuuu

SEQ ID NO: 440857 - RNA, 19 nt, Homo sapiens
  misc_RNA (1)...(19): siRNA sense strand
gcuggacagugcucacauc

SEQ ID NO: 440858 - RNA, 19 nt, Homo sapiens
  misc_RNA (1)...(19): siRNA sense strand
gaggaauacaacaagacua

SEQ ID NO: 440859 - RNA, 19 nt, Homo sapiens
  misc_RNA (1)...(19): siRNA sense strand
gaguacaucgaccgcauug

SEQ ID NO: 440860 - RNA, 19 nt, Homo sapiens
  misc_RNA (1)...(19): siRNA sense strand
ggaggaauacaacaagacu

SEQ ID NO: 440861 - RNA, 19 nt, Homo sapiens
  misc_RNA (1)...(19): siRNA sense strand
gcaagagggagagggugaa

SEQ ID NO: 440862 - RNA, 19 nt, Homo sapiens
  misc_RNA (1)...(19): siRNA sense strand
guuuauccuuucccagguu

SEQ ID NO: 440863 - RNA, 19 nt, Homo sapiens
  misc_RNA (1)...(19): siRNA sense strand
caucgaccgcauugccaua

SEQ ID NO: 440864 - RNA, 19 nt, Homo sapiens
  misc_RNA (1)...(19): siRNA sense strand
uggcccagauccacauuca

SEQ ID NO: 440865 - RNA, 19 nt, Homo sapiens
  misc_RNA (1)...(19): siRNA sense strand
ccauaccugaugccucuaa

SEQ ID NO: 440866 - RNA, 19 nt, Homo sapiens
  misc_RNA (1)...(19): siRNA sense strand
uaagcugcaauucauccua

SEQ ID NO: 440867 - RNA, 19 nt, Homo sapiens
  misc_RNA (1)...(19): siRNA sense strand
cuggaggaauacaacaaga

SEQ ID NO: 440868 - RNA, 19 nt, Homo sapiens
  misc_RNA (1)...(19): siRNA sense strand
agagggagagggugaagau

SEQ ID NO: 440869 - RNA, 19 nt, Homo sapiens
  misc_RNA (1)...(19): siRNA sense strand
caggaccaguguguggaaa

SEQ ID NO: 440870 - RNA, 19 nt, Homo sapiens
  misc_RNA (1)...(19): siRNA sense strand
gcagaggagcaguuuaucc

SEQ ID NO: 440871 - RNA, 19 nt, Homo sapiens
  misc_RNA (1)...(19): siRNA sense strand
ggacagugcucacaucaaa

SEQ ID NO: 440872 - RNA, 19 nt, Homo sapiens
  misc_RNA (1)...(19): siRNA sense strand
gggugaagauucucuacaa

SEQ ID NO: 440873 - RNA, 19 nt, Homo sapiens
  misc_RNA (1)...(19): siRNA sense strand
ggugaagauucucuacaaa

SEQ ID NO: 440874 - RNA, 19 nt, Homo sapiens
  misc_RNA (1)...(19): siRNA sense strand
ccucuaagcugcaauucau

SEQ ID NO: 440875 - RNA, 19 nt, Homo sapiens
  misc_RNA (1)...(19): siRNA sense strand
gggagagggugaagauucu

SEQ ID NO: 440876 - RNA, 19 nt, Homo sapiens
  misc_RNA (1)...(19): siRNA sense strand
uagcagaggagcaguuuau

SEQ ID NO: 440877 - RNA, 19 nt, Homo sapiens
  misc_RNA (1)...(19): siRNA sense strand
ggaccaguguguggaaauc

SEQ ID NO: 440878 - RNA, 19 nt, Homo sapiens
  misc_RNA (1)...(19): siRNA sense strand
gcuacaggcccgaguggaa

SEQ ID NO: 440879 - RNA, 19 nt, Homo sapiens
  misc_RNA (1)...(19): siRNA sense strand
caaagccguuccugagcau

SEQ ID NO: 440880 - RNA, 19 nt, Homo sapiens
  misc_RNA (1)...(19): siRNA sense strand
ucaaggugcagguggcuuu

SEQ ID NO: 440881 - RNA, 19 nt, Homo sapiens
  misc_RNA (1)...(19): siRNA sense strand
gcuggacagugcucacauc

SEQ ID NO: 440882 - RNA, 19 nt, Homo sapiens
  misc_RNA (1)...(19): siRNA sense strand
gaguacaucgaccgcauug

SEQ ID NO: 440883 - RNA, 19 nt, Homo sapiens
  misc_RNA (1)...(19): siRNA sense strand
gcaagagggagagggugaa

SEQ ID NO: 440884 - RNA, 19 nt, Homo sapiens
  misc_RNA (1)...(19): siRNA sense strand
guuuauccuuucccagguu

SEQ ID NO: 440885 - RNA, 19 nt, Homo sapiens
  misc_RNA (1)...(19): siRNA sense strand
caucgaccgcauugccaua

SEQ ID NO: 440886 - RNA, 19 nt, Homo sapiens
  misc_RNA (1)...(19): siRNA sense strand
uggcccagauccacauuca

SEQ ID NO: 440887 - RNA, 19 nt, Homo sapiens
  misc_RNA (1)...(19): siRNA sense strand
ccauaccugaugccucuaa

SEQ ID NO: 440888 - RNA, 19 nt, Homo sapiens
  misc_RNA (1)...(19): siRNA sense strand
uaagcugcaauucauccua

SEQ ID NO: 440889 - RNA, 19 nt, Homo sapiens
  misc_RNA (1)...(19): siRNA sense strand
agagggagagggugaagau

SEQ ID NO: 440890 - RNA, 19 nt, Homo sapiens
  misc_RNA (1)...(19): siRNA sense strand
caggaccaguguguggaaa

SEQ ID NO: 440891 - RNA, 19 nt, Homo sapiens
  misc_RNA (1)...(19): siRNA sense strand
gcagaggagcaguuuaucc

SEQ ID NO: 440892 - RNA, 19 nt, Homo sapiens
  misc_RNA (1)...(19): siRNA sense strand
guaucaaagucaccaaaua

SEQ ID NO: 440893 - RNA, 19 nt, Homo sapiens
  misc_RNA (1)...(19): siRNA sense strand
gaagaggacaacagccuuu

SEQ ID NO: 440894 - RNA, 19 nt, Homo sapiens
  misc_RNA (1)...(19): siRNA sense strand
agacaacgcugagcucaug

SEQ ID NO: 440895 - RNA, 19 nt, Homo sapiens
  misc_RNA (1)...(19): siRNA sense strand
gacaagagcaguuucaucu

SEQ ID NO: 440896 - RNA, 19 nt, Homo sapiens
  misc_RNA (1)...(19): siRNA sense strand
caucgugacugagcucauu

SEQ ID NO: 440897 - RNA, 19 nt, Homo sapiens
  misc_RNA (1)...(19): siRNA sense strand
gcacguccauuccgaagac

SEQ ID NO: 440898 - RNA, 19 nt, Homo sapiens
  misc_RNA (1)...(19): siRNA sense strand
caccaaauacuuucucuuc

SEQ ID NO: 440899 - RNA, 19 nt, Homo sapiens
  misc_RNA (1)...(19): siRNA sense strand
acgcugagcucaugaaucg

SEQ ID NO: 440900 - RNA, 19 nt, Homo sapiens
  misc_RNA (1)...(19): siRNA sense strand
ccaaauacuuucucuuccu

SEQ ID NO: 440901 - RNA, 19 nt, Homo sapiens
  misc_RNA (1)...(19): siRNA sense strand
caacuugaucuucuuuauc

SEQ ID NO: 440902 - RNA, 19 nt, Homo sapiens
  misc_RNA (1)...(19): siRNA sense strand
aggcguggcugcaggagaa

SEQ ID NO: 440903 - RNA, 19 nt, Homo sapiens
  misc_RNA (1)...(19): siRNA sense strand
ccugaggacuggccugugu

SEQ ID NO: 440904 - RNA, 19 nt, Homo sapiens
  misc_RNA (1)...(19): siRNA sense strand
uuucaucucuguccugcaa

SEQ ID NO: 440905 - RNA, 19 nt, Homo sapiens
  misc_RNA (1)...(19): siRNA sense strand
uaucaaagucaccaaauac

SEQ ID NO: 440906 - RNA, 19 nt, Homo sapiens
  misc_RNA (1)...(19): siRNA sense strand
cgacaagagcaguuucauc

SEQ ID NO: 440907 - RNA, 19 nt, Homo sapiens
  misc_RNA (1)...(19): siRNA sense strand
acagcaagguccccaagua

SEQ ID NO: 440908 - RNA, 19 nt, Homo sapiens
  misc_RNA (1)...(19): siRNA sense strand
ggcagucacuaugcucaug

SEQ ID NO: 440909 - RNA, 19 nt, Homo sapiens
  misc_RNA (1)...(19): siRNA sense strand
gaggacaacagccuuucug

SEQ ID NO: 440910 - RNA, 19 nt, Homo sapiens
  misc_RNA (1)...(19): siRNA sense strand
caacaugggcaagcugaag

SEQ ID NO: 440911 - RNA, 19 nt, Homo sapiens
  misc_RNA (1)...(19): siRNA sense strand
ugggucagcuucuacaacu

SEQ ID NO: 440912 - RNA, 19 nt, Homo sapiens
  misc_RNA (1)...(19): siRNA sense strand
ccucuucuacuucaacaug

SEQ ID NO: 440913 - RNA, 19 nt, Homo sapiens
  misc_RNA (1)...(19): siRNA sense strand
ggagaaccugggcaucauc

SEQ ID NO: 440914 - RNA, 19 nt, Homo sapiens
  misc_RNA (1)...(19): siRNA sense strand
gcucagccuguaucaaagu

SEQ ID NO: 440915 - RNA, 19 nt, Homo sapiens
  misc_RNA (1)...(19): siRNA sense strand
caacgcugagcucaugaau

SEQ ID NO: 440916 - RNA, 19 nt, Homo sapiens
  misc_RNA (1)...(19): siRNA sense strand
uacuuucucuuccucuuca

SEQ ID NO: 440917 - RNA, 19 nt, Homo sapiens
  misc_RNA (1)...(19): siRNA sense strand
gcauaaacuucgacaaaua

SEQ ID NO: 440918 - RNA, 19 nt, Homo sapiens
  misc_RNA (1)...(19): siRNA sense strand
uguaagagcuguuguuaua

SEQ ID NO: 440919 - RNA, 19 nt, Homo sapiens
  misc_RNA (1)...(19): siRNA sense strand
gaacagcgccaaacccuua

SEQ ID NO: 440920 - RNA, 19 nt, Homo sapiens
  misc_RNA (1)...(19): siRNA sense strand
gaaccagaguguauuauug

SEQ ID NO: 440921 - RNA, 19 nt, Homo sapiens
  misc_RNA (1)...(19): siRNA sense strand
gaaauugccuuuaguacau

SEQ ID NO: 440922 - RNA, 19 nt, Homo sapiens
  misc_RNA (1)...(19): siRNA sense strand
gaacuauggucuuuguuga

SEQ ID NO: 440923 - RNA, 19 nt, Homo sapiens
  misc_RNA (1)...(19): siRNA sense strand
gauaauacauccacaaugg

SEQ ID NO: 440924 - RNA, 19 nt, Homo sapiens
  misc_RNA (1)...(19): siRNA sense strand
gaaaucaacccucauaugu

SEQ ID NO: 440925 - RNA, 19 nt, Homo sapiens
  misc_RNA (1)...(19): siRNA sense strand
gaagaaauugccuuuagua

SEQ ID NO: 440926 - RNA, 19 nt, Homo sapiens
  misc_RNA (1)...(19): siRNA sense strand
gcagaaaucaacccucaua

SEQ ID NO: 440927 - RNA, 19 nt, Homo sapiens
  misc_RNA (1)...(19): siRNA sense strand
ugaagaagcuaaucucugu

SEQ ID NO: 440928 - RNA, 19 nt, Homo sapiens
  misc_RNA (1)...(19): siRNA sense strand
gagaaaagcucguugaaau

SEQ ID NO: 440929 - RNA, 19 nt, Homo sapiens
  misc_RNA (1)...(19): siRNA sense strand
ugaaucggauaaccauuua

SEQ ID NO: 440930 - RNA, 19 nt, Homo sapiens
  misc_RNA (1)...(19): siRNA sense strand
uaacaggacuccagcuuca

SEQ ID NO: 440931 - RNA, 19 nt, Homo sapiens
  misc_RNA (1)...(19): siRNA sense strand
ugaacgaggugguuacaaa

SEQ ID NO: 440932 - RNA, 19 nt, Homo sapiens
  misc_RNA (1)...(19): siRNA sense strand
ggaaauaauucagaagcuu

SEQ ID NO: 440933 - RNA, 19 nt, Homo sapiens
  misc_RNA (1)...(19): siRNA sense strand
ggaagaaauugccuuuagu

SEQ ID NO: 440934 - RNA, 19 nt, Homo sapiens
  misc_RNA (1)...(19): siRNA sense strand
ggagagagucuaguaauga

SEQ ID NO: 440935 - RNA, 19 nt, Homo sapiens
  misc_RNA (1)...(19): siRNA sense strand
uaugaugcaugauggaaua

SEQ ID NO: 440936 - RNA, 19 nt, Homo sapiens
  misc_RNA (1)...(19): siRNA sense strand
ucgaagagaucauuucaug

SEQ ID NO: 440937 - RNA, 19 nt, Homo sapiens
  misc_RNA (1)...(19): siRNA sense strand
gcagaccguucuccaaguu

SEQ ID NO: 440938 - RNA, 19 nt, Homo sapiens
  misc_RNA (1)...(19): siRNA sense strand
gaaauucugcgaaacauag

SEQ ID NO: 440939 - RNA, 19 nt, Homo sapiens
  misc_RNA (1)...(19): siRNA sense strand
guccagaaaugaagaaguu

SEQ ID NO: 440940 - RNA, 19 nt, Homo sapiens
  misc_RNA (1)...(19): siRNA sense strand
gaucuuccuucuaccauug

SEQ ID NO: 440941 - RNA, 19 nt, Homo sapiens
  misc_RNA (1)...(19): siRNA sense strand
cagaggaaauucaaagguu

SEQ ID NO: 440942 - RNA, 19 nt, Homo sapiens
  misc_RNA (1)...(19): siRNA sense strand
ggucuaggaaguccaaaua

SEQ ID NO: 440943 - RNA, 19 nt, Homo sapiens
  misc_RNA (1)...(19): siRNA sense strand
caccagcaauucugacuuu

SEQ ID NO: 440944 - RNA, 19 nt, Homo sapiens
  misc_RNA (1)...(19): siRNA sense strand
gaagugaacgaggugguua

SEQ ID NO: 440945 - RNA, 19 nt, Homo sapiens
  misc_RNA (1)...(19): siRNA sense strand
guaauaagcgagauaauac

SEQ ID NO: 440946 - RNA, 19 nt, Homo sapiens
  misc_RNA (1)...(19): siRNA sense strand
ggaaagugcccaguucuug

SEQ ID NO: 440947 - RNA, 19 nt, Homo sapiens
  misc_RNA (1)...(19): siRNA sense strand
aagguuggcugcagaguuu

SEQ ID NO: 440948 - RNA, 19 nt, Homo sapiens
  misc_RNA (1)...(19): siRNA sense strand
ggugauagcucugguuucu

SEQ ID NO: 440949 - RNA, 19 nt, Homo sapiens
  misc_RNA (1)...(19): siRNA sense strand
caagagcacuuugaacaca

SEQ ID NO: 440950 - RNA, 19 nt, Homo sapiens
  misc_RNA (1)...(19): siRNA sense strand
gcugaucgcauguuggaua

SEQ ID NO: 440951 - RNA, 19 nt, Homo sapiens
  misc_RNA (1)...(19): siRNA sense strand
gcagaaggaggagaaagua

SEQ ID NO: 440952 - RNA, 19 nt, Homo sapiens
  misc_RNA (1)...(19): siRNA sense strand
ggaggagaaaguagugaua

SEQ ID NO: 440953 - RNA, 19 nt, Homo sapiens
  misc_RNA (1)...(19): siRNA sense strand
gcccaggaaugccaucaaa

SEQ ID NO: 440954 - RNA, 19 nt, Homo sapiens
  misc_RNA (1)...(19): siRNA sense strand
caaccagauuuauuuggaa

SEQ ID NO: 440955 - RNA, 19 nt, Homo sapiens
  misc_RNA (1)...(19): siRNA sense strand
guaaugacugcgaagauaa

SEQ ID NO: 440956 - RNA, 19 nt, Homo sapiens
  misc_RNA (1)...(19): siRNA sense strand
ggaaccagaguguauuauu

SEQ ID NO: 440957 - RNA, 19 nt, Homo sapiens
  misc_RNA (1)...(19): siRNA sense strand
aguaaugacugcgaagaua

SEQ ID NO: 440958 - RNA, 19 nt, Homo sapiens
  misc_RNA (1)...(19): siRNA sense strand
gaauauguucaucgaauug

SEQ ID NO: 440959 - RNA, 19 nt, Homo sapiens
  misc_RNA (1)...(19): siRNA sense strand
cuucuaccauugaugaaua

SEQ ID NO: 440960 - RNA, 19 nt, Homo sapiens
  misc_RNA (1)...(19): siRNA sense strand
gaagucagaagcagaagga

SEQ ID NO: 440961 - RNA, 19 nt, Homo sapiens
  misc_RNA (1)...(19): siRNA sense strand
gaugauggaccuucucgaa

SEQ ID NO: 440962 - RNA, 19 nt, Homo sapiens
  misc_RNA (1)...(19): siRNA sense strand
ggacauucaauucgacaaa

SEQ ID NO: 440963 - RNA, 19 nt, Homo sapiens
  misc_RNA (1)...(19): siRNA sense strand
gagcuguuguuauauaugg

SEQ ID NO: 440964 - RNA, 19 nt, Homo sapiens
  misc_RNA (1)...(19): siRNA sense strand
ggcauaaacuucgacaaau

SEQ ID NO: 440965 - RNA, 19 nt, Homo sapiens
  misc_RNA (1)...(19): siRNA sense strand
ucaaccagauuuauuugga

SEQ ID NO: 440966 - RNA, 19 nt, Homo sapiens
  misc_RNA (1)...(19): siRNA sense strand
uggaagaaauugccuuuag

SEQ ID NO: 440967 - RNA, 19 nt, Homo sapiens
  misc_RNA (1)...(19): siRNA sense strand
uagcacagccucuaguaaa

SEQ ID NO: 440968 - RNA, 19 nt, Homo sapiens
  misc_RNA (1)...(19): siRNA sense strand
gaaagugcccaguucuugu

SEQ ID NO: 440969 - RNA, 19 nt, Homo sapiens
  misc_RNA (1)...(19): siRNA sense strand
ugacuuagacccagacgaa

SEQ ID NO: 440970 - RNA, 19 nt, Homo sapiens
  misc_RNA (1)...(19): siRNA sense strand
gaacacagcuggguuuucu

SEQ ID NO: 440971 - RNA, 19 nt, Homo sapiens
  misc_RNA (1)...(19): siRNA sense strand
gauaucauaggcaaagaaa

SEQ ID NO: 440972 - RNA, 19 nt, Homo sapiens
  misc_RNA (1)...(19): siRNA sense strand
ggugauacuucucaaagca

SEQ ID NO: 440973 - RNA, 19 nt, Homo sapiens
  misc_RNA (1)...(19): siRNA sense strand
gacagaugcucaacaggau

SEQ ID NO: 440974 - RNA, 19 nt, Homo sapiens
  misc_RNA (1)...(19): siRNA sense strand
cuaaagcugguuauacuaa

SEQ ID NO: 440975 - RNA, 19 nt, Homo sapiens
  misc_RNA (1)...(19): siRNA sense strand
cagagaugcuggugagugu

SEQ ID NO: 440976 - RNA, 19 nt, Homo sapiens
  misc_RNA (1)...(19): siRNA sense strand
gagaugcuggugaguguaa

SEQ ID NO: 440977 - RNA, 19 nt, Homo sapiens
  misc_RNA (1)...(19): siRNA sense strand
gagauaauacauccacaau

SEQ ID NO: 440978 - RNA, 19 nt, Homo sapiens
  misc_RNA (1)...(19): siRNA sense strand
ccaauccaguagaugauga

SEQ ID NO: 440979 - RNA, 19 nt, Homo sapiens
  misc_RNA (1)...(19): siRNA sense strand
guaaaaguauugacagaug

SEQ ID NO: 440980 - RNA, 19 nt, Homo sapiens
  misc_RNA (1)...(19): siRNA sense strand
caaacagggucugggaaga

SEQ ID NO: 440981 - RNA, 19 nt, Homo sapiens
  misc_RNA (1)...(19): siRNA sense strand
guaauaacaggcucuggaa

SEQ ID NO: 440982 - RNA, 19 nt, Homo sapiens
  misc_RNA (1)...(19): siRNA sense strand
gacacugaauaacaacauu

SEQ ID NO: 440983 - RNA, 19 nt, Homo sapiens
  misc_RNA (1)...(19): siRNA sense strand
aaucaacccucauaugucu

SEQ ID NO: 440984 - RNA, 19 nt, Homo sapiens
  misc_RNA (1)...(19): siRNA sense strand
acaaguggguggagcaugu

SEQ ID NO: 440985 - RNA, 19 nt, Homo sapiens
  misc_RNA (1)...(19): siRNA sense strand
uaacaacauugcuaaagcu

SEQ ID NO: 440986 - RNA, 19 nt, Homo sapiens
  misc_RNA (1)...(19): siRNA sense strand
caagagaggcggcuaucga

SEQ ID NO: 440987 - RNA, 19 nt, Homo sapiens
  misc_RNA (1)...(19): siRNA sense strand
ggcaagagcacuuugaaca

SEQ ID NO: 440988 - RNA, 19 nt, Homo sapiens
  misc_RNA (1)...(19): siRNA sense strand
uagaagaccaguauuaagu

SEQ ID NO: 440989 - RNA, 19 nt, Homo sapiens
  misc_RNA (1)...(19): siRNA sense strand
ucuaggaaguccaaauaau

SEQ ID NO: 440990 - RNA, 19 nt, Homo sapiens
  misc_RNA (1)...(19): siRNA sense strand
agagguaguuuccgagguu

SEQ ID NO: 440991 - RNA, 19 nt, Homo sapiens
  misc_RNA (1)...(19): siRNA sense strand
uaggaaguccaaauaauga

SEQ ID NO: 440992 - RNA, 19 nt, Homo sapiens
  misc_RNA (1)...(19): siRNA sense strand
ccagaaaugaagaaguuaa

SEQ ID NO: 440993 - RNA, 19 nt, Homo sapiens
  misc_RNA (1)...(19): siRNA sense strand
gaucgcauguuggauaugg

SEQ ID NO: 440994 - RNA, 19 nt, Homo sapiens
  misc_RNA (1)...(19): siRNA sense strand
cuggaagacugauggauau

SEQ ID NO: 440995 - RNA, 19 nt, Homo sapiens
  misc_RNA (1)...(19): siRNA sense strand
gagauggaaauaauucaga

SEQ ID NO: 440996 - RNA, 19 nt, Homo sapiens
  misc_RNA (1)...(19): siRNA sense strand
ugaagcugaucgcauguug

SEQ ID NO: 440997 - RNA, 19 nt, Homo sapiens
  misc_RNA (1)...(19): siRNA sense strand
gaaggaggagaaaguagug

SEQ ID NO: 440998 - RNA, 19 nt, Homo sapiens
  misc_RNA (1)...(19): siRNA sense strand
gaacgaggugguuacaaag

SEQ ID NO: 440999 - RNA, 19 nt, Homo sapiens
  misc_RNA (1)...(19): siRNA sense strand
uccaguagaugaugaguca

SEQ ID NO: 441000 - RNA, 19 nt, Homo sapiens
  misc_RNA (1)...(19): siRNA sense strand
gguggagcauguagagaug

SEQ ID NO: 441001 - RNA, 19 nt, Homo sapiens
  misc_RNA (1)...(19): siRNA sense strand
gcgccaaacccuuauguuc

SEQ ID NO: 441002 - RNA, 19 nt, Homo sapiens
  misc_RNA (1)...(19): siRNA sense strand
gacauucaauucgacaaau

SEQ ID NO: 441003 - RNA, 19 nt, Homo sapiens
  misc_RNA (1)...(19): siRNA sense strand
gcugggacauucaauucga

SEQ ID NO: 441004 - RNA, 19 nt, Homo sapiens
  misc_RNA (1)...(19): siRNA sense strand
caggaaccagaguguauua

SEQ ID NO: 441005 - RNA, 19 nt, Homo sapiens
  misc_RNA (1)...(19): siRNA sense strand
gacuccagcuucaucauca

SEQ ID NO: 441006 - RNA, 19 nt, Homo sapiens
  misc_RNA (1)...(19): siRNA sense strand
gagagagucuaguaaugac

SEQ ID NO: 441007 - RNA, 19 nt, Homo sapiens
  misc_RNA (1)...(19): siRNA sense strand
uggcagagcaauuuccuuu

SEQ ID NO: 441008 - RNA, 19 nt, Homo sapiens
  misc_RNA (1)...(19): siRNA sense strand
ccuggaagacugauggaua

SEQ ID NO: 441009 - RNA, 19 nt, Homo sapiens
  misc_RNA (1)...(19): siRNA sense strand
gcaggaaccagaguguauu

SEQ ID NO: 441010 - RNA, 19 nt, Homo sapiens
  misc_RNA (1)...(19): siRNA sense strand
gcuaaagcugguuauacua

SEQ ID NO: 441011 - RNA, 19 nt, Homo sapiens
  misc_RNA (1)...(19): siRNA sense strand
uggagagagucuaguaaug

SEQ ID NO: 441012 - RNA, 19 nt, Homo sapiens
  misc_RNA (1)...(19): siRNA sense strand
cuaggaaguccaaauaaug

SEQ ID NO: 441013 - RNA, 19 nt, Homo sapiens
  misc_RNA (1)...(19): siRNA sense strand
cuaucgagauggaaauaau

SEQ ID NO: 441014 - RNA, 19 nt, Homo sapiens
  misc_RNA (1)...(19): siRNA sense strand
guauuaaguggcacaggua

SEQ ID NO: 441015 - RNA, 19 nt, Homo sapiens
  misc_RNA (1)...(19): siRNA sense strand
gaaaagcucguugaaauuc

SEQ ID NO: 441016 - RNA, 19 nt, Homo sapiens
  misc_RNA (1)...(19): siRNA sense strand
gcaccaccagcaauucuga

SEQ ID NO: 441017 - RNA, 19 nt, Homo sapiens
  misc_RNA (1)...(19): siRNA sense strand
gcauaaacuucgacaaaua

SEQ ID NO: 441018 - RNA, 19 nt, Homo sapiens
  misc_RNA (1)...(19): siRNA sense strand
uguaagagcuguuguuaua

SEQ ID NO: 441019 - RNA, 19 nt, Homo sapiens
  misc_RNA (1)...(19): siRNA sense strand
gaacagcgccaaacccuua

SEQ ID NO: 441020 - RNA, 19 nt, Homo sapiens
  misc_RNA (1)...(19): siRNA sense strand
gaaccagaguguauuauug

SEQ ID NO: 441021 - RNA, 19 nt, Homo sapiens
  misc_RNA (1)...(19): siRNA sense strand
gaaauugccuuuaguacau

SEQ ID NO: 441022 - RNA, 19 nt, Homo sapiens
  misc_RNA (1)...(19): siRNA sense strand
gaacuauggucuuuguuga

SEQ ID NO: 441023 - RNA, 19 nt, Homo sapiens
  misc_RNA (1)...(19): siRNA sense strand
gauaauacauccacaaugg

SEQ ID NO: 441024 - RNA, 19 nt, Homo sapiens
  misc_RNA (1)...(19): siRNA sense strand
gaaaucaacccucauaugu

SEQ ID NO: 441025 - RNA, 19 nt, Homo sapiens
  misc_RNA (1)...(19): siRNA sense strand
gaagaaauugccuuuagua

SEQ ID NO: 441026 - RNA, 19 nt, Homo sapiens
  misc_RNA (1)...(19): siRNA sense strand
gcagaaaucaacccucaua

SEQ ID NO: 441027 - RNA, 19 nt, Homo sapiens
  misc_RNA (1)...(19): siRNA sense strand
ugaagaagcuaaucucugu

SEQ ID NO: 441028 - RNA, 19 nt, Homo sapiens
  misc_RNA (1)...(19): siRNA sense strand
gagaaaagcucguugaaau

SEQ ID NO: 441029 - RNA, 19 nt, Homo sapiens
  misc_RNA (1)...(19): siRNA sense strand
ugaaucggauaaccauuua

SEQ ID NO: 441030 - RNA, 19 nt, Homo sapiens
  misc_RNA (1)...(19): siRNA sense strand
uaacaggacuccagcuuca

SEQ ID NO: 441031 - RNA, 19 nt, Homo sapiens
  misc_RNA (1)...(19): siRNA sense strand
ugaacgaggugguuacaaa

SEQ ID NO: 441032 - RNA, 19 nt, Homo sapiens
  misc_RNA (1)...(19): siRNA sense strand
ggaaauaauucagaagcuu

SEQ ID NO: 441033 - RNA, 19 nt, Homo sapiens
  misc_RNA (1)...(19): siRNA sense strand
ggaagaaauugccuuuagu

SEQ ID NO: 441034 - RNA, 19 nt, Homo sapiens
  misc_RNA (1)...(19): siRNA sense strand
ggagagagucuaguaauga

SEQ ID NO: 441035 - RNA, 19 nt, Homo sapiens
  misc_RNA (1)...(19): siRNA sense strand
uaugaugcaugauggaaua

SEQ ID NO: 441036 - RNA, 19 nt, Homo sapiens
  misc_RNA (1)...(19): siRNA sense strand
ucgaagagaucauuucaug

SEQ ID NO: 441037 - RNA, 19 nt, Homo sapiens
  misc_RNA (1)...(19): siRNA sense strand
gcagaccguucuccaaguu

SEQ ID NO: 441038 - RNA, 19 nt, Homo sapiens
  misc_RNA (1)...(19): siRNA sense strand
gaaauucugcgaaacauag

SEQ ID NO: 441039 - RNA, 19 nt, Homo sapiens
  misc_RNA (1)...(19): siRNA sense strand
guccagaaaugaagaaguu

SEQ ID NO: 441040 - RNA, 19 nt, Homo sapiens
  misc_RNA (1)...(19): siRNA sense strand
gaucuuccuucuaccauug

SEQ ID NO: 441041 - RNA, 19 nt, Homo sapiens
  misc_RNA (1)...(19): siRNA sense strand
cagaggaaauucaaagguu

SEQ ID NO: 441042 - RNA, 19 nt, Homo sapiens
  misc_RNA (1)...(19): siRNA sense strand
ggucuaggaaguccaaaua

SEQ ID NO: 441043 - RNA, 19 nt, Homo sapiens
  misc_RNA (1)...(19): siRNA sense strand
caccagcaauucugacuuu

SEQ ID NO: 441044 - RNA, 19 nt, Homo sapiens
  misc_RNA (1)...(19): siRNA sense strand
gaagugaacgaggugguua

SEQ ID NO: 441045 - RNA, 19 nt, Homo sapiens
  misc_RNA (1)...(19): siRNA sense strand
guaauaagcgagauaauac

SEQ ID NO: 441046 - RNA, 19 nt, Homo sapiens
  misc_RNA (1)...(19): siRNA sense strand
ggaaagugcccaguucuug

SEQ ID NO: 441047 - RNA, 19 nt, Homo sapiens
  misc_RNA (1)...(19): siRNA sense strand
aagguuggcugcagaguuu

SEQ ID NO: 441048 - RNA, 19 nt, Homo sapiens
  misc_RNA (1)...(19): siRNA sense strand
ggugauagcucugguuucu

SEQ ID NO: 441049 - RNA, 19 nt, Homo sapiens
  misc_RNA (1)...(19): siRNA sense strand
caagagcacuuugaacaca

SEQ ID NO: 441050 - RNA, 19 nt, Homo sapiens
  misc_RNA (1)...(19): siRNA sense strand
gcugaucgcauguuggaua

SEQ ID NO: 441051 - RNA, 19 nt, Homo sapiens
  misc_RNA (1)...(19): siRNA sense strand
gcagaaggaggagaaagua

SEQ ID NO: 441052 - RNA, 19 nt, Homo sapiens
  misc_RNA (1)...(19): siRNA sense strand
ggaggagaaaguagugaua

SEQ ID NO: 441053 - RNA, 19 nt, Homo sapiens
  misc_RNA (1)...(19): siRNA sense strand
gcccaggaaugccaucaaa

SEQ ID NO: 441054 - RNA, 19 nt, Homo sapiens
  misc_RNA (1)...(19): siRNA sense strand
caaccagauuuauuuggaa

SEQ ID NO: 441055 - RNA, 19 nt, Homo sapiens
  misc_RNA (1)...(19): siRNA sense strand
guaaugacugcgaagauaa

SEQ ID NO: 441056 - RNA, 19 nt, Homo sapiens
  misc_RNA (1)...(19): siRNA sense strand
ggaaccagaguguauuauu

SEQ ID NO: 441057 - RNA, 19 nt, Homo sapiens
  misc_RNA (1)...(19): siRNA sense strand
aguaaugacugcgaagaua

SEQ ID NO: 441058 - RNA, 19 nt, Homo sapiens
  misc_RNA (1)...(19): siRNA sense strand
gaauauguucaucgaauug

SEQ ID NO: 441059 - RNA, 19 nt, Homo sapiens
  misc_RNA (1)...(19): siRNA sense strand
cuucuaccauugaugaaua

SEQ ID NO: 441060 - RNA, 19 nt, Homo sapiens
  misc_RNA (1)...(19): siRNA sense strand
gaagucagaagcagaagga

SEQ ID NO: 441061 - RNA, 19 nt, Homo sapiens
  misc_RNA (1)...(19): siRNA sense strand
gaugauggaccuucucgaa

SEQ ID NO: 441062 - RNA, 19 nt, Homo sapiens
  misc_RNA (1)...(19): siRNA sense strand
ggacauucaauucgacaaa

SEQ ID NO: 441063 - RNA, 19 nt, Homo sapiens
  misc_RNA (1)...(19): siRNA sense strand
gagcuguuguuauauaugg

SEQ ID NO: 441064 - RNA, 19 nt, Homo sapiens
  misc_RNA (1)...(19): siRNA sense strand
ggcauaaacuucgacaaau

SEQ ID NO: 441065 - RNA, 19 nt, Homo sapiens
  misc_RNA (1)...(19): siRNA sense strand
ucaaccagauuuauuugga

SEQ ID NO: 441066 - RNA, 19 nt, Homo sapiens
  misc_RNA (1)...(19): siRNA sense strand
uggaagaaauugccuuuag

SEQ ID NO: 441067 - RNA, 19 nt, Homo sapiens
  misc_RNA (1)...(19): siRNA sense strand
uagcacagccucuaguaaa

SEQ ID NO: 441068 - RNA, 19 nt, Homo sapiens
  misc_RNA (1)...(19): siRNA sense strand
gaaagugcccaguucuugu

SEQ ID NO: 441069 - RNA, 19 nt, Homo sapiens
  misc_RNA (1)...(19): siRNA sense strand
ugacuuagacccagacgaa

SEQ ID NO: 441070 - RNA, 19 nt, Homo sapiens
  misc_RNA (1)...(19): siRNA sense strand
gaacacagcuggguuuucu

SEQ ID NO: 441071 - RNA, 19 nt, Homo sapiens
  misc_RNA (1)...(19): siRNA sense strand
gauaucauaggcaaagaaa

SEQ ID NO: 441072 - RNA, 19 nt, Homo sapiens
  misc_RNA (1)...(19): siRNA sense strand
ggugauacuucucaaagca

SEQ ID NO: 441073 - RNA, 19 nt, Homo sapiens
  misc_RNA (1)...(19): siRNA sense strand
gacagaugcucaacaggau

SEQ ID NO: 441074 - RNA, 19 nt, Homo sapiens
  misc_RNA (1)...(19): siRNA sense strand
cuaaagcugguuauacuaa

SEQ ID NO: 441075 - RNA, 19 nt, Homo sapiens
  misc_RNA (1)...(19): siRNA sense strand
cagagaugcuggugagugu

SEQ ID NO: 441076 - RNA, 19 nt, Homo sapiens
  misc_RNA (1)...(19): siRNA sense strand
gagaugcuggugaguguaa

SEQ ID NO: 441077 - RNA, 19 nt, Homo sapiens
  misc_RNA (1)...(19): siRNA sense strand
gagauaauacauccacaau

SEQ ID NO: 441078 - RNA, 19 nt, Homo sapiens
  misc_RNA (1)...(19): siRNA sense strand
ccaauccaguagaugauga

SEQ ID NO: 441079 - RNA, 19 nt, Homo sapiens
  misc_RNA (1)...(19): siRNA sense strand
guaaaaguauugacagaug

SEQ ID NO: 441080 - RNA, 19 nt, Homo sapiens
  misc_RNA (1)...(19): siRNA sense strand
caaacagggucugggaaga

SEQ ID NO: 441081 - RNA, 19 nt, Homo sapiens
  misc_RNA (1)...(19): siRNA sense strand
guaauaacaggcucuggaa

SEQ ID NO: 441082 - RNA, 19 nt, Homo sapiens
  misc_RNA (1)...(19): siRNA sense strand
gacacugaauaacaacauu

SEQ ID NO: 441083 - RNA, 19 nt, Homo sapiens
  misc_RNA (1)...(19): siRNA sense strand
aaucaacccucauaugucu

SEQ ID NO: 441084 - RNA, 19 nt, Homo sapiens
  misc_RNA (1)...(19): siRNA sense strand
acaaguggguggagcaugu

SEQ ID NO: 441085 - RNA, 19 nt, Homo sapiens
  misc_RNA (1)...(19): siRNA sense strand
uaacaacauugcuaaagcu

SEQ ID NO: 441086 - RNA, 19 nt, Homo sapiens
  misc_RNA (1)...(19): siRNA sense strand
caagagaggcggcuaucga

SEQ ID NO: 441087 - RNA, 19 nt, Homo sapiens
  misc_RNA (1)...(19): siRNA sense strand
ggcaagagcacuuugaaca

SEQ ID NO: 441088 - RNA, 19 nt, Homo sapiens
  misc_RNA (1)...(19): siRNA sense strand
uagaagaccaguauuaagu

SEQ ID NO: 441089 - RNA, 19 nt, Homo sapiens
  misc_RNA (1)...(19): siRNA sense strand
ucuaggaaguccaaauaau

SEQ ID NO: 441090 - RNA, 19 nt, Homo sapiens
  misc_RNA (1)...(19): siRNA sense strand
agagguaguuuccgagguu

SEQ ID NO: 441091 - RNA, 19 nt, Homo sapiens
  misc_RNA (1)...(19): siRNA sense strand
uaggaaguccaaauaauga

SEQ ID NO: 441092 - RNA, 19 nt, Homo sapiens
  misc_RNA (1)...(19): siRNA sense strand
ccagaaaugaagaaguuaa

SEQ ID NO: 441093 - RNA, 19 nt, Homo sapiens
  misc_RNA (1)...(19): siRNA sense strand
gaucgcauguuggauaugg

SEQ ID NO: 441094 - RNA, 19 nt, Homo sapiens
  misc_RNA (1)...(19): siRNA sense strand
cuggaagacugauggauau

SEQ ID NO: 441095 - RNA, 19 nt, Homo sapiens
  misc_RNA (1)...(19): siRNA sense strand
gagauggaaauaauucaga

SEQ ID NO: 441096 - RNA, 19 nt, Homo sapiens
  misc_RNA (1)...(19): siRNA sense strand
ugaagcugaucgcauguug

SEQ ID NO: 441097 - RNA, 19 nt, Homo sapiens
  misc_RNA (1)...(19): siRNA sense strand
gaaggaggagaaaguagug

SEQ ID NO: 441098 - RNA, 19 nt, Homo sapiens
  misc_RNA (1)...(19): siRNA sense strand
gaacgaggugguuacaaag

SEQ ID NO: 441099 - RNA, 19 nt, Homo sapiens
  misc_RNA (1)...(19): siRNA sense strand
uccaguagaugaugaguca

SEQ ID NO: 441100 - RNA, 19 nt, Homo sapiens
  misc_RNA (1)...(19): siRNA sense strand
gguggagcauguagagaug

SEQ ID NO: 441101 - RNA, 19 nt, Homo sapiens
  misc_RNA (1)...(19): siRNA sense strand
gcgccaaacccuuauguuc

SEQ ID NO: 441102 - RNA, 19 nt, Homo sapiens
  misc_RNA (1)...(19): siRNA sense strand
gacauucaauucgacaaau

SEQ ID NO: 441103 - RNA, 19 nt, Homo sapiens
  misc_RNA (1)...(19): siRNA sense strand
gcugggacauucaauucga

SEQ ID NO: 441104 - RNA, 19 nt, Homo sapiens
  misc_RNA (1)...(19): siRNA sense strand
caggaaccagaguguauua

SEQ ID NO: 441105 - RNA, 19 nt, Homo sapiens
  misc_RNA (1)...(19): siRNA sense strand
gacuccagcuucaucauca

SEQ ID NO: 441106 - RNA, 19 nt, Homo sapiens
  misc_RNA (1)...(19): siRNA sense strand
gagagagucuaguaaugac

SEQ ID NO: 441107 - RNA, 19 nt, Homo sapiens
  misc_RNA (1)...(19): siRNA sense strand
uggcagagcaauuuccuuu

SEQ ID NO: 441108 - RNA, 19 nt, Homo sapiens
  misc_RNA (1)...(19): siRNA sense strand
ccuggaagacugauggaua

SEQ ID NO: 441109 - RNA, 19 nt, Homo sapiens
  misc_RNA (1)...(19): siRNA sense strand
gcaggaaccagaguguauu

SEQ ID NO: 441110 - RNA, 19 nt, Homo sapiens
  misc_RNA (1)...(19): siRNA sense strand
gcuaaagcugguuauacua

SEQ ID NO: 441111 - RNA, 19 nt, Homo sapiens
  misc_RNA (1)...(19): siRNA sense strand
uggagagagucuaguaaug

SEQ ID NO: 441112 - RNA, 19 nt, Homo sapiens
  misc_RNA (1)...(19): siRNA sense strand
cuaggaaguccaaauaaug

SEQ ID NO: 441113 - RNA, 19 nt, Homo sapiens
  misc_RNA (1)...(19): siRNA sense strand
cuaucgagauggaaauaau

SEQ ID NO: 441114 - RNA, 19 nt, Homo sapiens
  misc_RNA (1)...(19): siRNA sense strand
guauuaaguggcacaggua

SEQ ID NO: 441115 - RNA, 19 nt, Homo sapiens
  misc_RNA (1)...(19): siRNA sense strand
gaaaagcucguugaaauuc

SEQ ID NO: 441116 - RNA, 19 nt, Homo sapiens
  misc_RNA (1)...(19): siRNA sense strand
gcaccaccagcaauucuga

SEQ ID NO: 441117 - RNA, 19 nt, Homo sapiens
  misc_RNA (1)...(19): siRNA sense strand
caaguggccuucaccauua

SEQ ID NO: 441118 - RNA, 19 nt, Homo sapiens
  misc_RNA (1)...(19): siRNA sense strand
gcaaguggccuucaccauu

SEQ ID NO: 441119 - RNA, 19 nt, Homo sapiens
  misc_RNA (1)...(19): siRNA sense strand
gaaggcagcccugggugua

SEQ ID NO: 441120 - RNA, 19 nt, Homo sapiens
  misc_RNA (1)...(19): siRNA sense strand
ggaagcggcugacggaacu

SEQ ID NO: 441121 - RNA, 19 nt, Homo sapiens
  misc_RNA (1)...(19): siRNA sense strand
acaacgggcuuccugagaa

SEQ ID NO: 441122 - RNA, 19 nt, Homo sapiens
  misc_RNA (1)...(19): siRNA sense strand
uuaaggagcuucgggagau

SEQ ID NO: 441123 - RNA, 19 nt, Homo sapiens
  misc_RNA (1)...(19): siRNA sense strand
gugcugcccucaccagaug

SEQ ID NO: 441124 - RNA, 19 nt, Homo sapiens
  misc_RNA (1)...(19): siRNA sense strand
ugaagaaugucaucaacac

SEQ ID NO: 441125 - RNA, 19 nt, Homo sapiens
  misc_RNA (1)...(19): siRNA sense strand
ucagcagcauuggguauaa

SEQ ID NO: 441126 - RNA, 19 nt, Homo sapiens
  misc_RNA (1)...(19): siRNA sense strand
ggugaagaaugucaucaac

SEQ ID NO: 441127 - RNA, 19 nt, Homo sapiens
  misc_RNA (1)...(19): siRNA sense strand
gagcuucugccaccauuuc

SEQ ID NO: 441128 - RNA, 19 nt, Homo sapiens
  misc_RNA (1)...(19): siRNA sense strand
gaagaaugucaucaacaca

SEQ ID NO: 441129 - RNA, 19 nt, Homo sapiens
  misc_RNA (1)...(19): siRNA sense strand
gaagacaguguggcuagug

SEQ ID NO: 441130 - RNA, 19 nt, Homo sapiens
  misc_RNA (1)...(19): siRNA sense strand
gacccaagcgugcccuuug

SEQ ID NO: 441131 - RNA, 19 nt, Homo sapiens
  misc_RNA (1)...(19): siRNA sense strand
caacgggcuuccugagaac

SEQ ID NO: 441132 - RNA, 19 nt, Homo sapiens
  misc_RNA (1)...(19): siRNA sense strand
agccagaccugagcuguga

SEQ ID NO: 441133 - RNA, 19 nt, Homo sapiens
  misc_RNA (1)...(19): siRNA sense strand
gagcuucgggagaugauuc

SEQ ID NO: 441134 - RNA, 19 nt, Homo sapiens
  misc_RNA (1)...(19): siRNA sense strand
ggacaucuacgagaaacag

SEQ ID NO: 441135 - RNA, 19 nt, Homo sapiens
  misc_RNA (1)...(19): siRNA sense strand
ugacacagccgugauucug

SEQ ID NO: 441136 - RNA, 19 nt, Homo sapiens
  misc_RNA (1)...(19): siRNA sense strand
gacuggagggugucgauga

SEQ ID NO: 441137 - RNA, 19 nt, Homo sapiens
  misc_RNA (1)...(19): siRNA sense strand
gaggcagagucgagugaag

SEQ ID NO: 441138 - RNA, 19 nt, Homo sapiens
  misc_RNA (1)...(19): siRNA sense strand
gcucagcagcauuggguau

SEQ ID NO: 441139 - RNA, 19 nt, Homo sapiens
  misc_RNA (1)...(19): siRNA sense strand
agagaacggacaucacgaa

SEQ ID NO: 441140 - RNA, 19 nt, Homo sapiens
  misc_RNA (1)...(19): siRNA sense strand
caaccaugacugacagcuu

SEQ ID NO: 441141 - RNA, 19 nt, Homo sapiens
  misc_RNA (1)...(19): siRNA sense strand
cauggaagaccucccuugu

SEQ ID NO: 441142 - RNA, 19 nt, Homo sapiens
  misc_RNA (1)...(19): siRNA sense strand
uucgggagaugauucaguu

SEQ ID NO: 441143 - RNA, 19 nt, Homo sapiens
  misc_RNA (1)...(19): siRNA sense strand
acccaagcgugcccuuuga

SEQ ID NO: 441144 - RNA, 19 nt, Homo sapiens
  misc_RNA (1)...(19): siRNA sense strand
uaaggagcuucgggagaug

SEQ ID NO: 441145 - RNA, 19 nt, Homo sapiens
  misc_RNA (1)...(19): siRNA sense strand
ccacgggagacauggaaga

SEQ ID NO: 441146 - RNA, 19 nt, Homo sapiens
  misc_RNA (1)...(19): siRNA sense strand
uggcccagcuggcuucuac

SEQ ID NO: 441147 - RNA, 19 nt, Homo sapiens
  misc_RNA (1)...(19): siRNA sense strand
gugaagagaggaccuacag

SEQ ID NO: 441148 - RNA, 19 nt, Homo sapiens
  misc_RNA (1)...(19): siRNA sense strand
aaguggccuucaccauuaa

SEQ ID NO: 441149 - RNA, 19 nt, Homo sapiens
  misc_RNA (1)...(19): siRNA sense strand
gugaagaaugucaucaaca

SEQ ID NO: 441150 - RNA, 19 nt, Homo sapiens
  misc_RNA (1)...(19): siRNA sense strand
ccgagcuucugccaccauu

SEQ ID NO: 441151 - RNA, 19 nt, Homo sapiens
  misc_RNA (1)...(19): siRNA sense strand
acgcuguggugcugagcua

SEQ ID NO: 441152 - RNA, 19 nt, Homo sapiens
  misc_RNA (1)...(19): siRNA sense strand
cagcagcauuggguauaag

SEQ ID NO: 441153 - RNA, 19 nt, Homo sapiens
  misc_RNA (1)...(19): siRNA sense strand
gcccaacaccugcuaaagc

SEQ ID NO: 441154 - RNA, 19 nt, Homo sapiens
  misc_RNA (1)...(19): siRNA sense strand
caaguggccuucaccauua

SEQ ID NO: 441155 - RNA, 19 nt, Homo sapiens
  misc_RNA (1)...(19): siRNA sense strand
gcaaguggccuucaccauu

SEQ ID NO: 441156 - RNA, 19 nt, Homo sapiens
  misc_RNA (1)...(19): siRNA sense strand
gaaggcagcccugggugua

SEQ ID NO: 441157 - RNA, 19 nt, Homo sapiens
  misc_RNA (1)...(19): siRNA sense strand
ggaagcggcugacggaacu

SEQ ID NO: 441158 - RNA, 19 nt, Homo sapiens
  misc_RNA (1)...(19): siRNA sense strand
acaacgggcuuccugagaa

SEQ ID NO: 441159 - RNA, 19 nt, Homo sapiens
  misc_RNA (1)...(19): siRNA sense strand
uuaaggagcuucgggagau

SEQ ID NO: 441160 - RNA, 19 nt, Homo sapiens
  misc_RNA (1)...(19): siRNA sense strand
gugcugcccucaccagaug

SEQ ID NO: 441161 - RNA, 19 nt, Homo sapiens
  misc_RNA (1)...(19): siRNA sense strand
ugaagaaugucaucaacac

SEQ ID NO: 441162 - RNA, 19 nt, Homo sapiens
  misc_RNA (1)...(19): siRNA sense strand
ucagcagcauuggguauaa

SEQ ID NO: 441163 - RNA, 19 nt, Homo sapiens
  misc_RNA (1)...(19): siRNA sense strand
ggugaagaaugucaucaac

SEQ ID NO: 441164 - RNA, 19 nt, Homo sapiens
  misc_RNA (1)...(19): siRNA sense strand
gagcuucugccaccauuuc

SEQ ID NO: 441165 - RNA, 19 nt, Homo sapiens
  misc_RNA (1)...(19): siRNA sense strand
gaagaaugucaucaacaca

SEQ ID NO: 441166 - RNA, 19 nt, Homo sapiens
  misc_RNA (1)...(19): siRNA sense strand
gaagacaguguggcuagug

SEQ ID NO: 441167 - RNA, 19 nt, Homo sapiens
  misc_RNA (1)...(19): siRNA sense strand
gacccaagcgugcccuuug

SEQ ID NO: 441168 - RNA, 19 nt, Homo sapiens
  misc_RNA (1)...(19): siRNA sense strand
caacgggcuuccugagaac

SEQ ID NO: 441169 - RNA, 19 nt, Homo sapiens
  misc_RNA (1)...(19): siRNA sense strand
agccagaccugagcuguga

SEQ ID NO: 441170 - RNA, 19 nt, Homo sapiens
  misc_RNA (1)...(19): siRNA sense strand
gagcuucgggagaugauuc

SEQ ID NO: 441171 - RNA, 19 nt, Homo sapiens
  misc_RNA (1)...(19): siRNA sense strand
ggacaucuacgagaaacag

SEQ ID NO: 441172 - RNA, 19 nt, Homo sapiens
  misc_RNA (1)...(19): siRNA sense strand
ugacacagccgugauucug

SEQ ID NO: 441173 - RNA, 19 nt, Homo sapiens
  misc_RNA (1)...(19): siRNA sense strand
gacuggagggugucgauga

SEQ ID NO: 441174 - RNA, 19 nt, Homo sapiens
  misc_RNA (1)...(19): siRNA sense strand
gaggcagagucgagugaag

SEQ ID NO: 441175 - RNA, 19 nt, Homo sapiens
  misc_RNA (1)...(19): siRNA sense strand
gcucagcagcauuggguau

SEQ ID NO: 441176 - RNA, 19 nt, Homo sapiens
  misc_RNA (1)...(19): siRNA sense strand
agagaacggacaucacgaa

SEQ ID NO: 441177 - RNA, 19 nt, Homo sapiens
  misc_RNA (1)...(19): siRNA sense strand
caaccaugacugacagcuu

SEQ ID NO: 441178 - RNA, 19 nt, Homo sapiens
  misc_RNA (1)...(19): siRNA sense strand
cauggaagaccucccuugu

SEQ ID NO: 441179 - RNA, 19 nt, Homo sapiens
  misc_RNA (1)...(19): siRNA sense strand
uucgggagaugauucaguu

SEQ ID NO: 441180 - RNA, 19 nt, Homo sapiens
  misc_RNA (1)...(19): siRNA sense strand
acccaagcgugcccuuuga

SEQ ID NO: 441181 - RNA, 19 nt, Homo sapiens
  misc_RNA (1)...(19): siRNA sense strand
uaaggagcuucgggagaug

SEQ ID NO: 441182 - RNA, 19 nt, Homo sapiens
  misc_RNA (1)...(19): siRNA sense strand
ccacgggagacauggaaga

SEQ ID NO: 441183 - RNA, 19 nt, Homo sapiens
  misc_RNA (1)...(19): siRNA sense strand
uggcccagcuggcuucuac

SEQ ID NO: 441184 - RNA, 19 nt, Homo sapiens
  misc_RNA (1)...(19): siRNA sense strand
gugaagagaggaccuacag

SEQ ID NO: 441185 - RNA, 19 nt, Homo sapiens
  misc_RNA (1)...(19): siRNA sense strand
aaguggccuucaccauuaa

SEQ ID NO: 441186 - RNA, 19 nt, Homo sapiens
  misc_RNA (1)...(19): siRNA sense strand
gugaagaaugucaucaaca

SEQ ID NO: 441187 - RNA, 19 nt, Homo sapiens
  misc_RNA (1)...(19): siRNA sense strand
ccgagcuucugccaccauu

SEQ ID NO: 441188 - RNA, 19 nt, Homo sapiens
  misc_RNA (1)...(19): siRNA sense strand
acgcuguggugcugagcua

SEQ ID NO: 441189 - RNA, 19 nt, Homo sapiens
  misc_RNA (1)...(19): siRNA sense strand
cagcagcauuggguauaag

SEQ ID NO: 441190 - RNA, 19 nt, Homo sapiens
  misc_RNA (1)...(19): siRNA sense strand
gcccaacaccugcuaaagc

SEQ ID NO: 441191 - RNA, 19 nt, Homo sapiens
  misc_RNA (1)...(19): siRNA sense strand
gaagauaacugguuugaaa

SEQ ID NO: 441192 - RNA, 19 nt, Homo sapiens
  misc_RNA (1)...(19): siRNA sense strand
gaagauggcucaauuuaca

SEQ ID NO: 441193 - RNA, 19 nt, Homo sapiens
  misc_RNA (1)...(19): siRNA sense strand
gcacagauccaaauacaaa

SEQ ID NO: 441194 - RNA, 19 nt, Homo sapiens
  misc_RNA (1)...(19): siRNA sense strand
acaaagaacccuucaauuu

SEQ ID NO: 441195 - RNA, 19 nt, Homo sapiens
  misc_RNA (1)...(19): siRNA sense strand
acacauauguuaacaguga

SEQ ID NO: 441196 - RNA, 19 nt, Homo sapiens
  misc_RNA (1)...(19): siRNA sense strand
ugaaggaccuggagaagaa

SEQ ID NO: 441197 - RNA, 19 nt, Homo sapiens
  misc_RNA (1)...(19): siRNA sense strand
gaaaguuuaucuucgaguu

SEQ ID NO: 441198 - RNA, 19 nt, Homo sapiens
  misc_RNA (1)...(19): siRNA sense strand
gauagagaauccaaauuug

SEQ ID NO: 441199 - RNA, 19 nt, Homo sapiens
  misc_RNA (1)...(19): siRNA sense strand
ggaugaagauaacugguuu

SEQ ID NO: 441200 - RNA, 19 nt, Homo sapiens
  misc_RNA (1)...(19): siRNA sense strand
gcauugaccgugagaaaua

SEQ ID NO: 441201 - RNA, 19 nt, Homo sapiens
  misc_RNA (1)...(19): siRNA sense strand
gaaugaagguacaggauca

SEQ ID NO: 441202 - RNA, 19 nt, Homo sapiens
  misc_RNA (1)...(19): siRNA sense strand
gaaaacaagucuccuaaga

SEQ ID NO: 441203 - RNA, 19 nt, Homo sapiens
  misc_RNA (1)...(19): siRNA sense strand
gaagucaaucgccaaguua

SEQ ID NO: 441204 - RNA, 19 nt, Homo sapiens
  misc_RNA (1)...(19): siRNA sense strand
ggacaaagaacccuucaau

SEQ ID NO: 441205 - RNA, 19 nt, Homo sapiens
  misc_RNA (1)...(19): siRNA sense strand
ggaaauauccaguggugaa

SEQ ID NO: 441206 - RNA, 19 nt, Homo sapiens
  misc_RNA (1)...(19): siRNA sense strand
aaagaacccuucaauuugu

SEQ ID NO: 441207 - RNA, 19 nt, Homo sapiens
  misc_RNA (1)...(19): siRNA sense strand
gguguuggguucuguauug

SEQ ID NO: 441208 - RNA, 19 nt, Homo sapiens
  misc_RNA (1)...(19): siRNA sense strand
aaacaagucuccuaagaag

SEQ ID NO: 441209 - RNA, 19 nt, Homo sapiens
  misc_RNA (1)...(19): siRNA sense strand
uaagagaacagucaagaaa

SEQ ID NO: 441210 - RNA, 19 nt, Homo sapiens
  misc_RNA (1)...(19): siRNA sense strand
gagaguaugugacuguuca

SEQ ID NO: 441211 - RNA, 19 nt, Homo sapiens
  misc_RNA (1)...(19): siRNA sense strand
ggauaauucugccaguaaa

SEQ ID NO: 441212 - RNA, 19 nt, Homo sapiens
  misc_RNA (1)...(19): siRNA sense strand
gaacacagagugacuaucu

SEQ ID NO: 441213 - RNA, 19 nt, Homo sapiens
  misc_RNA (1)...(19): siRNA sense strand
gaagagacauaccaaagac

SEQ ID NO: 441214 - RNA, 19 nt, Homo sapiens
  misc_RNA (1)...(19): siRNA sense strand
caagagacguuagaccaaa

SEQ ID NO: 441215 - RNA, 19 nt, Homo sapiens
  misc_RNA (1)...(19): siRNA sense strand
gaaccugacacucuccaua

SEQ ID NO: 441216 - RNA, 19 nt, Homo sapiens
  misc_RNA (1)...(19): siRNA sense strand
guuggguucuguauuguua

SEQ ID NO: 441217 - RNA, 19 nt, Homo sapiens
  misc_RNA (1)...(19): siRNA sense strand
gacguuagaccaaauguaa

SEQ ID NO: 441218 - RNA, 19 nt, Homo sapiens
  misc_RNA (1)...(19): siRNA sense strand
cuacaacugucaccguuaa

SEQ ID NO: 441219 - RNA, 19 nt, Homo sapiens
  misc_RNA (1)...(19): siRNA sense strand
gcagcgagcucacaaacuc

SEQ ID NO: 441220 - RNA, 19 nt, Homo sapiens
  misc_RNA (1)...(19): siRNA sense strand
ucuagaagauggcucaauu

SEQ ID NO: 441221 - RNA, 19 nt, Homo sapiens
  misc_RNA (1)...(19): siRNA sense strand
guaacggaagcaaauauua

SEQ ID NO: 441222 - RNA, 19 nt, Homo sapiens
  misc_RNA (1)...(19): siRNA sense strand
ugagaaauacgaacaguuu

SEQ ID NO: 441223 - RNA, 19 nt, Homo sapiens
  misc_RNA (1)...(19): siRNA sense strand
uagaagauggcucaauuua

SEQ ID NO: 441224 - RNA, 19 nt, Homo sapiens
  misc_RNA (1)...(19): siRNA sense strand
gcacagaauuacaccaucu

SEQ ID NO: 441225 - RNA, 19 nt, Homo sapiens
  misc_RNA (1)...(19): siRNA sense strand
gaauauccacucccuuuga

SEQ ID NO: 441226 - RNA, 19 nt, Homo sapiens
  misc_RNA (1)...(19): siRNA sense strand
agacaggcaugguuuaguu

SEQ ID NO: 441227 - RNA, 19 nt, Homo sapiens
  misc_RNA (1)...(19): siRNA sense strand
gaauugacguggagauuuu

SEQ ID NO: 441228 - RNA, 19 nt, Homo sapiens
  misc_RNA (1)...(19): siRNA sense strand
gaaguaacggaagcaaaua

SEQ ID NO: 441229 - RNA, 19 nt, Homo sapiens
  misc_RNA (1)...(19): siRNA sense strand
ggugaaggcuuaagguauc

SEQ ID NO: 441230 - RNA, 19 nt, Homo sapiens
  misc_RNA (1)...(19): siRNA sense strand
gccaaacacuccucacuca

SEQ ID NO: 441231 - RNA, 19 nt, Homo sapiens
  misc_RNA (1)...(19): siRNA sense strand
ugaagucaaucgccaaguu

SEQ ID NO: 441232 - RNA, 19 nt, Homo sapiens
  misc_RNA (1)...(19): siRNA sense strand
cucaaaggcuguauacaaa

SEQ ID NO: 441233 - RNA, 19 nt, Homo sapiens
  misc_RNA (1)...(19): siRNA sense strand
gauaaaaguuguacuguca

SEQ ID NO: 441234 - RNA, 19 nt, Homo sapiens
  misc_RNA (1)...(19): siRNA sense strand
cagaauauccacucccuuu

SEQ ID NO: 441235 - RNA, 19 nt, Homo sapiens
  misc_RNA (1)...(19): siRNA sense strand
caaaggagguggacaucag

SEQ ID NO: 441236 - RNA, 19 nt, Homo sapiens
  misc_RNA (1)...(19): siRNA sense strand
gaaggagugcuguguguug

SEQ ID NO: 441237 - RNA, 19 nt, Homo sapiens
  misc_RNA (1)...(19): siRNA sense strand
caaacacuccucacucaaa

SEQ ID NO: 441238 - RNA, 19 nt, Homo sapiens
  misc_RNA (1)...(19): siRNA sense strand
caacaaaucccagaucauc

SEQ ID NO: 441239 - RNA, 19 nt, Homo sapiens
  misc_RNA (1)...(19): siRNA sense strand
ugaaacacuuguaggcaaa

SEQ ID NO: 441240 - RNA, 19 nt, Homo sapiens
  misc_RNA (1)...(19): siRNA sense strand
gggagauacuggcagauau

SEQ ID NO: 441241 - RNA, 19 nt, Homo sapiens
  misc_RNA (1)...(19): siRNA sense strand
agagaacagucaagaaaug

SEQ ID NO: 441242 - RNA, 19 nt, Homo sapiens
  misc_RNA (1)...(19): siRNA sense strand
ucagaaaguuuaucuucga

SEQ ID NO: 441243 - RNA, 19 nt, Homo sapiens
  misc_RNA (1)...(19): siRNA sense strand
gcacuggacccggaaauau

SEQ ID NO: 441244 - RNA, 19 nt, Homo sapiens
  misc_RNA (1)...(19): siRNA sense strand
acgaacaguuugcguuaua

SEQ ID NO: 441245 - RNA, 19 nt, Homo sapiens
  misc_RNA (1)...(19): siRNA sense strand
gacccugccuucagaauuc

SEQ ID NO: 441246 - RNA, 19 nt, Homo sapiens
  misc_RNA (1)...(19): siRNA sense strand
gagcauugaccgugagaaa

SEQ ID NO: 441247 - RNA, 19 nt, Homo sapiens
  misc_RNA (1)...(19): siRNA sense strand
ucaacacacuggcgacuug

SEQ ID NO: 441248 - RNA, 19 nt, Homo sapiens
  misc_RNA (1)...(19): siRNA sense strand
cuuaagguaucagaaguua

SEQ ID NO: 441249 - RNA, 19 nt, Homo sapiens
  misc_RNA (1)...(19): siRNA sense strand
caggaacaauuacuauuuc

SEQ ID NO: 441250 - RNA, 19 nt, Homo sapiens
  misc_RNA (1)...(19): siRNA sense strand
uagcacagauccaaauaca

SEQ ID NO: 441251 - RNA, 19 nt, Homo sapiens
  misc_RNA (1)...(19): siRNA sense strand
gaagacauagcccagcaaa

SEQ ID NO: 441252 - RNA, 19 nt, Homo sapiens
  misc_RNA (1)...(19): siRNA sense strand
gaugggcuauucuugcuau

SEQ ID NO: 441253 - RNA, 19 nt, Homo sapiens
  misc_RNA (1)...(19): siRNA sense strand
gaucacgcaccucaaauug

SEQ ID NO: 441254 - RNA, 19 nt, Homo sapiens
  misc_RNA (1)...(19): siRNA sense strand
gcaaguuggugucauuaac

SEQ ID NO: 441255 - RNA, 19 nt, Homo sapiens
  misc_RNA (1)...(19): siRNA sense strand
gacaaagaacccuucaauu

SEQ ID NO: 441256 - RNA, 19 nt, Homo sapiens
  misc_RNA (1)...(19): siRNA sense strand
gcagacauccaacauuugu

SEQ ID NO: 441257 - RNA, 19 nt, Homo sapiens
  misc_RNA (1)...(19): siRNA sense strand
cagggagcaucuucuguaa

SEQ ID NO: 441258 - RNA, 19 nt, Homo sapiens
  misc_RNA (1)...(19): siRNA sense strand
cuauuucacuugaggauga

SEQ ID NO: 441259 - RNA, 19 nt, Homo sapiens
  misc_RNA (1)...(19): siRNA sense strand
caaagcauuucuccauaca

SEQ ID NO: 441260 - RNA, 19 nt, Homo sapiens
  misc_RNA (1)...(19): siRNA sense strand
gacaaagaagugaccauuu

SEQ ID NO: 441261 - RNA, 19 nt, Homo sapiens
  misc_RNA (1)...(19): siRNA sense strand
augcagacauccaacauuu

SEQ ID NO: 441262 - RNA, 19 nt, Homo sapiens
  misc_RNA (1)...(19): siRNA sense strand
ccagggagcaucuucugua

SEQ ID NO: 441263 - RNA, 19 nt, Homo sapiens
  misc_RNA (1)...(19): siRNA sense strand
gaguguagaaugaaggaua

SEQ ID NO: 441264 - RNA, 19 nt, Homo sapiens
  misc_RNA (1)...(19): siRNA sense strand
ggggauaucuuuuguacaa

SEQ ID NO: 441265 - RNA, 19 nt, Homo sapiens
  misc_RNA (1)...(19): siRNA sense strand
ggccaggcguggacaaaga

SEQ ID NO: 441266 - RNA, 19 nt, Homo sapiens
  misc_RNA (1)...(19): siRNA sense strand
ccaaagcauuucuccauac

SEQ ID NO: 441267 - RNA, 19 nt, Homo sapiens
  misc_RNA (1)...(19): siRNA sense strand
ucacaaacuccuacaaugu

SEQ ID NO: 441268 - RNA, 19 nt, Homo sapiens
  misc_RNA (1)...(19): siRNA sense strand
cagaucauccaaagcauuu

SEQ ID NO: 441269 - RNA, 19 nt, Homo sapiens
  misc_RNA (1)...(19): siRNA sense strand
gaacauagaagaaaaggau

SEQ ID NO: 441270 - RNA, 19 nt, Homo sapiens
  misc_RNA (1)...(19): siRNA sense strand
gggaacaacaagagauaaa

SEQ ID NO: 441271 - RNA, 19 nt, Homo sapiens
  misc_RNA (1)...(19): siRNA sense strand
caacaaaggagguggacau

SEQ ID NO: 441272 - RNA, 19 nt, Homo sapiens
  misc_RNA (1)...(19): siRNA sense strand
uccaaagcauuucuccaua

SEQ ID NO: 441273 - RNA, 19 nt, Homo sapiens
  misc_RNA (1)...(19): siRNA sense strand
gagugacuaucuuuacugu

SEQ ID NO: 441274 - RNA, 19 nt, Homo sapiens
  misc_RNA (1)...(19): siRNA sense strand
gaacucguuggguccauuu

SEQ ID NO: 441275 - RNA, 19 nt, Homo sapiens
  misc_RNA (1)...(19): siRNA sense strand
ggagugcuguguguuguca

SEQ ID NO: 441276 - RNA, 19 nt, Homo sapiens
  misc_RNA (1)...(19): siRNA sense strand
ccaucugaguguagaauga

SEQ ID NO: 441277 - RNA, 19 nt, Homo sapiens
  misc_RNA (1)...(19): siRNA sense strand
gaaugccacccuccaguga

SEQ ID NO: 441278 - RNA, 19 nt, Homo sapiens
  misc_RNA (1)...(19): siRNA sense strand
caauuuacacaacacauga

SEQ ID NO: 441279 - RNA, 19 nt, Homo sapiens
  misc_RNA (1)...(19): siRNA sense strand
ggagauacuggcagauaug

SEQ ID NO: 441280 - RNA, 19 nt, Homo sapiens
  misc_RNA (1)...(19): siRNA sense strand
ggauuuugcuguucugaaa

SEQ ID NO: 441281 - RNA, 19 nt, Homo sapiens
  misc_RNA (1)...(19): siRNA sense strand
cuugagaacucuaaaagua

SEQ ID NO: 441282 - RNA, 19 nt, Homo sapiens
  misc_RNA (1)...(19): siRNA sense strand
gggagcaucuucuguaagc

SEQ ID NO: 441283 - RNA, 19 nt, Homo sapiens
  misc_RNA (1)...(19): siRNA sense strand
gguacaggaucaggauuug

SEQ ID NO: 441284 - RNA, 19 nt, Homo sapiens
  misc_RNA (1)...(19): siRNA sense strand
gaagguacaggaucaggau

SEQ ID NO: 441285 - RNA, 19 nt, Homo sapiens
  misc_RNA (1)...(19): siRNA sense strand
gaacaguuugcguuauaug

SEQ ID NO: 441286 - RNA, 19 nt, Homo sapiens
  misc_RNA (1)...(19): siRNA sense strand
caaguuauuuugcaaguug

SEQ ID NO: 441287 - RNA, 19 nt, Homo sapiens
  misc_RNA (1)...(19): siRNA sense strand
acaagcaugucuguuggua

SEQ ID NO: 441288 - RNA, 19 nt, Homo sapiens
  misc_RNA (1)...(19): siRNA sense strand
uaacggaagcaaauauuag

SEQ ID NO: 441289 - RNA, 19 nt, Homo sapiens
  misc_RNA (1)...(19): siRNA sense strand
cguuagaccaaauguaaua

SEQ ID NO: 441290 - RNA, 19 nt, Homo sapiens
  misc_RNA (1)...(19): siRNA sense strand
gcaguuggccgaucuugca

SEQ ID NO: 441291 - RNA, 19 nt, Homo sapiens
  misc_RNA (1)...(19): siRNA sense strand
gaagauaacugguuugaaa

SEQ ID NO: 441292 - RNA, 19 nt, Homo sapiens
  misc_RNA (1)...(19): siRNA sense strand
gaagauggcucaauuuaca

SEQ ID NO: 441293 - RNA, 19 nt, Homo sapiens
  misc_RNA (1)...(19): siRNA sense strand
gcaaagacaugcaucaaga

SEQ ID NO: 441294 - RNA, 19 nt, Homo sapiens
  misc_RNA (1)...(19): siRNA sense strand
gcacagauccaaauacaaa

SEQ ID NO: 441295 - RNA, 19 nt, Homo sapiens
  misc_RNA (1)...(19): siRNA sense strand
agacaugcaucaagaaaua

SEQ ID NO: 441296 - RNA, 19 nt, Homo sapiens
  misc_RNA (1)...(19): siRNA sense strand
acaaagaacccuucaauuu

SEQ ID NO: 441297 - RNA, 19 nt, Homo sapiens
  misc_RNA (1)...(19): siRNA sense strand
acacauauguuaacaguga

SEQ ID NO: 441298 - RNA, 19 nt, Homo sapiens
  misc_RNA (1)...(19): siRNA sense strand
ugaaggaccuggagaagaa

SEQ ID NO: 441299 - RNA, 19 nt, Homo sapiens
  misc_RNA (1)...(19): siRNA sense strand
gaaaguuuaucuucgaguu

SEQ ID NO: 441300 - RNA, 19 nt, Homo sapiens
  misc_RNA (1)...(19): siRNA sense strand
gauagagaauccaaauuug

SEQ ID NO: 441301 - RNA, 19 nt, Homo sapiens
  misc_RNA (1)...(19): siRNA sense strand
ggaugaagauaacugguuu

SEQ ID NO: 441302 - RNA, 19 nt, Homo sapiens
  misc_RNA (1)...(19): siRNA sense strand
gcauugaccgugagaaaua

SEQ ID NO: 441303 - RNA, 19 nt, Homo sapiens
  misc_RNA (1)...(19): siRNA sense strand
gaaugaagguacaggauca

SEQ ID NO: 441304 - RNA, 19 nt, Homo sapiens
  misc_RNA (1)...(19): siRNA sense strand
gaaaacaagucuccuaaga

SEQ ID NO: 441305 - RNA, 19 nt, Homo sapiens
  misc_RNA (1)...(19): siRNA sense strand
gaagucaaucgccaaguua

SEQ ID NO: 441306 - RNA, 19 nt, Homo sapiens
  misc_RNA (1)...(19): siRNA sense strand
ggacaaagaacccuucaau

SEQ ID NO: 441307 - RNA, 19 nt, Homo sapiens
  misc_RNA (1)...(19): siRNA sense strand
ggaaauauccaguggugaa

SEQ ID NO: 441308 - RNA, 19 nt, Homo sapiens
  misc_RNA (1)...(19): siRNA sense strand
aaagaacccuucaauuugu

SEQ ID NO: 441309 - RNA, 19 nt, Homo sapiens
  misc_RNA (1)...(19): siRNA sense strand
gguguuggguucuguauug

SEQ ID NO: 441310 - RNA, 19 nt, Homo sapiens
  misc_RNA (1)...(19): siRNA sense strand
aaacaagucuccuaagaag

SEQ ID NO: 441311 - RNA, 19 nt, Homo sapiens
  misc_RNA (1)...(19): siRNA sense strand
uaagagaacagucaagaaa

SEQ ID NO: 441312 - RNA, 19 nt, Homo sapiens
  misc_RNA (1)...(19): siRNA sense strand
gagaguaugugacuguuca

SEQ ID NO: 441313 - RNA, 19 nt, Homo sapiens
  misc_RNA (1)...(19): siRNA sense strand
ggauaauucugccaguaaa

SEQ ID NO: 441314 - RNA, 19 nt, Homo sapiens
  misc_RNA (1)...(19): siRNA sense strand
gaacacagagugacuaucu

SEQ ID NO: 441315 - RNA, 19 nt, Homo sapiens
  misc_RNA (1)...(19): siRNA sense strand
gaagagacauaccaaagac

SEQ ID NO: 441316 - RNA, 19 nt, Homo sapiens
  misc_RNA (1)...(19): siRNA sense strand
caagagacguuagaccaaa

SEQ ID NO: 441317 - RNA, 19 nt, Homo sapiens
  misc_RNA (1)...(19): siRNA sense strand
ggacuggaguuucuagauc

SEQ ID NO: 441318 - RNA, 19 nt, Homo sapiens
  misc_RNA (1)...(19): siRNA sense strand
gaaccugacacucuccaua

SEQ ID NO: 441319 - RNA, 19 nt, Homo sapiens
  misc_RNA (1)...(19): siRNA sense strand
guuggguucuguauuguua

SEQ ID NO: 441320 - RNA, 19 nt, Homo sapiens
  misc_RNA (1)...(19): siRNA sense strand
gacguuagaccaaauguaa

SEQ ID NO: 441321 - RNA, 19 nt, Homo sapiens
  misc_RNA (1)...(19): siRNA sense strand
cuacaacugucaccguuaa

SEQ ID NO: 441322 - RNA, 19 nt, Homo sapiens
  misc_RNA (1)...(19): siRNA sense strand
gcagcgagcucacaaacuc

SEQ ID NO: 441323 - RNA, 19 nt, Homo sapiens
  misc_RNA (1)...(19): siRNA sense strand
ucuagaagauggcucaauu

SEQ ID NO: 441324 - RNA, 19 nt, Homo sapiens
  misc_RNA (1)...(19): siRNA sense strand
guaacggaagcaaauauua

SEQ ID NO: 441325 - RNA, 19 nt, Homo sapiens
  misc_RNA (1)...(19): siRNA sense strand
ugagaaauacgaacaguuu

SEQ ID NO: 441326 - RNA, 19 nt, Homo sapiens
  misc_RNA (1)...(19): siRNA sense strand
uagaagauggcucaauuua

SEQ ID NO: 441327 - RNA, 19 nt, Homo sapiens
  misc_RNA (1)...(19): siRNA sense strand
gcacagaauuacaccaucu

SEQ ID NO: 441328 - RNA, 19 nt, Homo sapiens
  misc_RNA (1)...(19): siRNA sense strand
gaauauccacucccuuuga

SEQ ID NO: 441329 - RNA, 19 nt, Homo sapiens
  misc_RNA (1)...(19): siRNA sense strand
gcauaaacauugugaagac

SEQ ID NO: 441330 - RNA, 19 nt, Homo sapiens
  misc_RNA (1)...(19): siRNA sense strand
agacaggcaugguuuaguu

SEQ ID NO: 441331 - RNA, 19 nt, Homo sapiens
  misc_RNA (1)...(19): siRNA sense strand
gaauugacguggagauuuu

SEQ ID NO: 441332 - RNA, 19 nt, Homo sapiens
  misc_RNA (1)...(19): siRNA sense strand
gaaguaacggaagcaaaua

SEQ ID NO: 441333 - RNA, 19 nt, Homo sapiens
  misc_RNA (1)...(19): siRNA sense strand
ggugaaggcuuaagguauc

SEQ ID NO: 441334 - RNA, 19 nt, Homo sapiens
  misc_RNA (1)...(19): siRNA sense strand
gccaaacacuccucacuca

SEQ ID NO: 441335 - RNA, 19 nt, Homo sapiens
  misc_RNA (1)...(19): siRNA sense strand
gaacccaaauuuaggacau

SEQ ID NO: 441336 - RNA, 19 nt, Homo sapiens
  misc_RNA (1)...(19): siRNA sense strand
gacaagaugaggagcauaa

SEQ ID NO: 441337 - RNA, 19 nt, Homo sapiens
  misc_RNA (1)...(19): siRNA sense strand
ugaagucaaucgccaaguu

SEQ ID NO: 441338 - RNA, 19 nt, Homo sapiens
  misc_RNA (1)...(19): siRNA sense strand
cucaaaggcuguauacaaa

SEQ ID NO: 441339 - RNA, 19 nt, Homo sapiens
  misc_RNA (1)...(19): siRNA sense strand
gauaaaaguuguacuguca

SEQ ID NO: 441340 - RNA, 19 nt, Homo sapiens
  misc_RNA (1)...(19): siRNA sense strand
cagaauauccacucccuuu

SEQ ID NO: 441341 - RNA, 19 nt, Homo sapiens
  misc_RNA (1)...(19): siRNA sense strand
caaaggagguggacaucag

SEQ ID NO: 441342 - RNA, 19 nt, Homo sapiens
  misc_RNA (1)...(19): siRNA sense strand
gaaggagugcuguguguug

SEQ ID NO: 441343 - RNA, 19 nt, Homo sapiens
  misc_RNA (1)...(19): siRNA sense strand
caaacacuccucacucaaa

SEQ ID NO: 441344 - RNA, 19 nt, Homo sapiens
  misc_RNA (1)...(19): siRNA sense strand
caacaaaucccagaucauc

SEQ ID NO: 441345 - RNA, 19 nt, Homo sapiens
  misc_RNA (1)...(19): siRNA sense strand
ugaaacacuuguaggcaaa

SEQ ID NO: 441346 - RNA, 19 nt, Homo sapiens
  misc_RNA (1)...(19): siRNA sense strand
gggagauacuggcagauau

SEQ ID NO: 441347 - RNA, 19 nt, Homo sapiens
  misc_RNA (1)...(19): siRNA sense strand
ucagaaaguuuaucuucga

SEQ ID NO: 441348 - RNA, 19 nt, Homo sapiens
  misc_RNA (1)...(19): siRNA sense strand
agagaacagucaagaaaug

SEQ ID NO: 441349 - RNA, 19 nt, Homo sapiens
  misc_RNA (1)...(19): siRNA sense strand
gcacuggacccggaaauau

SEQ ID NO: 441350 - RNA, 19 nt, Homo sapiens
  misc_RNA (1)...(19): siRNA sense strand
acgaacaguuugcguuaua

SEQ ID NO: 441351 - RNA, 19 nt, Homo sapiens
  misc_RNA (1)...(19): siRNA sense strand
gacccugccuucagaauuc

SEQ ID NO: 441352 - RNA, 19 nt, Homo sapiens
  misc_RNA (1)...(19): siRNA sense strand
gagcauugaccgugagaaa

SEQ ID NO: 441353 - RNA, 19 nt, Homo sapiens
  misc_RNA (1)...(19): siRNA sense strand
ucaacacacuggcgacuug

SEQ ID NO: 441354 - RNA, 19 nt, Homo sapiens
  misc_RNA (1)...(19): siRNA sense strand
cuuaagguaucagaaguua

SEQ ID NO: 441355 - RNA, 19 nt, Homo sapiens
  misc_RNA (1)...(19): siRNA sense strand
caggaacaauuacuauuuc

SEQ ID NO: 441356 - RNA, 19 nt, Homo sapiens
  misc_RNA (1)...(19): siRNA sense strand
uagcacagauccaaauaca

SEQ ID NO: 441357 - RNA, 19 nt, Homo sapiens
  misc_RNA (1)...(19): siRNA sense strand
gaagacauagcccagcaaa

SEQ ID NO: 441358 - RNA, 19 nt, Homo sapiens
  misc_RNA (1)...(19): siRNA sense strand
gaugggcuauucuugcuau

SEQ ID NO: 441359 - RNA, 19 nt, Homo sapiens
  misc_RNA (1)...(19): siRNA sense strand
gaucacgcaccucaaauug

SEQ ID NO: 441360 - RNA, 19 nt, Homo sapiens
  misc_RNA (1)...(19): siRNA sense strand
gcaaguuggugucauuaac

SEQ ID NO: 441361 - RNA, 19 nt, Homo sapiens
  misc_RNA (1)...(19): siRNA sense strand
gacaaagaacccuucaauu

SEQ ID NO: 441362 - RNA, 19 nt, Homo sapiens
  misc_RNA (1)...(19): siRNA sense strand
gcagacauccaacauuugu

SEQ ID NO: 441363 - RNA, 19 nt, Homo sapiens
  misc_RNA (1)...(19): siRNA sense strand
cagggagcaucuucuguaa

SEQ ID NO: 441364 - RNA, 19 nt, Homo sapiens
  misc_RNA (1)...(19): siRNA sense strand
cuauuucacuugaggauga

SEQ ID NO: 441365 - RNA, 19 nt, Homo sapiens
  misc_RNA (1)...(19): siRNA sense strand
caaagcauuucuccauaca

SEQ ID NO: 441366 - RNA, 19 nt, Homo sapiens
  misc_RNA (1)...(19): siRNA sense strand
ccagggagcaucuucugua

SEQ ID NO: 441367 - RNA, 19 nt, Homo sapiens
  misc_RNA (1)...(19): siRNA sense strand
augcagacauccaacauuu

SEQ ID NO: 441368 - RNA, 19 nt, Homo sapiens
  misc_RNA (1)...(19): siRNA sense strand
gaguguagaaugaaggaua

SEQ ID NO: 441369 - RNA, 19 nt, Homo sapiens
  misc_RNA (1)...(19): siRNA sense strand
gacaaagaagugaccauuu

SEQ ID NO: 441370 - RNA, 19 nt, Homo sapiens
  misc_RNA (1)...(19): siRNA sense strand
ggggauaucuuuuguacaa

SEQ ID NO: 441371 - RNA, 19 nt, Homo sapiens
  misc_RNA (1)...(19): siRNA sense strand
ggccaggcguggacaaaga

SEQ ID NO: 441372 - RNA, 19 nt, Homo sapiens
  misc_RNA (1)...(19): siRNA sense strand
ccaaagcauuucuccauac

SEQ ID NO: 441373 - RNA, 19 nt, Homo sapiens
  misc_RNA (1)...(19): siRNA sense strand
ucacaaacuccuacaaugu

SEQ ID NO: 441374 - RNA, 19 nt, Homo sapiens
  misc_RNA (1)...(19): siRNA sense strand
cagaucauccaaagcauuu

SEQ ID NO: 441375 - RNA, 19 nt, Homo sapiens
  misc_RNA (1)...(19): siRNA sense strand
gaacauagaagaaaaggau

SEQ ID NO: 441376 - RNA, 19 nt, Homo sapiens
  misc_RNA (1)...(19): siRNA sense strand
gggaacaacaagagauaaa

SEQ ID NO: 441377 - RNA, 19 nt, Homo sapiens
  misc_RNA (1)...(19): siRNA sense strand
gagcauaaacauugugaag

SEQ ID NO: 441378 - RNA, 19 nt, Homo sapiens
  misc_RNA (1)...(19): siRNA sense strand
caacaaaggagguggacau

SEQ ID NO: 441379 - RNA, 19 nt, Homo sapiens
  misc_RNA (1)...(19): siRNA sense strand
uccaaagcauuucuccaua

SEQ ID NO: 441380 - RNA, 19 nt, Homo sapiens
  misc_RNA (1)...(19): siRNA sense strand
gagugacuaucuuuacugu

SEQ ID NO: 441381 - RNA, 19 nt, Homo sapiens
  misc_RNA (1)...(19): siRNA sense strand
gaacucguuggguccauuu

SEQ ID NO: 441382 - RNA, 19 nt, Homo sapiens
  misc_RNA (1)...(19): siRNA sense strand
ggagugcuguguguuguca

SEQ ID NO: 441383 - RNA, 19 nt, Homo sapiens
  misc_RNA (1)...(19): siRNA sense strand
gacuggaguuucuagauca

SEQ ID NO: 441384 - RNA, 19 nt, Homo sapiens
  misc_RNA (1)...(19): siRNA sense strand
gaagagggacuggaguuuc

SEQ ID NO: 441385 - RNA, 19 nt, Homo sapiens
  misc_RNA (1)...(19): siRNA sense strand
ccaucugaguguagaauga

SEQ ID NO: 441386 - RNA, 19 nt, Homo sapiens
  misc_RNA (1)...(19): siRNA sense strand
gaaugccacccuccaguga

SEQ ID NO: 441387 - RNA, 19 nt, Homo sapiens
  misc_RNA (1)...(19): siRNA sense strand
gggagcaucuucuguaagc

SEQ ID NO: 441388 - RNA, 19 nt, Homo sapiens
  misc_RNA (1)...(19): siRNA sense strand
gaugaggagcauaaacauu

SEQ ID NO: 441389 - RNA, 19 nt, Homo sapiens
  misc_RNA (1)...(19): siRNA sense strand
ggagauacuggcagauaug

SEQ ID NO: 441390 - RNA, 19 nt, Homo sapiens
  misc_RNA (1)...(19): siRNA sense strand
ggauuuugcuguucugaaa

SEQ ID NO: 441391 - RNA, 19 nt, Homo sapiens
  misc_RNA (1)...(19): siRNA sense strand
gaaauuaacugauccaaca

SEQ ID NO: 441392 - RNA, 19 nt, Homo sapiens
  misc_RNA (1)...(19): siRNA sense strand
aaacaaagguccuaaagaa

SEQ ID NO: 441393 - RNA, 19 nt, Homo sapiens
  misc_RNA (1)...(19): siRNA sense strand
guggaaaucuuacgaguua

SEQ ID NO: 441394 - RNA, 19 nt, Homo sapiens
  misc_RNA (1)...(19): siRNA sense strand
ccaagaaccucggaauuua

SEQ ID NO: 441395 - RNA, 19 nt, Homo sapiens
  misc_RNA (1)...(19): siRNA sense strand
gauccugacuuccaaauuu

SEQ ID NO: 441396 - RNA, 19 nt, Homo sapiens
  misc_RNA (1)...(19): siRNA sense strand
caaacuagaugccgagaaa

SEQ ID NO: 441397 - RNA, 19 nt, Homo sapiens
  misc_RNA (1)...(19): siRNA sense strand
gcaaauugguguaguuaau

SEQ ID NO: 441398 - RNA, 19 nt, Homo sapiens
  misc_RNA (1)...(19): siRNA sense strand
gaagagaaguuuuaccaua

SEQ ID NO: 441399 - RNA, 19 nt, Homo sapiens
  misc_RNA (1)...(19): siRNA sense strand
gagagacacuggaaacuug

SEQ ID NO: 441400 - RNA, 19 nt, Homo sapiens
  misc_RNA (1)...(19): siRNA sense strand
gaacaacaagcaauggaua

SEQ ID NO: 441401 - RNA, 19 nt, Homo sapiens
  misc_RNA (1)...(19): siRNA sense strand
gagaguuaauugacaagua

SEQ ID NO: 441402 - RNA, 19 nt, Homo sapiens
  misc_RNA (1)...(19): siRNA sense strand
cauaagagguccuggaguu

SEQ ID NO: 441403 - RNA, 19 nt, Homo sapiens
  misc_RNA (1)...(19): siRNA sense strand
ggaguucuuuguguaguua

SEQ ID NO: 441404 - RNA, 19 nt, Homo sapiens
  misc_RNA (1)...(19): siRNA sense strand
ugaaggaguucuuugugua

SEQ ID NO: 441405 - RNA, 19 nt, Homo sapiens
  misc_RNA (1)...(19): siRNA sense strand
agacauggauggucaguau

SEQ ID NO: 441406 - RNA, 19 nt, Homo sapiens
  misc_RNA (1)...(19): siRNA sense strand
gaaagaaaaugcagaagug

SEQ ID NO: 441407 - RNA, 19 nt, Homo sapiens
  misc_RNA (1)...(19): siRNA sense strand
cagcagaaccuaauuguau

SEQ ID NO: 441408 - RNA, 19 nt, Homo sapiens
  misc_RNA (1)...(19): siRNA sense strand
uaaagcauaugacccagaa

SEQ ID NO: 441409 - RNA, 19 nt, Homo sapiens
  misc_RNA (1)...(19): siRNA sense strand
gaaaaugacugcacacauc

SEQ ID NO: 441410 - RNA, 19 nt, Homo sapiens
  misc_RNA (1)...(19): siRNA sense strand
gcucauauguaguaccuau

SEQ ID NO: 441411 - RNA, 19 nt, Homo sapiens
  misc_RNA (1)...(19): siRNA sense strand
cagagaauguggagacuga

SEQ ID NO: 441412 - RNA, 19 nt, Homo sapiens
  misc_RNA (1)...(19): siRNA sense strand
ggaggaugguucagucuau

SEQ ID NO: 441413 - RNA, 19 nt, Homo sapiens
  misc_RNA (1)...(19): siRNA sense strand
gcacgucuuuccuaucaga

SEQ ID NO: 441414 - RNA, 19 nt, Homo sapiens
  misc_RNA (1)...(19): siRNA sense strand
gauaacagcccauucauac

SEQ ID NO: 441415 - RNA, 19 nt, Homo sapiens
  misc_RNA (1)...(19): siRNA sense strand
gaguuacuguugaggauaa

SEQ ID NO: 441416 - RNA, 19 nt, Homo sapiens
  misc_RNA (1)...(19): siRNA sense strand
gcaguggcauaagguauaa

SEQ ID NO: 441417 - RNA, 19 nt, Homo sapiens
  misc_RNA (1)...(19): siRNA sense strand
gaaccuaauuguaucaaac

SEQ ID NO: 441418 - RNA, 19 nt, Homo sapiens
  misc_RNA (1)...(19): siRNA sense strand
ucagaagccuggauagaga

SEQ ID NO: 441419 - RNA, 19 nt, Homo sapiens
  misc_RNA (1)...(19): siRNA sense strand
gaggaugguucagucuaua

SEQ ID NO: 441420 - RNA, 19 nt, Homo sapiens
  misc_RNA (1)...(19): siRNA sense strand
cagcacgucuuuccuauca

SEQ ID NO: 441421 - RNA, 19 nt, Homo sapiens
  misc_RNA (1)...(19): siRNA sense strand
caacaagcaauggauauaa

SEQ ID NO: 441422 - RNA, 19 nt, Homo sapiens
  misc_RNA (1)...(19): siRNA sense strand
gagaagaugggcuccaauu

SEQ ID NO: 441423 - RNA, 19 nt, Homo sapiens
  misc_RNA (1)...(19): siRNA sense strand
ccauuuggcucauauguag

SEQ ID NO: 441424 - RNA, 19 nt, Homo sapiens
  misc_RNA (1)...(19): siRNA sense strand
guaguuaagccuuugaauu

SEQ ID NO: 441425 - RNA, 19 nt, Homo sapiens
  misc_RNA (1)...(19): siRNA sense strand
acuggaaacuuguauugua

SEQ ID NO: 441426 - RNA, 19 nt, Homo sapiens
  misc_RNA (1)...(19): siRNA sense strand
gauuggcgguggaggagua

SEQ ID NO: 441427 - RNA, 19 nt, Homo sapiens
  misc_RNA (1)...(19): siRNA sense strand
ggcauaagguauaagaaau

SEQ ID NO: 441428 - RNA, 19 nt, Homo sapiens
  misc_RNA (1)...(19): siRNA sense strand
cugcaaaucuaauucauuc

SEQ ID NO: 441429 - RNA, 19 nt, Homo sapiens
  misc_RNA (1)...(19): siRNA sense strand
ggccauccuugcaauauug

SEQ ID NO: 441430 - RNA, 19 nt, Homo sapiens
  misc_RNA (1)...(19): siRNA sense strand
ggacaagugugugcuacug

SEQ ID NO: 441431 - RNA, 19 nt, Homo sapiens
  misc_RNA (1)...(19): siRNA sense strand
cgagaaacuuguugguaga

SEQ ID NO: 441432 - RNA, 19 nt, Homo sapiens
  misc_RNA (1)...(19): siRNA sense strand
gaaaauacaggaucaauca

SEQ ID NO: 441433 - RNA, 19 nt, Homo sapiens
  misc_RNA (1)...(19): siRNA sense strand
gcaauggauauaaagcaua

SEQ ID NO: 441434 - RNA, 19 nt, Homo sapiens
  misc_RNA (1)...(19): siRNA sense strand
cagagaggcuaguccaaga

SEQ ID NO: 441435 - RNA, 19 nt, Homo sapiens
  misc_RNA (1)...(19): siRNA sense strand
ugauguaaaugaccacuug

SEQ ID NO: 441436 - RNA, 19 nt, Homo sapiens
  misc_RNA (1)...(19): siRNA sense strand
aaauacaguugauguggaa

SEQ ID NO: 441437 - RNA, 19 nt, Homo sapiens
  misc_RNA (1)...(19): siRNA sense strand
caaacaaagguccuaaaga

SEQ ID NO: 441438 - RNA, 19 nt, Homo sapiens
  misc_RNA (1)...(19): siRNA sense strand
gacagagaguuaauugaca

SEQ ID NO: 441439 - RNA, 19 nt, Homo sapiens
  misc_RNA (1)...(19): siRNA sense strand
acacggagguggacaacug

SEQ ID NO: 441440 - RNA, 19 nt, Homo sapiens
  misc_RNA (1)...(19): siRNA sense strand
uuacaguccuugcaucaga

SEQ ID NO: 441441 - RNA, 19 nt, Homo sapiens
  misc_RNA (1)...(19): siRNA sense strand
guuaagccuuugaauuaug

SEQ ID NO: 441442 - RNA, 19 nt, Homo sapiens
  misc_RNA (1)...(19): siRNA sense strand
guauuguacucguccugua

SEQ ID NO: 441443 - RNA, 19 nt, Homo sapiens
  misc_RNA (1)...(19): siRNA sense strand
agaaguagcaguggcauaa

SEQ ID NO: 441444 - RNA, 19 nt, Homo sapiens
  misc_RNA (1)...(19): siRNA sense strand
gagagcuaauuauaccauu

SEQ ID NO: 441445 - RNA, 19 nt, Homo sapiens
  misc_RNA (1)...(19): siRNA sense strand
ucagcuagacagagaguua

SEQ ID NO: 441446 - RNA, 19 nt, Homo sapiens
  misc_RNA (1)...(19): siRNA sense strand
gacccucgcgaucuuaaua

SEQ ID NO: 441447 - RNA, 19 nt, Homo sapiens
  misc_RNA (1)...(19): siRNA sense strand
caaaaguaauuccugauga

SEQ ID NO: 441448 - RNA, 19 nt, Homo sapiens
  misc_RNA (1)...(19): siRNA sense strand
gggccauccuugcaauauu

SEQ ID NO: 441449 - RNA, 19 nt, Homo sapiens
  misc_RNA (1)...(19): siRNA sense strand
caaggagggagaacaugua

SEQ ID NO: 441450 - RNA, 19 nt, Homo sapiens
  misc_RNA (1)...(19): siRNA sense strand
gaccaagaaccucggaauu

SEQ ID NO: 441451 - RNA, 19 nt, Homo sapiens
  misc_RNA (1)...(19): siRNA sense strand
cauguucccuccaaacuag

SEQ ID NO: 441452 - RNA, 19 nt, Homo sapiens
  misc_RNA (1)...(19): siRNA sense strand
gaugagggcccugagugua

SEQ ID NO: 441453 - RNA, 19 nt, Homo sapiens
  misc_RNA (1)...(19): siRNA sense strand
acagagaguuaauugacaa

SEQ ID NO: 441454 - RNA, 19 nt, Homo sapiens
  misc_RNA (1)...(19): siRNA sense strand
cuuuacagcugcaaaucua

SEQ ID NO: 441455 - RNA, 19 nt, Homo sapiens
  misc_RNA (1)...(19): siRNA sense strand
cauuuacucguacuucuua

SEQ ID NO: 441456 - RNA, 19 nt, Homo sapiens
  misc_RNA (1)...(19): siRNA sense strand
gagaugacaaaguguauuc

SEQ ID NO: 441457 - RNA, 19 nt, Homo sapiens
  misc_RNA (1)...(19): siRNA sense strand
gcaauauuguugggcauag

SEQ ID NO: 441458 - RNA, 19 nt, Homo sapiens
  misc_RNA (1)...(19): siRNA sense strand
agacagugaucaucugcaa

SEQ ID NO: 441459 - RNA, 19 nt, Homo sapiens
  misc_RNA (1)...(19): siRNA sense strand
caagaaccucggaauuuau

SEQ ID NO: 441460 - RNA, 19 nt, Homo sapiens
  misc_RNA (1)...(19): siRNA sense strand
guggacaacugcagauaca

SEQ ID NO: 441461 - RNA, 19 nt, Homo sapiens
  misc_RNA (1)...(19): siRNA sense strand
gagauagacuuggcauguc

SEQ ID NO: 441462 - RNA, 19 nt, Homo sapiens
  misc_RNA (1)...(19): siRNA sense strand
ccuauaacagugagagaua

SEQ ID NO: 441463 - RNA, 19 nt, Homo sapiens
  misc_RNA (1)...(19): siRNA sense strand
ggcccacccuuugacuuua

SEQ ID NO: 441464 - RNA, 19 nt, Homo sapiens
  misc_RNA (1)...(19): siRNA sense strand
gaagugggaacaacaagca

SEQ ID NO: 441465 - RNA, 19 nt, Homo sapiens
  misc_RNA (1)...(19): siRNA sense strand
gcagaagugggaacaacaa

SEQ ID NO: 441466 - RNA, 19 nt, Homo sapiens
  misc_RNA (1)...(19): siRNA sense strand
gaagaaaagcaacagauga

SEQ ID NO: 441467 - RNA, 19 nt, Homo sapiens
  misc_RNA (1)...(19): siRNA sense strand
gaccacuugccaacauuua

SEQ ID NO: 441468 - RNA, 19 nt, Homo sapiens
  misc_RNA (1)...(19): siRNA sense strand
cugaaguacuccaucauug

SEQ ID NO: 441469 - RNA, 19 nt, Homo sapiens
  misc_RNA (1)...(19): siRNA sense strand
gcacuacugugggacaagu

SEQ ID NO: 441470 - RNA, 19 nt, Homo sapiens
  misc_RNA (1)...(19): siRNA sense strand
cuaacuggagagcuaauua

SEQ ID NO: 441471 - RNA, 19 nt, Homo sapiens
  misc_RNA (1)...(19): siRNA sense strand
ugauaacagcccauucaua

SEQ ID NO: 441472 - RNA, 19 nt, Homo sapiens
  misc_RNA (1)...(19): siRNA sense strand
gaaggaguucuuuguguag

SEQ ID NO: 441473 - RNA, 19 nt, Homo sapiens
  misc_RNA (1)...(19): siRNA sense strand
gcauaugacccagaaacaa

SEQ ID NO: 441474 - RNA, 19 nt, Homo sapiens
  misc_RNA (1)...(19): siRNA sense strand
gagaauguggagacugaaa

SEQ ID NO: 441475 - RNA, 19 nt, Homo sapiens
  misc_RNA (1)...(19): siRNA sense strand
uucaacagguucaaucuga

SEQ ID NO: 441476 - RNA, 19 nt, Homo sapiens
  misc_RNA (1)...(19): siRNA sense strand
agacugaaagcaauuaaug

SEQ ID NO: 441477 - RNA, 19 nt, Homo sapiens
  misc_RNA (1)...(19): siRNA sense strand
gaguguaacccuccaauac

SEQ ID NO: 441478 - RNA, 19 nt, Homo sapiens
  misc_RNA (1)...(19): siRNA sense strand
gccuuugaauuaugaagaa

SEQ ID NO: 441479 - RNA, 19 nt, Homo sapiens
  misc_RNA (1)...(19): siRNA sense strand
caacaucaucucagcuaga

SEQ ID NO: 441480 - RNA, 19 nt, Homo sapiens
  misc_RNA (1)...(19): siRNA sense strand
ugagauaauugccuuugca

SEQ ID NO: 441481 - RNA, 19 nt, Homo sapiens
  misc_RNA (1)...(19): siRNA sense strand
ggagagagacacuggaaac

SEQ ID NO: 441482 - RNA, 19 nt, Homo sapiens
  misc_RNA (1)...(19): siRNA sense strand
gcccaaaacuauaccauau

SEQ ID NO: 441483 - RNA, 19 nt, Homo sapiens
  misc_RNA (1)...(19): siRNA sense strand
gaagaugggcuccaauucc

SEQ ID NO: 441484 - RNA, 19 nt, Homo sapiens
  misc_RNA (1)...(19): siRNA sense strand
gcaaacccaccaugucauc

SEQ ID NO: 441485 - RNA, 19 nt, Homo sapiens
  misc_RNA (1)...(19): siRNA sense strand
uaacuggagagcuaauuau

SEQ ID NO: 441486 - RNA, 19 nt, Homo sapiens
  misc_RNA (1)...(19): siRNA sense strand
ugacaucaguggaagaaaa

SEQ ID NO: 441487 - RNA, 19 nt, Homo sapiens
  misc_RNA (1)...(19): siRNA sense strand
acucguacuucuuauguga

SEQ ID NO: 441488 - RNA, 19 nt, Homo sapiens
  misc_RNA (1)...(19): siRNA sense strand
cuacagacaacuucaacuu

SEQ ID NO: 441489 - RNA, 19 nt, Homo sapiens
  misc_RNA (1)...(19): siRNA sense strand
gggcuccaauuccuuguuc

SEQ ID NO: 441490 - RNA, 19 nt, Homo sapiens
  misc_RNA (1)...(19): siRNA sense strand
cagcagcacgucuuuccua

SEQ ID NO: 441491 - RNA, 19 nt, Homo sapiens
  misc_RNA (1)...(19): siRNA sense strand
gaaauuaacugauccaaca

SEQ ID NO: 441492 - RNA, 19 nt, Homo sapiens
  misc_RNA (1)...(19): siRNA sense strand
aaacaaagguccuaaagaa

SEQ ID NO: 441493 - RNA, 19 nt, Homo sapiens
  misc_RNA (1)...(19): siRNA sense strand
guggaaaucuuacgaguua

SEQ ID NO: 441494 - RNA, 19 nt, Homo sapiens
  misc_RNA (1)...(19): siRNA sense strand
ccaagaaccucggaauuua

SEQ ID NO: 441495 - RNA, 19 nt, Homo sapiens
  misc_RNA (1)...(19): siRNA sense strand
gauccugacuuccaaauuu

SEQ ID NO: 441496 - RNA, 19 nt, Homo sapiens
  misc_RNA (1)...(19): siRNA sense strand
caaacuagaugccgagaaa

SEQ ID NO: 441497 - RNA, 19 nt, Homo sapiens
  misc_RNA (1)...(19): siRNA sense strand
gcaaauugguguaguuaau

SEQ ID NO: 441498 - RNA, 19 nt, Homo sapiens
  misc_RNA (1)...(19): siRNA sense strand
gaagagaaguuuuaccaua

SEQ ID NO: 441499 - RNA, 19 nt, Homo sapiens
  misc_RNA (1)...(19): siRNA sense strand
gagagacacuggaaacuug

SEQ ID NO: 441500 - RNA, 19 nt, Homo sapiens
  misc_RNA (1)...(19): siRNA sense strand
gaacaacaagcaauggaua

SEQ ID NO: 441501 - RNA, 19 nt, Homo sapiens
  misc_RNA (1)...(19): siRNA sense strand
gagaguuaauugacaagua

SEQ ID NO: 441502 - RNA, 19 nt, Homo sapiens
  misc_RNA (1)...(19): siRNA sense strand
cauaagagguccuggaguu

SEQ ID NO: 441503 - RNA, 19 nt, Homo sapiens
  misc_RNA (1)...(19): siRNA sense strand
gcagaagcaugcaugaaga

SEQ ID NO: 441504 - RNA, 19 nt, Homo sapiens
  misc_RNA (1)...(19): siRNA sense strand
ggaguucuuuguguaguua

SEQ ID NO: 441505 - RNA, 19 nt, Homo sapiens
  misc_RNA (1)...(19): siRNA sense strand
ugaaggaguucuuugugua

SEQ ID NO: 441506 - RNA, 19 nt, Homo sapiens
  misc_RNA (1)...(19): siRNA sense strand
agacauggauggucaguau

SEQ ID NO: 441507 - RNA, 19 nt, Homo sapiens
  misc_RNA (1)...(19): siRNA sense strand
gaaagaaaaugcagaagug

SEQ ID NO: 441508 - RNA, 19 nt, Homo sapiens
  misc_RNA (1)...(19): siRNA sense strand
cagcagaaccuaauuguau

SEQ ID NO: 441509 - RNA, 19 nt, Homo sapiens
  misc_RNA (1)...(19): siRNA sense strand
uaaagcauaugacccagaa

SEQ ID NO: 441510 - RNA, 19 nt, Homo sapiens
  misc_RNA (1)...(19): siRNA sense strand
gaaaaugacugcacacauc

SEQ ID NO: 441511 - RNA, 19 nt, Homo sapiens
  misc_RNA (1)...(19): siRNA sense strand
gcucauauguaguaccuau

SEQ ID NO: 441512 - RNA, 19 nt, Homo sapiens
  misc_RNA (1)...(19): siRNA sense strand
cagagaauguggagacuga

SEQ ID NO: 441513 - RNA, 19 nt, Homo sapiens
  misc_RNA (1)...(19): siRNA sense strand
ggaggaugguucagucuau

SEQ ID NO: 441514 - RNA, 19 nt, Homo sapiens
  misc_RNA (1)...(19): siRNA sense strand
gcacgucuuuccuaucaga

SEQ ID NO: 441515 - RNA, 19 nt, Homo sapiens
  misc_RNA (1)...(19): siRNA sense strand
gauaacagcccauucauac

SEQ ID NO: 441516 - RNA, 19 nt, Homo sapiens
  misc_RNA (1)...(19): siRNA sense strand
gaguuacuguugaggauaa

SEQ ID NO: 441517 - RNA, 19 nt, Homo sapiens
  misc_RNA (1)...(19): siRNA sense strand
gcaguggcauaagguauaa

SEQ ID NO: 441518 - RNA, 19 nt, Homo sapiens
  misc_RNA (1)...(19): siRNA sense strand
gaaccuaauuguaucaaac

SEQ ID NO: 441519 - RNA, 19 nt, Homo sapiens
  misc_RNA (1)...(19): siRNA sense strand
ucagaagccuggauagaga

SEQ ID NO: 441520 - RNA, 19 nt, Homo sapiens
  misc_RNA (1)...(19): siRNA sense strand
gaggaugguucagucuaua

SEQ ID NO: 441521 - RNA, 19 nt, Homo sapiens
  misc_RNA (1)...(19): siRNA sense strand
cagcacgucuuuccuauca

SEQ ID NO: 441522 - RNA, 19 nt, Homo sapiens
  misc_RNA (1)...(19): siRNA sense strand
caacaagcaauggauauaa

SEQ ID NO: 441523 - RNA, 19 nt, Homo sapiens
  misc_RNA (1)...(19): siRNA sense strand
gagaagaugggcuccaauu

SEQ ID NO: 441524 - RNA, 19 nt, Homo sapiens
  misc_RNA (1)...(19): siRNA sense strand
ccauuuggcucauauguag

SEQ ID NO: 441525 - RNA, 19 nt, Homo sapiens
  misc_RNA (1)...(19): siRNA sense strand
guaguuaagccuuugaauu

SEQ ID NO: 441526 - RNA, 19 nt, Homo sapiens
  misc_RNA (1)...(19): siRNA sense strand
acuggaaacuuguauugua

SEQ ID NO: 441527 - RNA, 19 nt, Homo sapiens
  misc_RNA (1)...(19): siRNA sense strand
gauuggcgguggaggagua

SEQ ID NO: 441528 - RNA, 19 nt, Homo sapiens
  misc_RNA (1)...(19): siRNA sense strand
ggcauaagguauaagaaau

SEQ ID NO: 441529 - RNA, 19 nt, Homo sapiens
  misc_RNA (1)...(19): siRNA sense strand
cugcaaaucuaauucauuc

SEQ ID NO: 441530 - RNA, 19 nt, Homo sapiens
  misc_RNA (1)...(19): siRNA sense strand
ggccauccuugcaauauug

SEQ ID NO: 441531 - RNA, 19 nt, Homo sapiens
  misc_RNA (1)...(19): siRNA sense strand
ggacaagugugugcuacug

SEQ ID NO: 441532 - RNA, 19 nt, Homo sapiens
  misc_RNA (1)...(19): siRNA sense strand
ugauguaaaugaccacuug

SEQ ID NO: 441533 - RNA, 19 nt, Homo sapiens
  misc_RNA (1)...(19): siRNA sense strand
gaaaauacaggaucaauca

SEQ ID NO: 441534 - RNA, 19 nt, Homo sapiens
  misc_RNA (1)...(19): siRNA sense strand
cgagaaacuuguugguaga

SEQ ID NO: 441535 - RNA, 19 nt, Homo sapiens
  misc_RNA (1)...(19): siRNA sense strand
gcaauggauauaaagcaua

SEQ ID NO: 441536 - RNA, 19 nt, Homo sapiens
  misc_RNA (1)...(19): siRNA sense strand
cagagaggcuaguccaaga

SEQ ID NO: 441537 - RNA, 19 nt, Homo sapiens
  misc_RNA (1)...(19): siRNA sense strand
aaauacaguugauguggaa

SEQ ID NO: 441538 - RNA, 19 nt, Homo sapiens
  misc_RNA (1)...(19): siRNA sense strand
agaagaagaugggcuugaa

SEQ ID NO: 441539 - RNA, 19 nt, Homo sapiens
  misc_RNA (1)...(19): siRNA sense strand
caaacaaagguccuaaaga

SEQ ID NO: 441540 - RNA, 19 nt, Homo sapiens
  misc_RNA (1)...(19): siRNA sense strand
gacagagaguuaauugaca

SEQ ID NO: 441541 - RNA, 19 nt, Homo sapiens
  misc_RNA (1)...(19): siRNA sense strand
acacggagguggacaacug

SEQ ID NO: 441542 - RNA, 19 nt, Homo sapiens
  misc_RNA (1)...(19): siRNA sense strand
uuacaguccuugcaucaga

SEQ ID NO: 441543 - RNA, 19 nt, Homo sapiens
  misc_RNA (1)...(19): siRNA sense strand
guuaagccuuugaauuaug

SEQ ID NO: 441544 - RNA, 19 nt, Homo sapiens
  misc_RNA (1)...(19): siRNA sense strand
guauuguacucguccugua

SEQ ID NO: 441545 - RNA, 19 nt, Homo sapiens
  misc_RNA (1)...(19): siRNA sense strand
gcagugaacgacaagaaga

SEQ ID NO: 441546 - RNA, 19 nt, Homo sapiens
  misc_RNA (1)...(19): siRNA sense strand
agaaguagcaguggcauaa

SEQ ID NO: 441547 - RNA, 19 nt, Homo sapiens
  misc_RNA (1)...(19): siRNA sense strand
gagagcuaauuauaccauu

SEQ ID NO: 441548 - RNA, 19 nt, Homo sapiens
  misc_RNA (1)...(19): siRNA sense strand
ucagcuagacagagaguua

SEQ ID NO: 441549 - RNA, 19 nt, Homo sapiens
  misc_RNA (1)...(19): siRNA sense strand
caaggagggagaacaugua

SEQ ID NO: 441550 - RNA, 19 nt, Homo sapiens
  misc_RNA (1)...(19): siRNA sense strand
gacccucgcgaucuuaaua

SEQ ID NO: 441551 - RNA, 19 nt, Homo sapiens
  misc_RNA (1)...(19): siRNA sense strand
caaaaguaauuccugauga

SEQ ID NO: 441552 - RNA, 19 nt, Homo sapiens
  misc_RNA (1)...(19): siRNA sense strand
gggccauccuugcaauauu

SEQ ID NO: 441553 - RNA, 19 nt, Homo sapiens
  misc_RNA (1)...(19): siRNA sense strand
gaccaagaaccucggaauu

SEQ ID NO: 441554 - RNA, 19 nt, Homo sapiens
  misc_RNA (1)...(19): siRNA sense strand
cuuuacagcugcaaaucua

SEQ ID NO: 441555 - RNA, 19 nt, Homo sapiens
  misc_RNA (1)...(19): siRNA sense strand
cauguucccuccaaacuag

SEQ ID NO: 441556 - RNA, 19 nt, Homo sapiens
  misc_RNA (1)...(19): siRNA sense strand
gaugagggcccugagugua

SEQ ID NO: 441557 - RNA, 19 nt, Homo sapiens
  misc_RNA (1)...(19): siRNA sense strand
acagagaguuaauugacaa

SEQ ID NO: 441558 - RNA, 19 nt, Homo sapiens
  misc_RNA (1)...(19): siRNA sense strand
cauuuacucguacuucuua

SEQ ID NO: 441559 - RNA, 19 nt, Homo sapiens
  misc_RNA (1)...(19): siRNA sense strand
gagaugacaaaguguauuc

SEQ ID NO: 441560 - RNA, 19 nt, Homo sapiens
  misc_RNA (1)...(19): siRNA sense strand
gcaauauuguugggcauag

SEQ ID NO: 441561 - RNA, 19 nt, Homo sapiens
  misc_RNA (1)...(19): siRNA sense strand
agacagugaucaucugcaa

SEQ ID NO: 441562 - RNA, 19 nt, Homo sapiens
  misc_RNA (1)...(19): siRNA sense strand
caagaaccucggaauuuau

SEQ ID NO: 441563 - RNA, 19 nt, Homo sapiens
  misc_RNA (1)...(19): siRNA sense strand
aagcaugcaugaagagaug

SEQ ID NO: 441564 - RNA, 19 nt, Homo sapiens
  misc_RNA (1)...(19): siRNA sense strand
guggacaacugcagauaca

SEQ ID NO: 441565 - RNA, 19 nt, Homo sapiens
  misc_RNA (1)...(19): siRNA sense strand
gagauagacuuggcauguc

SEQ ID NO: 441566 - RNA, 19 nt, Homo sapiens
  misc_RNA (1)...(19): siRNA sense strand
ccuauaacagugagagaua

SEQ ID NO: 441567 - RNA, 19 nt, Homo sapiens
  misc_RNA (1)...(19): siRNA sense strand
ggcccacccuuugacuuua

SEQ ID NO: 441568 - RNA, 19 nt, Homo sapiens
  misc_RNA (1)...(19): siRNA sense strand
gaagugggaacaacaagca

SEQ ID NO: 441569 - RNA, 19 nt, Homo sapiens
  misc_RNA (1)...(19): siRNA sense strand
gcagaagugggaacaacaa

SEQ ID NO: 441570 - RNA, 19 nt, Homo sapiens
  misc_RNA (1)...(19): siRNA sense strand
gaagaaaagcaacagauga

SEQ ID NO: 441571 - RNA, 19 nt, Homo sapiens
  misc_RNA (1)...(19): siRNA sense strand
gaccacuugccaacauuua

SEQ ID NO: 441572 - RNA, 19 nt, Homo sapiens
  misc_RNA (1)...(19): siRNA sense strand
cugaaguacuccaucauug

SEQ ID NO: 441573 - RNA, 19 nt, Homo sapiens
  misc_RNA (1)...(19): siRNA sense strand
gcacuacugugggacaagu

SEQ ID NO: 441574 - RNA, 19 nt, Homo sapiens
  misc_RNA (1)...(19): siRNA sense strand
cuaacuggagagcuaauua

SEQ ID NO: 441575 - RNA, 19 nt, Homo sapiens
  misc_RNA (1)...(19): siRNA sense strand
gaagaugggcuugaauuuu

SEQ ID NO: 441576 - RNA, 19 nt, Homo sapiens
  misc_RNA (1)...(19): siRNA sense strand
ugauaacagcccauucaua

SEQ ID NO: 441577 - RNA, 19 nt, Homo sapiens
  misc_RNA (1)...(19): siRNA sense strand
gaaggaguucuuuguguag

SEQ ID NO: 441578 - RNA, 19 nt, Homo sapiens
  misc_RNA (1)...(19): siRNA sense strand
gcauaugacccagaaacaa

SEQ ID NO: 441579 - RNA, 19 nt, Homo sapiens
  misc_RNA (1)...(19): siRNA sense strand
gaagaagaugggcuugaau

SEQ ID NO: 441580 - RNA, 19 nt, Homo sapiens
  misc_RNA (1)...(19): siRNA sense strand
gagaauguggagacugaaa

SEQ ID NO: 441581 - RNA, 19 nt, Homo sapiens
  misc_RNA (1)...(19): siRNA sense strand
uucaacagguucaaucuga

SEQ ID NO: 441582 - RNA, 19 nt, Homo sapiens
  misc_RNA (1)...(19): siRNA sense strand
agacugaaagcaauuaaug

SEQ ID NO: 441583 - RNA, 19 nt, Homo sapiens
  misc_RNA (1)...(19): siRNA sense strand
gaguguaacccuccaauac

SEQ ID NO: 441584 - RNA, 19 nt, Homo sapiens
  misc_RNA (1)...(19): siRNA sense strand
gccuuugaauuaugaagaa

SEQ ID NO: 441585 - RNA, 19 nt, Homo sapiens
  misc_RNA (1)...(19): siRNA sense strand
caacaucaucucagcuaga

SEQ ID NO: 441586 - RNA, 19 nt, Homo sapiens
  misc_RNA (1)...(19): siRNA sense strand
ugagauaauugccuuugca

SEQ ID NO: 441587 - RNA, 19 nt, Homo sapiens
  misc_RNA (1)...(19): siRNA sense strand
ggagagagacacuggaaac

SEQ ID NO: 441588 - RNA, 19 nt, Homo sapiens
  misc_RNA (1)...(19): siRNA sense strand
gcccaaaacuauaccauau

SEQ ID NO: 441589 - RNA, 19 nt, Homo sapiens
  misc_RNA (1)...(19): siRNA sense strand
uaacuggagagcuaauuau

SEQ ID NO: 441590 - RNA, 19 nt, Homo sapiens
  misc_RNA (1)...(19): siRNA sense strand
gcaaacccaccaugucauc

SEQ ID NO: 441591 - RNA, 19 nt, Homo sapiens
  misc_RNA (1)...(19): siRNA sense strand
gacaaguacucauugauaa

SEQ ID NO: 441592 - RNA, 19 nt, Homo sapiens
  misc_RNA (1)...(19): siRNA sense strand
uaaagccacugaauuauga

SEQ ID NO: 441593 - RNA, 19 nt, Homo sapiens
  misc_RNA (1)...(19): siRNA sense strand
gcagaagcaugcacaaaga

SEQ ID NO: 441594 - RNA, 19 nt, Homo sapiens
  misc_RNA (1)...(19): siRNA sense strand
aagauuauguccucacuua

SEQ ID NO: 441595 - RNA, 19 nt, Homo sapiens
  misc_RNA (1)...(19): siRNA sense strand
gaaaguaguagaccuggua

SEQ ID NO: 441596 - RNA, 19 nt, Homo sapiens
  misc_RNA (1)...(19): siRNA sense strand
gaacagagccuugguuaca

SEQ ID NO: 441597 - RNA, 19 nt, Homo sapiens
  misc_RNA (1)...(19): siRNA sense strand
gaacuauacugucuucuac

SEQ ID NO: 441598 - RNA, 19 nt, Homo sapiens
  misc_RNA (1)...(19): siRNA sense strand
caaagaaacuaaugaaggu

SEQ ID NO: 441599 - RNA, 19 nt, Homo sapiens
  misc_RNA (1)...(19): siRNA sense strand
agacauggauggccaguuu

SEQ ID NO: 441600 - RNA, 19 nt, Homo sapiens
  misc_RNA (1)...(19): siRNA sense strand
cacaucaacuuguaucaua

SEQ ID NO: 441601 - RNA, 19 nt, Homo sapiens
  misc_RNA (1)...(19): siRNA sense strand
gcacagacaaagaaacuaa

SEQ ID NO: 441602 - RNA, 19 nt, Homo sapiens
  misc_RNA (1)...(19): siRNA sense strand
gauuauguccucacuuaua

SEQ ID NO: 441603 - RNA, 19 nt, Homo sapiens
  misc_RNA (1)...(19): siRNA sense strand
ucaccacagucucucauua

SEQ ID NO: 441604 - RNA, 19 nt, Homo sapiens
  misc_RNA (1)...(19): siRNA sense strand
guggaaaucuuacgaauac

SEQ ID NO: 441605 - RNA, 19 nt, Homo sapiens
  misc_RNA (1)...(19): siRNA sense strand
ccauauggcuuucugacaa

SEQ ID NO: 441606 - RNA, 19 nt, Homo sapiens
  misc_RNA (1)...(19): siRNA sense strand
ggaagaagauggccuugac

SEQ ID NO: 441607 - RNA, 19 nt, Homo sapiens
  misc_RNA (1)...(19): siRNA sense strand
caacaacucuagccaaggu

SEQ ID NO: 441608 - RNA, 19 nt, Homo sapiens
  misc_RNA (1)...(19): siRNA sense strand
caacuuguaucauaacagu

SEQ ID NO: 441609 - RNA, 19 nt, Homo sapiens
  misc_RNA (1)...(19): siRNA sense strand
guagacaaguacucauuga

SEQ ID NO: 441610 - RNA, 19 nt, Homo sapiens
  misc_RNA (1)...(19): siRNA sense strand
gaaccggacacaaugcaua

SEQ ID NO: 441611 - RNA, 19 nt, Homo sapiens
  misc_RNA (1)...(19): siRNA sense strand
gaagaaaaccgucaaguga

SEQ ID NO: 441612 - RNA, 19 nt, Homo sapiens
  misc_RNA (1)...(19): siRNA sense strand
caagugaaccuggaaauug

SEQ ID NO: 441613 - RNA, 19 nt, Homo sapiens
  misc_RNA (1)...(19): siRNA sense strand
caacuaaagggaaacguuu

SEQ ID NO: 441614 - RNA, 19 nt, Homo sapiens
  misc_RNA (1)...(19): siRNA sense strand
gagaugaaccggacacaau

SEQ ID NO: 441615 - RNA, 19 nt, Homo sapiens
  misc_RNA (1)...(19): siRNA sense strand
gcacccacuuucagacaaa

SEQ ID NO: 441616 - RNA, 19 nt, Homo sapiens
  misc_RNA (1)...(19): siRNA sense strand
cacagucucucauuauuug

SEQ ID NO: 441617 - RNA, 19 nt, Homo sapiens
  misc_RNA (1)...(19): siRNA sense strand
agacaaguacucauugaua

SEQ ID NO: 441618 - RNA, 19 nt, Homo sapiens
  misc_RNA (1)...(19): siRNA sense strand
gcacugcucuuuucuguau

SEQ ID NO: 441619 - RNA, 19 nt, Homo sapiens
  misc_RNA (1)...(19): siRNA sense strand
gaaaguacaagacauggau

SEQ ID NO: 441620 - RNA, 19 nt, Homo sapiens
  misc_RNA (1)...(19): siRNA sense strand
gcaauagacaaagaugaua

SEQ ID NO: 441621 - RNA, 19 nt, Homo sapiens
  misc_RNA (1)...(19): siRNA sense strand
gauguaaucagaaugaaga

SEQ ID NO: 441622 - RNA, 19 nt, Homo sapiens
  misc_RNA (1)...(19): siRNA sense strand
gaguuaaucugugugaaug

SEQ ID NO: 441623 - RNA, 19 nt, Homo sapiens
  misc_RNA (1)...(19): siRNA sense strand
gauagaucauguacuggaa

SEQ ID NO: 441624 - RNA, 19 nt, Homo sapiens
  misc_RNA (1)...(19): siRNA sense strand
guuaaucugugugaaugua

SEQ ID NO: 441625 - RNA, 19 nt, Homo sapiens
  misc_RNA (1)...(19): siRNA sense strand
uaaugaagguguucuuucu

SEQ ID NO: 441626 - RNA, 19 nt, Homo sapiens
  misc_RNA (1)...(19): siRNA sense strand
gaaccuggaaauuggagua

SEQ ID NO: 441627 - RNA, 19 nt, Homo sapiens
  misc_RNA (1)...(19): siRNA sense strand
guaaagccacugaauuaug

SEQ ID NO: 441628 - RNA, 19 nt, Homo sapiens
  misc_RNA (1)...(19): siRNA sense strand
gacguggaguugauaaaga

SEQ ID NO: 441629 - RNA, 19 nt, Homo sapiens
  misc_RNA (1)...(19): siRNA sense strand
gaagguguucuuucuguug

SEQ ID NO: 441630 - RNA, 19 nt, Homo sapiens
  misc_RNA (1)...(19): siRNA sense strand
aagagacacuggaaaucua

SEQ ID NO: 441631 - RNA, 19 nt, Homo sapiens
  misc_RNA (1)...(19): siRNA sense strand
gaacaucagaagaagguau

SEQ ID NO: 441632 - RNA, 19 nt, Homo sapiens
  misc_RNA (1)...(19): siRNA sense strand
gaaaccagaccuuggaauc

SEQ ID NO: 441633 - RNA, 19 nt, Homo sapiens
  misc_RNA (1)...(19): siRNA sense strand
caaaauaauuggcagaguu

SEQ ID NO: 441634 - RNA, 19 nt, Homo sapiens
  misc_RNA (1)...(19): siRNA sense strand
ccagaaauacuucaagaau

SEQ ID NO: 441635 - RNA, 19 nt, Homo sapiens
  misc_RNA (1)...(19): siRNA sense strand
gccauuugcuagagauauu

SEQ ID NO: 441636 - RNA, 19 nt, Homo sapiens
  misc_RNA (1)...(19): siRNA sense strand
uaaacuagaggcagacaaa

SEQ ID NO: 441637 - RNA, 19 nt, Homo sapiens
  misc_RNA (1)...(19): siRNA sense strand
ggacagagagguuguagac

SEQ ID NO: 441638 - RNA, 19 nt, Homo sapiens
  misc_RNA (1)...(19): siRNA sense strand
ggauuuaugacccaaacua

SEQ ID NO: 441639 - RNA, 19 nt, Homo sapiens
  misc_RNA (1)...(19): siRNA sense strand
caccagaaauacuucaaga

SEQ ID NO: 441640 - RNA, 19 nt, Homo sapiens
  misc_RNA (1)...(19): siRNA sense strand
gaaauuucagggucaauca

SEQ ID NO: 441641 - RNA, 19 nt, Homo sapiens
  misc_RNA (1)...(19): siRNA sense strand
gaaaucuuacgaauaccua

SEQ ID NO: 441642 - RNA, 19 nt, Homo sapiens
  misc_RNA (1)...(19): siRNA sense strand
gauaaugcacccacuuuca

SEQ ID NO: 441643 - RNA, 19 nt, Homo sapiens
  misc_RNA (1)...(19): siRNA sense strand
cauauggcuuucugacaaa

SEQ ID NO: 441644 - RNA, 19 nt, Homo sapiens
  misc_RNA (1)...(19): siRNA sense strand
gcacagcaaaacuuaauua

SEQ ID NO: 441645 - RNA, 19 nt, Homo sapiens
  misc_RNA (1)...(19): siRNA sense strand
uuguaaagccacugaauua

SEQ ID NO: 441646 - RNA, 19 nt, Homo sapiens
  misc_RNA (1)...(19): siRNA sense strand
gaaagagacacuggaaauc

SEQ ID NO: 441647 - RNA, 19 nt, Homo sapiens
  misc_RNA (1)...(19): siRNA sense strand
ccacagucucucauuauuu

SEQ ID NO: 441648 - RNA, 19 nt, Homo sapiens
  misc_RNA (1)...(19): siRNA sense strand
acacggagguggacaacug

SEQ ID NO: 441649 - RNA, 19 nt, Homo sapiens
  misc_RNA (1)...(19): siRNA sense strand
ggucaagugauccugauuu

SEQ ID NO: 441650 - RNA, 19 nt, Homo sapiens
  misc_RNA (1)...(19): siRNA sense strand
ccacugaauuaugaagaaa

SEQ ID NO: 441651 - RNA, 19 nt, Homo sapiens
  misc_RNA (1)...(19): siRNA sense strand
acgaauaccuauagaagau

SEQ ID NO: 441652 - RNA, 19 nt, Homo sapiens
  misc_RNA (1)...(19): siRNA sense strand
gaagacaagacacacuaga

SEQ ID NO: 441653 - RNA, 19 nt, Homo sapiens
  misc_RNA (1)...(19): siRNA sense strand
ucaccaaaguuaaugauac

SEQ ID NO: 441654 - RNA, 19 nt, Homo sapiens
  misc_RNA (1)...(19): siRNA sense strand
uuacaguccuggcaauaga

SEQ ID NO: 441655 - RNA, 19 nt, Homo sapiens
  misc_RNA (1)...(19): siRNA sense strand
cccaauaugugcggauuaa

SEQ ID NO: 441656 - RNA, 19 nt, Homo sapiens
  misc_RNA (1)...(19): siRNA sense strand
cuagagauauucccagagu

SEQ ID NO: 441657 - RNA, 19 nt, Homo sapiens
  misc_RNA (1)...(19): siRNA sense strand
ugaagcauuuguagaggaa

SEQ ID NO: 441658 - RNA, 19 nt, Homo sapiens
  misc_RNA (1)...(19): siRNA sense strand
gaagauuuagcacagcaaa

SEQ ID NO: 441659 - RNA, 19 nt, Homo sapiens
  misc_RNA (1)...(19): siRNA sense strand
gcaacuaaagggaaacguu

SEQ ID NO: 441660 - RNA, 19 nt, Homo sapiens
  misc_RNA (1)...(19): siRNA sense strand
uggcagaguuaauuuggaa

SEQ ID NO: 441661 - RNA, 19 nt, Homo sapiens
  misc_RNA (1)...(19): siRNA sense strand
ugaugaaccuguccaugga

SEQ ID NO: 441662 - RNA, 19 nt, Homo sapiens
  misc_RNA (1)...(19): siRNA sense strand
caacggcuauaaggcauau

SEQ ID NO: 441663 - RNA, 19 nt, Homo sapiens
  misc_RNA (1)...(19): siRNA sense strand
gccacugaauuaugaagaa

SEQ ID NO: 441664 - RNA, 19 nt, Homo sapiens
  misc_RNA (1)...(19): siRNA sense strand
gaagguaucgaagacaaga

SEQ ID NO: 441665 - RNA, 19 nt, Homo sapiens
  misc_RNA (1)...(19): siRNA sense strand
gaagauggccuugacuuuu

SEQ ID NO: 441666 - RNA, 19 nt, Homo sapiens
  misc_RNA (1)...(19): siRNA sense strand
gcaucgauguaaucagaau

SEQ ID NO: 441667 - RNA, 19 nt, Homo sapiens
  misc_RNA (1)...(19): siRNA sense strand
gaggaaaccagaccuugga

SEQ ID NO: 441668 - RNA, 19 nt, Homo sapiens
  misc_RNA (1)...(19): siRNA sense strand
gacaagacacacuagagaa

SEQ ID NO: 441669 - RNA, 19 nt, Homo sapiens
  misc_RNA (1)...(19): siRNA sense strand
uguccucacuuauaacuau

SEQ ID NO: 441670 - RNA, 19 nt, Homo sapiens
  misc_RNA (1)...(19): siRNA sense strand
uugcaucgauguaaucaga

SEQ ID NO: 441671 - RNA, 19 nt, Homo sapiens
  misc_RNA (1)...(19): siRNA sense strand
guggacaacugcagauaca

SEQ ID NO: 441672 - RNA, 19 nt, Homo sapiens
  misc_RNA (1)...(19): siRNA sense strand
gaaaugaugaaaggaggaa

SEQ ID NO: 441673 - RNA, 19 nt, Homo sapiens
  misc_RNA (1)...(19): siRNA sense strand
cagcugcccgucuuucaua

SEQ ID NO: 441674 - RNA, 19 nt, Homo sapiens
  misc_RNA (1)...(19): siRNA sense strand
caccaaaguuaaugauaca

SEQ ID NO: 441675 - RNA, 19 nt, Homo sapiens
  misc_RNA (1)...(19): siRNA sense strand
aagguuggaucaccauuga

SEQ ID NO: 441676 - RNA, 19 nt, Homo sapiens
  misc_RNA (1)...(19): siRNA sense strand
gcaaugguuuaagguacaa

SEQ ID NO: 441677 - RNA, 19 nt, Homo sapiens
  misc_RNA (1)...(19): siRNA sense strand
gaucuucagucgugauggu

SEQ ID NO: 441678 - RNA, 19 nt, Homo sapiens
  misc_RNA (1)...(19): siRNA sense strand
agaaagagacacuggaaau

SEQ ID NO: 441679 - RNA, 19 nt, Homo sapiens
  misc_RNA (1)...(19): siRNA sense strand
cuguugcgcugucugauaa

SEQ ID NO: 441680 - RNA, 19 nt, Homo sapiens
  misc_RNA (1)...(19): siRNA sense strand
guagucauuugcaaaccaa

SEQ ID NO: 441681 - RNA, 19 nt, Homo sapiens
  misc_RNA (1)...(19): siRNA sense strand
aaauagaaauggcaauggu

SEQ ID NO: 441682 - RNA, 19 nt, Homo sapiens
  misc_RNA (1)...(19): siRNA sense strand
gcacuccugcagcccaaua

SEQ ID NO: 441683 - RNA, 19 nt, Homo sapiens
  misc_RNA (1)...(19): siRNA sense strand
gcuagaacaucagaagaag

SEQ ID NO: 441684 - RNA, 19 nt, Homo sapiens
  misc_RNA (1)...(19): siRNA sense strand
ugauacagcugcccgucuu

SEQ ID NO: 441685 - RNA, 19 nt, Homo sapiens
  misc_RNA (1)...(19): siRNA sense strand
ugauaauccaccagaaaua

SEQ ID NO: 441686 - RNA, 19 nt, Homo sapiens
  misc_RNA (1)...(19): siRNA sense strand
ucaaagaucaacggcuaua

SEQ ID NO: 441687 - RNA, 19 nt, Homo sapiens
  misc_RNA (1)...(19): siRNA sense strand
gguguucuuucuguuguaa

SEQ ID NO: 441688 - RNA, 19 nt, Homo sapiens
  misc_RNA (1)...(19): siRNA sense strand
agaaauggcaaugguuuaa

SEQ ID NO: 441689 - RNA, 19 nt, Homo sapiens
  misc_RNA (1)...(19): siRNA sense strand
agaagcaccuggagacgau

SEQ ID NO: 441690 - RNA, 19 nt, Homo sapiens
  misc_RNA (1)...(19): siRNA sense strand
cagggucaaucauaacuuc

SEQ ID NO: 441691 - RNA, 19 nt, Homo sapiens
  misc_RNA (1)...(19): siRNA sense strand
gacaaguacucauugauaa

SEQ ID NO: 441692 - RNA, 19 nt, Homo sapiens
  misc_RNA (1)...(19): siRNA sense strand
uaaagccacugaauuauga

SEQ ID NO: 441693 - RNA, 19 nt, Homo sapiens
  misc_RNA (1)...(19): siRNA sense strand
gaaaguaguagaccuggua

SEQ ID NO: 441694 - RNA, 19 nt, Homo sapiens
  misc_RNA (1)...(19): siRNA sense strand
gaacagagccuugguuaca

SEQ ID NO: 441695 - RNA, 19 nt, Homo sapiens
  misc_RNA (1)...(19): siRNA sense strand
gaacuauacugucuucuac

SEQ ID NO: 441696 - RNA, 19 nt, Homo sapiens
  misc_RNA (1)...(19): siRNA sense strand
caaagaaacuaaugaaggu

SEQ ID NO: 441697 - RNA, 19 nt, Homo sapiens
  misc_RNA (1)...(19): siRNA sense strand
agacauggauggccaguuu

SEQ ID NO: 441698 - RNA, 19 nt, Homo sapiens
  misc_RNA (1)...(19): siRNA sense strand
cacaucaacuuguaucaua

SEQ ID NO: 441699 - RNA, 19 nt, Homo sapiens
  misc_RNA (1)...(19): siRNA sense strand
gcacagacaaagaaacuaa

SEQ ID NO: 441700 - RNA, 19 nt, Homo sapiens
  misc_RNA (1)...(19): siRNA sense strand
ucaccacagucucucauua

SEQ ID NO: 441701 - RNA, 19 nt, Homo sapiens
  misc_RNA (1)...(19): siRNA sense strand
guggaaaucuuacgaauac

SEQ ID NO: 441702 - RNA, 19 nt, Homo sapiens
  misc_RNA (1)...(19): siRNA sense strand
ccauauggcuuucugacaa

SEQ ID NO: 441703 - RNA, 19 nt, Homo sapiens
  misc_RNA (1)...(19): siRNA sense strand
caacaacucuagccaaggu

SEQ ID NO: 441704 - RNA, 19 nt, Homo sapiens
  misc_RNA (1)...(19): siRNA sense strand
caacuuguaucauaacagu

SEQ ID NO: 441705 - RNA, 19 nt, Homo sapiens
  misc_RNA (1)...(19): siRNA sense strand
guagacaaguacucauuga

SEQ ID NO: 441706 - RNA, 19 nt, Homo sapiens
  misc_RNA (1)...(19): siRNA sense strand
gaaccggacacaaugcaua

SEQ ID NO: 441707 - RNA, 19 nt, Homo sapiens
  misc_RNA (1)...(19): siRNA sense strand
gaagaaaaccgucaaguga

SEQ ID NO: 441708 - RNA, 19 nt, Homo sapiens
  misc_RNA (1)...(19): siRNA sense strand
caagugaaccuggaaauug

SEQ ID NO: 441709 - RNA, 19 nt, Homo sapiens
  misc_RNA (1)...(19): siRNA sense strand
caacuaaagggaaacguuu

SEQ ID NO: 441710 - RNA, 19 nt, Homo sapiens
  misc_RNA (1)...(19): siRNA sense strand
gagaugaaccggacacaau

SEQ ID NO: 441711 - RNA, 19 nt, Homo sapiens
  misc_RNA (1)...(19): siRNA sense strand
gcacccacuuucagacaaa

SEQ ID NO: 441712 - RNA, 19 nt, Homo sapiens
  misc_RNA (1)...(19): siRNA sense strand
cacagucucucauuauuug

SEQ ID NO: 441713 - RNA, 19 nt, Homo sapiens
  misc_RNA (1)...(19): siRNA sense strand
agacaaguacucauugaua

SEQ ID NO: 441714 - RNA, 19 nt, Homo sapiens
  misc_RNA (1)...(19): siRNA sense strand
gcacugcucuuuucuguau

SEQ ID NO: 441715 - RNA, 19 nt, Homo sapiens
  misc_RNA (1)...(19): siRNA sense strand
gaaaguacaagacauggau

SEQ ID NO: 441716 - RNA, 19 nt, Homo sapiens
  misc_RNA (1)...(19): siRNA sense strand
gcaauagacaaagaugaua

SEQ ID NO: 441717 - RNA, 19 nt, Homo sapiens
  misc_RNA (1)...(19): siRNA sense strand
gaguuaaucugugugaaug

SEQ ID NO: 441718 - RNA, 19 nt, Homo sapiens
  misc_RNA (1)...(19): siRNA sense strand
gauagaucauguacuggaa

SEQ ID NO: 441719 - RNA, 19 nt, Homo sapiens
  misc_RNA (1)...(19): siRNA sense strand
guuaaucugugugaaugua

SEQ ID NO: 441720 - RNA, 19 nt, Homo sapiens
  misc_RNA (1)...(19): siRNA sense strand
uaaugaagguguucuuucu

SEQ ID NO: 441721 - RNA, 19 nt, Homo sapiens
  misc_RNA (1)...(19): siRNA sense strand
gaaccuggaaauuggagua

SEQ ID NO: 441722 - RNA, 19 nt, Homo sapiens
  misc_RNA (1)...(19): siRNA sense strand
guaaagccacugaauuaug

SEQ ID NO: 441723 - RNA, 19 nt, Homo sapiens
  misc_RNA (1)...(19): siRNA sense strand
gacguggaguugauaaaga

SEQ ID NO: 441724 - RNA, 19 nt, Homo sapiens
  misc_RNA (1)...(19): siRNA sense strand
gaagguguucuuucuguug

SEQ ID NO: 441725 - RNA, 19 nt, Homo sapiens
  misc_RNA (1)...(19): siRNA sense strand
aagagacacuggaaaucua

SEQ ID NO: 441726 - RNA, 19 nt, Homo sapiens
  misc_RNA (1)...(19): siRNA sense strand
gaacaucagaagaagguau

SEQ ID NO: 441727 - RNA, 19 nt, Homo sapiens
  misc_RNA (1)...(19): siRNA sense strand
gaaaccagaccuuggaauc

SEQ ID NO: 441728 - RNA, 19 nt, Homo sapiens
  misc_RNA (1)...(19): siRNA sense strand
ccagaaauacuucaagaau

SEQ ID NO: 441729 - RNA, 19 nt, Homo sapiens
  misc_RNA (1)...(19): siRNA sense strand
gccauuugcuagagauauu

SEQ ID NO: 441730 - RNA, 19 nt, Homo sapiens
  misc_RNA (1)...(19): siRNA sense strand
uaaacuagaggcagacaaa

SEQ ID NO: 441731 - RNA, 19 nt, Homo sapiens
  misc_RNA (1)...(19): siRNA sense strand
caaaauaauuggcagaguu

SEQ ID NO: 441732 - RNA, 19 nt, Homo sapiens
  misc_RNA (1)...(19): siRNA sense strand
ggacagagagguuguagac

SEQ ID NO: 441733 - RNA, 19 nt, Homo sapiens
  misc_RNA (1)...(19): siRNA sense strand
ggauuuaugacccaaacua

SEQ ID NO: 441734 - RNA, 19 nt, Homo sapiens
  misc_RNA (1)...(19): siRNA sense strand
caccagaaauacuucaaga

SEQ ID NO: 441735 - RNA, 19 nt, Homo sapiens
  misc_RNA (1)...(19): siRNA sense strand
gaaauuucagggucaauca

SEQ ID NO: 441736 - RNA, 19 nt, Homo sapiens
  misc_RNA (1)...(19): siRNA sense strand
gaaaucuuacgaauaccua

SEQ ID NO: 441737 - RNA, 19 nt, Homo sapiens
  misc_RNA (1)...(19): siRNA sense strand
gauaaugcacccacuuuca

SEQ ID NO: 441738 - RNA, 19 nt, Homo sapiens
  misc_RNA (1)...(19): siRNA sense strand
cauauggcuuucugacaaa

SEQ ID NO: 441739 - RNA, 19 nt, Homo sapiens
  misc_RNA (1)...(19): siRNA sense strand
gcacagcaaaacuuaauua

SEQ ID NO: 441740 - RNA, 19 nt, Homo sapiens
  misc_RNA (1)...(19): siRNA sense strand
uuguaaagccacugaauua

SEQ ID NO: 441741 - RNA, 19 nt, Homo sapiens
  misc_RNA (1)...(19): siRNA sense strand
gaaagagacacuggaaauc

SEQ ID NO: 441742 - RNA, 19 nt, Homo sapiens
  misc_RNA (1)...(19): siRNA sense strand
ccacagucucucauuauuu

SEQ ID NO: 441743 - RNA, 19 nt, Homo sapiens
  misc_RNA (1)...(19): siRNA sense strand
acacggagguggacaacug

SEQ ID NO: 441744 - RNA, 19 nt, Homo sapiens
  misc_RNA (1)...(19): siRNA sense strand
ggucaagugauccugauuu

SEQ ID NO: 441745 - RNA, 19 nt, Homo sapiens
  misc_RNA (1)...(19): siRNA sense strand
ccacugaauuaugaagaaa

SEQ ID NO: 441746 - RNA, 19 nt, Homo sapiens
  misc_RNA (1)...(19): siRNA sense strand
acgaauaccuauagaagau

SEQ ID NO: 441747 - RNA, 19 nt, Homo sapiens
  misc_RNA (1)...(19): siRNA sense strand
gaagacaagacacacuaga

SEQ ID NO: 441748 - RNA, 19 nt, Homo sapiens
  misc_RNA (1)...(19): siRNA sense strand
ucaccaaaguuaaugauac

SEQ ID NO: 441749 - RNA, 19 nt, Homo sapiens
  misc_RNA (1)...(19): siRNA sense strand
uuacaguccuggcaauaga

SEQ ID NO: 441750 - RNA, 19 nt, Homo sapiens
  misc_RNA (1)...(19): siRNA sense strand
cccaauaugugcggauuaa

SEQ ID NO: 441751 - RNA, 19 nt, Homo sapiens
  misc_RNA (1)...(19): siRNA sense strand
cuagagauauucccagagu

SEQ ID NO: 441752 - RNA, 19 nt, Homo sapiens
  misc_RNA (1)...(19): siRNA sense strand
ugaagcauuuguagaggaa

SEQ ID NO: 441753 - RNA, 19 nt, Homo sapiens
  misc_RNA (1)...(19): siRNA sense strand
gaagauuuagcacagcaaa

SEQ ID NO: 441754 - RNA, 19 nt, Homo sapiens
  misc_RNA (1)...(19): siRNA sense strand
gcaacuaaagggaaacguu

SEQ ID NO: 441755 - RNA, 19 nt, Homo sapiens
  misc_RNA (1)...(19): siRNA sense strand
gccacugaauuaugaagaa

SEQ ID NO: 441756 - RNA, 19 nt, Homo sapiens
  misc_RNA (1)...(19): siRNA sense strand
ugaugaaccuguccaugga

SEQ ID NO: 441757 - RNA, 19 nt, Homo sapiens
  misc_RNA (1)...(19): siRNA sense strand
uggcagaguuaauuuggaa

SEQ ID NO: 441758 - RNA, 19 nt, Homo sapiens
  misc_RNA (1)...(19): siRNA sense strand
caacggcuauaaggcauau

SEQ ID NO: 441759 - RNA, 19 nt, Homo sapiens
  misc_RNA (1)...(19): siRNA sense strand
gaagguaucgaagacaaga

SEQ ID NO: 441760 - RNA, 19 nt, Homo sapiens
  misc_RNA (1)...(19): siRNA sense strand
gaggaaaccagaccuugga

SEQ ID NO: 441761 - RNA, 19 nt, Homo sapiens
  misc_RNA (1)...(19): siRNA sense strand
gacaagacacacuagagaa

SEQ ID NO: 441762 - RNA, 19 nt, Homo sapiens
  misc_RNA (1)...(19): siRNA sense strand
guggacaacugcagauaca

SEQ ID NO: 441763 - RNA, 19 nt, Homo sapiens
  misc_RNA (1)...(19): siRNA sense strand
gaaaugaugaaaggaggaa

SEQ ID NO: 441764 - RNA, 19 nt, Homo sapiens
  misc_RNA (1)...(19): siRNA sense strand
cagcugcccgucuuucaua

SEQ ID NO: 441765 - RNA, 19 nt, Homo sapiens
  misc_RNA (1)...(19): siRNA sense strand
caccaaaguuaaugauaca

SEQ ID NO: 441766 - RNA, 19 nt, Homo sapiens
  misc_RNA (1)...(19): siRNA sense strand
aagguuggaucaccauuga

SEQ ID NO: 441767 - RNA, 19 nt, Homo sapiens
  misc_RNA (1)...(19): siRNA sense strand
gcaaugguuuaagguacaa

SEQ ID NO: 441768 - RNA, 19 nt, Homo sapiens
  misc_RNA (1)...(19): siRNA sense strand
gaucuucagucgugauggu

SEQ ID NO: 441769 - RNA, 19 nt, Homo sapiens
  misc_RNA (1)...(19): siRNA sense strand
agaaagagacacuggaaau

SEQ ID NO: 441770 - RNA, 19 nt, Homo sapiens
  misc_RNA (1)...(19): siRNA sense strand
guagucauuugcaaaccaa

SEQ ID NO: 441771 - RNA, 19 nt, Homo sapiens
  misc_RNA (1)...(19): siRNA sense strand
aaauagaaauggcaauggu

SEQ ID NO: 441772 - RNA, 19 nt, Homo sapiens
  misc_RNA (1)...(19): siRNA sense strand
gcacuccugcagcccaaua

SEQ ID NO: 441773 - RNA, 19 nt, Homo sapiens
  misc_RNA (1)...(19): siRNA sense strand
cuguugcgcugucugauaa

SEQ ID NO: 441774 - RNA, 19 nt, Homo sapiens
  misc_RNA (1)...(19): siRNA sense strand
gcuagaacaucagaagaag

SEQ ID NO: 441775 - RNA, 19 nt, Homo sapiens
  misc_RNA (1)...(19): siRNA sense strand
ugauacagcugcccgucuu

SEQ ID NO: 441776 - RNA, 19 nt, Homo sapiens
  misc_RNA (1)...(19): siRNA sense strand
ugauaauccaccagaaaua

SEQ ID NO: 441777 - RNA, 19 nt, Homo sapiens
  misc_RNA (1)...(19): siRNA sense strand
ucaaagaucaacggcuaua

SEQ ID NO: 441778 - RNA, 19 nt, Homo sapiens
  misc_RNA (1)...(19): siRNA sense strand
gguguucuuucuguuguaa

SEQ ID NO: 441779 - RNA, 19 nt, Homo sapiens
  misc_RNA (1)...(19): siRNA sense strand
cagaagaagguaucgaaga

SEQ ID NO: 441780 - RNA, 19 nt, Homo sapiens
  misc_RNA (1)...(19): siRNA sense strand
agaagcaccuggagacgau

SEQ ID NO: 441781 - RNA, 19 nt, Homo sapiens
  misc_RNA (1)...(19): siRNA sense strand
cagggucaaucauaacuuc

SEQ ID NO: 441782 - RNA, 19 nt, Homo sapiens
  misc_RNA (1)...(19): siRNA sense strand
agaaauggcaaugguuuaa

SEQ ID NO: 441783 - RNA, 19 nt, Homo sapiens
  misc_RNA (1)...(19): siRNA sense strand
uagaaauggcaaugguuua

SEQ ID NO: 441784 - RNA, 19 nt, Homo sapiens
  misc_RNA (1)...(19): siRNA sense strand
uuacugugcugcuagaaca

SEQ ID NO: 441785 - RNA, 19 nt, Homo sapiens
  misc_RNA (1)...(19): siRNA sense strand
aagaagguaucgaagacaa

SEQ ID NO: 441786 - RNA, 19 nt, Homo sapiens
  misc_RNA (1)...(19): siRNA sense strand
gagagucaauuuuaccauu

SEQ ID NO: 441787 - RNA, 19 nt, Homo sapiens
  misc_RNA (1)...(19): siRNA sense strand
gggcaggaaaccauugaaa

SEQ ID NO: 441788 - RNA, 19 nt, Homo sapiens
  misc_RNA (1)...(19): siRNA sense strand
caaacuaccaacaacucua

SEQ ID NO: 441789 - RNA, 19 nt, Homo sapiens
  misc_RNA (1)...(19): siRNA sense strand
ucauuuaccauauggcuuu

SEQ ID NO: 441790 - RNA, 19 nt, Homo sapiens
  misc_RNA (1)...(19): siRNA sense strand
gagccuugguuacaguuca

SEQ ID NO: 441791 - RNA, 19 nt, Homo sapiens
  misc_RNA (1)...(19): siRNA sense strand
gaaauggacuugagaaaua

SEQ ID NO: 441792 - RNA, 19 nt, Homo sapiens
  misc_RNA (1)...(19): siRNA sense strand
gcacauugcuuucucaaga

SEQ ID NO: 441793 - RNA, 19 nt, Homo sapiens
  misc_RNA (1)...(19): siRNA sense strand
ggaauaguguucuguaaga

SEQ ID NO: 441794 - RNA, 19 nt, Homo sapiens
  misc_RNA (1)...(19): siRNA sense strand
ggaccaagccagagacuua

SEQ ID NO: 441795 - RNA, 19 nt, Homo sapiens
  misc_RNA (1)...(19): siRNA sense strand
ccaaggaaauccacaguuu

SEQ ID NO: 441796 - RNA, 19 nt, Homo sapiens
  misc_RNA (1)...(19): siRNA sense strand
ucacaaggaucguuauaaa

SEQ ID NO: 441797 - RNA, 19 nt, Homo sapiens
  misc_RNA (1)...(19): siRNA sense strand
gaauguaacuaccauggaa

SEQ ID NO: 441798 - RNA, 19 nt, Homo sapiens
  misc_RNA (1)...(19): siRNA sense strand
gagcugaaauuacuuggaa

SEQ ID NO: 441799 - RNA, 19 nt, Homo sapiens
  misc_RNA (1)...(19): siRNA sense strand
uaacaaggacuuucucuuu

SEQ ID NO: 441800 - RNA, 19 nt, Homo sapiens
  misc_RNA (1)...(19): siRNA sense strand
gggacaagcugcaggauga

SEQ ID NO: 441801 - RNA, 19 nt, Homo sapiens
  misc_RNA (1)...(19): siRNA sense strand
gaagaccacugcccagaug

SEQ ID NO: 441802 - RNA, 19 nt, Homo sapiens
  misc_RNA (1)...(19): siRNA sense strand
ugaagggucugcuggauuu

SEQ ID NO: 441803 - RNA, 19 nt, Homo sapiens
  misc_RNA (1)...(19): siRNA sense strand
gaaaugagcacgagcaaag

SEQ ID NO: 441804 - RNA, 19 nt, Homo sapiens
  misc_RNA (1)...(19): siRNA sense strand
gaacgucugaggaaccuua

SEQ ID NO: 441805 - RNA, 19 nt, Homo sapiens
  misc_RNA (1)...(19): siRNA sense strand
gaucaaguccugugaguug

SEQ ID NO: 441806 - RNA, 19 nt, Homo sapiens
  misc_RNA (1)...(19): siRNA sense strand
gcaagugagucugaugaaa

SEQ ID NO: 441807 - RNA, 19 nt, Homo sapiens
  misc_RNA (1)...(19): siRNA sense strand
ccaaagagaaccaaagauu

SEQ ID NO: 441808 - RNA, 19 nt, Homo sapiens
  misc_RNA (1)...(19): siRNA sense strand
gggauuaucuccucauuac

SEQ ID NO: 441809 - RNA, 19 nt, Homo sapiens
  misc_RNA (1)...(19): siRNA sense strand
acgaauagcuguggcauuu

SEQ ID NO: 441810 - RNA, 19 nt, Homo sapiens
  misc_RNA (1)...(19): siRNA sense strand
ucacugacauuggcauuaa

SEQ ID NO: 441811 - RNA, 19 nt, Homo sapiens
  misc_RNA (1)...(19): siRNA sense strand
caaaaugggugucaucaaa

SEQ ID NO: 441812 - RNA, 19 nt, Homo sapiens
  misc_RNA (1)...(19): siRNA sense strand
uaacuaccauggaaagguu

SEQ ID NO: 441813 - RNA, 19 nt, Homo sapiens
  misc_RNA (1)...(19): siRNA sense strand
ggaaauccacaguuugaaa

SEQ ID NO: 441814 - RNA, 19 nt, Homo sapiens
  misc_RNA (1)...(19): siRNA sense strand
gagcaucaucugaagcuua

SEQ ID NO: 441815 - RNA, 19 nt, Homo sapiens
  misc_RNA (1)...(19): siRNA sense strand
ggagauagacccaggugaa

SEQ ID NO: 441816 - RNA, 19 nt, Homo sapiens
  misc_RNA (1)...(19): siRNA sense strand
ggaagaugaugagacuaaa

SEQ ID NO: 441817 - RNA, 19 nt, Homo sapiens
  misc_RNA (1)...(19): siRNA sense strand
gaaagcagccagggagaaa

SEQ ID NO: 441818 - RNA, 19 nt, Homo sapiens
  misc_RNA (1)...(19): siRNA sense strand
gcaggcagcuucaaaagaa

SEQ ID NO: 441819 - RNA, 19 nt, Homo sapiens
  misc_RNA (1)...(19): siRNA sense strand
caacuucacagacaauuug

SEQ ID NO: 441820 - RNA, 19 nt, Homo sapiens
  misc_RNA (1)...(19): siRNA sense strand
ugaaggauuugauucgauu

SEQ ID NO: 441821 - RNA, 19 nt, Homo sapiens
  misc_RNA (1)...(19): siRNA sense strand
gaagagcaagcagaguuua

SEQ ID NO: 441822 - RNA, 19 nt, Homo sapiens
  misc_RNA (1)...(19): siRNA sense strand
cauagaaaguuugagauug

SEQ ID NO: 441823 - RNA, 19 nt, Homo sapiens
  misc_RNA (1)...(19): siRNA sense strand
ugaacgacauugcgacauu

SEQ ID NO: 441824 - RNA, 19 nt, Homo sapiens
  misc_RNA (1)...(19): siRNA sense strand
caaccaacuugagaaugua

SEQ ID NO: 441825 - RNA, 19 nt, Homo sapiens
  misc_RNA (1)...(19): siRNA sense strand
ggacaccuuugaagacugu

SEQ ID NO: 441826 - RNA, 19 nt, Homo sapiens
  misc_RNA (1)...(19): siRNA sense strand
gaaauccacaguuugaaau

SEQ ID NO: 441827 - RNA, 19 nt, Homo sapiens
  misc_RNA (1)...(19): siRNA sense strand
caacaagcuuuggcaguga

SEQ ID NO: 441828 - RNA, 19 nt, Homo sapiens
  misc_RNA (1)...(19): siRNA sense strand
gaaccaaagauucagcauu

SEQ ID NO: 441829 - RNA, 19 nt, Homo sapiens
  misc_RNA (1)...(19): siRNA sense strand
gaucacaaucucccucuuu

SEQ ID NO: 441830 - RNA, 19 nt, Homo sapiens
  misc_RNA (1)...(19): siRNA sense strand
gcaccucugugacgauuuc

SEQ ID NO: 441831 - RNA, 19 nt, Homo sapiens
  misc_RNA (1)...(19): siRNA sense strand
ggaagagcaagcagaguuu

SEQ ID NO: 441832 - RNA, 19 nt, Homo sapiens
  misc_RNA (1)...(19): siRNA sense strand
uagaacaacuucacagaca

SEQ ID NO: 441833 - RNA, 19 nt, Homo sapiens
  misc_RNA (1)...(19): siRNA sense strand
aaccaaagauucagcauuc

SEQ ID NO: 441834 - RNA, 19 nt, Homo sapiens
  misc_RNA (1)...(19): siRNA sense strand
gccagagacuuauaaaaua

SEQ ID NO: 441835 - RNA, 19 nt, Homo sapiens
  misc_RNA (1)...(19): siRNA sense strand
gaacgacauugcgacauuc

SEQ ID NO: 441836 - RNA, 19 nt, Homo sapiens
  misc_RNA (1)...(19): siRNA sense strand
ccacauugcugucaugcau

SEQ ID NO: 441837 - RNA, 19 nt, Homo sapiens
  misc_RNA (1)...(19): siRNA sense strand
cgaaaccuguuccuccaaa

SEQ ID NO: 441838 - RNA, 19 nt, Homo sapiens
  misc_RNA (1)...(19): siRNA sense strand
gcuugagacugaagagauu

SEQ ID NO: 441839 - RNA, 19 nt, Homo sapiens
  misc_RNA (1)...(19): siRNA sense strand
ucaacuggaugaaacagaa

SEQ ID NO: 441840 - RNA, 19 nt, Homo sapiens
  misc_RNA (1)...(19): siRNA sense strand
gaaacuuacagcucauauu

SEQ ID NO: 441841 - RNA, 19 nt, Homo sapiens
  misc_RNA (1)...(19): siRNA sense strand
aaucagagacuguugguuu

SEQ ID NO: 441842 - RNA, 19 nt, Homo sapiens
  misc_RNA (1)...(19): siRNA sense strand
gauagacccaggugaacua

SEQ ID NO: 441843 - RNA, 19 nt, Homo sapiens
  misc_RNA (1)...(19): siRNA sense strand
uaaaagaguuggaaaagug

SEQ ID NO: 441844 - RNA, 19 nt, Homo sapiens
  misc_RNA (1)...(19): siRNA sense strand
ggauauaucacuccaaugg

SEQ ID NO: 441845 - RNA, 19 nt, Homo sapiens
  misc_RNA (1)...(19): siRNA sense strand
caaacucaaucucaaccaa

SEQ ID NO: 441846 - RNA, 19 nt, Homo sapiens
  misc_RNA (1)...(19): siRNA sense strand
ggcauuaaauacuaucgaa

SEQ ID NO: 441847 - RNA, 19 nt, Homo sapiens
  misc_RNA (1)...(19): siRNA sense strand
gacuuucucuuugggaaua

SEQ ID NO: 441848 - RNA, 19 nt, Homo sapiens
  misc_RNA (1)...(19): siRNA sense strand
gcaaccaaaugucccaaca

SEQ ID NO: 441849 - RNA, 19 nt, Homo sapiens
  misc_RNA (1)...(19): siRNA sense strand
gaaagugccgaucaucaug

SEQ ID NO: 441850 - RNA, 19 nt, Homo sapiens
  misc_RNA (1)...(19): siRNA sense strand
gcaggaugagcugaaauua

SEQ ID NO: 441851 - RNA, 19 nt, Homo sapiens
  misc_RNA (1)...(19): siRNA sense strand
uaucaaagaccaaggaaau

SEQ ID NO: 441852 - RNA, 19 nt, Homo sapiens
  misc_RNA (1)...(19): siRNA sense strand
gauagaggauuugaucaag

SEQ ID NO: 441853 - RNA, 19 nt, Homo sapiens
  misc_RNA (1)...(19): siRNA sense strand
ggagauaauagaacaacuu

SEQ ID NO: 441854 - RNA, 19 nt, Homo sapiens
  misc_RNA (1)...(19): siRNA sense strand
ccaacugacccgggaauua

SEQ ID NO: 441855 - RNA, 19 nt, Homo sapiens
  misc_RNA (1)...(19): siRNA sense strand
gaacaacuucacagacaau

SEQ ID NO: 441856 - RNA, 19 nt, Homo sapiens
  misc_RNA (1)...(19): siRNA sense strand
caaagagaaccaaagauuc

SEQ ID NO: 441857 - RNA, 19 nt, Homo sapiens
  misc_RNA (1)...(19): siRNA sense strand
cugaagauauggagauaga

SEQ ID NO: 441858 - RNA, 19 nt, Homo sapiens
  misc_RNA (1)...(19): siRNA sense strand
ggccaaagcccagaaaguu

SEQ ID NO: 441859 - RNA, 19 nt, Homo sapiens
  misc_RNA (1)...(19): siRNA sense strand
ccaagaaccagcaaccaaa

SEQ ID NO: 441860 - RNA, 19 nt, Homo sapiens
  misc_RNA (1)...(19): siRNA sense strand
gagauugccagucgaaaug

SEQ ID NO: 441861 - RNA, 19 nt, Homo sapiens
  misc_RNA (1)...(19): siRNA sense strand
aaagagaaccaaagauuca

SEQ ID NO: 441862 - RNA, 19 nt, Homo sapiens
  misc_RNA (1)...(19): siRNA sense strand
ugaaagccaucaugaaagg

SEQ ID NO: 441863 - RNA, 19 nt, Homo sapiens
  misc_RNA (1)...(19): siRNA sense strand
gccuacaacuacagcauuu

SEQ ID NO: 441864 - RNA, 19 nt, Homo sapiens
  misc_RNA (1)...(19): siRNA sense strand
ccaaaugucccaacagcaa

SEQ ID NO: 441865 - RNA, 19 nt, Homo sapiens
  misc_RNA (1)...(19): siRNA sense strand
aaacuuacagcucauauuc

SEQ ID NO: 441866 - RNA, 19 nt, Homo sapiens
  misc_RNA (1)...(19): siRNA sense strand
ccaugaagcugaugacacu

SEQ ID NO: 441867 - RNA, 19 nt, Homo sapiens
  misc_RNA (1)...(19): siRNA sense strand
aaaggaagaugaugagacu

SEQ ID NO: 441868 - RNA, 19 nt, Homo sapiens
  misc_RNA (1)...(19): siRNA sense strand
ggucugagcaucaucugaa

SEQ ID NO: 441869 - RNA, 19 nt, Homo sapiens
  misc_RNA (1)...(19): siRNA sense strand
ggaccacauugcugucaug

SEQ ID NO: 441870 - RNA, 19 nt, Homo sapiens
  misc_RNA (1)...(19): siRNA sense strand
cagaggacauucacugaca

SEQ ID NO: 441871 - RNA, 19 nt, Homo sapiens
  misc_RNA (1)...(19): siRNA sense strand
gcugaugacacuuucaauu

SEQ ID NO: 441872 - RNA, 19 nt, Homo sapiens
  misc_RNA (1)...(19): siRNA sense strand
gaauaguguucuguaagau

SEQ ID NO: 441873 - RNA, 19 nt, Homo sapiens
  misc_RNA (1)...(19): siRNA sense strand
ugaguuggcuguggaccua

SEQ ID NO: 441874 - RNA, 19 nt, Homo sapiens
  misc_RNA (1)...(19): siRNA sense strand
aacaaggacuuucucuuug

SEQ ID NO: 441875 - RNA, 19 nt, Homo sapiens
  misc_RNA (1)...(19): siRNA sense strand
gugacuugcuugagacuga

SEQ ID NO: 441876 - RNA, 19 nt, Homo sapiens
  misc_RNA (1)...(19): siRNA sense strand
gaugaugagacuaaauuug

SEQ ID NO: 441877 - RNA, 19 nt, Homo sapiens
  misc_RNA (1)...(19): siRNA sense strand
ggagcagauucuuaaggaa

SEQ ID NO: 441878 - RNA, 19 nt, Homo sapiens
  misc_RNA (1)...(19): siRNA sense strand
gggaccagcucauccaaag

SEQ ID NO: 441879 - RNA, 19 nt, Homo sapiens
  misc_RNA (1)...(19): siRNA sense strand
auacgugacuugcuugaga

SEQ ID NO: 441880 - RNA, 19 nt, Homo sapiens
  misc_RNA (1)...(19): siRNA sense strand
aaacgaaagugccgaucau

SEQ ID NO: 441881 - RNA, 19 nt, Homo sapiens
  misc_RNA (1)...(19): siRNA sense strand
gaaaccuguuccuccaaau

SEQ ID NO: 441882 - RNA, 19 nt, Homo sapiens
  misc_RNA (1)...(19): siRNA sense strand
gccaaagcccagaaaguuu

SEQ ID NO: 441883 - RNA, 19 nt, Homo sapiens
  misc_RNA (1)...(19): siRNA sense strand
caacugacccgggaauuag

SEQ ID NO: 441884 - RNA, 19 nt, Homo sapiens
  misc_RNA (1)...(19): siRNA sense strand
ucacagacaauuugccauu

SEQ ID NO: 441885 - RNA, 19 nt, Homo sapiens
  misc_RNA (1)...(19): siRNA sense strand
caaaggaccaagccagaga

SEQ ID NO: 441886 - RNA, 19 nt, Homo sapiens
  misc_RNA (1)...(19): siRNA sense strand
gcuaaagcaucuaauucca

SEQ ID NO: 441887 - RNA, 19 nt, Homo sapiens
  misc_RNA (1)...(19): siRNA sense strand
cauuauacgugacuugcuu

SEQ ID NO: 441888 - RNA, 19 nt, Homo sapiens
  misc_RNA (1)...(19): siRNA sense strand
ggguugauaucgccuugaa

SEQ ID NO: 441889 - RNA, 19 nt, Homo sapiens
  misc_RNA (1)...(19): siRNA sense strand
gaaagguuauuaguucaac

SEQ ID NO: 441890 - RNA, 19 nt, Homo sapiens
  misc_RNA (1)...(19): siRNA sense strand
ucaccgcacugccaucgaa

SEQ ID NO: 441891 - RNA, 19 nt, Homo sapiens
  misc_RNA (1)...(19): siRNA sense strand
gaacaaagacaaggaguau

SEQ ID NO: 441892 - RNA, 19 nt, Homo sapiens
  misc_RNA (1)...(19): siRNA sense strand
acaaagacaaggaguauua

SEQ ID NO: 441893 - RNA, 19 nt, Homo sapiens
  misc_RNA (1)...(19): siRNA sense strand
caaggaguauuaugucuga

SEQ ID NO: 441894 - RNA, 19 nt, Homo sapiens
  misc_RNA (1)...(19): siRNA sense strand
gaaacuacaucaguaacuc

SEQ ID NO: 441895 - RNA, 19 nt, Homo sapiens
  misc_RNA (1)...(19): siRNA sense strand
gaccagagccgaaacuaca

SEQ ID NO: 441896 - RNA, 19 nt, Homo sapiens
  misc_RNA (1)...(19): siRNA sense strand
guggugcgcuucacucgaa

SEQ ID NO: 441897 - RNA, 19 nt, Homo sapiens
  misc_RNA (1)...(19): siRNA sense strand
ggaggagaguuaauauugc

SEQ ID NO: 441898 - RNA, 19 nt, Homo sapiens
  misc_RNA (1)...(19): siRNA sense strand
ccaagaagaacaaagacaa

SEQ ID NO: 441899 - RNA, 19 nt, Homo sapiens
  misc_RNA (1)...(19): siRNA sense strand
gagcccaacgccauaguaa

SEQ ID NO: 441900 - RNA, 19 nt, Homo sapiens
  misc_RNA (1)...(19): siRNA sense strand
gggcgguggugaaagagaa

SEQ ID NO: 441901 - RNA, 19 nt, Homo sapiens
  misc_RNA (1)...(19): siRNA sense strand
ucuacgccauguauaagua

SEQ ID NO: 441902 - RNA, 19 nt, Homo sapiens
  misc_RNA (1)...(19): siRNA sense strand
gcaaggccaagaagaacaa

SEQ ID NO: 441903 - RNA, 19 nt, Homo sapiens
  misc_RNA (1)...(19): siRNA sense strand
uggaggagaguuaauauug

SEQ ID NO: 441904 - RNA, 19 nt, Homo sapiens
  misc_RNA (1)...(19): siRNA sense strand
ccagcaaggccaagaagaa

SEQ ID NO: 441905 - RNA, 19 nt, Homo sapiens
  misc_RNA (1)...(19): siRNA sense strand
cgacgagcccaacgccaua

SEQ ID NO: 441906 - RNA, 19 nt, Homo sapiens
  misc_RNA (1)...(19): siRNA sense strand
agccgaaacuacaucagua

SEQ ID NO: 441907 - RNA, 19 nt, Homo sapiens
  misc_RNA (1)...(19): siRNA sense strand
gcaccacccagaacacaga

SEQ ID NO: 441908 - RNA, 19 nt, Homo sapiens
  misc_RNA (1)...(19): siRNA sense strand
cauaguaagcgacggcaaa

SEQ ID NO: 441909 - RNA, 19 nt, Homo sapiens
  misc_RNA (1)...(19): siRNA sense strand
ggggagcgcucaucaccua

SEQ ID NO: 441910 - RNA, 19 nt, Homo sapiens
  misc_RNA (1)...(19): siRNA sense strand
ggacagcaccacccagaac

SEQ ID NO: 441911 - RNA, 19 nt, Homo sapiens
  misc_RNA (1)...(19): siRNA sense strand
gguggccucugcugagugu

SEQ ID NO: 441912 - RNA, 19 nt, Homo sapiens
  misc_RNA (1)...(19): siRNA sense strand
caaagacaaggaguauuau

SEQ ID NO: 441913 - RNA, 19 nt, Homo sapiens
  misc_RNA (1)...(19): siRNA sense strand
gcacggacgacauuaccau

SEQ ID NO: 441914 - RNA, 19 nt, Homo sapiens
  misc_RNA (1)...(19): siRNA sense strand
gggaccacauacaucuuug

SEQ ID NO: 441915 - RNA, 19 nt, Homo sapiens
  misc_RNA (1)...(19): siRNA sense strand
gccgaaacuacaucaguaa

SEQ ID NO: 441916 - RNA, 19 nt, Homo sapiens
  misc_RNA (1)...(19): siRNA sense strand
ccacccagaacacagauga

SEQ ID NO: 441917 - RNA, 19 nt, Homo sapiens
  misc_RNA (1)...(19): siRNA sense strand
agaacaaagacaaggagua

SEQ ID NO: 441918 - RNA, 19 nt, Homo sapiens
  misc_RNA (1)...(19): siRNA sense strand
gagccgaaacuacaucagu

SEQ ID NO: 441919 - RNA, 19 nt, Homo sapiens
  misc_RNA (1)...(19): siRNA sense strand
ggcccaaccucaggacaga

SEQ ID NO: 441920 - RNA, 19 nt, Homo sapiens
  misc_RNA (1)...(19): siRNA sense strand
cagcugaccaucuucaaca

SEQ ID NO: 441921 - RNA, 19 nt, Homo sapiens
  misc_RNA (1)...(19): siRNA sense strand
caagaagaacaaagacaag

SEQ ID NO: 441922 - RNA, 19 nt, Homo sapiens
  misc_RNA (1)...(19): siRNA sense strand
guaccgcaaucgugaugag

SEQ ID NO: 441923 - RNA, 19 nt, Homo sapiens
  misc_RNA (1)...(19): siRNA sense strand
uguccggccucuacuacaa

SEQ ID NO: 441924 - RNA, 19 nt, Homo sapiens
  misc_RNA (1)...(19): siRNA sense strand
gccgccagcugaccaucuu

SEQ ID NO: 441925 - RNA, 19 nt, Homo sapiens
  misc_RNA (1)...(19): siRNA sense strand
guaacucggcccagagcaa

SEQ ID NO: 441926 - RNA, 19 nt, Homo sapiens
  misc_RNA (1)...(19): siRNA sense strand
ccaccaccauggccacuac

SEQ ID NO: 441927 - RNA, 19 nt, Homo sapiens
  misc_RNA (1)...(19): siRNA sense strand
gcaugguggugggcauugu

SEQ ID NO: 441928 - RNA, 19 nt, Homo sapiens
  misc_RNA (1)...(19): siRNA sense strand
aagacaaggaguauuaugu

SEQ ID NO: 441929 - RNA, 19 nt, Homo sapiens
  misc_RNA (1)...(19): siRNA sense strand
ggaccagagccgaaacuac

SEQ ID NO: 441930 - RNA, 19 nt, Homo sapiens
  misc_RNA (1)...(19): siRNA sense strand
cgggaccacauacaucuuu

SEQ ID NO: 441931 - RNA, 19 nt, Homo sapiens
  misc_RNA (1)...(19): siRNA sense strand
cggacgacauuaccaucga

SEQ ID NO: 441932 - RNA, 19 nt, Homo sapiens
  misc_RNA (1)...(19): siRNA sense strand
aaagacaaggaguauuaug

SEQ ID NO: 441933 - RNA, 19 nt, Homo sapiens
  misc_RNA (1)...(19): siRNA sense strand
agaagaacaaagacaagga

SEQ ID NO: 441934 - RNA, 19 nt, Homo sapiens
  misc_RNA (1)...(19): siRNA sense strand
ccacggacgacgaggacuu

SEQ ID NO: 441935 - RNA, 19 nt, Homo sapiens
  misc_RNA (1)...(19): siRNA sense strand
cuacuacaaugggcucaag

SEQ ID NO: 441936 - RNA, 19 nt, Homo sapiens
  misc_RNA (1)...(19): siRNA sense strand
uaacucggcccagagcaau

SEQ ID NO: 441937 - RNA, 19 nt, Homo sapiens
  misc_RNA (1)...(19): siRNA sense strand
guacuggaggagaguuaau

SEQ ID NO: 441938 - RNA, 19 nt, Homo sapiens
  misc_RNA (1)...(19): siRNA sense strand
cgagcccaacgccauagua

SEQ ID NO: 441939 - RNA, 19 nt, Homo sapiens
  misc_RNA (1)...(19): siRNA sense strand
gacagcaccacccagaaca

SEQ ID NO: 441940 - RNA, 19 nt, Homo sapiens
  misc_RNA (1)...(19): siRNA sense strand
gaacaaagacaaggaguau

SEQ ID NO: 441941 - RNA, 19 nt, Homo sapiens
  misc_RNA (1)...(19): siRNA sense strand
acaaagacaaggaguauua

SEQ ID NO: 441942 - RNA, 19 nt, Homo sapiens
  misc_RNA (1)...(19): siRNA sense strand
caaggaguauuaugucuga

SEQ ID NO: 441943 - RNA, 19 nt, Homo sapiens
  misc_RNA (1)...(19): siRNA sense strand
gaaacuacaucaguaacuc

SEQ ID NO: 441944 - RNA, 19 nt, Homo sapiens
  misc_RNA (1)...(19): siRNA sense strand
gaccagagccgaaacuaca

SEQ ID NO: 441945 - RNA, 19 nt, Homo sapiens
  misc_RNA (1)...(19): siRNA sense strand
guggugcgcuucacucgaa

SEQ ID NO: 441946 - RNA, 19 nt, Homo sapiens
  misc_RNA (1)...(19): siRNA sense strand
ggaggagaguuaauauugc

SEQ ID NO: 441947 - RNA, 19 nt, Homo sapiens
  misc_RNA (1)...(19): siRNA sense strand
ccaagaagaacaaagacaa

SEQ ID NO: 441948 - RNA, 19 nt, Homo sapiens
  misc_RNA (1)...(19): siRNA sense strand
gagcccaacgccauaguaa

SEQ ID NO: 441949 - RNA, 19 nt, Homo sapiens
  misc_RNA (1)...(19): siRNA sense strand
gggcgguggugaaagagaa

SEQ ID NO: 441950 - RNA, 19 nt, Homo sapiens
  misc_RNA (1)...(19): siRNA sense strand
ucuacgccauguauaagua

SEQ ID NO: 441951 - RNA, 19 nt, Homo sapiens
  misc_RNA (1)...(19): siRNA sense strand
gcaaggccaagaagaacaa

SEQ ID NO: 441952 - RNA, 19 nt, Homo sapiens
  misc_RNA (1)...(19): siRNA sense strand
uggaggagaguuaauauug

SEQ ID NO: 441953 - RNA, 19 nt, Homo sapiens
  misc_RNA (1)...(19): siRNA sense strand
ccagcaaggccaagaagaa

SEQ ID NO: 441954 - RNA, 19 nt, Homo sapiens
  misc_RNA (1)...(19): siRNA sense strand
cgacgagcccaacgccaua

SEQ ID NO: 441955 - RNA, 19 nt, Homo sapiens
  misc_RNA (1)...(19): siRNA sense strand
agccgaaacuacaucagua

SEQ ID NO: 441956 - RNA, 19 nt, Homo sapiens
  misc_RNA (1)...(19): siRNA sense strand
gcaccacccagaacacaga

SEQ ID NO: 441957 - RNA, 19 nt, Homo sapiens
  misc_RNA (1)...(19): siRNA sense strand
cauaguaagcgacggcaaa

SEQ ID NO: 441958 - RNA, 19 nt, Homo sapiens
  misc_RNA (1)...(19): siRNA sense strand
ggggagcgcucaucaccua

SEQ ID NO: 441959 - RNA, 19 nt, Homo sapiens
  misc_RNA (1)...(19): siRNA sense strand
ggacagcaccacccagaac

SEQ ID NO: 441960 - RNA, 19 nt, Homo sapiens
  misc_RNA (1)...(19): siRNA sense strand
gguggccucugcugagugu

SEQ ID NO: 441961 - RNA, 19 nt, Homo sapiens
  misc_RNA (1)...(19): siRNA sense strand
caaagacaaggaguauuau

SEQ ID NO: 441962 - RNA, 19 nt, Homo sapiens
  misc_RNA (1)...(19): siRNA sense strand
gcacggacgacauuaccau

SEQ ID NO: 441963 - RNA, 19 nt, Homo sapiens
  misc_RNA (1)...(19): siRNA sense strand
gggaccacauacaucuuug

SEQ ID NO: 441964 - RNA, 19 nt, Homo sapiens
  misc_RNA (1)...(19): siRNA sense strand
gccgaaacuacaucaguaa

SEQ ID NO: 441965 - RNA, 19 nt, Homo sapiens
  misc_RNA (1)...(19): siRNA sense strand
ccacccagaacacagauga

SEQ ID NO: 441966 - RNA, 19 nt, Homo sapiens
  misc_RNA (1)...(19): siRNA sense strand
agaacaaagacaaggagua

SEQ ID NO: 441967 - RNA, 19 nt, Homo sapiens
  misc_RNA (1)...(19): siRNA sense strand
gagccgaaacuacaucagu

SEQ ID NO: 441968 - RNA, 19 nt, Homo sapiens
  misc_RNA (1)...(19): siRNA sense strand
ggcccaaccucaggacaga

SEQ ID NO: 441969 - RNA, 19 nt, Homo sapiens
  misc_RNA (1)...(19): siRNA sense strand
cagcugaccaucuucaaca

SEQ ID NO: 441970 - RNA, 19 nt, Homo sapiens
  misc_RNA (1)...(19): siRNA sense strand
caagaagaacaaagacaag

SEQ ID NO: 441971 - RNA, 19 nt, Homo sapiens
  misc_RNA (1)...(19): siRNA sense strand
guaccgcaaucgugaugag

SEQ ID NO: 441972 - RNA, 19 nt, Homo sapiens
  misc_RNA (1)...(19): siRNA sense strand
uguccggccucuacuacaa

SEQ ID NO: 441973 - RNA, 19 nt, Homo sapiens
  misc_RNA (1)...(19): siRNA sense strand
gccgccagcugaccaucuu

SEQ ID NO: 441974 - RNA, 19 nt, Homo sapiens
  misc_RNA (1)...(19): siRNA sense strand
guaacucggcccagagcaa

SEQ ID NO: 441975 - RNA, 19 nt, Homo sapiens
  misc_RNA (1)...(19): siRNA sense strand
ccaccaccauggccacuac

SEQ ID NO: 441976 - RNA, 19 nt, Homo sapiens
  misc_RNA (1)...(19): siRNA sense strand
gcaugguggugggcauugu

SEQ ID NO: 441977 - RNA, 19 nt, Homo sapiens
  misc_RNA (1)...(19): siRNA sense strand
aagacaaggaguauuaugu

SEQ ID NO: 441978 - RNA, 19 nt, Homo sapiens
  misc_RNA (1)...(19): siRNA sense strand
ggaccagagccgaaacuac

SEQ ID NO: 441979 - RNA, 19 nt, Homo sapiens
  misc_RNA (1)...(19): siRNA sense strand
cgggaccacauacaucuuu

SEQ ID NO: 441980 - RNA, 19 nt, Homo sapiens
  misc_RNA (1)...(19): siRNA sense strand
cggacgacauuaccaucga

SEQ ID NO: 441981 - RNA, 19 nt, Homo sapiens
  misc_RNA (1)...(19): siRNA sense strand
aaagacaaggaguauuaug

SEQ ID NO: 441982 - RNA, 19 nt, Homo sapiens
  misc_RNA (1)...(19): siRNA sense strand
agaagaacaaagacaagga

SEQ ID NO: 441983 - RNA, 19 nt, Homo sapiens
  misc_RNA (1)...(19): siRNA sense strand
ccacggacgacgaggacuu

SEQ ID NO: 441984 - RNA, 19 nt, Homo sapiens
  misc_RNA (1)...(19): siRNA sense strand
cuacuacaaugggcucaag

SEQ ID NO: 441985 - RNA, 19 nt, Homo sapiens
  misc_RNA (1)...(19): siRNA sense strand
uaacucggcccagagcaau

SEQ ID NO: 441986 - RNA, 19 nt, Homo sapiens
  misc_RNA (1)...(19): siRNA sense strand
guacuggaggagaguuaau

SEQ ID NO: 441987 - RNA, 19 nt, Homo sapiens
  misc_RNA (1)...(19): siRNA sense strand
cgagcccaacgccauagua

SEQ ID NO: 441988 - RNA, 19 nt, Homo sapiens
  misc_RNA (1)...(19): siRNA sense strand
gacagcaccacccagaaca

SEQ ID NO: 441989 - RNA, 19 nt, Homo sapiens
  misc_RNA (1)...(19): siRNA sense strand
gaacaaagacaaggaguau

SEQ ID NO: 441990 - RNA, 19 nt, Homo sapiens
  misc_RNA (1)...(19): siRNA sense strand
acaaagacaaggaguauua

SEQ ID NO: 441991 - RNA, 19 nt, Homo sapiens
  misc_RNA (1)...(19): siRNA sense strand
caaggaguauuaugucuga

SEQ ID NO: 441992 - RNA, 19 nt, Homo sapiens
  misc_RNA (1)...(19): siRNA sense strand
gaaacuacaucaguaacuc

SEQ ID NO: 441993 - RNA, 19 nt, Homo sapiens
  misc_RNA (1)...(19): siRNA sense strand
gaccagagccgaaacuaca

SEQ ID NO: 441994 - RNA, 19 nt, Homo sapiens
  misc_RNA (1)...(19): siRNA sense strand
guggugcgcuucacucgaa

SEQ ID NO: 441995 - RNA, 19 nt, Homo sapiens
  misc_RNA (1)...(19): siRNA sense strand
ggaggagaguuaauauugc

SEQ ID NO: 441996 - RNA, 19 nt, Homo sapiens
  misc_RNA (1)...(19): siRNA sense strand
ccaagaagaacaaagacaa

SEQ ID NO: 441997 - RNA, 19 nt, Homo sapiens
  misc_RNA (1)...(19): siRNA sense strand
gagcccaacgccauaguaa

SEQ ID NO: 441998 - RNA, 19 nt, Homo sapiens
  misc_RNA (1)...(19): siRNA sense strand
gggcgguggugaaagagaa

SEQ ID NO: 441999 - RNA, 19 nt, Homo sapiens
  misc_RNA (1)...(19): siRNA sense strand
ucuacgccauguauaagua

SEQ ID NO: 442000 - RNA, 19 nt, Homo sapiens
  misc_RNA (1)...(19): siRNA sense strand
gcaaggccaagaagaacaa

SEQ ID NO: 442001 - RNA, 19 nt, Homo sapiens
  misc_RNA (1)...(19): siRNA sense strand
uggaggagaguuaauauug

SEQ ID NO: 442002 - RNA, 19 nt, Homo sapiens
  misc_RNA (1)...(19): siRNA sense strand
ccagcaaggccaagaagaa

SEQ ID NO: 442003 - RNA, 19 nt, Homo sapiens
  misc_RNA (1)...(19): siRNA sense strand
cgacgagcccaacgccaua

SEQ ID NO: 442004 - RNA, 19 nt, Homo sapiens
  misc_RNA (1)...(19): siRNA sense strand
agccgaaacuacaucagua

SEQ ID NO: 442005 - RNA, 19 nt, Homo sapiens
  misc_RNA (1)...(19): siRNA sense strand
gcaccacccagaacacaga

SEQ ID NO: 442006 - RNA, 19 nt, Homo sapiens
  misc_RNA (1)...(19): siRNA sense strand
cauaguaagcgacggcaaa

SEQ ID NO: 442007 - RNA, 19 nt, Homo sapiens
  misc_RNA (1)...(19): siRNA sense strand
ggggagcgcucaucaccua

SEQ ID NO: 442008 - RNA, 19 nt, Homo sapiens
  misc_RNA (1)...(19): siRNA sense strand
ggacagcaccacccagaac

SEQ ID NO: 442009 - RNA, 19 nt, Homo sapiens
  misc_RNA (1)...(19): siRNA sense strand
gguggccucugcugagugu

SEQ ID NO: 442010 - RNA, 19 nt, Homo sapiens
  misc_RNA (1)...(19): siRNA sense strand
caaagacaaggaguauuau

SEQ ID NO: 442011 - RNA, 19 nt, Homo sapiens
  misc_RNA (1)...(19): siRNA sense strand
gcacggacgacauuaccau

SEQ ID NO: 442012 - RNA, 19 nt, Homo sapiens
  misc_RNA (1)...(19): siRNA sense strand
gggaccacauacaucuuug

SEQ ID NO: 442013 - RNA, 19 nt, Homo sapiens
  misc_RNA (1)...(19): siRNA sense strand
gccgaaacuacaucaguaa

SEQ ID NO: 442014 - RNA, 19 nt, Homo sapiens
  misc_RNA (1)...(19): siRNA sense strand
ccacccagaacacagauga

SEQ ID NO: 442015 - RNA, 19 nt, Homo sapiens
  misc_RNA (1)...(19): siRNA sense strand
agaacaaagacaaggagua

SEQ ID NO: 442016 - RNA, 19 nt, Homo sapiens
  misc_RNA (1)...(19): siRNA sense strand
gagccgaaacuacaucagu

SEQ ID NO: 442017 - RNA, 19 nt, Homo sapiens
  misc_RNA (1)...(19): siRNA sense strand
ggcccaaccucaggacaga

SEQ ID NO: 442018 - RNA, 19 nt, Homo sapiens
  misc_RNA (1)...(19): siRNA sense strand
cagcugaccaucuucaaca

SEQ ID NO: 442019 - RNA, 19 nt, Homo sapiens
  misc_RNA (1)...(19): siRNA sense strand
caagaagaacaaagacaag

SEQ ID NO: 442020 - RNA, 19 nt, Homo sapiens
  misc_RNA (1)...(19): siRNA sense strand
guaccgcaaucgugaugag

SEQ ID NO: 442021 - RNA, 19 nt, Homo sapiens
  misc_RNA (1)...(19): siRNA sense strand
uguccggccucuacuacaa

SEQ ID NO: 442022 - RNA, 19 nt, Homo sapiens
  misc_RNA (1)...(19): siRNA sense strand
gccgccagcugaccaucuu

SEQ ID NO: 442023 - RNA, 19 nt, Homo sapiens
  misc_RNA (1)...(19): siRNA sense strand
guaacucggcccagagcaa

SEQ ID NO: 442024 - RNA, 19 nt, Homo sapiens
  misc_RNA (1)...(19): siRNA sense strand
ccaccaccauggccacuac

SEQ ID NO: 442025 - RNA, 19 nt, Homo sapiens
  misc_RNA (1)...(19): siRNA sense strand
gcaugguggugggcauugu

SEQ ID NO: 442026 - RNA, 19 nt, Homo sapiens
  misc_RNA (1)...(19): siRNA sense strand
aagacaaggaguauuaugu

SEQ ID NO: 442027 - RNA, 19 nt, Homo sapiens
  misc_RNA (1)...(19): siRNA sense strand
ggaccagagccgaaacuac

SEQ ID NO: 442028 - RNA, 19 nt, Homo sapiens
  misc_RNA (1)...(19): siRNA sense strand
cgggaccacauacaucuuu

SEQ ID NO: 442029 - RNA, 19 nt, Homo sapiens
  misc_RNA (1)...(19): siRNA sense strand
cggacgacauuaccaucga

SEQ ID NO: 442030 - RNA, 19 nt, Homo sapiens
  misc_RNA (1)...(19): siRNA sense strand
aaagacaaggaguauuaug

SEQ ID NO: 442031 - RNA, 19 nt, Homo sapiens
  misc_RNA (1)...(19): siRNA sense strand
agaagaacaaagacaagga

SEQ ID NO: 442032 - RNA, 19 nt, Homo sapiens
  misc_RNA (1)...(19): siRNA sense strand
ccacggacgacgaggacuu

SEQ ID NO: 442033 - RNA, 19 nt, Homo sapiens
  misc_RNA (1)...(19): siRNA sense strand
cuacuacaaugggcucaag

SEQ ID NO: 442034 - RNA, 19 nt, Homo sapiens
  misc_RNA (1)...(19): siRNA sense strand
uaacucggcccagagcaau

SEQ ID NO: 442035 - RNA, 19 nt, Homo sapiens
  misc_RNA (1)...(19): siRNA sense strand
guacuggaggagaguuaau

SEQ ID NO: 442036 - RNA, 19 nt, Homo sapiens
  misc_RNA (1)...(19): siRNA sense strand
cgagcccaacgccauagua

SEQ ID NO: 442037 - RNA, 19 nt, Homo sapiens
  misc_RNA (1)...(19): siRNA sense strand
gacagcaccacccagaaca

SEQ ID NO: 442038 - RNA, 19 nt, Homo sapiens
  misc_RNA (1)...(19): siRNA sense strand
aaggagagaugguggauua

SEQ ID NO: 442039 - RNA, 19 nt, Homo sapiens
  misc_RNA (1)...(19): siRNA sense strand
cagcugggcuuccugguuu

SEQ ID NO: 442040 - RNA, 19 nt, Homo sapiens
  misc_RNA (1)...(19): siRNA sense strand
ccaaagacaucuccaggau

SEQ ID NO: 442041 - RNA, 19 nt, Homo sapiens
  misc_RNA (1)...(19): siRNA sense strand
gagagaugguggauuacaa

SEQ ID NO: 442042 - RNA, 19 nt, Homo sapiens
  misc_RNA (1)...(19): siRNA sense strand
aaagggaccucgcgguaaa

SEQ ID NO: 442043 - RNA, 19 nt, Homo sapiens
  misc_RNA (1)...(19): siRNA sense strand
gaugguggauuacaaugga

SEQ ID NO: 442044 - RNA, 19 nt, Homo sapiens
  misc_RNA (1)...(19): siRNA sense strand
ggauuacaauggaaacauc

SEQ ID NO: 442045 - RNA, 19 nt, Homo sapiens
  misc_RNA (1)...(19): siRNA sense strand
caagggagaaccagggaaa

SEQ ID NO: 442046 - RNA, 19 nt, Homo sapiens
  misc_RNA (1)...(19): siRNA sense strand
ggaagcaggacuagaugga

SEQ ID NO: 442047 - RNA, 19 nt, Homo sapiens
  misc_RNA (1)...(19): siRNA sense strand
caaggcugcuggaacaagu

SEQ ID NO: 442048 - RNA, 19 nt, Homo sapiens
  misc_RNA (1)...(19): siRNA sense strand
gggagaagcaggugucgau

SEQ ID NO: 442049 - RNA, 19 nt, Homo sapiens
  misc_RNA (1)...(19): siRNA sense strand
ggagaacagggaccagaug

SEQ ID NO: 442050 - RNA, 19 nt, Homo sapiens
  misc_RNA (1)...(19): siRNA sense strand
acaauggaaacaucaauga

SEQ ID NO: 442051 - RNA, 19 nt, Homo sapiens
  misc_RNA (1)...(19): siRNA sense strand
gaaaggagagaugguggau

SEQ ID NO: 442052 - RNA, 19 nt, Homo sapiens
  misc_RNA (1)...(19): siRNA sense strand
cuagagguuucccuggauu

SEQ ID NO: 442053 - RNA, 19 nt, Homo sapiens
  misc_RNA (1)...(19): siRNA sense strand
gcaaauggagacggcuauu

SEQ ID NO: 442054 - RNA, 19 nt, Homo sapiens
  misc_RNA (1)...(19): siRNA sense strand
gaaaggcuuccagggagaa

SEQ ID NO: 442055 - RNA, 19 nt, Homo sapiens
  misc_RNA (1)...(19): siRNA sense strand
gcagcugggcuuccugguu

SEQ ID NO: 442056 - RNA, 19 nt, Homo sapiens
  misc_RNA (1)...(19): siRNA sense strand
ggagagaugguggauuaca

SEQ ID NO: 442057 - RNA, 19 nt, Homo sapiens
  misc_RNA (1)...(19): siRNA sense strand
gaugcuggcaacuccauug

SEQ ID NO: 442058 - RNA, 19 nt, Homo sapiens
  misc_RNA (1)...(19): siRNA sense strand
gcguggagcagcuggagaa

SEQ ID NO: 442059 - RNA, 19 nt, Homo sapiens
  misc_RNA (1)...(19): siRNA sense strand
uggagcagcuggagaacag

SEQ ID NO: 442060 - RNA, 19 nt, Homo sapiens
  misc_RNA (1)...(19): siRNA sense strand
ggauuuccgggucccauug

SEQ ID NO: 442061 - RNA, 19 nt, Homo sapiens
  misc_RNA (1)...(19): siRNA sense strand
gagaugguggauuacaaug

SEQ ID NO: 442062 - RNA, 19 nt, Homo sapiens
  misc_RNA (1)...(19): siRNA sense strand
uagcggagcgcacccacaa

SEQ ID NO: 442063 - RNA, 19 nt, Homo sapiens
  misc_RNA (1)...(19): siRNA sense strand
gggagaaccagggaaagga

SEQ ID NO: 442064 - RNA, 19 nt, Homo sapiens
  misc_RNA (1)...(19): siRNA sense strand
gagccaggccagcauccaa

SEQ ID NO: 442065 - RNA, 19 nt, Homo sapiens
  misc_RNA (1)...(19): siRNA sense strand
gguacuccaggaccaauug

SEQ ID NO: 442066 - RNA, 19 nt, Homo sapiens
  misc_RNA (1)...(19): siRNA sense strand
aaaggagacccugggauga

SEQ ID NO: 442067 - RNA, 19 nt, Homo sapiens
  misc_RNA (1)...(19): siRNA sense strand
gagccagggaucccaggaa

SEQ ID NO: 442068 - RNA, 19 nt, Homo sapiens
  misc_RNA (1)...(19): siRNA sense strand
gaaccagggaaaggagaga

SEQ ID NO: 442069 - RNA, 19 nt, Homo sapiens
  misc_RNA (1)...(19): siRNA sense strand
gauuacaauggaaacauca

SEQ ID NO: 442070 - RNA, 19 nt, Homo sapiens
  misc_RNA (1)...(19): siRNA sense strand
ggucaaccaggaacuagag

SEQ ID NO: 442071 - RNA, 19 nt, Homo sapiens
  misc_RNA (1)...(19): siRNA sense strand
aaggagagaugguggauua

SEQ ID NO: 442072 - RNA, 19 nt, Homo sapiens
  misc_RNA (1)...(19): siRNA sense strand
cagcugggcuuccugguuu

SEQ ID NO: 442073 - RNA, 19 nt, Homo sapiens
  misc_RNA (1)...(19): siRNA sense strand
ccaaagacaucuccaggau

SEQ ID NO: 442074 - RNA, 19 nt, Homo sapiens
  misc_RNA (1)...(19): siRNA sense strand
gagagaugguggauuacaa

SEQ ID NO: 442075 - RNA, 19 nt, Homo sapiens
  misc_RNA (1)...(19): siRNA sense strand
aaagggaccucgcgguaaa

SEQ ID NO: 442076 - RNA, 19 nt, Homo sapiens
  misc_RNA (1)...(19): siRNA sense strand
gaugguggauuacaaugga

SEQ ID NO: 442077 - RNA, 19 nt, Homo sapiens
  misc_RNA (1)...(19): siRNA sense strand
ggauuacaauggaaacauc

SEQ ID NO: 442078 - RNA, 19 nt, Homo sapiens
  misc_RNA (1)...(19): siRNA sense strand
caagggagaaccagggaaa

SEQ ID NO: 442079 - RNA, 19 nt, Homo sapiens
  misc_RNA (1)...(19): siRNA sense strand
ggaagcaggacuagaugga

SEQ ID NO: 442080 - RNA, 19 nt, Homo sapiens
  misc_RNA (1)...(19): siRNA sense strand
caaggcugcuggaacaagu

SEQ ID NO: 442081 - RNA, 19 nt, Homo sapiens
  misc_RNA (1)...(19): siRNA sense strand
gggagaagcaggugucgau

SEQ ID NO: 442082 - RNA, 19 nt, Homo sapiens
  misc_RNA (1)...(19): siRNA sense strand
ggagaacagggaccagaug

SEQ ID NO: 442083 - RNA, 19 nt, Homo sapiens
  misc_RNA (1)...(19): siRNA sense strand
acaauggaaacaucaauga

SEQ ID NO: 442084 - RNA, 19 nt, Homo sapiens
  misc_RNA (1)...(19): siRNA sense strand
gaaaggagagaugguggau

SEQ ID NO: 442085 - RNA, 19 nt, Homo sapiens
  misc_RNA (1)...(19): siRNA sense strand
cuagagguuucccuggauu

SEQ ID NO: 442086 - RNA, 19 nt, Homo sapiens
  misc_RNA (1)...(19): siRNA sense strand
gcaaauggagacggcuauu

SEQ ID NO: 442087 - RNA, 19 nt, Homo sapiens
  misc_RNA (1)...(19): siRNA sense strand
gaaaggcuuccagggagaa

SEQ ID NO: 442088 - RNA, 19 nt, Homo sapiens
  misc_RNA (1)...(19): siRNA sense strand
gcagcugggcuuccugguu

SEQ ID NO: 442089 - RNA, 19 nt, Homo sapiens
  misc_RNA (1)...(19): siRNA sense strand
ggagagaugguggauuaca

SEQ ID NO: 442090 - RNA, 19 nt, Homo sapiens
  misc_RNA (1)...(19): siRNA sense strand
gaugcuggcaacuccauug

SEQ ID NO: 442091 - RNA, 19 nt, Homo sapiens
  misc_RNA (1)...(19): siRNA sense strand
gcguggagcagcuggagaa

SEQ ID NO: 442092 - RNA, 19 nt, Homo sapiens
  misc_RNA (1)...(19): siRNA sense strand
uggagcagcuggagaacag

SEQ ID NO: 442093 - RNA, 19 nt, Homo sapiens
  misc_RNA (1)...(19): siRNA sense strand
ggauuuccgggucccauug

SEQ ID NO: 442094 - RNA, 19 nt, Homo sapiens
  misc_RNA (1)...(19): siRNA sense strand
gagaugguggauuacaaug

SEQ ID NO: 442095 - RNA, 19 nt, Homo sapiens
  misc_RNA (1)...(19): siRNA sense strand
uagcggagcgcacccacaa

SEQ ID NO: 442096 - RNA, 19 nt, Homo sapiens
  misc_RNA (1)...(19): siRNA sense strand
gggagaaccagggaaagga

SEQ ID NO: 442097 - RNA, 19 nt, Homo sapiens
  misc_RNA (1)...(19): siRNA sense strand
gagccaggccagcauccaa

SEQ ID NO: 442098 - RNA, 19 nt, Homo sapiens
  misc_RNA (1)...(19): siRNA sense strand
gguacuccaggaccaauug

SEQ ID NO: 442099 - RNA, 19 nt, Homo sapiens
  misc_RNA (1)...(19): siRNA sense strand
aaaggagacccugggauga

SEQ ID NO: 442100 - RNA, 19 nt, Homo sapiens
  misc_RNA (1)...(19): siRNA sense strand
gagccagggaucccaggaa

SEQ ID NO: 442101 - RNA, 19 nt, Homo sapiens
  misc_RNA (1)...(19): siRNA sense strand
gaaccagggaaaggagaga

SEQ ID NO: 442102 - RNA, 19 nt, Homo sapiens
  misc_RNA (1)...(19): siRNA sense strand
gauuacaauggaaacauca

SEQ ID NO: 442103 - RNA, 19 nt, Homo sapiens
  misc_RNA (1)...(19): siRNA sense strand
ggucaaccaggaacuagag

SEQ ID NO: 442104 - RNA, 19 nt, Homo sapiens
  misc_RNA (1)...(19): siRNA sense strand
aaggagagaugguggauua

SEQ ID NO: 442105 - RNA, 19 nt, Homo sapiens
  misc_RNA (1)...(19): siRNA sense strand
cagcugggcuuccugguuu

SEQ ID NO: 442106 - RNA, 19 nt, Homo sapiens
  misc_RNA (1)...(19): siRNA sense strand
ccaaagacaucuccaggau

SEQ ID NO: 442107 - RNA, 19 nt, Homo sapiens
  misc_RNA (1)...(19): siRNA sense strand
gagagaugguggauuacaa

SEQ ID NO: 442108 - RNA, 19 nt, Homo sapiens
  misc_RNA (1)...(19): siRNA sense strand
aaagggaccucgcgguaaa

SEQ ID NO: 442109 - RNA, 19 nt, Homo sapiens
  misc_RNA (1)...(19): siRNA sense strand
gaugguggauuacaaugga

SEQ ID NO: 442110 - RNA, 19 nt, Homo sapiens
  misc_RNA (1)...(19): siRNA sense strand
ggauuacaauggaaacauc

SEQ ID NO: 442111 - RNA, 19 nt, Homo sapiens
  misc_RNA (1)...(19): siRNA sense strand
caagggagaaccagggaaa

SEQ ID NO: 442112 - RNA, 19 nt, Homo sapiens
  misc_RNA (1)...(19): siRNA sense strand
ggaagcaggacuagaugga

SEQ ID NO: 442113 - RNA, 19 nt, Homo sapiens
  misc_RNA (1)...(19): siRNA sense strand
caaggcugcuggaacaagu

SEQ ID NO: 442114 - RNA, 19 nt, Homo sapiens
  misc_RNA (1)...(19): siRNA sense strand
gggagaagcaggugucgau

SEQ ID NO: 442115 - RNA, 19 nt, Homo sapiens
  misc_RNA (1)...(19): siRNA sense strand
ggagaacagggaccagaug

SEQ ID NO: 442116 - RNA, 19 nt, Homo sapiens
  misc_RNA (1)...(19): siRNA sense strand
acaauggaaacaucaauga

SEQ ID NO: 442117 - RNA, 19 nt, Homo sapiens
  misc_RNA (1)...(19): siRNA sense strand
gaaaggagagaugguggau

SEQ ID NO: 442118 - RNA, 19 nt, Homo sapiens
  misc_RNA (1)...(19): siRNA sense strand
cuagagguuucccuggauu

SEQ ID NO: 442119 - RNA, 19 nt, Homo sapiens
  misc_RNA (1)...(19): siRNA sense strand
gcaaauggagacggcuauu

SEQ ID NO: 442120 - RNA, 19 nt, Homo sapiens
  misc_RNA (1)...(19): siRNA sense strand
gaaaggcuuccagggagaa

SEQ ID NO: 442121 - RNA, 19 nt, Homo sapiens
  misc_RNA (1)...(19): siRNA sense strand
gcagcugggcuuccugguu

SEQ ID NO: 442122 - RNA, 19 nt, Homo sapiens
  misc_RNA (1)...(19): siRNA sense strand
ggagagaugguggauuaca

SEQ ID NO: 442123 - RNA, 19 nt, Homo sapiens
  misc_RNA (1)...(19): siRNA sense strand
gaugcuggcaacuccauug

SEQ ID NO: 442124 - RNA, 19 nt, Homo sapiens
  misc_RNA (1)...(19): siRNA sense strand
gcguggagcagcuggagaa

SEQ ID NO: 442125 - RNA, 19 nt, Homo sapiens
  misc_RNA (1)...(19): siRNA sense strand
uggagcagcuggagaacag

SEQ ID NO: 442126 - RNA, 19 nt, Homo sapiens
  misc_RNA (1)...(19): siRNA sense strand
ggauuuccgggucccauug

SEQ ID NO: 442127 - RNA, 19 nt, Homo sapiens
  misc_RNA (1)...(19): siRNA sense strand
gagaugguggauuacaaug

SEQ ID NO: 442128 - RNA, 19 nt, Homo sapiens
  misc_RNA (1)...(19): siRNA sense strand
uagcggagcgcacccacaa

SEQ ID NO: 442129 - RNA, 19 nt, Homo sapiens
  misc_RNA (1)...(19): siRNA sense strand
gggagaaccagggaaagga

SEQ ID NO: 442130 - RNA, 19 nt, Homo sapiens
  misc_RNA (1)...(19): siRNA sense strand
gagccaggccagcauccaa

SEQ ID NO: 442131 - RNA, 19 nt, Homo sapiens
  misc_RNA (1)...(19): siRNA sense strand
gguacuccaggaccaauug

SEQ ID NO: 442132 - RNA, 19 nt, Homo sapiens
  misc_RNA (1)...(19): siRNA sense strand
aaaggagacccugggauga

SEQ ID NO: 442133 - RNA, 19 nt, Homo sapiens
  misc_RNA (1)...(19): siRNA sense strand
gagccagggaucccaggaa

SEQ ID NO: 442134 - RNA, 19 nt, Homo sapiens
  misc_RNA (1)...(19): siRNA sense strand
gaaccagggaaaggagaga

SEQ ID NO: 442135 - RNA, 19 nt, Homo sapiens
  misc_RNA (1)...(19): siRNA sense strand
gauuacaauggaaacauca

SEQ ID NO: 442136 - RNA, 19 nt, Homo sapiens
  misc_RNA (1)...(19): siRNA sense strand
ggucaaccaggaacuagag

SEQ ID NO: 442137 - RNA, 19 nt, Homo sapiens
  misc_RNA (1)...(19): siRNA sense strand
aaggagagaugguggauua

SEQ ID NO: 442138 - RNA, 19 nt, Homo sapiens
  misc_RNA (1)...(19): siRNA sense strand
cagcugggcuuccugguuu

SEQ ID NO: 442139 - RNA, 19 nt, Homo sapiens
  misc_RNA (1)...(19): siRNA sense strand
ccaaagacaucuccaggau

SEQ ID NO: 442140 - RNA, 19 nt, Homo sapiens
  misc_RNA (1)...(19): siRNA sense strand
gagagaugguggauuacaa

SEQ ID NO: 442141 - RNA, 19 nt, Homo sapiens
  misc_RNA (1)...(19): siRNA sense strand
aaagggaccucgcgguaaa

SEQ ID NO: 442142 - RNA, 19 nt, Homo sapiens
  misc_RNA (1)...(19): siRNA sense strand
gaugguggauuacaaugga

SEQ ID NO: 442143 - RNA, 19 nt, Homo sapiens
  misc_RNA (1)...(19): siRNA sense strand
ggauuacaauggaaacauc

SEQ ID NO: 442144 - RNA, 19 nt, Homo sapiens
  misc_RNA (1)...(19): siRNA sense strand
caagggagaaccagggaaa

SEQ ID NO: 442145 - RNA, 19 nt, Homo sapiens
  misc_RNA (1)...(19): siRNA sense strand
ggaagcaggacuagaugga

SEQ ID NO: 442146 - RNA, 19 nt, Homo sapiens
  misc_RNA (1)...(19): siRNA sense strand
caaggcugcuggaacaagu

SEQ ID NO: 442147 - RNA, 19 nt, Homo sapiens
  misc_RNA (1)...(19): siRNA sense strand
gggagaagcaggugucgau

SEQ ID NO: 442148 - RNA, 19 nt, Homo sapiens
  misc_RNA (1)...(19): siRNA sense strand
ggagaacagggaccagaug

SEQ ID NO: 442149 - RNA, 19 nt, Homo sapiens
  misc_RNA (1)...(19): siRNA sense strand
acaauggaaacaucaauga

SEQ ID NO: 442150 - RNA, 19 nt, Homo sapiens
  misc_RNA (1)...(19): siRNA sense strand
gaaaggagagaugguggau

SEQ ID NO: 442151 - RNA, 19 nt, Homo sapiens
  misc_RNA (1)...(19): siRNA sense strand
cuagagguuucccuggauu

SEQ ID NO: 442152 - RNA, 19 nt, Homo sapiens
  misc_RNA (1)...(19): siRNA sense strand
gcaaauggagacggcuauu

SEQ ID NO: 442153 - RNA, 19 nt, Homo sapiens
  misc_RNA (1)...(19): siRNA sense strand
gaaaggcuuccagggagaa

SEQ ID NO: 442154 - RNA, 19 nt, Homo sapiens
  misc_RNA (1)...(19): siRNA sense strand
gcagcugggcuuccugguu

SEQ ID NO: 442155 - RNA, 19 nt, Homo sapiens
  misc_RNA (1)...(19): siRNA sense strand
ggagagaugguggauuaca

SEQ ID NO: 442156 - RNA, 19 nt, Homo sapiens
  misc_RNA (1)...(19): siRNA sense strand
gaugcuggcaacuccauug

SEQ ID NO: 442157 - RNA, 19 nt, Homo sapiens
  misc_RNA (1)...(19): siRNA sense strand
gcguggagcagcuggagaa

SEQ ID NO: 442158 - RNA, 19 nt, Homo sapiens
  misc_RNA (1)...(19): siRNA sense strand
uggagcagcuggagaacag

SEQ ID NO: 442159 - RNA, 19 nt, Homo sapiens
  misc_RNA (1)...(19): siRNA sense strand
ggauuuccgggucccauug

SEQ ID NO: 442160 - RNA, 19 nt, Homo sapiens
  misc_RNA (1)...(19): siRNA sense strand
gagaugguggauuacaaug

SEQ ID NO: 442161 - RNA, 19 nt, Homo sapiens
  misc_RNA (1)...(19): siRNA sense strand
uagcggagcgcacccacaa

SEQ ID NO: 442162 - RNA, 19 nt, Homo sapiens
  misc_RNA (1)...(19): siRNA sense strand
gggagaaccagggaaagga

SEQ ID NO: 442163 - RNA, 19 nt, Homo sapiens
  misc_RNA (1)...(19): siRNA sense strand
gagccaggccagcauccaa

SEQ ID NO: 442164 - RNA, 19 nt, Homo sapiens
  misc_RNA (1)...(19): siRNA sense strand
gguacuccaggaccaauug

SEQ ID NO: 442165 - RNA, 19 nt, Homo sapiens
  misc_RNA (1)...(19): siRNA sense strand
aaaggagacccugggauga

SEQ ID NO: 442166 - RNA, 19 nt, Homo sapiens
  misc_RNA (1)...(19): siRNA sense strand
gagccagggaucccaggaa

SEQ ID NO: 442167 - RNA, 19 nt, Homo sapiens
  misc_RNA (1)...(19): siRNA sense strand
gaaccagggaaaggagaga

SEQ ID NO: 442168 - RNA, 19 nt, Homo sapiens
  misc_RNA (1)...(19): siRNA sense strand
gauuacaauggaaacauca

SEQ ID NO: 442169 - RNA, 19 nt, Homo sapiens
  misc_RNA (1)...(19): siRNA sense strand
ggucaaccaggaacuagag

SEQ ID NO: 442170 - RNA, 19 nt, Homo sapiens
  misc_RNA (1)...(19): siRNA sense strand
aaggagagaugguggauua

SEQ ID NO: 442171 - RNA, 19 nt, Homo sapiens
  misc_RNA (1)...(19): siRNA sense strand
cagcugggcuuccugguuu

SEQ ID NO: 442172 - RNA, 19 nt, Homo sapiens
  misc_RNA (1)...(19): siRNA sense strand
ccaaagacaucuccaggau

SEQ ID NO: 442173 - RNA, 19 nt, Homo sapiens
  misc_RNA (1)...(19): siRNA sense strand
gagagaugguggauuacaa

SEQ ID NO: 442174 - RNA, 19 nt, Homo sapiens
  misc_RNA (1)...(19): siRNA sense strand
aaagggaccucgcgguaaa

SEQ ID NO: 442175 - RNA, 19 nt, Homo sapiens
  misc_RNA (1)...(19): siRNA sense strand
gaugguggauuacaaugga

SEQ ID NO: 442176 - RNA, 19 nt, Homo sapiens
  misc_RNA (1)...(19): siRNA sense strand
ggauuacaauggaaacauc

SEQ ID NO: 442177 - RNA, 19 nt, Homo sapiens
  misc_RNA (1)...(19): siRNA sense strand
caagggagaaccagggaaa

SEQ ID NO: 442178 - RNA, 19 nt, Homo sapiens
  misc_RNA (1)...(19): siRNA sense strand
ggaagcaggacuagaugga

SEQ ID NO: 442179 - RNA, 19 nt, Homo sapiens
  misc_RNA (1)...(19): siRNA sense strand
caaggcugcuggaacaagu

SEQ ID NO: 442180 - RNA, 19 nt, Homo sapiens
  misc_RNA (1)...(19): siRNA sense strand
gggagaagcaggugucgau

SEQ ID NO: 442181 - RNA, 19 nt, Homo sapiens
  misc_RNA (1)...(19): siRNA sense strand
ggagaacagggaccagaug

SEQ ID NO: 442182 - RNA, 19 nt, Homo sapiens
  misc_RNA (1)...(19): siRNA sense strand
acaauggaaacaucaauga

SEQ ID NO: 442183 - RNA, 19 nt, Homo sapiens
  misc_RNA (1)...(19): siRNA sense strand
gaaaggagagaugguggau

SEQ ID NO: 442184 - RNA, 19 nt, Homo sapiens
  misc_RNA (1)...(19): siRNA sense strand
cuagagguuucccuggauu

SEQ ID NO: 442185 - RNA, 19 nt, Homo sapiens
  misc_RNA (1)...(19): siRNA sense strand
gcaaauggagacggcuauu

SEQ ID NO: 442186 - RNA, 19 nt, Homo sapiens
  misc_RNA (1)...(19): siRNA sense strand
gaaaggcuuccagggagaa

SEQ ID NO: 442187 - RNA, 19 nt, Homo sapiens
  misc_RNA (1)...(19): siRNA sense strand
gcagcugggcuuccugguu

SEQ ID NO: 442188 - RNA, 19 nt, Homo sapiens
  misc_RNA (1)...(19): siRNA sense strand
ggagagaugguggauuaca

SEQ ID NO: 442189 - RNA, 19 nt, Homo sapiens
  misc_RNA (1)...(19): siRNA sense strand
gaugcuggcaacuccauug

SEQ ID NO: 442190 - RNA, 19 nt, Homo sapiens
  misc_RNA (1)...(19): siRNA sense strand
gcguggagcagcuggagaa

SEQ ID NO: 442191 - RNA, 19 nt, Homo sapiens
  misc_RNA (1)...(19): siRNA sense strand
uggagcagcuggagaacag

SEQ ID NO: 442192 - RNA, 19 nt, Homo sapiens
  misc_RNA (1)...(19): siRNA sense strand
ggauuuccgggucccauug

SEQ ID NO: 442193 - RNA, 19 nt, Homo sapiens
  misc_RNA (1)...(19): siRNA sense strand
gagaugguggauuacaaug

SEQ ID NO: 442194 - RNA, 19 nt, Homo sapiens
  misc_RNA (1)...(19): siRNA sense strand
uagcggagcgcacccacaa

SEQ ID NO: 442195 - RNA, 19 nt, Homo sapiens
  misc_RNA (1)...(19): siRNA sense strand
gggagaaccagggaaagga

SEQ ID NO: 442196 - RNA, 19 nt, Homo sapiens
  misc_RNA (1)...(19): siRNA sense strand
gagccaggccagcauccaa

SEQ ID NO: 442197 - RNA, 19 nt, Homo sapiens
  misc_RNA (1)...(19): siRNA sense strand
gguacuccaggaccaauug

SEQ ID NO: 442198 - RNA, 19 nt, Homo sapiens
  misc_RNA (1)...(19): siRNA sense strand
aaaggagacccugggauga

SEQ ID NO: 442199 - RNA, 19 nt, Homo sapiens
  misc_RNA (1)...(19): siRNA sense strand
gagccagggaucccaggaa

SEQ ID NO: 442200 - RNA, 19 nt, Homo sapiens
  misc_RNA (1)...(19): siRNA sense strand
gaaccagggaaaggagaga

SEQ ID NO: 442201 - RNA, 19 nt, Homo sapiens
  misc_RNA (1)...(19): siRNA sense strand
gauuacaauggaaacauca

SEQ ID NO: 442202 - RNA, 19 nt, Homo sapiens
  misc_RNA (1)...(19): siRNA sense strand
ggucaaccaggaacuagag

SEQ ID NO: 442203 - RNA, 19 nt, Homo sapiens
  misc_RNA (1)...(19): siRNA sense strand
aaggagagaugguggauua

SEQ ID NO: 442204 - RNA, 19 nt, Homo sapiens
  misc_RNA (1)...(19): siRNA sense strand
cagcugggcuuccugguuu

SEQ ID NO: 442205 - RNA, 19 nt, Homo sapiens
  misc_RNA (1)...(19): siRNA sense strand
ccaaagacaucuccaggau

SEQ ID NO: 442206 - RNA, 19 nt, Homo sapiens
  misc_RNA (1)...(19): siRNA sense strand
gagagaugguggauuacaa

SEQ ID NO: 442207 - RNA, 19 nt, Homo sapiens
  misc_RNA (1)...(19): siRNA sense strand
aaagggaccucgcgguaaa

SEQ ID NO: 442208 - RNA, 19 nt, Homo sapiens
  misc_RNA (1)...(19): siRNA sense strand
gaugguggauuacaaugga

SEQ ID NO: 442209 - RNA, 19 nt, Homo sapiens
  misc_RNA (1)...(19): siRNA sense strand
ggauuacaauggaaacauc

SEQ ID NO: 442210 - RNA, 19 nt, Homo sapiens
  misc_RNA (1)...(19): siRNA sense strand
caagggagaaccagggaaa

SEQ ID NO: 442211 - RNA, 19 nt, Homo sapiens
  misc_RNA (1)...(19): siRNA sense strand
ggaagcaggacuagaugga

SEQ ID NO: 442212 - RNA, 19 nt, Homo sapiens
  misc_RNA (1)...(19): siRNA sense strand
caaggcugcuggaacaagu

SEQ ID NO: 442213 - RNA, 19 nt, Homo sapiens
  misc_RNA (1)...(19): siRNA sense strand
gggagaagcaggugucgau

SEQ ID NO: 442214 - RNA, 19 nt, Homo sapiens
  misc_RNA (1)...(19): siRNA sense strand
ggagaacagggaccagaug

SEQ ID NO: 442215 - RNA, 19 nt, Homo sapiens
  misc_RNA (1)...(19): siRNA sense strand
acaauggaaacaucaauga

SEQ ID NO: 442216 - RNA, 19 nt, Homo sapiens
  misc_RNA (1)...(19): siRNA sense strand
gaaaggagagaugguggau

SEQ ID NO: 442217 - RNA, 19 nt, Homo sapiens
  misc_RNA (1)...(19): siRNA sense strand
cuagagguuucccuggauu

SEQ ID NO: 442218 - RNA, 19 nt, Homo sapiens
  misc_RNA (1)...(19): siRNA sense strand
gcaaauggagacggcuauu

SEQ ID NO: 442219 - RNA, 19 nt, Homo sapiens
  misc_RNA (1)...(19): siRNA sense strand
gaaaggcuuccagggagaa

SEQ ID NO: 442220 - RNA, 19 nt, Homo sapiens
  misc_RNA (1)...(19): siRNA sense strand
gcagcugggcuuccugguu

SEQ ID NO: 442221 - RNA, 19 nt, Homo sapiens
  misc_RNA (1)...(19): siRNA sense strand
ggagagaugguggauuaca

SEQ ID NO: 442222 - RNA, 19 nt, Homo sapiens
  misc_RNA (1)...(19): siRNA sense strand
gaugcuggcaacuccauug

SEQ ID NO: 442223 - RNA, 19 nt, Homo sapiens
  misc_RNA (1)...(19): siRNA sense strand
gcguggagcagcuggagaa

SEQ ID NO: 442224 - RNA, 19 nt, Homo sapiens
  misc_RNA (1)...(19): siRNA sense strand
uggagcagcuggagaacag

SEQ ID NO: 442225 - RNA, 19 nt, Homo sapiens
  misc_RNA (1)...(19): siRNA sense strand
ggauuuccgggucccauug

SEQ ID NO: 442226 - RNA, 19 nt, Homo sapiens
  misc_RNA (1)...(19): siRNA sense strand
gagaugguggauuacaaug

SEQ ID NO: 442227 - RNA, 19 nt, Homo sapiens
  misc_RNA (1)...(19): siRNA sense strand
uagcggagcgcacccacaa

SEQ ID NO: 442228 - RNA, 19 nt, Homo sapiens
  misc_RNA (1)...(19): siRNA sense strand
gggagaaccagggaaagga

SEQ ID NO: 442229 - RNA, 19 nt, Homo sapiens
  misc_RNA (1)...(19): siRNA sense strand
gagccaggccagcauccaa

SEQ ID NO: 442230 - RNA, 19 nt, Homo sapiens
  misc_RNA (1)...(19): siRNA sense strand
gguacuccaggaccaauug

SEQ ID NO: 442231 - RNA, 19 nt, Homo sapiens
  misc_RNA (1)...(19): siRNA sense strand
aaaggagacccugggauga

SEQ ID NO: 442232 - RNA, 19 nt, Homo sapiens
  misc_RNA (1)...(19): siRNA sense strand
gagccagggaucccaggaa

SEQ ID NO: 442233 - RNA, 19 nt, Homo sapiens
  misc_RNA (1)...(19): siRNA sense strand
gaaccagggaaaggagaga

SEQ ID NO: 442234 - RNA, 19 nt, Homo sapiens
  misc_RNA (1)...(19): siRNA sense strand
gauuacaauggaaacauca

SEQ ID NO: 442235 - RNA, 19 nt, Homo sapiens
  misc_RNA (1)...(19): siRNA sense strand
ggucaaccaggaacuagag

SEQ ID NO: 442236 - RNA, 19 nt, Homo sapiens
  misc_RNA (1)...(19): siRNA sense strand
aaggagagaugguggauua

SEQ ID NO: 442237 - RNA, 19 nt, Homo sapiens
  misc_RNA (1)...(19): siRNA sense strand
cagcugggcuuccugguuu

SEQ ID NO: 442238 - RNA, 19 nt, Homo sapiens
  misc_RNA (1)...(19): siRNA sense strand
ccaaagacaucuccaggau

SEQ ID NO: 442239 - RNA, 19 nt, Homo sapiens
  misc_RNA (1)...(19): siRNA sense strand
gagagaugguggauuacaa

SEQ ID NO: 442240 - RNA, 19 nt, Homo sapiens
  misc_RNA (1)...(19): siRNA sense strand
aaagggaccucgcgguaaa

SEQ ID NO: 442241 - RNA, 19 nt, Homo sapiens
  misc_RNA (1)...(19): siRNA sense strand
gaugguggauuacaaugga

SEQ ID NO: 442242 - RNA, 19 nt, Homo sapiens
  misc_RNA (1)...(19): siRNA sense strand
ggauuacaauggaaacauc

SEQ ID NO: 442243 - RNA, 19 nt, Homo sapiens
  misc_RNA (1)...(19): siRNA sense strand
caagggagaaccagggaaa

SEQ ID NO: 442244 - RNA, 19 nt, Homo sapiens
  misc_RNA (1)...(19): siRNA sense strand
ggaagcaggacuagaugga

SEQ ID NO: 442245 - RNA, 19 nt, Homo sapiens
  misc_RNA (1)...(19): siRNA sense strand
caaggcugcuggaacaagu

SEQ ID NO: 442246 - RNA, 19 nt, Homo sapiens
  misc_RNA (1)...(19): siRNA sense strand
gggagaagcaggugucgau

SEQ ID NO: 442247 - RNA, 19 nt, Homo sapiens
  misc_RNA (1)...(19): siRNA sense strand
ggagaacagggaccagaug

SEQ ID NO: 442248 - RNA, 19 nt, Homo sapiens
  misc_RNA (1)...(19): siRNA sense strand
acaauggaaacaucaauga

SEQ ID NO: 442249 - RNA, 19 nt, Homo sapiens
  misc_RNA (1)...(19): siRNA sense strand
gaaaggagagaugguggau

SEQ ID NO: 442250 - RNA, 19 nt, Homo sapiens
  misc_RNA (1)...(19): siRNA sense strand
cuagagguuucccuggauu

SEQ ID NO: 442251 - RNA, 19 nt, Homo sapiens
  misc_RNA (1)...(19): siRNA sense strand
gcaaauggagacggcuauu

SEQ ID NO: 442252 - RNA, 19 nt, Homo sapiens
  misc_RNA (1)...(19): siRNA sense strand
gaaaggcuuccagggagaa

SEQ ID NO: 442253 - RNA, 19 nt, Homo sapiens
  misc_RNA (1)...(19): siRNA sense strand
gcagcugggcuuccugguu

SEQ ID NO: 442254 - RNA, 19 nt, Homo sapiens
  misc_RNA (1)...(19): siRNA sense strand
ggagagaugguggauuaca

SEQ ID NO: 442255 - RNA, 19 nt, Homo sapiens
  misc_RNA (1)...(19): siRNA sense strand
gaugcuggcaacuccauug

SEQ ID NO: 442256 - RNA, 19 nt, Homo sapiens
  misc_RNA (1)...(19): siRNA sense strand
gcguggagcagcuggagaa

SEQ ID NO: 442257 - RNA, 19 nt, Homo sapiens
  misc_RNA (1)...(19): siRNA sense strand
uggagcagcuggagaacag

SEQ ID NO: 442258 - RNA, 19 nt, Homo sapiens
  misc_RNA (1)...(19): siRNA sense strand
ggauuuccgggucccauug

SEQ ID NO: 442259 - RNA, 19 nt, Homo sapiens
  misc_RNA (1)...(19): siRNA sense strand
gagaugguggauuacaaug

SEQ ID NO: 442260 - RNA, 19 nt, Homo sapiens
  misc_RNA (1)...(19): siRNA sense strand
uagcggagcgcacccacaa

SEQ ID NO: 442261 - RNA, 19 nt, Homo sapiens
  misc_RNA (1)...(19): siRNA sense strand
gggagaaccagggaaagga

SEQ ID NO: 442262 - RNA, 19 nt, Homo sapiens
  misc_RNA (1)...(19): siRNA sense strand
gagccaggccagcauccaa

SEQ ID NO: 442263 - RNA, 19 nt, Homo sapiens
  misc_RNA (1)...(19): siRNA sense strand
gguacuccaggaccaauug

SEQ ID NO: 442264 - RNA, 19 nt, Homo sapiens
  misc_RNA (1)...(19): siRNA sense strand
aaaggagacccugggauga

SEQ ID NO: 442265 - RNA, 19 nt, Homo sapiens
  misc_RNA (1)...(19): siRNA sense strand
gagccagggaucccaggaa

SEQ ID NO: 442266 - RNA, 19 nt, Homo sapiens
  misc_RNA (1)...(19): siRNA sense strand
gaaccagggaaaggagaga

SEQ ID NO: 442267 - RNA, 19 nt, Homo sapiens
  misc_RNA (1)...(19): siRNA sense strand
gauuacaauggaaacauca

SEQ ID NO: 442268 - RNA, 19 nt, Homo sapiens
  misc_RNA (1)...(19): siRNA sense strand
ggucaaccaggaacuagag

SEQ ID NO: 442269 - RNA, 19 nt, Homo sapiens
  misc_RNA (1)...(19): siRNA sense strand
aaggagagaugguggauua

SEQ ID NO: 442270 - RNA, 19 nt, Homo sapiens
  misc_RNA (1)...(19): siRNA sense strand
cagcugggcuuccugguuu

SEQ ID NO: 442271 - RNA, 19 nt, Homo sapiens
  misc_RNA (1)...(19): siRNA sense strand
ccaaagacaucuccaggau

SEQ ID NO: 442272 - RNA, 19 nt, Homo sapiens
  misc_RNA (1)...(19): siRNA sense strand
gagagaugguggauuacaa

SEQ ID NO: 442273 - RNA, 19 nt, Homo sapiens
  misc_RNA (1)...(19): siRNA sense strand
aaagggaccucgcgguaaa

SEQ ID NO: 442274 - RNA, 19 nt, Homo sapiens
  misc_RNA (1)...(19): siRNA sense strand
gaugguggauuacaaugga

SEQ ID NO: 442275 - RNA, 19 nt, Homo sapiens
  misc_RNA (1)...(19): siRNA sense strand
ggauuacaauggaaacauc

SEQ ID NO: 442276 - RNA, 19 nt, Homo sapiens
  misc_RNA (1)...(19): siRNA sense strand
caagggagaaccagggaaa

SEQ ID NO: 442277 - RNA, 19 nt, Homo sapiens
  misc_RNA (1)...(19): siRNA sense strand
ggaagcaggacuagaugga

SEQ ID NO: 442278 - RNA, 19 nt, Homo sapiens
  misc_RNA (1)...(19): siRNA sense strand
caaggcugcuggaacaagu

SEQ ID NO: 442279 - RNA, 19 nt, Homo sapiens
  misc_RNA (1)...(19): siRNA sense strand
gggagaagcaggugucgau

SEQ ID NO: 442280 - RNA, 19 nt, Homo sapiens
  misc_RNA (1)...(19): siRNA sense strand
ggagaacagggaccagaug

SEQ ID NO: 442281 - RNA, 19 nt, Homo sapiens
  misc_RNA (1)...(19): siRNA sense strand
acaauggaaacaucaauga

SEQ ID NO: 442282 - RNA, 19 nt, Homo sapiens
  misc_RNA (1)...(19): siRNA sense strand
gaaaggagagaugguggau

SEQ ID NO: 442283 - RNA, 19 nt, Homo sapiens
  misc_RNA (1)...(19): siRNA sense strand
cuagagguuucccuggauu

SEQ ID NO: 442284 - RNA, 19 nt, Homo sapiens
  misc_RNA (1)...(19): siRNA sense strand
gcaaauggagacggcuauu

SEQ ID NO: 442285 - RNA, 19 nt, Homo sapiens
  misc_RNA (1)...(19): siRNA sense strand
gaaaggcuuccagggagaa

SEQ ID NO: 442286 - RNA, 19 nt, Homo sapiens
  misc_RNA (1)...(19): siRNA sense strand
gcagcugggcuuccugguu

SEQ ID NO: 442287 - RNA, 19 nt, Homo sapiens
  misc_RNA (1)...(19): siRNA sense strand
ggagagaugguggauuaca

SEQ ID NO: 442288 - RNA, 19 nt, Homo sapiens
  misc_RNA (1)...(19): siRNA sense strand
gaugcuggcaacuccauug

SEQ ID NO: 442289 - RNA, 19 nt, Homo sapiens
  misc_RNA (1)...(19): siRNA sense strand
gcguggagcagcuggagaa

SEQ ID NO: 442290 - RNA, 19 nt, Homo sapiens
  misc_RNA (1)...(19): siRNA sense strand
uggagcagcuggagaacag

SEQ ID NO: 442291 - RNA, 19 nt, Homo sapiens
  misc_RNA (1)...(19): siRNA sense strand
ggauuuccgggucccauug

SEQ ID NO: 442292 - RNA, 19 nt, Homo sapiens
  misc_RNA (1)...(19): siRNA sense strand
gagaugguggauuacaaug

SEQ ID NO: 442293 - RNA, 19 nt, Homo sapiens
  misc_RNA (1)...(19): siRNA sense strand
uagcggagcgcacccacaa

SEQ ID NO: 442294 - RNA, 19 nt, Homo sapiens
  misc_RNA (1)...(19): siRNA sense strand
gggagaaccagggaaagga

SEQ ID NO: 442295 - RNA, 19 nt, Homo sapiens
  misc_RNA (1)...(19): siRNA sense strand
gagccaggccagcauccaa

SEQ ID NO: 442296 - RNA, 19 nt, Homo sapiens
  misc_RNA (1)...(19): siRNA sense strand
gguacuccaggaccaauug

SEQ ID NO: 442297 - RNA, 19 nt, Homo sapiens
  misc_RNA (1)...(19): siRNA sense strand
aaaggagacccugggauga

SEQ ID NO: 442298 - RNA, 19 nt, Homo sapiens
  misc_RNA (1)...(19): siRNA sense strand
gagccagggaucccaggaa

SEQ ID NO: 442299 - RNA, 19 nt, Homo sapiens
  misc_RNA (1)...(19): siRNA sense strand
gaaccagggaaaggagaga

SEQ ID NO: 442300 - RNA, 19 nt, Homo sapiens
  misc_RNA (1)...(19): siRNA sense strand
gauuacaauggaaacauca

SEQ ID NO: 442301 - RNA, 19 nt, Homo sapiens
  misc_RNA (1)...(19): siRNA sense strand
ggucaaccaggaacuagag

SEQ ID NO: 442302 - RNA, 19 nt, Homo sapiens
  misc_RNA (1)...(19): siRNA sense strand
aaggagagaugguggauua

SEQ ID NO: 442303 - RNA, 19 nt, Homo sapiens
  misc_RNA (1)...(19): siRNA sense strand
cagcugggcuuccugguuu

SEQ ID NO: 442304 - RNA, 19 nt, Homo sapiens
  misc_RNA (1)...(19): siRNA sense strand
ccaaagacaucuccaggau

SEQ ID NO: 442305 - RNA, 19 nt, Homo sapiens
  misc_RNA (1)...(19): siRNA sense strand
gagagaugguggauuacaa

SEQ ID NO: 442306 - RNA, 19 nt, Homo sapiens
  misc_RNA (1)...(19): siRNA sense strand
aaagggaccucgcgguaaa

SEQ ID NO: 442307 - RNA, 19 nt, Homo sapiens
  misc_RNA (1)...(19): siRNA sense strand
gaugguggauuacaaugga

SEQ ID NO: 442308 - RNA, 19 nt, Homo sapiens
  misc_RNA (1)...(19): siRNA sense strand
ggauuacaauggaaacauc

SEQ ID NO: 442309 - RNA, 19 nt, Homo sapiens
  misc_RNA (1)...(19): siRNA sense strand
caagggagaaccagggaaa

SEQ ID NO: 442310 - RNA, 19 nt, Homo sapiens
  misc_RNA (1)...(19): siRNA sense strand
ggaagcaggacuagaugga

SEQ ID NO: 442311 - RNA, 19 nt, Homo sapiens
  misc_RNA (1)...(19): siRNA sense strand
caaggcugcuggaacaagu

SEQ ID NO: 442312 - RNA, 19 nt, Homo sapiens
  misc_RNA (1)...(19): siRNA sense strand
gggagaagcaggugucgau

SEQ ID NO: 442313 - RNA, 19 nt, Homo sapiens
  misc_RNA (1)...(19): siRNA sense strand
ggagaacagggaccagaug

SEQ ID NO: 442314 - RNA, 19 nt, Homo sapiens
  misc_RNA (1)...(19): siRNA sense strand
acaauggaaacaucaauga

SEQ ID NO: 442315 - RNA, 19 nt, Homo sapiens
  misc_RNA (1)...(19): siRNA sense strand
gaaaggagagaugguggau

SEQ ID NO: 442316 - RNA, 19 nt, Homo sapiens
  misc_RNA (1)...(19): siRNA sense strand
cuagagguuucccuggauu

SEQ ID NO: 442317 - RNA, 19 nt, Homo sapiens
  misc_RNA (1)...(19): siRNA sense strand
gcaaauggagacggcuauu

SEQ ID NO: 442318 - RNA, 19 nt, Homo sapiens
  misc_RNA (1)...(19): siRNA sense strand
gaaaggcuuccagggagaa

SEQ ID NO: 442319 - RNA, 19 nt, Homo sapiens
  misc_RNA (1)...(19): siRNA sense strand
gcagcugggcuuccugguu

SEQ ID NO: 442320 - RNA, 19 nt, Homo sapiens
  misc_RNA (1)...(19): siRNA sense strand
ggagagaugguggauuaca

SEQ ID NO: 442321 - RNA, 19 nt, Homo sapiens
  misc_RNA (1)...(19): siRNA sense strand
gaugcuggcaacuccauug

SEQ ID NO: 442322 - RNA, 19 nt, Homo sapiens
  misc_RNA (1)...(19): siRNA sense strand
gcguggagcagcuggagaa

SEQ ID NO: 442323 - RNA, 19 nt, Homo sapiens
  misc_RNA (1)...(19): siRNA sense strand
uggagcagcuggagaacag

SEQ ID NO: 442324 - RNA, 19 nt, Homo sapiens
  misc_RNA (1)...(19): siRNA sense strand
ggauuuccgggucccauug

SEQ ID NO: 442325 - RNA, 19 nt, Homo sapiens
  misc_RNA (1)...(19): siRNA sense strand
gagaugguggauuacaaug

SEQ ID NO: 442326 - RNA, 19 nt, Homo sapiens
  misc_RNA (1)...(19): siRNA sense strand
uagcggagcgcacccacaa

SEQ ID NO: 442327 - RNA, 19 nt, Homo sapiens
  misc_RNA (1)...(19): siRNA sense strand
gggagaaccagggaaagga

SEQ ID NO: 442328 - RNA, 19 nt, Homo sapiens
  misc_RNA (1)...(19): siRNA sense strand
gagccaggccagcauccaa

SEQ ID NO: 442329 - RNA, 19 nt, Homo sapiens
  misc_RNA (1)...(19): siRNA sense strand
gguacuccaggaccaauug

SEQ ID NO: 442330 - RNA, 19 nt, Homo sapiens
  misc_RNA (1)...(19): siRNA sense strand
aaaggagacccugggauga

SEQ ID NO: 442331 - RNA, 19 nt, Homo sapiens
  misc_RNA (1)...(19): siRNA sense strand
gagccagggaucccaggaa

SEQ ID NO: 442332 - RNA, 19 nt, Homo sapiens
  misc_RNA (1)...(19): siRNA sense strand
gaaccagggaaaggagaga

SEQ ID NO: 442333 - RNA, 19 nt, Homo sapiens
  misc_RNA (1)...(19): siRNA sense strand
gauuacaauggaaacauca

SEQ ID NO: 442334 - RNA, 19 nt, Homo sapiens
  misc_RNA (1)...(19): siRNA sense strand
ggucaaccaggaacuagag

SEQ ID NO: 442335 - RNA, 19 nt, Homo sapiens
  misc_RNA (1)...(19): siRNA sense strand
aaggagagaugguggauua

SEQ ID NO: 442336 - RNA, 19 nt, Homo sapiens
  misc_RNA (1)...(19): siRNA sense strand
cagcugggcuuccugguuu

SEQ ID NO: 442337 - RNA, 19 nt, Homo sapiens
  misc_RNA (1)...(19): siRNA sense strand
ccaaagacaucuccaggau

SEQ ID NO: 442338 - RNA, 19 nt, Homo sapiens
  misc_RNA (1)...(19): siRNA sense strand
gagagaugguggauuacaa

SEQ ID NO: 442339 - RNA, 19 nt, Homo sapiens
  misc_RNA (1)...(19): siRNA sense strand
aaagggaccucgcgguaaa

SEQ ID NO: 442340 - RNA, 19 nt, Homo sapiens
  misc_RNA (1)...(19): siRNA sense strand
gaugguggauuacaaugga

SEQ ID NO: 442341 - RNA, 19 nt, Homo sapiens
  misc_RNA (1)...(19): siRNA sense strand
ggauuacaauggaaacauc

SEQ ID NO: 442342 - RNA, 19 nt, Homo sapiens
  misc_RNA (1)...(19): siRNA sense strand
caagggagaaccagggaaa

SEQ ID NO: 442343 - RNA, 19 nt, Homo sapiens
  misc_RNA (1)...(19): siRNA sense strand
ggaagcaggacuagaugga

SEQ ID NO: 442344 - RNA, 19 nt, Homo sapiens
  misc_RNA (1)...(19): siRNA sense strand
caaggcugcuggaacaagu

SEQ ID NO: 442345 - RNA, 19 nt, Homo sapiens
  misc_RNA (1)...(19): siRNA sense strand
gggagaagcaggugucgau

SEQ ID NO: 442346 - RNA, 19 nt, Homo sapiens
  misc_RNA (1)...(19): siRNA sense strand
ggagaacagggaccagaug

SEQ ID NO: 442347 - RNA, 19 nt, Homo sapiens
  misc_RNA (1)...(19): siRNA sense strand
acaauggaaacaucaauga

SEQ ID NO: 442348 - RNA, 19 nt, Homo sapiens
  misc_RNA (1)...(19): siRNA sense strand
gaaaggagagaugguggau

SEQ ID NO: 442349 - RNA, 19 nt, Homo sapiens
  misc_RNA (1)...(19): siRNA sense strand
cuagagguuucccuggauu

SEQ ID NO: 442350 - RNA, 19 nt, Homo sapiens
  misc_RNA (1)...(19): siRNA sense strand
gcaaauggagacggcuauu

SEQ ID NO: 442351 - RNA, 19 nt, Homo sapiens
  misc_RNA (1)...(19): siRNA sense strand
gaaaggcuuccagggagaa

SEQ ID NO: 442352 - RNA, 19 nt, Homo sapiens
  misc_RNA (1)...(19): siRNA sense strand
gcagcugggcuuccugguu

SEQ ID NO: 442353 - RNA, 19 nt, Homo sapiens
  misc_RNA (1)...(19): siRNA sense strand
ggagagaugguggauuaca

SEQ ID NO: 442354 - RNA, 19 nt, Homo sapiens
  misc_RNA (1)...(19): siRNA sense strand
gaugcuggcaacuccauug

SEQ ID NO: 442355 - RNA, 19 nt, Homo sapiens
  misc_RNA (1)...(19): siRNA sense strand
gcguggagcagcuggagaa

SEQ ID NO: 442356 - RNA, 19 nt, Homo sapiens
  misc_RNA (1)...(19): siRNA sense strand
uggagcagcuggagaacag

SEQ ID NO: 442357 - RNA, 19 nt, Homo sapiens
  misc_RNA (1)...(19): siRNA sense strand
ggauuuccgggucccauug

SEQ ID NO: 442358 - RNA, 19 nt, Homo sapiens
  misc_RNA (1)...(19): siRNA sense strand
gagaugguggauuacaaug

SEQ ID NO: 442359 - RNA, 19 nt, Homo sapiens
  misc_RNA (1)...(19): siRNA sense strand
uagcggagcgcacccacaa

SEQ ID NO: 442360 - RNA, 19 nt, Homo sapiens
  misc_RNA (1)...(19): siRNA sense strand
gggagaaccagggaaagga

SEQ ID NO: 442361 - RNA, 19 nt, Homo sapiens
  misc_RNA (1)...(19): siRNA sense strand
gagccaggccagcauccaa

SEQ ID NO: 442362 - RNA, 19 nt, Homo sapiens
  misc_RNA (1)...(19): siRNA sense strand
gguacuccaggaccaauug

SEQ ID NO: 442363 - RNA, 19 nt, Homo sapiens
  misc_RNA (1)...(19): siRNA sense strand
aaaggagacccugggauga

SEQ ID NO: 442364 - RNA, 19 nt, Homo sapiens
  misc_RNA (1)...(19): siRNA sense strand
gagccagggaucccaggaa

SEQ ID NO: 442365 - RNA, 19 nt, Homo sapiens
  misc_RNA (1)...(19): siRNA sense strand
gaaccagggaaaggagaga

SEQ ID NO: 442366 - RNA, 19 nt, Homo sapiens
  misc_RNA (1)...(19): siRNA sense strand
gauuacaauggaaacauca

SEQ ID NO: 442367 - RNA, 19 nt, Homo sapiens
  misc_RNA (1)...(19): siRNA sense strand
ggucaaccaggaacuagag

SEQ ID NO: 442368 - RNA, 19 nt, Homo sapiens
  misc_RNA (1)...(19): siRNA sense strand
aaggagagaugguggauua

SEQ ID NO: 442369 - RNA, 19 nt, Homo sapiens
  misc_RNA (1)...(19): siRNA sense strand
cagcugggcuuccugguuu

SEQ ID NO: 442370 - RNA, 19 nt, Homo sapiens
  misc_RNA (1)...(19): siRNA sense strand
ccaaagacaucuccaggau

SEQ ID NO: 442371 - RNA, 19 nt, Homo sapiens
  misc_RNA (1)...(19): siRNA sense strand
gagagaugguggauuacaa

SEQ ID NO: 442372 - RNA, 19 nt, Homo sapiens
  misc_RNA (1)...(19): siRNA sense strand
aaagggaccucgcgguaaa

SEQ ID NO: 442373 - RNA, 19 nt, Homo sapiens
  misc_RNA (1)...(19): siRNA sense strand
gaugguggauuacaaugga

SEQ ID NO: 442374 - RNA, 19 nt, Homo sapiens
  misc_RNA (1)...(19): siRNA sense strand
ggauuacaauggaaacauc

SEQ ID NO: 442375 - RNA, 19 nt, Homo sapiens
  misc_RNA (1)...(19): siRNA sense strand
caagggagaaccagggaaa

SEQ ID NO: 442376 - RNA, 19 nt, Homo sapiens
  misc_RNA (1)...(19): siRNA sense strand
ggaagcaggacuagaugga

SEQ ID NO: 442377 - RNA, 19 nt, Homo sapiens
  misc_RNA (1)...(19): siRNA sense strand
caaggcugcuggaacaagu

SEQ ID NO: 442378 - RNA, 19 nt, Homo sapiens
  misc_RNA (1)...(19): siRNA sense strand
gggagaagcaggugucgau

SEQ ID NO: 442379 - RNA, 19 nt, Homo sapiens
  misc_RNA (1)...(19): siRNA sense strand
ggagaacagggaccagaug

SEQ ID NO: 442380 - RNA, 19 nt, Homo sapiens
  misc_RNA (1)...(19): siRNA sense strand
acaauggaaacaucaauga

SEQ ID NO: 442381 - RNA, 19 nt, Homo sapiens
  misc_RNA (1)...(19): siRNA sense strand
gaaaggagagaugguggau

SEQ ID NO: 442382 - RNA, 19 nt, Homo sapiens
  misc_RNA (1)...(19): siRNA sense strand
cuagagguuucccuggauu

SEQ ID NO: 442383 - RNA, 19 nt, Homo sapiens
  misc_RNA (1)...(19): siRNA sense strand
gcaaauggagacggcuauu

SEQ ID NO: 442384 - RNA, 19 nt, Homo sapiens
  misc_RNA (1)...(19): siRNA sense strand
gaaaggcuuccagggagaa

SEQ ID NO: 442385 - RNA, 19 nt, Homo sapiens
  misc_RNA (1)...(19): siRNA sense strand
gcagcugggcuuccugguu

SEQ ID NO: 442386 - RNA, 19 nt, Homo sapiens
  misc_RNA (1)...(19): siRNA sense strand
ggagagaugguggauuaca

SEQ ID NO: 442387 - RNA, 19 nt, Homo sapiens
  misc_RNA (1)...(19): siRNA sense strand
gaugcuggcaacuccauug

SEQ ID NO: 442388 - RNA, 19 nt, Homo sapiens
  misc_RNA (1)...(19): siRNA sense strand
gcguggagcagcuggagaa

SEQ ID NO: 442389 - RNA, 19 nt, Homo sapiens
  misc_RNA (1)...(19): siRNA sense strand
uggagcagcuggagaacag

SEQ ID NO: 442390 - RNA, 19 nt, Homo sapiens
  misc_RNA (1)...(19): siRNA sense strand
ggauuuccgggucccauug

SEQ ID NO: 442391 - RNA, 19 nt, Homo sapiens
  misc_RNA (1)...(19): siRNA sense strand
gagaugguggauuacaaug

SEQ ID NO: 442392 - RNA, 19 nt, Homo sapiens
  misc_RNA (1)...(19): siRNA sense strand
uagcggagcgcacccacaa

SEQ ID NO: 442393 - RNA, 19 nt, Homo sapiens
  misc_RNA (1)...(19): siRNA sense strand
gggagaaccagggaaagga

SEQ ID NO: 442394 - RNA, 19 nt, Homo sapiens
  misc_RNA (1)...(19): siRNA sense strand
gagccaggccagcauccaa

SEQ ID NO: 442395 - RNA, 19 nt, Homo sapiens
  misc_RNA (1)...(19): siRNA sense strand
gguacuccaggaccaauug

SEQ ID NO: 442396 - RNA, 19 nt, Homo sapiens
  misc_RNA (1)...(19): siRNA sense strand
aaaggagacccugggauga

SEQ ID NO: 442397 - RNA, 19 nt, Homo sapiens
  misc_RNA (1)...(19): siRNA sense strand
gagccagggaucccaggaa

SEQ ID NO: 442398 - RNA, 19 nt, Homo sapiens
  misc_RNA (1)...(19): siRNA sense strand
gaaccagggaaaggagaga

SEQ ID NO: 442399 - RNA, 19 nt, Homo sapiens
  misc_RNA (1)...(19): siRNA sense strand
gauuacaauggaaacauca

SEQ ID NO: 442400 - RNA, 19 nt, Homo sapiens
  misc_RNA (1)...(19): siRNA sense strand
ggucaaccaggaacuagag

SEQ ID NO: 442401 - RNA, 19 nt, Homo sapiens
  misc_RNA (1)...(19): siRNA sense strand
aaggagagaugguggauua

SEQ ID NO: 442402 - RNA, 19 nt, Homo sapiens
  misc_RNA (1)...(19): siRNA sense strand
cagcugggcuuccugguuu

SEQ ID NO: 442403 - RNA, 19 nt, Homo sapiens
  misc_RNA (1)...(19): siRNA sense strand
ccaaagacaucuccaggau

SEQ ID NO: 442404 - RNA, 19 nt, Homo sapiens
  misc_RNA (1)...(19): siRNA sense strand
gagagaugguggauuacaa

SEQ ID NO: 442405 - RNA, 19 nt, Homo sapiens
  misc_RNA (1)...(19): siRNA sense strand
aaagggaccucgcgguaaa

SEQ ID NO: 442406 - RNA, 19 nt, Homo sapiens
  misc_RNA (1)...(19): siRNA sense strand
gaugguggauuacaaugga

SEQ ID NO: 442407 - RNA, 19 nt, Homo sapiens
  misc_RNA (1)...(19): siRNA sense strand
ggauuacaauggaaacauc

SEQ ID NO: 442408 - RNA, 19 nt, Homo sapiens
  misc_RNA (1)...(19): siRNA sense strand
caagggagaaccagggaaa

SEQ ID NO: 442409 - RNA, 19 nt, Homo sapiens
  misc_RNA (1)...(19): siRNA sense strand
ggaagcaggacuagaugga

SEQ ID NO: 442410 - RNA, 19 nt, Homo sapiens
  misc_RNA (1)...(19): siRNA sense strand
caaggcugcuggaacaagu

SEQ ID NO: 442411 - RNA, 19 nt, Homo sapiens
  misc_RNA (1)...(19): siRNA sense strand
gggagaagcaggugucgau

SEQ ID NO: 442412 - RNA, 19 nt, Homo sapiens
  misc_RNA (1)...(19): siRNA sense strand
ggagaacagggaccagaug

SEQ ID NO: 442413 - RNA, 19 nt, Homo sapiens
  misc_RNA (1)...(19): siRNA sense strand
acaauggaaacaucaauga

SEQ ID NO: 442414 - RNA, 19 nt, Homo sapiens
  misc_RNA (1)...(19): siRNA sense strand
gaaaggagagaugguggau

SEQ ID NO: 442415 - RNA, 19 nt, Homo sapiens
  misc_RNA (1)...(19): siRNA sense strand
cuagagguuucccuggauu

SEQ ID NO: 442416 - RNA, 19 nt, Homo sapiens
  misc_RNA (1)...(19): siRNA sense strand
gcaaauggagacggcuauu

SEQ ID NO: 442417 - RNA, 19 nt, Homo sapiens
  misc_RNA (1)...(19): siRNA sense strand
gaaaggcuuccagggagaa

SEQ ID NO: 442418 - RNA, 19 nt, Homo sapiens
  misc_RNA (1)...(19): siRNA sense strand
gcagcugggcuuccugguu

SEQ ID NO: 442419 - RNA, 19 nt, Homo sapiens
  misc_RNA (1)...(19): siRNA sense strand
ggagagaugguggauuaca

SEQ ID NO: 442420 - RNA, 19 nt, Homo sapiens
  misc_RNA (1)...(19): siRNA sense strand
gaugcuggcaacuccauug

SEQ ID NO: 442421 - RNA, 19 nt, Homo sapiens
  misc_RNA (1)...(19): siRNA sense strand
gcguggagcagcuggagaa

SEQ ID NO: 442422 - RNA, 19 nt, Homo sapiens
  misc_RNA (1)...(19): siRNA sense strand
uggagcagcuggagaacag

SEQ ID NO: 442423 - RNA, 19 nt, Homo sapiens
  misc_RNA (1)...(19): siRNA sense strand
ggauuuccgggucccauug

SEQ ID NO: 442424 - RNA, 19 nt, Homo sapiens
  misc_RNA (1)...(19): siRNA sense strand
gagaugguggauuacaaug

SEQ ID NO: 442425 - RNA, 19 nt, Homo sapiens
  misc_RNA (1)...(19): siRNA sense strand
uagcggagcgcacccacaa

SEQ ID NO: 442426 - RNA, 19 nt, Homo sapiens
  misc_RNA (1)...(19): siRNA sense strand
gggagaaccagggaaagga

SEQ ID NO: 442427 - RNA, 19 nt, Homo sapiens
  misc_RNA (1)...(19): siRNA sense strand
gagccaggccagcauccaa

SEQ ID NO: 442428 - RNA, 19 nt, Homo sapiens
  misc_RNA (1)...(19): siRNA sense strand
gguacuccaggaccaauug

SEQ ID NO: 442429 - RNA, 19 nt, Homo sapiens
  misc_RNA (1)...(19): siRNA sense strand
aaaggagacccugggauga

SEQ ID NO: 442430 - RNA, 19 nt, Homo sapiens
  misc_RNA (1)...(19): siRNA sense strand
gagccagggaucccaggaa

SEQ ID NO: 442431 - RNA, 19 nt, Homo sapiens
  misc_RNA (1)...(19): siRNA sense strand
gaaccagggaaaggagaga

SEQ ID NO: 442432 - RNA, 19 nt, Homo sapiens
  misc_RNA (1)...(19): siRNA sense strand
gauuacaauggaaacauca

SEQ ID NO: 442433 - RNA, 19 nt, Homo sapiens
  misc_RNA (1)...(19): siRNA sense strand
ggucaaccaggaacuagag

SEQ ID NO: 442434 - RNA, 19 nt, Homo sapiens
  misc_RNA (1)...(19): siRNA sense strand
aaggagagaugguggauua

SEQ ID NO: 442435 - RNA, 19 nt, Homo sapiens
  misc_RNA (1)...(19): siRNA sense strand
cagcugggcuuccugguuu

SEQ ID NO: 442436 - RNA, 19 nt, Homo sapiens
  misc_RNA (1)...(19): siRNA sense strand
ccaaagacaucuccaggau

SEQ ID NO: 442437 - RNA, 19 nt, Homo sapiens
  misc_RNA (1)...(19): siRNA sense strand
gagagaugguggauuacaa

SEQ ID NO: 442438 - RNA, 19 nt, Homo sapiens
  misc_RNA (1)...(19): siRNA sense strand
aaagggaccucgcgguaaa

SEQ ID NO: 442439 - RNA, 19 nt, Homo sapiens
  misc_RNA (1)...(19): siRNA sense strand
gaugguggauuacaaugga

SEQ ID NO: 442440 - RNA, 19 nt, Homo sapiens
  misc_RNA (1)...(19): siRNA sense strand
ggauuacaauggaaacauc

SEQ ID NO: 442441 - RNA, 19 nt, Homo sapiens
  misc_RNA (1)...(19): siRNA sense strand
caagggagaaccagggaaa

SEQ ID NO: 442442 - RNA, 19 nt, Homo sapiens
  misc_RNA (1)...(19): siRNA sense strand
ggaagcaggacuagaugga

SEQ ID NO: 442443 - RNA, 19 nt, Homo sapiens
  misc_RNA (1)...(19): siRNA sense strand
caaggcugcuggaacaagu

SEQ ID NO: 442444 - RNA, 19 nt, Homo sapiens
  misc_RNA (1)...(19): siRNA sense strand
gggagaagcaggugucgau

SEQ ID NO: 442445 - RNA, 19 nt, Homo sapiens
  misc_RNA (1)...(19): siRNA sense strand
ggagaacagggaccagaug

SEQ ID NO: 442446 - RNA, 19 nt, Homo sapiens
  misc_RNA (1)...(19): siRNA sense strand
acaauggaaacaucaauga

SEQ ID NO: 442447 - RNA, 19 nt, Homo sapiens
  misc_RNA (1)...(19): siRNA sense strand
gaaaggagagaugguggau

SEQ ID NO: 442448 - RNA, 19 nt, Homo sapiens
  misc_RNA (1)...(19): siRNA sense strand
cuagagguuucccuggauu

SEQ ID NO: 442449 - RNA, 19 nt, Homo sapiens
  misc_RNA (1)...(19): siRNA sense strand
gcaaauggagacggcuauu

SEQ ID NO: 442450 - RNA, 19 nt, Homo sapiens
  misc_RNA (1)...(19): siRNA sense strand
gaaaggcuuccagggagaa

SEQ ID NO: 442451 - RNA, 19 nt, Homo sapiens
  misc_RNA (1)...(19): siRNA sense strand
gcagcugggcuuccugguu

SEQ ID NO: 442452 - RNA, 19 nt, Homo sapiens
  misc_RNA (1)...(19): siRNA sense strand
ggagagaugguggauuaca

SEQ ID NO: 442453 - RNA, 19 nt, Homo sapiens
  misc_RNA (1)...(19): siRNA sense strand
gaugcuggcaacuccauug

SEQ ID NO: 442454 - RNA, 19 nt, Homo sapiens
  misc_RNA (1)...(19): siRNA sense strand
gcguggagcagcuggagaa

SEQ ID NO: 442455 - RNA, 19 nt, Homo sapiens
  misc_RNA (1)...(19): siRNA sense strand
uggagcagcuggagaacag

SEQ ID NO: 442456 - RNA, 19 nt, Homo sapiens
  misc_RNA (1)...(19): siRNA sense strand
ggauuuccgggucccauug

SEQ ID NO: 442457 - RNA, 19 nt, Homo sapiens
  misc_RNA (1)...(19): siRNA sense strand
gagaugguggauuacaaug

SEQ ID NO: 442458 - RNA, 19 nt, Homo sapiens
  misc_RNA (1)...(19): siRNA sense strand
uagcggagcgcacccacaa

SEQ ID NO: 442459 - RNA, 19 nt, Homo sapiens
  misc_RNA (1)...(19): siRNA sense strand
gggagaaccagggaaagga

SEQ ID NO: 442460 - RNA, 19 nt, Homo sapiens
  misc_RNA (1)...(19): siRNA sense strand
gagccaggccagcauccaa

SEQ ID NO: 442461 - RNA, 19 nt, Homo sapiens
  misc_RNA (1)...(19): siRNA sense strand
gguacuccaggaccaauug

SEQ ID NO: 442462 - RNA, 19 nt, Homo sapiens
  misc_RNA (1)...(19): siRNA sense strand
aaaggagacccugggauga

SEQ ID NO: 442463 - RNA, 19 nt, Homo sapiens
  misc_RNA (1)...(19): siRNA sense strand
gagccagggaucccaggaa

SEQ ID NO: 442464 - RNA, 19 nt, Homo sapiens
  misc_RNA (1)...(19): siRNA sense strand
gaaccagggaaaggagaga

SEQ ID NO: 442465 - RNA, 19 nt, Homo sapiens
  misc_RNA (1)...(19): siRNA sense strand
gauuacaauggaaacauca

SEQ ID NO: 442466 - RNA, 19 nt, Homo sapiens
  misc_RNA (1)...(19): siRNA sense strand
ggucaaccaggaacuagag

SEQ ID NO: 442467 - RNA, 19 nt, Homo sapiens
  misc_RNA (1)...(19): siRNA sense strand
aaggagagaugguggauua

SEQ ID NO: 442468 - RNA, 19 nt, Homo sapiens
  misc_RNA (1)...(19): siRNA sense strand
cagcugggcuuccugguuu

SEQ ID NO: 442469 - RNA, 19 nt, Homo sapiens
  misc_RNA (1)...(19): siRNA sense strand
ccaaagacaucuccaggau

SEQ ID NO: 442470 - RNA, 19 nt, Homo sapiens
  misc_RNA (1)...(19): siRNA sense strand
gagagaugguggauuacaa

SEQ ID NO: 442471 - RNA, 19 nt, Homo sapiens
  misc_RNA (1)...(19): siRNA sense strand
aaagggaccucgcgguaaa

SEQ ID NO: 442472 - RNA, 19 nt, Homo sapiens
  misc_RNA (1)...(19): siRNA sense strand
gaugguggauuacaaugga

SEQ ID NO: 442473 - RNA, 19 nt, Homo sapiens
  misc_RNA (1)...(19): siRNA sense strand
ggauuacaauggaaacauc

SEQ ID NO: 442474 - RNA, 19 nt, Homo sapiens
  misc_RNA (1)...(19): siRNA sense strand
caagggagaaccagggaaa

SEQ ID NO: 442475 - RNA, 19 nt, Homo sapiens
  misc_RNA (1)...(19): siRNA sense strand
ggaagcaggacuagaugga

SEQ ID NO: 442476 - RNA, 19 nt, Homo sapiens
  misc_RNA (1)...(19): siRNA sense strand
caaggcugcuggaacaagu

SEQ ID NO: 442477 - RNA, 19 nt, Homo sapiens
  misc_RNA (1)...(19): siRNA sense strand
gggagaagcaggugucgau

SEQ ID NO: 442478 - RNA, 19 nt, Homo sapiens
  misc_RNA (1)...(19): siRNA sense strand
ggagaacagggaccagaug

SEQ ID NO: 442479 - RNA, 19 nt, Homo sapiens
  misc_RNA (1)...(19): siRNA sense strand
acaauggaaacaucaauga

SEQ ID NO: 442480 - RNA, 19 nt, Homo sapiens
  misc_RNA (1)...(19): siRNA sense strand
gaaaggagagaugguggau

SEQ ID NO: 442481 - RNA, 19 nt, Homo sapiens
  misc_RNA (1)...(19): siRNA sense strand
cuagagguuucccuggauu

SEQ ID NO: 442482 - RNA, 19 nt, Homo sapiens
  misc_RNA (1)...(19): siRNA sense strand
gcaaauggagacggcuauu

SEQ ID NO: 442483 - RNA, 19 nt, Homo sapiens
  misc_RNA (1)...(19): siRNA sense strand
gaaaggcuuccagggagaa

SEQ ID NO: 442484 - RNA, 19 nt, Homo sapiens
  misc_RNA (1)...(19): siRNA sense strand
gcagcugggcuuccugguu

SEQ ID NO: 442485 - RNA, 19 nt, Homo sapiens
  misc_RNA (1)...(19): siRNA sense strand
ggagagaugguggauuaca

SEQ ID NO: 442486 - RNA, 19 nt, Homo sapiens
  misc_RNA (1)...(19): siRNA sense strand
gaugcuggcaacuccauug

SEQ ID NO: 442487 - RNA, 19 nt, Homo sapiens
  misc_RNA (1)...(19): siRNA sense strand
gcguggagcagcuggagaa

SEQ ID NO: 442488 - RNA, 19 nt, Homo sapiens
  misc_RNA (1)...(19): siRNA sense strand
uggagcagcuggagaacag

SEQ ID NO: 442489 - RNA, 19 nt, Homo sapiens
  misc_RNA (1)...(19): siRNA sense strand
ggauuuccgggucccauug

SEQ ID NO: 442490 - RNA, 19 nt, Homo sapiens
  misc_RNA (1)...(19): siRNA sense strand
gagaugguggauuacaaug

SEQ ID NO: 442491 - RNA, 19 nt, Homo sapiens
  misc_RNA (1)...(19): siRNA sense strand
uagcggagcgcacccacaa

SEQ ID NO: 442492 - RNA, 19 nt, Homo sapiens
  misc_RNA (1)...(19): siRNA sense strand
gggagaaccagggaaagga

SEQ ID NO: 442493 - RNA, 19 nt, Homo sapiens
  misc_RNA (1)...(19): siRNA sense strand
gagccaggccagcauccaa

SEQ ID NO: 442494 - RNA, 19 nt, Homo sapiens
  misc_RNA (1)...(19): siRNA sense strand
gguacuccaggaccaauug

SEQ ID NO: 442495 - RNA, 19 nt, Homo sapiens
  misc_RNA (1)...(19): siRNA sense strand
aaaggagacccugggauga

SEQ ID NO: 442496 - RNA, 19 nt, Homo sapiens
  misc_RNA (1)...(19): siRNA sense strand
gagccagggaucccaggaa

SEQ ID NO: 442497 - RNA, 19 nt, Homo sapiens
  misc_RNA (1)...(19): siRNA sense strand
gaaccagggaaaggagaga

SEQ ID NO: 442498 - RNA, 19 nt, Homo sapiens
  misc_RNA (1)...(19): siRNA sense strand
gauuacaauggaaacauca

SEQ ID NO: 442499 - RNA, 19 nt, Homo sapiens
  misc_RNA (1)...(19): siRNA sense strand
ggucaaccaggaacuagag

SEQ ID NO: 442500 - RNA, 19 nt, Homo sapiens
  misc_RNA (1)...(19): siRNA sense strand
aaggagagaugguggauua

SEQ ID NO: 442501 - RNA, 19 nt, Homo sapiens
  misc_RNA (1)...(19): siRNA sense strand
cagcugggcuuccugguuu

SEQ ID NO: 442502 - RNA, 19 nt, Homo sapiens
  misc_RNA (1)...(19): siRNA sense strand
ccaaagacaucuccaggau

SEQ ID NO: 442503 - RNA, 19 nt, Homo sapiens
  misc_RNA (1)...(19): siRNA sense strand
gagagaugguggauuacaa

SEQ ID NO: 442504 - RNA, 19 nt, Homo sapiens
  misc_RNA (1)...(19): siRNA sense strand
aaagggaccucgcgguaaa

SEQ ID NO: 442505 - RNA, 19 nt, Homo sapiens
  misc_RNA (1)...(19): siRNA sense strand
gaugguggauuacaaugga

SEQ ID NO: 442506 - RNA, 19 nt, Homo sapiens
  misc_RNA (1)...(19): siRNA sense strand
ggauuacaauggaaacauc

SEQ ID NO: 442507 - RNA, 19 nt, Homo sapiens
  misc_RNA (1)...(19): siRNA sense strand
caagggagaaccagggaaa

SEQ ID NO: 442508 - RNA, 19 nt, Homo sapiens
  misc_RNA (1)...(19): siRNA sense strand
ggaagcaggacuagaugga

SEQ ID NO: 442509 - RNA, 19 nt, Homo sapiens
  misc_RNA (1)...(19): siRNA sense strand
caaggcugcuggaacaagu

SEQ ID NO: 442510 - RNA, 19 nt, Homo sapiens
  misc_RNA (1)...(19): siRNA sense strand
gggagaagcaggugucgau

SEQ ID NO: 442511 - RNA, 19 nt, Homo sapiens
  misc_RNA (1)...(19): siRNA sense strand
ggagaacagggaccagaug

SEQ ID NO: 442512 - RNA, 19 nt, Homo sapiens
  misc_RNA (1)...(19): siRNA sense strand
acaauggaaacaucaauga

SEQ ID NO: 442513 - RNA, 19 nt, Homo sapiens
  misc_RNA (1)...(19): siRNA sense strand
gaaaggagagaugguggau

SEQ ID NO: 442514 - RNA, 19 nt, Homo sapiens
  misc_RNA (1)...(19): siRNA sense strand
cuagagguuucccuggauu

SEQ ID NO: 442515 - RNA, 19 nt, Homo sapiens
  misc_RNA (1)...(19): siRNA sense strand
gcaaauggagacggcuauu

SEQ ID NO: 442516 - RNA, 19 nt, Homo sapiens
  misc_RNA (1)...(19): siRNA sense strand
gaaaggcuuccagggagaa

SEQ ID NO: 442517 - RNA, 19 nt, Homo sapiens
  misc_RNA (1)...(19): siRNA sense strand
gcagcugggcuuccugguu

SEQ ID NO: 442518 - RNA, 19 nt, Homo sapiens
  misc_RNA (1)...(19): siRNA sense strand
ggagagaugguggauuaca

SEQ ID NO: 442519 - RNA, 19 nt, Homo sapiens
  misc_RNA (1)...(19): siRNA sense strand
gaugcuggcaacuccauug

SEQ ID NO: 442520 - RNA, 19 nt, Homo sapiens
  misc_RNA (1)...(19): siRNA sense strand
gcguggagcagcuggagaa

SEQ ID NO: 442521 - RNA, 19 nt, Homo sapiens
  misc_RNA (1)...(19): siRNA sense strand
uggagcagcuggagaacag

SEQ ID NO: 442522 - RNA, 19 nt, Homo sapiens
  misc_RNA (1)...(19): siRNA sense strand
ggauuuccgggucccauug

SEQ ID NO: 442523 - RNA, 19 nt, Homo sapiens
  misc_RNA (1)...(19): siRNA sense strand
gagaugguggauuacaaug

SEQ ID NO: 442524 - RNA, 19 nt, Homo sapiens
  misc_RNA (1)...(19): siRNA sense strand
uagcggagcgcacccacaa

SEQ ID NO: 442525 - RNA, 19 nt, Homo sapiens
  misc_RNA (1)...(19): siRNA sense strand
gggagaaccagggaaagga

SEQ ID NO: 442526 - RNA, 19 nt, Homo sapiens
  misc_RNA (1)...(19): siRNA sense strand
gagccaggccagcauccaa

SEQ ID NO: 442527 - RNA, 19 nt, Homo sapiens
  misc_RNA (1)...(19): siRNA sense strand
gguacuccaggaccaauug

SEQ ID NO: 442528 - RNA, 19 nt, Homo sapiens
  misc_RNA (1)...(19): siRNA sense strand
aaaggagacccugggauga

SEQ ID NO: 442529 - RNA, 19 nt, Homo sapiens
  misc_RNA (1)...(19): siRNA sense strand
gagccagggaucccaggaa

SEQ ID NO: 442530 - RNA, 19 nt, Homo sapiens
  misc_RNA (1)...(19): siRNA sense strand
gaaccagggaaaggagaga

SEQ ID NO: 442531 - RNA, 19 nt, Homo sapiens
  misc_RNA (1)...(19): siRNA sense strand
gauuacaauggaaacauca

SEQ ID NO: 442532 - RNA, 19 nt, Homo sapiens
  misc_RNA (1)...(19): siRNA sense strand
ggucaaccaggaacuagag

SEQ ID NO: 442533 - RNA, 19 nt, Homo sapiens
  misc_RNA (1)...(19): siRNA sense strand
aaggagagaugguggauua

SEQ ID NO: 442534 - RNA, 19 nt, Homo sapiens
  misc_RNA (1)...(19): siRNA sense strand
cagcugggcuuccugguuu

SEQ ID NO: 442535 - RNA, 19 nt, Homo sapiens
  misc_RNA (1)...(19): siRNA sense strand
ccaaagacaucuccaggau

SEQ ID NO: 442536 - RNA, 19 nt, Homo sapiens
  misc_RNA (1)...(19): siRNA sense strand
gagagaugguggauuacaa

SEQ ID NO: 442537 - RNA, 19 nt, Homo sapiens
  misc_RNA (1)...(19): siRNA sense strand
aaagggaccucgcgguaaa

SEQ ID NO: 442538 - RNA, 19 nt, Homo sapiens
  misc_RNA (1)...(19): siRNA sense strand
gaugguggauuacaaugga

SEQ ID NO: 442539 - RNA, 19 nt, Homo sapiens
  misc_RNA (1)...(19): siRNA sense strand
ggauuacaauggaaacauc

SEQ ID NO: 442540 - RNA, 19 nt, Homo sapiens
  misc_RNA (1)...(19): siRNA sense strand
caagggagaaccagggaaa

SEQ ID NO: 442541 - RNA, 19 nt, Homo sapiens
  misc_RNA (1)...(19): siRNA sense strand
ggaagcaggacuagaugga

SEQ ID NO: 442542 - RNA, 19 nt, Homo sapiens
  misc_RNA (1)...(19): siRNA sense strand
caaggcugcuggaacaagu

SEQ ID NO: 442543 - RNA, 19 nt, Homo sapiens
  misc_RNA (1)...(19): siRNA sense strand
gggagaagcaggugucgau

SEQ ID NO: 442544 - RNA, 19 nt, Homo sapiens
  misc_RNA (1)...(19): siRNA sense strand
ggagaacagggaccagaug

SEQ ID NO: 442545 - RNA, 19 nt, Homo sapiens
  misc_RNA (1)...(19): siRNA sense strand
acaauggaaacaucaauga

SEQ ID NO: 442546 - RNA, 19 nt, Homo sapiens
  misc_RNA (1)...(19): siRNA sense strand
gaaaggagagaugguggau

SEQ ID NO: 442547 - RNA, 19 nt, Homo sapiens
  misc_RNA (1)...(19): siRNA sense strand
cuagagguuucccuggauu

SEQ ID NO: 442548 - RNA, 19 nt, Homo sapiens
  misc_RNA (1)...(19): siRNA sense strand
gcaaauggagacggcuauu

SEQ ID NO: 442549 - RNA, 19 nt, Homo sapiens
  misc_RNA (1)...(19): siRNA sense strand
gaaaggcuuccagggagaa

SEQ ID NO: 442550 - RNA, 19 nt, Homo sapiens
  misc_RNA (1)...(19): siRNA sense strand
gcagcugggcuuccugguu

SEQ ID NO: 442551 - RNA, 19 nt, Homo sapiens
  misc_RNA (1)...(19): siRNA sense strand
ggagagaugguggauuaca

SEQ ID NO: 442552 - RNA, 19 nt, Homo sapiens
  misc_RNA (1)...(19): siRNA sense strand
gaugcuggcaacuccauug

SEQ ID NO: 442553 - RNA, 19 nt, Homo sapiens
  misc_RNA (1)...(19): siRNA sense strand
gcguggagcagcuggagaa

SEQ ID NO: 442554 - RNA, 19 nt, Homo sapiens
  misc_RNA (1)...(19): siRNA sense strand
uggagcagcuggagaacag

SEQ ID NO: 442555 - RNA, 19 nt, Homo sapiens
  misc_RNA (1)...(19): siRNA sense strand
ggauuuccgggucccauug

SEQ ID NO: 442556 - RNA, 19 nt, Homo sapiens
  misc_RNA (1)...(19): siRNA sense strand
gagaugguggauuacaaug

SEQ ID NO: 442557 - RNA, 19 nt, Homo sapiens
  misc_RNA (1)...(19): siRNA sense strand
uagcggagcgcacccacaa

SEQ ID NO: 442558 - RNA, 19 nt, Homo sapiens
  misc_RNA (1)...(19): siRNA sense strand
gggagaaccagggaaagga

SEQ ID NO: 442559 - RNA, 19 nt, Homo sapiens
  misc_RNA (1)...(19): siRNA sense strand
gagccaggccagcauccaa

SEQ ID NO: 442560 - RNA, 19 nt, Homo sapiens
  misc_RNA (1)...(19): siRNA sense strand
gguacuccaggaccaauug

SEQ ID NO: 442561 - RNA, 19 nt, Homo sapiens
  misc_RNA (1)...(19): siRNA sense strand
aaaggagacccugggauga

SEQ ID NO: 442562 - RNA, 19 nt, Homo sapiens
  misc_RNA (1)...(19): siRNA sense strand
gagccagggaucccaggaa

SEQ ID NO: 442563 - RNA, 19 nt, Homo sapiens
  misc_RNA (1)...(19): siRNA sense strand
gaaccagggaaaggagaga

SEQ ID NO: 442564 - RNA, 19 nt, Homo sapiens
  misc_RNA (1)...(19): siRNA sense strand
gauuacaauggaaacauca

SEQ ID NO: 442565 - RNA, 19 nt, Homo sapiens
  misc_RNA (1)...(19): siRNA sense strand
ggucaaccaggaacuagag

SEQ ID NO: 442566 - RNA, 19 nt, Homo sapiens
  misc_RNA (1)...(19): siRNA sense strand
aaggagagaugguggauua

SEQ ID NO: 442567 - RNA, 19 nt, Homo sapiens
  misc_RNA (1)...(19): siRNA sense strand
cagcugggcuuccugguuu

SEQ ID NO: 442568 - RNA, 19 nt, Homo sapiens
  misc_RNA (1)...(19): siRNA sense strand
ccaaagacaucuccaggau

SEQ ID NO: 442569 - RNA, 19 nt, Homo sapiens
  misc_RNA (1)...(19): siRNA sense strand
gagagaugguggauuacaa

SEQ ID NO: 442570 - RNA, 19 nt, Homo sapiens
  misc_RNA (1)...(19): siRNA sense strand
aaagggaccucgcgguaaa

SEQ ID NO: 442571 - RNA, 19 nt, Homo sapiens
  misc_RNA (1)...(19): siRNA sense strand
gaugguggauuacaaugga

SEQ ID NO: 442572 - RNA, 19 nt, Homo sapiens
  misc_RNA (1)...(19): siRNA sense strand
ggauuacaauggaaacauc

SEQ ID NO: 442573 - RNA, 19 nt, Homo sapiens
  misc_RNA (1)...(19): siRNA sense strand
caagggagaaccagggaaa

SEQ ID NO: 442574 - RNA, 19 nt, Homo sapiens
  misc_RNA (1)...(19): siRNA sense strand
ggaagcaggacuagaugga

SEQ ID NO: 442575 - RNA, 19 nt, Homo sapiens
  misc_RNA (1)...(19): siRNA sense strand
caaggcugcuggaacaagu

SEQ ID NO: 442576 - RNA, 19 nt, Homo sapiens
  misc_RNA (1)...(19): siRNA sense strand
gggagaagcaggugucgau

SEQ ID NO: 442577 - RNA, 19 nt, Homo sapiens
  misc_RNA (1)...(19): siRNA sense strand
ggagaacagggaccagaug

SEQ ID NO: 442578 - RNA, 19 nt, Homo sapiens
  misc_RNA (1)...(19): siRNA sense strand
acaauggaaacaucaauga

SEQ ID NO: 442579 - RNA, 19 nt, Homo sapiens
  misc_RNA (1)...(19): siRNA sense strand
gaaaggagagaugguggau

SEQ ID NO: 442580 - RNA, 19 nt, Homo sapiens
  misc_RNA (1)...(19): siRNA sense strand
cuagagguuucccuggauu

SEQ ID NO: 442581 - RNA, 19 nt, Homo sapiens
  misc_RNA (1)...(19): siRNA sense strand
gcaaauggagacggcuauu

SEQ ID NO: 442582 - RNA, 19 nt, Homo sapiens
  misc_RNA (1)...(19): siRNA sense strand
gaaaggcuuccagggagaa

SEQ ID NO: 442583 - RNA, 19 nt, Homo sapiens
  misc_RNA (1)...(19): siRNA sense strand
gcagcugggcuuccugguu

SEQ ID NO: 442584 - RNA, 19 nt, Homo sapiens
  misc_RNA (1)...(19): siRNA sense strand
ggagagaugguggauuaca

SEQ ID NO: 442585 - RNA, 19 nt, Homo sapiens
  misc_RNA (1)...(19): siRNA sense strand
gaugcuggcaacuccauug

SEQ ID NO: 442586 - RNA, 19 nt, Homo sapiens
  misc_RNA (1)...(19): siRNA sense strand
gcguggagcagcuggagaa

SEQ ID NO: 442587 - RNA, 19 nt, Homo sapiens
  misc_RNA (1)...(19): siRNA sense strand
uggagcagcuggagaacag

SEQ ID NO: 442588 - RNA, 19 nt, Homo sapiens
  misc_RNA (1)...(19): siRNA sense strand
ggauuuccgggucccauug

SEQ ID NO: 442589 - RNA, 19 nt, Homo sapiens
  misc_RNA (1)...(19): siRNA sense strand
gagaugguggauuacaaug

SEQ ID NO: 442590 - RNA, 19 nt, Homo sapiens
  misc_RNA (1)...(19): siRNA sense strand
uagcggagcgcacccacaa

SEQ ID NO: 442591 - RNA, 19 nt, Homo sapiens
  misc_RNA (1)...(19): siRNA sense strand
gggagaaccagggaaagga

SEQ ID NO: 442592 - RNA, 19 nt, Homo sapiens
  misc_RNA (1)...(19): siRNA sense strand
gagccaggccagcauccaa

SEQ ID NO: 442593 - RNA, 19 nt, Homo sapiens
  misc_RNA (1)...(19): siRNA sense strand
gguacuccaggaccaauug

SEQ ID NO: 442594 - RNA, 19 nt, Homo sapiens
  misc_RNA (1)...(19): siRNA sense strand
aaaggagacccugggauga

SEQ ID NO: 442595 - RNA, 19 nt, Homo sapiens
  misc_RNA (1)...(19): siRNA sense strand
gagccagggaucccaggaa

SEQ ID NO: 442596 - RNA, 19 nt, Homo sapiens
  misc_RNA (1)...(19): siRNA sense strand
gaaccagggaaaggagaga

SEQ ID NO: 442597 - RNA, 19 nt, Homo sapiens
  misc_RNA (1)...(19): siRNA sense strand
gauuacaauggaaacauca

SEQ ID NO: 442598 - RNA, 19 nt, Homo sapiens
  misc_RNA (1)...(19): siRNA sense strand
ggucaaccaggaacuagag

SEQ ID NO: 442599 - RNA, 19 nt, Homo sapiens
  misc_RNA (1)...(19): siRNA sense strand
aaggagagaugguggauua

SEQ ID NO: 442600 - RNA, 19 nt, Homo sapiens
  misc_RNA (1)...(19): siRNA sense strand
cagcugggcuuccugguuu

SEQ ID NO: 442601 - RNA, 19 nt, Homo sapiens
  misc_RNA (1)...(19): siRNA sense strand
ccaaagacaucuccaggau

SEQ ID NO: 442602 - RNA, 19 nt, Homo sapiens
  misc_RNA (1)...(19): siRNA sense strand
gagagaugguggauuacaa

SEQ ID NO: 442603 - RNA, 19 nt, Homo sapiens
  misc_RNA (1)...(19): siRNA sense strand
aaagggaccucgcgguaaa

SEQ ID NO: 442604 - RNA, 19 nt, Homo sapiens
  misc_RNA (1)...(19): siRNA sense strand
gaugguggauuacaaugga

SEQ ID NO: 442605 - RNA, 19 nt, Homo sapiens
  misc_RNA (1)...(19): siRNA sense strand
ggauuacaauggaaacauc

SEQ ID NO: 442606 - RNA, 19 nt, Homo sapiens
  misc_RNA (1)...(19): siRNA sense strand
caagggagaaccagggaaa

SEQ ID NO: 442607 - RNA, 19 nt, Homo sapiens
  misc_RNA (1)...(19): siRNA sense strand
ggaagcaggacuagaugga

SEQ ID NO: 442608 - RNA, 19 nt, Homo sapiens
  misc_RNA (1)...(19): siRNA sense strand
caaggcugcuggaacaagu

SEQ ID NO: 442609 - RNA, 19 nt, Homo sapiens
  misc_RNA (1)...(19): siRNA sense strand
gggagaagcaggugucgau

SEQ ID NO: 442610 - RNA, 19 nt, Homo sapiens
  misc_RNA (1)...(19): siRNA sense strand
ggagaacagggaccagaug

SEQ ID NO: 442611 - RNA, 19 nt, Homo sapiens
  misc_RNA (1)...(19): siRNA sense strand
acaauggaaacaucaauga

SEQ ID NO: 442612 - RNA, 19 nt, Homo sapiens
  misc_RNA (1)...(19): siRNA sense strand
gaaaggagagaugguggau

SEQ ID NO: 442613 - RNA, 19 nt, Homo sapiens
  misc_RNA (1)...(19): siRNA sense strand
cuagagguuucccuggauu

SEQ ID NO: 442614 - RNA, 19 nt, Homo sapiens
  misc_RNA (1)...(19): siRNA sense strand
gcaaauggagacggcuauu

SEQ ID NO: 442615 - RNA, 19 nt, Homo sapiens
  misc_RNA (1)...(19): siRNA sense strand
gaaaggcuuccagggagaa

SEQ ID NO: 442616 - RNA, 19 nt, Homo sapiens
  misc_RNA (1)...(19): siRNA sense strand
gcagcugggcuuccugguu

SEQ ID NO: 442617 - RNA, 19 nt, Homo sapiens
  misc_RNA (1)...(19): siRNA sense strand
ggagagaugguggauuaca

SEQ ID NO: 442618 - RNA, 19 nt, Homo sapiens
  misc_RNA (1)...(19): siRNA sense strand
gaugcuggcaacuccauug

SEQ ID NO: 442619 - RNA, 19 nt, Homo sapiens
  misc_RNA (1)...(19): siRNA sense strand
gcguggagcagcuggagaa

SEQ ID NO: 442620 - RNA, 19 nt, Homo sapiens
  misc_RNA (1)...(19): siRNA sense strand
uggagcagcuggagaacag

SEQ ID NO: 442621 - RNA, 19 nt, Homo sapiens
  misc_RNA (1)...(19): siRNA sense strand
ggauuuccgggucccauug

SEQ ID NO: 442622 - RNA, 19 nt, Homo sapiens
  misc_RNA (1)...(19): siRNA sense strand
gagaugguggauuacaaug

SEQ ID NO: 442623 - RNA, 19 nt, Homo sapiens
  misc_RNA (1)...(19): siRNA sense strand
uagcggagcgcacccacaa

SEQ ID NO: 442624 - RNA, 19 nt, Homo sapiens
  misc_RNA (1)...(19): siRNA sense strand
gggagaaccagggaaagga

SEQ ID NO: 442625 - RNA, 19 nt, Homo sapiens
  misc_RNA (1)...(19): siRNA sense strand
gagccaggccagcauccaa

SEQ ID NO: 442626 - RNA, 19 nt, Homo sapiens
  misc_RNA (1)...(19): siRNA sense strand
gguacuccaggaccaauug

SEQ ID NO: 442627 - RNA, 19 nt, Homo sapiens
  misc_RNA (1)...(19): siRNA sense strand
aaaggagacccugggauga

SEQ ID NO: 442628 - RNA, 19 nt, Homo sapiens
  misc_RNA (1)...(19): siRNA sense strand
gagccagggaucccaggaa

SEQ ID NO: 442629 - RNA, 19 nt, Homo sapiens
  misc_RNA (1)...(19): siRNA sense strand
gaaccagggaaaggagaga

SEQ ID NO: 442630 - RNA, 19 nt, Homo sapiens
  misc_RNA (1)...(19): siRNA sense strand
gauuacaauggaaacauca

SEQ ID NO: 442631 - RNA, 19 nt, Homo sapiens
  misc_RNA (1)...(19): siRNA sense strand
ggucaaccaggaacuagag

SEQ ID NO: 442632 - RNA, 19 nt, Homo sapiens
  misc_RNA (1)...(19): siRNA sense strand
aaggagagaugguggauua

SEQ ID NO: 442633 - RNA, 19 nt, Homo sapiens
  misc_RNA (1)...(19): siRNA sense strand
cagcugggcuuccugguuu

SEQ ID NO: 442634 - RNA, 19 nt, Homo sapiens
  misc_RNA (1)...(19): siRNA sense strand
ccaaagacaucuccaggau

SEQ ID NO: 442635 - RNA, 19 nt, Homo sapiens
  misc_RNA (1)...(19): siRNA sense strand
gagagaugguggauuacaa

SEQ ID NO: 442636 - RNA, 19 nt, Homo sapiens
  misc_RNA (1)...(19): siRNA sense strand
aaagggaccucgcgguaaa

SEQ ID NO: 442637 - RNA, 19 nt, Homo sapiens
  misc_RNA (1)...(19): siRNA sense strand
gaugguggauuacaaugga

SEQ ID NO: 442638 - RNA, 19 nt, Homo sapiens
  misc_RNA (1)...(19): siRNA sense strand
ggauuacaauggaaacauc

SEQ ID NO: 442639 - RNA, 19 nt, Homo sapiens
  misc_RNA (1)...(19): siRNA sense strand
gggcgaagauggcuuacca

SEQ ID NO: 442640 - RNA, 19 nt, Homo sapiens
  misc_RNA (1)...(19): siRNA sense strand
caagggagaaccagggaaa

SEQ ID NO: 442641 - RNA, 19 nt, Homo sapiens
  misc_RNA (1)...(19): siRNA sense strand
ggaagcaggacuagaugga

SEQ ID NO: 442642 - RNA, 19 nt, Homo sapiens
  misc_RNA (1)...(19): siRNA sense strand
caaggcugcuggaacaagu

SEQ ID NO: 442643 - RNA, 19 nt, Homo sapiens
  misc_RNA (1)...(19): siRNA sense strand
gggagaagcaggugucgau

SEQ ID NO: 442644 - RNA, 19 nt, Homo sapiens
  misc_RNA (1)...(19): siRNA sense strand
ggagaacagggaccagaug

SEQ ID NO: 442645 - RNA, 19 nt, Homo sapiens
  misc_RNA (1)...(19): siRNA sense strand
acaauggaaacaucaauga

SEQ ID NO: 442646 - RNA, 19 nt, Homo sapiens
  misc_RNA (1)...(19): siRNA sense strand
gaaaggagagaugguggau

SEQ ID NO: 442647 - RNA, 19 nt, Homo sapiens
  misc_RNA (1)...(19): siRNA sense strand
cuagagguuucccuggauu

SEQ ID NO: 442648 - RNA, 19 nt, Homo sapiens
  misc_RNA (1)...(19): siRNA sense strand
gcaaauggagacggcuauu

SEQ ID NO: 442649 - RNA, 19 nt, Homo sapiens
  misc_RNA (1)...(19): siRNA sense strand
gaaaggcuuccagggagaa

SEQ ID NO: 442650 - RNA, 19 nt, Homo sapiens
  misc_RNA (1)...(19): siRNA sense strand
gcagcugggcuuccugguu

SEQ ID NO: 442651 - RNA, 19 nt, Homo sapiens
  misc_RNA (1)...(19): siRNA sense strand
ggagagaugguggauuaca

SEQ ID NO: 442652 - RNA, 19 nt, Homo sapiens
  misc_RNA (1)...(19): siRNA sense strand
gaugcuggcaacuccauug

SEQ ID NO: 442653 - RNA, 19 nt, Homo sapiens
  misc_RNA (1)...(19): siRNA sense strand
gcguggagcagcuggagaa

SEQ ID NO: 442654 - RNA, 19 nt, Homo sapiens
  misc_RNA (1)...(19): siRNA sense strand
uggagcagcuggagaacag

SEQ ID NO: 442655 - RNA, 19 nt, Homo sapiens
  misc_RNA (1)...(19): siRNA sense strand
ggauuuccgggucccauug

SEQ ID NO: 442656 - RNA, 19 nt, Homo sapiens
  misc_RNA (1)...(19): siRNA sense strand
gagaugguggauuacaaug

SEQ ID NO: 442657 - RNA, 19 nt, Homo sapiens
  misc_RNA (1)...(19): siRNA sense strand
uagcggagcgcacccacaa

SEQ ID NO: 442658 - RNA, 19 nt, Homo sapiens
  misc_RNA (1)...(19): siRNA sense strand
gggagaaccagggaaagga

SEQ ID NO: 442659 - RNA, 19 nt, Homo sapiens
  misc_RNA (1)...(19): siRNA sense strand
gagccaggccagcauccaa

SEQ ID NO: 442660 - RNA, 19 nt, Homo sapiens
  misc_RNA (1)...(19): siRNA sense strand
gguacuccaggaccaauug

SEQ ID NO: 442661 - RNA, 19 nt, Homo sapiens
  misc_RNA (1)...(19): siRNA sense strand
aaaggagacccugggauga

SEQ ID NO: 442662 - RNA, 19 nt, Homo sapiens
  misc_RNA (1)...(19): siRNA sense strand
gagccagggaucccaggaa

SEQ ID NO: 442663 - RNA, 19 nt, Homo sapiens
  misc_RNA (1)...(19): siRNA sense strand
gaaccagggaaaggagaga

SEQ ID NO: 442664 - RNA, 19 nt, Homo sapiens
  misc_RNA (1)...(19): siRNA sense strand
gauuacaauggaaacauca

SEQ ID NO: 442665 - RNA, 19 nt, Homo sapiens
  misc_RNA (1)...(19): siRNA sense strand
ggucaaccaggaacuagag

SEQ ID NO: 442666 - RNA, 19 nt, Homo sapiens
  misc_RNA (1)...(19): siRNA sense strand
aaggagagaugguggauua

SEQ ID NO: 442667 - RNA, 19 nt, Homo sapiens
  misc_RNA (1)...(19): siRNA sense strand
cagcugggcuuccugguuu

SEQ ID NO: 442668 - RNA, 19 nt, Homo sapiens
  misc_RNA (1)...(19): siRNA sense strand
ccaaagacaucuccaggau

SEQ ID NO: 442669 - RNA, 19 nt, Homo sapiens
  misc_RNA (1)...(19): siRNA sense strand
gagagaugguggauuacaa

SEQ ID NO: 442670 - RNA, 19 nt, Homo sapiens
  misc_RNA (1)...(19): siRNA sense strand
aaagggaccucgcgguaaa

SEQ ID NO: 442671 - RNA, 19 nt, Homo sapiens
  misc_RNA (1)...(19): siRNA sense strand
gaugguggauuacaaugga

SEQ ID NO: 442672 - RNA, 19 nt, Homo sapiens
  misc_RNA (1)...(19): siRNA sense strand
ggauuacaauggaaacauc

SEQ ID NO: 442673 - RNA, 19 nt, Homo sapiens
  misc_RNA (1)...(19): siRNA sense strand
caagggagaaccagggaaa

SEQ ID NO: 442674 - RNA, 19 nt, Homo sapiens
  misc_RNA (1)...(19): siRNA sense strand
ggaagcaggacuagaugga

SEQ ID NO: 442675 - RNA, 19 nt, Homo sapiens
  misc_RNA (1)...(19): siRNA sense strand
caaggcugcuggaacaagu

SEQ ID NO: 442676 - RNA, 19 nt, Homo sapiens
  misc_RNA (1)...(19): siRNA sense strand
gggagaagcaggugucgau

SEQ ID NO: 442677 - RNA, 19 nt, Homo sapiens
  misc_RNA (1)...(19): siRNA sense strand
ggagaacagggaccagaug

SEQ ID NO: 442678 - RNA, 19 nt, Homo sapiens
  misc_RNA (1)...(19): siRNA sense strand
acaauggaaacaucaauga

SEQ ID NO: 442679 - RNA, 19 nt, Homo sapiens
  misc_RNA (1)...(19): siRNA sense strand
gaaaggagagaugguggau

SEQ ID NO: 442680 - RNA, 19 nt, Homo sapiens
  misc_RNA (1)...(19): siRNA sense strand
cuagagguuucccuggauu

SEQ ID NO: 442681 - RNA, 19 nt, Homo sapiens
  misc_RNA (1)...(19): siRNA sense strand
gcaaauggagacggcuauu

SEQ ID NO: 442682 - RNA, 19 nt, Homo sapiens
  misc_RNA (1)...(19): siRNA sense strand
gaaaggcuuccagggagaa

SEQ ID NO: 442683 - RNA, 19 nt, Homo sapiens
  misc_RNA (1)...(19): siRNA sense strand
gcagcugggcuuccugguu

SEQ ID NO: 442684 - RNA, 19 nt, Homo sapiens
  misc_RNA (1)...(19): siRNA sense strand
ggagagaugguggauuaca

SEQ ID NO: 442685 - RNA, 19 nt, Homo sapiens
  misc_RNA (1)...(19): siRNA sense strand
gaugcuggcaacuccauug

SEQ ID NO: 442686 - RNA, 19 nt, Homo sapiens
  misc_RNA (1)...(19): siRNA sense strand
gcguggagcagcuggagaa

SEQ ID NO: 442687 - RNA, 19 nt, Homo sapiens
  misc_RNA (1)...(19): siRNA sense strand
uggagcagcuggagaacag

SEQ ID NO: 442688 - RNA, 19 nt, Homo sapiens
  misc_RNA (1)...(19): siRNA sense strand
ggauuuccgggucccauug

SEQ ID NO: 442689 - RNA, 19 nt, Homo sapiens
  misc_RNA (1)...(19): siRNA sense strand
gagaugguggauuacaaug

SEQ ID NO: 442690 - RNA, 19 nt, Homo sapiens
  misc_RNA (1)...(19): siRNA sense strand
uagcggagcgcacccacaa

SEQ ID NO: 442691 - RNA, 19 nt, Homo sapiens
  misc_RNA (1)...(19): siRNA sense strand
gggagaaccagggaaagga

SEQ ID NO: 442692 - RNA, 19 nt, Homo sapiens
  misc_RNA (1)...(19): siRNA sense strand
gagccaggccagcauccaa

SEQ ID NO: 442693 - RNA, 19 nt, Homo sapiens
  misc_RNA (1)...(19): siRNA sense strand
gguacuccaggaccaauug

SEQ ID NO: 442694 - RNA, 19 nt, Homo sapiens
  misc_RNA (1)...(19): siRNA sense strand
aaaggagacccugggauga

SEQ ID NO: 442695 - RNA, 19 nt, Homo sapiens
  misc_RNA (1)...(19): siRNA sense strand
gagccagggaucccaggaa

SEQ ID NO: 442696 - RNA, 19 nt, Homo sapiens
  misc_RNA (1)...(19): siRNA sense strand
gaaccagggaaaggagaga

SEQ ID NO: 442697 - RNA, 19 nt, Homo sapiens
  misc_RNA (1)...(19): siRNA sense strand
gauuacaauggaaacauca

SEQ ID NO: 442698 - RNA, 19 nt, Homo sapiens
  misc_RNA (1)...(19): siRNA sense strand
ggucaaccaggaacuagag

SEQ ID NO: 442699 - RNA, 19 nt, Homo sapiens
  misc_RNA (1)...(19): siRNA sense strand
aaggagagaugguggauua

SEQ ID NO: 442700 - RNA, 19 nt, Homo sapiens
  misc_RNA (1)...(19): siRNA sense strand
cagcugggcuuccugguuu

SEQ ID NO: 442701 - RNA, 19 nt, Homo sapiens
  misc_RNA (1)...(19): siRNA sense strand
ccaaagacaucuccaggau

SEQ ID NO: 442702 - RNA, 19 nt, Homo sapiens
  misc_RNA (1)...(19): siRNA sense strand
gagagaugguggauuacaa

SEQ ID NO: 442703 - RNA, 19 nt, Homo sapiens
  misc_RNA (1)...(19): siRNA sense strand
aaagggaccucgcgguaaa

SEQ ID NO: 442704 - RNA, 19 nt, Homo sapiens
  misc_RNA (1)...(19): siRNA sense strand
gaugguggauuacaaugga

SEQ ID NO: 442705 - RNA, 19 nt, Homo sapiens
  misc_RNA (1)...(19): siRNA sense strand
ggauuacaauggaaacauc

SEQ ID NO: 442706 - RNA, 19 nt, Homo sapiens
  misc_RNA (1)...(19): siRNA sense strand
caagggagaaccagggaaa

SEQ ID NO: 442707 - RNA, 19 nt, Homo sapiens
  misc_RNA (1)...(19): siRNA sense strand
ggaagcaggacuagaugga

SEQ ID NO: 442708 - RNA, 19 nt, Homo sapiens
  misc_RNA (1)...(19): siRNA sense strand
caaggcugcuggaacaagu

SEQ ID NO: 442709 - RNA, 19 nt, Homo sapiens
  misc_RNA (1)...(19): siRNA sense strand
gggagaagcaggugucgau

SEQ ID NO: 442710 - RNA, 19 nt, Homo sapiens
  misc_RNA (1)...(19): siRNA sense strand
ggagaacagggaccagaug

SEQ ID NO: 442711 - RNA, 19 nt, Homo sapiens
  misc_RNA (1)...(19): siRNA sense strand
acaauggaaacaucaauga

SEQ ID NO: 442712 - RNA, 19 nt, Homo sapiens
  misc_RNA (1)...(19): siRNA sense strand
gaaaggagagaugguggau

SEQ ID NO: 442713 - RNA, 19 nt, Homo sapiens
  misc_RNA (1)...(19): siRNA sense strand
cuagagguuucccuggauu

SEQ ID NO: 442714 - RNA, 19 nt, Homo sapiens
  misc_RNA (1)...(19): siRNA sense strand
gcaaauggagacggcuauu

SEQ ID NO: 442715 - RNA, 19 nt, Homo sapiens
  misc_RNA (1)...(19): siRNA sense strand
gaaaggcuuccagggagaa

SEQ ID NO: 442716 - RNA, 19 nt, Homo sapiens
  misc_RNA (1)...(19): siRNA sense strand
gcagcugggcuuccugguu

SEQ ID NO: 442717 - RNA, 19 nt, Homo sapiens
  misc_RNA (1)...(19): siRNA sense strand
ggagagaugguggauuaca

SEQ ID NO: 442718 - RNA, 19 nt, Homo sapiens
  misc_RNA (1)...(19): siRNA sense strand
gaugcuggcaacuccauug

SEQ ID NO: 442719 - RNA, 19 nt, Homo sapiens
  misc_RNA (1)...(19): siRNA sense strand
gcguggagcagcuggagaa

SEQ ID NO: 442720 - RNA, 19 nt, Homo sapiens
  misc_RNA (1)...(19): siRNA sense strand
uggagcagcuggagaacag

SEQ ID NO: 442721 - RNA, 19 nt, Homo sapiens
  misc_RNA (1)...(19): siRNA sense strand
ggauuuccgggucccauug

SEQ ID NO: 442722 - RNA, 19 nt, Homo sapiens
  misc_RNA (1)...(19): siRNA sense strand
gagaugguggauuacaaug

SEQ ID NO: 442723 - RNA, 19 nt, Homo sapiens
  misc_RNA (1)...(19): siRNA sense strand
uagcggagcgcacccacaa

SEQ ID NO: 442724 - RNA, 19 nt, Homo sapiens
  misc_RNA (1)...(19): siRNA sense strand
gggagaaccagggaaagga

SEQ ID NO: 442725 - RNA, 19 nt, Homo sapiens
  misc_RNA (1)...(19): siRNA sense strand
gagccaggccagcauccaa

SEQ ID NO: 442726 - RNA, 19 nt, Homo sapiens
  misc_RNA (1)...(19): siRNA sense strand
gguacuccaggaccaauug

SEQ ID NO: 442727 - RNA, 19 nt, Homo sapiens
  misc_RNA (1)...(19): siRNA sense strand
aaaggagacccugggauga

SEQ ID NO: 442728 - RNA, 19 nt, Homo sapiens
  misc_RNA (1)...(19): siRNA sense strand
gagccagggaucccaggaa

SEQ ID NO: 442729 - RNA, 19 nt, Homo sapiens
  misc_RNA (1)...(19): siRNA sense strand
gaaccagggaaaggagaga

SEQ ID NO: 442730 - RNA, 19 nt, Homo sapiens
  misc_RNA (1)...(19): siRNA sense strand
gauuacaauggaaacauca

SEQ ID NO: 442731 - RNA, 19 nt, Homo sapiens
  misc_RNA (1)...(19): siRNA sense strand
ggucaaccaggaacuagag

SEQ ID NO: 442732 - RNA, 19 nt, Homo sapiens
  misc_RNA (1)...(19): siRNA sense strand
aaggagagaugguggauua

SEQ ID NO: 442733 - RNA, 19 nt, Homo sapiens
  misc_RNA (1)...(19): siRNA sense strand
cagcugggcuuccugguuu

SEQ ID NO: 442734 - RNA, 19 nt, Homo sapiens
  misc_RNA (1)...(19): siRNA sense strand
ccaaagacaucuccaggau

SEQ ID NO: 442735 - RNA, 19 nt, Homo sapiens
  misc_RNA (1)...(19): siRNA sense strand
gagagaugguggauuacaa

SEQ ID NO: 442736 - RNA, 19 nt, Homo sapiens
  misc_RNA (1)...(19): siRNA sense strand
aaagggaccucgcgguaaa

SEQ ID NO: 442737 - RNA, 19 nt, Homo sapiens
  misc_RNA (1)...(19): siRNA sense strand
gaugguggauuacaaugga

SEQ ID NO: 442738 - RNA, 19 nt, Homo sapiens
  misc_RNA (1)...(19): siRNA sense strand
ggauuacaauggaaacauc

SEQ ID NO: 442739 - RNA, 19 nt, Homo sapiens
  misc_RNA (1)...(19): siRNA sense strand
caagggagaaccagggaaa

SEQ ID NO: 442740 - RNA, 19 nt, Homo sapiens
  misc_RNA (1)...(19): siRNA sense strand
ggaagcaggacuagaugga

SEQ ID NO: 442741 - RNA, 19 nt, Homo sapiens
  misc_RNA (1)...(19): siRNA sense strand
caaggcugcuggaacaagu

SEQ ID NO: 442742 - RNA, 19 nt, Homo sapiens
  misc_RNA (1)...(19): siRNA sense strand
gggagaagcaggugucgau

SEQ ID NO: 442743 - RNA, 19 nt, Homo sapiens
  misc_RNA (1)...(19): siRNA sense strand
ggagaacagggaccagaug

SEQ ID NO: 442744 - RNA, 19 nt, Homo sapiens
  misc_RNA (1)...(19): siRNA sense strand
acaauggaaacaucaauga

SEQ ID NO: 442745 - RNA, 19 nt, Homo sapiens
  misc_RNA (1)...(19): siRNA sense strand
gaaaggagagaugguggau

SEQ ID NO: 442746 - RNA, 19 nt, Homo sapiens
  misc_RNA (1)...(19): siRNA sense strand
cuagagguuucccuggauu

SEQ ID NO: 442747 - RNA, 19 nt, Homo sapiens
  misc_RNA (1)...(19): siRNA sense strand
gcaaauggagacggcuauu

SEQ ID NO: 442748 - RNA, 19 nt, Homo sapiens
  misc_RNA (1)...(19): siRNA sense strand
gaaaggcuuccagggagaa

SEQ ID NO: 442749 - RNA, 19 nt, Homo sapiens
  misc_RNA (1)...(19): siRNA sense strand
gcagcugggcuuccugguu

SEQ ID NO: 442750 - RNA, 19 nt, Homo sapiens
  misc_RNA (1)...(19): siRNA sense strand
ggagagaugguggauuaca

SEQ ID NO: 442751 - RNA, 19 nt, Homo sapiens
  misc_RNA (1)...(19): siRNA sense strand
gaugcuggcaacuccauug

SEQ ID NO: 442752 - RNA, 19 nt, Homo sapiens
  misc_RNA (1)...(19): siRNA sense strand
gcguggagcagcuggagaa

SEQ ID NO: 442753 - RNA, 19 nt, Homo sapiens
  misc_RNA (1)...(19): siRNA sense strand
uggagcagcuggagaacag

SEQ ID NO: 442754 - RNA, 19 nt, Homo sapiens
  misc_RNA (1)...(19): siRNA sense strand
ggauuuccgggucccauug

SEQ ID NO: 442755 - RNA, 19 nt, Homo sapiens
  misc_RNA (1)...(19): siRNA sense strand
gagaugguggauuacaaug

SEQ ID NO: 442756 - RNA, 19 nt, Homo sapiens
  misc_RNA (1)...(19): siRNA sense strand
uagcggagcgcacccacaa

SEQ ID NO: 442757 - RNA, 19 nt, Homo sapiens
  misc_RNA (1)...(19): siRNA sense strand
gggagaaccagggaaagga

SEQ ID NO: 442758 - RNA, 19 nt, Homo sapiens
  misc_RNA (1)...(19): siRNA sense strand
gagccaggccagcauccaa

SEQ ID NO: 442759 - RNA, 19 nt, Homo sapiens
  misc_RNA (1)...(19): siRNA sense strand
gguacuccaggaccaauug

SEQ ID NO: 442760 - RNA, 19 nt, Homo sapiens
  misc_RNA (1)...(19): siRNA sense strand
aaaggagacccugggauga

SEQ ID NO: 442761 - RNA, 19 nt, Homo sapiens
  misc_RNA (1)...(19): siRNA sense strand
gagccagggaucccaggaa

SEQ ID NO: 442762 - RNA, 19 nt, Homo sapiens
  misc_RNA (1)...(19): siRNA sense strand
gaaccagggaaaggagaga

SEQ ID NO: 442763 - RNA, 19 nt, Homo sapiens
  misc_RNA (1)...(19): siRNA sense strand
gauuacaauggaaacauca

SEQ ID NO: 442764 - RNA, 19 nt, Homo sapiens
  misc_RNA (1)...(19): siRNA sense strand
ggucaaccaggaacuagag

SEQ ID NO: 442765 - RNA, 19 nt, Homo sapiens
  misc_RNA (1)...(19): siRNA sense strand
aaggagagaugguggauua

SEQ ID NO: 442766 - RNA, 19 nt, Homo sapiens
  misc_RNA (1)...(19): siRNA sense strand
cagcugggcuuccugguuu

SEQ ID NO: 442767 - RNA, 19 nt, Homo sapiens
  misc_RNA (1)...(19): siRNA sense strand
ccaaagacaucuccaggau

SEQ ID NO: 442768 - RNA, 19 nt, Homo sapiens
  misc_RNA (1)...(19): siRNA sense strand
gagagaugguggauuacaa

SEQ ID NO: 442769 - RNA, 19 nt, Homo sapiens
  misc_RNA (1)...(19): siRNA sense strand
aaagggaccucgcgguaaa

SEQ ID NO: 442770 - RNA, 19 nt, Homo sapiens
  misc_RNA (1)...(19): siRNA sense strand
gaugguggauuacaaugga

SEQ ID NO: 442771 - RNA, 19 nt, Homo sapiens
  misc_RNA (1)...(19): siRNA sense strand
ggauuacaauggaaacauc

SEQ ID NO: 442772 - RNA, 19 nt, Homo sapiens
  misc_RNA (1)...(19): siRNA sense strand
caagggagaaccagggaaa

SEQ ID NO: 442773 - RNA, 19 nt, Homo sapiens
  misc_RNA (1)...(19): siRNA sense strand
ggaagcaggacuagaugga

SEQ ID NO: 442774 - RNA, 19 nt, Homo sapiens
  misc_RNA (1)...(19): siRNA sense strand
caaggcugcuggaacaagu

SEQ ID NO: 442775 - RNA, 19 nt, Homo sapiens
  misc_RNA (1)...(19): siRNA sense strand
gggagaagcaggugucgau

SEQ ID NO: 442776 - RNA, 19 nt, Homo sapiens
  misc_RNA (1)...(19): siRNA sense strand
ggagaacagggaccagaug

SEQ ID NO: 442777 - RNA, 19 nt, Homo sapiens
  misc_RNA (1)...(19): siRNA sense strand
acaauggaaacaucaauga

SEQ ID NO: 442778 - RNA, 19 nt, Homo sapiens
  misc_RNA (1)...(19): siRNA sense strand
gaaaggagagaugguggau

SEQ ID NO: 442779 - RNA, 19 nt, Homo sapiens
  misc_RNA (1)...(19): siRNA sense strand
cuagagguuucccuggauu

SEQ ID NO: 442780 - RNA, 19 nt, Homo sapiens
  misc_RNA (1)...(19): siRNA sense strand
gcaaauggagacggcuauu

SEQ ID NO: 442781 - RNA, 19 nt, Homo sapiens
  misc_RNA (1)...(19): siRNA sense strand
gaaaggcuuccagggagaa

SEQ ID NO: 442782 - RNA, 19 nt, Homo sapiens
  misc_RNA (1)...(19): siRNA sense strand
gcagcugggcuuccugguu

SEQ ID NO: 442783 - RNA, 19 nt, Homo sapiens
  misc_RNA (1)...(19): siRNA sense strand
ggagagaugguggauuaca

SEQ ID NO: 442784 - RNA, 19 nt, Homo sapiens
  misc_RNA (1)...(19): siRNA sense strand
gaugcuggcaacuccauug

SEQ ID NO: 442785 - RNA, 19 nt, Homo sapiens
  misc_RNA (1)...(19): siRNA sense strand
gcguggagcagcuggagaa

SEQ ID NO: 442786 - RNA, 19 nt, Homo sapiens
  misc_RNA (1)...(19): siRNA sense strand
uggagcagcuggagaacag

SEQ ID NO: 442787 - RNA, 19 nt, Homo sapiens
  misc_RNA (1)...(19): siRNA sense strand
ggauuuccgggucccauug

SEQ ID NO: 442788 - RNA, 19 nt, Homo sapiens
  misc_RNA (1)...(19): siRNA sense strand
gagaugguggauuacaaug

SEQ ID NO: 442789 - RNA, 19 nt, Homo sapiens
  misc_RNA (1)...(19): siRNA sense strand
uagcggagcgcacccacaa

SEQ ID NO: 442790 - RNA, 19 nt, Homo sapiens
  misc_RNA (1)...(19): siRNA sense strand
gggagaaccagggaaagga

SEQ ID NO: 442791 - RNA, 19 nt, Homo sapiens
  misc_RNA (1)...(19): siRNA sense strand
gagccaggccagcauccaa

SEQ ID NO: 442792 - RNA, 19 nt, Homo sapiens
  misc_RNA (1)...(19): siRNA sense strand
gguacuccaggaccaauug

SEQ ID NO: 442793 - RNA, 19 nt, Homo sapiens
  misc_RNA (1)...(19): siRNA sense strand
aaaggagacccugggauga

SEQ ID NO: 442794 - RNA, 19 nt, Homo sapiens
  misc_RNA (1)...(19): siRNA sense strand
gagccagggaucccaggaa

SEQ ID NO: 442795 - RNA, 19 nt, Homo sapiens
  misc_RNA (1)...(19): siRNA sense strand
gaaccagggaaaggagaga

SEQ ID NO: 442796 - RNA, 19 nt, Homo sapiens
  misc_RNA (1)...(19): siRNA sense strand
gauuacaauggaaacauca

SEQ ID NO: 442797 - RNA, 19 nt, Homo sapiens
  misc_RNA (1)...(19): siRNA sense strand
ggucaaccaggaacuagag

SEQ ID NO: 442798 - RNA, 19 nt, Homo sapiens
  misc_RNA (1)...(19): siRNA sense strand
aaggagagaugguggauua

SEQ ID NO: 442799 - RNA, 19 nt, Homo sapiens
  misc_RNA (1)...(19): siRNA sense strand
cagcugggcuuccugguuu

SEQ ID NO: 442800 - RNA, 19 nt, Homo sapiens
  misc_RNA (1)...(19): siRNA sense strand
ccaaagacaucuccaggau

SEQ ID NO: 442801 - RNA, 19 nt, Homo sapiens
  misc_RNA (1)...(19): siRNA sense strand
gagagaugguggauuacaa

SEQ ID NO: 442802 - RNA, 19 nt, Homo sapiens
  misc_RNA (1)...(19): siRNA sense strand
aaagggaccucgcgguaaa

SEQ ID NO: 442803 - RNA, 19 nt, Homo sapiens
  misc_RNA (1)...(19): siRNA sense strand
gaugguggauuacaaugga

SEQ ID NO: 442804 - RNA, 19 nt, Homo sapiens
  misc_RNA (1)...(19): siRNA sense strand
ggauuacaauggaaacauc

SEQ ID NO: 442805 - RNA, 19 nt, Homo sapiens
  misc_RNA (1)...(19): siRNA sense strand
caagggagaaccagggaaa

SEQ ID NO: 442806 - RNA, 19 nt, Homo sapiens
  misc_RNA (1)...(19): siRNA sense strand
ggaagcaggacuagaugga

SEQ ID NO: 442807 - RNA, 19 nt, Homo sapiens
  misc_RNA (1)...(19): siRNA sense strand
caaggcugcuggaacaagu

SEQ ID NO: 442808 - RNA, 19 nt, Homo sapiens
  misc_RNA (1)...(19): siRNA sense strand
gggagaagcaggugucgau

SEQ ID NO: 442809 - RNA, 19 nt, Homo sapiens
  misc_RNA (1)...(19): siRNA sense strand
ggagaacagggaccagaug

SEQ ID NO: 442810 - RNA, 19 nt, Homo sapiens
  misc_RNA (1)...(19): siRNA sense strand
acaauggaaacaucaauga

SEQ ID NO: 442811 - RNA, 19 nt, Homo sapiens
  misc_RNA (1)...(19): siRNA sense strand
gaaaggagagaugguggau

SEQ ID NO: 442812 - RNA, 19 nt, Homo sapiens
  misc_RNA (1)...(19): siRNA sense strand
cuagagguuucccuggauu

SEQ ID NO: 442813 - RNA, 19 nt, Homo sapiens
  misc_RNA (1)...(19): siRNA sense strand
gcaaauggagacggcuauu

SEQ ID NO: 442814 - RNA, 19 nt, Homo sapiens
  misc_RNA (1)...(19): siRNA sense strand
gaaaggcuuccagggagaa

SEQ ID NO: 442815 - RNA, 19 nt, Homo sapiens
  misc_RNA (1)...(19): siRNA sense strand
gcagcugggcuuccugguu

SEQ ID NO: 442816 - RNA, 19 nt, Homo sapiens
  misc_RNA (1)...(19): siRNA sense strand
ggagagaugguggauuaca

SEQ ID NO: 442817 - RNA, 19 nt, Homo sapiens
  misc_RNA (1)...(19): siRNA sense strand
gaugcuggcaacuccauug

SEQ ID NO: 442818 - RNA, 19 nt, Homo sapiens
  misc_RNA (1)...(19): siRNA sense strand
gcguggagcagcuggagaa

SEQ ID NO: 442819 - RNA, 19 nt, Homo sapiens
  misc_RNA (1)...(19): siRNA sense strand
uggagcagcuggagaacag

SEQ ID NO: 442820 - RNA, 19 nt, Homo sapiens
  misc_RNA (1)...(19): siRNA sense strand
ggauuuccgggucccauug

SEQ ID NO: 442821 - RNA, 19 nt, Homo sapiens
  misc_RNA (1)...(19): siRNA sense strand
gagaugguggauuacaaug

SEQ ID NO: 442822 - RNA, 19 nt, Homo sapiens
  misc_RNA (1)...(19): siRNA sense strand
uagcggagcgcacccacaa

SEQ ID NO: 442823 - RNA, 19 nt, Homo sapiens
  misc_RNA (1)...(19): siRNA sense strand
gggagaaccagggaaagga

SEQ ID NO: 442824 - RNA, 19 nt, Homo sapiens
  misc_RNA (1)...(19): siRNA sense strand
gagccaggccagcauccaa

SEQ ID NO: 442825 - RNA, 19 nt, Homo sapiens
  misc_RNA (1)...(19): siRNA sense strand
gguacuccaggaccaauug

SEQ ID NO: 442826 - RNA, 19 nt, Homo sapiens
  misc_RNA (1)...(19): siRNA sense strand
aaaggagacccugggauga

SEQ ID NO: 442827 - RNA, 19 nt, Homo sapiens
  misc_RNA (1)...(19): siRNA sense strand
gagccagggaucccaggaa

SEQ ID NO: 442828 - RNA, 19 nt, Homo sapiens
  misc_RNA (1)...(19): siRNA sense strand
gaaccagggaaaggagaga

SEQ ID NO: 442829 - RNA, 19 nt, Homo sapiens
  misc_RNA (1)...(19): siRNA sense strand
gauuacaauggaaacauca

SEQ ID NO: 442830 - RNA, 19 nt, Homo sapiens
  misc_RNA (1)...(19): siRNA sense strand
ggucaaccaggaacuagag

SEQ ID NO: 442831 - RNA, 19 nt, Homo sapiens
  misc_RNA (1)...(19): siRNA sense strand
aaggagagaugguggauua

SEQ ID NO: 442832 - RNA, 19 nt, Homo sapiens
  misc_RNA (1)...(19): siRNA sense strand
cagcugggcuuccugguuu

SEQ ID NO: 442833 - RNA, 19 nt, Homo sapiens
  misc_RNA (1)...(19): siRNA sense strand
ccaaagacaucuccaggau

SEQ ID NO: 442834 - RNA, 19 nt, Homo sapiens
  misc_RNA (1)...(19): siRNA sense strand
gagagaugguggauuacaa

SEQ ID NO: 442835 - RNA, 19 nt, Homo sapiens
  misc_RNA (1)...(19): siRNA sense strand
aaagggaccucgcgguaaa

SEQ ID NO: 442836 - RNA, 19 nt, Homo sapiens
  misc_RNA (1)...(19): siRNA sense strand
gaugguggauuacaaugga

SEQ ID NO: 442837 - RNA, 19 nt, Homo sapiens
  misc_RNA (1)...(19): siRNA sense strand
ggauuacaauggaaacauc

SEQ ID NO: 442838 - RNA, 19 nt, Homo sapiens
  misc_RNA (1)...(19): siRNA sense strand
caagggagaaccagggaaa

SEQ ID NO: 442839 - RNA, 19 nt, Homo sapiens
  misc_RNA (1)...(19): siRNA sense strand
ggaagcaggacuagaugga

SEQ ID NO: 442840 - RNA, 19 nt, Homo sapiens
  misc_RNA (1)...(19): siRNA sense strand
caaggcugcuggaacaagu

SEQ ID NO: 442841 - RNA, 19 nt, Homo sapiens
  misc_RNA (1)...(19): siRNA sense strand
gggagaagcaggugucgau

SEQ ID NO: 442842 - RNA, 19 nt, Homo sapiens
  misc_RNA (1)...(19): siRNA sense strand
ggagaacagggaccagaug

SEQ ID NO: 442843 - RNA, 19 nt, Homo sapiens
  misc_RNA (1)...(19): siRNA sense strand
acaauggaaacaucaauga

SEQ ID NO: 442844 - RNA, 19 nt, Homo sapiens
  misc_RNA (1)...(19): siRNA sense strand
gaaaggagagaugguggau

SEQ ID NO: 442845 - RNA, 19 nt, Homo sapiens
  misc_RNA (1)...(19): siRNA sense strand
cuagagguuucccuggauu

SEQ ID NO: 442846 - RNA, 19 nt, Homo sapiens
  misc_RNA (1)...(19): siRNA sense strand
gcaaauggagacggcuauu

SEQ ID NO: 442847 - RNA, 19 nt, Homo sapiens
  misc_RNA (1)...(19): siRNA sense strand
gaaaggcuuccagggagaa

SEQ ID NO: 442848 - RNA, 19 nt, Homo sapiens
  misc_RNA (1)...(19): siRNA sense strand
gcagcugggcuuccugguu

SEQ ID NO: 442849 - RNA, 19 nt, Homo sapiens
  misc_RNA (1)...(19): siRNA sense strand
ggagagaugguggauuaca

SEQ ID NO: 442850 - RNA, 19 nt, Homo sapiens
  misc_RNA (1)...(19): siRNA sense strand
gaugcuggcaacuccauug

SEQ ID NO: 442851 - RNA, 19 nt, Homo sapiens
  misc_RNA (1)...(19): siRNA sense strand
gcguggagcagcuggagaa

SEQ ID NO: 442852 - RNA, 19 nt, Homo sapiens
  misc_RNA (1)...(19): siRNA sense strand
uggagcagcuggagaacag

SEQ ID NO: 442853 - RNA, 19 nt, Homo sapiens
  misc_RNA (1)...(19): siRNA sense strand
ggauuuccgggucccauug

SEQ ID NO: 442854 - RNA, 19 nt, Homo sapiens
  misc_RNA (1)...(19): siRNA sense strand
gagaugguggauuacaaug

SEQ ID NO: 442855 - RNA, 19 nt, Homo sapiens
  misc_RNA (1)...(19): siRNA sense strand
uagcggagcgcacccacaa

SEQ ID NO: 442856 - RNA, 19 nt, Homo sapiens
  misc_RNA (1)...(19): siRNA sense strand
gggagaaccagggaaagga

SEQ ID NO: 442857 - RNA, 19 nt, Homo sapiens
  misc_RNA (1)...(19): siRNA sense strand
gagccaggccagcauccaa

SEQ ID NO: 442858 - RNA, 19 nt, Homo sapiens
  misc_RNA (1)...(19): siRNA sense strand
gguacuccaggaccaauug

SEQ ID NO: 442859 - RNA, 19 nt, Homo sapiens
  misc_RNA (1)...(19): siRNA sense strand
aaaggagacccugggauga

SEQ ID NO: 442860 - RNA, 19 nt, Homo sapiens
  misc_RNA (1)...(19): siRNA sense strand
gagccagggaucccaggaa

SEQ ID NO: 442861 - RNA, 19 nt, Homo sapiens
  misc_RNA (1)...(19): siRNA sense strand
gaaccagggaaaggagaga

SEQ ID NO: 442862 - RNA, 19 nt, Homo sapiens
  misc_RNA (1)...(19): siRNA sense strand
gauuacaauggaaacauca

SEQ ID NO: 442863 - RNA, 19 nt, Homo sapiens
  misc_RNA (1)...(19): siRNA sense strand
ggucaaccaggaacuagag

SEQ ID NO: 442864 - RNA, 19 nt, Homo sapiens
  misc_RNA (1)...(19): siRNA sense strand
aaggagagaugguggauua

SEQ ID NO: 442865 - RNA, 19 nt, Homo sapiens
  misc_RNA (1)...(19): siRNA sense strand
cagcugggcuuccugguuu

SEQ ID NO: 442866 - RNA, 19 nt, Homo sapiens
  misc_RNA (1)...(19): siRNA sense strand
ccaaagacaucuccaggau

SEQ ID NO: 442867 - RNA, 19 nt, Homo sapiens
  misc_RNA (1)...(19): siRNA sense strand
gagagaugguggauuacaa

SEQ ID NO: 442868 - RNA, 19 nt, Homo sapiens
  misc_RNA (1)...(19): siRNA sense strand
aaagggaccucgcgguaaa

SEQ ID NO: 442869 - RNA, 19 nt, Homo sapiens
  misc_RNA (1)...(19): siRNA sense strand
gaugguggauuacaaugga

SEQ ID NO: 442870 - RNA, 19 nt, Homo sapiens
  misc_RNA (1)...(19): siRNA sense strand
ggauuacaauggaaacauc

SEQ ID NO: 442871 - RNA, 19 nt, Homo sapiens
  misc_RNA (1)...(19): siRNA sense strand
caagggagaaccagggaaa

SEQ ID NO: 442872 - RNA, 19 nt, Homo sapiens
  misc_RNA (1)...(19): siRNA sense strand
ggaagcaggacuagaugga

SEQ ID NO: 442873 - RNA, 19 nt, Homo sapiens
  misc_RNA (1)...(19): siRNA sense strand
caaggcugcuggaacaagu

SEQ ID NO: 442874 - RNA, 19 nt, Homo sapiens
  misc_RNA (1)...(19): siRNA sense strand
gggagaagcaggugucgau

SEQ ID NO: 442875 - RNA, 19 nt, Homo sapiens
  misc_RNA (1)...(19): siRNA sense strand
ggagaacagggaccagaug

SEQ ID NO: 442876 - RNA, 19 nt, Homo sapiens
  misc_RNA (1)...(19): siRNA sense strand
acaauggaaacaucaauga

SEQ ID NO: 442877 - RNA, 19 nt, Homo sapiens
  misc_RNA (1)...(19): siRNA sense strand
gaaaggagagaugguggau

SEQ ID NO: 442878 - RNA, 19 nt, Homo sapiens
  misc_RNA (1)...(19): siRNA sense strand
cuagagguuucccuggauu

SEQ ID NO: 442879 - RNA, 19 nt, Homo sapiens
  misc_RNA (1)...(19): siRNA sense strand
gcaaauggagacggcuauu

SEQ ID NO: 442880 - RNA, 19 nt, Homo sapiens
  misc_RNA (1)...(19): siRNA sense strand
gaaaggcuuccagggagaa

SEQ ID NO: 442881 - RNA, 19 nt, Homo sapiens
  misc_RNA (1)...(19): siRNA sense strand
gcagcugggcuuccugguu

SEQ ID NO: 442882 - RNA, 19 nt, Homo sapiens
  misc_RNA (1)...(19): siRNA sense strand
ggagagaugguggauuaca

SEQ ID NO: 442883 - RNA, 19 nt, Homo sapiens
  misc_RNA (1)...(19): siRNA sense strand
gaugcuggcaacuccauug

SEQ ID NO: 442884 - RNA, 19 nt, Homo sapiens
  misc_RNA (1)...(19): siRNA sense strand
gcguggagcagcuggagaa

SEQ ID NO: 442885 - RNA, 19 nt, Homo sapiens
  misc_RNA (1)...(19): siRNA sense strand
uggagcagcuggagaacag

SEQ ID NO: 442886 - RNA, 19 nt, Homo sapiens
  misc_RNA (1)...(19): siRNA sense strand
ggauuuccgggucccauug

SEQ ID NO: 442887 - RNA, 19 nt, Homo sapiens
  misc_RNA (1)...(19): siRNA sense strand
gagaugguggauuacaaug

SEQ ID NO: 442888 - RNA, 19 nt, Homo sapiens
  misc_RNA (1)...(19): siRNA sense strand
uagcggagcgcacccacaa

SEQ ID NO: 442889 - RNA, 19 nt, Homo sapiens
  misc_RNA (1)...(19): siRNA sense strand
gggagaaccagggaaagga

SEQ ID NO: 442890 - RNA, 19 nt, Homo sapiens
  misc_RNA (1)...(19): siRNA sense strand
gagccaggccagcauccaa

SEQ ID NO: 442891 - RNA, 19 nt, Homo sapiens
  misc_RNA (1)...(19): siRNA sense strand
gguacuccaggaccaauug

SEQ ID NO: 442892 - RNA, 19 nt, Homo sapiens
  misc_RNA (1)...(19): siRNA sense strand
aaaggagacccugggauga

SEQ ID NO: 442893 - RNA, 19 nt, Homo sapiens
  misc_RNA (1)...(19): siRNA sense strand
gagccagggaucccaggaa

SEQ ID NO: 442894 - RNA, 19 nt, Homo sapiens
  misc_RNA (1)...(19): siRNA sense strand
gaaccagggaaaggagaga

SEQ ID NO: 442895 - RNA, 19 nt, Homo sapiens
  misc_RNA (1)...(19): siRNA sense strand
gauuacaauggaaacauca

SEQ ID NO: 442896 - RNA, 19 nt, Homo sapiens
  misc_RNA (1)...(19): siRNA sense strand
ggucaaccaggaacuagag

SEQ ID NO: 442897 - RNA, 19 nt, Homo sapiens
  misc_RNA (1)...(19): siRNA sense strand
aaggagagaugguggauua

SEQ ID NO: 442898 - RNA, 19 nt, Homo sapiens
  misc_RNA (1)...(19): siRNA sense strand
cagcugggcuuccugguuu

SEQ ID NO: 442899 - RNA, 19 nt, Homo sapiens
  misc_RNA (1)...(19): siRNA sense strand
ccaaagacaucuccaggau

SEQ ID NO: 442900 - RNA, 19 nt, Homo sapiens
  misc_RNA (1)...(19): siRNA sense strand
gagagaugguggauuacaa

SEQ ID NO: 442901 - RNA, 19 nt, Homo sapiens
  misc_RNA (1)...(19): siRNA sense strand
aaagggaccucgcgguaaa

SEQ ID NO: 442902 - RNA, 19 nt, Homo sapiens
  misc_RNA (1)...(19): siRNA sense strand
gaugguggauuacaaugga

SEQ ID NO: 442903 - RNA, 19 nt, Homo sapiens
  misc_RNA (1)...(19): siRNA sense strand
ggauuacaauggaaacauc

SEQ ID NO: 442904 - RNA, 19 nt, Homo sapiens
  misc_RNA (1)...(19): siRNA sense strand
caagggagaaccagggaaa

SEQ ID NO: 442905 - RNA, 19 nt, Homo sapiens
  misc_RNA (1)...(19): siRNA sense strand
ggaagcaggacuagaugga

SEQ ID NO: 442906 - RNA, 19 nt, Homo sapiens
  misc_RNA (1)...(19): siRNA sense strand
caaggcugcuggaacaagu

SEQ ID NO: 442907 - RNA, 19 nt, Homo sapiens
  misc_RNA (1)...(19): siRNA sense strand
gggagaagcaggugucgau

SEQ ID NO: 442908 - RNA, 19 nt, Homo sapiens
  misc_RNA (1)...(19): siRNA sense strand
ggagaacagggaccagaug

SEQ ID NO: 442909 - RNA, 19 nt, Homo sapiens
  misc_RNA (1)...(19): siRNA sense strand
acaauggaaacaucaauga

SEQ ID NO: 442910 - RNA, 19 nt, Homo sapiens
  misc_RNA (1)...(19): siRNA sense strand
gaaaggagagaugguggau

SEQ ID NO: 442911 - RNA, 19 nt, Homo sapiens
  misc_RNA (1)...(19): siRNA sense strand
cuagagguuucccuggauu

SEQ ID NO: 442912 - RNA, 19 nt, Homo sapiens
  misc_RNA (1)...(19): siRNA sense strand
gcaaauggagacggcuauu

SEQ ID NO: 442913 - RNA, 19 nt, Homo sapiens
  misc_RNA (1)...(19): siRNA sense strand
gaaaggcuuccagggagaa

SEQ ID NO: 442914 - RNA, 19 nt, Homo sapiens
  misc_RNA (1)...(19): siRNA sense strand
gcagcugggcuuccugguu

SEQ ID NO: 442915 - RNA, 19 nt, Homo sapiens
  misc_RNA (1)...(19): siRNA sense strand
ggagagaugguggauuaca

SEQ ID NO: 442916 - RNA, 19 nt, Homo sapiens
  misc_RNA (1)...(19): siRNA sense strand
gaugcuggcaacuccauug

SEQ ID NO: 442917 - RNA, 19 nt, Homo sapiens
  misc_RNA (1)...(19): siRNA sense strand
gcguggagcagcuggagaa

SEQ ID NO: 442918 - RNA, 19 nt, Homo sapiens
  misc_RNA (1)...(19): siRNA sense strand
uggagcagcuggagaacag

SEQ ID NO: 442919 - RNA, 19 nt, Homo sapiens
  misc_RNA (1)...(19): siRNA sense strand
ggauuuccgggucccauug

SEQ ID NO: 442920 - RNA, 19 nt, Homo sapiens
  misc_RNA (1)...(19): siRNA sense strand
gagaugguggauuacaaug

SEQ ID NO: 442921 - RNA, 19 nt, Homo sapiens
  misc_RNA (1)...(19): siRNA sense strand
uagcggagcgcacccacaa

SEQ ID NO: 442922 - RNA, 19 nt, Homo sapiens
  misc_RNA (1)...(19): siRNA sense strand
gggagaaccagggaaagga

SEQ ID NO: 442923 - RNA, 19 nt, Homo sapiens
  misc_RNA (1)...(19): siRNA sense strand
gagccaggccagcauccaa

SEQ ID NO: 442924 - RNA, 19 nt, Homo sapiens
  misc_RNA (1)...(19): siRNA sense strand
gguacuccaggaccaauug

SEQ ID NO: 442925 - RNA, 19 nt, Homo sapiens
  misc_RNA (1)...(19): siRNA sense strand
aaaggagacccugggauga

SEQ ID NO: 442926 - RNA, 19 nt, Homo sapiens
  misc_RNA (1)...(19): siRNA sense strand
gagccagggaucccaggaa

SEQ ID NO: 442927 - RNA, 19 nt, Homo sapiens
  misc_RNA (1)...(19): siRNA sense strand
gaaccagggaaaggagaga

SEQ ID NO: 442928 - RNA, 19 nt, Homo sapiens
  misc_RNA (1)...(19): siRNA sense strand
gauuacaauggaaacauca

SEQ ID NO: 442929 - RNA, 19 nt, Homo sapiens
  misc_RNA (1)...(19): siRNA sense strand
ggucaaccaggaacuagag

SEQ ID NO: 442930 - RNA, 19 nt, Homo sapiens
  misc_RNA (1)...(19): siRNA sense strand
aaggagagaugguggauua

SEQ ID NO: 442931 - RNA, 19 nt, Homo sapiens
  misc_RNA (1)...(19): siRNA sense strand
cagcugggcuuccugguuu

SEQ ID NO: 442932 - RNA, 19 nt, Homo sapiens
  misc_RNA (1)...(19): siRNA sense strand
ccaaagacaucuccaggau

SEQ ID NO: 442933 - RNA, 19 nt, Homo sapiens
  misc_RNA (1)...(19): siRNA sense strand
gagagaugguggauuacaa

SEQ ID NO: 442934 - RNA, 19 nt, Homo sapiens
  misc_RNA (1)...(19): siRNA sense strand
aaagggaccucgcgguaaa

SEQ ID NO: 442935 - RNA, 19 nt, Homo sapiens
  misc_RNA (1)...(19): siRNA sense strand
gaugguggauuacaaugga

SEQ ID NO: 442936 - RNA, 19 nt, Homo sapiens
  misc_RNA (1)...(19): siRNA sense strand
ggauuacaauggaaacauc

SEQ ID NO: 442937 - RNA, 19 nt, Homo sapiens
  misc_RNA (1)...(19): siRNA sense strand
caagggagaaccagggaaa

SEQ ID NO: 442938 - RNA, 19 nt, Homo sapiens
  misc_RNA (1)...(19): siRNA sense strand
ggaagcaggacuagaugga

SEQ ID NO: 442939 - RNA, 19 nt, Homo sapiens
  misc_RNA (1)...(19): siRNA sense strand
caaggcugcuggaacaagu

SEQ ID NO: 442940 - RNA, 19 nt, Homo sapiens
  misc_RNA (1)...(19): siRNA sense strand
gggagaagcaggugucgau

SEQ ID NO: 442941 - RNA, 19 nt, Homo sapiens
  misc_RNA (1)...(19): siRNA sense strand
ggagaacagggaccagaug

SEQ ID NO: 442942 - RNA, 19 nt, Homo sapiens
  misc_RNA (1)...(19): siRNA sense strand
acaauggaaacaucaauga

SEQ ID NO: 442943 - RNA, 19 nt, Homo sapiens
  misc_RNA (1)...(19): siRNA sense strand
gaaaggagagaugguggau

SEQ ID NO: 442944 - RNA, 19 nt, Homo sapiens
  misc_RNA (1)...(19): siRNA sense strand
cuagagguuucccuggauu

SEQ ID NO: 442945 - RNA, 19 nt, Homo sapiens
  misc_RNA (1)...(19): siRNA sense strand
gcaaauggagacggcuauu

SEQ ID NO: 442946 - RNA, 19 nt, Homo sapiens
  misc_RNA (1)...(19): siRNA sense strand
gaaaggcuuccagggagaa

SEQ ID NO: 442947 - RNA, 19 nt, Homo sapiens
  misc_RNA (1)...(19): siRNA sense strand
gcagcugggcuuccugguu

SEQ ID NO: 442948 - RNA, 19 nt, Homo sapiens
  misc_RNA (1)...(19): siRNA sense strand
ggagagaugguggauuaca

SEQ ID NO: 442949 - RNA, 19 nt, Homo sapiens
  misc_RNA (1)...(19): siRNA sense strand
gaugcuggcaacuccauug

SEQ ID NO: 442950 - RNA, 19 nt, Homo sapiens
  misc_RNA (1)...(19): siRNA sense strand
gcguggagcagcuggagaa

SEQ ID NO: 442951 - RNA, 19 nt, Homo sapiens
  misc_RNA (1)...(19): siRNA sense strand
uggagcagcuggagaacag

SEQ ID NO: 442952 - RNA, 19 nt, Homo sapiens
  misc_RNA (1)...(19): siRNA sense strand
ggauuuccgggucccauug

SEQ ID NO: 442953 - RNA, 19 nt, Homo sapiens
  misc_RNA (1)...(19): siRNA sense strand
gagaugguggauuacaaug

SEQ ID NO: 442954 - RNA, 19 nt, Homo sapiens
  misc_RNA (1)...(19): siRNA sense strand
uagcggagcgcacccacaa

SEQ ID NO: 442955 - RNA, 19 nt, Homo sapiens
  misc_RNA (1)...(19): siRNA sense strand
gggagaaccagggaaagga

SEQ ID NO: 442956 - RNA, 19 nt, Homo sapiens
  misc_RNA (1)...(19): siRNA sense strand
gagccaggccagcauccaa

SEQ ID NO: 442957 - RNA, 19 nt, Homo sapiens
  misc_RNA (1)...(19): siRNA sense strand
gguacuccaggaccaauug

SEQ ID NO: 442958 - RNA, 19 nt, Homo sapiens
  misc_RNA (1)...(19): siRNA sense strand
aaaggagacccugggauga

SEQ ID NO: 442959 - RNA, 19 nt, Homo sapiens
  misc_RNA (1)...(19): siRNA sense strand
gagccagggaucccaggaa

SEQ ID NO: 442960 - RNA, 19 nt, Homo sapiens
  misc_RNA (1)...(19): siRNA sense strand
gaaccagggaaaggagaga

SEQ ID NO: 442961 - RNA, 19 nt, Homo sapiens
  misc_RNA (1)...(19): siRNA sense strand
gauuacaauggaaacauca

SEQ ID NO: 442962 - RNA, 19 nt, Homo sapiens
  misc_RNA (1)...(19): siRNA sense strand
ggucaaccaggaacuagag

SEQ ID NO: 442963 - RNA, 19 nt, Homo sapiens
  misc_RNA (1)...(19): siRNA sense strand
aaggagagaugguggauua

SEQ ID NO: 442964 - RNA, 19 nt, Homo sapiens
  misc_RNA (1)...(19): siRNA sense strand
cagcugggcuuccugguuu

SEQ ID NO: 442965 - RNA, 19 nt, Homo sapiens
  misc_RNA (1)...(19): siRNA sense strand
ccaaagacaucuccaggau

SEQ ID NO: 442966 - RNA, 19 nt, Homo sapiens
  misc_RNA (1)...(19): siRNA sense strand
gagagaugguggauuacaa

SEQ ID NO: 442967 - RNA, 19 nt, Homo sapiens
  misc_RNA (1)...(19): siRNA sense strand
aaagggaccucgcgguaaa

SEQ ID NO: 442968 - RNA, 19 nt, Homo sapiens
  misc_RNA (1)...(19): siRNA sense strand
gaugguggauuacaaugga

SEQ ID NO: 442969 - RNA, 19 nt, Homo sapiens
  misc_RNA (1)...(19): siRNA sense strand
ggauuacaauggaaacauc

SEQ ID NO: 442970 - RNA, 19 nt, Homo sapiens
  misc_RNA (1)...(19): siRNA sense strand
caagggagaaccagggaaa

SEQ ID NO: 442971 - RNA, 19 nt, Homo sapiens
  misc_RNA (1)...(19): siRNA sense strand
ggaagcaggacuagaugga

SEQ ID NO: 442972 - RNA, 19 nt, Homo sapiens
  misc_RNA (1)...(19): siRNA sense strand
caaggcugcuggaacaagu

SEQ ID NO: 442973 - RNA, 19 nt, Homo sapiens
  misc_RNA (1)...(19): siRNA sense strand
gggagaagcaggugucgau

SEQ ID NO: 442974 - RNA, 19 nt, Homo sapiens
  misc_RNA (1)...(19): siRNA sense strand
ggagaacagggaccagaug

SEQ ID NO: 442975 - RNA, 19 nt, Homo sapiens
  misc_RNA (1)...(19): siRNA sense strand
acaauggaaacaucaauga

SEQ ID NO: 442976 - RNA, 19 nt, Homo sapiens
  misc_RNA (1)...(19): siRNA sense strand
gaaaggagagaugguggau

SEQ ID NO: 442977 - RNA, 19 nt, Homo sapiens
  misc_RNA (1)...(19): siRNA sense strand
cuagagguuucccuggauu

SEQ ID NO: 442978 - RNA, 19 nt, Homo sapiens
  misc_RNA (1)...(19): siRNA sense strand
gcaaauggagacggcuauu

SEQ ID NO: 442979 - RNA, 19 nt, Homo sapiens
  misc_RNA (1)...(19): siRNA sense strand
gaaaggcuuccagggagaa

SEQ ID NO: 442980 - RNA, 19 nt, Homo sapiens
  misc_RNA (1)...(19): siRNA sense strand
gcagcugggcuuccugguu

SEQ ID NO: 442981 - RNA, 19 nt, Homo sapiens
  misc_RNA (1)...(19): siRNA sense strand
ggagagaugguggauuaca

SEQ ID NO: 442982 - RNA, 19 nt, Homo sapiens
  misc_RNA (1)...(19): siRNA sense strand
gaugcuggcaacuccauug

SEQ ID NO: 442983 - RNA, 19 nt, Homo sapiens
  misc_RNA (1)...(19): siRNA sense strand
gcguggagcagcuggagaa

SEQ ID NO: 442984 - RNA, 19 nt, Homo sapiens
  misc_RNA (1)...(19): siRNA sense strand
uggagcagcuggagaacag

SEQ ID NO: 442985 - RNA, 19 nt, Homo sapiens
  misc_RNA (1)...(19): siRNA sense strand
ggauuuccgggucccauug

SEQ ID NO: 442986 - RNA, 19 nt, Homo sapiens
  misc_RNA (1)...(19): siRNA sense strand
gagaugguggauuacaaug

SEQ ID NO: 442987 - RNA, 19 nt, Homo sapiens
  misc_RNA (1)...(19): siRNA sense strand
uagcggagcgcacccacaa

SEQ ID NO: 442988 - RNA, 19 nt, Homo sapiens
  misc_RNA (1)...(19): siRNA sense strand
gggagaaccagggaaagga

SEQ ID NO: 442989 - RNA, 19 nt, Homo sapiens
  misc_RNA (1)...(19): siRNA sense strand
gagccaggccagcauccaa

SEQ ID NO: 442990 - RNA, 19 nt, Homo sapiens
  misc_RNA (1)...(19): siRNA sense strand
gguacuccaggaccaauug

SEQ ID NO: 442991 - RNA, 19 nt, Homo sapiens
  misc_RNA (1)...(19): siRNA sense strand
aaaggagacccugggauga

SEQ ID NO: 442992 - RNA, 19 nt, Homo sapiens
  misc_RNA (1)...(19): siRNA sense strand
gagccagggaucccaggaa

SEQ ID NO: 442993 - RNA, 19 nt, Homo sapiens
  misc_RNA (1)...(19): siRNA sense strand
gaaccagggaaaggagaga

SEQ ID NO: 442994 - RNA, 19 nt, Homo sapiens
  misc_RNA (1)...(19): siRNA sense strand
gauuacaauggaaacauca

SEQ ID NO: 442995 - RNA, 19 nt, Homo sapiens
  misc_RNA (1)...(19): siRNA sense strand
ggucaaccaggaacuagag

SEQ ID NO: 442996 - RNA, 19 nt, Homo sapiens
  misc_RNA (1)...(19): siRNA sense strand
aaggagagaugguggauua

SEQ ID NO: 442997 - RNA, 19 nt, Homo sapiens
  misc_RNA (1)...(19): siRNA sense strand
cagcugggcuuccugguuu

SEQ ID NO: 442998 - RNA, 19 nt, Homo sapiens
  misc_RNA (1)...(19): siRNA sense strand
ccaaagacaucuccaggau

SEQ ID NO: 442999 - RNA, 19 nt, Homo sapiens
  misc_RNA (1)...(19): siRNA sense strand
gagagaugguggauuacaa

SEQ ID NO: 443000 - RNA, 19 nt, Homo sapiens
  misc_RNA (1)...(19): siRNA sense strand
aaagggaccucgcgguaaa

SEQ ID NO: 443001 - RNA, 19 nt, Homo sapiens
  misc_RNA (1)...(19): siRNA sense strand
gaugguggauuacaaugga

SEQ ID NO: 443002 - RNA, 19 nt, Homo sapiens
  misc_RNA (1)...(19): siRNA sense strand
ggauuacaauggaaacauc

SEQ ID NO: 443003 - RNA, 19 nt, Homo sapiens
  misc_RNA (1)...(19): siRNA sense strand
caagggagaaccagggaaa

SEQ ID NO: 443004 - RNA, 19 nt, Homo sapiens
  misc_RNA (1)...(19): siRNA sense strand
ggaagcaggacuagaugga

SEQ ID NO: 443005 - RNA, 19 nt, Homo sapiens
  misc_RNA (1)...(19): siRNA sense strand
caaggcugcuggaacaagu

SEQ ID NO: 443006 - RNA, 19 nt, Homo sapiens
  misc_RNA (1)...(19): siRNA sense strand
gggagaagcaggugucgau

SEQ ID NO: 443007 - RNA, 19 nt, Homo sapiens
  misc_RNA (1)...(19): siRNA sense strand
ggagaacagggaccagaug

SEQ ID NO: 443008 - RNA, 19 nt, Homo sapiens
  misc_RNA (1)...(19): siRNA sense strand
acaauggaaacaucaauga

SEQ ID NO: 443009 - RNA, 19 nt, Homo sapiens
  misc_RNA (1)...(19): siRNA sense strand
gaaaggagagaugguggau

SEQ ID NO: 443010 - RNA, 19 nt, Homo sapiens
  misc_RNA (1)...(19): siRNA sense strand
cuagagguuucccuggauu

SEQ ID NO: 443011 - RNA, 19 nt, Homo sapiens
  misc_RNA (1)...(19): siRNA sense strand
gcaaauggagacggcuauu

SEQ ID NO: 443012 - RNA, 19 nt, Homo sapiens
  misc_RNA (1)...(19): siRNA sense strand
gaaaggcuuccagggagaa

SEQ ID NO: 443013 - RNA, 19 nt, Homo sapiens
  misc_RNA (1)...(19): siRNA sense strand
gcagcugggcuuccugguu

SEQ ID NO: 443014 - RNA, 19 nt, Homo sapiens
  misc_RNA (1)...(19): siRNA sense strand
ggagagaugguggauuaca

SEQ ID NO: 443015 - RNA, 19 nt, Homo sapiens
  misc_RNA (1)...(19): siRNA sense strand
gaugcuggcaacuccauug

SEQ ID NO: 443016 - RNA, 19 nt, Homo sapiens
  misc_RNA (1)...(19): siRNA sense strand
gcguggagcagcuggagaa

SEQ ID NO: 443017 - RNA, 19 nt, Homo sapiens
  misc_RNA (1)...(19): siRNA sense strand
uggagcagcuggagaacag

SEQ ID NO: 443018 - RNA, 19 nt, Homo sapiens
  misc_RNA (1)...(19): siRNA sense strand
ggauuuccgggucccauug

SEQ ID NO: 443019 - RNA, 19 nt, Homo sapiens
  misc_RNA (1)...(19): siRNA sense strand
gagaugguggauuacaaug

SEQ ID NO: 443020 - RNA, 19 nt, Homo sapiens
  misc_RNA (1)...(19): siRNA sense strand
uagcggagcgcacccacaa

SEQ ID NO: 443021 - RNA, 19 nt, Homo sapiens
  misc_RNA (1)...(19): siRNA sense strand
gggagaaccagggaaagga

SEQ ID NO: 443022 - RNA, 19 nt, Homo sapiens
  misc_RNA (1)...(19): siRNA sense strand
gagccaggccagcauccaa

SEQ ID NO: 443023 - RNA, 19 nt, Homo sapiens
  misc_RNA (1)...(19): siRNA sense strand
gguacuccaggaccaauug

SEQ ID NO: 443024 - RNA, 19 nt, Homo sapiens
  misc_RNA (1)...(19): siRNA sense strand
aaaggagacccugggauga

SEQ ID NO: 443025 - RNA, 19 nt, Homo sapiens
  misc_RNA (1)...(19): siRNA sense strand
gagccagggaucccaggaa

SEQ ID NO: 443026 - RNA, 19 nt, Homo sapiens
  misc_RNA (1)...(19): siRNA sense strand
gaaccagggaaaggagaga

SEQ ID NO: 443027 - RNA, 19 nt, Homo sapiens
  misc_RNA (1)...(19): siRNA sense strand
gauuacaauggaaacauca

SEQ ID NO: 443028 - RNA, 19 nt, Homo sapiens
  misc_RNA (1)...(19): siRNA sense strand
ggucaaccaggaacuagag

SEQ ID NO: 443029 - RNA, 19 nt, Homo sapiens
  misc_RNA (1)...(19): siRNA sense strand
aaggagagaugguggauua

SEQ ID NO: 443030 - RNA, 19 nt, Homo sapiens
  misc_RNA (1)...(19): siRNA sense strand
cagcugggcuuccugguuu

SEQ ID NO: 443031 - RNA, 19 nt, Homo sapiens
  misc_RNA (1)...(19): siRNA sense strand
ccaaagacaucuccaggau

SEQ ID NO: 443032 - RNA, 19 nt, Homo sapiens
  misc_RNA (1)...(19): siRNA sense strand
gagagaugguggauuacaa

SEQ ID NO: 443033 - RNA, 19 nt, Homo sapiens
  misc_RNA (1)...(19): siRNA sense strand
aaagggaccucgcgguaaa

SEQ ID NO: 443034 - RNA, 19 nt, Homo sapiens
  misc_RNA (1)...(19): siRNA sense strand
gaugguggauuacaaugga

SEQ ID NO: 443035 - RNA, 19 nt, Homo sapiens
  misc_RNA (1)...(19): siRNA sense strand
ggauuacaauggaaacauc

SEQ ID NO: 443036 - RNA, 19 nt, Homo sapiens
  misc_RNA (1)...(19): siRNA sense strand
caagggagaaccagggaaa

SEQ ID NO: 443037 - RNA, 19 nt, Homo sapiens
  misc_RNA (1)...(19): siRNA sense strand
ggaagcaggacuagaugga

SEQ ID NO: 443038 - RNA, 19 nt, Homo sapiens
  misc_RNA (1)...(19): siRNA sense strand
caaggcugcuggaacaagu

SEQ ID NO: 443039 - RNA, 19 nt, Homo sapiens
  misc_RNA (1)...(19): siRNA sense strand
gggagaagcaggugucgau

SEQ ID NO: 443040 - RNA, 19 nt, Homo sapiens
  misc_RNA (1)...(19): siRNA sense strand
ggagaacagggaccagaug

SEQ ID NO: 443041 - RNA, 19 nt, Homo sapiens
  misc_RNA (1)...(19): siRNA sense strand
acaauggaaacaucaauga

SEQ ID NO: 443042 - RNA, 19 nt, Homo sapiens
  misc_RNA (1)...(19): siRNA sense strand
gaaaggagagaugguggau

SEQ ID NO: 443043 - RNA, 19 nt, Homo sapiens
  misc_RNA (1)...(19): siRNA sense strand
cuagagguuucccuggauu

SEQ ID NO: 443044 - RNA, 19 nt, Homo sapiens
  misc_RNA (1)...(19): siRNA sense strand
gcaaauggagacggcuauu

SEQ ID NO: 443045 - RNA, 19 nt, Homo sapiens
  misc_RNA (1)...(19): siRNA sense strand
gaaaggcuuccagggagaa

SEQ ID NO: 443046 - RNA, 19 nt, Homo sapiens
  misc_RNA (1)...(19): siRNA sense strand
gcagcugggcuuccugguu

SEQ ID NO: 443047 - RNA, 19 nt, Homo sapiens
  misc_RNA (1)...(19): siRNA sense strand
ggagagaugguggauuaca

SEQ ID NO: 443048 - RNA, 19 nt, Homo sapiens
  misc_RNA (1)...(19): siRNA sense strand
gaugcuggcaacuccauug

SEQ ID NO: 443049 - RNA, 19 nt, Homo sapiens
  misc_RNA (1)...(19): siRNA sense strand
gcguggagcagcuggagaa

SEQ ID NO: 443050 - RNA, 19 nt, Homo sapiens
  misc_RNA (1)...(19): siRNA sense strand
uggagcagcuggagaacag

SEQ ID NO: 443051 - RNA, 19 nt, Homo sapiens
  misc_RNA (1)...(19): siRNA sense strand
ggauuuccgggucccauug

SEQ ID NO: 443052 - RNA, 19 nt, Homo sapiens
  misc_RNA (1)...(19): siRNA sense strand
gagaugguggauuacaaug

SEQ ID NO: 443053 - RNA, 19 nt, Homo sapiens
  misc_RNA (1)...(19): siRNA sense strand
uagcggagcgcacccacaa

SEQ ID NO: 443054 - RNA, 19 nt, Homo sapiens
  misc_RNA (1)...(19): siRNA sense strand
gggagaaccagggaaagga

SEQ ID NO: 443055 - RNA, 19 nt, Homo sapiens
  misc_RNA (1)...(19): siRNA sense strand
gagccaggccagcauccaa

SEQ ID NO: 443056 - RNA, 19 nt, Homo sapiens
  misc_RNA (1)...(19): siRNA sense strand
gguacuccaggaccaauug

SEQ ID NO: 443057 - RNA, 19 nt, Homo sapiens
  misc_RNA (1)...(19): siRNA sense strand
aaaggagacccugggauga

SEQ ID NO: 443058 - RNA, 19 nt, Homo sapiens
  misc_RNA (1)...(19): siRNA sense strand
gagccagggaucccaggaa

SEQ ID NO: 443059 - RNA, 19 nt, Homo sapiens
  misc_RNA (1)...(19): siRNA sense strand
gaaccagggaaaggagaga

SEQ ID NO: 443060 - RNA, 19 nt, Homo sapiens
  misc_RNA (1)...(19): siRNA sense strand
gauuacaauggaaacauca

SEQ ID NO: 443061 - RNA, 19 nt, Homo sapiens
  misc_RNA (1)...(19): siRNA sense strand
ggucaaccaggaacuagag

SEQ ID NO: 443062 - RNA, 19 nt, Homo sapiens
  misc_RNA (1)...(19): siRNA sense strand
aaggagagaugguggauua

SEQ ID NO: 443063 - RNA, 19 nt, Homo sapiens
  misc_RNA (1)...(19): siRNA sense strand
cagcugggcuuccugguuu

SEQ ID NO: 443064 - RNA, 19 nt, Homo sapiens
  misc_RNA (1)...(19): siRNA sense strand
ccaaagacaucuccaggau

SEQ ID NO: 443065 - RNA, 19 nt, Homo sapiens
  misc_RNA (1)...(19): siRNA sense strand
gagagaugguggauuacaa

SEQ ID NO: 443066 - RNA, 19 nt, Homo sapiens
  misc_RNA (1)...(19): siRNA sense strand
aaagggaccucgcgguaaa

SEQ ID NO: 443067 - RNA, 19 nt, Homo sapiens
  misc_RNA (1)...(19): siRNA sense strand
gaugguggauuacaaugga

SEQ ID NO: 443068 - RNA, 19 nt, Homo sapiens
  misc_RNA (1)...(19): siRNA sense strand
ggauuacaauggaaacauc

SEQ ID NO: 443069 - RNA, 19 nt, Homo sapiens
  misc_RNA (1)...(19): siRNA sense strand
caagggagaaccagggaaa

SEQ ID NO: 443070 - RNA, 19 nt, Homo sapiens
  misc_RNA (1)...(19): siRNA sense strand
ggaagcaggacuagaugga

SEQ ID NO: 443071 - RNA, 19 nt, Homo sapiens
  misc_RNA (1)...(19): siRNA sense strand
caaggcugcuggaacaagu

SEQ ID NO: 443072 - RNA, 19 nt, Homo sapiens
  misc_RNA (1)...(19): siRNA sense strand
gggagaagcaggugucgau

SEQ ID NO: 443073 - RNA, 19 nt, Homo sapiens
  misc_RNA (1)...(19): siRNA sense strand
ggagaacagggaccagaug

SEQ ID NO: 443074 - RNA, 19 nt, Homo sapiens
  misc_RNA (1)...(19): siRNA sense strand
acaauggaaacaucaauga

SEQ ID NO: 443075 - RNA, 19 nt, Homo sapiens
  misc_RNA (1)...(19): siRNA sense strand
gaaaggagagaugguggau

SEQ ID NO: 443076 - RNA, 19 nt, Homo sapiens
  misc_RNA (1)...(19): siRNA sense strand
cuagagguuucccuggauu

SEQ ID NO: 443077 - RNA, 19 nt, Homo sapiens
  misc_RNA (1)...(19): siRNA sense strand
gcaaauggagacggcuauu

SEQ ID NO: 443078 - RNA, 19 nt, Homo sapiens
  misc_RNA (1)...(19): siRNA sense strand
gaaaggcuuccagggagaa

SEQ ID NO: 443079 - RNA, 19 nt, Homo sapiens
  misc_RNA (1)...(19): siRNA sense strand
gcagcugggcuuccugguu

SEQ ID NO: 443080 - RNA, 19 nt, Homo sapiens
  misc_RNA (1)...(19): siRNA sense strand
ggagagaugguggauuaca

SEQ ID NO: 443081 - RNA, 19 nt, Homo sapiens
  misc_RNA (1)...(19): siRNA sense strand
gaugcuggcaacuccauug

SEQ ID NO: 443082 - RNA, 19 nt, Homo sapiens
  misc_RNA (1)...(19): siRNA sense strand
gcguggagcagcuggagaa

SEQ ID NO: 443083 - RNA, 19 nt, Homo sapiens
  misc_RNA (1)...(19): siRNA sense strand
uggagcagcuggagaacag

SEQ ID NO: 443084 - RNA, 19 nt, Homo sapiens
  misc_RNA (1)...(19): siRNA sense strand
ggauuuccgggucccauug

SEQ ID NO: 443085 - RNA, 19 nt, Homo sapiens
  misc_RNA (1)...(19): siRNA sense strand
gagaugguggauuacaaug

SEQ ID NO: 443086 - RNA, 19 nt, Homo sapiens
  misc_RNA (1)...(19): siRNA sense strand
uagcggagcgcacccacaa

SEQ ID NO: 443087 - RNA, 19 nt, Homo sapiens
  misc_RNA (1)...(19): siRNA sense strand
gggagaaccagggaaagga

SEQ ID NO: 443088 - RNA, 19 nt, Homo sapiens
  misc_RNA (1)...(19): siRNA sense strand
gagccaggccagcauccaa

SEQ ID NO: 443089 - RNA, 19 nt, Homo sapiens
  misc_RNA (1)...(19): siRNA sense strand
gguacuccaggaccaauug

SEQ ID NO: 443090 - RNA, 19 nt, Homo sapiens
  misc_RNA (1)...(19): siRNA sense strand
aaaggagacccugggauga

SEQ ID NO: 443091 - RNA, 19 nt, Homo sapiens
  misc_RNA (1)...(19): siRNA sense strand
gagccagggaucccaggaa

SEQ ID NO: 443092 - RNA, 19 nt, Homo sapiens
  misc_RNA (1)...(19): siRNA sense strand
gaaccagggaaaggagaga

SEQ ID NO: 443093 - RNA, 19 nt, Homo sapiens
  misc_RNA (1)...(19): siRNA sense strand
gauuacaauggaaacauca

SEQ ID NO: 443094 - RNA, 19 nt, Homo sapiens
  misc_RNA (1)...(19): siRNA sense strand
ggucaaccaggaacuagag

SEQ ID NO: 443095 - RNA, 19 nt, Homo sapiens
  misc_RNA (1)...(19): siRNA sense strand
aaggagagaugguggauua

SEQ ID NO: 443096 - RNA, 19 nt, Homo sapiens
  misc_RNA (1)...(19): siRNA sense strand
cagcugggcuuccugguuu

SEQ ID NO: 443097 - RNA, 19 nt, Homo sapiens
  misc_RNA (1)...(19): siRNA sense strand
ccaaagacaucuccaggau

SEQ ID NO: 443098 - RNA, 19 nt, Homo sapiens
  misc_RNA (1)...(19): siRNA sense strand
gagagaugguggauuacaa

SEQ ID NO: 443099 - RNA, 19 nt, Homo sapiens
  misc_RNA (1)...(19): siRNA sense strand
aaagggaccucgcgguaaa

SEQ ID NO: 443100 - RNA, 19 nt, Homo sapiens
  misc_RNA (1)...(19): siRNA sense strand
gaugguggauuacaaugga

SEQ ID NO: 443101 - RNA, 19 nt, Homo sapiens
  misc_RNA (1)...(19): siRNA sense strand
ggauuacaauggaaacauc

SEQ ID NO: 443102 - RNA, 19 nt, Homo sapiens
  misc_RNA (1)...(19): siRNA sense strand
caagggagaaccagggaaa

SEQ ID NO: 443103 - RNA, 19 nt, Homo sapiens
  misc_RNA (1)...(19): siRNA sense strand
ggaagcaggacuagaugga

SEQ ID NO: 443104 - RNA, 19 nt, Homo sapiens
  misc_RNA (1)...(19): siRNA sense strand
caaggcugcuggaacaagu

SEQ ID NO: 443105 - RNA, 19 nt, Homo sapiens
  misc_RNA (1)...(19): siRNA sense strand
gggagaagcaggugucgau

SEQ ID NO: 443106 - RNA, 19 nt, Homo sapiens
  misc_RNA (1)...(19): siRNA sense strand
ggagaacagggaccagaug

SEQ ID NO: 443107 - RNA, 19 nt, Homo sapiens
  misc_RNA (1)...(19): siRNA sense strand
acaauggaaacaucaauga

SEQ ID NO: 443108 - RNA, 19 nt, Homo sapiens
  misc_RNA (1)...(19): siRNA sense strand
gaaaggagagaugguggau

SEQ ID NO: 443109 - RNA, 19 nt, Homo sapiens
  misc_RNA (1)...(19): siRNA sense strand
cuagagguuucccuggauu

SEQ ID NO: 443110 - RNA, 19 nt, Homo sapiens
  misc_RNA (1)...(19): siRNA sense strand
gcaaauggagacggcuauu

SEQ ID NO: 443111 - RNA, 19 nt, Homo sapiens
  misc_RNA (1)...(19): siRNA sense strand
gaaaggcuuccagggagaa

SEQ ID NO: 443112 - RNA, 19 nt, Homo sapiens
  misc_RNA (1)...(19): siRNA sense strand
gcagcugggcuuccugguu

SEQ ID NO: 443113 - RNA, 19 nt, Homo sapiens
  misc_RNA (1)...(19): siRNA sense strand
ggagagaugguggauuaca

SEQ ID NO: 443114 - RNA, 19 nt, Homo sapiens
  misc_RNA (1)...(19): siRNA sense strand
gaugcuggcaacuccauug

SEQ ID NO: 443115 - RNA, 19 nt, Homo sapiens
  misc_RNA (1)...(19): siRNA sense strand
gcguggagcagcuggagaa

SEQ ID NO: 443116 - RNA, 19 nt, Homo sapiens
  misc_RNA (1)...(19): siRNA sense strand
uggagcagcuggagaacag

SEQ ID NO: 443117 - RNA, 19 nt, Homo sapiens
  misc_RNA (1)...(19): siRNA sense strand
ggauuuccgggucccauug

SEQ ID NO: 443118 - RNA, 19 nt, Homo sapiens
  misc_RNA (1)...(19): siRNA sense strand
gagaugguggauuacaaug

SEQ ID NO: 443119 - RNA, 19 nt, Homo sapiens
  misc_RNA (1)...(19): siRNA sense strand
uagcggagcgcacccacaa

SEQ ID NO: 443120 - RNA, 19 nt, Homo sapiens
  misc_RNA (1)...(19): siRNA sense strand
gggagaaccagggaaagga

SEQ ID NO: 443121 - RNA, 19 nt, Homo sapiens
  misc_RNA (1)...(19): siRNA sense strand
gagccaggccagcauccaa

SEQ ID NO: 443122 - RNA, 19 nt, Homo sapiens
  misc_RNA (1)...(19): siRNA sense strand
gguacuccaggaccaauug

SEQ ID NO: 443123 - RNA, 19 nt, Homo sapiens
  misc_RNA (1)...(19): siRNA sense strand
aaaggagacccugggauga

SEQ ID NO: 443124 - RNA, 19 nt, Homo sapiens
  misc_RNA (1)...(19): siRNA sense strand
gagccagggaucccaggaa

SEQ ID NO: 443125 - RNA, 19 nt, Homo sapiens
  misc_RNA (1)...(19): siRNA sense strand
gaaccagggaaaggagaga

SEQ ID NO: 443126 - RNA, 19 nt, Homo sapiens
  misc_RNA (1)...(19): siRNA sense strand
gauuacaauggaaacauca

SEQ ID NO: 443127 - RNA, 19 nt, Homo sapiens
  misc_RNA (1)...(19): siRNA sense strand
ggucaaccaggaacuagag

SEQ ID NO: 443128 - RNA, 19 nt, Homo sapiens
  misc_RNA (1)...(19): siRNA sense strand
aaggagagaugguggauua

SEQ ID NO: 443129 - RNA, 19 nt, Homo sapiens
  misc_RNA (1)...(19): siRNA sense strand
cagcugggcuuccugguuu

SEQ ID NO: 443130 - RNA, 19 nt, Homo sapiens
  misc_RNA (1)...(19): siRNA sense strand
ccaaagacaucuccaggau

SEQ ID NO: 443131 - RNA, 19 nt, Homo sapiens
  misc_RNA (1)...(19): siRNA sense strand
gagagaugguggauuacaa

SEQ ID NO: 443132 - RNA, 19 nt, Homo sapiens
  misc_RNA (1)...(19): siRNA sense strand
aaagggaccucgcgguaaa

SEQ ID NO: 443133 - RNA, 19 nt, Homo sapiens
  misc_RNA (1)...(19): siRNA sense strand
gaugguggauuacaaugga

SEQ ID NO: 443134 - RNA, 19 nt, Homo sapiens
  misc_RNA (1)...(19): siRNA sense strand
ggauuacaauggaaacauc

SEQ ID NO: 443135 - RNA, 19 nt, Homo sapiens
  misc_RNA (1)...(19): siRNA sense strand
caagggagaaccagggaaa

SEQ ID NO: 443136 - RNA, 19 nt, Homo sapiens
  misc_RNA (1)...(19): siRNA sense strand
ggaagcaggacuagaugga

SEQ ID NO: 443137 - RNA, 19 nt, Homo sapiens
  misc_RNA (1)...(19): siRNA sense strand
caaggcugcuggaacaagu

SEQ ID NO: 443138 - RNA, 19 nt, Homo sapiens
  misc_RNA (1)...(19): siRNA sense strand
gggagaagcaggugucgau

SEQ ID NO: 443139 - RNA, 19 nt, Homo sapiens
  misc_RNA (1)...(19): siRNA sense strand
ggagaacagggaccagaug

SEQ ID NO: 443140 - RNA, 19 nt, Homo sapiens
  misc_RNA (1)...(19): siRNA sense strand
acaauggaaacaucaauga

SEQ ID NO: 443141 - RNA, 19 nt, Homo sapiens
  misc_RNA (1)...(19): siRNA sense strand
gaaaggagagaugguggau

SEQ ID NO: 443142 - RNA, 19 nt, Homo sapiens
  misc_RNA (1)...(19): siRNA sense strand
cuagagguuucccuggauu

SEQ ID NO: 443143 - RNA, 19 nt, Homo sapiens
  misc_RNA (1)...(19): siRNA sense strand
gcaaauggagacggcuauu

SEQ ID NO: 443144 - RNA, 19 nt, Homo sapiens
  misc_RNA (1)...(19): siRNA sense strand
gaaaggcuuccagggagaa

SEQ ID NO: 443145 - RNA, 19 nt, Homo sapiens
  misc_RNA (1)...(19): siRNA sense strand
gcagcugggcuuccugguu

SEQ ID NO: 443146 - RNA, 19 nt, Homo sapiens
  misc_RNA (1)...(19): siRNA sense strand
ggagagaugguggauuaca

SEQ ID NO: 443147 - RNA, 19 nt, Homo sapiens
  misc_RNA (1)...(19): siRNA sense strand
gaugcuggcaacuccauug

SEQ ID NO: 443148 - RNA, 19 nt, Homo sapiens
  misc_RNA (1)...(19): siRNA sense strand
gcguggagcagcuggagaa

SEQ ID NO: 443149 - RNA, 19 nt, Homo sapiens
  misc_RNA (1)...(19): siRNA sense strand
uggagcagcuggagaacag

SEQ ID NO: 443150 - RNA, 19 nt, Homo sapiens
  misc_RNA (1)...(19): siRNA sense strand
ggauuuccgggucccauug

SEQ ID NO: 443151 - RNA, 19 nt, Homo sapiens
  misc_RNA (1)...(19): siRNA sense strand
gagaugguggauuacaaug

SEQ ID NO: 443152 - RNA, 19 nt, Homo sapiens
  misc_RNA (1)...(19): siRNA sense strand
uagcggagcgcacccacaa

SEQ ID NO: 443153 - RNA, 19 nt, Homo sapiens
  misc_RNA (1)...(19): siRNA sense strand
gggagaaccagggaaagga

SEQ ID NO: 443154 - RNA, 19 nt, Homo sapiens
  misc_RNA (1)...(19): siRNA sense strand
gagccaggccagcauccaa

SEQ ID NO: 443155 - RNA, 19 nt, Homo sapiens
  misc_RNA (1)...(19): siRNA sense strand
gguacuccaggaccaauug

SEQ ID NO: 443156 - RNA, 19 nt, Homo sapiens
  misc_RNA (1)...(19): siRNA sense strand
aaaggagacccugggauga

SEQ ID NO: 443157 - RNA, 19 nt, Homo sapiens
  misc_RNA (1)...(19): siRNA sense strand
gagccagggaucccaggaa

SEQ ID NO: 443158 - RNA, 19 nt, Homo sapiens
  misc_RNA (1)...(19): siRNA sense strand
gaaccagggaaaggagaga

SEQ ID NO: 443159 - RNA, 19 nt, Homo sapiens
  misc_RNA (1)...(19): siRNA sense strand
gauuacaauggaaacauca

SEQ ID NO: 443160 - RNA, 19 nt, Homo sapiens
  misc_RNA (1)...(19): siRNA sense strand
ggucaaccaggaacuagag

SEQ ID NO: 443161 - RNA, 19 nt, Homo sapiens
  misc_RNA (1)...(19): siRNA sense strand
aaggagagaugguggauua

SEQ ID NO: 443162 - RNA, 19 nt, Homo sapiens
  misc_RNA (1)...(19): siRNA sense strand
cagcugggcuuccugguuu

SEQ ID NO: 443163 - RNA, 19 nt, Homo sapiens
  misc_RNA (1)...(19): siRNA sense strand
ccaaagacaucuccaggau

SEQ ID NO: 443164 - RNA, 19 nt, Homo sapiens
  misc_RNA (1)...(19): siRNA sense strand
gagagaugguggauuacaa

SEQ ID NO: 443165 - RNA, 19 nt, Homo sapiens
  misc_RNA (1)...(19): siRNA sense strand
aaagggaccucgcgguaaa

SEQ ID NO: 443166 - RNA, 19 nt, Homo sapiens
  misc_RNA (1)...(19): siRNA sense strand
gaugguggauuacaaugga

SEQ ID NO: 443167 - RNA, 19 nt, Homo sapiens
  misc_RNA (1)...(19): siRNA sense strand
ggauuacaauggaaacauc

SEQ ID NO: 443168 - RNA, 19 nt, Homo sapiens
  misc_RNA (1)...(19): siRNA sense strand
caagggagaaccagggaaa

SEQ ID NO: 443169 - RNA, 19 nt, Homo sapiens
  misc_RNA (1)...(19): siRNA sense strand
ggaagcaggacuagaugga

SEQ ID NO: 443170 - RNA, 19 nt, Homo sapiens
  misc_RNA (1)...(19): siRNA sense strand
caaggcugcuggaacaagu

SEQ ID NO: 443171 - RNA, 19 nt, Homo sapiens
  misc_RNA (1)...(19): siRNA sense strand
gggagaagcaggugucgau

SEQ ID NO: 443172 - RNA, 19 nt, Homo sapiens
  misc_RNA (1)...(19): siRNA sense strand
ggagaacagggaccagaug

SEQ ID NO: 443173 - RNA, 19 nt, Homo sapiens
  misc_RNA (1)...(19): siRNA sense strand
acaauggaaacaucaauga

SEQ ID NO: 443174 - RNA, 19 nt, Homo sapiens
  misc_RNA (1)...(19): siRNA sense strand
gaaaggagagaugguggau

SEQ ID NO: 443175 - RNA, 19 nt, Homo sapiens
  misc_RNA (1)...(19): siRNA sense strand
cuagagguuucccuggauu

SEQ ID NO: 443176 - RNA, 19 nt, Homo sapiens
  misc_RNA (1)...(19): siRNA sense strand
gcaaauggagacggcuauu

SEQ ID NO: 443177 - RNA, 19 nt, Homo sapiens
  misc_RNA (1)...(19): siRNA sense strand
gaaaggcuuccagggagaa

SEQ ID NO: 443178 - RNA, 19 nt, Homo sapiens
  misc_RNA (1)...(19): siRNA sense strand
gcagcugggcuuccugguu

SEQ ID NO: 443179 - RNA, 19 nt, Homo sapiens
  misc_RNA (1)...(19): siRNA sense strand
ggagagaugguggauuaca

SEQ ID NO: 443180 - RNA, 19 nt, Homo sapiens
  misc_RNA (1)...(19): siRNA sense strand
gaugcuggcaacuccauug

SEQ ID NO: 443181 - RNA, 19 nt, Homo sapiens
  misc_RNA (1)...(19): siRNA sense strand
gcguggagcagcuggagaa

SEQ ID NO: 443182 - RNA, 19 nt, Homo sapiens
  misc_RNA (1)...(19): siRNA sense strand
uggagcagcuggagaacag

SEQ ID NO: 443183 - RNA, 19 nt, Homo sapiens
  misc_RNA (1)...(19): siRNA sense strand
ggauuuccgggucccauug

SEQ ID NO: 443184 - RNA, 19 nt, Homo sapiens
  misc_RNA (1)...(19): siRNA sense strand
gagaugguggauuacaaug

SEQ ID NO: 443185 - RNA, 19 nt, Homo sapiens
  misc_RNA (1)...(19): siRNA sense strand
uagcggagcgcacccacaa

SEQ ID NO: 443186 - RNA, 19 nt, Homo sapiens
  misc_RNA (1)...(19): siRNA sense strand
gggagaaccagggaaagga

SEQ ID NO: 443187 - RNA, 19 nt, Homo sapiens
  misc_RNA (1)...(19): siRNA sense strand
gagccaggccagcauccaa

SEQ ID NO: 443188 - RNA, 19 nt, Homo sapiens
  misc_RNA (1)...(19): siRNA sense strand
gguacuccaggaccaauug

SEQ ID NO: 443189 - RNA, 19 nt, Homo sapiens
  misc_RNA (1)...(19): siRNA sense strand
aaaggagacccugggauga

SEQ ID NO: 443190 - RNA, 19 nt, Homo sapiens
  misc_RNA (1)...(19): siRNA sense strand
gagccagggaucccaggaa

SEQ ID NO: 443191 - RNA, 19 nt, Homo sapiens
  misc_RNA (1)...(19): siRNA sense strand
gaaccagggaaaggagaga

SEQ ID NO: 443192 - RNA, 19 nt, Homo sapiens
  misc_RNA (1)...(19): siRNA sense strand
gauuacaauggaaacauca

SEQ ID NO: 443193 - RNA, 19 nt, Homo sapiens
  misc_RNA (1)...(19): siRNA sense strand
ggucaaccaggaacuagag

SEQ ID NO: 443194 - RNA, 19 nt, Homo sapiens
  misc_RNA (1)...(19): siRNA sense strand
aaggagagaugguggauua

SEQ ID NO: 443195 - RNA, 19 nt, Homo sapiens
  misc_RNA (1)...(19): siRNA sense strand
cagcugggcuuccugguuu

SEQ ID NO: 443196 - RNA, 19 nt, Homo sapiens
  misc_RNA (1)...(19): siRNA sense strand
ccaaagacaucuccaggau

SEQ ID NO: 443197 - RNA, 19 nt, Homo sapiens
  misc_RNA (1)...(19): siRNA sense strand
gagagaugguggauuacaa

SEQ ID NO: 443198 - RNA, 19 nt, Homo sapiens
  misc_RNA (1)...(19): siRNA sense strand
aaagggaccucgcgguaaa

SEQ ID NO: 443199 - RNA, 19 nt, Homo sapiens
  misc_RNA (1)...(19): siRNA sense strand
gaugguggauuacaaugga

SEQ ID NO: 443200 - RNA, 19 nt, Homo sapiens
  misc_RNA (1)...(19): siRNA sense strand
ggauuacaauggaaacauc

SEQ ID NO: 443201 - RNA, 19 nt, Homo sapiens
  misc_RNA (1)...(19): siRNA sense strand
caagggagaaccagggaaa

SEQ ID NO: 443202 - RNA, 19 nt, Homo sapiens
  misc_RNA (1)...(19): siRNA sense strand
ggaagcaggacuagaugga

SEQ ID NO: 443203 - RNA, 19 nt, Homo sapiens
  misc_RNA (1)...(19): siRNA sense strand
caaggcugcuggaacaagu

SEQ ID NO: 443204 - RNA, 19 nt, Homo sapiens
  misc_RNA (1)...(19): siRNA sense strand
gggagaagcaggugucgau

SEQ ID NO: 443205 - RNA, 19 nt, Homo sapiens
  misc_RNA (1)...(19): siRNA sense strand
ggagaacagggaccagaug

SEQ ID NO: 443206 - RNA, 19 nt, Homo sapiens
  misc_RNA (1)...(19): siRNA sense strand
acaauggaaacaucaauga

SEQ ID NO: 443207 - RNA, 19 nt, Homo sapiens
  misc_RNA (1)...(19): siRNA sense strand
gaaaggagagaugguggau

SEQ ID NO: 443208 - RNA, 19 nt, Homo sapiens
  misc_RNA (1)...(19): siRNA sense strand
cuagagguuucccuggauu

SEQ ID NO: 443209 - RNA, 19 nt, Homo sapiens
  misc_RNA (1)...(19): siRNA sense strand
gcaaauggagacggcuauu

SEQ ID NO: 443210 - RNA, 19 nt, Homo sapiens
  misc_RNA (1)...(19): siRNA sense strand
gaaaggcuuccagggagaa

SEQ ID NO: 443211 - RNA, 19 nt, Homo sapiens
  misc_RNA (1)...(19): siRNA sense strand
gcagcugggcuuccugguu

SEQ ID NO: 443212 - RNA, 19 nt, Homo sapiens
  misc_RNA (1)...(19): siRNA sense strand
ggagagaugguggauuaca

SEQ ID NO: 443213 - RNA, 19 nt, Homo sapiens
  misc_RNA (1)...(19): siRNA sense strand
gaugcuggcaacuccauug

SEQ ID NO: 443214 - RNA, 19 nt, Homo sapiens
  misc_RNA (1)...(19): siRNA sense strand
gcguggagcagcuggagaa

SEQ ID NO: 443215 - RNA, 19 nt, Homo sapiens
  misc_RNA (1)...(19): siRNA sense strand
uggagcagcuggagaacag

SEQ ID NO: 443216 - RNA, 19 nt, Homo sapiens
  misc_RNA (1)...(19): siRNA sense strand
ggauuuccgggucccauug

SEQ ID NO: 443217 - RNA, 19 nt, Homo sapiens
  misc_RNA (1)...(19): siRNA sense strand
gagaugguggauuacaaug

SEQ ID NO: 443218 - RNA, 19 nt, Homo sapiens
  misc_RNA (1)...(19): siRNA sense strand
uagcggagcgcacccacaa

SEQ ID NO: 443219 - RNA, 19 nt, Homo sapiens
  misc_RNA (1)...(19): siRNA sense strand
gggagaaccagggaaagga

SEQ ID NO: 443220 - RNA, 19 nt, Homo sapiens
  misc_RNA (1)...(19): siRNA sense strand
gagccaggccagcauccaa

SEQ ID NO: 443221 - RNA, 19 nt, Homo sapiens
  misc_RNA (1)...(19): siRNA sense strand
gguacuccaggaccaauug

SEQ ID NO: 443222 - RNA, 19 nt, Homo sapiens
  misc_RNA (1)...(19): siRNA sense strand
aaaggagacccugggauga

SEQ ID NO: 443223 - RNA, 19 nt, Homo sapiens
  misc_RNA (1)...(19): siRNA sense strand
gagccagggaucccaggaa

SEQ ID NO: 443224 - RNA, 19 nt, Homo sapiens
  misc_RNA (1)...(19): siRNA sense strand
gaaccagggaaaggagaga

SEQ ID NO: 443225 - RNA, 19 nt, Homo sapiens
  misc_RNA (1)...(19): siRNA sense strand
gauuacaauggaaacauca

SEQ ID NO: 443226 - RNA, 19 nt, Homo sapiens
  misc_RNA (1)...(19): siRNA sense strand
ggucaaccaggaacuagag

SEQ ID NO: 443227 - RNA, 19 nt, Homo sapiens
  misc_RNA (1)...(19): siRNA sense strand
aaggagagaugguggauua

SEQ ID NO: 443228 - RNA, 19 nt, Homo sapiens
  misc_RNA (1)...(19): siRNA sense strand
cagcugggcuuccugguuu

SEQ ID NO: 443229 - RNA, 19 nt, Homo sapiens
  misc_RNA (1)...(19): siRNA sense strand
ccaaagacaucuccaggau

SEQ ID NO: 443230 - RNA, 19 nt, Homo sapiens
  misc_RNA (1)...(19): siRNA sense strand
gagagaugguggauuacaa

SEQ ID NO: 443231 - RNA, 19 nt, Homo sapiens
  misc_RNA (1)...(19): siRNA sense strand
aaagggaccucgcgguaaa

SEQ ID NO: 443232 - RNA, 19 nt, Homo sapiens
  misc_RNA (1)...(19): siRNA sense strand
gaugguggauuacaaugga

SEQ ID NO: 443233 - RNA, 19 nt, Homo sapiens
  misc_RNA (1)...(19): siRNA sense strand
ggauuacaauggaaacauc

SEQ ID NO: 443234 - RNA, 19 nt, Homo sapiens
  misc_RNA (1)...(19): siRNA sense strand
caagggagaaccagggaaa

SEQ ID NO: 443235 - RNA, 19 nt, Homo sapiens
  misc_RNA (1)...(19): siRNA sense strand
ggaagcaggacuagaugga

SEQ ID NO: 443236 - RNA, 19 nt, Homo sapiens
  misc_RNA (1)...(19): siRNA sense strand
caaggcugcuggaacaagu

SEQ ID NO: 443237 - RNA, 19 nt, Homo sapiens
  misc_RNA (1)...(19): siRNA sense strand
gggagaagcaggugucgau

SEQ ID NO: 443238 - RNA, 19 nt, Homo sapiens
  misc_RNA (1)...(19): siRNA sense strand
ggagaacagggaccagaug

SEQ ID NO: 443239 - RNA, 19 nt, Homo sapiens
  misc_RNA (1)...(19): siRNA sense strand
acaauggaaacaucaauga

SEQ ID NO: 443240 - RNA, 19 nt, Homo sapiens
  misc_RNA (1)...(19): siRNA sense strand
gaaaggagagaugguggau

SEQ ID NO: 443241 - RNA, 19 nt, Homo sapiens
  misc_RNA (1)...(19): siRNA sense strand
cuagagguuucccuggauu

SEQ ID NO: 443242 - RNA, 19 nt, Homo sapiens
  misc_RNA (1)...(19): siRNA sense strand
gcaaauggagacggcuauu

SEQ ID NO: 443243 - RNA, 19 nt, Homo sapiens
  misc_RNA (1)...(19): siRNA sense strand
gaaaggcuuccagggagaa

SEQ ID NO: 443244 - RNA, 19 nt, Homo sapiens
  misc_RNA (1)...(19): siRNA sense strand
gcagcugggcuuccugguu

SEQ ID NO: 443245 - RNA, 19 nt, Homo sapiens
  misc_RNA (1)...(19): siRNA sense strand
ggagagaugguggauuaca

SEQ ID NO: 443246 - RNA, 19 nt, Homo sapiens
  misc_RNA (1)...(19): siRNA sense strand
gaugcuggcaacuccauug

SEQ ID NO: 443247 - RNA, 19 nt, Homo sapiens
  misc_RNA (1)...(19): siRNA sense strand
gcguggagcagcuggagaa

SEQ ID NO: 443248 - RNA, 19 nt, Homo sapiens
  misc_RNA (1)...(19): siRNA sense strand
uggagcagcuggagaacag

SEQ ID NO: 443249 - RNA, 19 nt, Homo sapiens
  misc_RNA (1)...(19): siRNA sense strand
ggauuuccgggucccauug

SEQ ID NO: 443250 - RNA, 19 nt, Homo sapiens
  misc_RNA (1)...(19): siRNA sense strand
gagaugguggauuacaaug

SEQ ID NO: 443251 - RNA, 19 nt, Homo sapiens
  misc_RNA (1)...(19): siRNA sense strand
uagcggagcgcacccacaa

SEQ ID NO: 443252 - RNA, 19 nt, Homo sapiens
  misc_RNA (1)...(19): siRNA sense strand
gggagaaccagggaaagga

SEQ ID NO: 443253 - RNA, 19 nt, Homo sapiens
  misc_RNA (1)...(19): siRNA sense strand
gagccaggccagcauccaa

SEQ ID NO: 443254 - RNA, 19 nt, Homo sapiens
  misc_RNA (1)...(19): siRNA sense strand
gguacuccaggaccaauug

SEQ ID NO: 443255 - RNA, 19 nt, Homo sapiens
  misc_RNA (1)...(19): siRNA sense strand
aaaggagacccugggauga

SEQ ID NO: 443256 - RNA, 19 nt, Homo sapiens
  misc_RNA (1)...(19): siRNA sense strand
gagccagggaucccaggaa

SEQ ID NO: 443257 - RNA, 19 nt, Homo sapiens
  misc_RNA (1)...(19): siRNA sense strand
gaaccagggaaaggagaga

SEQ ID NO: 443258 - RNA, 19 nt, Homo sapiens
  misc_RNA (1)...(19): siRNA sense strand
gauuacaauggaaacauca

SEQ ID NO: 443259 - RNA, 19 nt, Homo sapiens
  misc_RNA (1)...(19): siRNA sense strand
ggucaaccaggaacuagag

SEQ ID NO: 443260 - RNA, 19 nt, Homo sapiens
  misc_RNA (1)...(19): siRNA sense strand
aaggagagaugguggauua

SEQ ID NO: 443261 - RNA, 19 nt, Homo sapiens
  misc_RNA (1)...(19): siRNA sense strand
cagcugggcuuccugguuu

SEQ ID NO: 443262 - RNA, 19 nt, Homo sapiens
  misc_RNA (1)...(19): siRNA sense strand
ccaaagacaucuccaggau

SEQ ID NO: 443263 - RNA, 19 nt, Homo sapiens
  misc_RNA (1)...(19): siRNA sense strand
gagagaugguggauuacaa

SEQ ID NO: 443264 - RNA, 19 nt, Homo sapiens
  misc_RNA (1)...(19): siRNA sense strand
aaagggaccucgcgguaaa

SEQ ID NO: 443265 - RNA, 19 nt, Homo sapiens
  misc_RNA (1)...(19): siRNA sense strand
gaugguggauuacaaugga

SEQ ID NO: 443266 - RNA, 19 nt, Homo sapiens
  misc_RNA (1)...(19): siRNA sense strand
ggauuacaauggaaacauc

SEQ ID NO: 443267 - RNA, 19 nt, Homo sapiens
  misc_RNA (1)...(19): siRNA sense strand
gggcgaagauggcuuacca

SEQ ID NO: 443268 - RNA, 19 nt, Homo sapiens
  misc_RNA (1)...(19): siRNA sense strand
caagggagaaccagggaaa

SEQ ID NO: 443269 - RNA, 19 nt, Homo sapiens
  misc_RNA (1)...(19): siRNA sense strand
ggaagcaggacuagaugga

SEQ ID NO: 443270 - RNA, 19 nt, Homo sapiens
  misc_RNA (1)...(19): siRNA sense strand
caaggcugcuggaacaagu

SEQ ID NO: 443271 - RNA, 19 nt, Homo sapiens
  misc_RNA (1)...(19): siRNA sense strand
gggagaagcaggugucgau

SEQ ID NO: 443272 - RNA, 19 nt, Homo sapiens
  misc_RNA (1)...(19): siRNA sense strand
ggagaacagggaccagaug

SEQ ID NO: 443273 - RNA, 19 nt, Homo sapiens
  misc_RNA (1)...(19): siRNA sense strand
acaauggaaacaucaauga

SEQ ID NO: 443274 - RNA, 19 nt, Homo sapiens
  misc_RNA (1)...(19): siRNA sense strand
gaaaggagagaugguggau

SEQ ID NO: 443275 - RNA, 19 nt, Homo sapiens
  misc_RNA (1)...(19): siRNA sense strand
cuagagguuucccuggauu

SEQ ID NO: 443276 - RNA, 19 nt, Homo sapiens
  misc_RNA (1)...(19): siRNA sense strand
gcaaauggagacggcuauu

SEQ ID NO: 443277 - RNA, 19 nt, Homo sapiens
  misc_RNA (1)...(19): siRNA sense strand
gaaaggcuuccagggagaa

SEQ ID NO: 443278 - RNA, 19 nt, Homo sapiens
  misc_RNA (1)...(19): siRNA sense strand
gcagcugggcuuccugguu

SEQ ID NO: 443279 - RNA, 19 nt, Homo sapiens
  misc_RNA (1)...(19): siRNA sense strand
ggagagaugguggauuaca

SEQ ID NO: 443280 - RNA, 19 nt, Homo sapiens
  misc_RNA (1)...(19): siRNA sense strand
gaugcuggcaacuccauug

SEQ ID NO: 443281 - RNA, 19 nt, Homo sapiens
  misc_RNA (1)...(19): siRNA sense strand
gcguggagcagcuggagaa

SEQ ID NO: 443282 - RNA, 19 nt, Homo sapiens
  misc_RNA (1)...(19): siRNA sense strand
uggagcagcuggagaacag

SEQ ID NO: 443283 - RNA, 19 nt, Homo sapiens
  misc_RNA (1)...(19): siRNA sense strand
ggauuuccgggucccauug

SEQ ID NO: 443284 - RNA, 19 nt, Homo sapiens
  misc_RNA (1)...(19): siRNA sense strand
gagaugguggauuacaaug

SEQ ID NO: 443285 - RNA, 19 nt, Homo sapiens
  misc_RNA (1)...(19): siRNA sense strand
uagcggagcgcacccacaa

SEQ ID NO: 443286 - RNA, 19 nt, Homo sapiens
  misc_RNA (1)...(19): siRNA sense strand
gggagaaccagggaaagga

SEQ ID NO: 443287 - RNA, 19 nt, Homo sapiens
  misc_RNA (1)...(19): siRNA sense strand
gagccaggccagcauccaa

SEQ ID NO: 443288 - RNA, 19 nt, Homo sapiens
  misc_RNA (1)...(19): siRNA sense strand
gguacuccaggaccaauug

SEQ ID NO: 443289 - RNA, 19 nt, Homo sapiens
  misc_RNA (1)...(19): siRNA sense strand
aaaggagacccugggauga

SEQ ID NO: 443290 - RNA, 19 nt, Homo sapiens
  misc_RNA (1)...(19): siRNA sense strand
gagccagggaucccaggaa

SEQ ID NO: 443291 - RNA, 19 nt, Homo sapiens
  misc_RNA (1)...(19): siRNA sense strand
gaaccagggaaaggagaga

SEQ ID NO: 443292 - RNA, 19 nt, Homo sapiens
  misc_RNA (1)...(19): siRNA sense strand
gauuacaauggaaacauca

SEQ ID NO: 443293 - RNA, 19 nt, Homo sapiens
  misc_RNA (1)...(19): siRNA sense strand
ggucaaccaggaacuagag

SEQ ID NO: 443294 - RNA, 19 nt, Homo sapiens
  misc_RNA (1)...(19): siRNA sense strand
gaacguggcuuccagauaa

SEQ ID NO: 443295 - RNA, 19 nt, Homo sapiens
  misc_RNA (1)...(19): siRNA sense strand
gaagugaccucucuagaaa

SEQ ID NO: 443296 - RNA, 19 nt, Homo sapiens
  misc_RNA (1)...(19): siRNA sense strand
guaaacaucuugccuuaug

SEQ ID NO: 443297 - RNA, 19 nt, Homo sapiens
  misc_RNA (1)...(19): siRNA sense strand
gaaauuaaccggagaaugg

SEQ ID NO: 443298 - RNA, 19 nt, Homo sapiens
  misc_RNA (1)...(19): siRNA sense strand
gaagaaacggugaaugauu

SEQ ID NO: 443299 - RNA, 19 nt, Homo sapiens
  misc_RNA (1)...(19): siRNA sense strand
caacaaugcuaccacaguu

SEQ ID NO: 443300 - RNA, 19 nt, Homo sapiens
  misc_RNA (1)...(19): siRNA sense strand
caucaacgguuaccaagaa

SEQ ID NO: 443301 - RNA, 19 nt, Homo sapiens
  misc_RNA (1)...(19): siRNA sense strand
aagaaacggugaaugauuu

SEQ ID NO: 443302 - RNA, 19 nt, Homo sapiens
  misc_RNA (1)...(19): siRNA sense strand
gcaguggucugauaugugu

SEQ ID NO: 443303 - RNA, 19 nt, Homo sapiens
  misc_RNA (1)...(19): siRNA sense strand
cuagugaucguguuuauua

SEQ ID NO: 443304 - RNA, 19 nt, Homo sapiens
  misc_RNA (1)...(19): siRNA sense strand
ggaagugaccucucuagaa

SEQ ID NO: 443305 - RNA, 19 nt, Homo sapiens
  misc_RNA (1)...(19): siRNA sense strand
gaacagcaagcaccaauuc

SEQ ID NO: 443306 - RNA, 19 nt, Homo sapiens
  misc_RNA (1)...(19): siRNA sense strand
gaacgcauccuuuauugau

SEQ ID NO: 443307 - RNA, 19 nt, Homo sapiens
  misc_RNA (1)...(19): siRNA sense strand
gcucggcaguggucugaua

SEQ ID NO: 443308 - RNA, 19 nt, Homo sapiens
  misc_RNA (1)...(19): siRNA sense strand
gcauuacaauuucaccaaa

SEQ ID NO: 443309 - RNA, 19 nt, Homo sapiens
  misc_RNA (1)...(19): siRNA sense strand
gaaagggcaugaucagcau

SEQ ID NO: 443310 - RNA, 19 nt, Homo sapiens
  misc_RNA (1)...(19): siRNA sense strand
ggacguguauggcuuugug

SEQ ID NO: 443311 - RNA, 19 nt, Homo sapiens
  misc_RNA (1)...(19): siRNA sense strand
gaggacuucuggcgaauga

SEQ ID NO: 443312 - RNA, 19 nt, Homo sapiens
  misc_RNA (1)...(19): siRNA sense strand
gauuagaggaggaguuuaa

SEQ ID NO: 443313 - RNA, 19 nt, Homo sapiens
  misc_RNA (1)...(19): siRNA sense strand
gcaaaccgauaugcaguau

SEQ ID NO: 443314 - RNA, 19 nt, Homo sapiens
  misc_RNA (1)...(19): siRNA sense strand
ggaggaguuuaagaaguua

SEQ ID NO: 443315 - RNA, 19 nt, Homo sapiens
  misc_RNA (1)...(19): siRNA sense strand
aaaccgauaugcaguaugu

SEQ ID NO: 443316 - RNA, 19 nt, Homo sapiens
  misc_RNA (1)...(19): siRNA sense strand
gaagaagaaccguguuuua

SEQ ID NO: 443317 - RNA, 19 nt, Homo sapiens
  misc_RNA (1)...(19): siRNA sense strand
gcgaagagaauacagacua

SEQ ID NO: 443318 - RNA, 19 nt, Homo sapiens
  misc_RNA (1)...(19): siRNA sense strand
agagugaucauuccaguua

SEQ ID NO: 443319 - RNA, 19 nt, Homo sapiens
  misc_RNA (1)...(19): siRNA sense strand
gagaauggcagacgacaau

SEQ ID NO: 443320 - RNA, 19 nt, Homo sapiens
  misc_RNA (1)...(19): siRNA sense strand
gaccagcaacaauggauua

SEQ ID NO: 443321 - RNA, 19 nt, Homo sapiens
  misc_RNA (1)...(19): siRNA sense strand
gaauggcagacgacaauaa

SEQ ID NO: 443322 - RNA, 19 nt, Homo sapiens
  misc_RNA (1)...(19): siRNA sense strand
gugaacgcauccuuuauug

SEQ ID NO: 443323 - RNA, 19 nt, Homo sapiens
  misc_RNA (1)...(19): siRNA sense strand
gagaauacagacuauguga

SEQ ID NO: 443324 - RNA, 19 nt, Homo sapiens
  misc_RNA (1)...(19): siRNA sense strand
cagccaacaugaagaagaa

SEQ ID NO: 443325 - RNA, 19 nt, Homo sapiens
  misc_RNA (1)...(19): siRNA sense strand
acauucagcccaaauauaa

SEQ ID NO: 443326 - RNA, 19 nt, Homo sapiens
  misc_RNA (1)...(19): siRNA sense strand
guauauugaugcauucuca

SEQ ID NO: 443327 - RNA, 19 nt, Homo sapiens
  misc_RNA (1)...(19): siRNA sense strand
ggagaagugugcccaguac

SEQ ID NO: 443328 - RNA, 19 nt, Homo sapiens
  misc_RNA (1)...(19): siRNA sense strand
cgaagagaauacagacuau

SEQ ID NO: 443329 - RNA, 19 nt, Homo sapiens
  misc_RNA (1)...(19): siRNA sense strand
caaauucauugcugcacaa

SEQ ID NO: 443330 - RNA, 19 nt, Homo sapiens
  misc_RNA (1)...(19): siRNA sense strand
gaggaggaguuuaagaagu

SEQ ID NO: 443331 - RNA, 19 nt, Homo sapiens
  misc_RNA (1)...(19): siRNA sense strand
uaaccacugucaauucuuc

SEQ ID NO: 443332 - RNA, 19 nt, Homo sapiens
  misc_RNA (1)...(19): siRNA sense strand
caaccacuccagaaacuuu

SEQ ID NO: 443333 - RNA, 19 nt, Homo sapiens
  misc_RNA (1)...(19): siRNA sense strand
cggaugaucugggaacaaa

SEQ ID NO: 443334 - RNA, 19 nt, Homo sapiens
  misc_RNA (1)...(19): siRNA sense strand
aagaagaaacggugaauga

SEQ ID NO: 443335 - RNA, 19 nt, Homo sapiens
  misc_RNA (1)...(19): siRNA sense strand
cagaaccaguuaaagaaga

SEQ ID NO: 443336 - RNA, 19 nt, Homo sapiens
  misc_RNA (1)...(19): siRNA sense strand
gcaagcaccaauucuauag

SEQ ID NO: 443337 - RNA, 19 nt, Homo sapiens
  misc_RNA (1)...(19): siRNA sense strand
gaagaaggaggaggaaugu

SEQ ID NO: 443338 - RNA, 19 nt, Homo sapiens
  misc_RNA (1)...(19): siRNA sense strand
gaguggaaauccugcucua

SEQ ID NO: 443339 - RNA, 19 nt, Homo sapiens
  misc_RNA (1)...(19): siRNA sense strand
gcagcaaccacuccagaaa

SEQ ID NO: 443340 - RNA, 19 nt, Homo sapiens
  misc_RNA (1)...(19): siRNA sense strand
gcugggagccauuccaauu

SEQ ID NO: 443341 - RNA, 19 nt, Homo sapiens
  misc_RNA (1)...(19): siRNA sense strand
uaaacaucuugccuuauga

SEQ ID NO: 443342 - RNA, 19 nt, Homo sapiens
  misc_RNA (1)...(19): siRNA sense strand
caacauucagcccaaauau

SEQ ID NO: 443343 - RNA, 19 nt, Homo sapiens
  misc_RNA (1)...(19): siRNA sense strand
ggaguauauugaugcauuc

SEQ ID NO: 443344 - RNA, 19 nt, Homo sapiens
  misc_RNA (1)...(19): siRNA sense strand
acaagguggugcaggagua

SEQ ID NO: 443345 - RNA, 19 nt, Homo sapiens
  misc_RNA (1)...(19): siRNA sense strand
uaugugaacgcauccuuua

SEQ ID NO: 443346 - RNA, 19 nt, Homo sapiens
  misc_RNA (1)...(19): siRNA sense strand
gaauacagacuaugugaac

SEQ ID NO: 443347 - RNA, 19 nt, Homo sapiens
  misc_RNA (1)...(19): siRNA sense strand
gacaagaugcggacuggaa

SEQ ID NO: 443348 - RNA, 19 nt, Homo sapiens
  misc_RNA (1)...(19): siRNA sense strand
guaccuuugucgucauuga

SEQ ID NO: 443349 - RNA, 19 nt, Homo sapiens
  misc_RNA (1)...(19): siRNA sense strand
aaauccaacuucuucacua

SEQ ID NO: 443350 - RNA, 19 nt, Homo sapiens
  misc_RNA (1)...(19): siRNA sense strand
uuacagaucauuccauaug

SEQ ID NO: 443351 - RNA, 19 nt, Homo sapiens
  misc_RNA (1)...(19): siRNA sense strand
aggaggaguuuaagaaguu

SEQ ID NO: 443352 - RNA, 19 nt, Homo sapiens
  misc_RNA (1)...(19): siRNA sense strand
cagcaacaauggauuagag

SEQ ID NO: 443353 - RNA, 19 nt, Homo sapiens
  misc_RNA (1)...(19): siRNA sense strand
ggacaugaugcauacagaa

SEQ ID NO: 443354 - RNA, 19 nt, Homo sapiens
  misc_RNA (1)...(19): siRNA sense strand
cuucauucaucaacgguua

SEQ ID NO: 443355 - RNA, 19 nt, Homo sapiens
  misc_RNA (1)...(19): siRNA sense strand
gacaaugggaccacaagaa

SEQ ID NO: 443356 - RNA, 19 nt, Homo sapiens
  misc_RNA (1)...(19): siRNA sense strand
ggacccaccuauuuaacca

SEQ ID NO: 443357 - RNA, 19 nt, Homo sapiens
  misc_RNA (1)...(19): siRNA sense strand
aauccaacuucuucacuaa

SEQ ID NO: 443358 - RNA, 19 nt, Homo sapiens
  misc_RNA (1)...(19): siRNA sense strand
ggcagaaccaguuaaagaa

SEQ ID NO: 443359 - RNA, 19 nt, Homo sapiens
  misc_RNA (1)...(19): siRNA sense strand
cauaugaauucaacagagu

SEQ ID NO: 443360 - RNA, 19 nt, Homo sapiens
  misc_RNA (1)...(19): siRNA sense strand
cggcagaaccaguuaaaga

SEQ ID NO: 443361 - RNA, 19 nt, Homo sapiens
  misc_RNA (1)...(19): siRNA sense strand
gaugcggacuggaaaccuu

SEQ ID NO: 443362 - RNA, 19 nt, Homo sapiens
  misc_RNA (1)...(19): siRNA sense strand
uugaugcauucucagauua

SEQ ID NO: 443363 - RNA, 19 nt, Homo sapiens
  misc_RNA (1)...(19): siRNA sense strand
aggaguauauugaugcauu

SEQ ID NO: 443364 - RNA, 19 nt, Homo sapiens
  misc_RNA (1)...(19): siRNA sense strand
gagugaucauuccaguuaa

SEQ ID NO: 443365 - RNA, 19 nt, Homo sapiens
  misc_RNA (1)...(19): siRNA sense strand
ccaacauucagcccaaaua

SEQ ID NO: 443366 - RNA, 19 nt, Homo sapiens
  misc_RNA (1)...(19): siRNA sense strand
gugcaggaguauauugaug

SEQ ID NO: 443367 - RNA, 19 nt, Homo sapiens
  misc_RNA (1)...(19): siRNA sense strand
gguguccuauggagauauu

SEQ ID NO: 443368 - RNA, 19 nt, Homo sapiens
  misc_RNA (1)...(19): siRNA sense strand
uagaggaggaguuuaagaa

SEQ ID NO: 443369 - RNA, 19 nt, Homo sapiens
  misc_RNA (1)...(19): siRNA sense strand
aaugauuucuggcggauga

SEQ ID NO: 443370 - RNA, 19 nt, Homo sapiens
  misc_RNA (1)...(19): siRNA sense strand
cuauaggcauuacaauuuc

SEQ ID NO: 443371 - RNA, 19 nt, Homo sapiens
  misc_RNA (1)...(19): siRNA sense strand
ucacuaacuucucuuucug

SEQ ID NO: 443372 - RNA, 19 nt, Homo sapiens
  misc_RNA (1)...(19): siRNA sense strand
agaaggaggaggaauguga

SEQ ID NO: 443373 - RNA, 19 nt, Homo sapiens
  misc_RNA (1)...(19): siRNA sense strand
cagcaagcaccaauucuau

SEQ ID NO: 443374 - RNA, 19 nt, Homo sapiens
  misc_RNA (1)...(19): siRNA sense strand
gcaggaguauauugaugca

SEQ ID NO: 443375 - RNA, 19 nt, Homo sapiens
  misc_RNA (1)...(19): siRNA sense strand
ccacacaauugaggacuuc

SEQ ID NO: 443376 - RNA, 19 nt, Homo sapiens
  misc_RNA (1)...(19): siRNA sense strand
ucaaguuccucaagaaggu

SEQ ID NO: 443377 - RNA, 19 nt, Homo sapiens
  misc_RNA (1)...(19): siRNA sense strand
ucacucaguuccacuuuac

SEQ ID NO: 443378 - RNA, 19 nt, Homo sapiens
  misc_RNA (1)...(19): siRNA sense strand
caaggcugcuggaccuaug

SEQ ID NO: 443379 - RNA, 19 nt, Homo sapiens
  misc_RNA (1)...(19): siRNA sense strand
ggacaagcuggaagaggaa

SEQ ID NO: 443380 - RNA, 19 nt, Homo sapiens
  misc_RNA (1)...(19): siRNA sense strand
uuccaauucuuuccgcuua

SEQ ID NO: 443381 - RNA, 19 nt, Homo sapiens
  misc_RNA (1)...(19): siRNA sense strand
ggagccauuccaauucuuu

SEQ ID NO: 443382 - RNA, 19 nt, Homo sapiens
  misc_RNA (1)...(19): siRNA sense strand
ugaagaaggaggaggaaug

SEQ ID NO: 443383 - RNA, 19 nt, Homo sapiens
  misc_RNA (1)...(19): siRNA sense strand
caccaauucuauaggcauu

SEQ ID NO: 443384 - RNA, 19 nt, Homo sapiens
  misc_RNA (1)...(19): siRNA sense strand
ccaacaccagggagaauaa

SEQ ID NO: 443385 - RNA, 19 nt, Homo sapiens
  misc_RNA (1)...(19): siRNA sense strand
caaucaaaauccagaauga

SEQ ID NO: 443386 - RNA, 19 nt, Homo sapiens
  misc_RNA (1)...(19): siRNA sense strand
ggagcauuaucucuaugga

SEQ ID NO: 443387 - RNA, 19 nt, Homo sapiens
  misc_RNA (1)...(19): siRNA sense strand
ggagagaggccaggagaag

SEQ ID NO: 443388 - RNA, 19 nt, Homo sapiens
  misc_RNA (1)...(19): siRNA sense strand
ccaccuauuuaaccacugu

SEQ ID NO: 443389 - RNA, 19 nt, Homo sapiens
  misc_RNA (1)...(19): siRNA sense strand
gaagagaauacagacuaug

SEQ ID NO: 443390 - RNA, 19 nt, Homo sapiens
  misc_RNA (1)...(19): siRNA sense strand
gcagaaccaguuaaagaag

SEQ ID NO: 443391 - RNA, 19 nt, Homo sapiens
  misc_RNA (1)...(19): siRNA sense strand
ggaaauuaaccggagaaug

SEQ ID NO: 443392 - RNA, 19 nt, Homo sapiens
  misc_RNA (1)...(19): siRNA sense strand
aagcccuucuggagcauua

SEQ ID NO: 443393 - RNA, 19 nt, Homo sapiens
  misc_RNA (1)...(19): siRNA sense strand
cagauuaugccaacuucaa

SEQ ID NO: 443394 - RNA, 19 nt, Homo sapiens
  misc_RNA (1)...(19): siRNA sense strand
gaacguggcuuccagauaa

SEQ ID NO: 443395 - RNA, 19 nt, Homo sapiens
  misc_RNA (1)...(19): siRNA sense strand
gaagugaccucucuagaaa

SEQ ID NO: 443396 - RNA, 19 nt, Homo sapiens
  misc_RNA (1)...(19): siRNA sense strand
guaaacaucuugccuuaug

SEQ ID NO: 443397 - RNA, 19 nt, Homo sapiens
  misc_RNA (1)...(19): siRNA sense strand
gaaauuaaccggagaaugg

SEQ ID NO: 443398 - RNA, 19 nt, Homo sapiens
  misc_RNA (1)...(19): siRNA sense strand
gaagaaacggugaaugauu

SEQ ID NO: 443399 - RNA, 19 nt, Homo sapiens
  misc_RNA (1)...(19): siRNA sense strand
caacaaugcuaccacaguu

SEQ ID NO: 443400 - RNA, 19 nt, Homo sapiens
  misc_RNA (1)...(19): siRNA sense strand
caucaacgguuaccaagaa

SEQ ID NO: 443401 - RNA, 19 nt, Homo sapiens
  misc_RNA (1)...(19): siRNA sense strand
aagaaacggugaaugauuu

SEQ ID NO: 443402 - RNA, 19 nt, Homo sapiens
  misc_RNA (1)...(19): siRNA sense strand
gcaguggucugauaugugu

SEQ ID NO: 443403 - RNA, 19 nt, Homo sapiens
  misc_RNA (1)...(19): siRNA sense strand
cuagugaucguguuuauua

SEQ ID NO: 443404 - RNA, 19 nt, Homo sapiens
  misc_RNA (1)...(19): siRNA sense strand
ggaagugaccucucuagaa

SEQ ID NO: 443405 - RNA, 19 nt, Homo sapiens
  misc_RNA (1)...(19): siRNA sense strand
gaacagcaagcaccaauuc

SEQ ID NO: 443406 - RNA, 19 nt, Homo sapiens
  misc_RNA (1)...(19): siRNA sense strand
gaacgcauccuuuauugau

SEQ ID NO: 443407 - RNA, 19 nt, Homo sapiens
  misc_RNA (1)...(19): siRNA sense strand
gcucggcaguggucugaua

SEQ ID NO: 443408 - RNA, 19 nt, Homo sapiens
  misc_RNA (1)...(19): siRNA sense strand
gcauuacaauuucaccaaa

SEQ ID NO: 443409 - RNA, 19 nt, Homo sapiens
  misc_RNA (1)...(19): siRNA sense strand
gaaagggcaugaucagcau

SEQ ID NO: 443410 - RNA, 19 nt, Homo sapiens
  misc_RNA (1)...(19): siRNA sense strand
ggacguguauggcuuugug

SEQ ID NO: 443411 - RNA, 19 nt, Homo sapiens
  misc_RNA (1)...(19): siRNA sense strand
gaggacuucuggcgaauga

SEQ ID NO: 443412 - RNA, 19 nt, Homo sapiens
  misc_RNA (1)...(19): siRNA sense strand
gauuagaggaggaguuuaa

SEQ ID NO: 443413 - RNA, 19 nt, Homo sapiens
  misc_RNA (1)...(19): siRNA sense strand
gcaaaccgauaugcaguau

SEQ ID NO: 443414 - RNA, 19 nt, Homo sapiens
  misc_RNA (1)...(19): siRNA sense strand
ggaggaguuuaagaaguua

SEQ ID NO: 443415 - RNA, 19 nt, Homo sapiens
  misc_RNA (1)...(19): siRNA sense strand
aaaccgauaugcaguaugu

SEQ ID NO: 443416 - RNA, 19 nt, Homo sapiens
  misc_RNA (1)...(19): siRNA sense strand
gaagaagaaccguguuuua

SEQ ID NO: 443417 - RNA, 19 nt, Homo sapiens
  misc_RNA (1)...(19): siRNA sense strand
gcgaagagaauacagacua

SEQ ID NO: 443418 - RNA, 19 nt, Homo sapiens
  misc_RNA (1)...(19): siRNA sense strand
agagugaucauuccaguua

SEQ ID NO: 443419 - RNA, 19 nt, Homo sapiens
  misc_RNA (1)...(19): siRNA sense strand
gagaauggcagacgacaau

SEQ ID NO: 443420 - RNA, 19 nt, Homo sapiens
  misc_RNA (1)...(19): siRNA sense strand
gaccagcaacaauggauua

SEQ ID NO: 443421 - RNA, 19 nt, Homo sapiens
  misc_RNA (1)...(19): siRNA sense strand
gaauggcagacgacaauaa

SEQ ID NO: 443422 - RNA, 19 nt, Homo sapiens
  misc_RNA (1)...(19): siRNA sense strand
gugaacgcauccuuuauug

SEQ ID NO: 443423 - RNA, 19 nt, Homo sapiens
  misc_RNA (1)...(19): siRNA sense strand
gagaauacagacuauguga

SEQ ID NO: 443424 - RNA, 19 nt, Homo sapiens
  misc_RNA (1)...(19): siRNA sense strand
cagccaacaugaagaagaa

SEQ ID NO: 443425 - RNA, 19 nt, Homo sapiens
  misc_RNA (1)...(19): siRNA sense strand
acauucagcccaaauauaa

SEQ ID NO: 443426 - RNA, 19 nt, Homo sapiens
  misc_RNA (1)...(19): siRNA sense strand
guauauugaugcauucuca

SEQ ID NO: 443427 - RNA, 19 nt, Homo sapiens
  misc_RNA (1)...(19): siRNA sense strand
ggagaagugugcccaguac

SEQ ID NO: 443428 - RNA, 19 nt, Homo sapiens
  misc_RNA (1)...(19): siRNA sense strand
cgaagagaauacagacuau

SEQ ID NO: 443429 - RNA, 19 nt, Homo sapiens
  misc_RNA (1)...(19): siRNA sense strand
caaauucauugcugcacaa

SEQ ID NO: 443430 - RNA, 19 nt, Homo sapiens
  misc_RNA (1)...(19): siRNA sense strand
gaggaggaguuuaagaagu

SEQ ID NO: 443431 - RNA, 19 nt, Homo sapiens
  misc_RNA (1)...(19): siRNA sense strand
uaaccacugucaauucuuc

SEQ ID NO: 443432 - RNA, 19 nt, Homo sapiens
  misc_RNA (1)...(19): siRNA sense strand
caaccacuccagaaacuuu

SEQ ID NO: 443433 - RNA, 19 nt, Homo sapiens
  misc_RNA (1)...(19): siRNA sense strand
cggaugaucugggaacaaa

SEQ ID NO: 443434 - RNA, 19 nt, Homo sapiens
  misc_RNA (1)...(19): siRNA sense strand
aagaagaaacggugaauga

SEQ ID NO: 443435 - RNA, 19 nt, Homo sapiens
  misc_RNA (1)...(19): siRNA sense strand
cagaaccaguuaaagaaga

SEQ ID NO: 443436 - RNA, 19 nt, Homo sapiens
  misc_RNA (1)...(19): siRNA sense strand
gcaagcaccaauucuauag

SEQ ID NO: 443437 - RNA, 19 nt, Homo sapiens
  misc_RNA (1)...(19): siRNA sense strand
gaagaaggaggaggaaugu

SEQ ID NO: 443438 - RNA, 19 nt, Homo sapiens
  misc_RNA (1)...(19): siRNA sense strand
gaguggaaauccugcucua

SEQ ID NO: 443439 - RNA, 19 nt, Homo sapiens
  misc_RNA (1)...(19): siRNA sense strand
gcagcaaccacuccagaaa

SEQ ID NO: 443440 - RNA, 19 nt, Homo sapiens
  misc_RNA (1)...(19): siRNA sense strand
gcugggagccauuccaauu

SEQ ID NO: 443441 - RNA, 19 nt, Homo sapiens
  misc_RNA (1)...(19): siRNA sense strand
uaaacaucuugccuuauga

SEQ ID NO: 443442 - RNA, 19 nt, Homo sapiens
  misc_RNA (1)...(19): siRNA sense strand
caacauucagcccaaauau

SEQ ID NO: 443443 - RNA, 19 nt, Homo sapiens
  misc_RNA (1)...(19): siRNA sense strand
ggaguauauugaugcauuc

SEQ ID NO: 443444 - RNA, 19 nt, Homo sapiens
  misc_RNA (1)...(19): siRNA sense strand
acaagguggugcaggagua

SEQ ID NO: 443445 - RNA, 19 nt, Homo sapiens
  misc_RNA (1)...(19): siRNA sense strand
uaugugaacgcauccuuua

SEQ ID NO: 443446 - RNA, 19 nt, Homo sapiens
  misc_RNA (1)...(19): siRNA sense strand
gaauacagacuaugugaac

SEQ ID NO: 443447 - RNA, 19 nt, Homo sapiens
  misc_RNA (1)...(19): siRNA sense strand
gacaagaugcggacuggaa

SEQ ID NO: 443448 - RNA, 19 nt, Homo sapiens
  misc_RNA (1)...(19): siRNA sense strand
guaccuuugucgucauuga

SEQ ID NO: 443449 - RNA, 19 nt, Homo sapiens
  misc_RNA (1)...(19): siRNA sense strand
aaauccaacuucuucacua

SEQ ID NO: 443450 - RNA, 19 nt, Homo sapiens
  misc_RNA (1)...(19): siRNA sense strand
uuacagaucauuccauaug

SEQ ID NO: 443451 - RNA, 19 nt, Homo sapiens
  misc_RNA (1)...(19): siRNA sense strand
aggaggaguuuaagaaguu

SEQ ID NO: 443452 - RNA, 19 nt, Homo sapiens
  misc_RNA (1)...(19): siRNA sense strand
cagcaacaauggauuagag

SEQ ID NO: 443453 - RNA, 19 nt, Homo sapiens
  misc_RNA (1)...(19): siRNA sense strand
ggacaugaugcauacagaa

SEQ ID NO: 443454 - RNA, 19 nt, Homo sapiens
  misc_RNA (1)...(19): siRNA sense strand
cuucauucaucaacgguua

SEQ ID NO: 443455 - RNA, 19 nt, Homo sapiens
  misc_RNA (1)...(19): siRNA sense strand
gacaaugggaccacaagaa

SEQ ID NO: 443456 - RNA, 19 nt, Homo sapiens
  misc_RNA (1)...(19): siRNA sense strand
ggacccaccuauuuaacca

SEQ ID NO: 443457 - RNA, 19 nt, Homo sapiens
  misc_RNA (1)...(19): siRNA sense strand
aauccaacuucuucacuaa

SEQ ID NO: 443458 - RNA, 19 nt, Homo sapiens
  misc_RNA (1)...(19): siRNA sense strand
ggcagaaccaguuaaagaa

SEQ ID NO: 443459 - RNA, 19 nt, Homo sapiens
  misc_RNA (1)...(19): siRNA sense strand
cauaugaauucaacagagu

SEQ ID NO: 443460 - RNA, 19 nt, Homo sapiens
  misc_RNA (1)...(19): siRNA sense strand
cggcagaaccaguuaaaga

SEQ ID NO: 443461 - RNA, 19 nt, Homo sapiens
  misc_RNA (1)...(19): siRNA sense strand
gaugcggacuggaaaccuu

SEQ ID NO: 443462 - RNA, 19 nt, Homo sapiens
  misc_RNA (1)...(19): siRNA sense strand
uugaugcauucucagauua

SEQ ID NO: 443463 - RNA, 19 nt, Homo sapiens
  misc_RNA (1)...(19): siRNA sense strand
aggaguauauugaugcauu

SEQ ID NO: 443464 - RNA, 19 nt, Homo sapiens
  misc_RNA (1)...(19): siRNA sense strand
gagugaucauuccaguuaa

SEQ ID NO: 443465 - RNA, 19 nt, Homo sapiens
  misc_RNA (1)...(19): siRNA sense strand
ccaacauucagcccaaaua

SEQ ID NO: 443466 - RNA, 19 nt, Homo sapiens
  misc_RNA (1)...(19): siRNA sense strand
gugcaggaguauauugaug

SEQ ID NO: 443467 - RNA, 19 nt, Homo sapiens
  misc_RNA (1)...(19): siRNA sense strand
gguguccuauggagauauu

SEQ ID NO: 443468 - RNA, 19 nt, Homo sapiens
  misc_RNA (1)...(19): siRNA sense strand
uagaggaggaguuuaagaa

SEQ ID NO: 443469 - RNA, 19 nt, Homo sapiens
  misc_RNA (1)...(19): siRNA sense strand
aaugauuucuggcggauga

SEQ ID NO: 443470 - RNA, 19 nt, Homo sapiens
  misc_RNA (1)...(19): siRNA sense strand
cuauaggcauuacaauuuc

SEQ ID NO: 443471 - RNA, 19 nt, Homo sapiens
  misc_RNA (1)...(19): siRNA sense strand
ucacuaacuucucuuucug

SEQ ID NO: 443472 - RNA, 19 nt, Homo sapiens
  misc_RNA (1)...(19): siRNA sense strand
agaaggaggaggaauguga

SEQ ID NO: 443473 - RNA, 19 nt, Homo sapiens
  misc_RNA (1)...(19): siRNA sense strand
cagcaagcaccaauucuau

SEQ ID NO: 443474 - RNA, 19 nt, Homo sapiens
  misc_RNA (1)...(19): siRNA sense strand
gcaggaguauauugaugca

SEQ ID NO: 443475 - RNA, 19 nt, Homo sapiens
  misc_RNA (1)...(19): siRNA sense strand
ccacacaauugaggacuuc

SEQ ID NO: 443476 - RNA, 19 nt, Homo sapiens
  misc_RNA (1)...(19): siRNA sense strand
ucaaguuccucaagaaggu

SEQ ID NO: 443477 - RNA, 19 nt, Homo sapiens
  misc_RNA (1)...(19): siRNA sense strand
ucacucaguuccacuuuac

SEQ ID NO: 443478 - RNA, 19 nt, Homo sapiens
  misc_RNA (1)...(19): siRNA sense strand
caaggcugcuggaccuaug

SEQ ID NO: 443479 - RNA, 19 nt, Homo sapiens
  misc_RNA (1)...(19): siRNA sense strand
ggacaagcuggaagaggaa

SEQ ID NO: 443480 - RNA, 19 nt, Homo sapiens
  misc_RNA (1)...(19): siRNA sense strand
uuccaauucuuuccgcuua

SEQ ID NO: 443481 - RNA, 19 nt, Homo sapiens
  misc_RNA (1)...(19): siRNA sense strand
ggagccauuccaauucuuu

SEQ ID NO: 443482 - RNA, 19 nt, Homo sapiens
  misc_RNA (1)...(19): siRNA sense strand
ugaagaaggaggaggaaug

SEQ ID NO: 443483 - RNA, 19 nt, Homo sapiens
  misc_RNA (1)...(19): siRNA sense strand
caccaauucuauaggcauu

SEQ ID NO: 443484 - RNA, 19 nt, Homo sapiens
  misc_RNA (1)...(19): siRNA sense strand
ccaacaccagggagaauaa

SEQ ID NO: 443485 - RNA, 19 nt, Homo sapiens
  misc_RNA (1)...(19): siRNA sense strand
caaucaaaauccagaauga

SEQ ID NO: 443486 - RNA, 19 nt, Homo sapiens
  misc_RNA (1)...(19): siRNA sense strand
ggagcauuaucucuaugga

SEQ ID NO: 443487 - RNA, 19 nt, Homo sapiens
  misc_RNA (1)...(19): siRNA sense strand
ggagagaggccaggagaag

SEQ ID NO: 443488 - RNA, 19 nt, Homo sapiens
  misc_RNA (1)...(19): siRNA sense strand
ccaccuauuuaaccacugu

SEQ ID NO: 443489 - RNA, 19 nt, Homo sapiens
  misc_RNA (1)...(19): siRNA sense strand
gaagagaauacagacuaug

SEQ ID NO: 443490 - RNA, 19 nt, Homo sapiens
  misc_RNA (1)...(19): siRNA sense strand
gcagaaccaguuaaagaag

SEQ ID NO: 443491 - RNA, 19 nt, Homo sapiens
  misc_RNA (1)...(19): siRNA sense strand
ggaaauuaaccggagaaug

SEQ ID NO: 443492 - RNA, 19 nt, Homo sapiens
  misc_RNA (1)...(19): siRNA sense strand
aagcccuucuggagcauua

SEQ ID NO: 443493 - RNA, 19 nt, Homo sapiens
  misc_RNA (1)...(19): siRNA sense strand
cagauuaugccaacuucaa

SEQ ID NO: 443494 - RNA, 19 nt, Homo sapiens
  misc_RNA (1)...(19): siRNA sense strand
gaacguggcuuccagauaa

SEQ ID NO: 443495 - RNA, 19 nt, Homo sapiens
  misc_RNA (1)...(19): siRNA sense strand
gaagugaccucucuagaaa

SEQ ID NO: 443496 - RNA, 19 nt, Homo sapiens
  misc_RNA (1)...(19): siRNA sense strand
guaaacaucuugccuuaug

SEQ ID NO: 443497 - RNA, 19 nt, Homo sapiens
  misc_RNA (1)...(19): siRNA sense strand
gaaauuaaccggagaaugg

SEQ ID NO: 443498 - RNA, 19 nt, Homo sapiens
  misc_RNA (1)...(19): siRNA sense strand
gaagaaacggugaaugauu

SEQ ID NO: 443499 - RNA, 19 nt, Homo sapiens
  misc_RNA (1)...(19): siRNA sense strand
caacaaugcuaccacaguu

SEQ ID NO: 443500 - RNA, 19 nt, Homo sapiens
  misc_RNA (1)...(19): siRNA sense strand
caucaacgguuaccaagaa

SEQ ID NO: 443501 - RNA, 19 nt, Homo sapiens
  misc_RNA (1)...(19): siRNA sense strand
aagaaacggugaaugauuu

SEQ ID NO: 443502 - RNA, 19 nt, Homo sapiens
  misc_RNA (1)...(19): siRNA sense strand
gcaguggucugauaugugu

SEQ ID NO: 443503 - RNA, 19 nt, Homo sapiens
  misc_RNA (1)...(19): siRNA sense strand
cuagugaucguguuuauua

SEQ ID NO: 443504 - RNA, 19 nt, Homo sapiens
  misc_RNA (1)...(19): siRNA sense strand
ggaagugaccucucuagaa

SEQ ID NO: 443505 - RNA, 19 nt, Homo sapiens
  misc_RNA (1)...(19): siRNA sense strand
gaacagcaagcaccaauuc

SEQ ID NO: 443506 - RNA, 19 nt, Homo sapiens
  misc_RNA (1)...(19): siRNA sense strand
gaacgcauccuuuauugau

SEQ ID NO: 443507 - RNA, 19 nt, Homo sapiens
  misc_RNA (1)...(19): siRNA sense strand
gcucggcaguggucugaua

SEQ ID NO: 443508 - RNA, 19 nt, Homo sapiens
  misc_RNA (1)...(19): siRNA sense strand
gcauuacaauuucaccaaa

SEQ ID NO: 443509 - RNA, 19 nt, Homo sapiens
  misc_RNA (1)...(19): siRNA sense strand
gaaagggcaugaucagcau

SEQ ID NO: 443510 - RNA, 19 nt, Homo sapiens
  misc_RNA (1)...(19): siRNA sense strand
ggacguguauggcuuugug

SEQ ID NO: 443511 - RNA, 19 nt, Homo sapiens
  misc_RNA (1)...(19): siRNA sense strand
gaggacuucuggcgaauga

SEQ ID NO: 443512 - RNA, 19 nt, Homo sapiens
  misc_RNA (1)...(19): siRNA sense strand
gauuagaggaggaguuuaa

SEQ ID NO: 443513 - RNA, 19 nt, Homo sapiens
  misc_RNA (1)...(19): siRNA sense strand
gcaaaccgauaugcaguau

SEQ ID NO: 443514 - RNA, 19 nt, Homo sapiens
  misc_RNA (1)...(19): siRNA sense strand
ggaggaguuuaagaaguua

SEQ ID NO: 443515 - RNA, 19 nt, Homo sapiens
  misc_RNA (1)...(19): siRNA sense strand
aaaccgauaugcaguaugu

SEQ ID NO: 443516 - RNA, 19 nt, Homo sapiens
  misc_RNA (1)...(19): siRNA sense strand
gaagaagaaccguguuuua

SEQ ID NO: 443517 - RNA, 19 nt, Homo sapiens
  misc_RNA (1)...(19): siRNA sense strand
gcgaagagaauacagacua

SEQ ID NO: 443518 - RNA, 19 nt, Homo sapiens
  misc_RNA (1)...(19): siRNA sense strand
agagugaucauuccaguua

SEQ ID NO: 443519 - RNA, 19 nt, Homo sapiens
  misc_RNA (1)...(19): siRNA sense strand
gagaauggcagacgacaau

SEQ ID NO: 443520 - RNA, 19 nt, Homo sapiens
  misc_RNA (1)...(19): siRNA sense strand
gaccagcaacaauggauua

SEQ ID NO: 443521 - RNA, 19 nt, Homo sapiens
  misc_RNA (1)...(19): siRNA sense strand
gaauggcagacgacaauaa

SEQ ID NO: 443522 - RNA, 19 nt, Homo sapiens
  misc_RNA (1)...(19): siRNA sense strand
gugaacgcauccuuuauug

SEQ ID NO: 443523 - RNA, 19 nt, Homo sapiens
  misc_RNA (1)...(19): siRNA sense strand
gagaauacagacuauguga

SEQ ID NO: 443524 - RNA, 19 nt, Homo sapiens
  misc_RNA (1)...(19): siRNA sense strand
cagccaacaugaagaagaa

SEQ ID NO: 443525 - RNA, 19 nt, Homo sapiens
  misc_RNA (1)...(19): siRNA sense strand
acauucagcccaaauauaa

SEQ ID NO: 443526 - RNA, 19 nt, Homo sapiens
  misc_RNA (1)...(19): siRNA sense strand
guauauugaugcauucuca

SEQ ID NO: 443527 - RNA, 19 nt, Homo sapiens
  misc_RNA (1)...(19): siRNA sense strand
ggagaagugugcccaguac

SEQ ID NO: 443528 - RNA, 19 nt, Homo sapiens
  misc_RNA (1)...(19): siRNA sense strand
cgaagagaauacagacuau

SEQ ID NO: 443529 - RNA, 19 nt, Homo sapiens
  misc_RNA (1)...(19): siRNA sense strand
caaauucauugcugcacaa

SEQ ID NO: 443530 - RNA, 19 nt, Homo sapiens
  misc_RNA (1)...(19): siRNA sense strand
gaggaggaguuuaagaagu

SEQ ID NO: 443531 - RNA, 19 nt, Homo sapiens
  misc_RNA (1)...(19): siRNA sense strand
uaaccacugucaauucuuc

SEQ ID NO: 443532 - RNA, 19 nt, Homo sapiens
  misc_RNA (1)...(19): siRNA sense strand
caaccacuccagaaacuuu

SEQ ID NO: 443533 - RNA, 19 nt, Homo sapiens
  misc_RNA (1)...(19): siRNA sense strand
cggaugaucugggaacaaa

SEQ ID NO: 443534 - RNA, 19 nt, Homo sapiens
  misc_RNA (1)...(19): siRNA sense strand
aagaagaaacggugaauga

SEQ ID NO: 443535 - RNA, 19 nt, Homo sapiens
  misc_RNA (1)...(19): siRNA sense strand
cagaaccaguuaaagaaga

SEQ ID NO: 443536 - RNA, 19 nt, Homo sapiens
  misc_RNA (1)...(19): siRNA sense strand
gcaagcaccaauucuauag

SEQ ID NO: 443537 - RNA, 19 nt, Homo sapiens
  misc_RNA (1)...(19): siRNA sense strand
gaagaaggaggaggaaugu

SEQ ID NO: 443538 - RNA, 19 nt, Homo sapiens
  misc_RNA (1)...(19): siRNA sense strand
gaguggaaauccugcucua

SEQ ID NO: 443539 - RNA, 19 nt, Homo sapiens
  misc_RNA (1)...(19): siRNA sense strand
gcagcaaccacuccagaaa

SEQ ID NO: 443540 - RNA, 19 nt, Homo sapiens
  misc_RNA (1)...(19): siRNA sense strand
gcugggagccauuccaauu

SEQ ID NO: 443541 - RNA, 19 nt, Homo sapiens
  misc_RNA (1)...(19): siRNA sense strand
uaaacaucuugccuuauga

SEQ ID NO: 443542 - RNA, 19 nt, Homo sapiens
  misc_RNA (1)...(19): siRNA sense strand
caacauucagcccaaauau

SEQ ID NO: 443543 - RNA, 19 nt, Homo sapiens
  misc_RNA (1)...(19): siRNA sense strand
ggaguauauugaugcauuc

SEQ ID NO: 443544 - RNA, 19 nt, Homo sapiens
  misc_RNA (1)...(19): siRNA sense strand
acaagguggugcaggagua

SEQ ID NO: 443545 - RNA, 19 nt, Homo sapiens
  misc_RNA (1)...(19): siRNA sense strand
uaugugaacgcauccuuua

SEQ ID NO: 443546 - RNA, 19 nt, Homo sapiens
  misc_RNA (1)...(19): siRNA sense strand
gaauacagacuaugugaac

SEQ ID NO: 443547 - RNA, 19 nt, Homo sapiens
  misc_RNA (1)...(19): siRNA sense strand
gacaagaugcggacuggaa

SEQ ID NO: 443548 - RNA, 19 nt, Homo sapiens
  misc_RNA (1)...(19): siRNA sense strand
guaccuuugucgucauuga

SEQ ID NO: 443549 - RNA, 19 nt, Homo sapiens
  misc_RNA (1)...(19): siRNA sense strand
aaauccaacuucuucacua

SEQ ID NO: 443550 - RNA, 19 nt, Homo sapiens
  misc_RNA (1)...(19): siRNA sense strand
uuacagaucauuccauaug

SEQ ID NO: 443551 - RNA, 19 nt, Homo sapiens
  misc_RNA (1)...(19): siRNA sense strand
aggaggaguuuaagaaguu

SEQ ID NO: 443552 - RNA, 19 nt, Homo sapiens
  misc_RNA (1)...(19): siRNA sense strand
cagcaacaauggauuagag

SEQ ID NO: 443553 - RNA, 19 nt, Homo sapiens
  misc_RNA (1)...(19): siRNA sense strand
ggacaugaugcauacagaa

SEQ ID NO: 443554 - RNA, 19 nt, Homo sapiens
  misc_RNA (1)...(19): siRNA sense strand
cuucauucaucaacgguua

SEQ ID NO: 443555 - RNA, 19 nt, Homo sapiens
  misc_RNA (1)...(19): siRNA sense strand
gacaaugggaccacaagaa

SEQ ID NO: 443556 - RNA, 19 nt, Homo sapiens
  misc_RNA (1)...(19): siRNA sense strand
ggacccaccuauuuaacca

SEQ ID NO: 443557 - RNA, 19 nt, Homo sapiens
  misc_RNA (1)...(19): siRNA sense strand
aauccaacuucuucacuaa

SEQ ID NO: 443558 - RNA, 19 nt, Homo sapiens
  misc_RNA (1)...(19): siRNA sense strand
ggcagaaccaguuaaagaa

SEQ ID NO: 443559 - RNA, 19 nt, Homo sapiens
  misc_RNA (1)...(19): siRNA sense strand
cauaugaauucaacagagu

SEQ ID NO: 443560 - RNA, 19 nt, Homo sapiens
  misc_RNA (1)...(19): siRNA sense strand
cggcagaaccaguuaaaga

SEQ ID NO: 443561 - RNA, 19 nt, Homo sapiens
  misc_RNA (1)...(19): siRNA sense strand
gaugcggacuggaaaccuu

SEQ ID NO: 443562 - RNA, 19 nt, Homo sapiens
  misc_RNA (1)...(19): siRNA sense strand
uugaugcauucucagauua

SEQ ID NO: 443563 - RNA, 19 nt, Homo sapiens
  misc_RNA (1)...(19): siRNA sense strand
aggaguauauugaugcauu

SEQ ID NO: 443564 - RNA, 19 nt, Homo sapiens
  misc_RNA (1)...(19): siRNA sense strand
gagugaucauuccaguuaa

SEQ ID NO: 443565 - RNA, 19 nt, Homo sapiens
  misc_RNA (1)...(19): siRNA sense strand
ccaacauucagcccaaaua

SEQ ID NO: 443566 - RNA, 19 nt, Homo sapiens
  misc_RNA (1)...(19): siRNA sense strand
gugcaggaguauauugaug

SEQ ID NO: 443567 - RNA, 19 nt, Homo sapiens
  misc_RNA (1)...(19): siRNA sense strand
gguguccuauggagauauu

SEQ ID NO: 443568 - RNA, 19 nt, Homo sapiens
  misc_RNA (1)...(19): siRNA sense strand
uagaggaggaguuuaagaa

SEQ ID NO: 443569 - RNA, 19 nt, Homo sapiens
  misc_RNA (1)...(19): siRNA sense strand
aaugauuucuggcggauga

SEQ ID NO: 443570 - RNA, 19 nt, Homo sapiens
  misc_RNA (1)...(19): siRNA sense strand
cuauaggcauuacaauuuc

SEQ ID NO: 443571 - RNA, 19 nt, Homo sapiens
  misc_RNA (1)...(19): siRNA sense strand
ucacuaacuucucuuucug

SEQ ID NO: 443572 - RNA, 19 nt, Homo sapiens
  misc_RNA (1)...(19): siRNA sense strand
agaaggaggaggaauguga

SEQ ID NO: 443573 - RNA, 19 nt, Homo sapiens
  misc_RNA (1)...(19): siRNA sense strand
cagcaagcaccaauucuau

SEQ ID NO: 443574 - RNA, 19 nt, Homo sapiens
  misc_RNA (1)...(19): siRNA sense strand
gcaggaguauauugaugca

SEQ ID NO: 443575 - RNA, 19 nt, Homo sapiens
  misc_RNA (1)...(19): siRNA sense strand
ccacacaauugaggacuuc

SEQ ID NO: 443576 - RNA, 19 nt, Homo sapiens
  misc_RNA (1)...(19): siRNA sense strand
ucaaguuccucaagaaggu

SEQ ID NO: 443577 - RNA, 19 nt, Homo sapiens
  misc_RNA (1)...(19): siRNA sense strand
ucacucaguuccacuuuac

SEQ ID NO: 443578 - RNA, 19 nt, Homo sapiens
  misc_RNA (1)...(19): siRNA sense strand
caaggcugcuggaccuaug

SEQ ID NO: 443579 - RNA, 19 nt, Homo sapiens
  misc_RNA (1)...(19): siRNA sense strand
ggacaagcuggaagaggaa

SEQ ID NO: 443580 - RNA, 19 nt, Homo sapiens
  misc_RNA (1)...(19): siRNA sense strand
uuccaauucuuuccgcuua

SEQ ID NO: 443581 - RNA, 19 nt, Homo sapiens
  misc_RNA (1)...(19): siRNA sense strand
ggagccauuccaauucuuu

SEQ ID NO: 443582 - RNA, 19 nt, Homo sapiens
  misc_RNA (1)...(19): siRNA sense strand
ugaagaaggaggaggaaug

SEQ ID NO: 443583 - RNA, 19 nt, Homo sapiens
  misc_RNA (1)...(19): siRNA sense strand
caccaauucuauaggcauu

SEQ ID NO: 443584 - RNA, 19 nt, Homo sapiens
  misc_RNA (1)...(19): siRNA sense strand
ccaacaccagggagaauaa

SEQ ID NO: 443585 - RNA, 19 nt, Homo sapiens
  misc_RNA (1)...(19): siRNA sense strand
caaucaaaauccagaauga

SEQ ID NO: 443586 - RNA, 19 nt, Homo sapiens
  misc_RNA (1)...(19): siRNA sense strand
ggagcauuaucucuaugga

SEQ ID NO: 443587 - RNA, 19 nt, Homo sapiens
  misc_RNA (1)...(19): siRNA sense strand
ggagagaggccaggagaag

SEQ ID NO: 443588 - RNA, 19 nt, Homo sapiens
  misc_RNA (1)...(19): siRNA sense strand
ccaccuauuuaaccacugu

SEQ ID NO: 443589 - RNA, 19 nt, Homo sapiens
  misc_RNA (1)...(19): siRNA sense strand
gaagagaauacagacuaug

SEQ ID NO: 443590 - RNA, 19 nt, Homo sapiens
  misc_RNA (1)...(19): siRNA sense strand
gcagaaccaguuaaagaag

SEQ ID NO: 443591 - RNA, 19 nt, Homo sapiens
  misc_RNA (1)...(19): siRNA sense strand
ggaaauuaaccggagaaug

SEQ ID NO: 443592 - RNA, 19 nt, Homo sapiens
  misc_RNA (1)...(19): siRNA sense strand
aagcccuucuggagcauua

SEQ ID NO: 443593 - RNA, 19 nt, Homo sapiens
  misc_RNA (1)...(19): siRNA sense strand
cagauuaugccaacuucaa

SEQ ID NO: 443594 - RNA, 19 nt, Homo sapiens
  misc_RNA (1)...(19): siRNA sense strand
gaacguggcuuccagauaa

SEQ ID NO: 443595 - RNA, 19 nt, Homo sapiens
  misc_RNA (1)...(19): siRNA sense strand
gaagugaccucucuagaaa

SEQ ID NO: 443596 - RNA, 19 nt, Homo sapiens
  misc_RNA (1)...(19): siRNA sense strand
guaaacaucuugccuuaug

SEQ ID NO: 443597 - RNA, 19 nt, Homo sapiens
  misc_RNA (1)...(19): siRNA sense strand
gaaauuaaccggagaaugg

SEQ ID NO: 443598 - RNA, 19 nt, Homo sapiens
  misc_RNA (1)...(19): siRNA sense strand
gaagaaacggugaaugauu

SEQ ID NO: 443599 - RNA, 19 nt, Homo sapiens
  misc_RNA (1)...(19): siRNA sense strand
caacaaugcuaccacaguu

SEQ ID NO: 443600 - RNA, 19 nt, Homo sapiens
  misc_RNA (1)...(19): siRNA sense strand
caucaacgguuaccaagaa

SEQ ID NO: 443601 - RNA, 19 nt, Homo sapiens
  misc_RNA (1)...(19): siRNA sense strand
aagaaacggugaaugauuu

SEQ ID NO: 443602 - RNA, 19 nt, Homo sapiens
  misc_RNA (1)...(19): siRNA sense strand
gcaguggucugauaugugu

SEQ ID NO: 443603 - RNA, 19 nt, Homo sapiens
  misc_RNA (1)...(19): siRNA sense strand
cuagugaucguguuuauua

SEQ ID NO: 443604 - RNA, 19 nt, Homo sapiens
  misc_RNA (1)...(19): siRNA sense strand
ggaagugaccucucuagaa

SEQ ID NO: 443605 - RNA, 19 nt, Homo sapiens
  misc_RNA (1)...(19): siRNA sense strand
gaacagcaagcaccaauuc

SEQ ID NO: 443606 - RNA, 19 nt, Homo sapiens
  misc_RNA (1)...(19): siRNA sense strand
gaacgcauccuuuauugau

SEQ ID NO: 443607 - RNA, 19 nt, Homo sapiens
  misc_RNA (1)...(19): siRNA sense strand
gcucggcaguggucugaua

SEQ ID NO: 443608 - RNA, 19 nt, Homo sapiens
  misc_RNA (1)...(19): siRNA sense strand
gcauuacaauuucaccaaa

SEQ ID NO: 443609 - RNA, 19 nt, Homo sapiens
  misc_RNA (1)...(19): siRNA sense strand
gaaagggcaugaucagcau

SEQ ID NO: 443610 - RNA, 19 nt, Homo sapiens
  misc_RNA (1)...(19): siRNA sense strand
ggacguguauggcuuugug

SEQ ID NO: 443611 - RNA, 19 nt, Homo sapiens
  misc_RNA (1)...(19): siRNA sense strand
gaggacuucuggcgaauga

SEQ ID NO: 443612 - RNA, 19 nt, Homo sapiens
  misc_RNA (1)...(19): siRNA sense strand
gauuagaggaggaguuuaa

SEQ ID NO: 443613 - RNA, 19 nt, Homo sapiens
  misc_RNA (1)...(19): siRNA sense strand
gcaaaccgauaugcaguau

SEQ ID NO: 443614 - RNA, 19 nt, Homo sapiens
  misc_RNA (1)...(19): siRNA sense strand
ggaggaguuuaagaaguua

SEQ ID NO: 443615 - RNA, 19 nt, Homo sapiens
  misc_RNA (1)...(19): siRNA sense strand
aaaccgauaugcaguaugu

SEQ ID NO: 443616 - RNA, 19 nt, Homo sapiens
  misc_RNA (1)...(19): siRNA sense strand
gaagaagaaccguguuuua

SEQ ID NO: 443617 - RNA, 19 nt, Homo sapiens
  misc_RNA (1)...(19): siRNA sense strand
gcgaagagaauacagacua

SEQ ID NO: 443618 - RNA, 19 nt, Homo sapiens
  misc_RNA (1)...(19): siRNA sense strand
agagugaucauuccaguua

SEQ ID NO: 443619 - RNA, 19 nt, Homo sapiens
  misc_RNA (1)...(19): siRNA sense strand
gagaauggcagacgacaau

SEQ ID NO: 443620 - RNA, 19 nt, Homo sapiens
  misc_RNA (1)...(19): siRNA sense strand
gaccagcaacaauggauua

SEQ ID NO: 443621 - RNA, 19 nt, Homo sapiens
  misc_RNA (1)...(19): siRNA sense strand
gaauggcagacgacaauaa

SEQ ID NO: 443622 - RNA, 19 nt, Homo sapiens
  misc_RNA (1)...(19): siRNA sense strand
gugaacgcauccuuuauug

SEQ ID NO: 443623 - RNA, 19 nt, Homo sapiens
  misc_RNA (1)...(19): siRNA sense strand
gagaauacagacuauguga

SEQ ID NO: 443624 - RNA, 19 nt, Homo sapiens
  misc_RNA (1)...(19): siRNA sense strand
cagccaacaugaagaagaa

SEQ ID NO: 443625 - RNA, 19 nt, Homo sapiens
  misc_RNA (1)...(19): siRNA sense strand
acauucagcccaaauauaa

SEQ ID NO: 443626 - RNA, 19 nt, Homo sapiens
  misc_RNA (1)...(19): siRNA sense strand
guauauugaugcauucuca

SEQ ID NO: 443627 - RNA, 19 nt, Homo sapiens
  misc_RNA (1)...(19): siRNA sense strand
ggagaagugugcccaguac

SEQ ID NO: 443628 - RNA, 19 nt, Homo sapiens
  misc_RNA (1)...(19): siRNA sense strand
cgaagagaauacagacuau

SEQ ID NO: 443629 - RNA, 19 nt, Homo sapiens
  misc_RNA (1)...(19): siRNA sense strand
caaauucauugcugcacaa

SEQ ID NO: 443630 - RNA, 19 nt, Homo sapiens
  misc_RNA (1)...(19): siRNA sense strand
gaggaggaguuuaagaagu

SEQ ID NO: 443631 - RNA, 19 nt, Homo sapiens
  misc_RNA (1)...(19): siRNA sense strand
uaaccacugucaauucuuc

SEQ ID NO: 443632 - RNA, 19 nt, Homo sapiens
  misc_RNA (1)...(19): siRNA sense strand
caaccacuccagaaacuuu

SEQ ID NO: 443633 - RNA, 19 nt, Homo sapiens
  misc_RNA (1)...(19): siRNA sense strand
cggaugaucugggaacaaa

SEQ ID NO: 443634 - RNA, 19 nt, Homo sapiens
  misc_RNA (1)...(19): siRNA sense strand
aagaagaaacggugaauga

SEQ ID NO: 443635 - RNA, 19 nt, Homo sapiens
  misc_RNA (1)...(19): siRNA sense strand
cagaaccaguuaaagaaga

SEQ ID NO: 443636 - RNA, 19 nt, Homo sapiens
  misc_RNA (1)...(19): siRNA sense strand
gcaagcaccaauucuauag

SEQ ID NO: 443637 - RNA, 19 nt, Homo sapiens
  misc_RNA (1)...(19): siRNA sense strand
gaagaaggaggaggaaugu

SEQ ID NO: 443638 - RNA, 19 nt, Homo sapiens
  misc_RNA (1)...(19): siRNA sense strand
gaguggaaauccugcucua

SEQ ID NO: 443639 - RNA, 19 nt, Homo sapiens
  misc_RNA (1)...(19): siRNA sense strand
gcagcaaccacuccagaaa

SEQ ID NO: 443640 - RNA, 19 nt, Homo sapiens
  misc_RNA (1)...(19): siRNA sense strand
gcugggagccauuccaauu

SEQ ID NO: 443641 - RNA, 19 nt, Homo sapiens
  misc_RNA (1)...(19): siRNA sense strand
uaaacaucuugccuuauga

SEQ ID NO: 443642 - RNA, 19 nt, Homo sapiens
  misc_RNA (1)...(19): siRNA sense strand
caacauucagcccaaauau

SEQ ID NO: 443643 - RNA, 19 nt, Homo sapiens
  misc_RNA (1)...(19): siRNA sense strand
ggaguauauugaugcauuc

SEQ ID NO: 443644 - RNA, 19 nt, Homo sapiens
  misc_RNA (1)...(19): siRNA sense strand
acaagguggugcaggagua

SEQ ID NO: 443645 - RNA, 19 nt, Homo sapiens
  misc_RNA (1)...(19): siRNA sense strand
uaugugaacgcauccuuua

SEQ ID NO: 443646 - RNA, 19 nt, Homo sapiens
  misc_RNA (1)...(19): siRNA sense strand
gaauacagacuaugugaac

SEQ ID NO: 443647 - RNA, 19 nt, Homo sapiens
  misc_RNA (1)...(19): siRNA sense strand
gacaagaugcggacuggaa

SEQ ID NO: 443648 - RNA, 19 nt, Homo sapiens
  misc_RNA (1)...(19): siRNA sense strand
guaccuuugucgucauuga

SEQ ID NO: 443649 - RNA, 19 nt, Homo sapiens
  misc_RNA (1)...(19): siRNA sense strand
aaauccaacuucuucacua

SEQ ID NO: 443650 - RNA, 19 nt, Homo sapiens
  misc_RNA (1)...(19): siRNA sense strand
uuacagaucauuccauaug

SEQ ID NO: 443651 - RNA, 19 nt, Homo sapiens
  misc_RNA (1)...(19): siRNA sense strand
aggaggaguuuaagaaguu

SEQ ID NO: 443652 - RNA, 19 nt, Homo sapiens
  misc_RNA (1)...(19): siRNA sense strand
cagcaacaauggauuagag

SEQ ID NO: 443653 - RNA, 19 nt, Homo sapiens
  misc_RNA (1)...(19): siRNA sense strand
ggacaugaugcauacagaa

SEQ ID NO: 443654 - RNA, 19 nt, Homo sapiens
  misc_RNA (1)...(19): siRNA sense strand
cuucauucaucaacgguua

SEQ ID NO: 443655 - RNA, 19 nt, Homo sapiens
  misc_RNA (1)...(19): siRNA sense strand
gacaaugggaccacaagaa

SEQ ID NO: 443656 - RNA, 19 nt, Homo sapiens
  misc_RNA (1)...(19): siRNA sense strand
ggacccaccuauuuaacca

SEQ ID NO: 443657 - RNA, 19 nt, Homo sapiens
  misc_RNA (1)...(19): siRNA sense strand
aauccaacuucuucacuaa

SEQ ID NO: 443658 - RNA, 19 nt, Homo sapiens
  misc_RNA (1)...(19): siRNA sense strand
ggcagaaccaguuaaagaa

SEQ ID NO: 443659 - RNA, 19 nt, Homo sapiens
  misc_RNA (1)...(19): siRNA sense strand
cauaugaauucaacagagu

SEQ ID NO: 443660 - RNA, 19 nt, Homo sapiens
  misc_RNA (1)...(19): siRNA sense strand
cggcagaaccaguuaaaga

SEQ ID NO: 443661 - RNA, 19 nt, Homo sapiens
  misc_RNA (1)...(19): siRNA sense strand
gaugcggacuggaaaccuu

SEQ ID NO: 443662 - RNA, 19 nt, Homo sapiens
  misc_RNA (1)...(19): siRNA sense strand
uugaugcauucucagauua

SEQ ID NO: 443663 - RNA, 19 nt, Homo sapiens
  misc_RNA (1)...(19): siRNA sense strand
aggaguauauugaugcauu

SEQ ID NO: 443664 - RNA, 19 nt, Homo sapiens
  misc_RNA (1)...(19): siRNA sense strand
gagugaucauuccaguuaa

SEQ ID NO: 443665 - RNA, 19 nt, Homo sapiens
  misc_RNA (1)...(19): siRNA sense strand
ccaacauucagcccaaaua

SEQ ID NO: 443666 - RNA, 19 nt, Homo sapiens
  misc_RNA (1)...(19): siRNA sense strand
gugcaggaguauauugaug

SEQ ID NO: 443667 - RNA, 19 nt, Homo sapiens
  misc_RNA (1)...(19): siRNA sense strand
gguguccuauggagauauu

SEQ ID NO: 443668 - RNA, 19 nt, Homo sapiens
  misc_RNA (1)...(19): siRNA sense strand
uagaggaggaguuuaagaa

SEQ ID NO: 443669 - RNA, 19 nt, Homo sapiens
  misc_RNA (1)...(19): siRNA sense strand
aaugauuucuggcggauga

SEQ ID NO: 443670 - RNA, 19 nt, Homo sapiens
  misc_RNA (1)...(19): siRNA sense strand
cuauaggcauuacaauuuc

SEQ ID NO: 443671 - RNA, 19 nt, Homo sapiens
  misc_RNA (1)...(19): siRNA sense strand
ucacuaacuucucuuucug

SEQ ID NO: 443672 - RNA, 19 nt, Homo sapiens
  misc_RNA (1)...(19): siRNA sense strand
agaaggaggaggaauguga

SEQ ID NO: 443673 - RNA, 19 nt, Homo sapiens
  misc_RNA (1)...(19): siRNA sense strand
cagcaagcaccaauucuau

SEQ ID NO: 443674 - RNA, 19 nt, Homo sapiens
  misc_RNA (1)...(19): siRNA sense strand
gcaggaguauauugaugca

SEQ ID NO: 443675 - RNA, 19 nt, Homo sapiens
  misc_RNA (1)...(19): siRNA sense strand
ccacacaauugaggacuuc

SEQ ID NO: 443676 - RNA, 19 nt, Homo sapiens
  misc_RNA (1)...(19): siRNA sense strand
ucaaguuccucaagaaggu

SEQ ID NO: 443677 - RNA, 19 nt, Homo sapiens
  misc_RNA (1)...(19): siRNA sense strand
ucacucaguuccacuuuac

SEQ ID NO: 443678 - RNA, 19 nt, Homo sapiens
  misc_RNA (1)...(19): siRNA sense strand
caaggcugcuggaccuaug

SEQ ID NO: 443679 - RNA, 19 nt, Homo sapiens
  misc_RNA (1)...(19): siRNA sense strand
ggacaagcuggaagaggaa

SEQ ID NO: 443680 - RNA, 19 nt, Homo sapiens
  misc_RNA (1)...(19): siRNA sense strand
uuccaauucuuuccgcuua

SEQ ID NO: 443681 - RNA, 19 nt, Homo sapiens
  misc_RNA (1)...(19): siRNA sense strand
ggagccauuccaauucuuu

SEQ ID NO: 443682 - RNA, 19 nt, Homo sapiens
  misc_RNA (1)...(19): siRNA sense strand
ugaagaaggaggaggaaug

SEQ ID NO: 443683 - RNA, 19 nt, Homo sapiens
  misc_RNA (1)...(19): siRNA sense strand
caccaauucuauaggcauu

SEQ ID NO: 443684 - RNA, 19 nt, Homo sapiens
  misc_RNA (1)...(19): siRNA sense strand
ccaacaccagggagaauaa

SEQ ID NO: 443685 - RNA, 19 nt, Homo sapiens
  misc_RNA (1)...(19): siRNA sense strand
caaucaaaauccagaauga

SEQ ID NO: 443686 - RNA, 19 nt, Homo sapiens
  misc_RNA (1)...(19): siRNA sense strand
ggagcauuaucucuaugga

SEQ ID NO: 443687 - RNA, 19 nt, Homo sapiens
  misc_RNA (1)...(19): siRNA sense strand
ggagagaggccaggagaag

SEQ ID NO: 443688 - RNA, 19 nt, Homo sapiens
  misc_RNA (1)...(19): siRNA sense strand
ccaccuauuuaaccacugu

SEQ ID NO: 443689 - RNA, 19 nt, Homo sapiens
  misc_RNA (1)...(19): siRNA sense strand
gaagagaauacagacuaug

SEQ ID NO: 443690 - RNA, 19 nt, Homo sapiens
  misc_RNA (1)...(19): siRNA sense strand
gcagaaccaguuaaagaag

SEQ ID NO: 443691 - RNA, 19 nt, Homo sapiens
  misc_RNA (1)...(19): siRNA sense strand
ggaaauuaaccggagaaug

SEQ ID NO: 443692 - RNA, 19 nt, Homo sapiens
  misc_RNA (1)...(19): siRNA sense strand
aagcccuucuggagcauua

SEQ ID NO: 443693 - RNA, 19 nt, Homo sapiens
  misc_RNA (1)...(19): siRNA sense strand
cagauuaugccaacuucaa

SEQ ID NO: 443694 - RNA, 19 nt, Homo sapiens
  misc_RNA (1)...(19): siRNA sense strand
gaacguggcuuccagauaa

SEQ ID NO: 443695 - RNA, 19 nt, Homo sapiens
  misc_RNA (1)...(19): siRNA sense strand
gaagugaccucucuagaaa

SEQ ID NO: 443696 - RNA, 19 nt, Homo sapiens
  misc_RNA (1)...(19): siRNA sense strand
guaaacaucuugccuuaug

SEQ ID NO: 443697 - RNA, 19 nt, Homo sapiens
  misc_RNA (1)...(19): siRNA sense strand
gaaauuaaccggagaaugg

SEQ ID NO: 443698 - RNA, 19 nt, Homo sapiens
  misc_RNA (1)...(19): siRNA sense strand
gaagaaacggugaaugauu

SEQ ID NO: 443699 - RNA, 19 nt, Homo sapiens
  misc_RNA (1)...(19): siRNA sense strand
caacaaugcuaccacaguu

SEQ ID NO: 443700 - RNA, 19 nt, Homo sapiens
  misc_RNA (1)...(19): siRNA sense strand
caucaacgguuaccaagaa

SEQ ID NO: 443701 - RNA, 19 nt, Homo sapiens
  misc_RNA (1)...(19): siRNA sense strand
aagaaacggugaaugauuu

SEQ ID NO: 443702 - RNA, 19 nt, Homo sapiens
  misc_RNA (1)...(19): siRNA sense strand
gcaguggucugauaugugu

SEQ ID NO: 443703 - RNA, 19 nt, Homo sapiens
  misc_RNA (1)...(19): siRNA sense strand
cuagugaucguguuuauua

SEQ ID NO: 443704 - RNA, 19 nt, Homo sapiens
  misc_RNA (1)...(19): siRNA sense strand
ggaagugaccucucuagaa

SEQ ID NO: 443705 - RNA, 19 nt, Homo sapiens
  misc_RNA (1)...(19): siRNA sense strand
gaacagcaagcaccaauuc

SEQ ID NO: 443706 - RNA, 19 nt, Homo sapiens
  misc_RNA (1)...(19): siRNA sense strand
gaacgcauccuuuauugau

SEQ ID NO: 443707 - RNA, 19 nt, Homo sapiens
  misc_RNA (1)...(19): siRNA sense strand
gcucggcaguggucugaua

SEQ ID NO: 443708 - RNA, 19 nt, Homo sapiens
  misc_RNA (1)...(19): siRNA sense strand
gcauuacaauuucaccaaa

SEQ ID NO: 443709 - RNA, 19 nt, Homo sapiens
  misc_RNA (1)...(19): siRNA sense strand
gaaagggcaugaucagcau

SEQ ID NO: 443710 - RNA, 19 nt, Homo sapiens
  misc_RNA (1)...(19): siRNA sense strand
ggacguguauggcuuugug

SEQ ID NO: 443711 - RNA, 19 nt, Homo sapiens
  misc_RNA (1)...(19): siRNA sense strand
gaggacuucuggcgaauga

SEQ ID NO: 443712 - RNA, 19 nt, Homo sapiens
  misc_RNA (1)...(19): siRNA sense strand
gauuagaggaggaguuuaa

SEQ ID NO: 443713 - RNA, 19 nt, Homo sapiens
  misc_RNA (1)...(19): siRNA sense strand
gcaaaccgauaugcaguau

SEQ ID NO: 443714 - RNA, 19 nt, Homo sapiens
  misc_RNA (1)...(19): siRNA sense strand
ggaggaguuuaagaaguua

SEQ ID NO: 443715 - RNA, 19 nt, Homo sapiens
  misc_RNA (1)...(19): siRNA sense strand
aaaccgauaugcaguaugu

SEQ ID NO: 443716 - RNA, 19 nt, Homo sapiens
  misc_RNA (1)...(19): siRNA sense strand
gaagaagaaccguguuuua

SEQ ID NO: 443717 - RNA, 19 nt, Homo sapiens
  misc_RNA (1)...(19): siRNA sense strand
gcgaagagaauacagacua

SEQ ID NO: 443718 - RNA, 19 nt, Homo sapiens
  misc_RNA (1)...(19): siRNA sense strand
agagugaucauuccaguua

SEQ ID NO: 443719 - RNA, 19 nt, Homo sapiens
  misc_RNA (1)...(19): siRNA sense strand
gagaauggcagacgacaau

SEQ ID NO: 443720 - RNA, 19 nt, Homo sapiens
  misc_RNA (1)...(19): siRNA sense strand
gaccagcaacaauggauua

SEQ ID NO: 443721 - RNA, 19 nt, Homo sapiens
  misc_RNA (1)...(19): siRNA sense strand
gaauggcagacgacaauaa

SEQ ID NO: 443722 - RNA, 19 nt, Homo sapiens
  misc_RNA (1)...(19): siRNA sense strand
gugaacgcauccuuuauug

SEQ ID NO: 443723 - RNA, 19 nt, Homo sapiens
  misc_RNA (1)...(19): siRNA sense strand
gagaauacagacuauguga

SEQ ID NO: 443724 - RNA, 19 nt, Homo sapiens
  misc_RNA (1)...(19): siRNA sense strand
cagccaacaugaagaagaa

SEQ ID NO: 443725 - RNA, 19 nt, Homo sapiens
  misc_RNA (1)...(19): siRNA sense strand
acauucagcccaaauauaa

SEQ ID NO: 443726 - RNA, 19 nt, Homo sapiens
  misc_RNA (1)...(19): siRNA sense strand
guauauugaugcauucuca

SEQ ID NO: 443727 - RNA, 19 nt, Homo sapiens
  misc_RNA (1)...(19): siRNA sense strand
ggagaagugugcccaguac

SEQ ID NO: 443728 - RNA, 19 nt, Homo sapiens
  misc_RNA (1)...(19): siRNA sense strand
cgaagagaauacagacuau

SEQ ID NO: 443729 - RNA, 19 nt, Homo sapiens
  misc_RNA (1)...(19): siRNA sense strand
caaauucauugcugcacaa

SEQ ID NO: 443730 - RNA, 19 nt, Homo sapiens
  misc_RNA (1)...(19): siRNA sense strand
gaggaggaguuuaagaagu

SEQ ID NO: 443731 - RNA, 19 nt, Homo sapiens
  misc_RNA (1)...(19): siRNA sense strand
uaaccacugucaauucuuc

SEQ ID NO: 443732 - RNA, 19 nt, Homo sapiens
  misc_RNA (1)...(19): siRNA sense strand
caaccacuccagaaacuuu

SEQ ID NO: 443733 - RNA, 19 nt, Homo sapiens
  misc_RNA (1)...(19): siRNA sense strand
cggaugaucugggaacaaa

SEQ ID NO: 443734 - RNA, 19 nt, Homo sapiens
  misc_RNA (1)...(19): siRNA sense strand
aagaagaaacggugaauga

SEQ ID NO: 443735 - RNA, 19 nt, Homo sapiens
  misc_RNA (1)...(19): siRNA sense strand
cagaaccaguuaaagaaga

SEQ ID NO: 443736 - RNA, 19 nt, Homo sapiens
  misc_RNA (1)...(19): siRNA sense strand
gcaagcaccaauucuauag

SEQ ID NO: 443737 - RNA, 19 nt, Homo sapiens
  misc_RNA (1)...(19): siRNA sense strand
gaagaaggaggaggaaugu

SEQ ID NO: 443738 - RNA, 19 nt, Homo sapiens
  misc_RNA (1)...(19): siRNA sense strand
gaguggaaauccugcucua

SEQ ID NO: 443739 - RNA, 19 nt, Homo sapiens
  misc_RNA (1)...(19): siRNA sense strand
gcagcaaccacuccagaaa

SEQ ID NO: 443740 - RNA, 19 nt, Homo sapiens
  misc_RNA (1)...(19): siRNA sense strand
gcugggagccauuccaauu

SEQ ID NO: 443741 - RNA, 19 nt, Homo sapiens
  misc_RNA (1)...(19): siRNA sense strand
uaaacaucuugccuuauga

SEQ ID NO: 443742 - RNA, 19 nt, Homo sapiens
  misc_RNA (1)...(19): siRNA sense strand
caacauucagcccaaauau

SEQ ID NO: 443743 - RNA, 19 nt, Homo sapiens
  misc_RNA (1)...(19): siRNA sense strand
ggaguauauugaugcauuc

SEQ ID NO: 443744 - RNA, 19 nt, Homo sapiens
  misc_RNA (1)...(19): siRNA sense strand
acaagguggugcaggagua

SEQ ID NO: 443745 - RNA, 19 nt, Homo sapiens
  misc_RNA (1)...(19): siRNA sense strand
uaugugaacgcauccuuua

SEQ ID NO: 443746 - RNA, 19 nt, Homo sapiens
  misc_RNA (1)...(19): siRNA sense strand
gaauacagacuaugugaac

SEQ ID NO: 443747 - RNA, 19 nt, Homo sapiens
  misc_RNA (1)...(19): siRNA sense strand
gacaagaugcggacuggaa

SEQ ID NO: 443748 - RNA, 19 nt, Homo sapiens
  misc_RNA (1)...(19): siRNA sense strand
guaccuuugucgucauuga

SEQ ID NO: 443749 - RNA, 19 nt, Homo sapiens
  misc_RNA (1)...(19): siRNA sense strand
aaauccaacuucuucacua

SEQ ID NO: 443750 - RNA, 19 nt, Homo sapiens
  misc_RNA (1)...(19): siRNA sense strand
uuacagaucauuccauaug

SEQ ID NO: 443751 - RNA, 19 nt, Homo sapiens
  misc_RNA (1)...(19): siRNA sense strand
aggaggaguuuaagaaguu

SEQ ID NO: 443752 - RNA, 19 nt, Homo sapiens
  misc_RNA (1)...(19): siRNA sense strand
cagcaacaauggauuagag

SEQ ID NO: 443753 - RNA, 19 nt, Homo sapiens
  misc_RNA (1)...(19): siRNA sense strand
ggacaugaugcauacagaa

SEQ ID NO: 443754 - RNA, 19 nt, Homo sapiens
  misc_RNA (1)...(19): siRNA sense strand
cuucauucaucaacgguua

SEQ ID NO: 443755 - RNA, 19 nt, Homo sapiens
  misc_RNA (1)...(19): siRNA sense strand
gacaaugggaccacaagaa

SEQ ID NO: 443756 - RNA, 19 nt, Homo sapiens
  misc_RNA (1)...(19): siRNA sense strand
ggacccaccuauuuaacca

SEQ ID NO: 443757 - RNA, 19 nt, Homo sapiens
  misc_RNA (1)...(19): siRNA sense strand
aauccaacuucuucacuaa

SEQ ID NO: 443758 - RNA, 19 nt, Homo sapiens
  misc_RNA (1)...(19): siRNA sense strand
ggcagaaccaguuaaagaa

SEQ ID NO: 443759 - RNA, 19 nt, Homo sapiens
  misc_RNA (1)...(19): siRNA sense strand
cauaugaauucaacagagu

SEQ ID NO: 443760 - RNA, 19 nt, Homo sapiens
  misc_RNA (1)...(19): siRNA sense strand
cggcagaaccaguuaaaga

SEQ ID NO: 443761 - RNA, 19 nt, Homo sapiens
  misc_RNA (1)...(19): siRNA sense strand
gaugcggacuggaaaccuu

SEQ ID NO: 443762 - RNA, 19 nt, Homo sapiens
  misc_RNA (1)...(19): siRNA sense strand
uugaugcauucucagauua

SEQ ID NO: 443763 - RNA, 19 nt, Homo sapiens
  misc_RNA (1)...(19): siRNA sense strand
aggaguauauugaugcauu

SEQ ID NO: 443764 - RNA, 19 nt, Homo sapiens
  misc_RNA (1)...(19): siRNA sense strand
gagugaucauuccaguuaa

SEQ ID NO: 443765 - RNA, 19 nt, Homo sapiens
  misc_RNA (1)...(19): siRNA sense strand
ccaacauucagcccaaaua

SEQ ID NO: 443766 - RNA, 19 nt, Homo sapiens
  misc_RNA (1)...(19): siRNA sense strand
gugcaggaguauauugaug

SEQ ID NO: 443767 - RNA, 19 nt, Homo sapiens
  misc_RNA (1)...(19): siRNA sense strand
gguguccuauggagauauu

SEQ ID NO: 443768 - RNA, 19 nt, Homo sapiens
  misc_RNA (1)...(19): siRNA sense strand
uagaggaggaguuuaagaa

SEQ ID NO: 443769 - RNA, 19 nt, Homo sapiens
  misc_RNA (1)...(19): siRNA sense strand
aaugauuucuggcggauga

SEQ ID NO: 443770 - RNA, 19 nt, Homo sapiens
  misc_RNA (1)...(19): siRNA sense strand
cuauaggcauuacaauuuc

SEQ ID NO: 443771 - RNA, 19 nt, Homo sapiens
  misc_RNA (1)...(19): siRNA sense strand
ucacuaacuucucuuucug

SEQ ID NO: 443772 - RNA, 19 nt, Homo sapiens
  misc_RNA (1)...(19): siRNA sense strand
agaaggaggaggaauguga

SEQ ID NO: 443773 - RNA, 19 nt, Homo sapiens
  misc_RNA (1)...(19): siRNA sense strand
cagcaagcaccaauucuau

SEQ ID NO: 443774 - RNA, 19 nt, Homo sapiens
  misc_RNA (1)...(19): siRNA sense strand
gcaggaguauauugaugca

SEQ ID NO: 443775 - RNA, 19 nt, Homo sapiens
  misc_RNA (1)...(19): siRNA sense strand
ccacacaauugaggacuuc

SEQ ID NO: 443776 - RNA, 19 nt, Homo sapiens
  misc_RNA (1)...(19): siRNA sense strand
ucaaguuccucaagaaggu

SEQ ID NO: 443777 - RNA, 19 nt, Homo sapiens
  misc_RNA (1)...(19): siRNA sense strand
ucacucaguuccacuuuac

SEQ ID NO: 443778 - RNA, 19 nt, Homo sapiens
  misc_RNA (1)...(19): siRNA sense strand
caaggcugcuggaccuaug

SEQ ID NO: 443779 - RNA, 19 nt, Homo sapiens
  misc_RNA (1)...(19): siRNA sense strand
ggacaagcuggaagaggaa

SEQ ID NO: 443780 - RNA, 19 nt, Homo sapiens
  misc_RNA (1)...(19): siRNA sense strand
uuccaauucuuuccgcuua

SEQ ID NO: 443781 - RNA, 19 nt, Homo sapiens
  misc_RNA (1)...(19): siRNA sense strand
ggagccauuccaauucuuu

SEQ ID NO: 443782 - RNA, 19 nt, Homo sapiens
  misc_RNA (1)...(19): siRNA sense strand
ugaagaaggaggaggaaug

SEQ ID NO: 443783 - RNA, 19 nt, Homo sapiens
  misc_RNA (1)...(19): siRNA sense strand
caccaauucuauaggcauu

SEQ ID NO: 443784 - RNA, 19 nt, Homo sapiens
  misc_RNA (1)...(19): siRNA sense strand
ccaacaccagggagaauaa

SEQ ID NO: 443785 - RNA, 19 nt, Homo sapiens
  misc_RNA (1)...(19): siRNA sense strand
caaucaaaauccagaauga

SEQ ID NO: 443786 - RNA, 19 nt, Homo sapiens
  misc_RNA (1)...(19): siRNA sense strand
ggagcauuaucucuaugga

SEQ ID NO: 443787 - RNA, 19 nt, Homo sapiens
  misc_RNA (1)...(19): siRNA sense strand
ggagagaggccaggagaag

SEQ ID NO: 443788 - RNA, 19 nt, Homo sapiens
  misc_RNA (1)...(19): siRNA sense strand
ccaccuauuuaaccacugu

SEQ ID NO: 443789 - RNA, 19 nt, Homo sapiens
  misc_RNA (1)...(19): siRNA sense strand
gaagagaauacagacuaug

SEQ ID NO: 443790 - RNA, 19 nt, Homo sapiens
  misc_RNA (1)...(19): siRNA sense strand
gcagaaccaguuaaagaag

SEQ ID NO: 443791 - RNA, 19 nt, Homo sapiens
  misc_RNA (1)...(19): siRNA sense strand
ggaaauuaaccggagaaug

SEQ ID NO: 443792 - RNA, 19 nt, Homo sapiens
  misc_RNA (1)...(19): siRNA sense strand
aagcccuucuggagcauua

SEQ ID NO: 443793 - RNA, 19 nt, Homo sapiens
  misc_RNA (1)...(19): siRNA sense strand
cagauuaugccaacuucaa

SEQ ID NO: 443794 - RNA, 19 nt, Homo sapiens
  misc_RNA (1)...(19): siRNA sense strand
gaacguggcuuccagauaa

SEQ ID NO: 443795 - RNA, 19 nt, Homo sapiens
  misc_RNA (1)...(19): siRNA sense strand
gaagugaccucucuagaaa

SEQ ID NO: 443796 - RNA, 19 nt, Homo sapiens
  misc_RNA (1)...(19): siRNA sense strand
guaaacaucuugccuuaug

SEQ ID NO: 443797 - RNA, 19 nt, Homo sapiens
  misc_RNA (1)...(19): siRNA sense strand
gaaauuaaccggagaaugg

SEQ ID NO: 443798 - RNA, 19 nt, Homo sapiens
  misc_RNA (1)...(19): siRNA sense strand
gaagaaacggugaaugauu

SEQ ID NO: 443799 - RNA, 19 nt, Homo sapiens
  misc_RNA (1)...(19): siRNA sense strand
caacaaugcuaccacaguu

SEQ ID NO: 443800 - RNA, 19 nt, Homo sapiens
  misc_RNA (1)...(19): siRNA sense strand
caucaacgguuaccaagaa

SEQ ID NO: 443801 - RNA, 19 nt, Homo sapiens
  misc_RNA (1)...(19): siRNA sense strand
aagaaacggugaaugauuu

SEQ ID NO: 443802 - RNA, 19 nt, Homo sapiens
  misc_RNA (1)...(19): siRNA sense strand
gcaguggucugauaugugu

SEQ ID NO: 443803 - RNA, 19 nt, Homo sapiens
  misc_RNA (1)...(19): siRNA sense strand
cuagugaucguguuuauua

SEQ ID NO: 443804 - RNA, 19 nt, Homo sapiens
  misc_RNA (1)...(19): siRNA sense strand
ggaagugaccucucuagaa

SEQ ID NO: 443805 - RNA, 19 nt, Homo sapiens
  misc_RNA (1)...(19): siRNA sense strand
gaacagcaagcaccaauuc

SEQ ID NO: 443806 - RNA, 19 nt, Homo sapiens
  misc_RNA (1)...(19): siRNA sense strand
gaacgcauccuuuauugau

SEQ ID NO: 443807 - RNA, 19 nt, Homo sapiens
  misc_RNA (1)...(19): siRNA sense strand
gcucggcaguggucugaua

SEQ ID NO: 443808 - RNA, 19 nt, Homo sapiens
  misc_RNA (1)...(19): siRNA sense strand
gcauuacaauuucaccaaa

SEQ ID NO: 443809 - RNA, 19 nt, Homo sapiens
  misc_RNA (1)...(19): siRNA sense strand
gaaagggcaugaucagcau

SEQ ID NO: 443810 - RNA, 19 nt, Homo sapiens
  misc_RNA (1)...(19): siRNA sense strand
ggacguguauggcuuugug

SEQ ID NO: 443811 - RNA, 19 nt, Homo sapiens
  misc_RNA (1)...(19): siRNA sense strand
gaggacuucuggcgaauga

SEQ ID NO: 443812 - RNA, 19 nt, Homo sapiens
  misc_RNA (1)...(19): siRNA sense strand
gauuagaggaggaguuuaa

SEQ ID NO: 443813 - RNA, 19 nt, Homo sapiens
  misc_RNA (1)...(19): siRNA sense strand
gcaaaccgauaugcaguau

SEQ ID NO: 443814 - RNA, 19 nt, Homo sapiens
  misc_RNA (1)...(19): siRNA sense strand
ggaggaguuuaagaaguua

SEQ ID NO: 443815 - RNA, 19 nt, Homo sapiens
  misc_RNA (1)...(19): siRNA sense strand
aaaccgauaugcaguaugu

SEQ ID NO: 443816 - RNA, 19 nt, Homo sapiens
  misc_RNA (1)...(19): siRNA sense strand
gaagaagaaccguguuuua

SEQ ID NO: 443817 - RNA, 19 nt, Homo sapiens
  misc_RNA (1)...(19): siRNA sense strand
gcgaagagaauacagacua

SEQ ID NO: 443818 - RNA, 19 nt, Homo sapiens
  misc_RNA (1)...(19): siRNA sense strand
agagugaucauuccaguua

SEQ ID NO: 443819 - RNA, 19 nt, Homo sapiens
  misc_RNA (1)...(19): siRNA sense strand
gagaauggcagacgacaau

SEQ ID NO: 443820 - RNA, 19 nt, Homo sapiens
  misc_RNA (1)...(19): siRNA sense strand
gaccagcaacaauggauua

SEQ ID NO: 443821 - RNA, 19 nt, Homo sapiens
  misc_RNA (1)...(19): siRNA sense strand
gaauggcagacgacaauaa

SEQ ID NO: 443822 - RNA, 19 nt, Homo sapiens
  misc_RNA (1)...(19): siRNA sense strand
gugaacgcauccuuuauug

SEQ ID NO: 443823 - RNA, 19 nt, Homo sapiens
  misc_RNA (1)...(19): siRNA sense strand
gagaauacagacuauguga

SEQ ID NO: 443824 - RNA, 19 nt, Homo sapiens
  misc_RNA (1)...(19): siRNA sense strand
cagccaacaugaagaagaa

SEQ ID NO: 443825 - RNA, 19 nt, Homo sapiens
  misc_RNA (1)...(19): siRNA sense strand
acauucagcccaaauauaa

SEQ ID NO: 443826 - RNA, 19 nt, Homo sapiens
  misc_RNA (1)...(19): siRNA sense strand
guauauugaugcauucuca

SEQ ID NO: 443827 - RNA, 19 nt, Homo sapiens
  misc_RNA (1)...(19): siRNA sense strand
ggagaagugugcccaguac

SEQ ID NO: 443828 - RNA, 19 nt, Homo sapiens
  misc_RNA (1)...(19): siRNA sense strand
cgaagagaauacagacuau

SEQ ID NO: 443829 - RNA, 19 nt, Homo sapiens
  misc_RNA (1)...(19): siRNA sense strand
caaauucauugcugcacaa

SEQ ID NO: 443830 - RNA, 19 nt, Homo sapiens
  misc_RNA (1)...(19): siRNA sense strand
gaggaggaguuuaagaagu

SEQ ID NO: 443831 - RNA, 19 nt, Homo sapiens
  misc_RNA (1)...(19): siRNA sense strand
uaaccacugucaauucuuc

SEQ ID NO: 443832 - RNA, 19 nt, Homo sapiens
  misc_RNA (1)...(19): siRNA sense strand
caaccacuccagaaacuuu

SEQ ID NO: 443833 - RNA, 19 nt, Homo sapiens
  misc_RNA (1)...(19): siRNA sense strand
cggaugaucugggaacaaa

SEQ ID NO: 443834 - RNA, 19 nt, Homo sapiens
  misc_RNA (1)...(19): siRNA sense strand
aagaagaaacggugaauga

SEQ ID NO: 443835 - RNA, 19 nt, Homo sapiens
  misc_RNA (1)...(19): siRNA sense strand
cagaaccaguuaaagaaga

SEQ ID NO: 443836 - RNA, 19 nt, Homo sapiens
  misc_RNA (1)...(19): siRNA sense strand
gcaagcaccaauucuauag

SEQ ID NO: 443837 - RNA, 19 nt, Homo sapiens
  misc_RNA (1)...(19): siRNA sense strand
gaagaaggaggaggaaugu

SEQ ID NO: 443838 - RNA, 19 nt, Homo sapiens
  misc_RNA (1)...(19): siRNA sense strand
gaguggaaauccugcucua

SEQ ID NO: 443839 - RNA, 19 nt, Homo sapiens
  misc_RNA (1)...(19): siRNA sense strand
gcagcaaccacuccagaaa

SEQ ID NO: 443840 - RNA, 19 nt, Homo sapiens
  misc_RNA (1)...(19): siRNA sense strand
gcugggagccauuccaauu

SEQ ID NO: 443841 - RNA, 19 nt, Homo sapiens
  misc_RNA (1)...(19): siRNA sense strand
uaaacaucuugccuuauga

SEQ ID NO: 443842 - RNA, 19 nt, Homo sapiens
  misc_RNA (1)...(19): siRNA sense strand
caacauucagcccaaauau

SEQ ID NO: 443843 - RNA, 19 nt, Homo sapiens
  misc_RNA (1)...(19): siRNA sense strand
ggaguauauugaugcauuc

SEQ ID NO: 443844 - RNA, 19 nt, Homo sapiens
  misc_RNA (1)...(19): siRNA sense strand
acaagguggugcaggagua

SEQ ID NO: 443845 - RNA, 19 nt, Homo sapiens
  misc_RNA (1)...(19): siRNA sense strand
uaugugaacgcauccuuua

SEQ ID NO: 443846 - RNA, 19 nt, Homo sapiens
  misc_RNA (1)...(19): siRNA sense strand
gaauacagacuaugugaac

SEQ ID NO: 443847 - RNA, 19 nt, Homo sapiens
  misc_RNA (1)...(19): siRNA sense strand
gacaagaugcggacuggaa

SEQ ID NO: 443848 - RNA, 19 nt, Homo sapiens
  misc_RNA (1)...(19): siRNA sense strand
guaccuuugucgucauuga

SEQ ID NO: 443849 - RNA, 19 nt, Homo sapiens
  misc_RNA (1)...(19): siRNA sense strand
aaauccaacuucuucacua

SEQ ID NO: 443850 - RNA, 19 nt, Homo sapiens
  misc_RNA (1)...(19): siRNA sense strand
uuacagaucauuccauaug

SEQ ID NO: 443851 - RNA, 19 nt, Homo sapiens
  misc_RNA (1)...(19): siRNA sense strand
aggaggaguuuaagaaguu

SEQ ID NO: 443852 - RNA, 19 nt, Homo sapiens
  misc_RNA (1)...(19): siRNA sense strand
cagcaacaauggauuagag

SEQ ID NO: 443853 - RNA, 19 nt, Homo sapiens
  misc_RNA (1)...(19): siRNA sense strand
ggacaugaugcauacagaa

SEQ ID NO: 443854 - RNA, 19 nt, Homo sapiens
  misc_RNA (1)...(19): siRNA sense strand
cuucauucaucaacgguua

SEQ ID NO: 443855 - RNA, 19 nt, Homo sapiens
  misc_RNA (1)...(19): siRNA sense strand
gacaaugggaccacaagaa

SEQ ID NO: 443856 - RNA, 19 nt, Homo sapiens
  misc_RNA (1)...(19): siRNA sense strand
ggacccaccuauuuaacca

SEQ ID NO: 443857 - RNA, 19 nt, Homo sapiens
  misc_RNA (1)...(19): siRNA sense strand
aauccaacuucuucacuaa

SEQ ID NO: 443858 - RNA, 19 nt, Homo sapiens
  misc_RNA (1)...(19): siRNA sense strand
ggcagaaccaguuaaagaa

SEQ ID NO: 443859 - RNA, 19 nt, Homo sapiens
  misc_RNA (1)...(19): siRNA sense strand
cauaugaauucaacagagu

SEQ ID NO: 443860 - RNA, 19 nt, Homo sapiens
  misc_RNA (1)...(19): siRNA sense strand
cggcagaaccaguuaaaga

SEQ ID NO: 443861 - RNA, 19 nt, Homo sapiens
  misc_RNA (1)...(19): siRNA sense strand
gaugcggacuggaaaccuu

SEQ ID NO: 443862 - RNA, 19 nt, Homo sapiens
  misc_RNA (1)...(19): siRNA sense strand
uugaugcauucucagauua

SEQ ID NO: 443863 - RNA, 19 nt, Homo sapiens
  misc_RNA (1)...(19): siRNA sense strand
aggaguauauugaugcauu

SEQ ID NO: 443864 - RNA, 19 nt, Homo sapiens
  misc_RNA (1)...(19): siRNA sense strand
gagugaucauuccaguuaa

SEQ ID NO: 443865 - RNA, 19 nt, Homo sapiens
  misc_RNA (1)...(19): siRNA sense strand
ccaacauucagcccaaaua

SEQ ID NO: 443866 - RNA, 19 nt, Homo sapiens
  misc_RNA (1)...(19): siRNA sense strand
gugcaggaguauauugaug

SEQ ID NO: 443867 - RNA, 19 nt, Homo sapiens
  misc_RNA (1)...(19): siRNA sense strand
gguguccuauggagauauu

SEQ ID NO: 443868 - RNA, 19 nt, Homo sapiens
  misc_RNA (1)...(19): siRNA sense strand
uagaggaggaguuuaagaa

SEQ ID NO: 443869 - RNA, 19 nt, Homo sapiens
  misc_RNA (1)...(19): siRNA sense strand
aaugauuucuggcggauga

SEQ ID NO: 443870 - RNA, 19 nt, Homo sapiens
  misc_RNA (1)...(19): siRNA sense strand
cuauaggcauuacaauuuc

SEQ ID NO: 443871 - RNA, 19 nt, Homo sapiens
  misc_RNA (1)...(19): siRNA sense strand
ucacuaacuucucuuucug

SEQ ID NO: 443872 - RNA, 19 nt, Homo sapiens
  misc_RNA (1)...(19): siRNA sense strand
agaaggaggaggaauguga

SEQ ID NO: 443873 - RNA, 19 nt, Homo sapiens
  misc_RNA (1)...(19): siRNA sense strand
cagcaagcaccaauucuau

SEQ ID NO: 443874 - RNA, 19 nt, Homo sapiens
  misc_RNA (1)...(19): siRNA sense strand
gcaggaguauauugaugca

SEQ ID NO: 443875 - RNA, 19 nt, Homo sapiens
  misc_RNA (1)...(19): siRNA sense strand
ccacacaauugaggacuuc

SEQ ID NO: 443876 - RNA, 19 nt, Homo sapiens
  misc_RNA (1)...(19): siRNA sense strand
ucaaguuccucaagaaggu

SEQ ID NO: 443877 - RNA, 19 nt, Homo sapiens
  misc_RNA (1)...(19): siRNA sense strand
ucacucaguuccacuuuac

SEQ ID NO: 443878 - RNA, 19 nt, Homo sapiens
  misc_RNA (1)...(19): siRNA sense strand
caaggcugcuggaccuaug

SEQ ID NO: 443879 - RNA, 19 nt, Homo sapiens
  misc_RNA (1)...(19): siRNA sense strand
ggacaagcuggaagaggaa

SEQ ID NO: 443880 - RNA, 19 nt, Homo sapiens
  misc_RNA (1)...(19): siRNA sense strand
uuccaauucuuuccgcuua

SEQ ID NO: 443881 - RNA, 19 nt, Homo sapiens
  misc_RNA (1)...(19): siRNA sense strand
ggagccauuccaauucuuu

SEQ ID NO: 443882 - RNA, 19 nt, Homo sapiens
  misc_RNA (1)...(19): siRNA sense strand
ugaagaaggaggaggaaug

SEQ ID NO: 443883 - RNA, 19 nt, Homo sapiens
  misc_RNA (1)...(19): siRNA sense strand
caccaauucuauaggcauu

SEQ ID NO: 443884 - RNA, 19 nt, Homo sapiens
  misc_RNA (1)...(19): siRNA sense strand
ccaacaccagggagaauaa

SEQ ID NO: 443885 - RNA, 19 nt, Homo sapiens
  misc_RNA (1)...(19): siRNA sense strand
caaucaaaauccagaauga

SEQ ID NO: 443886 - RNA, 19 nt, Homo sapiens
  misc_RNA (1)...(19): siRNA sense strand
ggagcauuaucucuaugga

SEQ ID NO: 443887 - RNA, 19 nt, Homo sapiens
  misc_RNA (1)...(19): siRNA sense strand
ggagagaggccaggagaag

SEQ ID NO: 443888 - RNA, 19 nt, Homo sapiens
  misc_RNA (1)...(19): siRNA sense strand
ccaccuauuuaaccacugu

SEQ ID NO: 443889 - RNA, 19 nt, Homo sapiens
  misc_RNA (1)...(19): siRNA sense strand
gaagagaauacagacuaug

SEQ ID NO: 443890 - RNA, 19 nt, Homo sapiens
  misc_RNA (1)...(19): siRNA sense strand
gcagaaccaguuaaagaag

SEQ ID NO: 443891 - RNA, 19 nt, Homo sapiens
  misc_RNA (1)...(19): siRNA sense strand
ggaaauuaaccggagaaug

SEQ ID NO: 443892 - RNA, 19 nt, Homo sapiens
  misc_RNA (1)...(19): siRNA sense strand
aagcccuucuggagcauua

SEQ ID NO: 443893 - RNA, 19 nt, Homo sapiens
  misc_RNA (1)...(19): siRNA sense strand
cagauuaugccaacuucaa

SEQ ID NO: 443894 - RNA, 19 nt, Homo sapiens
  misc_RNA (1)...(19): siRNA sense strand
gcacaucagugucaaggaa

SEQ ID NO: 443895 - RNA, 19 nt, Homo sapiens
  misc_RNA (1)...(19): siRNA sense strand
ggacacugcccacgacuuu

SEQ ID NO: 443896 - RNA, 19 nt, Homo sapiens
  misc_RNA (1)...(19): siRNA sense strand
ucaacaaccugguggagaa

SEQ ID NO: 443897 - RNA, 19 nt, Homo sapiens
  misc_RNA (1)...(19): siRNA sense strand
guguggagcuggaguguga

SEQ ID NO: 443898 - RNA, 19 nt, Homo sapiens
  misc_RNA (1)...(19): siRNA sense strand
gcaggaguuugauaagcuu

SEQ ID NO: 443899 - RNA, 19 nt, Homo sapiens
  misc_RNA (1)...(19): siRNA sense strand
gaaggaggacgacguuucu

SEQ ID NO: 443900 - RNA, 19 nt, Homo sapiens
  misc_RNA (1)...(19): siRNA sense strand
gaugaaggaggacgacguu

SEQ ID NO: 443901 - RNA, 19 nt, Homo sapiens
  misc_RNA (1)...(19): siRNA sense strand
uugauaagcuucgcgaguu

SEQ ID NO: 443902 - RNA, 19 nt, Homo sapiens
  misc_RNA (1)...(19): siRNA sense strand
ggacagcucagccucuucu

SEQ ID NO: 443903 - RNA, 19 nt, Homo sapiens
  misc_RNA (1)...(19): siRNA sense strand
agggcgagcugucuuucua

SEQ ID NO: 443904 - RNA, 19 nt, Homo sapiens
  misc_RNA (1)...(19): siRNA sense strand
gcggacagcucagccucuu

SEQ ID NO: 443905 - RNA, 19 nt, Homo sapiens
  misc_RNA (1)...(19): siRNA sense strand
gcaccaaccacacccucaa

SEQ ID NO: 443906 - RNA, 19 nt, Homo sapiens
  misc_RNA (1)...(19): siRNA sense strand
ggcaggaguuugauaagcu

SEQ ID NO: 443907 - RNA, 19 nt, Homo sapiens
  misc_RNA (1)...(19): siRNA sense strand
ucuguacccuucagcuuug

SEQ ID NO: 443908 - RNA, 19 nt, Homo sapiens
  misc_RNA (1)...(19): siRNA sense strand
gggcucccgugucuucuca

SEQ ID NO: 443909 - RNA, 19 nt, Homo sapiens
  misc_RNA (1)...(19): siRNA sense strand
ggcgagcugucuuucuaug

SEQ ID NO: 443910 - RNA, 19 nt, Homo sapiens
  misc_RNA (1)...(19): siRNA sense strand
ggcugcagauggagaugaa

SEQ ID NO: 443911 - RNA, 19 nt, Homo sapiens
  misc_RNA (1)...(19): siRNA sense strand
ugauaagcuucgcgaguuc

SEQ ID NO: 443912 - RNA, 19 nt, Homo sapiens
  misc_RNA (1)...(19): siRNA sense strand
ugaaggaggacgacguuuc

SEQ ID NO: 443913 - RNA, 19 nt, Homo sapiens
  misc_RNA (1)...(19): siRNA sense strand
gaagaugaagcagcucaca

SEQ ID NO: 443914 - RNA, 19 nt, Homo sapiens
  misc_RNA (1)...(19): siRNA sense strand
ggaggacgacguuucuuuu

SEQ ID NO: 443915 - RNA, 19 nt, Homo sapiens
  misc_RNA (1)...(19): siRNA sense strand
ccagagccuuugcgcaucu

SEQ ID NO: 443916 - RNA, 19 nt, Homo sapiens
  misc_RNA (1)...(19): siRNA sense strand
uuaucgaugucugcaagua

SEQ ID NO: 443917 - RNA, 19 nt, Homo sapiens
  misc_RNA (1)...(19): siRNA sense strand
ggagcaggccauucuggau

SEQ ID NO: 443918 - RNA, 19 nt, Homo sapiens
  misc_RNA (1)...(19): siRNA sense strand
uugcaucuguggaaucugu

SEQ ID NO: 443919 - RNA, 19 nt, Homo sapiens
  misc_RNA (1)...(19): siRNA sense strand
uaccgcgucuggaagaaga

SEQ ID NO: 443920 - RNA, 19 nt, Homo sapiens
  misc_RNA (1)...(19): siRNA sense strand
cgacguuucuuuucucaug

SEQ ID NO: 443921 - RNA, 19 nt, Homo sapiens
  misc_RNA (1)...(19): siRNA sense strand
agaugaagcagcucacaga

SEQ ID NO: 443922 - RNA, 19 nt, Homo sapiens
  misc_RNA (1)...(19): siRNA sense strand
gcucgggcuucugguaugu

SEQ ID NO: 443923 - RNA, 19 nt, Homo sapiens
  misc_RNA (1)...(19): siRNA sense strand
ggauccggcaggaguuuga

SEQ ID NO: 443924 - RNA, 19 nt, Homo sapiens
  misc_RNA (1)...(19): siRNA sense strand
gcgagcugucuuucuauga

SEQ ID NO: 443925 - RNA, 19 nt, Homo sapiens
  misc_RNA (1)...(19): siRNA sense strand
gcuugcaucuguggaaucu

SEQ ID NO: 443926 - RNA, 19 nt, Homo sapiens
  misc_RNA (1)...(19): siRNA sense strand
ucgagcggcugcagaugga

SEQ ID NO: 443927 - RNA, 19 nt, Homo sapiens
  misc_RNA (1)...(19): siRNA sense strand
caaccacacccucaacaac

SEQ ID NO: 443928 - RNA, 19 nt, Homo sapiens
  misc_RNA (1)...(19): siRNA sense strand
cgagcugucuuucuaugac

SEQ ID NO: 443929 - RNA, 19 nt, Homo sapiens
  misc_RNA (1)...(19): siRNA sense strand
agacaaggcagaagcaacu

SEQ ID NO: 443930 - RNA, 19 nt, Homo sapiens
  misc_RNA (1)...(19): siRNA sense strand
ccaaccacacccucaacaa

SEQ ID NO: 443931 - RNA, 19 nt, Homo sapiens
  misc_RNA (1)...(19): siRNA sense strand
ccggcaugcuuaucgaugu

SEQ ID NO: 443932 - RNA, 19 nt, Homo sapiens
  misc_RNA (1)...(19): siRNA sense strand
ggagacaaggcagaagcaa

SEQ ID NO: 443933 - RNA, 19 nt, Homo sapiens
  misc_RNA (1)...(19): siRNA sense strand
gaggagggcgagcugucuu

SEQ ID NO: 443934 - RNA, 19 nt, Homo sapiens
  misc_RNA (1)...(19): siRNA sense strand
ccaagugcaggaacaugga

SEQ ID NO: 443935 - RNA, 19 nt, Homo sapiens
  misc_RNA (1)...(19): siRNA sense strand
ggacgacguuucuuuucuc

SEQ ID NO: 443936 - RNA, 19 nt, Homo sapiens
  misc_RNA (1)...(19): siRNA sense strand
aggaggacgacguuucuuu

SEQ ID NO: 443937 - RNA, 19 nt, Homo sapiens
  misc_RNA (1)...(19): siRNA sense strand
ggacacugcccacgacuuu

SEQ ID NO: 443938 - RNA, 19 nt, Homo sapiens
  misc_RNA (1)...(19): siRNA sense strand
ucaacaaccugguggagaa

SEQ ID NO: 443939 - RNA, 19 nt, Homo sapiens
  misc_RNA (1)...(19): siRNA sense strand
ggacagcucagccucuucu

SEQ ID NO: 443940 - RNA, 19 nt, Homo sapiens
  misc_RNA (1)...(19): siRNA sense strand
gcggacagcucagccucuu

SEQ ID NO: 443941 - RNA, 19 nt, Homo sapiens
  misc_RNA (1)...(19): siRNA sense strand
gcaccaaccacacccucaa

SEQ ID NO: 443942 - RNA, 19 nt, Homo sapiens
  misc_RNA (1)...(19): siRNA sense strand
caaccacacccucaacaac

SEQ ID NO: 443943 - RNA, 19 nt, Homo sapiens
  misc_RNA (1)...(19): siRNA sense strand
ccaaccacacccucaacaa

SEQ ID NO: 443944 - RNA, 19 nt, Homo sapiens
  misc_RNA (1)...(19): siRNA sense strand
ccaagugcaggaacaugga

SEQ ID NO: 443945 - RNA, 19 nt, Homo sapiens
  misc_RNA (1)...(19): siRNA sense strand
gaugauggcucacgcaaga

SEQ ID NO: 443946 - RNA, 19 nt, Homo sapiens
  misc_RNA (1)...(19): siRNA sense strand
gcaaugagaagaagaugua

SEQ ID NO: 443947 - RNA, 19 nt, Homo sapiens
  misc_RNA (1)...(19): siRNA sense strand
gcaagaaguauaacuguaa

SEQ ID NO: 443948 - RNA, 19 nt, Homo sapiens
  misc_RNA (1)...(19): siRNA sense strand
gcaagaaggcugaguuuau

SEQ ID NO: 443949 - RNA, 19 nt, Homo sapiens
  misc_RNA (1)...(19): siRNA sense strand
gagaagcacuguguguuug

SEQ ID NO: 443950 - RNA, 19 nt, Homo sapiens
  misc_RNA (1)...(19): siRNA sense strand
ggagaagcacuguguguuu

SEQ ID NO: 443951 - RNA, 19 nt, Homo sapiens
  misc_RNA (1)...(19): siRNA sense strand
caagaaggcugaguuuauc

SEQ ID NO: 443952 - RNA, 19 nt, Homo sapiens
  misc_RNA (1)...(19): siRNA sense strand
gaggaugaaucaauuuaca

SEQ ID NO: 443953 - RNA, 19 nt, Homo sapiens
  misc_RNA (1)...(19): siRNA sense strand
cgagugcagugucaaguuu

SEQ ID NO: 443954 - RNA, 19 nt, Homo sapiens
  misc_RNA (1)...(19): siRNA sense strand
gcgacaagcugccguucaa

SEQ ID NO: 443955 - RNA, 19 nt, Homo sapiens
  misc_RNA (1)...(19): siRNA sense strand
ggaguauccuugcaaucaa

SEQ ID NO: 443956 - RNA, 19 nt, Homo sapiens
  misc_RNA (1)...(19): siRNA sense strand
ccaagcacaucaaggagaa

SEQ ID NO: 443957 - RNA, 19 nt, Homo sapiens
  misc_RNA (1)...(19): siRNA sense strand
agaagaagaugcgggauga

SEQ ID NO: 443958 - RNA, 19 nt, Homo sapiens
  misc_RNA (1)...(19): siRNA sense strand
gcacagcaaugagaagaag

SEQ ID NO: 443959 - RNA, 19 nt, Homo sapiens
  misc_RNA (1)...(19): siRNA sense strand
gagcugcagugccacauca

SEQ ID NO: 443960 - RNA, 19 nt, Homo sapiens
  misc_RNA (1)...(19): siRNA sense strand
ccacacacagcaagaagua

SEQ ID NO: 443961 - RNA, 19 nt, Homo sapiens
  misc_RNA (1)...(19): siRNA sense strand
gcaguucuccucaguggaa

SEQ ID NO: 443962 - RNA, 19 nt, Homo sapiens
  misc_RNA (1)...(19): siRNA sense strand
cggaggagcuggagaagca

SEQ ID NO: 443963 - RNA, 19 nt, Homo sapiens
  misc_RNA (1)...(19): siRNA sense strand
ugcagaagcucuacaagug

SEQ ID NO: 443964 - RNA, 19 nt, Homo sapiens
  misc_RNA (1)...(19): siRNA sense strand
gcgaggaggaguuuauuga

SEQ ID NO: 443965 - RNA, 19 nt, Homo sapiens
  misc_RNA (1)...(19): siRNA sense strand
ucaaggagaaccacaagaa

SEQ ID NO: 443966 - RNA, 19 nt, Homo sapiens
  misc_RNA (1)...(19): siRNA sense strand
gcaucaaccacgaguguaa

SEQ ID NO: 443967 - RNA, 19 nt, Homo sapiens
  misc_RNA (1)...(19): siRNA sense strand
cuacaugugucccaucugu

SEQ ID NO: 443968 - RNA, 19 nt, Homo sapiens
  misc_RNA (1)...(19): siRNA sense strand
acacacugcucgcccauau

SEQ ID NO: 443969 - RNA, 19 nt, Homo sapiens
  misc_RNA (1)...(19): siRNA sense strand
acacacagcaagaaguaua

SEQ ID NO: 443970 - RNA, 19 nt, Homo sapiens
  misc_RNA (1)...(19): siRNA sense strand
gccauacccuugccaguuc

SEQ ID NO: 443971 - RNA, 19 nt, Homo sapiens
  misc_RNA (1)...(19): siRNA sense strand
cggccaagcuccucuguca

SEQ ID NO: 443972 - RNA, 19 nt, Homo sapiens
  misc_RNA (1)...(19): siRNA sense strand
guuccaagcgggacuuuaa

SEQ ID NO: 443973 - RNA, 19 nt, Homo sapiens
  misc_RNA (1)...(19): siRNA sense strand
ggaaaggcacccagacauc

SEQ ID NO: 443974 - RNA, 19 nt, Homo sapiens
  misc_RNA (1)...(19): siRNA sense strand
guaauaaugcuuucuucug

SEQ ID NO: 443975 - RNA, 19 nt, Homo sapiens
  misc_RNA (1)...(19): siRNA sense strand
gcuccucugucaccucauu

SEQ ID NO: 443976 - RNA, 19 nt, Homo sapiens
  misc_RNA (1)...(19): siRNA sense strand
gcagagcgaggaggaguuu

SEQ ID NO: 443977 - RNA, 19 nt, Homo sapiens
  misc_RNA (1)...(19): siRNA sense strand
caagaaguauaacuguaag

SEQ ID NO: 443978 - RNA, 19 nt, Homo sapiens
  misc_RNA (1)...(19): siRNA sense strand
gagcugcgacaagcaauuu

SEQ ID NO: 443979 - RNA, 19 nt, Homo sapiens
  misc_RNA (1)...(19): siRNA sense strand
gggaguauccuugcaauca

SEQ ID NO: 443980 - RNA, 19 nt, Homo sapiens
  misc_RNA (1)...(19): siRNA sense strand
gaguauccuugcaaucaau

SEQ ID NO: 443981 - RNA, 19 nt, Homo sapiens
  misc_RNA (1)...(19): siRNA sense strand
ccagcaagcccuucaagug

SEQ ID NO: 443982 - RNA, 19 nt, Homo sapiens
  misc_RNA (1)...(19): siRNA sense strand
agagagagauccaaaucca

SEQ ID NO: 443983 - RNA, 19 nt, Homo sapiens
  misc_RNA (1)...(19): siRNA sense strand
agucacaagugcaacguuu

SEQ ID NO: 443984 - RNA, 19 nt, Homo sapiens
  misc_RNA (1)...(19): siRNA sense strand
ccacgucgacccacuaugu

SEQ ID NO: 443985 - RNA, 19 nt, Homo sapiens
  misc_RNA (1)...(19): siRNA sense strand
ucaccaagcacaucaagga

SEQ ID NO: 443986 - RNA, 19 nt, Homo sapiens
  misc_RNA (1)...(19): siRNA sense strand
agaccgagcugcagaacca

SEQ ID NO: 443987 - RNA, 19 nt, Homo sapiens
  misc_RNA (1)...(19): siRNA sense strand
gcucacaagugcaucuucu

SEQ ID NO: 443988 - RNA, 19 nt, Homo sapiens
  misc_RNA (1)...(19): siRNA sense strand
uggaugaccugcagaagca

SEQ ID NO: 443989 - RNA, 19 nt, Homo sapiens
  misc_RNA (1)...(19): siRNA sense strand
ucacugcccugaggucuuc

SEQ ID NO: 443990 - RNA, 19 nt, Homo sapiens
  misc_RNA (1)...(19): siRNA sense strand
ggagaaggaagccaagaag

SEQ ID NO: 443991 - RNA, 19 nt, Homo sapiens
  misc_RNA (1)...(19): siRNA sense strand
gaagcacuguguguuugau

SEQ ID NO: 443992 - RNA, 19 nt, Homo sapiens
  misc_RNA (1)...(19): siRNA sense strand
ucaaugcgaccucaaguuc

SEQ ID NO: 443993 - RNA, 19 nt, Homo sapiens
  misc_RNA (1)...(19): siRNA sense strand
ccacaugcaggcccacaaa

SEQ ID NO: 443994 - RNA, 19 nt, Homo sapiens
  misc_RNA (1)...(19): siRNA sense strand
gcagccgccucuucaagca

SEQ ID NO: 443995 - RNA, 19 nt, Homo sapiens
  misc_RNA (1)...(19): siRNA sense strand
cgagagagagauccaaauc

SEQ ID NO: 443996 - RNA, 19 nt, Homo sapiens
  misc_RNA (1)...(19): siRNA sense strand
ggagaaccacaagaacauu

SEQ ID NO: 443997 - RNA, 19 nt, Homo sapiens
  misc_RNA (1)...(19): siRNA sense strand
ccauggguuuccuuacuga

SEQ ID NO: 443998 - RNA, 19 nt, Homo sapiens
  misc_RNA (1)...(19): siRNA sense strand
aaccaugccuacccuguga

SEQ ID NO: 443999 - RNA, 19 nt, Homo sapiens
  misc_RNA (1)...(19): siRNA sense strand
gcagcgaccaccucaagau

SEQ ID NO: 444000 - RNA, 19 nt, Homo sapiens
  misc_RNA (1)...(19): siRNA sense strand
ucaaggaguuccgcagcaa

SEQ ID NO: 444001 - RNA, 19 nt, Homo sapiens
  misc_RNA (1)...(19): siRNA sense strand
agcaagaaguauaacugua

SEQ ID NO: 444002 - RNA, 19 nt, Homo sapiens
  misc_RNA (1)...(19): siRNA sense strand
agaaggaagccaagaagga

SEQ ID NO: 444003 - RNA, 19 nt, Homo sapiens
  misc_RNA (1)...(19): siRNA sense strand
agaagcaccugcgggagaa

SEQ ID NO: 444004 - RNA, 19 nt, Homo sapiens
  misc_RNA (1)...(19): siRNA sense strand
gagaaccacaagaacauuc

SEQ ID NO: 444005 - RNA, 19 nt, Homo sapiens
  misc_RNA (1)...(19): siRNA sense strand
cagcagagccacacauguc

SEQ ID NO: 444006 - RNA, 19 nt, Homo sapiens
  misc_RNA (1)...(19): siRNA sense strand
gugaagcacagcaaugaga

SEQ ID NO: 444007 - RNA, 19 nt, Homo sapiens
  misc_RNA (1)...(19): siRNA sense strand
ggcaggaggacaagaucua

SEQ ID NO: 444008 - RNA, 19 nt, Homo sapiens
  misc_RNA (1)...(19): siRNA sense strand
gagcgaggaggaguuuauu

SEQ ID NO: 444009 - RNA, 19 nt, Homo sapiens
  misc_RNA (1)...(19): siRNA sense strand
gcaccugucgcaucugcaa

SEQ ID NO: 444010 - RNA, 19 nt, Homo sapiens
  misc_RNA (1)...(19): siRNA sense strand
ucacagugcccucagaagu

SEQ ID NO: 444011 - RNA, 19 nt, Homo sapiens
  misc_RNA (1)...(19): siRNA sense strand
gaagaggcacgagcagauc

SEQ ID NO: 444012 - RNA, 19 nt, Homo sapiens
  misc_RNA (1)...(19): siRNA sense strand
gaugaucggagaugguugu

SEQ ID NO: 444013 - RNA, 19 nt, Homo sapiens
  misc_RNA (1)...(19): siRNA sense strand
cugcagaaccacacgauga

SEQ ID NO: 444014 - RNA, 19 nt, Homo sapiens
  misc_RNA (1)...(19): siRNA sense strand
ucaaaugccccguguguuu

SEQ ID NO: 444015 - RNA, 19 nt, Homo sapiens
  misc_RNA (1)...(19): siRNA sense strand
caagugcaacguuuguuca

SEQ ID NO: 444016 - RNA, 19 nt, Homo sapiens
  misc_RNA (1)...(19): siRNA sense strand
cgcuugagcuacuugaaga

SEQ ID NO: 444017 - RNA, 19 nt, Homo sapiens
  misc_RNA (1)...(19): siRNA sense strand
gagccagcacgcacaguga

SEQ ID NO: 444018 - RNA, 19 nt, Homo sapiens
  misc_RNA (1)...(19): siRNA sense strand
cacagugcccucagaaguu

SEQ ID NO: 444019 - RNA, 19 nt, Homo sapiens
  misc_RNA (1)...(19): siRNA sense strand
gaacgagagagagauccaa

SEQ ID NO: 444020 - RNA, 19 nt, Homo sapiens
  misc_RNA (1)...(19): siRNA sense strand
cccaauggccaccaagaaa

SEQ ID NO: 444021 - RNA, 19 nt, Homo sapiens
  misc_RNA (1)...(19): siRNA sense strand
gggagaagcacuguguguu

SEQ ID NO: 444022 - RNA, 19 nt, Homo sapiens
  misc_RNA (1)...(19): siRNA sense strand
gaaacucaccaagcacauc

SEQ ID NO: 444023 - RNA, 19 nt, Homo sapiens
  misc_RNA (1)...(19): siRNA sense strand
gcaccuuccacaugcagaa

SEQ ID NO: 444024 - RNA, 19 nt, Homo sapiens
  misc_RNA (1)...(19): siRNA sense strand
gcaugcagacagucacuuc

SEQ ID NO: 444025 - RNA, 19 nt, Homo sapiens
  misc_RNA (1)...(19): siRNA sense strand
cagcaagaaguauaacugu

SEQ ID NO: 444026 - RNA, 19 nt, Homo sapiens
  misc_RNA (1)...(19): siRNA sense strand
ccacuggcccacagcaaga

SEQ ID NO: 444027 - RNA, 19 nt, Homo sapiens
  misc_RNA (1)...(19): siRNA sense strand
agacggaggagcuggagaa

SEQ ID NO: 444028 - RNA, 19 nt, Homo sapiens
  misc_RNA (1)...(19): siRNA sense strand
acagugcccucagaaguuc

SEQ ID NO: 444029 - RNA, 19 nt, Homo sapiens
  misc_RNA (1)...(19): siRNA sense strand
gcucacagugcccucagaa

SEQ ID NO: 444030 - RNA, 19 nt, Homo sapiens
  misc_RNA (1)...(19): siRNA sense strand
uucgcaagcugcacaagaa

SEQ ID NO: 444031 - RNA, 19 nt, Homo sapiens
  misc_RNA (1)...(19): siRNA sense strand
caugugcccugagcaguuc

SEQ ID NO: 444032 - RNA, 19 nt, Homo sapiens
  misc_RNA (1)...(19): siRNA sense strand
gaugacgacccacaacucu

SEQ ID NO: 444033 - RNA, 19 nt, Homo sapiens
  misc_RNA (1)...(19): siRNA sense strand
ugaagaggcacgagcagau

SEQ ID NO: 444034 - RNA, 19 nt, Homo sapiens
  misc_RNA (1)...(19): siRNA sense strand
ccagaugaccuucgagaac

SEQ ID NO: 444035 - RNA, 19 nt, Homo sapiens
  misc_RNA (1)...(19): siRNA sense strand
gagaacggcacggccaaug

SEQ ID NO: 444036 - RNA, 19 nt, Homo sapiens
  misc_RNA (1)...(19): siRNA sense strand
ucacaagugcaucuucugu

SEQ ID NO: 444037 - RNA, 19 nt, Homo sapiens
  misc_RNA (1)...(19): siRNA sense strand
acccgcagcuguccgagaa

SEQ ID NO: 444038 - RNA, 19 nt, Homo sapiens
  misc_RNA (1)...(19): siRNA sense strand
ggaggaugaaucaauuuac

SEQ ID NO: 444039 - RNA, 19 nt, Homo sapiens
  misc_RNA (1)...(19): siRNA sense strand
gacaagcugccguucaagu

SEQ ID NO: 444040 - RNA, 19 nt, Homo sapiens
  misc_RNA (1)...(19): siRNA sense strand
ccaccgcuguccuggagau

SEQ ID NO: 444041 - RNA, 19 nt, Homo sapiens
  misc_RNA (1)...(19): siRNA sense strand
cggcacaucaagcugcaua

SEQ ID NO: 444042 - RNA, 19 nt, Homo sapiens
  misc_RNA (1)...(19): siRNA sense strand
gcagauccacagcgacaag

SEQ ID NO: 444043 - RNA, 19 nt, Homo sapiens
  misc_RNA (1)...(19): siRNA sense strand
agacauaccagugcaucaa

SEQ ID NO: 444044 - RNA, 19 nt, Homo sapiens
  misc_RNA (1)...(19): siRNA sense strand
gaccugcgcaacucacuca

SEQ ID NO: 444045 - RNA, 19 nt, Homo sapiens
  misc_RNA (1)...(19): siRNA sense strand
gacaaguacucauugauaa

SEQ ID NO: 444046 - RNA, 19 nt, Homo sapiens
  misc_RNA (1)...(19): siRNA sense strand
uaaagccacugaauuauga

SEQ ID NO: 444047 - RNA, 19 nt, Homo sapiens
  misc_RNA (1)...(19): siRNA sense strand
gcagaagcaugcacaaaga

SEQ ID NO: 444048 - RNA, 19 nt, Homo sapiens
  misc_RNA (1)...(19): siRNA sense strand
aagauuauguccucacuua

SEQ ID NO: 444049 - RNA, 19 nt, Homo sapiens
  misc_RNA (1)...(19): siRNA sense strand
gaaaguaguagaccuggua

SEQ ID NO: 444050 - RNA, 19 nt, Homo sapiens
  misc_RNA (1)...(19): siRNA sense strand
gaacagagccuugguuaca

SEQ ID NO: 444051 - RNA, 19 nt, Homo sapiens
  misc_RNA (1)...(19): siRNA sense strand
gaacuauacugucuucuac

SEQ ID NO: 444052 - RNA, 19 nt, Homo sapiens
  misc_RNA (1)...(19): siRNA sense strand
caaagaaacuaaugaaggu

SEQ ID NO: 444053 - RNA, 19 nt, Homo sapiens
  misc_RNA (1)...(19): siRNA sense strand
agacauggauggccaguuu

SEQ ID NO: 444054 - RNA, 19 nt, Homo sapiens
  misc_RNA (1)...(19): siRNA sense strand
cacaucaacuuguaucaua

SEQ ID NO: 444055 - RNA, 19 nt, Homo sapiens
  misc_RNA (1)...(19): siRNA sense strand
gcacagacaaagaaacuaa

SEQ ID NO: 444056 - RNA, 19 nt, Homo sapiens
  misc_RNA (1)...(19): siRNA sense strand
gauuauguccucacuuaua

SEQ ID NO: 444057 - RNA, 19 nt, Homo sapiens
  misc_RNA (1)...(19): siRNA sense strand
ucaccacagucucucauua

SEQ ID NO: 444058 - RNA, 19 nt, Homo sapiens
  misc_RNA (1)...(19): siRNA sense strand
guggaaaucuuacgaauac

SEQ ID NO: 444059 - RNA, 19 nt, Homo sapiens
  misc_RNA (1)...(19): siRNA sense strand
ccauauggcuuucugacaa

SEQ ID NO: 444060 - RNA, 19 nt, Homo sapiens
  misc_RNA (1)...(19): siRNA sense strand
ggaagaagauggccuugac

SEQ ID NO: 444061 - RNA, 19 nt, Homo sapiens
  misc_RNA (1)...(19): siRNA sense strand
caacaacucuagccaaggu

SEQ ID NO: 444062 - RNA, 19 nt, Homo sapiens
  misc_RNA (1)...(19): siRNA sense strand
caacuuguaucauaacagu

SEQ ID NO: 444063 - RNA, 19 nt, Homo sapiens
  misc_RNA (1)...(19): siRNA sense strand
guagacaaguacucauuga

SEQ ID NO: 444064 - RNA, 19 nt, Homo sapiens
  misc_RNA (1)...(19): siRNA sense strand
gaaccggacacaaugcaua

SEQ ID NO: 444065 - RNA, 19 nt, Homo sapiens
  misc_RNA (1)...(19): siRNA sense strand
gaagaaaaccgucaaguga

SEQ ID NO: 444066 - RNA, 19 nt, Homo sapiens
  misc_RNA (1)...(19): siRNA sense strand
caagugaaccuggaaauug

SEQ ID NO: 444067 - RNA, 19 nt, Homo sapiens
  misc_RNA (1)...(19): siRNA sense strand
caacuaaagggaaacguuu

SEQ ID NO: 444068 - RNA, 19 nt, Homo sapiens
  misc_RNA (1)...(19): siRNA sense strand
gagaugaaccggacacaau

SEQ ID NO: 444069 - RNA, 19 nt, Homo sapiens
  misc_RNA (1)...(19): siRNA sense strand
gcacccacuuucagacaaa

SEQ ID NO: 444070 - RNA, 19 nt, Homo sapiens
  misc_RNA (1)...(19): siRNA sense strand
cacagucucucauuauuug

SEQ ID NO: 444071 - RNA, 19 nt, Homo sapiens
  misc_RNA (1)...(19): siRNA sense strand
agacaaguacucauugaua

SEQ ID NO: 444072 - RNA, 19 nt, Homo sapiens
  misc_RNA (1)...(19): siRNA sense strand
gcacugcucuuuucuguau

SEQ ID NO: 444073 - RNA, 19 nt, Homo sapiens
  misc_RNA (1)...(19): siRNA sense strand
gaaaguacaagacauggau

SEQ ID NO: 444074 - RNA, 19 nt, Homo sapiens
  misc_RNA (1)...(19): siRNA sense strand
gcaauagacaaagaugaua

SEQ ID NO: 444075 - RNA, 19 nt, Homo sapiens
  misc_RNA (1)...(19): siRNA sense strand
gauguaaucagaaugaaga

SEQ ID NO: 444076 - RNA, 19 nt, Homo sapiens
  misc_RNA (1)...(19): siRNA sense strand
gaguuaaucugugugaaug

SEQ ID NO: 444077 - RNA, 19 nt, Homo sapiens
  misc_RNA (1)...(19): siRNA sense strand
gauagaucauguacuggaa

SEQ ID NO: 444078 - RNA, 19 nt, Homo sapiens
  misc_RNA (1)...(19): siRNA sense strand
guuaaucugugugaaugua

SEQ ID NO: 444079 - RNA, 19 nt, Homo sapiens
  misc_RNA (1)...(19): siRNA sense strand
uaaugaagguguucuuucu

SEQ ID NO: 444080 - RNA, 19 nt, Homo sapiens
  misc_RNA (1)...(19): siRNA sense strand
gaaccuggaaauuggagua

SEQ ID NO: 444081 - RNA, 19 nt, Homo sapiens
  misc_RNA (1)...(19): siRNA sense strand
guaaagccacugaauuaug

SEQ ID NO: 444082 - RNA, 19 nt, Homo sapiens
  misc_RNA (1)...(19): siRNA sense strand
gacguggaguugauaaaga

SEQ ID NO: 444083 - RNA, 19 nt, Homo sapiens
  misc_RNA (1)...(19): siRNA sense strand
gaagguguucuuucuguug

SEQ ID NO: 444084 - RNA, 19 nt, Homo sapiens
  misc_RNA (1)...(19): siRNA sense strand
aagagacacuggaaaucua

SEQ ID NO: 444085 - RNA, 19 nt, Homo sapiens
  misc_RNA (1)...(19): siRNA sense strand
gaacaucagaagaagguau

SEQ ID NO: 444086 - RNA, 19 nt, Homo sapiens
  misc_RNA (1)...(19): siRNA sense strand
gaaaccagaccuuggaauc

SEQ ID NO: 444087 - RNA, 19 nt, Homo sapiens
  misc_RNA (1)...(19): siRNA sense strand
caaaauaauuggcagaguu

SEQ ID NO: 444088 - RNA, 19 nt, Homo sapiens
  misc_RNA (1)...(19): siRNA sense strand
ccagaaauacuucaagaau

SEQ ID NO: 444089 - RNA, 19 nt, Homo sapiens
  misc_RNA (1)...(19): siRNA sense strand
gccauuugcuagagauauu

SEQ ID NO: 444090 - RNA, 19 nt, Homo sapiens
  misc_RNA (1)...(19): siRNA sense strand
uaaacuagaggcagacaaa

SEQ ID NO: 444091 - RNA, 19 nt, Homo sapiens
  misc_RNA (1)...(19): siRNA sense strand
ggacagagagguuguagac

SEQ ID NO: 444092 - RNA, 19 nt, Homo sapiens
  misc_RNA (1)...(19): siRNA sense strand
ggauuuaugacccaaacua

SEQ ID NO: 444093 - RNA, 19 nt, Homo sapiens
  misc_RNA (1)...(19): siRNA sense strand
caccagaaauacuucaaga

SEQ ID NO: 444094 - RNA, 19 nt, Homo sapiens
  misc_RNA (1)...(19): siRNA sense strand
gaaauuucagggucaauca

SEQ ID NO: 444095 - RNA, 19 nt, Homo sapiens
  misc_RNA (1)...(19): siRNA sense strand
gaaaucuuacgaauaccua

SEQ ID NO: 444096 - RNA, 19 nt, Homo sapiens
  misc_RNA (1)...(19): siRNA sense strand
gauaaugcacccacuuuca

SEQ ID NO: 444097 - RNA, 19 nt, Homo sapiens
  misc_RNA (1)...(19): siRNA sense strand
cauauggcuuucugacaaa

SEQ ID NO: 444098 - RNA, 19 nt, Homo sapiens
  misc_RNA (1)...(19): siRNA sense strand
gcacagcaaaacuuaauua

SEQ ID NO: 444099 - RNA, 19 nt, Homo sapiens
  misc_RNA (1)...(19): siRNA sense strand
uuguaaagccacugaauua

SEQ ID NO: 444100 - RNA, 19 nt, Homo sapiens
  misc_RNA (1)...(19): siRNA sense strand
gaaagagacacuggaaauc

SEQ ID NO: 444101 - RNA, 19 nt, Homo sapiens
  misc_RNA (1)...(19): siRNA sense strand
ccacagucucucauuauuu

SEQ ID NO: 444102 - RNA, 19 nt, Homo sapiens
  misc_RNA (1)...(19): siRNA sense strand
acacggagguggacaacug

SEQ ID NO: 444103 - RNA, 19 nt, Homo sapiens
  misc_RNA (1)...(19): siRNA sense strand
ggucaagugauccugauuu

SEQ ID NO: 444104 - RNA, 19 nt, Homo sapiens
  misc_RNA (1)...(19): siRNA sense strand
ccacugaauuaugaagaaa

SEQ ID NO: 444105 - RNA, 19 nt, Homo sapiens
  misc_RNA (1)...(19): siRNA sense strand
acgaauaccuauagaagau

SEQ ID NO: 444106 - RNA, 19 nt, Homo sapiens
  misc_RNA (1)...(19): siRNA sense strand
gaagacaagacacacuaga

SEQ ID NO: 444107 - RNA, 19 nt, Homo sapiens
  misc_RNA (1)...(19): siRNA sense strand
ucaccaaaguuaaugauac

SEQ ID NO: 444108 - RNA, 19 nt, Homo sapiens
  misc_RNA (1)...(19): siRNA sense strand
uuacaguccuggcaauaga

SEQ ID NO: 444109 - RNA, 19 nt, Homo sapiens
  misc_RNA (1)...(19): siRNA sense strand
cccaauaugugcggauuaa

SEQ ID NO: 444110 - RNA, 19 nt, Homo sapiens
  misc_RNA (1)...(19): siRNA sense strand
cuagagauauucccagagu

SEQ ID NO: 444111 - RNA, 19 nt, Homo sapiens
  misc_RNA (1)...(19): siRNA sense strand
ugaagcauuuguagaggaa

SEQ ID NO: 444112 - RNA, 19 nt, Homo sapiens
  misc_RNA (1)...(19): siRNA sense strand
gaagauuuagcacagcaaa

SEQ ID NO: 444113 - RNA, 19 nt, Homo sapiens
  misc_RNA (1)...(19): siRNA sense strand
gcaacuaaagggaaacguu

SEQ ID NO: 444114 - RNA, 19 nt, Homo sapiens
  misc_RNA (1)...(19): siRNA sense strand
uggcagaguuaauuuggaa

SEQ ID NO: 444115 - RNA, 19 nt, Homo sapiens
  misc_RNA (1)...(19): siRNA sense strand
ugaugaaccuguccaugga

SEQ ID NO: 444116 - RNA, 19 nt, Homo sapiens
  misc_RNA (1)...(19): siRNA sense strand
caacggcuauaaggcauau

SEQ ID NO: 444117 - RNA, 19 nt, Homo sapiens
  misc_RNA (1)...(19): siRNA sense strand
gccacugaauuaugaagaa

SEQ ID NO: 444118 - RNA, 19 nt, Homo sapiens
  misc_RNA (1)...(19): siRNA sense strand
gaagguaucgaagacaaga

SEQ ID NO: 444119 - RNA, 19 nt, Homo sapiens
  misc_RNA (1)...(19): siRNA sense strand
gaagauggccuugacuuuu

SEQ ID NO: 444120 - RNA, 19 nt, Homo sapiens
  misc_RNA (1)...(19): siRNA sense strand
gcaucgauguaaucagaau

SEQ ID NO: 444121 - RNA, 19 nt, Homo sapiens
  misc_RNA (1)...(19): siRNA sense strand
gaggaaaccagaccuugga

SEQ ID NO: 444122 - RNA, 19 nt, Homo sapiens
  misc_RNA (1)...(19): siRNA sense strand
gacaagacacacuagagaa

SEQ ID NO: 444123 - RNA, 19 nt, Homo sapiens
  misc_RNA (1)...(19): siRNA sense strand
uguccucacuuauaacuau

SEQ ID NO: 444124 - RNA, 19 nt, Homo sapiens
  misc_RNA (1)...(19): siRNA sense strand
uugcaucgauguaaucaga

SEQ ID NO: 444125 - RNA, 19 nt, Homo sapiens
  misc_RNA (1)...(19): siRNA sense strand
guggacaacugcagauaca

SEQ ID NO: 444126 - RNA, 19 nt, Homo sapiens
  misc_RNA (1)...(19): siRNA sense strand
gaaaugaugaaaggaggaa

SEQ ID NO: 444127 - RNA, 19 nt, Homo sapiens
  misc_RNA (1)...(19): siRNA sense strand
cagcugcccgucuuucaua

SEQ ID NO: 444128 - RNA, 19 nt, Homo sapiens
  misc_RNA (1)...(19): siRNA sense strand
caccaaaguuaaugauaca

SEQ ID NO: 444129 - RNA, 19 nt, Homo sapiens
  misc_RNA (1)...(19): siRNA sense strand
aagguuggaucaccauuga

SEQ ID NO: 444130 - RNA, 19 nt, Homo sapiens
  misc_RNA (1)...(19): siRNA sense strand
gcaaugguuuaagguacaa

SEQ ID NO: 444131 - RNA, 19 nt, Homo sapiens
  misc_RNA (1)...(19): siRNA sense strand
gaucuucagucgugauggu

SEQ ID NO: 444132 - RNA, 19 nt, Homo sapiens
  misc_RNA (1)...(19): siRNA sense strand
agaaagagacacuggaaau

SEQ ID NO: 444133 - RNA, 19 nt, Homo sapiens
  misc_RNA (1)...(19): siRNA sense strand
cuguugcgcugucugauaa

SEQ ID NO: 444134 - RNA, 19 nt, Homo sapiens
  misc_RNA (1)...(19): siRNA sense strand
guagucauuugcaaaccaa

SEQ ID NO: 444135 - RNA, 19 nt, Homo sapiens
  misc_RNA (1)...(19): siRNA sense strand
aaauagaaauggcaauggu

SEQ ID NO: 444136 - RNA, 19 nt, Homo sapiens
  misc_RNA (1)...(19): siRNA sense strand
gcacuccugcagcccaaua

SEQ ID NO: 444137 - RNA, 19 nt, Homo sapiens
  misc_RNA (1)...(19): siRNA sense strand
gcuagaacaucagaagaag

SEQ ID NO: 444138 - RNA, 19 nt, Homo sapiens
  misc_RNA (1)...(19): siRNA sense strand
ugauacagcugcccgucuu

SEQ ID NO: 444139 - RNA, 19 nt, Homo sapiens
  misc_RNA (1)...(19): siRNA sense strand
ugauaauccaccagaaaua

SEQ ID NO: 444140 - RNA, 19 nt, Homo sapiens
  misc_RNA (1)...(19): siRNA sense strand
ucaaagaucaacggcuaua

SEQ ID NO: 444141 - RNA, 19 nt, Homo sapiens
  misc_RNA (1)...(19): siRNA sense strand
gguguucuuucuguuguaa

SEQ ID NO: 444142 - RNA, 19 nt, Homo sapiens
  misc_RNA (1)...(19): siRNA sense strand
agaaauggcaaugguuuaa

SEQ ID NO: 444143 - RNA, 19 nt, Homo sapiens
  misc_RNA (1)...(19): siRNA sense strand
agaagcaccuggagacgau

SEQ ID NO: 444144 - RNA, 19 nt, Homo sapiens
  misc_RNA (1)...(19): siRNA sense strand
cagggucaaucauaacuuc

SEQ ID NO: 444145 - RNA, 19 nt, Homo sapiens
  misc_RNA (1)...(19): siRNA sense strand
gacaaguacucauugauaa

SEQ ID NO: 444146 - RNA, 19 nt, Homo sapiens
  misc_RNA (1)...(19): siRNA sense strand
uaaagccacugaauuauga

SEQ ID NO: 444147 - RNA, 19 nt, Homo sapiens
  misc_RNA (1)...(19): siRNA sense strand
gaaaguaguagaccuggua

SEQ ID NO: 444148 - RNA, 19 nt, Homo sapiens
  misc_RNA (1)...(19): siRNA sense strand
gaacagagccuugguuaca

SEQ ID NO: 444149 - RNA, 19 nt, Homo sapiens
  misc_RNA (1)...(19): siRNA sense strand
gaacuauacugucuucuac

SEQ ID NO: 444150 - RNA, 19 nt, Homo sapiens
  misc_RNA (1)...(19): siRNA sense strand
caaagaaacuaaugaaggu

SEQ ID NO: 444151 - RNA, 19 nt, Homo sapiens
  misc_RNA (1)...(19): siRNA sense strand
agacauggauggccaguuu

SEQ ID NO: 444152 - RNA, 19 nt, Homo sapiens
  misc_RNA (1)...(19): siRNA sense strand
cacaucaacuuguaucaua

SEQ ID NO: 444153 - RNA, 19 nt, Homo sapiens
  misc_RNA (1)...(19): siRNA sense strand
gcacagacaaagaaacuaa

SEQ ID NO: 444154 - RNA, 19 nt, Homo sapiens
  misc_RNA (1)...(19): siRNA sense strand
ucaccacagucucucauua

SEQ ID NO: 444155 - RNA, 19 nt, Homo sapiens
  misc_RNA (1)...(19): siRNA sense strand
guggaaaucuuacgaauac

SEQ ID NO: 444156 - RNA, 19 nt, Homo sapiens
  misc_RNA (1)...(19): siRNA sense strand
ccauauggcuuucugacaa

SEQ ID NO: 444157 - RNA, 19 nt, Homo sapiens
  misc_RNA (1)...(19): siRNA sense strand
caacaacucuagccaaggu

SEQ ID NO: 444158 - RNA, 19 nt, Homo sapiens
  misc_RNA (1)...(19): siRNA sense strand
caacuuguaucauaacagu

SEQ ID NO: 444159 - RNA, 19 nt, Homo sapiens
  misc_RNA (1)...(19): siRNA sense strand
guagacaaguacucauuga

SEQ ID NO: 444160 - RNA, 19 nt, Homo sapiens
  misc_RNA (1)...(19): siRNA sense strand
gaaccggacacaaugcaua

SEQ ID NO: 444161 - RNA, 19 nt, Homo sapiens
  misc_RNA (1)...(19): siRNA sense strand
gaagaaaaccgucaaguga

SEQ ID NO: 444162 - RNA, 19 nt, Homo sapiens
  misc_RNA (1)...(19): siRNA sense strand
caagugaaccuggaaauug

SEQ ID NO: 444163 - RNA, 19 nt, Homo sapiens
  misc_RNA (1)...(19): siRNA sense strand
caacuaaagggaaacguuu

SEQ ID NO: 444164 - RNA, 19 nt, Homo sapiens
  misc_RNA (1)...(19): siRNA sense strand
gagaugaaccggacacaau

SEQ ID NO: 444165 - RNA, 19 nt, Homo sapiens
  misc_RNA (1)...(19): siRNA sense strand
gcacccacuuucagacaaa

SEQ ID NO: 444166 - RNA, 19 nt, Homo sapiens
  misc_RNA (1)...(19): siRNA sense strand
cacagucucucauuauuug

SEQ ID NO: 444167 - RNA, 19 nt, Homo sapiens
  misc_RNA (1)...(19): siRNA sense strand
agacaaguacucauugaua

SEQ ID NO: 444168 - RNA, 19 nt, Homo sapiens
  misc_RNA (1)...(19): siRNA sense strand
gcacugcucuuuucuguau

SEQ ID NO: 444169 - RNA, 19 nt, Homo sapiens
  misc_RNA (1)...(19): siRNA sense strand
gaaaguacaagacauggau

SEQ ID NO: 444170 - RNA, 19 nt, Homo sapiens
  misc_RNA (1)...(19): siRNA sense strand
gcaauagacaaagaugaua

SEQ ID NO: 444171 - RNA, 19 nt, Homo sapiens
  misc_RNA (1)...(19): siRNA sense strand
gaguuaaucugugugaaug

SEQ ID NO: 444172 - RNA, 19 nt, Homo sapiens
  misc_RNA (1)...(19): siRNA sense strand
gauagaucauguacuggaa

SEQ ID NO: 444173 - RNA, 19 nt, Homo sapiens
  misc_RNA (1)...(19): siRNA sense strand
guuaaucugugugaaugua

SEQ ID NO: 444174 - RNA, 19 nt, Homo sapiens
  misc_RNA (1)...(19): siRNA sense strand
uaaugaagguguucuuucu

SEQ ID NO: 444175 - RNA, 19 nt, Homo sapiens
  misc_RNA (1)...(19): siRNA sense strand
gaaccuggaaauuggagua

SEQ ID NO: 444176 - RNA, 19 nt, Homo sapiens
  misc_RNA (1)...(19): siRNA sense strand
guaaagccacugaauuaug

SEQ ID NO: 444177 - RNA, 19 nt, Homo sapiens
  misc_RNA (1)...(19): siRNA sense strand
gacguggaguugauaaaga

SEQ ID NO: 444178 - RNA, 19 nt, Homo sapiens
  misc_RNA (1)...(19): siRNA sense strand
gaagguguucuuucuguug

SEQ ID NO: 444179 - RNA, 19 nt, Homo sapiens
  misc_RNA (1)...(19): siRNA sense strand
aagagacacuggaaaucua

SEQ ID NO: 444180 - RNA, 19 nt, Homo sapiens
  misc_RNA (1)...(19): siRNA sense strand
gaacaucagaagaagguau

SEQ ID NO: 444181 - RNA, 19 nt, Homo sapiens
  misc_RNA (1)...(19): siRNA sense strand
gaaaccagaccuuggaauc

SEQ ID NO: 444182 - RNA, 19 nt, Homo sapiens
  misc_RNA (1)...(19): siRNA sense strand
ccagaaauacuucaagaau

SEQ ID NO: 444183 - RNA, 19 nt, Homo sapiens
  misc_RNA (1)...(19): siRNA sense strand
gccauuugcuagagauauu

SEQ ID NO: 444184 - RNA, 19 nt, Homo sapiens
  misc_RNA (1)...(19): siRNA sense strand
uaaacuagaggcagacaaa

SEQ ID NO: 444185 - RNA, 19 nt, Homo sapiens
  misc_RNA (1)...(19): siRNA sense strand
caaaauaauuggcagaguu

SEQ ID NO: 444186 - RNA, 19 nt, Homo sapiens
  misc_RNA (1)...(19): siRNA sense strand
ggacagagagguuguagac

SEQ ID NO: 444187 - RNA, 19 nt, Homo sapiens
  misc_RNA (1)...(19): siRNA sense strand
ggauuuaugacccaaacua

SEQ ID NO: 444188 - RNA, 19 nt, Homo sapiens
  misc_RNA (1)...(19): siRNA sense strand
caccagaaauacuucaaga

SEQ ID NO: 444189 - RNA, 19 nt, Homo sapiens
  misc_RNA (1)...(19): siRNA sense strand
gaaauuucagggucaauca

SEQ ID NO: 444190 - RNA, 19 nt, Homo sapiens
  misc_RNA (1)...(19): siRNA sense strand
gaaaucuuacgaauaccua

SEQ ID NO: 444191 - RNA, 19 nt, Homo sapiens
  misc_RNA (1)...(19): siRNA sense strand
gauaaugcacccacuuuca

SEQ ID NO: 444192 - RNA, 19 nt, Homo sapiens
  misc_RNA (1)...(19): siRNA sense strand
cauauggcuuucugacaaa

SEQ ID NO: 444193 - RNA, 19 nt, Homo sapiens
  misc_RNA (1)...(19): siRNA sense strand
gcacagcaaaacuuaauua

SEQ ID NO: 444194 - RNA, 19 nt, Homo sapiens
  misc_RNA (1)...(19): siRNA sense strand
uuguaaagccacugaauua

SEQ ID NO: 444195 - RNA, 19 nt, Homo sapiens
  misc_RNA (1)...(19): siRNA sense strand
gaaagagacacuggaaauc

SEQ ID NO: 444196 - RNA, 19 nt, Homo sapiens
  misc_RNA (1)...(19): siRNA sense strand
ccacagucucucauuauuu

SEQ ID NO: 444197 - RNA, 19 nt, Homo sapiens
  misc_RNA (1)...(19): siRNA sense strand
acacggagguggacaacug

SEQ ID NO: 444198 - RNA, 19 nt, Homo sapiens
  misc_RNA (1)...(19): siRNA sense strand
ggucaagugauccugauuu

SEQ ID NO: 444199 - RNA, 19 nt, Homo sapiens
  misc_RNA (1)...(19): siRNA sense strand
ccacugaauuaugaagaaa

SEQ ID NO: 444200 - RNA, 19 nt, Homo sapiens
  misc_RNA (1)...(19): siRNA sense strand
acgaauaccuauagaagau

SEQ ID NO: 444201 - RNA, 19 nt, Homo sapiens
  misc_RNA (1)...(19): siRNA sense strand
gaagacaagacacacuaga

SEQ ID NO: 444202 - RNA, 19 nt, Homo sapiens
  misc_RNA (1)...(19): siRNA sense strand
ucaccaaaguuaaugauac

SEQ ID NO: 444203 - RNA, 19 nt, Homo sapiens
  misc_RNA (1)...(19): siRNA sense strand
uuacaguccuggcaauaga

SEQ ID NO: 444204 - RNA, 19 nt, Homo sapiens
  misc_RNA (1)...(19): siRNA sense strand
cccaauaugugcggauuaa

SEQ ID NO: 444205 - RNA, 19 nt, Homo sapiens
  misc_RNA (1)...(19): siRNA sense strand
cuagagauauucccagagu

SEQ ID NO: 444206 - RNA, 19 nt, Homo sapiens
  misc_RNA (1)...(19): siRNA sense strand
ugaagcauuuguagaggaa

SEQ ID NO: 444207 - RNA, 19 nt, Homo sapiens
  misc_RNA (1)...(19): siRNA sense strand
gaagauuuagcacagcaaa

SEQ ID NO: 444208 - RNA, 19 nt, Homo sapiens
  misc_RNA (1)...(19): siRNA sense strand
gcaacuaaagggaaacguu

SEQ ID NO: 444209 - RNA, 19 nt, Homo sapiens
  misc_RNA (1)...(19): siRNA sense strand
gccacugaauuaugaagaa

SEQ ID NO: 444210 - RNA, 19 nt, Homo sapiens
  misc_RNA (1)...(19): siRNA sense strand
ugaugaaccuguccaugga

SEQ ID NO: 444211 - RNA, 19 nt, Homo sapiens
  misc_RNA (1)...(19): siRNA sense strand
uggcagaguuaauuuggaa

SEQ ID NO: 444212 - RNA, 19 nt, Homo sapiens
  misc_RNA (1)...(19): siRNA sense strand
caacggcuauaaggcauau

SEQ ID NO: 444213 - RNA, 19 nt, Homo sapiens
  misc_RNA (1)...(19): siRNA sense strand
gaagguaucgaagacaaga

SEQ ID NO: 444214 - RNA, 19 nt, Homo sapiens
  misc_RNA (1)...(19): siRNA sense strand
gaggaaaccagaccuugga

SEQ ID NO: 444215 - RNA, 19 nt, Homo sapiens
  misc_RNA (1)...(19): siRNA sense strand
gacaagacacacuagagaa

SEQ ID NO: 444216 - RNA, 19 nt, Homo sapiens
  misc_RNA (1)...(19): siRNA sense strand
guggacaacugcagauaca

SEQ ID NO: 444217 - RNA, 19 nt, Homo sapiens
  misc_RNA (1)...(19): siRNA sense strand
gaaaugaugaaaggaggaa

SEQ ID NO: 444218 - RNA, 19 nt, Homo sapiens
  misc_RNA (1)...(19): siRNA sense strand
cagcugcccgucuuucaua

SEQ ID NO: 444219 - RNA, 19 nt, Homo sapiens
  misc_RNA (1)...(19): siRNA sense strand
caccaaaguuaaugauaca

SEQ ID NO: 444220 - RNA, 19 nt, Homo sapiens
  misc_RNA (1)...(19): siRNA sense strand
aagguuggaucaccauuga

SEQ ID NO: 444221 - RNA, 19 nt, Homo sapiens
  misc_RNA (1)...(19): siRNA sense strand
gcaaugguuuaagguacaa

SEQ ID NO: 444222 - RNA, 19 nt, Homo sapiens
  misc_RNA (1)...(19): siRNA sense strand
gaucuucagucgugauggu

SEQ ID NO: 444223 - RNA, 19 nt, Homo sapiens
  misc_RNA (1)...(19): siRNA sense strand
agaaagagacacuggaaau

SEQ ID NO: 444224 - RNA, 19 nt, Homo sapiens
  misc_RNA (1)...(19): siRNA sense strand
guagucauuugcaaaccaa

SEQ ID NO: 444225 - RNA, 19 nt, Homo sapiens
  misc_RNA (1)...(19): siRNA sense strand
aaauagaaauggcaauggu

SEQ ID NO: 444226 - RNA, 19 nt, Homo sapiens
  misc_RNA (1)...(19): siRNA sense strand
gcacuccugcagcccaaua

SEQ ID NO: 444227 - RNA, 19 nt, Homo sapiens
  misc_RNA (1)...(19): siRNA sense strand
cuguugcgcugucugauaa

SEQ ID NO: 444228 - RNA, 19 nt, Homo sapiens
  misc_RNA (1)...(19): siRNA sense strand
gcuagaacaucagaagaag

SEQ ID NO: 444229 - RNA, 19 nt, Homo sapiens
  misc_RNA (1)...(19): siRNA sense strand
ugauacagcugcccgucuu

SEQ ID NO: 444230 - RNA, 19 nt, Homo sapiens
  misc_RNA (1)...(19): siRNA sense strand
ugauaauccaccagaaaua

SEQ ID NO: 444231 - RNA, 19 nt, Homo sapiens
  misc_RNA (1)...(19): siRNA sense strand
ucaaagaucaacggcuaua

SEQ ID NO: 444232 - RNA, 19 nt, Homo sapiens
  misc_RNA (1)...(19): siRNA sense strand
gguguucuuucuguuguaa

SEQ ID NO: 444233 - RNA, 19 nt, Homo sapiens
  misc_RNA (1)...(19): siRNA sense strand
cagaagaagguaucgaaga

SEQ ID NO: 444234 - RNA, 19 nt, Homo sapiens
  misc_RNA (1)...(19): siRNA sense strand
agaagcaccuggagacgau

SEQ ID NO: 444235 - RNA, 19 nt, Homo sapiens
  misc_RNA (1)...(19): siRNA sense strand
cagggucaaucauaacuuc

SEQ ID NO: 444236 - RNA, 19 nt, Homo sapiens
  misc_RNA (1)...(19): siRNA sense strand
agaaauggcaaugguuuaa

SEQ ID NO: 444237 - RNA, 19 nt, Homo sapiens
  misc_RNA (1)...(19): siRNA sense strand
uagaaauggcaaugguuua

SEQ ID NO: 444238 - RNA, 19 nt, Homo sapiens
  misc_RNA (1)...(19): siRNA sense strand
uuacugugcugcuagaaca

SEQ ID NO: 444239 - RNA, 19 nt, Homo sapiens
  misc_RNA (1)...(19): siRNA sense strand
aagaagguaucgaagacaa

SEQ ID NO: 444240 - RNA, 19 nt, Homo sapiens
  misc_RNA (1)...(19): siRNA sense strand
gagagucaauuuuaccauu

SEQ ID NO: 444241 - RNA, 19 nt, Homo sapiens
  misc_RNA (1)...(19): siRNA sense strand
gggcaggaaaccauugaaa

SEQ ID NO: 444242 - RNA, 19 nt, Homo sapiens
  misc_RNA (1)...(19): siRNA sense strand
caaacuaccaacaacucua

SEQ ID NO: 444243 - RNA, 19 nt, Homo sapiens
  misc_RNA (1)...(19): siRNA sense strand
ucauuuaccauauggcuuu

SEQ ID NO: 444244 - RNA, 19 nt, Homo sapiens
  misc_RNA (1)...(19): siRNA sense strand
gagccuugguuacaguuca

SEQ ID NO: 444245 - RNA, 19 nt, Homo sapiens
  misc_RNA (1)...(19): siRNA sense strand
gaacuuaggagccaccuua

SEQ ID NO: 444246 - RNA, 19 nt, Homo sapiens
  misc_RNA (1)...(19): siRNA sense strand
cuacagcagugacaauuua

SEQ ID NO: 444247 - RNA, 19 nt, Homo sapiens
  misc_RNA (1)...(19): siRNA sense strand
gaagcacacuggugagaaa

SEQ ID NO: 444248 - RNA, 19 nt, Homo sapiens
  misc_RNA (1)...(19): siRNA sense strand
ggaaucagaugaacuuagg

SEQ ID NO: 444249 - RNA, 19 nt, Homo sapiens
  misc_RNA (1)...(19): siRNA sense strand
ugaaaccauuccaguguaa

SEQ ID NO: 444250 - RNA, 19 nt, Homo sapiens
  misc_RNA (1)...(19): siRNA sense strand
gugaaaccauuccagugua

SEQ ID NO: 444251 - RNA, 19 nt, Homo sapiens
  misc_RNA (1)...(19): siRNA sense strand
cgccuucacuguccacuuu

SEQ ID NO: 444252 - RNA, 19 nt, Homo sapiens
  misc_RNA (1)...(19): siRNA sense strand
ggacugugaacgaagguuu

SEQ ID NO: 444253 - RNA, 19 nt, Homo sapiens
  misc_RNA (1)...(19): siRNA sense strand
ucagaggcauucaggaugu

SEQ ID NO: 444254 - RNA, 19 nt, Homo sapiens
  misc_RNA (1)...(19): siRNA sense strand
agagaaacaugaccaaacu

SEQ ID NO: 444255 - RNA, 19 nt, Homo sapiens
  misc_RNA (1)...(19): siRNA sense strand
auacaggugugaaaccauu

SEQ ID NO: 444256 - RNA, 19 nt, Homo sapiens
  misc_RNA (1)...(19): siRNA sense strand
uacccaggcugcaauaaga

SEQ ID NO: 444257 - RNA, 19 nt, Homo sapiens
  misc_RNA (1)...(19): siRNA sense strand
gaauuaguccgccaucaca

SEQ ID NO: 444258 - RNA, 19 nt, Homo sapiens
  misc_RNA (1)...(19): siRNA sense strand
cgagagcgauaaccacaca

SEQ ID NO: 444259 - RNA, 19 nt, Homo sapiens
  misc_RNA (1)...(19): siRNA sense strand
caacaugcaucagagaaac

SEQ ID NO: 444260 - RNA, 19 nt, Homo sapiens
  misc_RNA (1)...(19): siRNA sense strand
ugcaugaccuggaaucaga

SEQ ID NO: 444261 - RNA, 19 nt, Homo sapiens
  misc_RNA (1)...(19): siRNA sense strand
ugagaaaccauaccagugu

SEQ ID NO: 444262 - RNA, 19 nt, Homo sapiens
  misc_RNA (1)...(19): siRNA sense strand
caucacaacaugcaucaga

SEQ ID NO: 444263 - RNA, 19 nt, Homo sapiens
  misc_RNA (1)...(19): siRNA sense strand
ccaaaugacaucccagcuu

SEQ ID NO: 444264 - RNA, 19 nt, Homo sapiens
  misc_RNA (1)...(19): siRNA sense strand
ugacaucccagcuugaaug

SEQ ID NO: 444265 - RNA, 19 nt, Homo sapiens
  misc_RNA (1)...(19): siRNA sense strand
caucccagcuugaaugcau

SEQ ID NO: 444266 - RNA, 19 nt, Homo sapiens
  misc_RNA (1)...(19): siRNA sense strand
gcagugacaauuuauacca

SEQ ID NO: 444267 - RNA, 19 nt, Homo sapiens
  misc_RNA (1)...(19): siRNA sense strand
ggaagcacacuggugagaa

SEQ ID NO: 444268 - RNA, 19 nt, Homo sapiens
  misc_RNA (1)...(19): siRNA sense strand
gagaaacgccccuucaugu

SEQ ID NO: 444269 - RNA, 19 nt, Homo sapiens
  misc_RNA (1)...(19): siRNA sense strand
cugcggagcccaauacaga

SEQ ID NO: 444270 - RNA, 19 nt, Homo sapiens
  misc_RNA (1)...(19): siRNA sense strand
gaaaccauuccaguguaaa

SEQ ID NO: 444271 - RNA, 19 nt, Homo sapiens
  misc_RNA (1)...(19): siRNA sense strand
agacaccaaaggagacaua

SEQ ID NO: 444272 - RNA, 19 nt, Homo sapiens
  misc_RNA (1)...(19): siRNA sense strand
caucugagaccagugagaa

SEQ ID NO: 444273 - RNA, 19 nt, Homo sapiens
  misc_RNA (1)...(19): siRNA sense strand
uugaaugcaugaccuggaa

SEQ ID NO: 444274 - RNA, 19 nt, Homo sapiens
  misc_RNA (1)...(19): siRNA sense strand
ccggucagaugaauuaguc

SEQ ID NO: 444275 - RNA, 19 nt, Homo sapiens
  misc_RNA (1)...(19): siRNA sense strand
gagacauacaggugugaaa

SEQ ID NO: 444276 - RNA, 19 nt, Homo sapiens
  misc_RNA (1)...(19): siRNA sense strand
ccgccucacuccuucauca

SEQ ID NO: 444277 - RNA, 19 nt, Homo sapiens
  misc_RNA (1)...(19): siRNA sense strand
cagugacaauuuauaccaa

SEQ ID NO: 444278 - RNA, 19 nt, Homo sapiens
  misc_RNA (1)...(19): siRNA sense strand
guggccaaguugucagaaa

SEQ ID NO: 444279 - RNA, 19 nt, Homo sapiens
  misc_RNA (1)...(19): siRNA sense strand
ggagcccaauacagaauac

SEQ ID NO: 444280 - RNA, 19 nt, Homo sapiens
  misc_RNA (1)...(19): siRNA sense strand
gaaugcaugaccuggaauc

SEQ ID NO: 444281 - RNA, 19 nt, Homo sapiens
  misc_RNA (1)...(19): siRNA sense strand
acaacaugcaucagagaaa

SEQ ID NO: 444282 - RNA, 19 nt, Homo sapiens
  misc_RNA (1)...(19): siRNA sense strand
ccuggaaucagaugaacuu

SEQ ID NO: 444283 - RNA, 19 nt, Homo sapiens
  misc_RNA (1)...(19): siRNA sense strand
cagagaaacaugaccaaac

SEQ ID NO: 444284 - RNA, 19 nt, Homo sapiens
  misc_RNA (1)...(19): siRNA sense strand
ucacaacaugcaucagaga

SEQ ID NO: 444285 - RNA, 19 nt, Homo sapiens
  misc_RNA (1)...(19): siRNA sense strand
gaaacgccccuucaugugu

SEQ ID NO: 444286 - RNA, 19 nt, Homo sapiens
  misc_RNA (1)...(19): siRNA sense strand
cagcagugacaauuuauac

SEQ ID NO: 444287 - RNA, 19 nt, Homo sapiens
  misc_RNA (1)...(19): siRNA sense strand
ugcccggucagaugaauua

SEQ ID NO: 444288 - RNA, 19 nt, Homo sapiens
  misc_RNA (1)...(19): siRNA sense strand
ugugaaaccauuccagugu

SEQ ID NO: 444289 - RNA, 19 nt, Homo sapiens
  misc_RNA (1)...(19): siRNA sense strand
cuuaggagccaccuuaaag

SEQ ID NO: 444290 - RNA, 19 nt, Homo sapiens
  misc_RNA (1)...(19): siRNA sense strand
caaccacucauucaagcau

SEQ ID NO: 444291 - RNA, 19 nt, Homo sapiens
  misc_RNA (1)...(19): siRNA sense strand
ucagagaaacaugaccaaa

SEQ ID NO: 444292 - RNA, 19 nt, Homo sapiens
  misc_RNA (1)...(19): siRNA sense strand
ugaccuggaaucagaugaa

SEQ ID NO: 444293 - RNA, 19 nt, Homo sapiens
  misc_RNA (1)...(19): siRNA sense strand
ccuacagcagugacaauuu

SEQ ID NO: 444294 - RNA, 19 nt, Homo sapiens
  misc_RNA (1)...(19): siRNA sense strand
acagcagugacaauuuaua

SEQ ID NO: 444295 - RNA, 19 nt, Homo sapiens
  misc_RNA (1)...(19): siRNA sense strand
ggagacauacaggugugaa

SEQ ID NO: 444296 - RNA, 19 nt, Homo sapiens
  misc_RNA (1)...(19): siRNA sense strand
cacgcacggugucuucaga

SEQ ID NO: 444297 - RNA, 19 nt, Homo sapiens
  misc_RNA (1)...(19): siRNA sense strand
ccagcccgcuauucgcaau

SEQ ID NO: 444298 - RNA, 19 nt, Homo sapiens
  misc_RNA (1)...(19): siRNA sense strand
gaccuggaaucagaugaac

SEQ ID NO: 444299 - RNA, 19 nt, Homo sapiens
  misc_RNA (1)...(19): siRNA sense strand
acccacaccaggacucaua

SEQ ID NO: 444300 - RNA, 19 nt, Homo sapiens
  misc_RNA (1)...(19): siRNA sense strand
caggcugcaauaagagaua

SEQ ID NO: 444301 - RNA, 19 nt, Homo sapiens
  misc_RNA (1)...(19): siRNA sense strand
gcuuacccaggcugcaaua

SEQ ID NO: 444302 - RNA, 19 nt, Homo sapiens
  misc_RNA (1)...(19): siRNA sense strand
cggcaucugagaccaguga

SEQ ID NO: 444303 - RNA, 19 nt, Homo sapiens
  misc_RNA (1)...(19): siRNA sense strand
gaacuuaggagccaccuua

SEQ ID NO: 444304 - RNA, 19 nt, Homo sapiens
  misc_RNA (1)...(19): siRNA sense strand
cuacagcagugacaauuua

SEQ ID NO: 444305 - RNA, 19 nt, Homo sapiens
  misc_RNA (1)...(19): siRNA sense strand
gaagcacacuggugagaaa

SEQ ID NO: 444306 - RNA, 19 nt, Homo sapiens
  misc_RNA (1)...(19): siRNA sense strand
ggaaucagaugaacuuagg

SEQ ID NO: 444307 - RNA, 19 nt, Homo sapiens
  misc_RNA (1)...(19): siRNA sense strand
ugaaaccauuccaguguaa

SEQ ID NO: 444308 - RNA, 19 nt, Homo sapiens
  misc_RNA (1)...(19): siRNA sense strand
gugaaaccauuccagugua

SEQ ID NO: 444309 - RNA, 19 nt, Homo sapiens
  misc_RNA (1)...(19): siRNA sense strand
cgccuucacuguccacuuu

SEQ ID NO: 444310 - RNA, 19 nt, Homo sapiens
  misc_RNA (1)...(19): siRNA sense strand
ggacugugaacgaagguuu

SEQ ID NO: 444311 - RNA, 19 nt, Homo sapiens
  misc_RNA (1)...(19): siRNA sense strand
ucagaggcauucaggaugu

SEQ ID NO: 444312 - RNA, 19 nt, Homo sapiens
  misc_RNA (1)...(19): siRNA sense strand
agagaaacaugaccaaacu

SEQ ID NO: 444313 - RNA, 19 nt, Homo sapiens
  misc_RNA (1)...(19): siRNA sense strand
auacaggugugaaaccauu

SEQ ID NO: 444314 - RNA, 19 nt, Homo sapiens
  misc_RNA (1)...(19): siRNA sense strand
uacccaggcugcaauaaga

SEQ ID NO: 444315 - RNA, 19 nt, Homo sapiens
  misc_RNA (1)...(19): siRNA sense strand
gaauuaguccgccaucaca

SEQ ID NO: 444316 - RNA, 19 nt, Homo sapiens
  misc_RNA (1)...(19): siRNA sense strand
cgagagcgauaaccacaca

SEQ ID NO: 444317 - RNA, 19 nt, Homo sapiens
  misc_RNA (1)...(19): siRNA sense strand
caacaugcaucagagaaac

SEQ ID NO: 444318 - RNA, 19 nt, Homo sapiens
  misc_RNA (1)...(19): siRNA sense strand
ugcaugaccuggaaucaga

SEQ ID NO: 444319 - RNA, 19 nt, Homo sapiens
  misc_RNA (1)...(19): siRNA sense strand
ugagaaaccauaccagugu

SEQ ID NO: 444320 - RNA, 19 nt, Homo sapiens
  misc_RNA (1)...(19): siRNA sense strand
caucacaacaugcaucaga

SEQ ID NO: 444321 - RNA, 19 nt, Homo sapiens
  misc_RNA (1)...(19): siRNA sense strand
ccaaaugacaucccagcuu

SEQ ID NO: 444322 - RNA, 19 nt, Homo sapiens
  misc_RNA (1)...(19): siRNA sense strand
ugacaucccagcuugaaug

SEQ ID NO: 444323 - RNA, 19 nt, Homo sapiens
  misc_RNA (1)...(19): siRNA sense strand
caucccagcuugaaugcau

SEQ ID NO: 444324 - RNA, 19 nt, Homo sapiens
  misc_RNA (1)...(19): siRNA sense strand
gcagugacaauuuauacca

SEQ ID NO: 444325 - RNA, 19 nt, Homo sapiens
  misc_RNA (1)...(19): siRNA sense strand
ggaagcacacuggugagaa

SEQ ID NO: 444326 - RNA, 19 nt, Homo sapiens
  misc_RNA (1)...(19): siRNA sense strand
gagaaacgccccuucaugu

SEQ ID NO: 444327 - RNA, 19 nt, Homo sapiens
  misc_RNA (1)...(19): siRNA sense strand
cugcggagcccaauacaga

SEQ ID NO: 444328 - RNA, 19 nt, Homo sapiens
  misc_RNA (1)...(19): siRNA sense strand
gaaaccauuccaguguaaa

SEQ ID NO: 444329 - RNA, 19 nt, Homo sapiens
  misc_RNA (1)...(19): siRNA sense strand
agacaccaaaggagacaua

SEQ ID NO: 444330 - RNA, 19 nt, Homo sapiens
  misc_RNA (1)...(19): siRNA sense strand
caucugagaccagugagaa

SEQ ID NO: 444331 - RNA, 19 nt, Homo sapiens
  misc_RNA (1)...(19): siRNA sense strand
uugaaugcaugaccuggaa

SEQ ID NO: 444332 - RNA, 19 nt, Homo sapiens
  misc_RNA (1)...(19): siRNA sense strand
ccggucagaugaauuaguc

SEQ ID NO: 444333 - RNA, 19 nt, Homo sapiens
  misc_RNA (1)...(19): siRNA sense strand
gagacauacaggugugaaa

SEQ ID NO: 444334 - RNA, 19 nt, Homo sapiens
  misc_RNA (1)...(19): siRNA sense strand
ccgccucacuccuucauca

SEQ ID NO: 444335 - RNA, 19 nt, Homo sapiens
  misc_RNA (1)...(19): siRNA sense strand
cagugacaauuuauaccaa

SEQ ID NO: 444336 - RNA, 19 nt, Homo sapiens
  misc_RNA (1)...(19): siRNA sense strand
guggccaaguugucagaaa

SEQ ID NO: 444337 - RNA, 19 nt, Homo sapiens
  misc_RNA (1)...(19): siRNA sense strand
ggagcccaauacagaauac

SEQ ID NO: 444338 - RNA, 19 nt, Homo sapiens
  misc_RNA (1)...(19): siRNA sense strand
gaaugcaugaccuggaauc

SEQ ID NO: 444339 - RNA, 19 nt, Homo sapiens
  misc_RNA (1)...(19): siRNA sense strand
acaacaugcaucagagaaa

SEQ ID NO: 444340 - RNA, 19 nt, Homo sapiens
  misc_RNA (1)...(19): siRNA sense strand
ccuggaaucagaugaacuu

SEQ ID NO: 444341 - RNA, 19 nt, Homo sapiens
  misc_RNA (1)...(19): siRNA sense strand
cagagaaacaugaccaaac

SEQ ID NO: 444342 - RNA, 19 nt, Homo sapiens
  misc_RNA (1)...(19): siRNA sense strand
ucacaacaugcaucagaga

SEQ ID NO: 444343 - RNA, 19 nt, Homo sapiens
  misc_RNA (1)...(19): siRNA sense strand
gaaacgccccuucaugugu

SEQ ID NO: 444344 - RNA, 19 nt, Homo sapiens
  misc_RNA (1)...(19): siRNA sense strand
cagcagugacaauuuauac

SEQ ID NO: 444345 - RNA, 19 nt, Homo sapiens
  misc_RNA (1)...(19): siRNA sense strand
ugcccggucagaugaauua

SEQ ID NO: 444346 - RNA, 19 nt, Homo sapiens
  misc_RNA (1)...(19): siRNA sense strand
ugugaaaccauuccagugu

SEQ ID NO: 444347 - RNA, 19 nt, Homo sapiens
  misc_RNA (1)...(19): siRNA sense strand
cuuaggagccaccuuaaag

SEQ ID NO: 444348 - RNA, 19 nt, Homo sapiens
  misc_RNA (1)...(19): siRNA sense strand
caaccacucauucaagcau

SEQ ID NO: 444349 - RNA, 19 nt, Homo sapiens
  misc_RNA (1)...(19): siRNA sense strand
ucagagaaacaugaccaaa

SEQ ID NO: 444350 - RNA, 19 nt, Homo sapiens
  misc_RNA (1)...(19): siRNA sense strand
ugaccuggaaucagaugaa

SEQ ID NO: 444351 - RNA, 19 nt, Homo sapiens
  misc_RNA (1)...(19): siRNA sense strand
ccuacagcagugacaauuu

SEQ ID NO: 444352 - RNA, 19 nt, Homo sapiens
  misc_RNA (1)...(19): siRNA sense strand
acagcagugacaauuuaua

SEQ ID NO: 444353 - RNA, 19 nt, Homo sapiens
  misc_RNA (1)...(19): siRNA sense strand
ggagacauacaggugugaa

SEQ ID NO: 444354 - RNA, 19 nt, Homo sapiens
  misc_RNA (1)...(19): siRNA sense strand
cacgcacggugucuucaga

SEQ ID NO: 444355 - RNA, 19 nt, Homo sapiens
  misc_RNA (1)...(19): siRNA sense strand
ccagcccgcuauucgcaau

SEQ ID NO: 444356 - RNA, 19 nt, Homo sapiens
  misc_RNA (1)...(19): siRNA sense strand
gaccuggaaucagaugaac

SEQ ID NO: 444357 - RNA, 19 nt, Homo sapiens
  misc_RNA (1)...(19): siRNA sense strand
acccacaccaggacucaua

SEQ ID NO: 444358 - RNA, 19 nt, Homo sapiens
  misc_RNA (1)...(19): siRNA sense strand
caggcugcaauaagagaua

SEQ ID NO: 444359 - RNA, 19 nt, Homo sapiens
  misc_RNA (1)...(19): siRNA sense strand
gcuuacccaggcugcaaua

SEQ ID NO: 444360 - RNA, 19 nt, Homo sapiens
  misc_RNA (1)...(19): siRNA sense strand
cggcaucugagaccaguga

SEQ ID NO: 444361 - RNA, 19 nt, Homo sapiens
  misc_RNA (1)...(19): siRNA sense strand
gaacuuaggagccaccuua

SEQ ID NO: 444362 - RNA, 19 nt, Homo sapiens
  misc_RNA (1)...(19): siRNA sense strand
cuacagcagugacaauuua

SEQ ID NO: 444363 - RNA, 19 nt, Homo sapiens
  misc_RNA (1)...(19): siRNA sense strand
gaagcacacuggugagaaa

SEQ ID NO: 444364 - RNA, 19 nt, Homo sapiens
  misc_RNA (1)...(19): siRNA sense strand
ggaaucagaugaacuuagg

SEQ ID NO: 444365 - RNA, 19 nt, Homo sapiens
  misc_RNA (1)...(19): siRNA sense strand
ugaaaccauuccaguguaa

SEQ ID NO: 444366 - RNA, 19 nt, Homo sapiens
  misc_RNA (1)...(19): siRNA sense strand
gugaaaccauuccagugua

SEQ ID NO: 444367 - RNA, 19 nt, Homo sapiens
  misc_RNA (1)...(19): siRNA sense strand
cgccuucacuguccacuuu

SEQ ID NO: 444368 - RNA, 19 nt, Homo sapiens
  misc_RNA (1)...(19): siRNA sense strand
ggacugugaacgaagguuu

SEQ ID NO: 444369 - RNA, 19 nt, Homo sapiens
  misc_RNA (1)...(19): siRNA sense strand
ucagaggcauucaggaugu

SEQ ID NO: 444370 - RNA, 19 nt, Homo sapiens
  misc_RNA (1)...(19): siRNA sense strand
agagaaacaugaccaaacu

SEQ ID NO: 444371 - RNA, 19 nt, Homo sapiens
  misc_RNA (1)...(19): siRNA sense strand
auacaggugugaaaccauu

SEQ ID NO: 444372 - RNA, 19 nt, Homo sapiens
  misc_RNA (1)...(19): siRNA sense strand
uacccaggcugcaauaaga

SEQ ID NO: 444373 - RNA, 19 nt, Homo sapiens
  misc_RNA (1)...(19): siRNA sense strand
gaauuaguccgccaucaca

SEQ ID NO: 444374 - RNA, 19 nt, Homo sapiens
  misc_RNA (1)...(19): siRNA sense strand
cgagagcgauaaccacaca

SEQ ID NO: 444375 - RNA, 19 nt, Homo sapiens
  misc_RNA (1)...(19): siRNA sense strand
caacaugcaucagagaaac

SEQ ID NO: 444376 - RNA, 19 nt, Homo sapiens
  misc_RNA (1)...(19): siRNA sense strand
ugcaugaccuggaaucaga

SEQ ID NO: 444377 - RNA, 19 nt, Homo sapiens
  misc_RNA (1)...(19): siRNA sense strand
ugagaaaccauaccagugu

SEQ ID NO: 444378 - RNA, 19 nt, Homo sapiens
  misc_RNA (1)...(19): siRNA sense strand
caucacaacaugcaucaga

SEQ ID NO: 444379 - RNA, 19 nt, Homo sapiens
  misc_RNA (1)...(19): siRNA sense strand
ccaaaugacaucccagcuu

SEQ ID NO: 444380 - RNA, 19 nt, Homo sapiens
  misc_RNA (1)...(19): siRNA sense strand
ugacaucccagcuugaaug

SEQ ID NO: 444381 - RNA, 19 nt, Homo sapiens
  misc_RNA (1)...(19): siRNA sense strand
caucccagcuugaaugcau

SEQ ID NO: 444382 - RNA, 19 nt, Homo sapiens
  misc_RNA (1)...(19): siRNA sense strand
gcagugacaauuuauacca

SEQ ID NO: 444383 - RNA, 19 nt, Homo sapiens
  misc_RNA (1)...(19): siRNA sense strand
ggaagcacacuggugagaa

SEQ ID NO: 444384 - RNA, 19 nt, Homo sapiens
  misc_RNA (1)...(19): siRNA sense strand
gagaaacgccccuucaugu

SEQ ID NO: 444385 - RNA, 19 nt, Homo sapiens
  misc_RNA (1)...(19): siRNA sense strand
cugcggagcccaauacaga

SEQ ID NO: 444386 - RNA, 19 nt, Homo sapiens
  misc_RNA (1)...(19): siRNA sense strand
gaaaccauuccaguguaaa

SEQ ID NO: 444387 - RNA, 19 nt, Homo sapiens
  misc_RNA (1)...(19): siRNA sense strand
agacaccaaaggagacaua

SEQ ID NO: 444388 - RNA, 19 nt, Homo sapiens
  misc_RNA (1)...(19): siRNA sense strand
caucugagaccagugagaa

SEQ ID NO: 444389 - RNA, 19 nt, Homo sapiens
  misc_RNA (1)...(19): siRNA sense strand
uugaaugcaugaccuggaa

SEQ ID NO: 444390 - RNA, 19 nt, Homo sapiens
  misc_RNA (1)...(19): siRNA sense strand
ccggucagaugaauuaguc

SEQ ID NO: 444391 - RNA, 19 nt, Homo sapiens
  misc_RNA (1)...(19): siRNA sense strand
gagacauacaggugugaaa

SEQ ID NO: 444392 - RNA, 19 nt, Homo sapiens
  misc_RNA (1)...(19): siRNA sense strand
ccgccucacuccuucauca

SEQ ID NO: 444393 - RNA, 19 nt, Homo sapiens
  misc_RNA (1)...(19): siRNA sense strand
cagugacaauuuauaccaa

SEQ ID NO: 444394 - RNA, 19 nt, Homo sapiens
  misc_RNA (1)...(19): siRNA sense strand
guggccaaguugucagaaa

SEQ ID NO: 444395 - RNA, 19 nt, Homo sapiens
  misc_RNA (1)...(19): siRNA sense strand
ggagcccaauacagaauac

SEQ ID NO: 444396 - RNA, 19 nt, Homo sapiens
  misc_RNA (1)...(19): siRNA sense strand
gaaugcaugaccuggaauc

SEQ ID NO: 444397 - RNA, 19 nt, Homo sapiens
  misc_RNA (1)...(19): siRNA sense strand
acaacaugcaucagagaaa

SEQ ID NO: 444398 - RNA, 19 nt, Homo sapiens
  misc_RNA (1)...(19): siRNA sense strand
ccuggaaucagaugaacuu

SEQ ID NO: 444399 - RNA, 19 nt, Homo sapiens
  misc_RNA (1)...(19): siRNA sense strand
cagagaaacaugaccaaac

SEQ ID NO: 444400 - RNA, 19 nt, Homo sapiens
  misc_RNA (1)...(19): siRNA sense strand
ucacaacaugcaucagaga

SEQ ID NO: 444401 - RNA, 19 nt, Homo sapiens
  misc_RNA (1)...(19): siRNA sense strand
gaaacgccccuucaugugu

SEQ ID NO: 444402 - RNA, 19 nt, Homo sapiens
  misc_RNA (1)...(19): siRNA sense strand
cagcagugacaauuuauac

SEQ ID NO: 444403 - RNA, 19 nt, Homo sapiens
  misc_RNA (1)...(19): siRNA sense strand
ugcccggucagaugaauua

SEQ ID NO: 444404 - RNA, 19 nt, Homo sapiens
  misc_RNA (1)...(19): siRNA sense strand
ugugaaaccauuccagugu

SEQ ID NO: 444405 - RNA, 19 nt, Homo sapiens
  misc_RNA (1)...(19): siRNA sense strand
cuuaggagccaccuuaaag

SEQ ID NO: 444406 - RNA, 19 nt, Homo sapiens
  misc_RNA (1)...(19): siRNA sense strand
caaccacucauucaagcau

SEQ ID NO: 444407 - RNA, 19 nt, Homo sapiens
  misc_RNA (1)...(19): siRNA sense strand
ucagagaaacaugaccaaa

SEQ ID NO: 444408 - RNA, 19 nt, Homo sapiens
  misc_RNA (1)...(19): siRNA sense strand
ugaccuggaaucagaugaa

SEQ ID NO: 444409 - RNA, 19 nt, Homo sapiens
  misc_RNA (1)...(19): siRNA sense strand
ccuacagcagugacaauuu

SEQ ID NO: 444410 - RNA, 19 nt, Homo sapiens
  misc_RNA (1)...(19): siRNA sense strand
acagcagugacaauuuaua

SEQ ID NO: 444411 - RNA, 19 nt, Homo sapiens
  misc_RNA (1)...(19): siRNA sense strand
ggagacauacaggugugaa

SEQ ID NO: 444412 - RNA, 19 nt, Homo sapiens
  misc_RNA (1)...(19): siRNA sense strand
cacgcacggugucuucaga

SEQ ID NO: 444413 - RNA, 19 nt, Homo sapiens
  misc_RNA (1)...(19): siRNA sense strand
ccagcccgcuauucgcaau

SEQ ID NO: 444414 - RNA, 19 nt, Homo sapiens
  misc_RNA (1)...(19): siRNA sense strand
gaccuggaaucagaugaac

SEQ ID NO: 444415 - RNA, 19 nt, Homo sapiens
  misc_RNA (1)...(19): siRNA sense strand
acccacaccaggacucaua

SEQ ID NO: 444416 - RNA, 19 nt, Homo sapiens
  misc_RNA (1)...(19): siRNA sense strand
caggcugcaauaagagaua

SEQ ID NO: 444417 - RNA, 19 nt, Homo sapiens
  misc_RNA (1)...(19): siRNA sense strand
gcuuacccaggcugcaaua

SEQ ID NO: 444418 - RNA, 19 nt, Homo sapiens
  misc_RNA (1)...(19): siRNA sense strand
cggcaucugagaccaguga

SEQ ID NO: 444419 - RNA, 19 nt, Homo sapiens
  misc_RNA (1)...(19): siRNA sense strand
gaacuuaggagccaccuua

SEQ ID NO: 444420 - RNA, 19 nt, Homo sapiens
  misc_RNA (1)...(19): siRNA sense strand
cuacagcagugacaauuua

SEQ ID NO: 444421 - RNA, 19 nt, Homo sapiens
  misc_RNA (1)...(19): siRNA sense strand
gaagcacacuggugagaaa

SEQ ID NO: 444422 - RNA, 19 nt, Homo sapiens
  misc_RNA (1)...(19): siRNA sense strand
ggaaucagaugaacuuagg

SEQ ID NO: 444423 - RNA, 19 nt, Homo sapiens
  misc_RNA (1)...(19): siRNA sense strand
ugaaaccauuccaguguaa

SEQ ID NO: 444424 - RNA, 19 nt, Homo sapiens
  misc_RNA (1)...(19): siRNA sense strand
gugaaaccauuccagugua

SEQ ID NO: 444425 - RNA, 19 nt, Homo sapiens
  misc_RNA (1)...(19): siRNA sense strand
cgccuucacuguccacuuu

SEQ ID NO: 444426 - RNA, 19 nt, Homo sapiens
  misc_RNA (1)...(19): siRNA sense strand
ggacugugaacgaagguuu

SEQ ID NO: 444427 - RNA, 19 nt, Homo sapiens
  misc_RNA (1)...(19): siRNA sense strand
ucagaggcauucaggaugu

SEQ ID NO: 444428 - RNA, 19 nt, Homo sapiens
  misc_RNA (1)...(19): siRNA sense strand
agagaaacaugaccaaacu

SEQ ID NO: 444429 - RNA, 19 nt, Homo sapiens
  misc_RNA (1)...(19): siRNA sense strand
auacaggugugaaaccauu

SEQ ID NO: 444430 - RNA, 19 nt, Homo sapiens
  misc_RNA (1)...(19): siRNA sense strand
uacccaggcugcaauaaga

SEQ ID NO: 444431 - RNA, 19 nt, Homo sapiens
  misc_RNA (1)...(19): siRNA sense strand
gaauuaguccgccaucaca

SEQ ID NO: 444432 - RNA, 19 nt, Homo sapiens
  misc_RNA (1)...(19): siRNA sense strand
cgagagcgauaaccacaca

SEQ ID NO: 444433 - RNA, 19 nt, Homo sapiens
  misc_RNA (1)...(19): siRNA sense strand
caacaugcaucagagaaac

SEQ ID NO: 444434 - RNA, 19 nt, Homo sapiens
  misc_RNA (1)...(19): siRNA sense strand
ugcaugaccuggaaucaga

SEQ ID NO: 444435 - RNA, 19 nt, Homo sapiens
  misc_RNA (1)...(19): siRNA sense strand
ugagaaaccauaccagugu

SEQ ID NO: 444436 - RNA, 19 nt, Homo sapiens
  misc_RNA (1)...(19): siRNA sense strand
caucacaacaugcaucaga

SEQ ID NO: 444437 - RNA, 19 nt, Homo sapiens
  misc_RNA (1)...(19): siRNA sense strand
ccaaaugacaucccagcuu

SEQ ID NO: 444438 - RNA, 19 nt, Homo sapiens
  misc_RNA (1)...(19): siRNA sense strand
ugacaucccagcuugaaug

SEQ ID NO: 444439 - RNA, 19 nt, Homo sapiens
  misc_RNA (1)...(19): siRNA sense strand
caucccagcuugaaugcau

SEQ ID NO: 444440 - RNA, 19 nt, Homo sapiens
  misc_RNA (1)...(19): siRNA sense strand
gcagugacaauuuauacca

SEQ ID NO: 444441 - RNA, 19 nt, Homo sapiens
  misc_RNA (1)...(19): siRNA sense strand
ggaagcacacuggugagaa

SEQ ID NO: 444442 - RNA, 19 nt, Homo sapiens
  misc_RNA (1)...(19): siRNA sense strand
gagaaacgccccuucaugu

SEQ ID NO: 444443 - RNA, 19 nt, Homo sapiens
  misc_RNA (1)...(19): siRNA sense strand
cugcggagcccaauacaga

SEQ ID NO: 444444 - RNA, 19 nt, Homo sapiens
  misc_RNA (1)...(19): siRNA sense strand
gaaaccauuccaguguaaa

SEQ ID NO: 444445 - RNA, 19 nt, Homo sapiens
  misc_RNA (1)...(19): siRNA sense strand
agacaccaaaggagacaua

SEQ ID NO: 444446 - RNA, 19 nt, Homo sapiens
  misc_RNA (1)...(19): siRNA sense strand
caucugagaccagugagaa

SEQ ID NO: 444447 - RNA, 19 nt, Homo sapiens
  misc_RNA (1)...(19): siRNA sense strand
uugaaugcaugaccuggaa

SEQ ID NO: 444448 - RNA, 19 nt, Homo sapiens
  misc_RNA (1)...(19): siRNA sense strand
ccggucagaugaauuaguc

SEQ ID NO: 444449 - RNA, 19 nt, Homo sapiens
  misc_RNA (1)...(19): siRNA sense strand
gagacauacaggugugaaa

SEQ ID NO: 444450 - RNA, 19 nt, Homo sapiens
  misc_RNA (1)...(19): siRNA sense strand
ccgccucacuccuucauca

SEQ ID NO: 444451 - RNA, 19 nt, Homo sapiens
  misc_RNA (1)...(19): siRNA sense strand
cagugacaauuuauaccaa

SEQ ID NO: 444452 - RNA, 19 nt, Homo sapiens
  misc_RNA (1)...(19): siRNA sense strand
guggccaaguugucagaaa

SEQ ID NO: 444453 - RNA, 19 nt, Homo sapiens
  misc_RNA (1)...(19): siRNA sense strand
ggagcccaauacagaauac

SEQ ID NO: 444454 - RNA, 19 nt, Homo sapiens
  misc_RNA (1)...(19): siRNA sense strand
gaaugcaugaccuggaauc

SEQ ID NO: 444455 - RNA, 19 nt, Homo sapiens
  misc_RNA (1)...(19): siRNA sense strand
acaacaugcaucagagaaa

SEQ ID NO: 444456 - RNA, 19 nt, Homo sapiens
  misc_RNA (1)...(19): siRNA sense strand
ccuggaaucagaugaacuu

SEQ ID NO: 444457 - RNA, 19 nt, Homo sapiens
  misc_RNA (1)...(19): siRNA sense strand
cagagaaacaugaccaaac

SEQ ID NO: 444458 - RNA, 19 nt, Homo sapiens
  misc_RNA (1)...(19): siRNA sense strand
ucacaacaugcaucagaga

SEQ ID NO: 444459 - RNA, 19 nt, Homo sapiens
  misc_RNA (1)...(19): siRNA sense strand
gaaacgccccuucaugugu

SEQ ID NO: 444460 - RNA, 19 nt, Homo sapiens
  misc_RNA (1)...(19): siRNA sense strand
cagcagugacaauuuauac

SEQ ID NO: 444461 - RNA, 19 nt, Homo sapiens
  misc_RNA (1)...(19): siRNA sense strand
ugcccggucagaugaauua

SEQ ID NO: 444462 - RNA, 19 nt, Homo sapiens
  misc_RNA (1)...(19): siRNA sense strand
ugugaaaccauuccagugu

SEQ ID NO: 444463 - RNA, 19 nt, Homo sapiens
  misc_RNA (1)...(19): siRNA sense strand
cuuaggagccaccuuaaag

SEQ ID NO: 444464 - RNA, 19 nt, Homo sapiens
  misc_RNA (1)...(19): siRNA sense strand
caaccacucauucaagcau

SEQ ID NO: 444465 - RNA, 19 nt, Homo sapiens
  misc_RNA (1)...(19): siRNA sense strand
ucagagaaacaugaccaaa

SEQ ID NO: 444466 - RNA, 19 nt, Homo sapiens
  misc_RNA (1)...(19): siRNA sense strand
ugaccuggaaucagaugaa

SEQ ID NO: 444467 - RNA, 19 nt, Homo sapiens
  misc_RNA (1)...(19): siRNA sense strand
ccuacagcagugacaauuu

SEQ ID NO: 444468 - RNA, 19 nt, Homo sapiens
  misc_RNA (1)...(19): siRNA sense strand
acagcagugacaauuuaua

SEQ ID NO: 444469 - RNA, 19 nt, Homo sapiens
  misc_RNA (1)...(19): siRNA sense strand
ggagacauacaggugugaa

SEQ ID NO: 444470 - RNA, 19 nt, Homo sapiens
  misc_RNA (1)...(19): siRNA sense strand
cacgcacggugucuucaga

SEQ ID NO: 444471 - RNA, 19 nt, Homo sapiens
  misc_RNA (1)...(19): siRNA sense strand
ccagcccgcuauucgcaau

SEQ ID NO: 444472 - RNA, 19 nt, Homo sapiens
  misc_RNA (1)...(19): siRNA sense strand
gaccuggaaucagaugaac

SEQ ID NO: 444473 - RNA, 19 nt, Homo sapiens
  misc_RNA (1)...(19): siRNA sense strand
acccacaccaggacucaua

SEQ ID NO: 444474 - RNA, 19 nt, Homo sapiens
  misc_RNA (1)...(19): siRNA sense strand
caggcugcaauaagagaua

SEQ ID NO: 444475 - RNA, 19 nt, Homo sapiens
  misc_RNA (1)...(19): siRNA sense strand
gcuuacccaggcugcaaua

SEQ ID NO: 444476 - RNA, 19 nt, Homo sapiens
  misc_RNA (1)...(19): siRNA sense strand
cggcaucugagaccaguga

SEQ ID NO: 444477 - RNA, 19 nt, Homo sapiens
  misc_RNA (1)...(19): siRNA sense strand
gaacuuaggagccaccuua

SEQ ID NO: 444478 - RNA, 19 nt, Homo sapiens
  misc_RNA (1)...(19): siRNA sense strand
cuacagcagugacaauuua

SEQ ID NO: 444479 - RNA, 19 nt, Homo sapiens
  misc_RNA (1)...(19): siRNA sense strand
gaagcacacuggugagaaa

SEQ ID NO: 444480 - RNA, 19 nt, Homo sapiens
  misc_RNA (1)...(19): siRNA sense strand
ggaaucagaugaacuuagg

SEQ ID NO: 444481 - RNA, 19 nt, Homo sapiens
  misc_RNA (1)...(19): siRNA sense strand
ugaaaccauuccaguguaa

SEQ ID NO: 444482 - RNA, 19 nt, Homo sapiens
  misc_RNA (1)...(19): siRNA sense strand
gugaaaccauuccagugua

SEQ ID NO: 444483 - RNA, 19 nt, Homo sapiens
  misc_RNA (1)...(19): siRNA sense strand
cgccuucacuguccacuuu

SEQ ID NO: 444484 - RNA, 19 nt, Homo sapiens
  misc_RNA (1)...(19): siRNA sense strand
ggacugugaacgaagguuu

SEQ ID NO: 444485 - RNA, 19 nt, Homo sapiens
  misc_RNA (1)...(19): siRNA sense strand
ucagaggcauucaggaugu

SEQ ID NO: 444486 - RNA, 19 nt, Homo sapiens
  misc_RNA (1)...(19): siRNA sense strand
agagaaacaugaccaaacu

SEQ ID NO: 444487 - RNA, 19 nt, Homo sapiens
  misc_RNA (1)...(19): siRNA sense strand
auacaggugugaaaccauu

SEQ ID NO: 444488 - RNA, 19 nt, Homo sapiens
  misc_RNA (1)...(19): siRNA sense strand
uacccaggcugcaauaaga

SEQ ID NO: 444489 - RNA, 19 nt, Homo sapiens
  misc_RNA (1)...(19): siRNA sense strand
gaauuaguccgccaucaca

SEQ ID NO: 444490 - RNA, 19 nt, Homo sapiens
  misc_RNA (1)...(19): siRNA sense strand
cgagagcgauaaccacaca

SEQ ID NO: 444491 - RNA, 19 nt, Homo sapiens
  misc_RNA (1)...(19): siRNA sense strand
caacaugcaucagagaaac

SEQ ID NO: 444492 - RNA, 19 nt, Homo sapiens
  misc_RNA (1)...(19): siRNA sense strand
ugcaugaccuggaaucaga

SEQ ID NO: 444493 - RNA, 19 nt, Homo sapiens
  misc_RNA (1)...(19): siRNA sense strand
ugagaaaccauaccagugu

SEQ ID NO: 444494 - RNA, 19 nt, Homo sapiens
  misc_RNA (1)...(19): siRNA sense strand
caucacaacaugcaucaga

SEQ ID NO: 444495 - RNA, 19 nt, Homo sapiens
  misc_RNA (1)...(19): siRNA sense strand
ccaaaugacaucccagcuu

SEQ ID NO: 444496 - RNA, 19 nt, Homo sapiens
  misc_RNA (1)...(19): siRNA sense strand
ugacaucccagcuugaaug

SEQ ID NO: 444497 - RNA, 19 nt, Homo sapiens
  misc_RNA (1)...(19): siRNA sense strand
caucccagcuugaaugcau

SEQ ID NO: 444498 - RNA, 19 nt, Homo sapiens
  misc_RNA (1)...(19): siRNA sense strand
gcagugacaauuuauacca

SEQ ID NO: 444499 - RNA, 19 nt, Homo sapiens
  misc_RNA (1)...(19): siRNA sense strand
ggaagcacacuggugagaa

SEQ ID NO: 444500 - RNA, 19 nt, Homo sapiens
  misc_RNA (1)...(19): siRNA sense strand
gagaaacgccccuucaugu

SEQ ID NO: 444501 - RNA, 19 nt, Homo sapiens
  misc_RNA (1)...(19): siRNA sense strand
cugcggagcccaauacaga

SEQ ID NO: 444502 - RNA, 19 nt, Homo sapiens
  misc_RNA (1)...(19): siRNA sense strand
gaaaccauuccaguguaaa

SEQ ID NO: 444503 - RNA, 19 nt, Homo sapiens
  misc_RNA (1)...(19): siRNA sense strand
agacaccaaaggagacaua

SEQ ID NO: 444504 - RNA, 19 nt, Homo sapiens
  misc_RNA (1)...(19): siRNA sense strand
caucugagaccagugagaa

SEQ ID NO: 444505 - RNA, 19 nt, Homo sapiens
  misc_RNA (1)...(19): siRNA sense strand
uugaaugcaugaccuggaa

SEQ ID NO: 444506 - RNA, 19 nt, Homo sapiens
  misc_RNA (1)...(19): siRNA sense strand
ccggucagaugaauuaguc

SEQ ID NO: 444507 - RNA, 19 nt, Homo sapiens
  misc_RNA (1)...(19): siRNA sense strand
gagacauacaggugugaaa

SEQ ID NO: 444508 - RNA, 19 nt, Homo sapiens
  misc_RNA (1)...(19): siRNA sense strand
ccgccucacuccuucauca

SEQ ID NO: 444509 - RNA, 19 nt, Homo sapiens
  misc_RNA (1)...(19): siRNA sense strand
cagugacaauuuauaccaa

SEQ ID NO: 444510 - RNA, 19 nt, Homo sapiens
  misc_RNA (1)...(19): siRNA sense strand
guggccaaguugucagaaa

SEQ ID NO: 444511 - RNA, 19 nt, Homo sapiens
  misc_RNA (1)...(19): siRNA sense strand
ggagcccaauacagaauac

SEQ ID NO: 444512 - RNA, 19 nt, Homo sapiens
  misc_RNA (1)...(19): siRNA sense strand
gaaugcaugaccuggaauc

SEQ ID NO: 444513 - RNA, 19 nt, Homo sapiens
  misc_RNA (1)...(19): siRNA sense strand
acaacaugcaucagagaaa

SEQ ID NO: 444514 - RNA, 19 nt, Homo sapiens
  misc_RNA (1)...(19): siRNA sense strand
ccuggaaucagaugaacuu

SEQ ID NO: 444515 - RNA, 19 nt, Homo sapiens
  misc_RNA (1)...(19): siRNA sense strand
cagagaaacaugaccaaac

SEQ ID NO: 444516 - RNA, 19 nt, Homo sapiens
  misc_RNA (1)...(19): siRNA sense strand
ucacaacaugcaucagaga

SEQ ID NO: 444517 - RNA, 19 nt, Homo sapiens
  misc_RNA (1)...(19): siRNA sense strand
gaaacgccccuucaugugu

SEQ ID NO: 444518 - RNA, 19 nt, Homo sapiens
  misc_RNA (1)...(19): siRNA sense strand
cagcagugacaauuuauac

SEQ ID NO: 444519 - RNA, 19 nt, Homo sapiens
  misc_RNA (1)...(19): siRNA sense strand
ugcccggucagaugaauua

SEQ ID NO: 444520 - RNA, 19 nt, Homo sapiens
  misc_RNA (1)...(19): siRNA sense strand
ugugaaaccauuccagugu

SEQ ID NO: 444521 - RNA, 19 nt, Homo sapiens
  misc_RNA (1)...(19): siRNA sense strand
cuuaggagccaccuuaaag

SEQ ID NO: 444522 - RNA, 19 nt, Homo sapiens
  misc_RNA (1)...(19): siRNA sense strand
caaccacucauucaagcau

SEQ ID NO: 444523 - RNA, 19 nt, Homo sapiens
  misc_RNA (1)...(19): siRNA sense strand
ucagagaaacaugaccaaa

SEQ ID NO: 444524 - RNA, 19 nt, Homo sapiens
  misc_RNA (1)...(19): siRNA sense strand
ugaccuggaaucagaugaa

SEQ ID NO: 444525 - RNA, 19 nt, Homo sapiens
  misc_RNA (1)...(19): siRNA sense strand
ccuacagcagugacaauuu

SEQ ID NO: 444526 - RNA, 19 nt, Homo sapiens
  misc_RNA (1)...(19): siRNA sense strand
acagcagugacaauuuaua

SEQ ID NO: 444527 - RNA, 19 nt, Homo sapiens
  misc_RNA (1)...(19): siRNA sense strand
ggagacauacaggugugaa

SEQ ID NO: 444528 - RNA, 19 nt, Homo sapiens
  misc_RNA (1)...(19): siRNA sense strand
cacgcacggugucuucaga

SEQ ID NO: 444529 - RNA, 19 nt, Homo sapiens
  misc_RNA (1)...(19): siRNA sense strand
ccagcccgcuauucgcaau

SEQ ID NO: 444530 - RNA, 19 nt, Homo sapiens
  misc_RNA (1)...(19): siRNA sense strand
gaccuggaaucagaugaac

SEQ ID NO: 444531 - RNA, 19 nt, Homo sapiens
  misc_RNA (1)...(19): siRNA sense strand
acccacaccaggacucaua

SEQ ID NO: 444532 - RNA, 19 nt, Homo sapiens
  misc_RNA (1)...(19): siRNA sense strand
caggcugcaauaagagaua

SEQ ID NO: 444533 - RNA, 19 nt, Homo sapiens
  misc_RNA (1)...(19): siRNA sense strand
gcuuacccaggcugcaaua

SEQ ID NO: 444534 - RNA, 19 nt, Homo sapiens
  misc_RNA (1)...(19): siRNA sense strand
cggcaucugagaccaguga

SEQ ID NO: 444535 - RNA, 19 nt, Homo sapiens
  misc_RNA (1)...(19): siRNA sense strand
gaacuuaggagccaccuua

SEQ ID NO: 444536 - RNA, 19 nt, Homo sapiens
  misc_RNA (1)...(19): siRNA sense strand
cuacagcagugacaauuua

SEQ ID NO: 444537 - RNA, 19 nt, Homo sapiens
  misc_RNA (1)...(19): siRNA sense strand
gaagcacacuggugagaaa

SEQ ID NO: 444538 - RNA, 19 nt, Homo sapiens
  misc_RNA (1)...(19): siRNA sense strand
ggaaucagaugaacuuagg

SEQ ID NO: 444539 - RNA, 19 nt, Homo sapiens
  misc_RNA (1)...(19): siRNA sense strand
ugaaaccauuccaguguaa

SEQ ID NO: 444540 - RNA, 19 nt, Homo sapiens
  misc_RNA (1)...(19): siRNA sense strand
gugaaaccauuccagugua

SEQ ID NO: 444541 - RNA, 19 nt, Homo sapiens
  misc_RNA (1)...(19): siRNA sense strand
cgccuucacuguccacuuu

SEQ ID NO: 444542 - RNA, 19 nt, Homo sapiens
  misc_RNA (1)...(19): siRNA sense strand
ggacugugaacgaagguuu

SEQ ID NO: 444543 - RNA, 19 nt, Homo sapiens
  misc_RNA (1)...(19): siRNA sense strand
ucagaggcauucaggaugu

SEQ ID NO: 444544 - RNA, 19 nt, Homo sapiens
  misc_RNA (1)...(19): siRNA sense strand
agagaaacaugaccaaacu

SEQ ID NO: 444545 - RNA, 19 nt, Homo sapiens
  misc_RNA (1)...(19): siRNA sense strand
auacaggugugaaaccauu

SEQ ID NO: 444546 - RNA, 19 nt, Homo sapiens
  misc_RNA (1)...(19): siRNA sense strand
uacccaggcugcaauaaga

SEQ ID NO: 444547 - RNA, 19 nt, Homo sapiens
  misc_RNA (1)...(19): siRNA sense strand
gaauuaguccgccaucaca

SEQ ID NO: 444548 - RNA, 19 nt, Homo sapiens
  misc_RNA (1)...(19): siRNA sense strand
cgagagcgauaaccacaca

SEQ ID NO: 444549 - RNA, 19 nt, Homo sapiens
  misc_RNA (1)...(19): siRNA sense strand
caacaugcaucagagaaac

SEQ ID NO: 444550 - RNA, 19 nt, Homo sapiens
  misc_RNA (1)...(19): siRNA sense strand
ugcaugaccuggaaucaga

SEQ ID NO: 444551 - RNA, 19 nt, Homo sapiens
  misc_RNA (1)...(19): siRNA sense strand
ugagaaaccauaccagugu

SEQ ID NO: 444552 - RNA, 19 nt, Homo sapiens
  misc_RNA (1)...(19): siRNA sense strand
caucacaacaugcaucaga

SEQ ID NO: 444553 - RNA, 19 nt, Homo sapiens
  misc_RNA (1)...(19): siRNA sense strand
ccaaaugacaucccagcuu

SEQ ID NO: 444554 - RNA, 19 nt, Homo sapiens
  misc_RNA (1)...(19): siRNA sense strand
ugacaucccagcuugaaug

SEQ ID NO: 444555 - RNA, 19 nt, Homo sapiens
  misc_RNA (1)...(19): siRNA sense strand
caucccagcuugaaugcau

SEQ ID NO: 444556 - RNA, 19 nt, Homo sapiens
  misc_RNA (1)...(19): siRNA sense strand
gcagugacaauuuauacca

SEQ ID NO: 444557 - RNA, 19 nt, Homo sapiens
  misc_RNA (1)...(19): siRNA sense strand
ggaagcacacuggugagaa

SEQ ID NO: 444558 - RNA, 19 nt, Homo sapiens
  misc_RNA (1)...(19): siRNA sense strand
gagaaacgccccuucaugu

SEQ ID NO: 444559 - RNA, 19 nt, Homo sapiens
  misc_RNA (1)...(19): siRNA sense strand
cugcggagcccaauacaga

SEQ ID NO: 444560 - RNA, 19 nt, Homo sapiens
  misc_RNA (1)...(19): siRNA sense strand
gaaaccauuccaguguaaa

SEQ ID NO: 444561 - RNA, 19 nt, Homo sapiens
  misc_RNA (1)...(19): siRNA sense strand
agacaccaaaggagacaua

SEQ ID NO: 444562 - RNA, 19 nt, Homo sapiens
  misc_RNA (1)...(19): siRNA sense strand
caucugagaccagugagaa

SEQ ID NO: 444563 - RNA, 19 nt, Homo sapiens
  misc_RNA (1)...(19): siRNA sense strand
uugaaugcaugaccuggaa

SEQ ID NO: 444564 - RNA, 19 nt, Homo sapiens
  misc_RNA (1)...(19): siRNA sense strand
ccggucagaugaauuaguc

SEQ ID NO: 444565 - RNA, 19 nt, Homo sapiens
  misc_RNA (1)...(19): siRNA sense strand
gagacauacaggugugaaa

SEQ ID NO: 444566 - RNA, 19 nt, Homo sapiens
  misc_RNA (1)...(19): siRNA sense strand
ccgccucacuccuucauca

SEQ ID NO: 444567 - RNA, 19 nt, Homo sapiens
  misc_RNA (1)...(19): siRNA sense strand
cagugacaauuuauaccaa

SEQ ID NO: 444568 - RNA, 19 nt, Homo sapiens
  misc_RNA (1)...(19): siRNA sense strand
guggccaaguugucagaaa

SEQ ID NO: 444569 - RNA, 19 nt, Homo sapiens
  misc_RNA (1)...(19): siRNA sense strand
ggagcccaauacagaauac

SEQ ID NO: 444570 - RNA, 19 nt, Homo sapiens
  misc_RNA (1)...(19): siRNA sense strand
gaaugcaugaccuggaauc

SEQ ID NO: 444571 - RNA, 19 nt, Homo sapiens
  misc_RNA (1)...(19): siRNA sense strand
acaacaugcaucagagaaa

SEQ ID NO: 444572 - RNA, 19 nt, Homo sapiens
  misc_RNA (1)...(19): siRNA sense strand
ccuggaaucagaugaacuu

SEQ ID NO: 444573 - RNA, 19 nt, Homo sapiens
  misc_RNA (1)...(19): siRNA sense strand
cagagaaacaugaccaaac

SEQ ID NO: 444574 - RNA, 19 nt, Homo sapiens
  misc_RNA (1)...(19): siRNA sense strand
ucacaacaugcaucagaga

SEQ ID NO: 444575 - RNA, 19 nt, Homo sapiens
  misc_RNA (1)...(19): siRNA sense strand
gaaacgccccuucaugugu

SEQ ID NO: 444576 - RNA, 19 nt, Homo sapiens
  misc_RNA (1)...(19): siRNA sense strand
cagcagugacaauuuauac

SEQ ID NO: 444577 - RNA, 19 nt, Homo sapiens
  misc_RNA (1)...(19): siRNA sense strand
ugcccggucagaugaauua

SEQ ID NO: 444578 - RNA, 19 nt, Homo sapiens
  misc_RNA (1)...(19): siRNA sense strand
ugugaaaccauuccagugu

SEQ ID NO: 444579 - RNA, 19 nt, Homo sapiens
  misc_RNA (1)...(19): siRNA sense strand
cuuaggagccaccuuaaag

SEQ ID NO: 444580 - RNA, 19 nt, Homo sapiens
  misc_RNA (1)...(19): siRNA sense strand
caaccacucauucaagcau

SEQ ID NO: 444581 - RNA, 19 nt, Homo sapiens
  misc_RNA (1)...(19): siRNA sense strand
ucagagaaacaugaccaaa

SEQ ID NO: 444582 - RNA, 19 nt, Homo sapiens
  misc_RNA (1)...(19): siRNA sense strand
ugaccuggaaucagaugaa

SEQ ID NO: 444583 - RNA, 19 nt, Homo sapiens
  misc_RNA (1)...(19): siRNA sense strand
ccuacagcagugacaauuu

SEQ ID NO: 444584 - RNA, 19 nt, Homo sapiens
  misc_RNA (1)...(19): siRNA sense strand
acagcagugacaauuuaua

SEQ ID NO: 444585 - RNA, 19 nt, Homo sapiens
  misc_RNA (1)...(19): siRNA sense strand
ggagacauacaggugugaa

SEQ ID NO: 444586 - RNA, 19 nt, Homo sapiens
  misc_RNA (1)...(19): siRNA sense strand
cacgcacggugucuucaga

SEQ ID NO: 444587 - RNA, 19 nt, Homo sapiens
  misc_RNA (1)...(19): siRNA sense strand
ccagcccgcuauucgcaau

SEQ ID NO: 444588 - RNA, 19 nt, Homo sapiens
  misc_RNA (1)...(19): siRNA sense strand
gaccuggaaucagaugaac

SEQ ID NO: 444589 - RNA, 19 nt, Homo sapiens
  misc_RNA (1)...(19): siRNA sense strand
acccacaccaggacucaua

SEQ ID NO: 444590 - RNA, 19 nt, Homo sapiens
  misc_RNA (1)...(19): siRNA sense strand
caggcugcaauaagagaua

SEQ ID NO: 444591 - RNA, 19 nt, Homo sapiens
  misc_RNA (1)...(19): siRNA sense strand
gcuuacccaggcugcaaua

SEQ ID NO: 444592 - RNA, 19 nt, Homo sapiens
  misc_RNA (1)...(19): siRNA sense strand
cggcaucugagaccaguga

SEQ ID NO: 444593 - RNA, 19 nt, Homo sapiens
  misc_RNA (1)...(19): siRNA sense strand
gaacuuaggagccaccuua

SEQ ID NO: 444594 - RNA, 19 nt, Homo sapiens
  misc_RNA (1)...(19): siRNA sense strand
cuacagcagugacaauuua

SEQ ID NO: 444595 - RNA, 19 nt, Homo sapiens
  misc_RNA (1)...(19): siRNA sense strand
gaagcacacuggugagaaa

SEQ ID NO: 444596 - RNA, 19 nt, Homo sapiens
  misc_RNA (1)...(19): siRNA sense strand
ggaaucagaugaacuuagg

SEQ ID NO: 444597 - RNA, 19 nt, Homo sapiens
  misc_RNA (1)...(19): siRNA sense strand
ugaaaccauuccaguguaa

SEQ ID NO: 444598 - RNA, 19 nt, Homo sapiens
  misc_RNA (1)...(19): siRNA sense strand
gugaaaccauuccagugua

SEQ ID NO: 444599 - RNA, 19 nt, Homo sapiens
  misc_RNA (1)...(19): siRNA sense strand
cgccuucacuguccacuuu

SEQ ID NO: 444600 - RNA, 19 nt, Homo sapiens
  misc_RNA (1)...(19): siRNA sense strand
ggacugugaacgaagguuu

SEQ ID NO: 444601 - RNA, 19 nt, Homo sapiens
  misc_RNA (1)...(19): siRNA sense strand
ucagaggcauucaggaugu

SEQ ID NO: 444602 - RNA, 19 nt, Homo sapiens
  misc_RNA (1)...(19): siRNA sense strand
agagaaacaugaccaaacu

SEQ ID NO: 444603 - RNA, 19 nt, Homo sapiens
  misc_RNA (1)...(19): siRNA sense strand
auacaggugugaaaccauu

SEQ ID NO: 444604 - RNA, 19 nt, Homo sapiens
  misc_RNA (1)...(19): siRNA sense strand
uacccaggcugcaauaaga

SEQ ID NO: 444605 - RNA, 19 nt, Homo sapiens
  misc_RNA (1)...(19): siRNA sense strand
gaauuaguccgccaucaca

SEQ ID NO: 444606 - RNA, 19 nt, Homo sapiens
  misc_RNA (1)...(19): siRNA sense strand
cgagagcgauaaccacaca

SEQ ID NO: 444607 - RNA, 19 nt, Homo sapiens
  misc_RNA (1)...(19): siRNA sense strand
caacaugcaucagagaaac

SEQ ID NO: 444608 - RNA, 19 nt, Homo sapiens
  misc_RNA (1)...(19): siRNA sense strand
ugcaugaccuggaaucaga

SEQ ID NO: 444609 - RNA, 19 nt, Homo sapiens
  misc_RNA (1)...(19): siRNA sense strand
ugagaaaccauaccagugu

SEQ ID NO: 444610 - RNA, 19 nt, Homo sapiens
  misc_RNA (1)...(19): siRNA sense strand
caucacaacaugcaucaga

SEQ ID NO: 444611 - RNA, 19 nt, Homo sapiens
  misc_RNA (1)...(19): siRNA sense strand
ccaaaugacaucccagcuu

SEQ ID NO: 444612 - RNA, 19 nt, Homo sapiens
  misc_RNA (1)...(19): siRNA sense strand
ugacaucccagcuugaaug

SEQ ID NO: 444613 - RNA, 19 nt, Homo sapiens
  misc_RNA (1)...(19): siRNA sense strand
caucccagcuugaaugcau

SEQ ID NO: 444614 - RNA, 19 nt, Homo sapiens
  misc_RNA (1)...(19): siRNA sense strand
gcagugacaauuuauacca

SEQ ID NO: 444615 - RNA, 19 nt, Homo sapiens
  misc_RNA (1)...(19): siRNA sense strand
ggaagcacacuggugagaa

SEQ ID NO: 444616 - RNA, 19 nt, Homo sapiens
  misc_RNA (1)...(19): siRNA sense strand
gagaaacgccccuucaugu

SEQ ID NO: 444617 - RNA, 19 nt, Homo sapiens
  misc_RNA (1)...(19): siRNA sense strand
cugcggagcccaauacaga

SEQ ID NO: 444618 - RNA, 19 nt, Homo sapiens
  misc_RNA (1)...(19): siRNA sense strand
gaaaccauuccaguguaaa

SEQ ID NO: 444619 - RNA, 19 nt, Homo sapiens
  misc_RNA (1)...(19): siRNA sense strand
agacaccaaaggagacaua

SEQ ID NO: 444620 - RNA, 19 nt, Homo sapiens
  misc_RNA (1)...(19): siRNA sense strand
caucugagaccagugagaa

SEQ ID NO: 444621 - RNA, 19 nt, Homo sapiens
  misc_RNA (1)...(19): siRNA sense strand
uugaaugcaugaccuggaa

SEQ ID NO: 444622 - RNA, 19 nt, Homo sapiens
  misc_RNA (1)...(19): siRNA sense strand
ccggucagaugaauuaguc

SEQ ID NO: 444623 - RNA, 19 nt, Homo sapiens
  misc_RNA (1)...(19): siRNA sense strand
gagacauacaggugugaaa

SEQ ID NO: 444624 - RNA, 19 nt, Homo sapiens
  misc_RNA (1)...(19): siRNA sense strand
ccgccucacuccuucauca

SEQ ID NO: 444625 - RNA, 19 nt, Homo sapiens
  misc_RNA (1)...(19): siRNA sense strand
cagugacaauuuauaccaa

SEQ ID NO: 444626 - RNA, 19 nt, Homo sapiens
  misc_RNA (1)...(19): siRNA sense strand
guggccaaguugucagaaa

SEQ ID NO: 444627 - RNA, 19 nt, Homo sapiens
  misc_RNA (1)...(19): siRNA sense strand
ggagcccaauacagaauac

SEQ ID NO: 444628 - RNA, 19 nt, Homo sapiens
  misc_RNA (1)...(19): siRNA sense strand
gaaugcaugaccuggaauc

SEQ ID NO: 444629 - RNA, 19 nt, Homo sapiens
  misc_RNA (1)...(19): siRNA sense strand
acaacaugcaucagagaaa

SEQ ID NO: 444630 - RNA, 19 nt, Homo sapiens
  misc_RNA (1)...(19): siRNA sense strand
ccuggaaucagaugaacuu

SEQ ID NO: 444631 - RNA, 19 nt, Homo sapiens
  misc_RNA (1)...(19): siRNA sense strand
cagagaaacaugaccaaac

SEQ ID NO: 444632 - RNA, 19 nt, Homo sapiens
  misc_RNA (1)...(19): siRNA sense strand
ucacaacaugcaucagaga

SEQ ID NO: 444633 - RNA, 19 nt, Homo sapiens
  misc_RNA (1)...(19): siRNA sense strand
gaaacgccccuucaugugu

SEQ ID NO: 444634 - RNA, 19 nt, Homo sapiens
  misc_RNA (1)...(19): siRNA sense strand
cagcagugacaauuuauac

SEQ ID NO: 444635 - RNA, 19 nt, Homo sapiens
  misc_RNA (1)...(19): siRNA sense strand
ugcccggucagaugaauua

SEQ ID NO: 444636 - RNA, 19 nt, Homo sapiens
  misc_RNA (1)...(19): siRNA sense strand
ugugaaaccauuccagugu

SEQ ID NO: 444637 - RNA, 19 nt, Homo sapiens
  misc_RNA (1)...(19): siRNA sense strand
cuuaggagccaccuuaaag

SEQ ID NO: 444638 - RNA, 19 nt, Homo sapiens
  misc_RNA (1)...(19): siRNA sense strand
caaccacucauucaagcau

SEQ ID NO: 444639 - RNA, 19 nt, Homo sapiens
  misc_RNA (1)...(19): siRNA sense strand
ucagagaaacaugaccaaa

SEQ ID NO: 444640 - RNA, 19 nt, Homo sapiens
  misc_RNA (1)...(19): siRNA sense strand
ugaccuggaaucagaugaa

SEQ ID NO: 444641 - RNA, 19 nt, Homo sapiens
  misc_RNA (1)...(19): siRNA sense strand
ccuacagcagugacaauuu

SEQ ID NO: 444642 - RNA, 19 nt, Homo sapiens
  misc_RNA (1)...(19): siRNA sense strand
acagcagugacaauuuaua

SEQ ID NO: 444643 - RNA, 19 nt, Homo sapiens
  misc_RNA (1)...(19): siRNA sense strand
ggagacauacaggugugaa

SEQ ID NO: 444644 - RNA, 19 nt, Homo sapiens
  misc_RNA (1)...(19): siRNA sense strand
cacgcacggugucuucaga

SEQ ID NO: 444645 - RNA, 19 nt, Homo sapiens
  misc_RNA (1)...(19): siRNA sense strand
ccagcccgcuauucgcaau

SEQ ID NO: 444646 - RNA, 19 nt, Homo sapiens
  misc_RNA (1)...(19): siRNA sense strand
gaccuggaaucagaugaac

SEQ ID NO: 444647 - RNA, 19 nt, Homo sapiens
  misc_RNA (1)...(19): siRNA sense strand
acccacaccaggacucaua

SEQ ID NO: 444648 - RNA, 19 nt, Homo sapiens
  misc_RNA (1)...(19): siRNA sense strand
caggcugcaauaagagaua

SEQ ID NO: 444649 - RNA, 19 nt, Homo sapiens
  misc_RNA (1)...(19): siRNA sense strand
gcuuacccaggcugcaaua

SEQ ID NO: 444650 - RNA, 19 nt, Homo sapiens
  misc_RNA (1)...(19): siRNA sense strand
cggcaucugagaccaguga

SEQ ID NO: 444651 - RNA, 19 nt, Homo sapiens
  misc_RNA (1)...(19): siRNA sense strand
gaacuuaggagccaccuua

SEQ ID NO: 444652 - RNA, 19 nt, Homo sapiens
  misc_RNA (1)...(19): siRNA sense strand
cuacagcagugacaauuua

SEQ ID NO: 444653 - RNA, 19 nt, Homo sapiens
  misc_RNA (1)...(19): siRNA sense strand
gaagcacacuggugagaaa

SEQ ID NO: 444654 - RNA, 19 nt, Homo sapiens
  misc_RNA (1)...(19): siRNA sense strand
ggaaucagaugaacuuagg

SEQ ID NO: 444655 - RNA, 19 nt, Homo sapiens
  misc_RNA (1)...(19): siRNA sense strand
ugaaaccauuccaguguaa

SEQ ID NO: 444656 - RNA, 19 nt, Homo sapiens
  misc_RNA (1)...(19): siRNA sense strand
gugaaaccauuccagugua

SEQ ID NO: 444657 - RNA, 19 nt, Homo sapiens
  misc_RNA (1)...(19): siRNA sense strand
cgccuucacuguccacuuu

SEQ ID NO: 444658 - RNA, 19 nt, Homo sapiens
  misc_RNA (1)...(19): siRNA sense strand
ggacugugaacgaagguuu

SEQ ID NO: 444659 - RNA, 19 nt, Homo sapiens
  misc_RNA (1)...(19): siRNA sense strand
ucagaggcauucaggaugu

SEQ ID NO: 444660 - RNA, 19 nt, Homo sapiens
  misc_RNA (1)...(19): siRNA sense strand
agagaaacaugaccaaacu

SEQ ID NO: 444661 - RNA, 19 nt, Homo sapiens
  misc_RNA (1)...(19): siRNA sense strand
auacaggugugaaaccauu

SEQ ID NO: 444662 - RNA, 19 nt, Homo sapiens
  misc_RNA (1)...(19): siRNA sense strand
uacccaggcugcaauaaga

SEQ ID NO: 444663 - RNA, 19 nt, Homo sapiens
  misc_RNA (1)...(19): siRNA sense strand
gaauuaguccgccaucaca

SEQ ID NO: 444664 - RNA, 19 nt, Homo sapiens
  misc_RNA (1)...(19): siRNA sense strand
cgagagcgauaaccacaca

SEQ ID NO: 444665 - RNA, 19 nt, Homo sapiens
  misc_RNA (1)...(19): siRNA sense strand
caacaugcaucagagaaac

SEQ ID NO: 444666 - RNA, 19 nt, Homo sapiens
  misc_RNA (1)...(19): siRNA sense strand
ugcaugaccuggaaucaga

SEQ ID NO: 444667 - RNA, 19 nt, Homo sapiens
  misc_RNA (1)...(19): siRNA sense strand
ugagaaaccauaccagugu

SEQ ID NO: 444668 - RNA, 19 nt, Homo sapiens
  misc_RNA (1)...(19): siRNA sense strand
caucacaacaugcaucaga

SEQ ID NO: 444669 - RNA, 19 nt, Homo sapiens
  misc_RNA (1)...(19): siRNA sense strand
ccaaaugacaucccagcuu

SEQ ID NO: 444670 - RNA, 19 nt, Homo sapiens
  misc_RNA (1)...(19): siRNA sense strand
ugacaucccagcuugaaug

SEQ ID NO: 444671 - RNA, 19 nt, Homo sapiens
  misc_RNA (1)...(19): siRNA sense strand
caucccagcuugaaugcau

SEQ ID NO: 444672 - RNA, 19 nt, Homo sapiens
  misc_RNA (1)...(19): siRNA sense strand
gcagugacaauuuauacca

SEQ ID NO: 444673 - RNA, 19 nt, Homo sapiens
  misc_RNA (1)...(19): siRNA sense strand
ggaagcacacuggugagaa

SEQ ID NO: 444674 - RNA, 19 nt, Homo sapiens
  misc_RNA (1)...(19): siRNA sense strand
gagaaacgccccuucaugu

SEQ ID NO: 444675 - RNA, 19 nt, Homo sapiens
  misc_RNA (1)...(19): siRNA sense strand
cugcggagcccaauacaga

SEQ ID NO: 444676 - RNA, 19 nt, Homo sapiens
  misc_RNA (1)...(19): siRNA sense strand
gaaaccauuccaguguaaa

SEQ ID NO: 444677 - RNA, 19 nt, Homo sapiens
  misc_RNA (1)...(19): siRNA sense strand
agacaccaaaggagacaua

SEQ ID NO: 444678 - RNA, 19 nt, Homo sapiens
  misc_RNA (1)...(19): siRNA sense strand
caucugagaccagugagaa

SEQ ID NO: 444679 - RNA, 19 nt, Homo sapiens
  misc_RNA (1)...(19): siRNA sense strand
uugaaugcaugaccuggaa

SEQ ID NO: 444680 - RNA, 19 nt, Homo sapiens
  misc_RNA (1)...(19): siRNA sense strand
ccggucagaugaauuaguc

SEQ ID NO: 444681 - RNA, 19 nt, Homo sapiens
  misc_RNA (1)...(19): siRNA sense strand
gagacauacaggugugaaa

SEQ ID NO: 444682 - RNA, 19 nt, Homo sapiens
  misc_RNA (1)...(19): siRNA sense strand
ccgccucacuccuucauca

SEQ ID NO: 444683 - RNA, 19 nt, Homo sapiens
  misc_RNA (1)...(19): siRNA sense strand
cagugacaauuuauaccaa

SEQ ID NO: 444684 - RNA, 19 nt, Homo sapiens
  misc_RNA (1)...(19): siRNA sense strand
guggccaaguugucagaaa

SEQ ID NO: 444685 - RNA, 19 nt, Homo sapiens
  misc_RNA (1)...(19): siRNA sense strand
ggagcccaauacagaauac

SEQ ID NO: 444686 - RNA, 19 nt, Homo sapiens
  misc_RNA (1)...(19): siRNA sense strand
gaaugcaugaccuggaauc

SEQ ID NO: 444687 - RNA, 19 nt, Homo sapiens
  misc_RNA (1)...(19): siRNA sense strand
acaacaugcaucagagaaa

SEQ ID NO: 444688 - RNA, 19 nt, Homo sapiens
  misc_RNA (1)...(19): siRNA sense strand
ccuggaaucagaugaacuu

SEQ ID NO: 444689 - RNA, 19 nt, Homo sapiens
  misc_RNA (1)...(19): siRNA sense strand
cagagaaacaugaccaaac

SEQ ID NO: 444690 - RNA, 19 nt, Homo sapiens
  misc_RNA (1)...(19): siRNA sense strand
ucacaacaugcaucagaga

SEQ ID NO: 444691 - RNA, 19 nt, Homo sapiens
  misc_RNA (1)...(19): siRNA sense strand
gaaacgccccuucaugugu

SEQ ID NO: 444692 - RNA, 19 nt, Homo sapiens
  misc_RNA (1)...(19): siRNA sense strand
cagcagugacaauuuauac

SEQ ID NO: 444693 - RNA, 19 nt, Homo sapiens
  misc_RNA (1)...(19): siRNA sense strand
ugcccggucagaugaauua

SEQ ID NO: 444694 - RNA, 19 nt, Homo sapiens
  misc_RNA (1)...(19): siRNA sense strand
ugugaaaccauuccagugu

SEQ ID NO: 444695 - RNA, 19 nt, Homo sapiens
  misc_RNA (1)...(19): siRNA sense strand
cuuaggagccaccuuaaag

SEQ ID NO: 444696 - RNA, 19 nt, Homo sapiens
  misc_RNA (1)...(19): siRNA sense strand
caaccacucauucaagcau

SEQ ID NO: 444697 - RNA, 19 nt, Homo sapiens
  misc_RNA (1)...(19): siRNA sense strand
ucagagaaacaugaccaaa

SEQ ID NO: 444698 - RNA, 19 nt, Homo sapiens
  misc_RNA (1)...(19): siRNA sense strand
ugaccuggaaucagaugaa

SEQ ID NO: 444699 - RNA, 19 nt, Homo sapiens
  misc_RNA (1)...(19): siRNA sense strand
ccuacagcagugacaauuu

SEQ ID NO: 444700 - RNA, 19 nt, Homo sapiens
  misc_RNA (1)...(19): siRNA sense strand
acagcagugacaauuuaua

SEQ ID NO: 444701 - RNA, 19 nt, Homo sapiens
  misc_RNA (1)...(19): siRNA sense strand
ggagacauacaggugugaa

SEQ ID NO: 444702 - RNA, 19 nt, Homo sapiens
  misc_RNA (1)...(19): siRNA sense strand
cacgcacggugucuucaga

SEQ ID NO: 444703 - RNA, 19 nt, Homo sapiens
  misc_RNA (1)...(19): siRNA sense strand
ccagcccgcuauucgcaau

SEQ ID NO: 444704 - RNA, 19 nt, Homo sapiens
  misc_RNA (1)...(19): siRNA sense strand
gaccuggaaucagaugaac

SEQ ID NO: 444705 - RNA, 19 nt, Homo sapiens
  misc_RNA (1)...(19): siRNA sense strand
acccacaccaggacucaua

SEQ ID NO: 444706 - RNA, 19 nt, Homo sapiens
  misc_RNA (1)...(19): siRNA sense strand
caggcugcaauaagagaua

SEQ ID NO: 444707 - RNA, 19 nt, Homo sapiens
  misc_RNA (1)...(19): siRNA sense strand
gcuuacccaggcugcaaua

SEQ ID NO: 444708 - RNA, 19 nt, Homo sapiens
  misc_RNA (1)...(19): siRNA sense strand
cggcaucugagaccaguga

SEQ ID NO: 444709 - RNA, 19 nt, Homo sapiens
  misc_RNA (1)...(19): siRNA sense strand
caaagaaccuauccgcuua

SEQ ID NO: 444710 - RNA, 19 nt, Homo sapiens
  misc_RNA (1)...(19): siRNA sense strand
gaaauacucuucaguugga

SEQ ID NO: 444711 - RNA, 19 nt, Homo sapiens
  misc_RNA (1)...(19): siRNA sense strand
ggucagcuauccagaauuu

SEQ ID NO: 444712 - RNA, 19 nt, Homo sapiens
  misc_RNA (1)...(19): siRNA sense strand
gaacaggauuggucagcua

SEQ ID NO: 444713 - RNA, 19 nt, Homo sapiens
  misc_RNA (1)...(19): siRNA sense strand
gcaaaccgguuaaucaaga

SEQ ID NO: 444714 - RNA, 19 nt, Homo sapiens
  misc_RNA (1)...(19): siRNA sense strand
ggacuguggugccaucuuu

SEQ ID NO: 444715 - RNA, 19 nt, Homo sapiens
  misc_RNA (1)...(19): siRNA sense strand
ugacaaggcuucuaaagag

SEQ ID NO: 444716 - RNA, 19 nt, Homo sapiens
  misc_RNA (1)...(19): siRNA sense strand
gcuccaagcuuccugcauu

SEQ ID NO: 444717 - RNA, 19 nt, Homo sapiens
  misc_RNA (1)...(19): siRNA sense strand
ugaauuauguuucgcagaa

SEQ ID NO: 444718 - RNA, 19 nt, Homo sapiens
  misc_RNA (1)...(19): siRNA sense strand
gguacaagcugacauucaa

SEQ ID NO: 444719 - RNA, 19 nt, Homo sapiens
  misc_RNA (1)...(19): siRNA sense strand
ugaacgaacugaucaaagu

SEQ ID NO: 444720 - RNA, 19 nt, Homo sapiens
  misc_RNA (1)...(19): siRNA sense strand
ggaagcucuuuaugccuua

SEQ ID NO: 444721 - RNA, 19 nt, Homo sapiens
  misc_RNA (1)...(19): siRNA sense strand
ucaagaauuuggucaagga

SEQ ID NO: 444722 - RNA, 19 nt, Homo sapiens
  misc_RNA (1)...(19): siRNA sense strand
cgaaguaggagaagugaaa

SEQ ID NO: 444723 - RNA, 19 nt, Homo sapiens
  misc_RNA (1)...(19): siRNA sense strand
gaagugcgaagccauguga

SEQ ID NO: 444724 - RNA, 19 nt, Homo sapiens
  misc_RNA (1)...(19): siRNA sense strand
gugagcaggugaacacuga

SEQ ID NO: 444725 - RNA, 19 nt, Homo sapiens
  misc_RNA (1)...(19): siRNA sense strand
gaaauucuccaggcaaaug

SEQ ID NO: 444726 - RNA, 19 nt, Homo sapiens
  misc_RNA (1)...(19): siRNA sense strand
gaagagucauugaaauacu

SEQ ID NO: 444727 - RNA, 19 nt, Homo sapiens
  misc_RNA (1)...(19): siRNA sense strand
uaacggugcuggagaugug

SEQ ID NO: 444728 - RNA, 19 nt, Homo sapiens
  misc_RNA (1)...(19): siRNA sense strand
acagcgagguggccaaauu

SEQ ID NO: 444729 - RNA, 19 nt, Homo sapiens
  misc_RNA (1)...(19): siRNA sense strand
cagaauugcugugaggaaa

SEQ ID NO: 444730 - RNA, 19 nt, Homo sapiens
  misc_RNA (1)...(19): siRNA sense strand
aaaggaagagucauugaaa

SEQ ID NO: 444731 - RNA, 19 nt, Homo sapiens
  misc_RNA (1)...(19): siRNA sense strand
ucgagacgcuuaucagaug

SEQ ID NO: 444732 - RNA, 19 nt, Homo sapiens
  misc_RNA (1)...(19): siRNA sense strand
ggucaaggaggaacaagaa

SEQ ID NO: 444733 - RNA, 19 nt, Homo sapiens
  misc_RNA (1)...(19): siRNA sense strand
caaagucaaugagagugaa

SEQ ID NO: 444734 - RNA, 19 nt, Homo sapiens
  misc_RNA (1)...(19): siRNA sense strand
uaaaggaagagucauugaa

SEQ ID NO: 444735 - RNA, 19 nt, Homo sapiens
  misc_RNA (1)...(19): siRNA sense strand
ugacaccacugaugacgau

SEQ ID NO: 444736 - RNA, 19 nt, Homo sapiens
  misc_RNA (1)...(19): siRNA sense strand
aaacaagacccuaaacuac

SEQ ID NO: 444737 - RNA, 19 nt, Homo sapiens
  misc_RNA (1)...(19): siRNA sense strand
caauggaccugcgcagaug

SEQ ID NO: 444738 - RNA, 19 nt, Homo sapiens
  misc_RNA (1)...(19): siRNA sense strand
caaaccgguuaaucaagaa

SEQ ID NO: 444739 - RNA, 19 nt, Homo sapiens
  misc_RNA (1)...(19): siRNA sense strand
gaacgaacugaucaaagug

SEQ ID NO: 444740 - RNA, 19 nt, Homo sapiens
  misc_RNA (1)...(19): siRNA sense strand
cggaaauucuccaggcaaa

SEQ ID NO: 444741 - RNA, 19 nt, Homo sapiens
  misc_RNA (1)...(19): siRNA sense strand
aggaagagucauugaaaua

SEQ ID NO: 444742 - RNA, 19 nt, Homo sapiens
  misc_RNA (1)...(19): siRNA sense strand
gaagugccaccagguacua

SEQ ID NO: 444743 - RNA, 19 nt, Homo sapiens
  misc_RNA (1)...(19): siRNA sense strand
gcuugacaauccacacaaa

SEQ ID NO: 444744 - RNA, 19 nt, Homo sapiens
  misc_RNA (1)...(19): siRNA sense strand
gagaaggaagcucuuuaug

SEQ ID NO: 444745 - RNA, 19 nt, Homo sapiens
  misc_RNA (1)...(19): siRNA sense strand
ugaaggugcugcaggagau

SEQ ID NO: 444746 - RNA, 19 nt, Homo sapiens
  misc_RNA (1)...(19): siRNA sense strand
gaacugaucaaaguguugu

SEQ ID NO: 444747 - RNA, 19 nt, Homo sapiens
  misc_RNA (1)...(19): siRNA sense strand
ggucaccuuuggaaacaga

SEQ ID NO: 444748 - RNA, 19 nt, Homo sapiens
  misc_RNA (1)...(19): siRNA sense strand
ggaagagucauugaaauac

SEQ ID NO: 444749 - RNA, 19 nt, Homo sapiens
  misc_RNA (1)...(19): siRNA sense strand
gaguucugcuguacaaaca

SEQ ID NO: 444750 - RNA, 19 nt, Homo sapiens
  misc_RNA (1)...(19): siRNA sense strand
gcugcaaaccgguuaauca

SEQ ID NO: 444751 - RNA, 19 nt, Homo sapiens
  misc_RNA (1)...(19): siRNA sense strand
gaagcucuuuaugccuuaa

SEQ ID NO: 444752 - RNA, 19 nt, Homo sapiens
  misc_RNA (1)...(19): siRNA sense strand
ugacaauccacacaaagaa

SEQ ID NO: 444753 - RNA, 19 nt, Homo sapiens
  misc_RNA (1)...(19): siRNA sense strand
cggagaagguguccaagag

SEQ ID NO: 444754 - RNA, 19 nt, Homo sapiens
  misc_RNA (1)...(19): siRNA sense strand
uaaacuaccaguggauaaa

SEQ ID NO: 444755 - RNA, 19 nt, Homo sapiens
  misc_RNA (1)...(19): siRNA sense strand
cugaagaaacaaggaauua

SEQ ID NO: 444756 - RNA, 19 nt, Homo sapiens
  misc_RNA (1)...(19): siRNA sense strand
caaauuucguuuccugaac

SEQ ID NO: 444757 - RNA, 19 nt, Homo sapiens
  misc_RNA (1)...(19): siRNA sense strand
ccaaggaguucugcuguac

SEQ ID NO: 444758 - RNA, 19 nt, Homo sapiens
  misc_RNA (1)...(19): siRNA sense strand
aaggaagagucauugaaau

SEQ ID NO: 444759 - RNA, 19 nt, Homo sapiens
  misc_RNA (1)...(19): siRNA sense strand
cggaagacaucaagauucg

SEQ ID NO: 444760 - RNA, 19 nt, Homo sapiens
  misc_RNA (1)...(19): siRNA sense strand
gggauaucauguuucaagu

SEQ ID NO: 444761 - RNA, 19 nt, Homo sapiens
  misc_RNA (1)...(19): siRNA sense strand
cccaaggaguucugcugua

SEQ ID NO: 444762 - RNA, 19 nt, Homo sapiens
  misc_RNA (1)...(19): siRNA sense strand
gcugaagaaacaaggaauu

SEQ ID NO: 444763 - RNA, 19 nt, Homo sapiens
  misc_RNA (1)...(19): siRNA sense strand
ccaaauuucguuuccugaa

SEQ ID NO: 444764 - RNA, 19 nt, Homo sapiens
  misc_RNA (1)...(19): siRNA sense strand
cuccgugcccucugaauua

SEQ ID NO: 444765 - RNA, 19 nt, Homo sapiens
  misc_RNA (1)...(19): siRNA sense strand
cagcgagguggccaaauuu

SEQ ID NO: 444766 - RNA, 19 nt, Homo sapiens
  misc_RNA (1)...(19): siRNA sense strand
caagcuuccugcauucagu

SEQ ID NO: 444767 - RNA, 19 nt, Homo sapiens
  misc_RNA (1)...(19): siRNA sense strand
ccaaagucaaugagaguga

SEQ ID NO: 444768 - RNA, 19 nt, Homo sapiens
  misc_RNA (1)...(19): siRNA sense strand
aaggaguucugcuguacaa

SEQ ID NO: 444769 - RNA, 19 nt, Homo sapiens
  misc_RNA (1)...(19): siRNA sense strand
aaaguuaaaggaagaguca

SEQ ID NO: 444770 - RNA, 19 nt, Homo sapiens
  misc_RNA (1)...(19): siRNA sense strand
ucagugcgguggaggaagu

SEQ ID NO: 444771 - RNA, 19 nt, Homo sapiens
  misc_RNA (1)...(19): siRNA sense strand
cuaaacuaccaguggauaa

SEQ ID NO: 444772 - RNA, 19 nt, Homo sapiens
  misc_RNA (1)...(19): siRNA sense strand
gauccagucuccgcaagag

SEQ ID NO: 444773 - RNA, 19 nt, Homo sapiens
  misc_RNA (1)...(19): siRNA sense strand
acuaaguccucuccagguu

SEQ ID NO: 444774 - RNA, 19 nt, Homo sapiens
  misc_RNA (1)...(19): siRNA sense strand
gcuccgugcccucugaauu

SEQ ID NO: 444775 - RNA, 19 nt, Homo sapiens
  misc_RNA (1)...(19): siRNA sense strand
cagagugaccagcucauug

SEQ ID NO: 444776 - RNA, 19 nt, Homo sapiens
  misc_RNA (1)...(19): siRNA sense strand
caaggcuucuaaagagcaa

SEQ ID NO: 444777 - RNA, 19 nt, Homo sapiens
  misc_RNA (1)...(19): siRNA sense strand
acaagacccuaaacuacca

SEQ ID NO: 444778 - RNA, 19 nt, Homo sapiens
  misc_RNA (1)...(19): siRNA sense strand
ucaagauucgagacgcuua

SEQ ID NO: 444779 - RNA, 19 nt, Homo sapiens
  misc_RNA (1)...(19): siRNA sense strand
ccaucucccuggcccaaga

SEQ ID NO: 444780 - RNA, 19 nt, Homo sapiens
  misc_RNA (1)...(19): siRNA sense strand
ggauaucauguuucaagug

SEQ ID NO: 444781 - RNA, 19 nt, Homo sapiens
  misc_RNA (1)...(19): siRNA sense strand
gcuacuggcccacaagauc

SEQ ID NO: 444782 - RNA, 19 nt, Homo sapiens
  misc_RNA (1)...(19): siRNA sense strand
guuaaaggaagagucauug

SEQ ID NO: 444783 - RNA, 19 nt, Homo sapiens
  misc_RNA (1)...(19): siRNA sense strand
ccuauccgcuuacgguaca

SEQ ID NO: 444784 - RNA, 19 nt, Homo sapiens
  misc_RNA (1)...(19): siRNA sense strand
cuuugaugcugaugaagaa

SEQ ID NO: 444785 - RNA, 19 nt, Homo sapiens
  misc_RNA (1)...(19): siRNA sense strand
aaaacaagacccuaaacua

SEQ ID NO: 444786 - RNA, 19 nt, Homo sapiens
  misc_RNA (1)...(19): siRNA sense strand
uccagagucuuucagaauc

SEQ ID NO: 444787 - RNA, 19 nt, Homo sapiens
  misc_RNA (1)...(19): siRNA sense strand
gcaugucggaacaggauug

SEQ ID NO: 444788 - RNA, 19 nt, Homo sapiens
  misc_RNA (1)...(19): siRNA sense strand
ccuaaacuaccaguggaua

SEQ ID NO: 444789 - RNA, 19 nt, Homo sapiens
  misc_RNA (1)...(19): siRNA sense strand
gaaaaguguccccaaggaa

SEQ ID NO: 444790 - RNA, 19 nt, Homo sapiens
  misc_RNA (1)...(19): siRNA sense strand
cagugaugcuccuguuaca

SEQ ID NO: 444791 - RNA, 19 nt, Homo sapiens
  misc_RNA (1)...(19): siRNA sense strand
ggaguucugcuguacaaac

SEQ ID NO: 444792 - RNA, 19 nt, Homo sapiens
  misc_RNA (1)...(19): siRNA sense strand
cccugcaggucguguauga

SEQ ID NO: 444793 - RNA, 19 nt, Homo sapiens
  misc_RNA (1)...(19): siRNA sense strand
cugacaaggcuucuaaaga

SEQ ID NO: 444794 - RNA, 19 nt, Homo sapiens
  misc_RNA (1)...(19): siRNA sense strand
agaaggaagcucuuuaugc

SEQ ID NO: 444795 - RNA, 19 nt, Homo sapiens
  misc_RNA (1)...(19): siRNA sense strand
cuucugacaaggcuucuaa

SEQ ID NO: 444796 - RNA, 19 nt, Homo sapiens
  misc_RNA (1)...(19): siRNA sense strand
caagcugacauucaaccaa

SEQ ID NO: 444797 - RNA, 19 nt, Homo sapiens
  misc_RNA (1)...(19): siRNA sense strand
gaugaugcacucgcggaaa

SEQ ID NO: 444798 - RNA, 19 nt, Homo sapiens
  misc_RNA (1)...(19): siRNA sense strand
aaucaagaauuuggucaag

SEQ ID NO: 444799 - RNA, 19 nt, Homo sapiens
  misc_RNA (1)...(19): siRNA sense strand
gagguggccaaauuucguu

SEQ ID NO: 444800 - RNA, 19 nt, Homo sapiens
  misc_RNA (1)...(19): siRNA sense strand
uuaaaggaagagucauuga

SEQ ID NO: 444801 - RNA, 19 nt, Homo sapiens
  misc_RNA (1)...(19): siRNA sense strand
cagcgaaguaggagaagug

SEQ ID NO: 444802 - RNA, 19 nt, Homo sapiens
  misc_RNA (1)...(19): siRNA sense strand
ucuccagagucuuucagaa

SEQ ID NO: 444803 - RNA, 19 nt, Homo sapiens
  misc_RNA (1)...(19): siRNA sense strand
cugcaaaccgguuaaucaa

SEQ ID NO: 444804 - RNA, 19 nt, Homo sapiens
  misc_RNA (1)...(19): siRNA sense strand
ccuuaacggugcuggagau

SEQ ID NO: 444805 - RNA, 19 nt, Homo sapiens
  misc_RNA (1)...(19): siRNA sense strand
cuccagcugugauaucuca

SEQ ID NO: 444806 - RNA, 19 nt, Homo sapiens
  misc_RNA (1)...(19): siRNA sense strand
ugcauucaguccuuugaug

SEQ ID NO: 444807 - RNA, 19 nt, Homo sapiens
  misc_RNA (1)...(19): siRNA sense strand
cgugcccucugaauuaugu

SEQ ID NO: 444808 - RNA, 19 nt, Homo sapiens
  misc_RNA (1)...(19): siRNA sense strand
ggaaauucuccaggcaaau

SEQ ID NO: 444809 - RNA, 19 nt, Homo sapiens
  misc_RNA (1)...(19): siRNA sense strand
gaaauacucuucaguugga

SEQ ID NO: 444810 - RNA, 19 nt, Homo sapiens
  misc_RNA (1)...(19): siRNA sense strand
ggucagcuauccagaauuu

SEQ ID NO: 444811 - RNA, 19 nt, Homo sapiens
  misc_RNA (1)...(19): siRNA sense strand
gaacaggauuggucagcua

SEQ ID NO: 444812 - RNA, 19 nt, Homo sapiens
  misc_RNA (1)...(19): siRNA sense strand
ugaacgaacugaucaaagu

SEQ ID NO: 444813 - RNA, 19 nt, Homo sapiens
  misc_RNA (1)...(19): siRNA sense strand
ggaagcucuuuaugccuua

SEQ ID NO: 444814 - RNA, 19 nt, Homo sapiens
  misc_RNA (1)...(19): siRNA sense strand
gugagcaggugaacacuga

SEQ ID NO: 444815 - RNA, 19 nt, Homo sapiens
  misc_RNA (1)...(19): siRNA sense strand
gaagagucauugaaauacu

SEQ ID NO: 444816 - RNA, 19 nt, Homo sapiens
  misc_RNA (1)...(19): siRNA sense strand
uaacggugcuggagaugug

SEQ ID NO: 444817 - RNA, 19 nt, Homo sapiens
  misc_RNA (1)...(19): siRNA sense strand
acagcgagguggccaaauu

SEQ ID NO: 444818 - RNA, 19 nt, Homo sapiens
  misc_RNA (1)...(19): siRNA sense strand
aaaggaagagucauugaaa

SEQ ID NO: 444819 - RNA, 19 nt, Homo sapiens
  misc_RNA (1)...(19): siRNA sense strand
ucgagacgcuuaucagaug

SEQ ID NO: 444820 - RNA, 19 nt, Homo sapiens
  misc_RNA (1)...(19): siRNA sense strand
uaaaggaagagucauugaa

SEQ ID NO: 444821 - RNA, 19 nt, Homo sapiens
  misc_RNA (1)...(19): siRNA sense strand
aaacaagacccuaaacuac

SEQ ID NO: 444822 - RNA, 19 nt, Homo sapiens
  misc_RNA (1)...(19): siRNA sense strand
gaacgaacugaucaaagug

SEQ ID NO: 444823 - RNA, 19 nt, Homo sapiens
  misc_RNA (1)...(19): siRNA sense strand
aggaagagucauugaaaua

SEQ ID NO: 444824 - RNA, 19 nt, Homo sapiens
  misc_RNA (1)...(19): siRNA sense strand
gagaaggaagcucuuuaug

SEQ ID NO: 444825 - RNA, 19 nt, Homo sapiens
  misc_RNA (1)...(19): siRNA sense strand
gaacugaucaaaguguugu

SEQ ID NO: 444826 - RNA, 19 nt, Homo sapiens
  misc_RNA (1)...(19): siRNA sense strand
ggaagagucauugaaauac

SEQ ID NO: 444827 - RNA, 19 nt, Homo sapiens
  misc_RNA (1)...(19): siRNA sense strand
gaagcucuuuaugccuuaa

SEQ ID NO: 444828 - RNA, 19 nt, Homo sapiens
  misc_RNA (1)...(19): siRNA sense strand
uaaacuaccaguggauaaa

SEQ ID NO: 444829 - RNA, 19 nt, Homo sapiens
  misc_RNA (1)...(19): siRNA sense strand
cugaagaaacaaggaauua

SEQ ID NO: 444830 - RNA, 19 nt, Homo sapiens
  misc_RNA (1)...(19): siRNA sense strand
caaauuucguuuccugaac

SEQ ID NO: 444831 - RNA, 19 nt, Homo sapiens
  misc_RNA (1)...(19): siRNA sense strand
aaggaagagucauugaaau

SEQ ID NO: 444832 - RNA, 19 nt, Homo sapiens
  misc_RNA (1)...(19): siRNA sense strand
cggaagacaucaagauucg

SEQ ID NO: 444833 - RNA, 19 nt, Homo sapiens
  misc_RNA (1)...(19): siRNA sense strand
gcugaagaaacaaggaauu

SEQ ID NO: 444834 - RNA, 19 nt, Homo sapiens
  misc_RNA (1)...(19): siRNA sense strand
ccaaauuucguuuccugaa

SEQ ID NO: 444835 - RNA, 19 nt, Homo sapiens
  misc_RNA (1)...(19): siRNA sense strand
cagcgagguggccaaauuu

SEQ ID NO: 444836 - RNA, 19 nt, Homo sapiens
  misc_RNA (1)...(19): siRNA sense strand
aaaguuaaaggaagaguca

SEQ ID NO: 444837 - RNA, 19 nt, Homo sapiens
  misc_RNA (1)...(19): siRNA sense strand
cuaaacuaccaguggauaa

SEQ ID NO: 444838 - RNA, 19 nt, Homo sapiens
  misc_RNA (1)...(19): siRNA sense strand
gauccagucuccgcaagag

SEQ ID NO: 444839 - RNA, 19 nt, Homo sapiens
  misc_RNA (1)...(19): siRNA sense strand
acaagacccuaaacuacca

SEQ ID NO: 444840 - RNA, 19 nt, Homo sapiens
  misc_RNA (1)...(19): siRNA sense strand
ucaagauucgagacgcuua

SEQ ID NO: 444841 - RNA, 19 nt, Homo sapiens
  misc_RNA (1)...(19): siRNA sense strand
gcuacuggcccacaagauc

SEQ ID NO: 444842 - RNA, 19 nt, Homo sapiens
  misc_RNA (1)...(19): siRNA sense strand
ccaucucccuggcccaaga

SEQ ID NO: 444843 - RNA, 19 nt, Homo sapiens
  misc_RNA (1)...(19): siRNA sense strand
guuaaaggaagagucauug

SEQ ID NO: 444844 - RNA, 19 nt, Homo sapiens
  misc_RNA (1)...(19): siRNA sense strand
cuuugaugcugaugaagaa

SEQ ID NO: 444845 - RNA, 19 nt, Homo sapiens
  misc_RNA (1)...(19): siRNA sense strand
aaaacaagacccuaaacua

SEQ ID NO: 444846 - RNA, 19 nt, Homo sapiens
  misc_RNA (1)...(19): siRNA sense strand
gcaugucggaacaggauug

SEQ ID NO: 444847 - RNA, 19 nt, Homo sapiens
  misc_RNA (1)...(19): siRNA sense strand
agaaggaagcucuuuaugc

SEQ ID NO: 444848 - RNA, 19 nt, Homo sapiens
  misc_RNA (1)...(19): siRNA sense strand
ccuaaacuaccaguggaua

SEQ ID NO: 444849 - RNA, 19 nt, Homo sapiens
  misc_RNA (1)...(19): siRNA sense strand
gagguggccaaauuucguu

SEQ ID NO: 444850 - RNA, 19 nt, Homo sapiens
  misc_RNA (1)...(19): siRNA sense strand
uuaaaggaagagucauuga

SEQ ID NO: 444851 - RNA, 19 nt, Homo sapiens
  misc_RNA (1)...(19): siRNA sense strand
ccuuaacggugcuggagau

SEQ ID NO: 444852 - RNA, 19 nt, Homo sapiens
  misc_RNA (1)...(19): siRNA sense strand
caagauucgagacgcuuau

SEQ ID NO: 444853 - RNA, 19 nt, Homo sapiens
  misc_RNA (1)...(19): siRNA sense strand
ccacagacccaagcauguc

SEQ ID NO: 444854 - RNA, 19 nt, Homo sapiens
  misc_RNA (1)...(19): siRNA sense strand
ggugaacacugaccccaau

SEQ ID NO: 444855 - RNA, 19 nt, Homo sapiens
  misc_RNA (1)...(19): siRNA sense strand
ccggaagacaucaagauuc

SEQ ID NO: 444856 - RNA, 19 nt, Homo sapiens
  misc_RNA (1)...(19): siRNA sense strand
ucaguuggacagucugguu

SEQ ID NO: 444857 - RNA, 19 nt, Homo sapiens
  misc_RNA (1)...(19): siRNA sense strand
uuggucagcuauccagaau

SEQ ID NO: 444858 - RNA, 19 nt, Homo sapiens
  misc_RNA (1)...(19): siRNA sense strand
cgagaaagcuugugaguuu

SEQ ID NO: 444859 - RNA, 19 nt, Homo sapiens
  misc_RNA (1)...(19): siRNA sense strand
gaacgaagcugccagugaa

SEQ ID NO: 444860 - RNA, 19 nt, Homo sapiens
  misc_RNA (1)...(19): siRNA sense strand
gcagaacacuggauuacua

SEQ ID NO: 444861 - RNA, 19 nt, Homo sapiens
  misc_RNA (1)...(19): siRNA sense strand
gcacacagaugaugaccua

SEQ ID NO: 444862 - RNA, 19 nt, Homo sapiens
  misc_RNA (1)...(19): siRNA sense strand
gaacauuugucgacuauca

SEQ ID NO: 444863 - RNA, 19 nt, Homo sapiens
  misc_RNA (1)...(19): siRNA sense strand
ccaagaaacuauugaagaa

SEQ ID NO: 444864 - RNA, 19 nt, Homo sapiens
  misc_RNA (1)...(19): siRNA sense strand
ggaaagccgugucagauau

SEQ ID NO: 444865 - RNA, 19 nt, Homo sapiens
  misc_RNA (1)...(19): siRNA sense strand
cgaaauccauucucaaguu

SEQ ID NO: 444866 - RNA, 19 nt, Homo sapiens
  misc_RNA (1)...(19): siRNA sense strand
ggacuggcuucacaaauga

SEQ ID NO: 444867 - RNA, 19 nt, Homo sapiens
  misc_RNA (1)...(19): siRNA sense strand
caacgcagcugcccagaau

SEQ ID NO: 444868 - RNA, 19 nt, Homo sapiens
  misc_RNA (1)...(19): siRNA sense strand
gaaauccauucucaaguug

SEQ ID NO: 444869 - RNA, 19 nt, Homo sapiens
  misc_RNA (1)...(19): siRNA sense strand
ugacacaacuggcaagcua

SEQ ID NO: 444870 - RNA, 19 nt, Homo sapiens
  misc_RNA (1)...(19): siRNA sense strand
agacgacugugguuaaaua

SEQ ID NO: 444871 - RNA, 19 nt, Homo sapiens
  misc_RNA (1)...(19): siRNA sense strand
caaugcagcugccauguug

SEQ ID NO: 444872 - RNA, 19 nt, Homo sapiens
  misc_RNA (1)...(19): siRNA sense strand
gaagacaaccgcaauaagu

SEQ ID NO: 444873 - RNA, 19 nt, Homo sapiens
  misc_RNA (1)...(19): siRNA sense strand
ccagaaugcuauuaagaaa

SEQ ID NO: 444874 - RNA, 19 nt, Homo sapiens
  misc_RNA (1)...(19): siRNA sense strand
cagcugaacuugcuuuaug

SEQ ID NO: 444875 - RNA, 19 nt, Homo sapiens
  misc_RNA (1)...(19): siRNA sense strand
gaagaaaugcuaaagaaag

SEQ ID NO: 444876 - RNA, 19 nt, Homo sapiens
  misc_RNA (1)...(19): siRNA sense strand
gaucacagccgaacauuca

SEQ ID NO: 444877 - RNA, 19 nt, Homo sapiens
  misc_RNA (1)...(19): siRNA sense strand
ggccaaagcuguugccaau

SEQ ID NO: 444878 - RNA, 19 nt, Homo sapiens
  misc_RNA (1)...(19): siRNA sense strand
gaacaaggaguagaugaaa

SEQ ID NO: 444879 - RNA, 19 nt, Homo sapiens
  misc_RNA (1)...(19): siRNA sense strand
caaagaauguugcccaagu

SEQ ID NO: 444880 - RNA, 19 nt, Homo sapiens
  misc_RNA (1)...(19): siRNA sense strand
gaaaagagccucagacaau

SEQ ID NO: 444881 - RNA, 19 nt, Homo sapiens
  misc_RNA (1)...(19): siRNA sense strand
ggacaccaccauuauguuu

SEQ ID NO: 444882 - RNA, 19 nt, Homo sapiens
  misc_RNA (1)...(19): siRNA sense strand
uagggaaccucaagaauau

SEQ ID NO: 444883 - RNA, 19 nt, Homo sapiens
  misc_RNA (1)...(19): siRNA sense strand
ggacgacccuuccauguac

SEQ ID NO: 444884 - RNA, 19 nt, Homo sapiens
  misc_RNA (1)...(19): siRNA sense strand
gaagaauacuccuuaaucc

SEQ ID NO: 444885 - RNA, 19 nt, Homo sapiens
  misc_RNA (1)...(19): siRNA sense strand
uaaaggcaguggaggauga

SEQ ID NO: 444886 - RNA, 19 nt, Homo sapiens
  misc_RNA (1)...(19): siRNA sense strand
gagcaucaaucaacucauc

SEQ ID NO: 444887 - RNA, 19 nt, Homo sapiens
  misc_RNA (1)...(19): siRNA sense strand
gaugugcgaucaccacuau

SEQ ID NO: 444888 - RNA, 19 nt, Homo sapiens
  misc_RNA (1)...(19): siRNA sense strand
gaaacaaaguaaagaucga

SEQ ID NO: 444889 - RNA, 19 nt, Homo sapiens
  misc_RNA (1)...(19): siRNA sense strand
gcagauaucccagcugauu

SEQ ID NO: 444890 - RNA, 19 nt, Homo sapiens
  misc_RNA (1)...(19): siRNA sense strand
gcaaggcaguggcugauca

SEQ ID NO: 444891 - RNA, 19 nt, Homo sapiens
  misc_RNA (1)...(19): siRNA sense strand
ggacagagggagugugauu

SEQ ID NO: 444892 - RNA, 19 nt, Homo sapiens
  misc_RNA (1)...(19): siRNA sense strand
gcagggauuucacagaaug

SEQ ID NO: 444893 - RNA, 19 nt, Homo sapiens
  misc_RNA (1)...(19): siRNA sense strand
ucaagagucucaucacuuc

SEQ ID NO: 444894 - RNA, 19 nt, Homo sapiens
  misc_RNA (1)...(19): siRNA sense strand
gagggaagaugagggcuaa

SEQ ID NO: 444895 - RNA, 19 nt, Homo sapiens
  misc_RNA (1)...(19): siRNA sense strand
caaagaagguggcggaaac

SEQ ID NO: 444896 - RNA, 19 nt, Homo sapiens
  misc_RNA (1)...(19): siRNA sense strand
cauaagaacugcggagaga

SEQ ID NO: 444897 - RNA, 19 nt, Homo sapiens
  misc_RNA (1)...(19): siRNA sense strand
ggaagcugcuaaauccauu

SEQ ID NO: 444898 - RNA, 19 nt, Homo sapiens
  misc_RNA (1)...(19): siRNA sense strand
agagggagcugaucgaaug

SEQ ID NO: 444899 - RNA, 19 nt, Homo sapiens
  misc_RNA (1)...(19): siRNA sense strand
ggugacagcucaggaaaug

SEQ ID NO: 444900 - RNA, 19 nt, Homo sapiens
  misc_RNA (1)...(19): siRNA sense strand
gaaaguucagugaugauuu

SEQ ID NO: 444901 - RNA, 19 nt, Homo sapiens
  misc_RNA (1)...(19): siRNA sense strand
caucagaccucgucaaugc

SEQ ID NO: 444902 - RNA, 19 nt, Homo sapiens
  misc_RNA (1)...(19): siRNA sense strand
ggaacggcuucaguuguua

SEQ ID NO: 444903 - RNA, 19 nt, Homo sapiens
  misc_RNA (1)...(19): siRNA sense strand
gauauggcaucuaggguau

SEQ ID NO: 444904 - RNA, 19 nt, Homo sapiens
  misc_RNA (1)...(19): siRNA sense strand
ggaagaaaugcuaaagaaa

SEQ ID NO: 444905 - RNA, 19 nt, Homo sapiens
  misc_RNA (1)...(19): siRNA sense strand
ugacagcguucgccucaaa

SEQ ID NO: 444906 - RNA, 19 nt, Homo sapiens
  misc_RNA (1)...(19): siRNA sense strand
ccaagucucucucuguaga

SEQ ID NO: 444907 - RNA, 19 nt, Homo sapiens
  misc_RNA (1)...(19): siRNA sense strand
gcuguuagcugccaagucu

SEQ ID NO: 444908 - RNA, 19 nt, Homo sapiens
  misc_RNA (1)...(19): siRNA sense strand
ggcaggaaaugcugugaaa

SEQ ID NO: 444909 - RNA, 19 nt, Homo sapiens
  misc_RNA (1)...(19): siRNA sense strand
gagaucggauuccagauuc

SEQ ID NO: 444910 - RNA, 19 nt, Homo sapiens
  misc_RNA (1)...(19): siRNA sense strand
gaacaaagucgacgaaucc

SEQ ID NO: 444911 - RNA, 19 nt, Homo sapiens
  misc_RNA (1)...(19): siRNA sense strand
aggaagaaaugcuaaagaa

SEQ ID NO: 444912 - RNA, 19 nt, Homo sapiens
  misc_RNA (1)...(19): siRNA sense strand
ugaagaccaugcaguuuga

SEQ ID NO: 444913 - RNA, 19 nt, Homo sapiens
  misc_RNA (1)...(19): siRNA sense strand
gaugaggagucaaccaugu

SEQ ID NO: 444914 - RNA, 19 nt, Homo sapiens
  misc_RNA (1)...(19): siRNA sense strand
ugacgacgauguuguagug

SEQ ID NO: 444915 - RNA, 19 nt, Homo sapiens
  misc_RNA (1)...(19): siRNA sense strand
ggagaucggauuccagauu

SEQ ID NO: 444916 - RNA, 19 nt, Homo sapiens
  misc_RNA (1)...(19): siRNA sense strand
gcccuguccuuaaagauuu

SEQ ID NO: 444917 - RNA, 19 nt, Homo sapiens
  misc_RNA (1)...(19): siRNA sense strand
gggaacauuugucgacuau

SEQ ID NO: 444918 - RNA, 19 nt, Homo sapiens
  misc_RNA (1)...(19): siRNA sense strand
ugaaggcacuccuccagaa

SEQ ID NO: 444919 - RNA, 19 nt, Homo sapiens
  misc_RNA (1)...(19): siRNA sense strand
caggaaaucggacaccuua

SEQ ID NO: 444920 - RNA, 19 nt, Homo sapiens
  misc_RNA (1)...(19): siRNA sense strand
ugcagacgcuuaagaauga

SEQ ID NO: 444921 - RNA, 19 nt, Homo sapiens
  misc_RNA (1)...(19): siRNA sense strand
caaagucgacgaauccaaa

SEQ ID NO: 444922 - RNA, 19 nt, Homo sapiens
  misc_RNA (1)...(19): siRNA sense strand
gaaagggauuuggcuggaa

SEQ ID NO: 444923 - RNA, 19 nt, Homo sapiens
  misc_RNA (1)...(19): siRNA sense strand
gauguuguaugcagccaaa

SEQ ID NO: 444924 - RNA, 19 nt, Homo sapiens
  misc_RNA (1)...(19): siRNA sense strand
ugacagagagcaucaauca

SEQ ID NO: 444925 - RNA, 19 nt, Homo sapiens
  misc_RNA (1)...(19): siRNA sense strand
agacagugaugguggauga

SEQ ID NO: 444926 - RNA, 19 nt, Homo sapiens
  misc_RNA (1)...(19): siRNA sense strand
caucgaagcugcugcuaag

SEQ ID NO: 444927 - RNA, 19 nt, Homo sapiens
  misc_RNA (1)...(19): siRNA sense strand
ggccacaauugaaugcaua

SEQ ID NO: 444928 - RNA, 19 nt, Homo sapiens
  misc_RNA (1)...(19): siRNA sense strand
uuagugaccucucuuacuu

SEQ ID NO: 444929 - RNA, 19 nt, Homo sapiens
  misc_RNA (1)...(19): siRNA sense strand
ccaagggugugaagcuauu

SEQ ID NO: 444930 - RNA, 19 nt, Homo sapiens
  misc_RNA (1)...(19): siRNA sense strand
caaaagacguaccugaaaa

SEQ ID NO: 444931 - RNA, 19 nt, Homo sapiens
  misc_RNA (1)...(19): siRNA sense strand
gaccuggacaccaccauua

SEQ ID NO: 444932 - RNA, 19 nt, Homo sapiens
  misc_RNA (1)...(19): siRNA sense strand
gggugacgcuggugaaaug

SEQ ID NO: 444933 - RNA, 19 nt, Homo sapiens
  misc_RNA (1)...(19): siRNA sense strand
gagagaaugagacugauga

SEQ ID NO: 444934 - RNA, 19 nt, Homo sapiens
  misc_RNA (1)...(19): siRNA sense strand
ccaccgagcugagggaaga

SEQ ID NO: 444935 - RNA, 19 nt, Homo sapiens
  misc_RNA (1)...(19): siRNA sense strand
cgacgauguuguagugaaa

SEQ ID NO: 444936 - RNA, 19 nt, Homo sapiens
  misc_RNA (1)...(19): siRNA sense strand
gaaccagagccuugcguuu

SEQ ID NO: 444937 - RNA, 19 nt, Homo sapiens
  misc_RNA (1)...(19): siRNA sense strand
acagacagcuacaccaaga

SEQ ID NO: 444938 - RNA, 19 nt, Homo sapiens
  misc_RNA (1)...(19): siRNA sense strand
gacauaaggugacacaacu

SEQ ID NO: 444939 - RNA, 19 nt, Homo sapiens
  misc_RNA (1)...(19): siRNA sense strand
caacucaucacucugugua

SEQ ID NO: 444940 - RNA, 19 nt, Homo sapiens
  misc_RNA (1)...(19): siRNA sense strand
ucaaucaacucaucacucu

SEQ ID NO: 444941 - RNA, 19 nt, Homo sapiens
  misc_RNA (1)...(19): siRNA sense strand
gcaagcuucugacuaugga

SEQ ID NO: 444942 - RNA, 19 nt, Homo sapiens
  misc_RNA (1)...(19): siRNA sense strand
gagcacgucuuggugauuc

SEQ ID NO: 444943 - RNA, 19 nt, Homo sapiens
  misc_RNA (1)...(19): siRNA sense strand
ggauggaucugugaagaca

SEQ ID NO: 444944 - RNA, 19 nt, Homo sapiens
  misc_RNA (1)...(19): siRNA sense strand
gaaagagcgagaacuggaa

SEQ ID NO: 444945 - RNA, 19 nt, Homo sapiens
  misc_RNA (1)...(19): siRNA sense strand
gaucuuagccgcaguuggu

SEQ ID NO: 444946 - RNA, 19 nt, Homo sapiens
  misc_RNA (1)...(19): siRNA sense strand
ggaaaucggacaccuuauc

SEQ ID NO: 444947 - RNA, 19 nt, Homo sapiens
  misc_RNA (1)...(19): siRNA sense strand
cggaacggcuucaguuguu

SEQ ID NO: 444948 - RNA, 19 nt, Homo sapiens
  misc_RNA (1)...(19): siRNA sense strand
gcacauauggcguguccuu

SEQ ID NO: 444949 - RNA, 19 nt, Homo sapiens
  misc_RNA (1)...(19): siRNA sense strand
gaaacagagaccucagaaa

SEQ ID NO: 444950 - RNA, 19 nt, Homo sapiens
  misc_RNA (1)...(19): siRNA sense strand
gaagacacgaaacuacuug

SEQ ID NO: 444951 - RNA, 19 nt, Homo sapiens
  misc_RNA (1)...(19): siRNA sense strand
ccaaagcuguugccaaugc

SEQ ID NO: 444952 - RNA, 19 nt, Homo sapiens
  misc_RNA (1)...(19): siRNA sense strand
gaacggcuucaguuguuaa

SEQ ID NO: 444953 - RNA, 19 nt, Homo sapiens
  misc_RNA (1)...(19): siRNA sense strand
caagacggccaacccagua

SEQ ID NO: 444954 - RNA, 19 nt, Homo sapiens
  misc_RNA (1)...(19): siRNA sense strand
caagcgcccuggucaaauc

SEQ ID NO: 444955 - RNA, 19 nt, Homo sapiens
  misc_RNA (1)...(19): siRNA sense strand
gaucaaugccaucaaagau

SEQ ID NO: 444956 - RNA, 19 nt, Homo sapiens
  misc_RNA (1)...(19): siRNA sense strand
gguguggccuccaagauuc

SEQ ID NO: 444957 - RNA, 19 nt, Homo sapiens
  misc_RNA (1)...(19): siRNA sense strand
ggauuucucugaagacaac

SEQ ID NO: 444958 - RNA, 19 nt, Homo sapiens
  misc_RNA (1)...(19): siRNA sense strand
gaacuuaggagccaccuua

SEQ ID NO: 444959 - RNA, 19 nt, Homo sapiens
  misc_RNA (1)...(19): siRNA sense strand
cuacagcagugacaauuua

SEQ ID NO: 444960 - RNA, 19 nt, Homo sapiens
  misc_RNA (1)...(19): siRNA sense strand
gaagcacacuggugagaaa

SEQ ID NO: 444961 - RNA, 19 nt, Homo sapiens
  misc_RNA (1)...(19): siRNA sense strand
ggaaucagaugaacuuagg

SEQ ID NO: 444962 - RNA, 19 nt, Homo sapiens
  misc_RNA (1)...(19): siRNA sense strand
ugaaaccauuccaguguaa

SEQ ID NO: 444963 - RNA, 19 nt, Homo sapiens
  misc_RNA (1)...(19): siRNA sense strand
gugaaaccauuccagugua

SEQ ID NO: 444964 - RNA, 19 nt, Homo sapiens
  misc_RNA (1)...(19): siRNA sense strand
cgccuucacuguccacuuu

SEQ ID NO: 444965 - RNA, 19 nt, Homo sapiens
  misc_RNA (1)...(19): siRNA sense strand
ggacugugaacgaagguuu

SEQ ID NO: 444966 - RNA, 19 nt, Homo sapiens
  misc_RNA (1)...(19): siRNA sense strand
ucagaggcauucaggaugu

SEQ ID NO: 444967 - RNA, 19 nt, Homo sapiens
  misc_RNA (1)...(19): siRNA sense strand
agagaaacaugaccaaacu

SEQ ID NO: 444968 - RNA, 19 nt, Homo sapiens
  misc_RNA (1)...(19): siRNA sense strand
auacaggugugaaaccauu

SEQ ID NO: 444969 - RNA, 19 nt, Homo sapiens
  misc_RNA (1)...(19): siRNA sense strand
uacccaggcugcaauaaga

SEQ ID NO: 444970 - RNA, 19 nt, Homo sapiens
  misc_RNA (1)...(19): siRNA sense strand
gaauuaguccgccaucaca

SEQ ID NO: 444971 - RNA, 19 nt, Homo sapiens
  misc_RNA (1)...(19): siRNA sense strand
cgagagcgauaaccacaca

SEQ ID NO: 444972 - RNA, 19 nt, Homo sapiens
  misc_RNA (1)...(19): siRNA sense strand
caacaugcaucagagaaac

SEQ ID NO: 444973 - RNA, 19 nt, Homo sapiens
  misc_RNA (1)...(19): siRNA sense strand
ugcaugaccuggaaucaga

SEQ ID NO: 444974 - RNA, 19 nt, Homo sapiens
  misc_RNA (1)...(19): siRNA sense strand
ugagaaaccauaccagugu

SEQ ID NO: 444975 - RNA, 19 nt, Homo sapiens
  misc_RNA (1)...(19): siRNA sense strand
caucacaacaugcaucaga

SEQ ID NO: 444976 - RNA, 19 nt, Homo sapiens
  misc_RNA (1)...(19): siRNA sense strand
ccaaaugacaucccagcuu

SEQ ID NO: 444977 - RNA, 19 nt, Homo sapiens
  misc_RNA (1)...(19): siRNA sense strand
ugacaucccagcuugaaug

SEQ ID NO: 444978 - RNA, 19 nt, Homo sapiens
  misc_RNA (1)...(19): siRNA sense strand
caucccagcuugaaugcau

SEQ ID NO: 444979 - RNA, 19 nt, Homo sapiens
  misc_RNA (1)...(19): siRNA sense strand
gcagugacaauuuauacca

SEQ ID NO: 444980 - RNA, 19 nt, Homo sapiens
  misc_RNA (1)...(19): siRNA sense strand
ggaagcacacuggugagaa

SEQ ID NO: 444981 - RNA, 19 nt, Homo sapiens
  misc_RNA (1)...(19): siRNA sense strand
gagaaacgccccuucaugu

SEQ ID NO: 444982 - RNA, 19 nt, Homo sapiens
  misc_RNA (1)...(19): siRNA sense strand
cugcggagcccaauacaga

SEQ ID NO: 444983 - RNA, 19 nt, Homo sapiens
  misc_RNA (1)...(19): siRNA sense strand
gaaaccauuccaguguaaa

SEQ ID NO: 444984 - RNA, 19 nt, Homo sapiens
  misc_RNA (1)...(19): siRNA sense strand
agacaccaaaggagacaua

SEQ ID NO: 444985 - RNA, 19 nt, Homo sapiens
  misc_RNA (1)...(19): siRNA sense strand
caucugagaccagugagaa

SEQ ID NO: 444986 - RNA, 19 nt, Homo sapiens
  misc_RNA (1)...(19): siRNA sense strand
uugaaugcaugaccuggaa

SEQ ID NO: 444987 - RNA, 19 nt, Homo sapiens
  misc_RNA (1)...(19): siRNA sense strand
ccggucagaugaauuaguc

SEQ ID NO: 444988 - RNA, 19 nt, Homo sapiens
  misc_RNA (1)...(19): siRNA sense strand
gagacauacaggugugaaa

SEQ ID NO: 444989 - RNA, 19 nt, Homo sapiens
  misc_RNA (1)...(19): siRNA sense strand
ccgccucacuccuucauca

SEQ ID NO: 444990 - RNA, 19 nt, Homo sapiens
  misc_RNA (1)...(19): siRNA sense strand
cagugacaauuuauaccaa

SEQ ID NO: 444991 - RNA, 19 nt, Homo sapiens
  misc_RNA (1)...(19): siRNA sense strand
guggccaaguugucagaaa

SEQ ID NO: 444992 - RNA, 19 nt, Homo sapiens
  misc_RNA (1)...(19): siRNA sense strand
ggagcccaauacagaauac

SEQ ID NO: 444993 - RNA, 19 nt, Homo sapiens
  misc_RNA (1)...(19): siRNA sense strand
gaaugcaugaccuggaauc

SEQ ID NO: 444994 - RNA, 19 nt, Homo sapiens
  misc_RNA (1)...(19): siRNA sense strand
acaacaugcaucagagaaa

SEQ ID NO: 444995 - RNA, 19 nt, Homo sapiens
  misc_RNA (1)...(19): siRNA sense strand
ccuggaaucagaugaacuu

SEQ ID NO: 444996 - RNA, 19 nt, Homo sapiens
  misc_RNA (1)...(19): siRNA sense strand
cagagaaacaugaccaaac

SEQ ID NO: 444997 - RNA, 19 nt, Homo sapiens
  misc_RNA (1)...(19): siRNA sense strand
ucacaacaugcaucagaga

SEQ ID NO: 444998 - RNA, 19 nt, Homo sapiens
  misc_RNA (1)...(19): siRNA sense strand
gaaacgccccuucaugugu

SEQ ID NO: 444999 - RNA, 19 nt, Homo sapiens
  misc_RNA (1)...(19): siRNA sense strand
cagcagugacaauuuauac

SEQ ID NO: 445000 - RNA, 19 nt, Homo sapiens
  misc_RNA (1)...(19): siRNA sense strand
ugcccggucagaugaauua

SEQ ID NO: 445001 - RNA, 19 nt, Homo sapiens
  misc_RNA (1)...(19): siRNA sense strand
ugugaaaccauuccagugu

SEQ ID NO: 445002 - RNA, 19 nt, Homo sapiens
  misc_RNA (1)...(19): siRNA sense strand
cuuaggagccaccuuaaag

SEQ ID NO: 445003 - RNA, 19 nt, Homo sapiens
  misc_RNA (1)...(19): siRNA sense strand
caaccacucauucaagcau

SEQ ID NO: 445004 - RNA, 19 nt, Homo sapiens
  misc_RNA (1)...(19): siRNA sense strand
ucagagaaacaugaccaaa

SEQ ID NO: 445005 - RNA, 19 nt, Homo sapiens
  misc_RNA (1)...(19): siRNA sense strand
ugaccuggaaucagaugaa

SEQ ID NO: 445006 - RNA, 19 nt, Homo sapiens
  misc_RNA (1)...(19): siRNA sense strand
ccuacagcagugacaauuu

SEQ ID NO: 445007 - RNA, 19 nt, Homo sapiens
  misc_RNA (1)...(19): siRNA sense strand
acagcagugacaauuuaua

SEQ ID NO: 445008 - RNA, 19 nt, Homo sapiens
  misc_RNA (1)...(19): siRNA sense strand
ggagacauacaggugugaa

SEQ ID NO: 445009 - RNA, 19 nt, Homo sapiens
  misc_RNA (1)...(19): siRNA sense strand
cacgcacggugucuucaga

SEQ ID NO: 445010 - RNA, 19 nt, Homo sapiens
  misc_RNA (1)...(19): siRNA sense strand
ccagcccgcuauucgcaau

SEQ ID NO: 445011 - RNA, 19 nt, Homo sapiens
  misc_RNA (1)...(19): siRNA sense strand
gaccuggaaucagaugaac

SEQ ID NO: 445012 - RNA, 19 nt, Homo sapiens
  misc_RNA (1)...(19): siRNA sense strand
acccacaccaggacucaua

SEQ ID NO: 445013 - RNA, 19 nt, Homo sapiens
  misc_RNA (1)...(19): siRNA sense strand
caggcugcaauaagagaua

SEQ ID NO: 445014 - RNA, 19 nt, Homo sapiens
  misc_RNA (1)...(19): siRNA sense strand
gcuuacccaggcugcaaua

SEQ ID NO: 445015 - RNA, 19 nt, Homo sapiens
  misc_RNA (1)...(19): siRNA sense strand
cggcaucugagaccaguga

SEQ ID NO: 445016 - RNA, 19 nt, Homo sapiens
  misc_RNA (1)...(19): siRNA sense strand
gaacuuaggagccaccuua

SEQ ID NO: 445017 - RNA, 19 nt, Homo sapiens
  misc_RNA (1)...(19): siRNA sense strand
cuacagcagugacaauuua

SEQ ID NO: 445018 - RNA, 19 nt, Homo sapiens
  misc_RNA (1)...(19): siRNA sense strand
gaagcacacuggugagaaa

SEQ ID NO: 445019 - RNA, 19 nt, Homo sapiens
  misc_RNA (1)...(19): siRNA sense strand
ggaaucagaugaacuuagg

SEQ ID NO: 445020 - RNA, 19 nt, Homo sapiens
  misc_RNA (1)...(19): siRNA sense strand
ugaaaccauuccaguguaa

SEQ ID NO: 445021 - RNA, 19 nt, Homo sapiens
  misc_RNA (1)...(19): siRNA sense strand
gugaaaccauuccagugua

SEQ ID NO: 445022 - RNA, 19 nt, Homo sapiens
  misc_RNA (1)...(19): siRNA sense strand
cgccuucacuguccacuuu

SEQ ID NO: 445023 - RNA, 19 nt, Homo sapiens
  misc_RNA (1)...(19): siRNA sense strand
ggacugugaacgaagguuu

SEQ ID NO: 445024 - RNA, 19 nt, Homo sapiens
  misc_RNA (1)...(19): siRNA sense strand
ucagaggcauucaggaugu

SEQ ID NO: 445025 - RNA, 19 nt, Homo sapiens
  misc_RNA (1)...(19): siRNA sense strand
agagaaacaugaccaaacu

SEQ ID NO: 445026 - RNA, 19 nt, Homo sapiens
  misc_RNA (1)...(19): siRNA sense strand
auacaggugugaaaccauu

SEQ ID NO: 445027 - RNA, 19 nt, Homo sapiens
  misc_RNA (1)...(19): siRNA sense strand
uacccaggcugcaauaaga

SEQ ID NO: 445028 - RNA, 19 nt, Homo sapiens
  misc_RNA (1)...(19): siRNA sense strand
gaauuaguccgccaucaca

SEQ ID NO: 445029 - RNA, 19 nt, Homo sapiens
  misc_RNA (1)...(19): siRNA sense strand
cgagagcgauaaccacaca

SEQ ID NO: 445030 - RNA, 19 nt, Homo sapiens
  misc_RNA (1)...(19): siRNA sense strand
caacaugcaucagagaaac

SEQ ID NO: 445031 - RNA, 19 nt, Homo sapiens
  misc_RNA (1)...(19): siRNA sense strand
ugcaugaccuggaaucaga

SEQ ID NO: 445032 - RNA, 19 nt, Homo sapiens
  misc_RNA (1)...(19): siRNA sense strand
ugagaaaccauaccagugu

SEQ ID NO: 445033 - RNA, 19 nt, Homo sapiens
  misc_RNA (1)...(19): siRNA sense strand
caucacaacaugcaucaga

SEQ ID NO: 445034 - RNA, 19 nt, Homo sapiens
  misc_RNA (1)...(19): siRNA sense strand
ccaaaugacaucccagcuu

SEQ ID NO: 445035 - RNA, 19 nt, Homo sapiens
  misc_RNA (1)...(19): siRNA sense strand
ugacaucccagcuugaaug

SEQ ID NO: 445036 - RNA, 19 nt, Homo sapiens
  misc_RNA (1)...(19): siRNA sense strand
caucccagcuugaaugcau

SEQ ID NO: 445037 - RNA, 19 nt, Homo sapiens
  misc_RNA (1)...(19): siRNA sense strand
gcagugacaauuuauacca

SEQ ID NO: 445038 - RNA, 19 nt, Homo sapiens
  misc_RNA (1)...(19): siRNA sense strand
ggaagcacacuggugagaa

SEQ ID NO: 445039 - RNA, 19 nt, Homo sapiens
  misc_RNA (1)...(19): siRNA sense strand
gagaaacgccccuucaugu

SEQ ID NO: 445040 - RNA, 19 nt, Homo sapiens
  misc_RNA (1)...(19): siRNA sense strand
cugcggagcccaauacaga

SEQ ID NO: 445041 - RNA, 19 nt, Homo sapiens
  misc_RNA (1)...(19): siRNA sense strand
gaaaccauuccaguguaaa

SEQ ID NO: 445042 - RNA, 19 nt, Homo sapiens
  misc_RNA (1)...(19): siRNA sense strand
agacaccaaaggagacaua

SEQ ID NO: 445043 - RNA, 19 nt, Homo sapiens
  misc_RNA (1)...(19): siRNA sense strand
caucugagaccagugagaa

SEQ ID NO: 445044 - RNA, 19 nt, Homo sapiens
  misc_RNA (1)...(19): siRNA sense strand
uugaaugcaugaccuggaa

SEQ ID NO: 445045 - RNA, 19 nt, Homo sapiens
  misc_RNA (1)...(19): siRNA sense strand
ccggucagaugaauuaguc

SEQ ID NO: 445046 - RNA, 19 nt, Homo sapiens
  misc_RNA (1)...(19): siRNA sense strand
gagacauacaggugugaaa

SEQ ID NO: 445047 - RNA, 19 nt, Homo sapiens
  misc_RNA (1)...(19): siRNA sense strand
ccgccucacuccuucauca

SEQ ID NO: 445048 - RNA, 19 nt, Homo sapiens
  misc_RNA (1)...(19): siRNA sense strand
cagugacaauuuauaccaa

SEQ ID NO: 445049 - RNA, 19 nt, Homo sapiens
  misc_RNA (1)...(19): siRNA sense strand
guggccaaguugucagaaa

SEQ ID NO: 445050 - RNA, 19 nt, Homo sapiens
  misc_RNA (1)...(19): siRNA sense strand
ggagcccaauacagaauac

SEQ ID NO: 445051 - RNA, 19 nt, Homo sapiens
  misc_RNA (1)...(19): siRNA sense strand
gaaugcaugaccuggaauc

SEQ ID NO: 445052 - RNA, 19 nt, Homo sapiens
  misc_RNA (1)...(19): siRNA sense strand
acaacaugcaucagagaaa

SEQ ID NO: 445053 - RNA, 19 nt, Homo sapiens
  misc_RNA (1)...(19): siRNA sense strand
ccuggaaucagaugaacuu

SEQ ID NO: 445054 - RNA, 19 nt, Homo sapiens
  misc_RNA (1)...(19): siRNA sense strand
cagagaaacaugaccaaac

SEQ ID NO: 445055 - RNA, 19 nt, Homo sapiens
  misc_RNA (1)...(19): siRNA sense strand
ucacaacaugcaucagaga

SEQ ID NO: 445056 - RNA, 19 nt, Homo sapiens
  misc_RNA (1)...(19): siRNA sense strand
gaaacgccccuucaugugu

SEQ ID NO: 445057 - RNA, 19 nt, Homo sapiens
  misc_RNA (1)...(19): siRNA sense strand
cagcagugacaauuuauac

SEQ ID NO: 445058 - RNA, 19 nt, Homo sapiens
  misc_RNA (1)...(19): siRNA sense strand
ugcccggucagaugaauua

SEQ ID NO: 445059 - RNA, 19 nt, Homo sapiens
  misc_RNA (1)...(19): siRNA sense strand
ugugaaaccauuccagugu

SEQ ID NO: 445060 - RNA, 19 nt, Homo sapiens
  misc_RNA (1)...(19): siRNA sense strand
cuuaggagccaccuuaaag

SEQ ID NO: 445061 - RNA, 19 nt, Homo sapiens
  misc_RNA (1)...(19): siRNA sense strand
caaccacucauucaagcau

SEQ ID NO: 445062 - RNA, 19 nt, Homo sapiens
  misc_RNA (1)...(19): siRNA sense strand
ucagagaaacaugaccaaa

SEQ ID NO: 445063 - RNA, 19 nt, Homo sapiens
  misc_RNA (1)...(19): siRNA sense strand
ugaccuggaaucagaugaa

SEQ ID NO: 445064 - RNA, 19 nt, Homo sapiens
  misc_RNA (1)...(19): siRNA sense strand
ccuacagcagugacaauuu

SEQ ID NO: 445065 - RNA, 19 nt, Homo sapiens
  misc_RNA (1)...(19): siRNA sense strand
acagcagugacaauuuaua

SEQ ID NO: 445066 - RNA, 19 nt, Homo sapiens
  misc_RNA (1)...(19): siRNA sense strand
ggagacauacaggugugaa

SEQ ID NO: 445067 - RNA, 19 nt, Homo sapiens
  misc_RNA (1)...(19): siRNA sense strand
cacgcacggugucuucaga

SEQ ID NO: 445068 - RNA, 19 nt, Homo sapiens
  misc_RNA (1)...(19): siRNA sense strand
ccagcccgcuauucgcaau

SEQ ID NO: 445069 - RNA, 19 nt, Homo sapiens
  misc_RNA (1)...(19): siRNA sense strand
gaccuggaaucagaugaac

SEQ ID NO: 445070 - RNA, 19 nt, Homo sapiens
  misc_RNA (1)...(19): siRNA sense strand
acccacaccaggacucaua

SEQ ID NO: 445071 - RNA, 19 nt, Homo sapiens
  misc_RNA (1)...(19): siRNA sense strand
caggcugcaauaagagaua

SEQ ID NO: 445072 - RNA, 19 nt, Homo sapiens
  misc_RNA (1)...(19): siRNA sense strand
gcuuacccaggcugcaaua

SEQ ID NO: 445073 - RNA, 19 nt, Homo sapiens
  misc_RNA (1)...(19): siRNA sense strand
cggcaucugagaccaguga

SEQ ID NO: 445074 - RNA, 19 nt, Homo sapiens
  misc_RNA (1)...(19): siRNA sense strand
gaacuuaggagccaccuua

SEQ ID NO: 445075 - RNA, 19 nt, Homo sapiens
  misc_RNA (1)...(19): siRNA sense strand
cuacagcagugacaauuua

SEQ ID NO: 445076 - RNA, 19 nt, Homo sapiens
  misc_RNA (1)...(19): siRNA sense strand
gaagcacacuggugagaaa

SEQ ID NO: 445077 - RNA, 19 nt, Homo sapiens
  misc_RNA (1)...(19): siRNA sense strand
ggaaucagaugaacuuagg

SEQ ID NO: 445078 - RNA, 19 nt, Homo sapiens
  misc_RNA (1)...(19): siRNA sense strand
ugaaaccauuccaguguaa

SEQ ID NO: 445079 - RNA, 19 nt, Homo sapiens
  misc_RNA (1)...(19): siRNA sense strand
gugaaaccauuccagugua

SEQ ID NO: 445080 - RNA, 19 nt, Homo sapiens
  misc_RNA (1)...(19): siRNA sense strand
cgccuucacuguccacuuu

SEQ ID NO: 445081 - RNA, 19 nt, Homo sapiens
  misc_RNA (1)...(19): siRNA sense strand
ggacugugaacgaagguuu

SEQ ID NO: 445082 - RNA, 19 nt, Homo sapiens
  misc_RNA (1)...(19): siRNA sense strand
ucagaggcauucaggaugu

SEQ ID NO: 445083 - RNA, 19 nt, Homo sapiens
  misc_RNA (1)...(19): siRNA sense strand
agagaaacaugaccaaacu

SEQ ID NO: 445084 - RNA, 19 nt, Homo sapiens
  misc_RNA (1)...(19): siRNA sense strand
auacaggugugaaaccauu

SEQ ID NO: 445085 - RNA, 19 nt, Homo sapiens
  misc_RNA (1)...(19): siRNA sense strand
uacccaggcugcaauaaga

SEQ ID NO: 445086 - RNA, 19 nt, Homo sapiens
  misc_RNA (1)...(19): siRNA sense strand
gaauuaguccgccaucaca

SEQ ID NO: 445087 - RNA, 19 nt, Homo sapiens
  misc_RNA (1)...(19): siRNA sense strand
cgagagcgauaaccacaca

SEQ ID NO: 445088 - RNA, 19 nt, Homo sapiens
  misc_RNA (1)...(19): siRNA sense strand
caacaugcaucagagaaac

SEQ ID NO: 445089 - RNA, 19 nt, Homo sapiens
  misc_RNA (1)...(19): siRNA sense strand
ugcaugaccuggaaucaga

SEQ ID NO: 445090 - RNA, 19 nt, Homo sapiens
  misc_RNA (1)...(19): siRNA sense strand
ugagaaaccauaccagugu

SEQ ID NO: 445091 - RNA, 19 nt, Homo sapiens
  misc_RNA (1)...(19): siRNA sense strand
caucacaacaugcaucaga

SEQ ID NO: 445092 - RNA, 19 nt, Homo sapiens
  misc_RNA (1)...(19): siRNA sense strand
ccaaaugacaucccagcuu

SEQ ID NO: 445093 - RNA, 19 nt, Homo sapiens
  misc_RNA (1)...(19): siRNA sense strand
ugacaucccagcuugaaug

SEQ ID NO: 445094 - RNA, 19 nt, Homo sapiens
  misc_RNA (1)...(19): siRNA sense strand
caucccagcuugaaugcau

SEQ ID NO: 445095 - RNA, 19 nt, Homo sapiens
  misc_RNA (1)...(19): siRNA sense strand
gcagugacaauuuauacca

SEQ ID NO: 445096 - RNA, 19 nt, Homo sapiens
  misc_RNA (1)...(19): siRNA sense strand
ggaagcacacuggugagaa

SEQ ID NO: 445097 - RNA, 19 nt, Homo sapiens
  misc_RNA (1)...(19): siRNA sense strand
gagaaacgccccuucaugu

SEQ ID NO: 445098 - RNA, 19 nt, Homo sapiens
  misc_RNA (1)...(19): siRNA sense strand
cugcggagcccaauacaga

SEQ ID NO: 445099 - RNA, 19 nt, Homo sapiens
  misc_RNA (1)...(19): siRNA sense strand
gaaaccauuccaguguaaa

SEQ ID NO: 445100 - RNA, 19 nt, Homo sapiens
  misc_RNA (1)...(19): siRNA sense strand
agacaccaaaggagacaua

SEQ ID NO: 445101 - RNA, 19 nt, Homo sapiens
  misc_RNA (1)...(19): siRNA sense strand
caucugagaccagugagaa

SEQ ID NO: 445102 - RNA, 19 nt, Homo sapiens
  misc_RNA (1)...(19): siRNA sense strand
uugaaugcaugaccuggaa

SEQ ID NO: 445103 - RNA, 19 nt, Homo sapiens
  misc_RNA (1)...(19): siRNA sense strand
ccggucagaugaauuaguc

SEQ ID NO: 445104 - RNA, 19 nt, Homo sapiens
  misc_RNA (1)...(19): siRNA sense strand
gagacauacaggugugaaa

SEQ ID NO: 445105 - RNA, 19 nt, Homo sapiens
  misc_RNA (1)...(19): siRNA sense strand
ccgccucacuccuucauca

SEQ ID NO: 445106 - RNA, 19 nt, Homo sapiens
  misc_RNA (1)...(19): siRNA sense strand
cagugacaauuuauaccaa

SEQ ID NO: 445107 - RNA, 19 nt, Homo sapiens
  misc_RNA (1)...(19): siRNA sense strand
guggccaaguugucagaaa

SEQ ID NO: 445108 - RNA, 19 nt, Homo sapiens
  misc_RNA (1)...(19): siRNA sense strand
ggagcccaauacagaauac

SEQ ID NO: 445109 - RNA, 19 nt, Homo sapiens
  misc_RNA (1)...(19): siRNA sense strand
gaaugcaugaccuggaauc

SEQ ID NO: 445110 - RNA, 19 nt, Homo sapiens
  misc_RNA (1)...(19): siRNA sense strand
acaacaugcaucagagaaa

SEQ ID NO: 445111 - RNA, 19 nt, Homo sapiens
  misc_RNA (1)...(19): siRNA sense strand
ccuggaaucagaugaacuu

SEQ ID NO: 445112 - RNA, 19 nt, Homo sapiens
  misc_RNA (1)...(19): siRNA sense strand
cagagaaacaugaccaaac

SEQ ID NO: 445113 - RNA, 19 nt, Homo sapiens
  misc_RNA (1)...(19): siRNA sense strand
ucacaacaugcaucagaga

SEQ ID NO: 445114 - RNA, 19 nt, Homo sapiens
  misc_RNA (1)...(19): siRNA sense strand
gaaacgccccuucaugugu

SEQ ID NO: 445115 - RNA, 19 nt, Homo sapiens
  misc_RNA (1)...(19): siRNA sense strand
cagcagugacaauuuauac

SEQ ID NO: 445116 - RNA, 19 nt, Homo sapiens
  misc_RNA (1)...(19): siRNA sense strand
ugcccggucagaugaauua

SEQ ID NO: 445117 - RNA, 19 nt, Homo sapiens
  misc_RNA (1)...(19): siRNA sense strand
ugugaaaccauuccagugu

SEQ ID NO: 445118 - RNA, 19 nt, Homo sapiens
  misc_RNA (1)...(19): siRNA sense strand
cuuaggagccaccuuaaag

SEQ ID NO: 445119 - RNA, 19 nt, Homo sapiens
  misc_RNA (1)...(19): siRNA sense strand
caaccacucauucaagcau

SEQ ID NO: 445120 - RNA, 19 nt, Homo sapiens
  misc_RNA (1)...(19): siRNA sense strand
ucagagaaacaugaccaaa

SEQ ID NO: 445121 - RNA, 19 nt, Homo sapiens
  misc_RNA (1)...(19): siRNA sense strand
ugaccuggaaucagaugaa

SEQ ID NO: 445122 - RNA, 19 nt, Homo sapiens
  misc_RNA (1)...(19): siRNA sense strand
ccuacagcagugacaauuu

SEQ ID NO: 445123 - RNA, 19 nt, Homo sapiens
  misc_RNA (1)...(19): siRNA sense strand
acagcagugacaauuuaua

SEQ ID NO: 445124 - RNA, 19 nt, Homo sapiens
  misc_RNA (1)...(19): siRNA sense strand
ggagacauacaggugugaa

SEQ ID NO: 445125 - RNA, 19 nt, Homo sapiens
  misc_RNA (1)...(19): siRNA sense strand
cacgcacggugucuucaga

SEQ ID NO: 445126 - RNA, 19 nt, Homo sapiens
  misc_RNA (1)...(19): siRNA sense strand
ccagcccgcuauucgcaau

SEQ ID NO: 445127 - RNA, 19 nt, Homo sapiens
  misc_RNA (1)...(19): siRNA sense strand
gaccuggaaucagaugaac

SEQ ID NO: 445128 - RNA, 19 nt, Homo sapiens
  misc_RNA (1)...(19): siRNA sense strand
acccacaccaggacucaua

SEQ ID NO: 445129 - RNA, 19 nt, Homo sapiens
  misc_RNA (1)...(19): siRNA sense strand
caggcugcaauaagagaua

SEQ ID NO: 445130 - RNA, 19 nt, Homo sapiens
  misc_RNA (1)...(19): siRNA sense strand
gcuuacccaggcugcaaua

SEQ ID NO: 445131 - RNA, 19 nt, Homo sapiens
  misc_RNA (1)...(19): siRNA sense strand
cggcaucugagaccaguga

SEQ ID NO: 445132 - RNA, 19 nt, Homo sapiens
  misc_RNA (1)...(19): siRNA sense strand
gaacuuaggagccaccuua

SEQ ID NO: 445133 - RNA, 19 nt, Homo sapiens
  misc_RNA (1)...(19): siRNA sense strand
cuacagcagugacaauuua

SEQ ID NO: 445134 - RNA, 19 nt, Homo sapiens
  misc_RNA (1)...(19): siRNA sense strand
gaagcacacuggugagaaa

SEQ ID NO: 445135 - RNA, 19 nt, Homo sapiens
  misc_RNA (1)...(19): siRNA sense strand
ggaaucagaugaacuuagg

SEQ ID NO: 445136 - RNA, 19 nt, Homo sapiens
  misc_RNA (1)...(19): siRNA sense strand
ugaaaccauuccaguguaa

SEQ ID NO: 445137 - RNA, 19 nt, Homo sapiens
  misc_RNA (1)...(19): siRNA sense strand
gugaaaccauuccagugua

SEQ ID NO: 445138 - RNA, 19 nt, Homo sapiens
  misc_RNA (1)...(19): siRNA sense strand
cgccuucacuguccacuuu

SEQ ID NO: 445139 - RNA, 19 nt, Homo sapiens
  misc_RNA (1)...(19): siRNA sense strand
ggacugugaacgaagguuu

SEQ ID NO: 445140 - RNA, 19 nt, Homo sapiens
  misc_RNA (1)...(19): siRNA sense strand
ucagaggcauucaggaugu

SEQ ID NO: 445141 - RNA, 19 nt, Homo sapiens
  misc_RNA (1)...(19): siRNA sense strand
agagaaacaugaccaaacu

SEQ ID NO: 445142 - RNA, 19 nt, Homo sapiens
  misc_RNA (1)...(19): siRNA sense strand
auacaggugugaaaccauu

SEQ ID NO: 445143 - RNA, 19 nt, Homo sapiens
  misc_RNA (1)...(19): siRNA sense strand
uacccaggcugcaauaaga

SEQ ID NO: 445144 - RNA, 19 nt, Homo sapiens
  misc_RNA (1)...(19): siRNA sense strand
gaauuaguccgccaucaca

SEQ ID NO: 445145 - RNA, 19 nt, Homo sapiens
  misc_RNA (1)...(19): siRNA sense strand
cgagagcgauaaccacaca

SEQ ID NO: 445146 - RNA, 19 nt, Homo sapiens
  misc_RNA (1)...(19): siRNA sense strand
caacaugcaucagagaaac

SEQ ID NO: 445147 - RNA, 19 nt, Homo sapiens
  misc_RNA (1)...(19): siRNA sense strand
ugcaugaccuggaaucaga

SEQ ID NO: 445148 - RNA, 19 nt, Homo sapiens
  misc_RNA (1)...(19): siRNA sense strand
ugagaaaccauaccagugu

SEQ ID NO: 445149 - RNA, 19 nt, Homo sapiens
  misc_RNA (1)...(19): siRNA sense strand
caucacaacaugcaucaga

SEQ ID NO: 445150 - RNA, 19 nt, Homo sapiens
  misc_RNA (1)...(19): siRNA sense strand
ccaaaugacaucccagcuu

SEQ ID NO: 445151 - RNA, 19 nt, Homo sapiens
  misc_RNA (1)...(19): siRNA sense strand
ugacaucccagcuugaaug

SEQ ID NO: 445152 - RNA, 19 nt, Homo sapiens
  misc_RNA (1)...(19): siRNA sense strand
caucccagcuugaaugcau

SEQ ID NO: 445153 - RNA, 19 nt, Homo sapiens
  misc_RNA (1)...(19): siRNA sense strand
gcagugacaauuuauacca

SEQ ID NO: 445154 - RNA, 19 nt, Homo sapiens
  misc_RNA (1)...(19): siRNA sense strand
ggaagcacacuggugagaa

SEQ ID NO: 445155 - RNA, 19 nt, Homo sapiens
  misc_RNA (1)...(19): siRNA sense strand
gagaaacgccccuucaugu

SEQ ID NO: 445156 - RNA, 19 nt, Homo sapiens
  misc_RNA (1)...(19): siRNA sense strand
cugcggagcccaauacaga

SEQ ID NO: 445157 - RNA, 19 nt, Homo sapiens
  misc_RNA (1)...(19): siRNA sense strand
gaaaccauuccaguguaaa

SEQ ID NO: 445158 - RNA, 19 nt, Homo sapiens
  misc_RNA (1)...(19): siRNA sense strand
agacaccaaaggagacaua

SEQ ID NO: 445159 - RNA, 19 nt, Homo sapiens
  misc_RNA (1)...(19): siRNA sense strand
caucugagaccagugagaa

SEQ ID NO: 445160 - RNA, 19 nt, Homo sapiens
  misc_RNA (1)...(19): siRNA sense strand
uugaaugcaugaccuggaa

SEQ ID NO: 445161 - RNA, 19 nt, Homo sapiens
  misc_RNA (1)...(19): siRNA sense strand
ccggucagaugaauuaguc

SEQ ID NO: 445162 - RNA, 19 nt, Homo sapiens
  misc_RNA (1)...(19): siRNA sense strand
gagacauacaggugugaaa

SEQ ID NO: 445163 - RNA, 19 nt, Homo sapiens
  misc_RNA (1)...(19): siRNA sense strand
ccgccucacuccuucauca

SEQ ID NO: 445164 - RNA, 19 nt, Homo sapiens
  misc_RNA (1)...(19): siRNA sense strand
cagugacaauuuauaccaa

SEQ ID NO: 445165 - RNA, 19 nt, Homo sapiens
  misc_RNA (1)...(19): siRNA sense strand
guggccaaguugucagaaa

SEQ ID NO: 445166 - RNA, 19 nt, Homo sapiens
  misc_RNA (1)...(19): siRNA sense strand
ggagcccaauacagaauac

SEQ ID NO: 445167 - RNA, 19 nt, Homo sapiens
  misc_RNA (1)...(19): siRNA sense strand
gaaugcaugaccuggaauc

SEQ ID NO: 445168 - RNA, 19 nt, Homo sapiens
  misc_RNA (1)...(19): siRNA sense strand
acaacaugcaucagagaaa

SEQ ID NO: 445169 - RNA, 19 nt, Homo sapiens
  misc_RNA (1)...(19): siRNA sense strand
ccuggaaucagaugaacuu

SEQ ID NO: 445170 - RNA, 19 nt, Homo sapiens
  misc_RNA (1)...(19): siRNA sense strand
cagagaaacaugaccaaac

SEQ ID NO: 445171 - RNA, 19 nt, Homo sapiens
  misc_RNA (1)...(19): siRNA sense strand
ucacaacaugcaucagaga

SEQ ID NO: 445172 - RNA, 19 nt, Homo sapiens
  misc_RNA (1)...(19): siRNA sense strand
gaaacgccccuucaugugu

SEQ ID NO: 445173 - RNA, 19 nt, Homo sapiens
  misc_RNA (1)...(19): siRNA sense strand
cagcagugacaauuuauac

SEQ ID NO: 445174 - RNA, 19 nt, Homo sapiens
  misc_RNA (1)...(19): siRNA sense strand
ugcccggucagaugaauua

SEQ ID NO: 445175 - RNA, 19 nt, Homo sapiens
  misc_RNA (1)...(19): siRNA sense strand
ugugaaaccauuccagugu

SEQ ID NO: 445176 - RNA, 19 nt, Homo sapiens
  misc_RNA (1)...(19): siRNA sense strand
cuuaggagccaccuuaaag

SEQ ID NO: 445177 - RNA, 19 nt, Homo sapiens
  misc_RNA (1)...(19): siRNA sense strand
caaccacucauucaagcau

SEQ ID NO: 445178 - RNA, 19 nt, Homo sapiens
  misc_RNA (1)...(19): siRNA sense strand
ucagagaaacaugaccaaa

SEQ ID NO: 445179 - RNA, 19 nt, Homo sapiens
  misc_RNA (1)...(19): siRNA sense strand
ugaccuggaaucagaugaa

SEQ ID NO: 445180 - RNA, 19 nt, Homo sapiens
  misc_RNA (1)...(19): siRNA sense strand
ccuacagcagugacaauuu

SEQ ID NO: 445181 - RNA, 19 nt, Homo sapiens
  misc_RNA (1)...(19): siRNA sense strand
acagcagugacaauuuaua

SEQ ID NO: 445182 - RNA, 19 nt, Homo sapiens
  misc_RNA (1)...(19): siRNA sense strand
ggagacauacaggugugaa

SEQ ID NO: 445183 - RNA, 19 nt, Homo sapiens
  misc_RNA (1)...(19): siRNA sense strand
cacgcacggugucuucaga

SEQ ID NO: 445184 - RNA, 19 nt, Homo sapiens
  misc_RNA (1)...(19): siRNA sense strand
ccagcccgcuauucgcaau

SEQ ID NO: 445185 - RNA, 19 nt, Homo sapiens
  misc_RNA (1)...(19): siRNA sense strand
gaccuggaaucagaugaac

SEQ ID NO: 445186 - RNA, 19 nt, Homo sapiens
  misc_RNA (1)...(19): siRNA sense strand
acccacaccaggacucaua

SEQ ID NO: 445187 - RNA, 19 nt, Homo sapiens
  misc_RNA (1)...(19): siRNA sense strand
caggcugcaauaagagaua

SEQ ID NO: 445188 - RNA, 19 nt, Homo sapiens
  misc_RNA (1)...(19): siRNA sense strand
gcuuacccaggcugcaaua

SEQ ID NO: 445189 - RNA, 19 nt, Homo sapiens
  misc_RNA (1)...(19): siRNA sense strand
cggcaucugagaccaguga

SEQ ID NO: 445190 - RNA, 19 nt, Homo sapiens
  misc_RNA (1)...(19): siRNA sense strand
gaaagaagccaaagagaaa

SEQ ID NO: 445191 - RNA, 19 nt, Homo sapiens
  misc_RNA (1)...(19): siRNA sense strand
cgagauagcuuccugaaac

SEQ ID NO: 445192 - RNA, 19 nt, Homo sapiens
  misc_RNA (1)...(19): siRNA sense strand
guaccuggguucaacuaaa

SEQ ID NO: 445193 - RNA, 19 nt, Homo sapiens
  misc_RNA (1)...(19): siRNA sense strand
gggaauggguacuguucaa

SEQ ID NO: 445194 - RNA, 19 nt, Homo sapiens
  misc_RNA (1)...(19): siRNA sense strand
agaaagaagccaaagagaa

SEQ ID NO: 445195 - RNA, 19 nt, Homo sapiens
  misc_RNA (1)...(19): siRNA sense strand
gagaggcacccgauauaug

SEQ ID NO: 445196 - RNA, 19 nt, Homo sapiens
  misc_RNA (1)...(19): siRNA sense strand
caaguuaagggcaagauuc

SEQ ID NO: 445197 - RNA, 19 nt, Homo sapiens
  misc_RNA (1)...(19): siRNA sense strand
ggaauggguacuguucaaa

SEQ ID NO: 445198 - RNA, 19 nt, Homo sapiens
  misc_RNA (1)...(19): siRNA sense strand
acauggaguuguuccuuug

SEQ ID NO: 445199 - RNA, 19 nt, Homo sapiens
  misc_RNA (1)...(19): siRNA sense strand
gaaagguaccuggguucaa

SEQ ID NO: 445200 - RNA, 19 nt, Homo sapiens
  misc_RNA (1)...(19): siRNA sense strand
gaagccaaagagaaaggua

SEQ ID NO: 445201 - RNA, 19 nt, Homo sapiens
  misc_RNA (1)...(19): siRNA sense strand
aaagaaagaagccaaagag

SEQ ID NO: 445202 - RNA, 19 nt, Homo sapiens
  misc_RNA (1)...(19): siRNA sense strand
cccgauauauguucucuag

SEQ ID NO: 445203 - RNA, 19 nt, Homo sapiens
  misc_RNA (1)...(19): siRNA sense strand
aaagguaccuggguucaac

SEQ ID NO: 445204 - RNA, 19 nt, Homo sapiens
  misc_RNA (1)...(19): siRNA sense strand
ucaagggaauggguacugu

SEQ ID NO: 445205 - RNA, 19 nt, Homo sapiens
  misc_RNA (1)...(19): siRNA sense strand
agaggcacccgauauaugu

SEQ ID NO: 445206 - RNA, 19 nt, Homo sapiens
  misc_RNA (1)...(19): siRNA sense strand
caaguguuaccauggcaaa

SEQ ID NO: 445207 - RNA, 19 nt, Homo sapiens
  misc_RNA (1)...(19): siRNA sense strand
uaccuggguucaacuaaag

SEQ ID NO: 445208 - RNA, 19 nt, Homo sapiens
  misc_RNA (1)...(19): siRNA sense strand
aaggugauauuguagacau

SEQ ID NO: 445209 - RNA, 19 nt, Homo sapiens
  misc_RNA (1)...(19): siRNA sense strand
gagcugcuggaaccuauuc

SEQ ID NO: 445210 - RNA, 19 nt, Homo sapiens
  misc_RNA (1)...(19): siRNA sense strand
gaauggguacuguucaaaa

SEQ ID NO: 445211 - RNA, 19 nt, Homo sapiens
  misc_RNA (1)...(19): siRNA sense strand
guaaacaaacaaguuaagg

SEQ ID NO: 445212 - RNA, 19 nt, Homo sapiens
  misc_RNA (1)...(19): siRNA sense strand
caagggaauggguacuguu

SEQ ID NO: 445213 - RNA, 19 nt, Homo sapiens
  misc_RNA (1)...(19): siRNA sense strand
aagaaagaagccaaagaga

SEQ ID NO: 445214 - RNA, 19 nt, Homo sapiens
  misc_RNA (1)...(19): siRNA sense strand
caacauagauccuuacaua

SEQ ID NO: 445215 - RNA, 19 nt, Homo sapiens
  misc_RNA (1)...(19): siRNA sense strand
ggacagagccugagaaguu

SEQ ID NO: 445216 - RNA, 19 nt, Homo sapiens
  misc_RNA (1)...(19): siRNA sense strand
gaaagaaagucgccucgaa

SEQ ID NO: 445217 - RNA, 19 nt, Homo sapiens
  misc_RNA (1)...(19): siRNA sense strand
gaaugaaacgcucagauua

SEQ ID NO: 445218 - RNA, 19 nt, Homo sapiens
  misc_RNA (1)...(19): siRNA sense strand
gaaacuugcucuaaucaga

SEQ ID NO: 445219 - RNA, 19 nt, Homo sapiens
  misc_RNA (1)...(19): siRNA sense strand
gaaagucgccucgaagaua

SEQ ID NO: 445220 - RNA, 19 nt, Homo sapiens
  misc_RNA (1)...(19): siRNA sense strand
ggaaauugaugcaguuuua

SEQ ID NO: 445221 - RNA, 19 nt, Homo sapiens
  misc_RNA (1)...(19): siRNA sense strand
gaagaacaaggacaacaua

SEQ ID NO: 445222 - RNA, 19 nt, Homo sapiens
  misc_RNA (1)...(19): siRNA sense strand
cuucaaaccuuguaaagaa

SEQ ID NO: 445223 - RNA, 19 nt, Homo sapiens
  misc_RNA (1)...(19): siRNA sense strand
ccaagaagcuuuuaagauu

SEQ ID NO: 445224 - RNA, 19 nt, Homo sapiens
  misc_RNA (1)...(19): siRNA sense strand
aaacagugcuagugaaaga

SEQ ID NO: 445225 - RNA, 19 nt, Homo sapiens
  misc_RNA (1)...(19): siRNA sense strand
gaacaaggacaacauagau

SEQ ID NO: 445226 - RNA, 19 nt, Homo sapiens
  misc_RNA (1)...(19): siRNA sense strand
ggaggaaauugaugcaguu

SEQ ID NO: 445227 - RNA, 19 nt, Homo sapiens
  misc_RNA (1)...(19): siRNA sense strand
gaagagauuacgaucauug

SEQ ID NO: 445228 - RNA, 19 nt, Homo sapiens
  misc_RNA (1)...(19): siRNA sense strand
ucaaggagauggucccuau

SEQ ID NO: 445229 - RNA, 19 nt, Homo sapiens
  misc_RNA (1)...(19): siRNA sense strand
caauaacagucuuuccauu

SEQ ID NO: 445230 - RNA, 19 nt, Homo sapiens
  misc_RNA (1)...(19): siRNA sense strand
gaacaugaaacuugcucua

SEQ ID NO: 445231 - RNA, 19 nt, Homo sapiens
  misc_RNA (1)...(19): siRNA sense strand
gagauggucccuaucauug

SEQ ID NO: 445232 - RNA, 19 nt, Homo sapiens
  misc_RNA (1)...(19): siRNA sense strand
gcauggaugugaucacuag

SEQ ID NO: 445233 - RNA, 19 nt, Homo sapiens
  misc_RNA (1)...(19): siRNA sense strand
uaucacagauccugacaug

SEQ ID NO: 445234 - RNA, 19 nt, Homo sapiens
  misc_RNA (1)...(19): siRNA sense strand
gcaagaagaacaaggacaa

SEQ ID NO: 445235 - RNA, 19 nt, Homo sapiens
  misc_RNA (1)...(19): siRNA sense strand
gaaacugagucccacaaag

SEQ ID NO: 445236 - RNA, 19 nt, Homo sapiens
  misc_RNA (1)...(19): siRNA sense strand
gagauguguuggugagaaa

SEQ ID NO: 445237 - RNA, 19 nt, Homo sapiens
  misc_RNA (1)...(19): siRNA sense strand
guuauucugucuucacaaa

SEQ ID NO: 445238 - RNA, 19 nt, Homo sapiens
  misc_RNA (1)...(19): siRNA sense strand
gcaccacccaccuaugaua

SEQ ID NO: 445239 - RNA, 19 nt, Homo sapiens
  misc_RNA (1)...(19): siRNA sense strand
aguguucucuccuucauua

SEQ ID NO: 445240 - RNA, 19 nt, Homo sapiens
  misc_RNA (1)...(19): siRNA sense strand
ggagauguguuggugagaa

SEQ ID NO: 445241 - RNA, 19 nt, Homo sapiens
  misc_RNA (1)...(19): siRNA sense strand
ggagauggucccuaucauu

SEQ ID NO: 445242 - RNA, 19 nt, Homo sapiens
  misc_RNA (1)...(19): siRNA sense strand
gaugaagaauggaagagau

SEQ ID NO: 445243 - RNA, 19 nt, Homo sapiens
  misc_RNA (1)...(19): siRNA sense strand
gaaagauucagcaagaaga

SEQ ID NO: 445244 - RNA, 19 nt, Homo sapiens
  misc_RNA (1)...(19): siRNA sense strand
gcucguggcccaaucaauu

SEQ ID NO: 445245 - RNA, 19 nt, Homo sapiens
  misc_RNA (1)...(19): siRNA sense strand
gauggaguaucuugacaug

SEQ ID NO: 445246 - RNA, 19 nt, Homo sapiens
  misc_RNA (1)...(19): siRNA sense strand
gagaaguuccucccugaaa

SEQ ID NO: 445247 - RNA, 19 nt, Homo sapiens
  misc_RNA (1)...(19): siRNA sense strand
cccaauucuugaaguauua

SEQ ID NO: 445248 - RNA, 19 nt, Homo sapiens
  misc_RNA (1)...(19): siRNA sense strand
gaaaagugccaucucuaua

SEQ ID NO: 445249 - RNA, 19 nt, Homo sapiens
  misc_RNA (1)...(19): siRNA sense strand
caugaaacuugcucuaauc

SEQ ID NO: 445250 - RNA, 19 nt, Homo sapiens
  misc_RNA (1)...(19): siRNA sense strand
ugaaugaaacgcucagauu

SEQ ID NO: 445251 - RNA, 19 nt, Homo sapiens
  misc_RNA (1)...(19): siRNA sense strand
ucacagauccugacaugau

SEQ ID NO: 445252 - RNA, 19 nt, Homo sapiens
  misc_RNA (1)...(19): siRNA sense strand
ggaagagauuacgaucauu

SEQ ID NO: 445253 - RNA, 19 nt, Homo sapiens
  misc_RNA (1)...(19): siRNA sense strand
ucagaguccuucagaacuu

SEQ ID NO: 445254 - RNA, 19 nt, Homo sapiens
  misc_RNA (1)...(19): siRNA sense strand
cauagauccuuacauauac

SEQ ID NO: 445255 - RNA, 19 nt, Homo sapiens
  misc_RNA (1)...(19): siRNA sense strand
gaaguuccucccugaaaga

SEQ ID NO: 445256 - RNA, 19 nt, Homo sapiens
  misc_RNA (1)...(19): siRNA sense strand
acaaagcucuguccgaucu

SEQ ID NO: 445257 - RNA, 19 nt, Homo sapiens
  misc_RNA (1)...(19): siRNA sense strand
ccaagagaaguuacaaauu

SEQ ID NO: 445258 - RNA, 19 nt, Homo sapiens
  misc_RNA (1)...(19): siRNA sense strand
caucccaauucuugaagua

SEQ ID NO: 445259 - RNA, 19 nt, Homo sapiens
  misc_RNA (1)...(19): siRNA sense strand
gaacuucuccuucaaaccu

SEQ ID NO: 445260 - RNA, 19 nt, Homo sapiens
  misc_RNA (1)...(19): siRNA sense strand
uggaagagauuacgaucau

SEQ ID NO: 445261 - RNA, 19 nt, Homo sapiens
  misc_RNA (1)...(19): siRNA sense strand
gcucagauuauucccaauu

SEQ ID NO: 445262 - RNA, 19 nt, Homo sapiens
  misc_RNA (1)...(19): siRNA sense strand
gacagagccugagaaguuc

SEQ ID NO: 445263 - RNA, 19 nt, Homo sapiens
  misc_RNA (1)...(19): siRNA sense strand
ggaaguggacccagaaacu

SEQ ID NO: 445264 - RNA, 19 nt, Homo sapiens
  misc_RNA (1)...(19): siRNA sense strand
gauugacucucagaauuca

SEQ ID NO: 445265 - RNA, 19 nt, Homo sapiens
  misc_RNA (1)...(19): siRNA sense strand
acaugaaacuugcucuaau

SEQ ID NO: 445266 - RNA, 19 nt, Homo sapiens
  misc_RNA (1)...(19): siRNA sense strand
gagguuugcucucaugaac

SEQ ID NO: 445267 - RNA, 19 nt, Homo sapiens
  misc_RNA (1)...(19): siRNA sense strand
ggugaugauuccaagcuau

SEQ ID NO: 445268 - RNA, 19 nt, Homo sapiens
  misc_RNA (1)...(19): siRNA sense strand
gcaguguucucuccuucau

SEQ ID NO: 445269 - RNA, 19 nt, Homo sapiens
  misc_RNA (1)...(19): siRNA sense strand
gaaaacaccaagaagcuuu

SEQ ID NO: 445270 - RNA, 19 nt, Homo sapiens
  misc_RNA (1)...(19): siRNA sense strand
uuacauauacacacccuuu

SEQ ID NO: 445271 - RNA, 19 nt, Homo sapiens
  misc_RNA (1)...(19): siRNA sense strand
guuccucccugaaagauuc

SEQ ID NO: 445272 - RNA, 19 nt, Homo sapiens
  misc_RNA (1)...(19): siRNA sense strand
gaaacugcaggaggaaauu

SEQ ID NO: 445273 - RNA, 19 nt, Homo sapiens
  misc_RNA (1)...(19): siRNA sense strand
gauccauucuuucucucaa

SEQ ID NO: 445274 - RNA, 19 nt, Homo sapiens
  misc_RNA (1)...(19): siRNA sense strand
augaaacgcucagauuauu

SEQ ID NO: 445275 - RNA, 19 nt, Homo sapiens
  misc_RNA (1)...(19): siRNA sense strand
ucacaaaccggaggccuuu

SEQ ID NO: 445276 - RNA, 19 nt, Homo sapiens
  misc_RNA (1)...(19): siRNA sense strand
gaugauugacucucagaau

SEQ ID NO: 445277 - RNA, 19 nt, Homo sapiens
  misc_RNA (1)...(19): siRNA sense strand
ugaagaauggaagagauua

SEQ ID NO: 445278 - RNA, 19 nt, Homo sapiens
  misc_RNA (1)...(19): siRNA sense strand
ccagugggauuuaugaaaa

SEQ ID NO: 445279 - RNA, 19 nt, Homo sapiens
  misc_RNA (1)...(19): siRNA sense strand
gcuccucuaucuauaugga

SEQ ID NO: 445280 - RNA, 19 nt, Homo sapiens
  misc_RNA (1)...(19): siRNA sense strand
augauugacucucagaauu

SEQ ID NO: 445281 - RNA, 19 nt, Homo sapiens
  misc_RNA (1)...(19): siRNA sense strand
gaauggaagagauuacgau

SEQ ID NO: 445282 - RNA, 19 nt, Homo sapiens
  misc_RNA (1)...(19): siRNA sense strand
gaaguggacccagaaacug

SEQ ID NO: 445283 - RNA, 19 nt, Homo sapiens
  misc_RNA (1)...(19): siRNA sense strand
caauugcuaugagacuuga

SEQ ID NO: 445284 - RNA, 19 nt, Homo sapiens
  misc_RNA (1)...(19): siRNA sense strand
uccauucuuucucucaaua

SEQ ID NO: 445285 - RNA, 19 nt, Homo sapiens
  misc_RNA (1)...(19): siRNA sense strand
gguuugcucucaugaacau

SEQ ID NO: 445286 - RNA, 19 nt, Homo sapiens
  misc_RNA (1)...(19): siRNA sense strand
gaaacugcauuggcaugag

SEQ ID NO: 445287 - RNA, 19 nt, Homo sapiens
  misc_RNA (1)...(19): siRNA sense strand
ugagaucaaugggauguuc

SEQ ID NO: 445288 - RNA, 19 nt, Homo sapiens
  misc_RNA (1)...(19): siRNA sense strand
uggaguaucuugacauggu

SEQ ID NO: 445289 - RNA, 19 nt, Homo sapiens
  misc_RNA (1)...(19): siRNA sense strand
gaaaccacgagcaguguuc

SEQ ID NO: 445290 - RNA, 19 nt, Homo sapiens
  misc_RNA (1)...(19): siRNA sense strand
gcccaaucaauuaucuuua

SEQ ID NO: 445291 - RNA, 19 nt, Homo sapiens
  misc_RNA (1)...(19): siRNA sense strand
ucccaauucuugaaguauu

SEQ ID NO: 445292 - RNA, 19 nt, Homo sapiens
  misc_RNA (1)...(19): siRNA sense strand
uaaucagaguccuucagaa

SEQ ID NO: 445293 - RNA, 19 nt, Homo sapiens
  misc_RNA (1)...(19): siRNA sense strand
ggacccagaaacugcauug

SEQ ID NO: 445294 - RNA, 19 nt, Homo sapiens
  misc_RNA (1)...(19): siRNA sense strand
gugcuccucuaucuauaug

SEQ ID NO: 445295 - RNA, 19 nt, Homo sapiens
  misc_RNA (1)...(19): siRNA sense strand
aaugaaacgcucagauuau

SEQ ID NO: 445296 - RNA, 19 nt, Homo sapiens
  misc_RNA (1)...(19): siRNA sense strand
ggcccaaucaauuaucuuu

SEQ ID NO: 445297 - RNA, 19 nt, Homo sapiens
  misc_RNA (1)...(19): siRNA sense strand
ggaugaagaauggaagaga

SEQ ID NO: 445298 - RNA, 19 nt, Homo sapiens
  misc_RNA (1)...(19): siRNA sense strand
gacaugguggugaaugaaa

SEQ ID NO: 445299 - RNA, 19 nt, Homo sapiens
  misc_RNA (1)...(19): siRNA sense strand
uuaagaagcuuggaauucc

SEQ ID NO: 445300 - RNA, 19 nt, Homo sapiens
  misc_RNA (1)...(19): siRNA sense strand
gcaccgaguggauuuccuu

SEQ ID NO: 445301 - RNA, 19 nt, Homo sapiens
  misc_RNA (1)...(19): siRNA sense strand
aaagucgccucgaagauac

SEQ ID NO: 445302 - RNA, 19 nt, Homo sapiens
  misc_RNA (1)...(19): siRNA sense strand
uagcugaggaugaagaaug

SEQ ID NO: 445303 - RNA, 19 nt, Homo sapiens
  misc_RNA (1)...(19): siRNA sense strand
uccuucagcugaugauuga

SEQ ID NO: 445304 - RNA, 19 nt, Homo sapiens
  misc_RNA (1)...(19): siRNA sense strand
gaagaauggaagagauuac

SEQ ID NO: 445305 - RNA, 19 nt, Homo sapiens
  misc_RNA (1)...(19): siRNA sense strand
agaaguuccucccugaaag

SEQ ID NO: 445306 - RNA, 19 nt, Homo sapiens
  misc_RNA (1)...(19): siRNA sense strand
uaagggcuuuuguauguuu

SEQ ID NO: 445307 - RNA, 19 nt, Homo sapiens
  misc_RNA (1)...(19): siRNA sense strand
aauaacagucuuuccauuc

SEQ ID NO: 445308 - RNA, 19 nt, Homo sapiens
  misc_RNA (1)...(19): siRNA sense strand
cuaaucagaguccuucaga

SEQ ID NO: 445309 - RNA, 19 nt, Homo sapiens
  misc_RNA (1)...(19): siRNA sense strand
ggauguucauucccaaagg

SEQ ID NO: 445310 - RNA, 19 nt, Homo sapiens
  misc_RNA (1)...(19): siRNA sense strand
ggauuuccuucagcugaug

SEQ ID NO: 445311 - RNA, 19 nt, Homo sapiens
  misc_RNA (1)...(19): siRNA sense strand
agaacaaggacaacauaga

SEQ ID NO: 445312 - RNA, 19 nt, Homo sapiens
  misc_RNA (1)...(19): siRNA sense strand
caccuaugauacugugcua

SEQ ID NO: 445313 - RNA, 19 nt, Homo sapiens
  misc_RNA (1)...(19): siRNA sense strand
gaggaaauugaugcaguuu

SEQ ID NO: 445314 - RNA, 19 nt, Homo sapiens
  misc_RNA (1)...(19): siRNA sense strand
gggagcagcaccucuacua

SEQ ID NO: 445315 - RNA, 19 nt, Homo sapiens
  misc_RNA (1)...(19): siRNA sense strand
caaccggccuggcaucuac

SEQ ID NO: 445316 - RNA, 19 nt, Homo sapiens
  misc_RNA (1)...(19): siRNA sense strand
gaccggacgucaaggaucu

SEQ ID NO: 445317 - RNA, 19 nt, Homo sapiens
  misc_RNA (1)...(19): siRNA sense strand
ggacuggauccaccacuau

SEQ ID NO: 445318 - RNA, 19 nt, Homo sapiens
  misc_RNA (1)...(19): siRNA sense strand
cauacuggaugcacuucug

SEQ ID NO: 445319 - RNA, 19 nt, Homo sapiens
  misc_RNA (1)...(19): siRNA sense strand
ccacuaaguuuaucaagaa

SEQ ID NO: 445320 - RNA, 19 nt, Homo sapiens
  misc_RNA (1)...(19): siRNA sense strand
ggaugaaagugaagaggaa

SEQ ID NO: 445321 - RNA, 19 nt, Homo sapiens
  misc_RNA (1)...(19): siRNA sense strand
gcacgaauuucagcaccaa

SEQ ID NO: 445322 - RNA, 19 nt, Homo sapiens
  misc_RNA (1)...(19): siRNA sense strand
gcaccaagcaacugacaga

SEQ ID NO: 445323 - RNA, 19 nt, Homo sapiens
  misc_RNA (1)...(19): siRNA sense strand
ccaagcaacugacagaacu

SEQ ID NO: 445324 - RNA, 19 nt, Homo sapiens
  misc_RNA (1)...(19): siRNA sense strand
gcaacugacagaacuggaa

SEQ ID NO: 445325 - RNA, 19 nt, Homo sapiens
  misc_RNA (1)...(19): siRNA sense strand
gcaucgagauagccaacug

SEQ ID NO: 445326 - RNA, 19 nt, Homo sapiens
  misc_RNA (1)...(19): siRNA sense strand
caacugacagaacuggaaa

SEQ ID NO: 445327 - RNA, 19 nt, Homo sapiens
  misc_RNA (1)...(19): siRNA sense strand
gcgcgauccgcacgaauuu

SEQ ID NO: 445328 - RNA, 19 nt, Homo sapiens
  misc_RNA (1)...(19): siRNA sense strand
ucgaguggaugaaagugaa

SEQ ID NO: 445329 - RNA, 19 nt, Homo sapiens
  misc_RNA (1)...(19): siRNA sense strand
aggaaugccucuaagaaag

SEQ ID NO: 445330 - RNA, 19 nt, Homo sapiens
  misc_RNA (1)...(19): siRNA sense strand
gaagaaaagggaacgagaa

SEQ ID NO: 445331 - RNA, 19 nt, Homo sapiens
  misc_RNA (1)...(19): siRNA sense strand
cccacuaaguuuaucaaga

SEQ ID NO: 445332 - RNA, 19 nt, Homo sapiens
  misc_RNA (1)...(19): siRNA sense strand
ggaaugccucuaagaaagg

SEQ ID NO: 445333 - RNA, 19 nt, Homo sapiens
  misc_RNA (1)...(19): siRNA sense strand
ucagcggccagguggauua

SEQ ID NO: 445334 - RNA, 19 nt, Homo sapiens
  misc_RNA (1)...(19): siRNA sense strand
gcaggaugaaacagaagaa

SEQ ID NO: 445335 - RNA, 19 nt, Homo sapiens
  misc_RNA (1)...(19): siRNA sense strand
gaaugccucuaagaaaggu

SEQ ID NO: 445336 - RNA, 19 nt, Homo sapiens
  misc_RNA (1)...(19): siRNA sense strand
gcgauccgcacgaauuuca

SEQ ID NO: 445337 - RNA, 19 nt, Homo sapiens
  misc_RNA (1)...(19): siRNA sense strand
gaauuucagcaccaagcaa

SEQ ID NO: 445338 - RNA, 19 nt, Homo sapiens
  misc_RNA (1)...(19): siRNA sense strand
ccaacugcuugcaccugaa

SEQ ID NO: 445339 - RNA, 19 nt, Homo sapiens
  misc_RNA (1)...(19): siRNA sense strand
uuccagaaccgcaggauga

SEQ ID NO: 445340 - RNA, 19 nt, Homo sapiens
  misc_RNA (1)...(19): siRNA sense strand
caacugcuugcaccugaau

SEQ ID NO: 445341 - RNA, 19 nt, Homo sapiens
  misc_RNA (1)...(19): siRNA sense strand
gcgggucucacguccacua

SEQ ID NO: 445342 - RNA, 19 nt, Homo sapiens
  misc_RNA (1)...(19): siRNA sense strand
gcccuucucagucccaaga

SEQ ID NO: 445343 - RNA, 19 nt, Homo sapiens
  misc_RNA (1)...(19): siRNA sense strand
gaagcugggcuguguggua

SEQ ID NO: 445344 - RNA, 19 nt, Homo sapiens
  misc_RNA (1)...(19): siRNA sense strand
cugcagggcuuccucuuuc

SEQ ID NO: 445345 - RNA, 19 nt, Homo sapiens
  misc_RNA (1)...(19): siRNA sense strand
guccaggccuguccgaaug

SEQ ID NO: 445346 - RNA, 19 nt, Homo sapiens
  misc_RNA (1)...(19): siRNA sense strand
cuacgcuucugccgcauga

SEQ ID NO: 445347 - RNA, 19 nt, Homo sapiens
  misc_RNA (1)...(19): siRNA sense strand
ggacuucccggacgaguac

SEQ ID NO: 445348 - RNA, 19 nt, Homo sapiens
  misc_RNA (1)...(19): siRNA sense strand
aggagaagcugggcugugu

SEQ ID NO: 445349 - RNA, 19 nt, Homo sapiens
  misc_RNA (1)...(19): siRNA sense strand
ccgaaugcuuccaggugaa

SEQ ID NO: 445350 - RNA, 19 nt, Homo sapiens
  misc_RNA (1)...(19): siRNA sense strand
agacagaggagggcaucua

SEQ ID NO: 445351 - RNA, 19 nt, Homo sapiens
  misc_RNA (1)...(19): siRNA sense strand
gaccagacgcagcaacaca

SEQ ID NO: 445352 - RNA, 19 nt, Homo sapiens
  misc_RNA (1)...(19): siRNA sense strand
acugugaccagaucuguuu

SEQ ID NO: 445353 - RNA, 19 nt, Homo sapiens
  misc_RNA (1)...(19): siRNA sense strand
gggaugcuuuguggacuca

SEQ ID NO: 445354 - RNA, 19 nt, Homo sapiens
  misc_RNA (1)...(19): siRNA sense strand
agacgcagcaacacagcua

SEQ ID NO: 445355 - RNA, 19 nt, Homo sapiens
  misc_RNA (1)...(19): siRNA sense strand
cagaggagggcaucuacug

SEQ ID NO: 445356 - RNA, 19 nt, Homo sapiens
  misc_RNA (1)...(19): siRNA sense strand
gcacaacuucugccguaac

SEQ ID NO: 445357 - RNA, 19 nt, Homo sapiens
  misc_RNA (1)...(19): siRNA sense strand
caccgacugugaccagauc

SEQ ID NO: 445358 - RNA, 19 nt, Homo sapiens
  misc_RNA (1)...(19): siRNA sense strand
gcugggcgucuaugaagug

SEQ ID NO: 445359 - RNA, 19 nt, Homo sapiens
  misc_RNA (1)...(19): siRNA sense strand
cugcagggcuuccucuuuc

SEQ ID NO: 445360 - RNA, 19 nt, Homo sapiens
  misc_RNA (1)...(19): siRNA sense strand
guccaggccuguccgaaug

SEQ ID NO: 445361 - RNA, 19 nt, Homo sapiens
  misc_RNA (1)...(19): siRNA sense strand
cuacgcuucugccgcauga

SEQ ID NO: 445362 - RNA, 19 nt, Homo sapiens
  misc_RNA (1)...(19): siRNA sense strand
ggacuucccggacgaguac

SEQ ID NO: 445363 - RNA, 19 nt, Homo sapiens
  misc_RNA (1)...(19): siRNA sense strand
ccgaaugcuuccaggugaa

SEQ ID NO: 445364 - RNA, 19 nt, Homo sapiens
  misc_RNA (1)...(19): siRNA sense strand
agacagaggagggcaucua

SEQ ID NO: 445365 - RNA, 19 nt, Homo sapiens
  misc_RNA (1)...(19): siRNA sense strand
gaccagacgcagcaacaca

SEQ ID NO: 445366 - RNA, 19 nt, Homo sapiens
  misc_RNA (1)...(19): siRNA sense strand
acugugaccagaucuguuu

SEQ ID NO: 445367 - RNA, 19 nt, Homo sapiens
  misc_RNA (1)...(19): siRNA sense strand
gggaugcuuuguggacuca

SEQ ID NO: 445368 - RNA, 19 nt, Homo sapiens
  misc_RNA (1)...(19): siRNA sense strand
agacgcagcaacacagcua

SEQ ID NO: 445369 - RNA, 19 nt, Homo sapiens
  misc_RNA (1)...(19): siRNA sense strand
cagaggagggcaucuacug

SEQ ID NO: 445370 - RNA, 19 nt, Homo sapiens
  misc_RNA (1)...(19): siRNA sense strand
gcacaacuucugccguaac

SEQ ID NO: 445371 - RNA, 19 nt, Homo sapiens
  misc_RNA (1)...(19): siRNA sense strand
caccgacugugaccagauc

SEQ ID NO: 445372 - RNA, 19 nt, Homo sapiens
  misc_RNA (1)...(19): siRNA sense strand
gcugggcgucuaugaagug

SEQ ID NO: 445373 - RNA, 19 nt, Homo sapiens
  misc_RNA (1)...(19): siRNA sense strand
cugcagggcuuccucuuuc

SEQ ID NO: 445374 - RNA, 19 nt, Homo sapiens
  misc_RNA (1)...(19): siRNA sense strand
guccaggccuguccgaaug

SEQ ID NO: 445375 - RNA, 19 nt, Homo sapiens
  misc_RNA (1)...(19): siRNA sense strand
cuacgcuucugccgcauga

SEQ ID NO: 445376 - RNA, 19 nt, Homo sapiens
  misc_RNA (1)...(19): siRNA sense strand
ggacuucccggacgaguac

SEQ ID NO: 445377 - RNA, 19 nt, Homo sapiens
  misc_RNA (1)...(19): siRNA sense strand
ccgaaugcuuccaggugaa

SEQ ID NO: 445378 - RNA, 19 nt, Homo sapiens
  misc_RNA (1)...(19): siRNA sense strand
agacagaggagggcaucua

SEQ ID NO: 445379 - RNA, 19 nt, Homo sapiens
  misc_RNA (1)...(19): siRNA sense strand
gaccagacgcagcaacaca

SEQ ID NO: 445380 - RNA, 19 nt, Homo sapiens
  misc_RNA (1)...(19): siRNA sense strand
acugugaccagaucuguuu

SEQ ID NO: 445381 - RNA, 19 nt, Homo sapiens
  misc_RNA (1)...(19): siRNA sense strand
gggaugcuuuguggacuca

SEQ ID NO: 445382 - RNA, 19 nt, Homo sapiens
  misc_RNA (1)...(19): siRNA sense strand
agacgcagcaacacagcua

SEQ ID NO: 445383 - RNA, 19 nt, Homo sapiens
  misc_RNA (1)...(19): siRNA sense strand
cagaggagggcaucuacug

SEQ ID NO: 445384 - RNA, 19 nt, Homo sapiens
  misc_RNA (1)...(19): siRNA sense strand
gcacaacuucugccguaac

SEQ ID NO: 445385 - RNA, 19 nt, Homo sapiens
  misc_RNA (1)...(19): siRNA sense strand
caccgacugugaccagauc

SEQ ID NO: 445386 - RNA, 19 nt, Homo sapiens
  misc_RNA (1)...(19): siRNA sense strand
gcugggcgucuaugaagug

SEQ ID NO: 445387 - RNA, 19 nt, Homo sapiens
  misc_RNA (1)...(19): siRNA sense strand
gaagcugggcuguguggua

SEQ ID NO: 445388 - RNA, 19 nt, Homo sapiens
  misc_RNA (1)...(19): siRNA sense strand
gcucaucuccgcucucuga

SEQ ID NO: 445389 - RNA, 19 nt, Homo sapiens
  misc_RNA (1)...(19): siRNA sense strand
guccaggccuguccgaaug

SEQ ID NO: 445390 - RNA, 19 nt, Homo sapiens
  misc_RNA (1)...(19): siRNA sense strand
cugcagggcuuccucuuuc

SEQ ID NO: 445391 - RNA, 19 nt, Homo sapiens
  misc_RNA (1)...(19): siRNA sense strand
cuacgcuucugccgcauga

SEQ ID NO: 445392 - RNA, 19 nt, Homo sapiens
  misc_RNA (1)...(19): siRNA sense strand
ggacuucccggacgaguac

SEQ ID NO: 445393 - RNA, 19 nt, Homo sapiens
  misc_RNA (1)...(19): siRNA sense strand
aggagaagcugggcugugu

SEQ ID NO: 445394 - RNA, 19 nt, Homo sapiens
  misc_RNA (1)...(19): siRNA sense strand
ccgaaugcuuccaggugaa

SEQ ID NO: 445395 - RNA, 19 nt, Homo sapiens
  misc_RNA (1)...(19): siRNA sense strand
agacagaggagggcaucua

SEQ ID NO: 445396 - RNA, 19 nt, Homo sapiens
  misc_RNA (1)...(19): siRNA sense strand
gaccagacgcagcaacaca

SEQ ID NO: 445397 - RNA, 19 nt, Homo sapiens
  misc_RNA (1)...(19): siRNA sense strand
acugugaccagaucuguuu

SEQ ID NO: 445398 - RNA, 19 nt, Homo sapiens
  misc_RNA (1)...(19): siRNA sense strand
gggaugcuuuguggacuca

SEQ ID NO: 445399 - RNA, 19 nt, Homo sapiens
  misc_RNA (1)...(19): siRNA sense strand
agacgcagcaacacagcua

SEQ ID NO: 445400 - RNA, 19 nt, Homo sapiens
  misc_RNA (1)...(19): siRNA sense strand
cagaggagggcaucuacug

SEQ ID NO: 445401 - RNA, 19 nt, Homo sapiens
  misc_RNA (1)...(19): siRNA sense strand
gcacaacuucugccguaac

SEQ ID NO: 445402 - RNA, 19 nt, Homo sapiens
  misc_RNA (1)...(19): siRNA sense strand
caccgacugugaccagauc

SEQ ID NO: 445403 - RNA, 19 nt, Homo sapiens
  misc_RNA (1)...(19): siRNA sense strand
gcugggcgucuaugaagug

SEQ ID NO: 445404 - RNA, 19 nt, Homo sapiens
  misc_RNA (1)...(19): siRNA sense strand
ucccugcgcucgcucaucu

SEQ ID NO: 445405 - RNA, 19 nt, Homo sapiens
  misc_RNA (1)...(19): siRNA sense strand
cagcaaaccugacuccuua

SEQ ID NO: 445406 - RNA, 19 nt, Homo sapiens
  misc_RNA (1)...(19): siRNA sense strand
ucaaagaccuggccaaaga

SEQ ID NO: 445407 - RNA, 19 nt, Homo sapiens
  misc_RNA (1)...(19): siRNA sense strand
caacaccgcugccaaagga

SEQ ID NO: 445408 - RNA, 19 nt, Homo sapiens
  misc_RNA (1)...(19): siRNA sense strand
gaagagggcugccaagaac

SEQ ID NO: 445409 - RNA, 19 nt, Homo sapiens
  misc_RNA (1)...(19): siRNA sense strand
cagaaggacugcaagauga

SEQ ID NO: 445410 - RNA, 19 nt, Homo sapiens
  misc_RNA (1)...(19): siRNA sense strand
caaaggcucucacaaaucu

SEQ ID NO: 445411 - RNA, 19 nt, Homo sapiens
  misc_RNA (1)...(19): siRNA sense strand
ggagccaccugacauugua

SEQ ID NO: 445412 - RNA, 19 nt, Homo sapiens
  misc_RNA (1)...(19): siRNA sense strand
gcaaacgacugcugaagag

SEQ ID NO: 445413 - RNA, 19 nt, Homo sapiens
  misc_RNA (1)...(19): siRNA sense strand
ugaaggaguuuguggacua

SEQ ID NO: 445414 - RNA, 19 nt, Homo sapiens
  misc_RNA (1)...(19): siRNA sense strand
gaugagagcauaugaagug

SEQ ID NO: 445415 - RNA, 19 nt, Homo sapiens
  misc_RNA (1)...(19): siRNA sense strand
gagagcauaugaaguggaa

SEQ ID NO: 445416 - RNA, 19 nt, Homo sapiens
  misc_RNA (1)...(19): siRNA sense strand
gcagccagcucuucaucaa

SEQ ID NO: 445417 - RNA, 19 nt, Homo sapiens
  misc_RNA (1)...(19): siRNA sense strand
aaaccugacuccuuacuga

SEQ ID NO: 445418 - RNA, 19 nt, Homo sapiens
  misc_RNA (1)...(19): siRNA sense strand
cuucaaaccuucacagcua

SEQ ID NO: 445419 - RNA, 19 nt, Homo sapiens
  misc_RNA (1)...(19): siRNA sense strand
caacaacaccgcugccaaa

SEQ ID NO: 445420 - RNA, 19 nt, Homo sapiens
  misc_RNA (1)...(19): siRNA sense strand
ucagugacgucgagaacua

SEQ ID NO: 445421 - RNA, 19 nt, Homo sapiens
  misc_RNA (1)...(19): siRNA sense strand
caaagaguguccugagugu

SEQ ID NO: 445422 - RNA, 19 nt, Homo sapiens
  misc_RNA (1)...(19): siRNA sense strand
caccugacauuguaaagaa

SEQ ID NO: 445423 - RNA, 19 nt, Homo sapiens
  misc_RNA (1)...(19): siRNA sense strand
agaugaagcugaaggaguu

SEQ ID NO: 445424 - RNA, 19 nt, Homo sapiens
  misc_RNA (1)...(19): siRNA sense strand
gaccggaagugaauacugu

SEQ ID NO: 445425 - RNA, 19 nt, Homo sapiens
  misc_RNA (1)...(19): siRNA sense strand
cuucacagcuaaucaaaga

SEQ ID NO: 445426 - RNA, 19 nt, Homo sapiens
  misc_RNA (1)...(19): siRNA sense strand
ggagucagaugaagacaac

SEQ ID NO: 445427 - RNA, 19 nt, Homo sapiens
  misc_RNA (1)...(19): siRNA sense strand
gaaggaguuuguggacuau

SEQ ID NO: 445428 - RNA, 19 nt, Homo sapiens
  misc_RNA (1)...(19): siRNA sense strand
gcaagcgccugacgucaag

SEQ ID NO: 445429 - RNA, 19 nt, Homo sapiens
  misc_RNA (1)...(19): siRNA sense strand
gacgagcccugguguguuc

SEQ ID NO: 445430 - RNA, 19 nt, Homo sapiens
  misc_RNA (1)...(19): siRNA sense strand
gaacggaguguggauguga

SEQ ID NO: 445431 - RNA, 19 nt, Homo sapiens
  misc_RNA (1)...(19): siRNA sense strand
gccaacaucucccuguaug

SEQ ID NO: 445432 - RNA, 19 nt, Homo sapiens
  misc_RNA (1)...(19): siRNA sense strand
gccucuagcuggaaacaaa

SEQ ID NO: 445433 - RNA, 19 nt, Homo sapiens
  misc_RNA (1)...(19): siRNA sense strand
gaaacugcgugcugguaca

SEQ ID NO: 445434 - RNA, 19 nt, Homo sapiens
  misc_RNA (1)...(19): siRNA sense strand
gaagaagucccgggaguca

SEQ ID NO: 445435 - RNA, 19 nt, Homo sapiens
  misc_RNA (1)...(19): siRNA sense strand
ggacucagacuacguuuac

SEQ ID NO: 445436 - RNA, 19 nt, Homo sapiens
  misc_RNA (1)...(19): siRNA sense strand
ggaaguacaagaacagcaa

SEQ ID NO: 445437 - RNA, 19 nt, Homo sapiens
  misc_RNA (1)...(19): siRNA sense strand
aggaguuuguggacuauua

SEQ ID NO: 445438 - RNA, 19 nt, Homo sapiens
  misc_RNA (1)...(19): siRNA sense strand
caacaaagaugugguucac

SEQ ID NO: 445439 - RNA, 19 nt, Homo sapiens
  misc_RNA (1)...(19): siRNA sense strand
gaaacugucauggguagaa

SEQ ID NO: 445440 - RNA, 19 nt, Homo sapiens
  misc_RNA (1)...(19): siRNA sense strand
acgggaaacuacuccuuua

SEQ ID NO: 445441 - RNA, 19 nt, Homo sapiens
  misc_RNA (1)...(19): siRNA sense strand
gcaagaagaaagggaagaa

SEQ ID NO: 445442 - RNA, 19 nt, Homo sapiens
  misc_RNA (1)...(19): siRNA sense strand
ccaaguggaaguacaagaa

SEQ ID NO: 445443 - RNA, 19 nt, Homo sapiens
  misc_RNA (1)...(19): siRNA sense strand
ggaaacaaagacaauaagu

SEQ ID NO: 445444 - RNA, 19 nt, Homo sapiens
  misc_RNA (1)...(19): siRNA sense strand
gaaaacuacuggccagaug

SEQ ID NO: 445445 - RNA, 19 nt, Homo sapiens
  misc_RNA (1)...(19): siRNA sense strand
gcucaagaucgacgaguuu

SEQ ID NO: 445446 - RNA, 19 nt, Homo sapiens
  misc_RNA (1)...(19): siRNA sense strand
gcagaugagagcauaugaa

SEQ ID NO: 445447 - RNA, 19 nt, Homo sapiens
  misc_RNA (1)...(19): siRNA sense strand
gcacacaggaagccauuca

SEQ ID NO: 445448 - RNA, 19 nt, Homo sapiens
  misc_RNA (1)...(19): siRNA sense strand
gcaagcggguccucaacgu

SEQ ID NO: 445449 - RNA, 19 nt, Homo sapiens
  misc_RNA (1)...(19): siRNA sense strand
gaacgggaaacuacuccuu

SEQ ID NO: 445450 - RNA, 19 nt, Homo sapiens
  misc_RNA (1)...(19): siRNA sense strand
guacacggguggcuuccau

SEQ ID NO: 445451 - RNA, 19 nt, Homo sapiens
  misc_RNA (1)...(19): siRNA sense strand
gagcuaaaauucucaaugg

SEQ ID NO: 445452 - RNA, 19 nt, Homo sapiens
  misc_RNA (1)...(19): siRNA sense strand
gaaguggaaaggagguuga

SEQ ID NO: 445453 - RNA, 19 nt, Homo sapiens
  misc_RNA (1)...(19): siRNA sense strand
ugaagagggcugccaagaa

SEQ ID NO: 445454 - RNA, 19 nt, Homo sapiens
  misc_RNA (1)...(19): siRNA sense strand
gcccaucggugccaagaca

SEQ ID NO: 445455 - RNA, 19 nt, Homo sapiens
  misc_RNA (1)...(19): siRNA sense strand
gagcaaaccaagagcaagu

SEQ ID NO: 445456 - RNA, 19 nt, Homo sapiens
  misc_RNA (1)...(19): siRNA sense strand
gcaagaugaagcugaagga

SEQ ID NO: 445457 - RNA, 19 nt, Homo sapiens
  misc_RNA (1)...(19): siRNA sense strand
cgcccgacaucgacauaua

SEQ ID NO: 445458 - RNA, 19 nt, Homo sapiens
  misc_RNA (1)...(19): siRNA sense strand
gcaaugccagagucaagaa

SEQ ID NO: 445459 - RNA, 19 nt, Homo sapiens
  misc_RNA (1)...(19): siRNA sense strand
gaaguacaagaacagcaaa

SEQ ID NO: 445460 - RNA, 19 nt, Homo sapiens
  misc_RNA (1)...(19): siRNA sense strand
ccaaaacgcugaagcucaa

SEQ ID NO: 445461 - RNA, 19 nt, Homo sapiens
  misc_RNA (1)...(19): siRNA sense strand
gaagcggaccuggcacaaa

SEQ ID NO: 445462 - RNA, 19 nt, Homo sapiens
  misc_RNA (1)...(19): siRNA sense strand
ggaagaggagcagaagcua

SEQ ID NO: 445463 - RNA, 19 nt, Homo sapiens
  misc_RNA (1)...(19): siRNA sense strand
gcuggaaauucgagagcaa

SEQ ID NO: 445464 - RNA, 19 nt, Homo sapiens
  misc_RNA (1)...(19): siRNA sense strand
uucaaaggcucucacaaau

SEQ ID NO: 445465 - RNA, 19 nt, Homo sapiens
  misc_RNA (1)...(19): siRNA sense strand
gaccaaguacugccuaauc

SEQ ID NO: 445466 - RNA, 19 nt, Homo sapiens
  misc_RNA (1)...(19): siRNA sense strand
caaggacucagacuacguu

SEQ ID NO: 445467 - RNA, 19 nt, Homo sapiens
  misc_RNA (1)...(19): siRNA sense strand
ggcaaacgacugcugaaga

SEQ ID NO: 445468 - RNA, 19 nt, Homo sapiens
  misc_RNA (1)...(19): siRNA sense strand
gaaauucgagagcaaacca

SEQ ID NO: 445469 - RNA, 19 nt, Homo sapiens
  misc_RNA (1)...(19): siRNA sense strand
ccggagcacuucaaaccuu

SEQ ID NO: 445470 - RNA, 19 nt, Homo sapiens
  misc_RNA (1)...(19): siRNA sense strand
aaacugucauggguagaaa

SEQ ID NO: 445471 - RNA, 19 nt, Homo sapiens
  misc_RNA (1)...(19): siRNA sense strand
aaagauggaggcaagaaga

SEQ ID NO: 445472 - RNA, 19 nt, Homo sapiens
  misc_RNA (1)...(19): siRNA sense strand
uggcaagagugcaggcaaa

SEQ ID NO: 445473 - RNA, 19 nt, Homo sapiens
  misc_RNA (1)...(19): siRNA sense strand
caaagacaauaaguucucu

SEQ ID NO: 445474 - RNA, 19 nt, Homo sapiens
  misc_RNA (1)...(19): siRNA sense strand
gcuggaaacaaagacaaua

SEQ ID NO: 445475 - RNA, 19 nt, Homo sapiens
  misc_RNA (1)...(19): siRNA sense strand
gcaagucagaggccaagug

SEQ ID NO: 445476 - RNA, 19 nt, Homo sapiens
  misc_RNA (1)...(19): siRNA sense strand
aaaccaagagcaagucaga

SEQ ID NO: 445477 - RNA, 19 nt, Homo sapiens
  misc_RNA (1)...(19): siRNA sense strand
ugagugugcccaacaaaga

SEQ ID NO: 445478 - RNA, 19 nt, Homo sapiens
  misc_RNA (1)...(19): siRNA sense strand
ucaccaaccucgaguucuc

SEQ ID NO: 445479 - RNA, 19 nt, Homo sapiens
  misc_RNA (1)...(19): siRNA sense strand
gagcagaagcuagagaagu

SEQ ID NO: 445480 - RNA, 19 nt, Homo sapiens
  misc_RNA (1)...(19): siRNA sense strand
gagagcaaaccaagagcaa

SEQ ID NO: 445481 - RNA, 19 nt, Homo sapiens
  misc_RNA (1)...(19): siRNA sense strand
gcaaggccacaaagagugu

SEQ ID NO: 445482 - RNA, 19 nt, Homo sapiens
  misc_RNA (1)...(19): siRNA sense strand
gggcaaggccacaaagagu

SEQ ID NO: 445483 - RNA, 19 nt, Homo sapiens
  misc_RNA (1)...(19): siRNA sense strand
cggccaacaucucccugua

SEQ ID NO: 445484 - RNA, 19 nt, Homo sapiens
  misc_RNA (1)...(19): siRNA sense strand
ccaaagugaccaaguacug

SEQ ID NO: 445485 - RNA, 19 nt, Homo sapiens
  misc_RNA (1)...(19): siRNA sense strand
caagagugcaggcaaacga

SEQ ID NO: 445486 - RNA, 19 nt, Homo sapiens
  misc_RNA (1)...(19): siRNA sense strand
auucaaaggcucucacaaa

SEQ ID NO: 445487 - RNA, 19 nt, Homo sapiens
  misc_RNA (1)...(19): siRNA sense strand
acaagugcaucgucaagca

SEQ ID NO: 445488 - RNA, 19 nt, Homo sapiens
  misc_RNA (1)...(19): siRNA sense strand
ccacagcgagauguucuuu

SEQ ID NO: 445489 - RNA, 19 nt, Homo sapiens
  misc_RNA (1)...(19): siRNA sense strand
ggacaguuacaccgacuuc

SEQ ID NO: 445490 - RNA, 19 nt, Homo sapiens
  misc_RNA (1)...(19): siRNA sense strand
gagcauaugaaguggaaag

SEQ ID NO: 445491 - RNA, 19 nt, Homo sapiens
  misc_RNA (1)...(19): siRNA sense strand
gagcagaaaagcaagaaaa

SEQ ID NO: 445492 - RNA, 19 nt, Homo sapiens
  misc_RNA (1)...(19): siRNA sense strand
ggaacggaguguggaugug

SEQ ID NO: 445493 - RNA, 19 nt, Homo sapiens
  misc_RNA (1)...(19): siRNA sense strand
cacaaagaguguccugagu

SEQ ID NO: 445494 - RNA, 19 nt, Homo sapiens
  misc_RNA (1)...(19): siRNA sense strand
ccaaggaggcacugaccaa

SEQ ID NO: 445495 - RNA, 19 nt, Homo sapiens
  misc_RNA (1)...(19): siRNA sense strand
caacaucucccuguaugag

SEQ ID NO: 445496 - RNA, 19 nt, Homo sapiens
  misc_RNA (1)...(19): siRNA sense strand
cgucagaugagguguguga

SEQ ID NO: 445497 - RNA, 19 nt, Homo sapiens
  misc_RNA (1)...(19): siRNA sense strand
agcccaaagugaccaagua

SEQ ID NO: 445498 - RNA, 19 nt, Homo sapiens
  misc_RNA (1)...(19): siRNA sense strand
ggaugacggugagcucaag

SEQ ID NO: 445499 - RNA, 19 nt, Homo sapiens
  misc_RNA (1)...(19): siRNA sense strand
augaguacgugucggauga

SEQ ID NO: 445500 - RNA, 19 nt, Homo sapiens
  misc_RNA (1)...(19): siRNA sense strand
agucagaggccaaguggaa

SEQ ID NO: 445501 - RNA, 19 nt, Homo sapiens
  misc_RNA (1)...(19): siRNA sense strand
caucgucuccaaacaacaa

SEQ ID NO: 445502 - RNA, 19 nt, Homo sapiens
  misc_RNA (1)...(19): siRNA sense strand
acggugagcucaagaucga

SEQ ID NO: 445503 - RNA, 19 nt, Homo sapiens
  misc_RNA (1)...(19): siRNA sense strand
aagcggaccuggcacaaac

SEQ ID NO: 445504 - RNA, 19 nt, Homo sapiens
  misc_RNA (1)...(19): siRNA sense strand
guguggaugugacagaugu

SEQ ID NO: 445505 - RNA, 19 nt, Homo sapiens
  misc_RNA (1)...(19): siRNA sense strand
cagcaaaccugacuccuua

SEQ ID NO: 445506 - RNA, 19 nt, Homo sapiens
  misc_RNA (1)...(19): siRNA sense strand
ucaaagaccuggccaaaga

SEQ ID NO: 445507 - RNA, 19 nt, Homo sapiens
  misc_RNA (1)...(19): siRNA sense strand
caacaccgcugccaaagga

SEQ ID NO: 445508 - RNA, 19 nt, Homo sapiens
  misc_RNA (1)...(19): siRNA sense strand
gaagagggcugccaagaac

SEQ ID NO: 445509 - RNA, 19 nt, Homo sapiens
  misc_RNA (1)...(19): siRNA sense strand
cagaaggacugcaagauga

SEQ ID NO: 445510 - RNA, 19 nt, Homo sapiens
  misc_RNA (1)...(19): siRNA sense strand
caaaggcucucacaaaucu

SEQ ID NO: 445511 - RNA, 19 nt, Homo sapiens
  misc_RNA (1)...(19): siRNA sense strand
ggagccaccugacauugua

SEQ ID NO: 445512 - RNA, 19 nt, Homo sapiens
  misc_RNA (1)...(19): siRNA sense strand
gcaaacgacugcugaagag

SEQ ID NO: 445513 - RNA, 19 nt, Homo sapiens
  misc_RNA (1)...(19): siRNA sense strand
ugaaggaguuuguggacua

SEQ ID NO: 445514 - RNA, 19 nt, Homo sapiens
  misc_RNA (1)...(19): siRNA sense strand
gaugagagcauaugaagug

SEQ ID NO: 445515 - RNA, 19 nt, Homo sapiens
  misc_RNA (1)...(19): siRNA sense strand
gagagcauaugaaguggaa

SEQ ID NO: 445516 - RNA, 19 nt, Homo sapiens
  misc_RNA (1)...(19): siRNA sense strand
gcagccagcucuucaucaa

SEQ ID NO: 445517 - RNA, 19 nt, Homo sapiens
  misc_RNA (1)...(19): siRNA sense strand
aaaccugacuccuuacuga

SEQ ID NO: 445518 - RNA, 19 nt, Homo sapiens
  misc_RNA (1)...(19): siRNA sense strand
cuucaaaccuucacagcua

SEQ ID NO: 445519 - RNA, 19 nt, Homo sapiens
  misc_RNA (1)...(19): siRNA sense strand
caacaacaccgcugccaaa

SEQ ID NO: 445520 - RNA, 19 nt, Homo sapiens
  misc_RNA (1)...(19): siRNA sense strand
ucagugacgucgagaacua

SEQ ID NO: 445521 - RNA, 19 nt, Homo sapiens
  misc_RNA (1)...(19): siRNA sense strand
caaagaguguccugagugu

SEQ ID NO: 445522 - RNA, 19 nt, Homo sapiens
  misc_RNA (1)...(19): siRNA sense strand
caccugacauuguaaagaa

SEQ ID NO: 445523 - RNA, 19 nt, Homo sapiens
  misc_RNA (1)...(19): siRNA sense strand
agaugaagcugaaggaguu

SEQ ID NO: 445524 - RNA, 19 nt, Homo sapiens
  misc_RNA (1)...(19): siRNA sense strand
gaccggaagugaauacugu

SEQ ID NO: 445525 - RNA, 19 nt, Homo sapiens
  misc_RNA (1)...(19): siRNA sense strand
cuucacagcuaaucaaaga

SEQ ID NO: 445526 - RNA, 19 nt, Homo sapiens
  misc_RNA (1)...(19): siRNA sense strand
ggagucagaugaagacaac

SEQ ID NO: 445527 - RNA, 19 nt, Homo sapiens
  misc_RNA (1)...(19): siRNA sense strand
gaaggaguuuguggacuau

SEQ ID NO: 445528 - RNA, 19 nt, Homo sapiens
  misc_RNA (1)...(19): siRNA sense strand
gcaagcgccugacgucaag

SEQ ID NO: 445529 - RNA, 19 nt, Homo sapiens
  misc_RNA (1)...(19): siRNA sense strand
gacgagcccugguguguuc

SEQ ID NO: 445530 - RNA, 19 nt, Homo sapiens
  misc_RNA (1)...(19): siRNA sense strand
gaacggaguguggauguga

SEQ ID NO: 445531 - RNA, 19 nt, Homo sapiens
  misc_RNA (1)...(19): siRNA sense strand
gccaacaucucccuguaug

SEQ ID NO: 445532 - RNA, 19 nt, Homo sapiens
  misc_RNA (1)...(19): siRNA sense strand
gccucuagcuggaaacaaa

SEQ ID NO: 445533 - RNA, 19 nt, Homo sapiens
  misc_RNA (1)...(19): siRNA sense strand
gaaacugcgugcugguaca

SEQ ID NO: 445534 - RNA, 19 nt, Homo sapiens
  misc_RNA (1)...(19): siRNA sense strand
gaagaagucccgggaguca

SEQ ID NO: 445535 - RNA, 19 nt, Homo sapiens
  misc_RNA (1)...(19): siRNA sense strand
ggacucagacuacguuuac

SEQ ID NO: 445536 - RNA, 19 nt, Homo sapiens
  misc_RNA (1)...(19): siRNA sense strand
ggaaguacaagaacagcaa

SEQ ID NO: 445537 - RNA, 19 nt, Homo sapiens
  misc_RNA (1)...(19): siRNA sense strand
aggaguuuguggacuauua

SEQ ID NO: 445538 - RNA, 19 nt, Homo sapiens
  misc_RNA (1)...(19): siRNA sense strand
caacaaagaugugguucac

SEQ ID NO: 445539 - RNA, 19 nt, Homo sapiens
  misc_RNA (1)...(19): siRNA sense strand
gaaacugucauggguagaa

SEQ ID NO: 445540 - RNA, 19 nt, Homo sapiens
  misc_RNA (1)...(19): siRNA sense strand
acgggaaacuacuccuuua

SEQ ID NO: 445541 - RNA, 19 nt, Homo sapiens
  misc_RNA (1)...(19): siRNA sense strand
gcaagaagaaagggaagaa

SEQ ID NO: 445542 - RNA, 19 nt, Homo sapiens
  misc_RNA (1)...(19): siRNA sense strand
ccaaguggaaguacaagaa

SEQ ID NO: 445543 - RNA, 19 nt, Homo sapiens
  misc_RNA (1)...(19): siRNA sense strand
ggaaacaaagacaauaagu

SEQ ID NO: 445544 - RNA, 19 nt, Homo sapiens
  misc_RNA (1)...(19): siRNA sense strand
gaaaacuacuggccagaug

SEQ ID NO: 445545 - RNA, 19 nt, Homo sapiens
  misc_RNA (1)...(19): siRNA sense strand
gcucaagaucgacgaguuu

SEQ ID NO: 445546 - RNA, 19 nt, Homo sapiens
  misc_RNA (1)...(19): siRNA sense strand
gcagaugagagcauaugaa

SEQ ID NO: 445547 - RNA, 19 nt, Homo sapiens
  misc_RNA (1)...(19): siRNA sense strand
gcacacaggaagccauuca

SEQ ID NO: 445548 - RNA, 19 nt, Homo sapiens
  misc_RNA (1)...(19): siRNA sense strand
gcaagcggguccucaacgu

SEQ ID NO: 445549 - RNA, 19 nt, Homo sapiens
  misc_RNA (1)...(19): siRNA sense strand
gaacgggaaacuacuccuu

SEQ ID NO: 445550 - RNA, 19 nt, Homo sapiens
  misc_RNA (1)...(19): siRNA sense strand
guacacggguggcuuccau

SEQ ID NO: 445551 - RNA, 19 nt, Homo sapiens
  misc_RNA (1)...(19): siRNA sense strand
gagcuaaaauucucaaugg

SEQ ID NO: 445552 - RNA, 19 nt, Homo sapiens
  misc_RNA (1)...(19): siRNA sense strand
gaaguggaaaggagguuga

SEQ ID NO: 445553 - RNA, 19 nt, Homo sapiens
  misc_RNA (1)...(19): siRNA sense strand
ugaagagggcugccaagaa

SEQ ID NO: 445554 - RNA, 19 nt, Homo sapiens
  misc_RNA (1)...(19): siRNA sense strand
gcccaucggugccaagaca

SEQ ID NO: 445555 - RNA, 19 nt, Homo sapiens
  misc_RNA (1)...(19): siRNA sense strand
gagcaaaccaagagcaagu

SEQ ID NO: 445556 - RNA, 19 nt, Homo sapiens
  misc_RNA (1)...(19): siRNA sense strand
gcaagaugaagcugaagga

SEQ ID NO: 445557 - RNA, 19 nt, Homo sapiens
  misc_RNA (1)...(19): siRNA sense strand
cgcccgacaucgacauaua

SEQ ID NO: 445558 - RNA, 19 nt, Homo sapiens
  misc_RNA (1)...(19): siRNA sense strand
gcaaugccagagucaagaa

SEQ ID NO: 445559 - RNA, 19 nt, Homo sapiens
  misc_RNA (1)...(19): siRNA sense strand
gaaguacaagaacagcaaa

SEQ ID NO: 445560 - RNA, 19 nt, Homo sapiens
  misc_RNA (1)...(19): siRNA sense strand
ccaaaacgcugaagcucaa

SEQ ID NO: 445561 - RNA, 19 nt, Homo sapiens
  misc_RNA (1)...(19): siRNA sense strand
gaagcggaccuggcacaaa

SEQ ID NO: 445562 - RNA, 19 nt, Homo sapiens
  misc_RNA (1)...(19): siRNA sense strand
ggaagaggagcagaagcua

SEQ ID NO: 445563 - RNA, 19 nt, Homo sapiens
  misc_RNA (1)...(19): siRNA sense strand
gcuggaaauucgagagcaa

SEQ ID NO: 445564 - RNA, 19 nt, Homo sapiens
  misc_RNA (1)...(19): siRNA sense strand
uucaaaggcucucacaaau

SEQ ID NO: 445565 - RNA, 19 nt, Homo sapiens
  misc_RNA (1)...(19): siRNA sense strand
gaccaaguacugccuaauc

SEQ ID NO: 445566 - RNA, 19 nt, Homo sapiens
  misc_RNA (1)...(19): siRNA sense strand
caaggacucagacuacguu

SEQ ID NO: 445567 - RNA, 19 nt, Homo sapiens
  misc_RNA (1)...(19): siRNA sense strand
ggcaaacgacugcugaaga

SEQ ID NO: 445568 - RNA, 19 nt, Homo sapiens
  misc_RNA (1)...(19): siRNA sense strand
gaaauucgagagcaaacca

SEQ ID NO: 445569 - RNA, 19 nt, Homo sapiens
  misc_RNA (1)...(19): siRNA sense strand
ccggagcacuucaaaccuu

SEQ ID NO: 445570 - RNA, 19 nt, Homo sapiens
  misc_RNA (1)...(19): siRNA sense strand
aaacugucauggguagaaa

SEQ ID NO: 445571 - RNA, 19 nt, Homo sapiens
  misc_RNA (1)...(19): siRNA sense strand
aaagauggaggcaagaaga

SEQ ID NO: 445572 - RNA, 19 nt, Homo sapiens
  misc_RNA (1)...(19): siRNA sense strand
uggcaagagugcaggcaaa

SEQ ID NO: 445573 - RNA, 19 nt, Homo sapiens
  misc_RNA (1)...(19): siRNA sense strand
caaagacaauaaguucucu

SEQ ID NO: 445574 - RNA, 19 nt, Homo sapiens
  misc_RNA (1)...(19): siRNA sense strand
gcuggaaacaaagacaaua

SEQ ID NO: 445575 - RNA, 19 nt, Homo sapiens
  misc_RNA (1)...(19): siRNA sense strand
gcaagucagaggccaagug

SEQ ID NO: 445576 - RNA, 19 nt, Homo sapiens
  misc_RNA (1)...(19): siRNA sense strand
aaaccaagagcaagucaga

SEQ ID NO: 445577 - RNA, 19 nt, Homo sapiens
  misc_RNA (1)...(19): siRNA sense strand
ugagugugcccaacaaaga

SEQ ID NO: 445578 - RNA, 19 nt, Homo sapiens
  misc_RNA (1)...(19): siRNA sense strand
ucaccaaccucgaguucuc

SEQ ID NO: 445579 - RNA, 19 nt, Homo sapiens
  misc_RNA (1)...(19): siRNA sense strand
gagcagaagcuagagaagu

SEQ ID NO: 445580 - RNA, 19 nt, Homo sapiens
  misc_RNA (1)...(19): siRNA sense strand
gagagcaaaccaagagcaa

SEQ ID NO: 445581 - RNA, 19 nt, Homo sapiens
  misc_RNA (1)...(19): siRNA sense strand
gcaaggccacaaagagugu

SEQ ID NO: 445582 - RNA, 19 nt, Homo sapiens
  misc_RNA (1)...(19): siRNA sense strand
gggcaaggccacaaagagu

SEQ ID NO: 445583 - RNA, 19 nt, Homo sapiens
  misc_RNA (1)...(19): siRNA sense strand
cggccaacaucucccugua

SEQ ID NO: 445584 - RNA, 19 nt, Homo sapiens
  misc_RNA (1)...(19): siRNA sense strand
ccaaagugaccaaguacug

SEQ ID NO: 445585 - RNA, 19 nt, Homo sapiens
  misc_RNA (1)...(19): siRNA sense strand
caagagugcaggcaaacga

SEQ ID NO: 445586 - RNA, 19 nt, Homo sapiens
  misc_RNA (1)...(19): siRNA sense strand
auucaaaggcucucacaaa

SEQ ID NO: 445587 - RNA, 19 nt, Homo sapiens
  misc_RNA (1)...(19): siRNA sense strand
acaagugcaucgucaagca

SEQ ID NO: 445588 - RNA, 19 nt, Homo sapiens
  misc_RNA (1)...(19): siRNA sense strand
ccacagcgagauguucuuu

SEQ ID NO: 445589 - RNA, 19 nt, Homo sapiens
  misc_RNA (1)...(19): siRNA sense strand
ggacaguuacaccgacuuc

SEQ ID NO: 445590 - RNA, 19 nt, Homo sapiens
  misc_RNA (1)...(19): siRNA sense strand
gagcauaugaaguggaaag

SEQ ID NO: 445591 - RNA, 19 nt, Homo sapiens
  misc_RNA (1)...(19): siRNA sense strand
gagcagaaaagcaagaaaa

SEQ ID NO: 445592 - RNA, 19 nt, Homo sapiens
  misc_RNA (1)...(19): siRNA sense strand
ggaacggaguguggaugug

SEQ ID NO: 445593 - RNA, 19 nt, Homo sapiens
  misc_RNA (1)...(19): siRNA sense strand
cacaaagaguguccugagu

SEQ ID NO: 445594 - RNA, 19 nt, Homo sapiens
  misc_RNA (1)...(19): siRNA sense strand
ccaaggaggcacugaccaa

SEQ ID NO: 445595 - RNA, 19 nt, Homo sapiens
  misc_RNA (1)...(19): siRNA sense strand
caacaucucccuguaugag

SEQ ID NO: 445596 - RNA, 19 nt, Homo sapiens
  misc_RNA (1)...(19): siRNA sense strand
cgucagaugagguguguga

SEQ ID NO: 445597 - RNA, 19 nt, Homo sapiens
  misc_RNA (1)...(19): siRNA sense strand
agcccaaagugaccaagua

SEQ ID NO: 445598 - RNA, 19 nt, Homo sapiens
  misc_RNA (1)...(19): siRNA sense strand
ggaugacggugagcucaag

SEQ ID NO: 445599 - RNA, 19 nt, Homo sapiens
  misc_RNA (1)...(19): siRNA sense strand
augaguacgugucggauga

SEQ ID NO: 445600 - RNA, 19 nt, Homo sapiens
  misc_RNA (1)...(19): siRNA sense strand
agucagaggccaaguggaa

SEQ ID NO: 445601 - RNA, 19 nt, Homo sapiens
  misc_RNA (1)...(19): siRNA sense strand
caucgucuccaaacaacaa

SEQ ID NO: 445602 - RNA, 19 nt, Homo sapiens
  misc_RNA (1)...(19): siRNA sense strand
acggugagcucaagaucga

SEQ ID NO: 445603 - RNA, 19 nt, Homo sapiens
  misc_RNA (1)...(19): siRNA sense strand
aagcggaccuggcacaaac

SEQ ID NO: 445604 - RNA, 19 nt, Homo sapiens
  misc_RNA (1)...(19): siRNA sense strand
guguggaugugacagaugu

SEQ ID NO: 445605 - RNA, 19 nt, Homo sapiens
  misc_RNA (1)...(19): siRNA sense strand
aggaggagcuggacucuua

SEQ ID NO: 445606 - RNA, 19 nt, Homo sapiens
  misc_RNA (1)...(19): siRNA sense strand
gcaaagaccagcaggaaga

SEQ ID NO: 445607 - RNA, 19 nt, Homo sapiens
  misc_RNA (1)...(19): siRNA sense strand
ggugguggcuggugaagaa

SEQ ID NO: 445608 - RNA, 19 nt, Homo sapiens
  misc_RNA (1)...(19): siRNA sense strand
ggacggagcggcuacauuc

SEQ ID NO: 445609 - RNA, 19 nt, Homo sapiens
  misc_RNA (1)...(19): siRNA sense strand
cagcagagccauuuacuug

SEQ ID NO: 445610 - RNA, 19 nt, Homo sapiens
  misc_RNA (1)...(19): siRNA sense strand
gaagaagaaauuugggaaa

SEQ ID NO: 445611 - RNA, 19 nt, Homo sapiens
  misc_RNA (1)...(19): siRNA sense strand
ucagaugacuggcaacuuc

SEQ ID NO: 445612 - RNA, 19 nt, Homo sapiens
  misc_RNA (1)...(19): siRNA sense strand
gcagagccauuuacuugca

SEQ ID NO: 445613 - RNA, 19 nt, Homo sapiens
  misc_RNA (1)...(19): siRNA sense strand
uaagggacauugagcuguu

SEQ ID NO: 445614 - RNA, 19 nt, Homo sapiens
  misc_RNA (1)...(19): siRNA sense strand
caacccacauucucagaug

SEQ ID NO: 445615 - RNA, 19 nt, Homo sapiens
  misc_RNA (1)...(19): siRNA sense strand
guacacauccucuucaagu

SEQ ID NO: 445616 - RNA, 19 nt, Homo sapiens
  misc_RNA (1)...(19): siRNA sense strand
agaaggcucuggaggaaga

SEQ ID NO: 445617 - RNA, 19 nt, Homo sapiens
  misc_RNA (1)...(19): siRNA sense strand
gccaagcacccuuaggaua

SEQ ID NO: 445618 - RNA, 19 nt, Homo sapiens
  misc_RNA (1)...(19): siRNA sense strand
aggaagagcuggagcaaag

SEQ ID NO: 445619 - RNA, 19 nt, Homo sapiens
  misc_RNA (1)...(19): siRNA sense strand
guuccaaugcuucgacuua

SEQ ID NO: 445620 - RNA, 19 nt, Homo sapiens
  misc_RNA (1)...(19): siRNA sense strand
gaaaggccgcucccuaugg

SEQ ID NO: 445621 - RNA, 19 nt, Homo sapiens
  misc_RNA (1)...(19): siRNA sense strand
ggaaaggccgcucccuaug

SEQ ID NO: 445622 - RNA, 19 nt, Homo sapiens
  misc_RNA (1)...(19): siRNA sense strand
gcaggaagaagaaauuugg

SEQ ID NO: 445623 - RNA, 19 nt, Homo sapiens
  misc_RNA (1)...(19): siRNA sense strand
ccacaccagugcccgagaa

SEQ ID NO: 445624 - RNA, 19 nt, Homo sapiens
  misc_RNA (1)...(19): siRNA sense strand
ccagcuacuucgcauaaga

SEQ ID NO: 445625 - RNA, 19 nt, Homo sapiens
  misc_RNA (1)...(19): siRNA sense strand
gagcacagccucccaccau

SEQ ID NO: 445626 - RNA, 19 nt, Homo sapiens
  misc_RNA (1)...(19): siRNA sense strand
cccagaaccucaccucaga

SEQ ID NO: 445627 - RNA, 19 nt, Homo sapiens
  misc_RNA (1)...(19): siRNA sense strand
gguggcuggugaagaauga

SEQ ID NO: 445628 - RNA, 19 nt, Homo sapiens
  misc_RNA (1)...(19): siRNA sense strand
ugcagaagcuguucgagau

SEQ ID NO: 445629 - RNA, 19 nt, Homo sapiens
  misc_RNA (1)...(19): siRNA sense strand
aaaggccgcucccuaugga

SEQ ID NO: 445630 - RNA, 19 nt, Homo sapiens
  misc_RNA (1)...(19): siRNA sense strand
gcugaaccauguccuaagg

SEQ ID NO: 445631 - RNA, 19 nt, Homo sapiens
  misc_RNA (1)...(19): siRNA sense strand
ugucuaagcccaccugaga

SEQ ID NO: 445632 - RNA, 19 nt, Homo sapiens
  misc_RNA (1)...(19): siRNA sense strand
ggagaaggcccaggcaaag

SEQ ID NO: 445633 - RNA, 19 nt, Homo sapiens
  misc_RNA (1)...(19): siRNA sense strand
gaaccaagugccuuuacuc

SEQ ID NO: 445634 - RNA, 19 nt, Homo sapiens
  misc_RNA (1)...(19): siRNA sense strand
gagaaggcccaggcaaaga

SEQ ID NO: 445635 - RNA, 19 nt, Homo sapiens
  misc_RNA (1)...(19): siRNA sense strand
aggaagugcugaaccaugu

SEQ ID NO: 445636 - RNA, 19 nt, Homo sapiens
  misc_RNA (1)...(19): siRNA sense strand
gcacaggguggagcacuug

SEQ ID NO: 445637 - RNA, 19 nt, Homo sapiens
  misc_RNA (1)...(19): siRNA sense strand
gcggcuacauuccaagcaa

SEQ ID NO: 445638 - RNA, 19 nt, Homo sapiens
  misc_RNA (1)...(19): siRNA sense strand
guggagcacuugaugacau

SEQ ID NO: 445639 - RNA, 19 nt, Homo sapiens
  misc_RNA (1)...(19): siRNA sense strand
ggacauugagcuguucaug

SEQ ID NO: 445640 - RNA, 19 nt, Homo sapiens
  misc_RNA (1)...(19): siRNA sense strand
ccaagcacccuuaggauac

SEQ ID NO: 445641 - RNA, 19 nt, Homo sapiens
  misc_RNA (1)...(19): siRNA sense strand
uaagcccaccugagaguaa

SEQ ID NO: 445642 - RNA, 19 nt, Homo sapiens
  misc_RNA (1)...(19): siRNA sense strand
gcuaucaaccugcuacagu

SEQ ID NO: 445643 - RNA, 19 nt, Homo sapiens
  misc_RNA (1)...(19): siRNA sense strand
ccagcaggaagaagaaauu

SEQ ID NO: 445644 - RNA, 19 nt, Homo sapiens
  misc_RNA (1)...(19): siRNA sense strand
gcauccaggccaugaaugu

SEQ ID NO: 445645 - RNA, 19 nt, Homo sapiens
  misc_RNA (1)...(19): siRNA sense strand
cagccaagcacccuuagga

SEQ ID NO: 445646 - RNA, 19 nt, Homo sapiens
  misc_RNA (1)...(19): siRNA sense strand
gcagcagagccauuuacuu

SEQ ID NO: 445647 - RNA, 19 nt, Homo sapiens
  misc_RNA (1)...(19): siRNA sense strand
ccaugaauguggcgcucaa

SEQ ID NO: 445648 - RNA, 19 nt, Homo sapiens
  misc_RNA (1)...(19): siRNA sense strand
cauaagaccuggggagcua

SEQ ID NO: 445649 - RNA, 19 nt, Homo sapiens
  misc_RNA (1)...(19): siRNA sense strand
gcagaagcuguucgagaug

SEQ ID NO: 445650 - RNA, 19 nt, Homo sapiens
  misc_RNA (1)...(19): siRNA sense strand
uggaaaggccgcucccuau

SEQ ID NO: 445651 - RNA, 19 nt, Homo sapiens
  misc_RNA (1)...(19): siRNA sense strand
gcucguacacauccucuuc

SEQ ID NO: 445652 - RNA, 19 nt, Homo sapiens
  misc_RNA (1)...(19): siRNA sense strand
cgagaaccaagugccuuua

SEQ ID NO: 445653 - RNA, 19 nt, Homo sapiens
  misc_RNA (1)...(19): siRNA sense strand
caaagaccagcaggaagaa

SEQ ID NO: 445654 - RNA, 19 nt, Homo sapiens
  misc_RNA (1)...(19): siRNA sense strand
ggaggaagagcuggagcaa

SEQ ID NO: 445655 - RNA, 19 nt, Homo sapiens
  misc_RNA (1)...(19): siRNA sense strand
gggcagagcgacugaagac

SEQ ID NO: 445656 - RNA, 19 nt, Homo sapiens
  misc_RNA (1)...(19): siRNA sense strand
caccugagaguaaccuuug

SEQ ID NO: 445657 - RNA, 19 nt, Homo sapiens
  misc_RNA (1)...(19): siRNA sense strand
cagcaggaagaagaaauuu

SEQ ID NO: 445658 - RNA, 19 nt, Homo sapiens
  misc_RNA (1)...(19): siRNA sense strand
gugcugaaccauguccuaa

SEQ ID NO: 445659 - RNA, 19 nt, Homo sapiens
  misc_RNA (1)...(19): siRNA sense strand
gaggaagagcuggagcaaa

SEQ ID NO: 445660 - RNA, 19 nt, Homo sapiens
  misc_RNA (1)...(19): siRNA sense strand
cggagcggcuacauuccaa

SEQ ID NO: 445661 - RNA, 19 nt, Homo sapiens
  misc_RNA (1)...(19): siRNA sense strand
cuaccaacccacauucuca

SEQ ID NO: 445662 - RNA, 19 nt, Homo sapiens
  misc_RNA (1)...(19): siRNA sense strand
ccuagcagcccaagugauc

SEQ ID NO: 445663 - RNA, 19 nt, Homo sapiens
  misc_RNA (1)...(19): siRNA sense strand
uggagaaggcccaggcaaa

SEQ ID NO: 445664 - RNA, 19 nt, Homo sapiens
  misc_RNA (1)...(19): siRNA sense strand
ccgagaaccaagugccuuu

SEQ ID NO: 445665 - RNA, 19 nt, Homo sapiens
  misc_RNA (1)...(19): siRNA sense strand
ccaccugagaguaaccuuu

SEQ ID NO: 445666 - RNA, 19 nt, Homo sapiens
  misc_RNA (1)...(19): siRNA sense strand
ccgaggaugccuugcagaa

SEQ ID NO: 445667 - RNA, 19 nt, Homo sapiens
  misc_RNA (1)...(19): siRNA sense strand
uggagcacuugaugacaug

SEQ ID NO: 445668 - RNA, 19 nt, Homo sapiens
  misc_RNA (1)...(19): siRNA sense strand
gagccagcuacuucgcaua

SEQ ID NO: 445669 - RNA, 19 nt, Homo sapiens
  misc_RNA (1)...(19): siRNA sense strand
ggagcaggcacgcuaucug

SEQ ID NO: 445670 - RNA, 19 nt, Homo sapiens
  misc_RNA (1)...(19): siRNA sense strand
gagaaccaagugccuuuac

SEQ ID NO: 445671 - RNA, 19 nt, Homo sapiens
  misc_RNA (1)...(19): siRNA sense strand
gaaggaugcuggggauaag

SEQ ID NO: 445672 - RNA, 19 nt, Homo sapiens
  misc_RNA (1)...(19): siRNA sense strand
gggacggagcggcuacauu

SEQ ID NO: 445673 - RNA, 19 nt, Homo sapiens
  misc_RNA (1)...(19): siRNA sense strand
ccagcagcagagccauuua

SEQ ID NO: 445674 - RNA, 19 nt, Homo sapiens
  misc_RNA (1)...(19): siRNA sense strand
gacagcauccaggccauga

SEQ ID NO: 445675 - RNA, 19 nt, Homo sapiens
  misc_RNA (1)...(19): siRNA sense strand
ugaagaccagccugcagaa

SEQ ID NO: 445676 - RNA, 19 nt, Homo sapiens
  misc_RNA (1)...(19): siRNA sense strand
ggccugaagaggucacaga

SEQ ID NO: 445677 - RNA, 19 nt, Homo sapiens
  misc_RNA (1)...(19): siRNA sense strand
cagcauccaggccaugaau

SEQ ID NO: 445678 - RNA, 19 nt, Homo sapiens
  misc_RNA (1)...(19): siRNA sense strand
gaagaccagccugcagaag

SEQ ID NO: 445679 - RNA, 19 nt, Homo sapiens
  misc_RNA (1)...(19): siRNA sense strand
aggaggagcuggacucuua

SEQ ID NO: 445680 - RNA, 19 nt, Homo sapiens
  misc_RNA (1)...(19): siRNA sense strand
gcaaagaccagcaggaaga

SEQ ID NO: 445681 - RNA, 19 nt, Homo sapiens
  misc_RNA (1)...(19): siRNA sense strand
ggugguggcuggugaagaa

SEQ ID NO: 445682 - RNA, 19 nt, Homo sapiens
  misc_RNA (1)...(19): siRNA sense strand
ggacggagcggcuacauuc

SEQ ID NO: 445683 - RNA, 19 nt, Homo sapiens
  misc_RNA (1)...(19): siRNA sense strand
cagcagagccauuuacuug

SEQ ID NO: 445684 - RNA, 19 nt, Homo sapiens
  misc_RNA (1)...(19): siRNA sense strand
gaagaagaaauuugggaaa

SEQ ID NO: 445685 - RNA, 19 nt, Homo sapiens
  misc_RNA (1)...(19): siRNA sense strand
ucagaugacuggcaacuuc

SEQ ID NO: 445686 - RNA, 19 nt, Homo sapiens
  misc_RNA (1)...(19): siRNA sense strand
gcagagccauuuacuugca

SEQ ID NO: 445687 - RNA, 19 nt, Homo sapiens
  misc_RNA (1)...(19): siRNA sense strand
uaagggacauugagcuguu

SEQ ID NO: 445688 - RNA, 19 nt, Homo sapiens
  misc_RNA (1)...(19): siRNA sense strand
caacccacauucucagaug

SEQ ID NO: 445689 - RNA, 19 nt, Homo sapiens
  misc_RNA (1)...(19): siRNA sense strand
guacacauccucuucaagu

SEQ ID NO: 445690 - RNA, 19 nt, Homo sapiens
  misc_RNA (1)...(19): siRNA sense strand
agaaggcucuggaggaaga

SEQ ID NO: 445691 - RNA, 19 nt, Homo sapiens
  misc_RNA (1)...(19): siRNA sense strand
gccaagcacccuuaggaua

SEQ ID NO: 445692 - RNA, 19 nt, Homo sapiens
  misc_RNA (1)...(19): siRNA sense strand
aggaagagcuggagcaaag

SEQ ID NO: 445693 - RNA, 19 nt, Homo sapiens
  misc_RNA (1)...(19): siRNA sense strand
guuccaaugcuucgacuua

SEQ ID NO: 445694 - RNA, 19 nt, Homo sapiens
  misc_RNA (1)...(19): siRNA sense strand
gaaaggccgcucccuaugg

SEQ ID NO: 445695 - RNA, 19 nt, Homo sapiens
  misc_RNA (1)...(19): siRNA sense strand
ggaaaggccgcucccuaug

SEQ ID NO: 445696 - RNA, 19 nt, Homo sapiens
  misc_RNA (1)...(19): siRNA sense strand
gcaggaagaagaaauuugg

SEQ ID NO: 445697 - RNA, 19 nt, Homo sapiens
  misc_RNA (1)...(19): siRNA sense strand
ccacaccagugcccgagaa

SEQ ID NO: 445698 - RNA, 19 nt, Homo sapiens
  misc_RNA (1)...(19): siRNA sense strand
ccagcuacuucgcauaaga

SEQ ID NO: 445699 - RNA, 19 nt, Homo sapiens
  misc_RNA (1)...(19): siRNA sense strand
gagcacagccucccaccau

SEQ ID NO: 445700 - RNA, 19 nt, Homo sapiens
  misc_RNA (1)...(19): siRNA sense strand
cccagaaccucaccucaga

SEQ ID NO: 445701 - RNA, 19 nt, Homo sapiens
  misc_RNA (1)...(19): siRNA sense strand
gguggcuggugaagaauga

SEQ ID NO: 445702 - RNA, 19 nt, Homo sapiens
  misc_RNA (1)...(19): siRNA sense strand
ugcagaagcuguucgagau

SEQ ID NO: 445703 - RNA, 19 nt, Homo sapiens
  misc_RNA (1)...(19): siRNA sense strand
aaaggccgcucccuaugga

SEQ ID NO: 445704 - RNA, 19 nt, Homo sapiens
  misc_RNA (1)...(19): siRNA sense strand
gcugaaccauguccuaagg

SEQ ID NO: 445705 - RNA, 19 nt, Homo sapiens
  misc_RNA (1)...(19): siRNA sense strand
ugucuaagcccaccugaga

SEQ ID NO: 445706 - RNA, 19 nt, Homo sapiens
  misc_RNA (1)...(19): siRNA sense strand
ggagaaggcccaggcaaag

SEQ ID NO: 445707 - RNA, 19 nt, Homo sapiens
  misc_RNA (1)...(19): siRNA sense strand
gaaccaagugccuuuacuc

SEQ ID NO: 445708 - RNA, 19 nt, Homo sapiens
  misc_RNA (1)...(19): siRNA sense strand
gagaaggcccaggcaaaga

SEQ ID NO: 445709 - RNA, 19 nt, Homo sapiens
  misc_RNA (1)...(19): siRNA sense strand
aggaagugcugaaccaugu

SEQ ID NO: 445710 - RNA, 19 nt, Homo sapiens
  misc_RNA (1)...(19): siRNA sense strand
gcacaggguggagcacuug

SEQ ID NO: 445711 - RNA, 19 nt, Homo sapiens
  misc_RNA (1)...(19): siRNA sense strand
gcggcuacauuccaagcaa

SEQ ID NO: 445712 - RNA, 19 nt, Homo sapiens
  misc_RNA (1)...(19): siRNA sense strand
guggagcacuugaugacau

SEQ ID NO: 445713 - RNA, 19 nt, Homo sapiens
  misc_RNA (1)...(19): siRNA sense strand
ggacauugagcuguucaug

SEQ ID NO: 445714 - RNA, 19 nt, Homo sapiens
  misc_RNA (1)...(19): siRNA sense strand
ccaagcacccuuaggauac

SEQ ID NO: 445715 - RNA, 19 nt, Homo sapiens
  misc_RNA (1)...(19): siRNA sense strand
uaagcccaccugagaguaa

SEQ ID NO: 445716 - RNA, 19 nt, Homo sapiens
  misc_RNA (1)...(19): siRNA sense strand
gcuaucaaccugcuacagu

SEQ ID NO: 445717 - RNA, 19 nt, Homo sapiens
  misc_RNA (1)...(19): siRNA sense strand
ccagcaggaagaagaaauu

SEQ ID NO: 445718 - RNA, 19 nt, Homo sapiens
  misc_RNA (1)...(19): siRNA sense strand
gcauccaggccaugaaugu

SEQ ID NO: 445719 - RNA, 19 nt, Homo sapiens
  misc_RNA (1)...(19): siRNA sense strand
cagccaagcacccuuagga

SEQ ID NO: 445720 - RNA, 19 nt, Homo sapiens
  misc_RNA (1)...(19): siRNA sense strand
gcagcagagccauuuacuu

SEQ ID NO: 445721 - RNA, 19 nt, Homo sapiens
  misc_RNA (1)...(19): siRNA sense strand
ccaugaauguggcgcucaa

SEQ ID NO: 445722 - RNA, 19 nt, Homo sapiens
  misc_RNA (1)...(19): siRNA sense strand
cauaagaccuggggagcua

SEQ ID NO: 445723 - RNA, 19 nt, Homo sapiens
  misc_RNA (1)...(19): siRNA sense strand
gcagaagcuguucgagaug

SEQ ID NO: 445724 - RNA, 19 nt, Homo sapiens
  misc_RNA (1)...(19): siRNA sense strand
uggaaaggccgcucccuau

SEQ ID NO: 445725 - RNA, 19 nt, Homo sapiens
  misc_RNA (1)...(19): siRNA sense strand
gcucguacacauccucuuc

SEQ ID NO: 445726 - RNA, 19 nt, Homo sapiens
  misc_RNA (1)...(19): siRNA sense strand
cgagaaccaagugccuuua

SEQ ID NO: 445727 - RNA, 19 nt, Homo sapiens
  misc_RNA (1)...(19): siRNA sense strand
caaagaccagcaggaagaa

SEQ ID NO: 445728 - RNA, 19 nt, Homo sapiens
  misc_RNA (1)...(19): siRNA sense strand
ggaggaagagcuggagcaa

SEQ ID NO: 445729 - RNA, 19 nt, Homo sapiens
  misc_RNA (1)...(19): siRNA sense strand
gggcagagcgacugaagac

SEQ ID NO: 445730 - RNA, 19 nt, Homo sapiens
  misc_RNA (1)...(19): siRNA sense strand
caccugagaguaaccuuug

SEQ ID NO: 445731 - RNA, 19 nt, Homo sapiens
  misc_RNA (1)...(19): siRNA sense strand
cagcaggaagaagaaauuu

SEQ ID NO: 445732 - RNA, 19 nt, Homo sapiens
  misc_RNA (1)...(19): siRNA sense strand
gugcugaaccauguccuaa

SEQ ID NO: 445733 - RNA, 19 nt, Homo sapiens
  misc_RNA (1)...(19): siRNA sense strand
gaggaagagcuggagcaaa

SEQ ID NO: 445734 - RNA, 19 nt, Homo sapiens
  misc_RNA (1)...(19): siRNA sense strand
cggagcggcuacauuccaa

SEQ ID NO: 445735 - RNA, 19 nt, Homo sapiens
  misc_RNA (1)...(19): siRNA sense strand
cuaccaacccacauucuca

SEQ ID NO: 445736 - RNA, 19 nt, Homo sapiens
  misc_RNA (1)...(19): siRNA sense strand
ccuagcagcccaagugauc

SEQ ID NO: 445737 - RNA, 19 nt, Homo sapiens
  misc_RNA (1)...(19): siRNA sense strand
uggagaaggcccaggcaaa

SEQ ID NO: 445738 - RNA, 19 nt, Homo sapiens
  misc_RNA (1)...(19): siRNA sense strand
ccgagaaccaagugccuuu

SEQ ID NO: 445739 - RNA, 19 nt, Homo sapiens
  misc_RNA (1)...(19): siRNA sense strand
ccaccugagaguaaccuuu

SEQ ID NO: 445740 - RNA, 19 nt, Homo sapiens
  misc_RNA (1)...(19): siRNA sense strand
ccgaggaugccuugcagaa

SEQ ID NO: 445741 - RNA, 19 nt, Homo sapiens
  misc_RNA (1)...(19): siRNA sense strand
uggagcacuugaugacaug

SEQ ID NO: 445742 - RNA, 19 nt, Homo sapiens
  misc_RNA (1)...(19): siRNA sense strand
gagccagcuacuucgcaua

SEQ ID NO: 445743 - RNA, 19 nt, Homo sapiens
  misc_RNA (1)...(19): siRNA sense strand
ggagcaggcacgcuaucug

SEQ ID NO: 445744 - RNA, 19 nt, Homo sapiens
  misc_RNA (1)...(19): siRNA sense strand
gagaaccaagugccuuuac

SEQ ID NO: 445745 - RNA, 19 nt, Homo sapiens
  misc_RNA (1)...(19): siRNA sense strand
gaaggaugcuggggauaag

SEQ ID NO: 445746 - RNA, 19 nt, Homo sapiens
  misc_RNA (1)...(19): siRNA sense strand
gggacggagcggcuacauu

SEQ ID NO: 445747 - RNA, 19 nt, Homo sapiens
  misc_RNA (1)...(19): siRNA sense strand
ccagcagcagagccauuua

SEQ ID NO: 445748 - RNA, 19 nt, Homo sapiens
  misc_RNA (1)...(19): siRNA sense strand
gacagcauccaggccauga

SEQ ID NO: 445749 - RNA, 19 nt, Homo sapiens
  misc_RNA (1)...(19): siRNA sense strand
ugaagaccagccugcagaa

SEQ ID NO: 445750 - RNA, 19 nt, Homo sapiens
  misc_RNA (1)...(19): siRNA sense strand
ggccugaagaggucacaga

SEQ ID NO: 445751 - RNA, 19 nt, Homo sapiens
  misc_RNA (1)...(19): siRNA sense strand
cagcauccaggccaugaau

SEQ ID NO: 445752 - RNA, 19 nt, Homo sapiens
  misc_RNA (1)...(19): siRNA sense strand
gaagaccagccugcagaag

SEQ ID NO: 445753 - RNA, 19 nt, Homo sapiens
  misc_RNA (1)...(19): siRNA sense strand
aggaggagcuggacucuua

SEQ ID NO: 445754 - RNA, 19 nt, Homo sapiens
  misc_RNA (1)...(19): siRNA sense strand
gcaaagaccagcaggaaga

SEQ ID NO: 445755 - RNA, 19 nt, Homo sapiens
  misc_RNA (1)...(19): siRNA sense strand
ggugguggcuggugaagaa

SEQ ID NO: 445756 - RNA, 19 nt, Homo sapiens
  misc_RNA (1)...(19): siRNA sense strand
ggacggagcggcuacauuc

SEQ ID NO: 445757 - RNA, 19 nt, Homo sapiens
  misc_RNA (1)...(19): siRNA sense strand
cagcagagccauuuacuug

SEQ ID NO: 445758 - RNA, 19 nt, Homo sapiens
  misc_RNA (1)...(19): siRNA sense strand
gaagaagaaauuugggaaa

SEQ ID NO: 445759 - RNA, 19 nt, Homo sapiens
  misc_RNA (1)...(19): siRNA sense strand
ucagaugacuggcaacuuc

SEQ ID NO: 445760 - RNA, 19 nt, Homo sapiens
  misc_RNA (1)...(19): siRNA sense strand
gcagagccauuuacuugca

SEQ ID NO: 445761 - RNA, 19 nt, Homo sapiens
  misc_RNA (1)...(19): siRNA sense strand
uaagggacauugagcuguu

SEQ ID NO: 445762 - RNA, 19 nt, Homo sapiens
  misc_RNA (1)...(19): siRNA sense strand
caacccacauucucagaug

SEQ ID NO: 445763 - RNA, 19 nt, Homo sapiens
  misc_RNA (1)...(19): siRNA sense strand
guacacauccucuucaagu

SEQ ID NO: 445764 - RNA, 19 nt, Homo sapiens
  misc_RNA (1)...(19): siRNA sense strand
agaaggcucuggaggaaga

SEQ ID NO: 445765 - RNA, 19 nt, Homo sapiens
  misc_RNA (1)...(19): siRNA sense strand
gccaagcacccuuaggaua

SEQ ID NO: 445766 - RNA, 19 nt, Homo sapiens
  misc_RNA (1)...(19): siRNA sense strand
aggaagagcuggagcaaag

SEQ ID NO: 445767 - RNA, 19 nt, Homo sapiens
  misc_RNA (1)...(19): siRNA sense strand
guuccaaugcuucgacuua

SEQ ID NO: 445768 - RNA, 19 nt, Homo sapiens
  misc_RNA (1)...(19): siRNA sense strand
gaaaggccgcucccuaugg

SEQ ID NO: 445769 - RNA, 19 nt, Homo sapiens
  misc_RNA (1)...(19): siRNA sense strand
ggaaaggccgcucccuaug

SEQ ID NO: 445770 - RNA, 19 nt, Homo sapiens
  misc_RNA (1)...(19): siRNA sense strand
gcaggaagaagaaauuugg

SEQ ID NO: 445771 - RNA, 19 nt, Homo sapiens
  misc_RNA (1)...(19): siRNA sense strand
ccacaccagugcccgagaa

SEQ ID NO: 445772 - RNA, 19 nt, Homo sapiens
  misc_RNA (1)...(19): siRNA sense strand
ccagcuacuucgcauaaga

SEQ ID NO: 445773 - RNA, 19 nt, Homo sapiens
  misc_RNA (1)...(19): siRNA sense strand
gagcacagccucccaccau

SEQ ID NO: 445774 - RNA, 19 nt, Homo sapiens
  misc_RNA (1)...(19): siRNA sense strand
cccagaaccucaccucaga

SEQ ID NO: 445775 - RNA, 19 nt, Homo sapiens
  misc_RNA (1)...(19): siRNA sense strand
gguggcuggugaagaauga

SEQ ID NO: 445776 - RNA, 19 nt, Homo sapiens
  misc_RNA (1)...(19): siRNA sense strand
ugcagaagcuguucgagau

SEQ ID NO: 445777 - RNA, 19 nt, Homo sapiens
  misc_RNA (1)...(19): siRNA sense strand
aaaggccgcucccuaugga

SEQ ID NO: 445778 - RNA, 19 nt, Homo sapiens
  misc_RNA (1)...(19): siRNA sense strand
gcugaaccauguccuaagg

SEQ ID NO: 445779 - RNA, 19 nt, Homo sapiens
  misc_RNA (1)...(19): siRNA sense strand
ugucuaagcccaccugaga

SEQ ID NO: 445780 - RNA, 19 nt, Homo sapiens
  misc_RNA (1)...(19): siRNA sense strand
ggagaaggcccaggcaaag

SEQ ID NO: 445781 - RNA, 19 nt, Homo sapiens
  misc_RNA (1)...(19): siRNA sense strand
gaaccaagugccuuuacuc

SEQ ID NO: 445782 - RNA, 19 nt, Homo sapiens
  misc_RNA (1)...(19): siRNA sense strand
gagaaggcccaggcaaaga

SEQ ID NO: 445783 - RNA, 19 nt, Homo sapiens
  misc_RNA (1)...(19): siRNA sense strand
aggaagugcugaaccaugu

SEQ ID NO: 445784 - RNA, 19 nt, Homo sapiens
  misc_RNA (1)...(19): siRNA sense strand
gcacaggguggagcacuug

SEQ ID NO: 445785 - RNA, 19 nt, Homo sapiens
  misc_RNA (1)...(19): siRNA sense strand
gcggcuacauuccaagcaa

SEQ ID NO: 445786 - RNA, 19 nt, Homo sapiens
  misc_RNA (1)...(19): siRNA sense strand
guggagcacuugaugacau

SEQ ID NO: 445787 - RNA, 19 nt, Homo sapiens
  misc_RNA (1)...(19): siRNA sense strand
ggacauugagcuguucaug

SEQ ID NO: 445788 - RNA, 19 nt, Homo sapiens
  misc_RNA (1)...(19): siRNA sense strand
ccaagcacccuuaggauac

SEQ ID NO: 445789 - RNA, 19 nt, Homo sapiens
  misc_RNA (1)...(19): siRNA sense strand
uaagcccaccugagaguaa

SEQ ID NO: 445790 - RNA, 19 nt, Homo sapiens
  misc_RNA (1)...(19): siRNA sense strand
gcuaucaaccugcuacagu

SEQ ID NO: 445791 - RNA, 19 nt, Homo sapiens
  misc_RNA (1)...(19): siRNA sense strand
ccagcaggaagaagaaauu

SEQ ID NO: 445792 - RNA, 19 nt, Homo sapiens
  misc_RNA (1)...(19): siRNA sense strand
gcauccaggccaugaaugu

SEQ ID NO: 445793 - RNA, 19 nt, Homo sapiens
  misc_RNA (1)...(19): siRNA sense strand
cagccaagcacccuuagga

SEQ ID NO: 445794 - RNA, 19 nt, Homo sapiens
  misc_RNA (1)...(19): siRNA sense strand
gcagcagagccauuuacuu

SEQ ID NO: 445795 - RNA, 19 nt, Homo sapiens
  misc_RNA (1)...(19): siRNA sense strand
ccaugaauguggcgcucaa

SEQ ID NO: 445796 - RNA, 19 nt, Homo sapiens
  misc_RNA (1)...(19): siRNA sense strand
cauaagaccuggggagcua

SEQ ID NO: 445797 - RNA, 19 nt, Homo sapiens
  misc_RNA (1)...(19): siRNA sense strand
gcagaagcuguucgagaug

SEQ ID NO: 445798 - RNA, 19 nt, Homo sapiens
  misc_RNA (1)...(19): siRNA sense strand
uggaaaggccgcucccuau

SEQ ID NO: 445799 - RNA, 19 nt, Homo sapiens
  misc_RNA (1)...(19): siRNA sense strand
gcucguacacauccucuuc

SEQ ID NO: 445800 - RNA, 19 nt, Homo sapiens
  misc_RNA (1)...(19): siRNA sense strand
cgagaaccaagugccuuua

SEQ ID NO: 445801 - RNA, 19 nt, Homo sapiens
  misc_RNA (1)...(19): siRNA sense strand
caaagaccagcaggaagaa

SEQ ID NO: 445802 - RNA, 19 nt, Homo sapiens
  misc_RNA (1)...(19): siRNA sense strand
ggaggaagagcuggagcaa

SEQ ID NO: 445803 - RNA, 19 nt, Homo sapiens
  misc_RNA (1)...(19): siRNA sense strand
gggcagagcgacugaagac

SEQ ID NO: 445804 - RNA, 19 nt, Homo sapiens
  misc_RNA (1)...(19): siRNA sense strand
caccugagaguaaccuuug

SEQ ID NO: 445805 - RNA, 19 nt, Homo sapiens
  misc_RNA (1)...(19): siRNA sense strand
cagcaggaagaagaaauuu

SEQ ID NO: 445806 - RNA, 19 nt, Homo sapiens
  misc_RNA (1)...(19): siRNA sense strand
gugcugaaccauguccuaa

SEQ ID NO: 445807 - RNA, 19 nt, Homo sapiens
  misc_RNA (1)...(19): siRNA sense strand
gaggaagagcuggagcaaa

SEQ ID NO: 445808 - RNA, 19 nt, Homo sapiens
  misc_RNA (1)...(19): siRNA sense strand
cggagcggcuacauuccaa

SEQ ID NO: 445809 - RNA, 19 nt, Homo sapiens
  misc_RNA (1)...(19): siRNA sense strand
cuaccaacccacauucuca

SEQ ID NO: 445810 - RNA, 19 nt, Homo sapiens
  misc_RNA (1)...(19): siRNA sense strand
ccuagcagcccaagugauc

SEQ ID NO: 445811 - RNA, 19 nt, Homo sapiens
  misc_RNA (1)...(19): siRNA sense strand
uggagaaggcccaggcaaa

SEQ ID NO: 445812 - RNA, 19 nt, Homo sapiens
  misc_RNA (1)...(19): siRNA sense strand
ccgagaaccaagugccuuu

SEQ ID NO: 445813 - RNA, 19 nt, Homo sapiens
  misc_RNA (1)...(19): siRNA sense strand
ccaccugagaguaaccuuu

SEQ ID NO: 445814 - RNA, 19 nt, Homo sapiens
  misc_RNA (1)...(19): siRNA sense strand
ccgaggaugccuugcagaa

SEQ ID NO: 445815 - RNA, 19 nt, Homo sapiens
  misc_RNA (1)...(19): siRNA sense strand
uggagcacuugaugacaug

SEQ ID NO: 445816 - RNA, 19 nt, Homo sapiens
  misc_RNA (1)...(19): siRNA sense strand
gagccagcuacuucgcaua

SEQ ID NO: 445817 - RNA, 19 nt, Homo sapiens
  misc_RNA (1)...(19): siRNA sense strand
ggagcaggcacgcuaucug

SEQ ID NO: 445818 - RNA, 19 nt, Homo sapiens
  misc_RNA (1)...(19): siRNA sense strand
gagaaccaagugccuuuac

SEQ ID NO: 445819 - RNA, 19 nt, Homo sapiens
  misc_RNA (1)...(19): siRNA sense strand
gaaggaugcuggggauaag

SEQ ID NO: 445820 - RNA, 19 nt, Homo sapiens
  misc_RNA (1)...(19): siRNA sense strand
gggacggagcggcuacauu

SEQ ID NO: 445821 - RNA, 19 nt, Homo sapiens
  misc_RNA (1)...(19): siRNA sense strand
ccagcagcagagccauuua

SEQ ID NO: 445822 - RNA, 19 nt, Homo sapiens
  misc_RNA (1)...(19): siRNA sense strand
gacagcauccaggccauga

SEQ ID NO: 445823 - RNA, 19 nt, Homo sapiens
  misc_RNA (1)...(19): siRNA sense strand
ugaagaccagccugcagaa

SEQ ID NO: 445824 - RNA, 19 nt, Homo sapiens
  misc_RNA (1)...(19): siRNA sense strand
ggccugaagaggucacaga

SEQ ID NO: 445825 - RNA, 19 nt, Homo sapiens
  misc_RNA (1)...(19): siRNA sense strand
cagcauccaggccaugaau

SEQ ID NO: 445826 - RNA, 19 nt, Homo sapiens
  misc_RNA (1)...(19): siRNA sense strand
gaagaccagccugcagaag

SEQ ID NO: 445827 - RNA, 19 nt, Homo sapiens
  misc_RNA (1)...(19): siRNA sense strand
gcacgagccugaagacaua

SEQ ID NO: 445828 - RNA, 19 nt, Homo sapiens
  misc_RNA (1)...(19): siRNA sense strand
cagcugggcuucauuggua

SEQ ID NO: 445829 - RNA, 19 nt, Homo sapiens
  misc_RNA (1)...(19): siRNA sense strand
ccaaacagaaccucgauua

SEQ ID NO: 445830 - RNA, 19 nt, Homo sapiens
  misc_RNA (1)...(19): siRNA sense strand
gauuacugcuuccucauga

SEQ ID NO: 445831 - RNA, 19 nt, Homo sapiens
  misc_RNA (1)...(19): siRNA sense strand
gaccugagccugauuguag

SEQ ID NO: 445832 - RNA, 19 nt, Homo sapiens
  misc_RNA (1)...(19): siRNA sense strand
gcacuucacccuggagaaa

SEQ ID NO: 445833 - RNA, 19 nt, Homo sapiens
  misc_RNA (1)...(19): siRNA sense strand
ggcaagauccagaaacuga

SEQ ID NO: 445834 - RNA, 19 nt, Homo sapiens
  misc_RNA (1)...(19): siRNA sense strand
ccaaaggcaucuacuacgu

SEQ ID NO: 445835 - RNA, 19 nt, Homo sapiens
  misc_RNA (1)...(19): siRNA sense strand
caagagggccgugucagaa

SEQ ID NO: 445836 - RNA, 19 nt, Homo sapiens
  misc_RNA (1)...(19): siRNA sense strand
gggcuucauugguaagaug

SEQ ID NO: 445837 - RNA, 19 nt, Homo sapiens
  misc_RNA (1)...(19): siRNA sense strand
ugagcgagaucuuccugaa

SEQ ID NO: 445838 - RNA, 19 nt, Homo sapiens
  misc_RNA (1)...(19): siRNA sense strand
gagccugauuguagaguuc

SEQ ID NO: 445839 - RNA, 19 nt, Homo sapiens
  misc_RNA (1)...(19): siRNA sense strand
aacagaaccucgauuacug

SEQ ID NO: 445840 - RNA, 19 nt, Homo sapiens
  misc_RNA (1)...(19): siRNA sense strand
gagcgagaucuuccugaaa

SEQ ID NO: 445841 - RNA, 19 nt, Homo sapiens
  misc_RNA (1)...(19): siRNA sense strand
gaucggcuccuucuacaag

SEQ ID NO: 445842 - RNA, 19 nt, Homo sapiens
  misc_RNA (1)...(19): siRNA sense strand
gcaagauccagaaacugaa

SEQ ID NO: 445843 - RNA, 19 nt, Homo sapiens
  misc_RNA (1)...(19): siRNA sense strand
uccagaaacugaaggacaa

SEQ ID NO: 445844 - RNA, 19 nt, Homo sapiens
  misc_RNA (1)...(19): siRNA sense strand
cagaucggcuccuucuaca

SEQ ID NO: 445845 - RNA, 19 nt, Homo sapiens
  misc_RNA (1)...(19): siRNA sense strand
gcacugugaccggcagaaa

SEQ ID NO: 445846 - RNA, 19 nt, Homo sapiens
  misc_RNA (1)...(19): siRNA sense strand
gcagugacagagaacauca

SEQ ID NO: 445847 - RNA, 19 nt, Homo sapiens
  misc_RNA (1)...(19): siRNA sense strand
uagaguucauucucauguu

SEQ ID NO: 445848 - RNA, 19 nt, Homo sapiens
  misc_RNA (1)...(19): siRNA sense strand
gaucaagagggccguguca

SEQ ID NO: 445849 - RNA, 19 nt, Homo sapiens
  misc_RNA (1)...(19): siRNA sense strand
ggaccugagccugauugua

SEQ ID NO: 445850 - RNA, 19 nt, Homo sapiens
  misc_RNA (1)...(19): siRNA sense strand
gaaggaggacucggucauc

SEQ ID NO: 445851 - RNA, 19 nt, Homo sapiens
  misc_RNA (1)...(19): siRNA sense strand
ucaagagggccgugucaga

SEQ ID NO: 445852 - RNA, 19 nt, Homo sapiens
  misc_RNA (1)...(19): siRNA sense strand
gaggacaagcucuucaaca

SEQ ID NO: 445853 - RNA, 19 nt, Homo sapiens
  misc_RNA (1)...(19): siRNA sense strand
guagaguucauucucaugu

SEQ ID NO: 445854 - RNA, 19 nt, Homo sapiens
  misc_RNA (1)...(19): siRNA sense strand
ccacuucuacccugacuuc

SEQ ID NO: 445855 - RNA, 19 nt, Homo sapiens
  misc_RNA (1)...(19): siRNA sense strand
gguggaggaccaaacagaa

SEQ ID NO: 445856 - RNA, 19 nt, Homo sapiens
  misc_RNA (1)...(19): siRNA sense strand
ccaacuaccugagcaccau

SEQ ID NO: 445857 - RNA, 19 nt, Homo sapiens
  misc_RNA (1)...(19): siRNA sense strand
aaacagaaccucgauuacu

SEQ ID NO: 445858 - RNA, 19 nt, Homo sapiens
  misc_RNA (1)...(19): siRNA sense strand
uaccugagcaccaugaaga

SEQ ID NO: 445859 - RNA, 19 nt, Homo sapiens
  misc_RNA (1)...(19): siRNA sense strand
agaguucauucucauguuc

SEQ ID NO: 445860 - RNA, 19 nt, Homo sapiens
  misc_RNA (1)...(19): siRNA sense strand
gauguacgcgcaguccaaa

SEQ ID NO: 445861 - RNA, 19 nt, Homo sapiens
  misc_RNA (1)...(19): siRNA sense strand
ccagaucggcuccuucuac

SEQ ID NO: 445862 - RNA, 19 nt, Homo sapiens
  misc_RNA (1)...(19): siRNA sense strand
uugguaagauguucaaguc

SEQ ID NO: 445863 - RNA, 19 nt, Homo sapiens
  misc_RNA (1)...(19): siRNA sense strand
acgugcagcuggaggauga

SEQ ID NO: 445864 - RNA, 19 nt, Homo sapiens
  misc_RNA (1)...(19): siRNA sense strand
gaaacugaaggacaaagac

SEQ ID NO: 445865 - RNA, 19 nt, Homo sapiens
  misc_RNA (1)...(19): siRNA sense strand
caaacagaaccucgauuac

SEQ ID NO: 445866 - RNA, 19 nt, Homo sapiens
  misc_RNA (1)...(19): siRNA sense strand
cuucaaaccgucccucuuc

SEQ ID NO: 445867 - RNA, 19 nt, Homo sapiens
  misc_RNA (1)...(19): siRNA sense strand
cuucggcagugacagagaa

SEQ ID NO: 445868 - RNA, 19 nt, Homo sapiens
  misc_RNA (1)...(19): siRNA sense strand
gacuggagcgguucuucuu

SEQ ID NO: 445869 - RNA, 19 nt, Homo sapiens
  misc_RNA (1)...(19): siRNA sense strand
cauauucugugggugaaag

SEQ ID NO: 445870 - RNA, 19 nt, Homo sapiens
  misc_RNA (1)...(19): siRNA sense strand
agaaacugaaggacaaaga

SEQ ID NO: 445871 - RNA, 19 nt, Homo sapiens
  misc_RNA (1)...(19): siRNA sense strand
gaccaaacagaaccucgau

SEQ ID NO: 445872 - RNA, 19 nt, Homo sapiens
  misc_RNA (1)...(19): siRNA sense strand
gaaggaugcgaagcacugu

SEQ ID NO: 445873 - RNA, 19 nt, Homo sapiens
  misc_RNA (1)...(19): siRNA sense strand
aagagggccgugucagaaa

SEQ ID NO: 445874 - RNA, 19 nt, Homo sapiens
  misc_RNA (1)...(19): siRNA sense strand
cgacggcuaccuccagauc

SEQ ID NO: 445875 - RNA, 19 nt, Homo sapiens
  misc_RNA (1)...(19): siRNA sense strand
ucgacaacccucagucaga

SEQ ID NO: 445876 - RNA, 19 nt, Homo sapiens
  misc_RNA (1)...(19): siRNA sense strand
aggacaagcucuucaacac

SEQ ID NO: 445877 - RNA, 19 nt, Homo sapiens
  misc_RNA (1)...(19): siRNA sense strand
acucugcacucgcucaucu

SEQ ID NO: 445878 - RNA, 19 nt, Homo sapiens
  misc_RNA (1)...(19): siRNA sense strand
ugagccugauuguagaguu

SEQ ID NO: 445879 - RNA, 19 nt, Homo sapiens
  misc_RNA (1)...(19): siRNA sense strand
guccaaaggcaucuacuac

SEQ ID NO: 445880 - RNA, 19 nt, Homo sapiens
  misc_RNA (1)...(19): siRNA sense strand
caagauccagaaacugaag

SEQ ID NO: 445881 - RNA, 19 nt, Homo sapiens
  misc_RNA (1)...(19): siRNA sense strand
gauuguagaguucauucuc

SEQ ID NO: 445882 - RNA, 19 nt, Homo sapiens
  misc_RNA (1)...(19): siRNA sense strand
gcacgagccugaagacaua

SEQ ID NO: 445883 - RNA, 19 nt, Homo sapiens
  misc_RNA (1)...(19): siRNA sense strand
cagcugggcuucauuggua

SEQ ID NO: 445884 - RNA, 19 nt, Homo sapiens
  misc_RNA (1)...(19): siRNA sense strand
ccaaacagaaccucgauua

SEQ ID NO: 445885 - RNA, 19 nt, Homo sapiens
  misc_RNA (1)...(19): siRNA sense strand
gauuacugcuuccucauga

SEQ ID NO: 445886 - RNA, 19 nt, Homo sapiens
  misc_RNA (1)...(19): siRNA sense strand
gaccugagccugauuguag

SEQ ID NO: 445887 - RNA, 19 nt, Homo sapiens
  misc_RNA (1)...(19): siRNA sense strand
gcacuucacccuggagaaa

SEQ ID NO: 445888 - RNA, 19 nt, Homo sapiens
  misc_RNA (1)...(19): siRNA sense strand
ggcaagauccagaaacuga

SEQ ID NO: 445889 - RNA, 19 nt, Homo sapiens
  misc_RNA (1)...(19): siRNA sense strand
ccaaaggcaucuacuacgu

SEQ ID NO: 445890 - RNA, 19 nt, Homo sapiens
  misc_RNA (1)...(19): siRNA sense strand
caagagggccgugucagaa

SEQ ID NO: 445891 - RNA, 19 nt, Homo sapiens
  misc_RNA (1)...(19): siRNA sense strand
gggcuucauugguaagaug

SEQ ID NO: 445892 - RNA, 19 nt, Homo sapiens
  misc_RNA (1)...(19): siRNA sense strand
ugagcgagaucuuccugaa

SEQ ID NO: 445893 - RNA, 19 nt, Homo sapiens
  misc_RNA (1)...(19): siRNA sense strand
gagccugauuguagaguuc

SEQ ID NO: 445894 - RNA, 19 nt, Homo sapiens
  misc_RNA (1)...(19): siRNA sense strand
aacagaaccucgauuacug

SEQ ID NO: 445895 - RNA, 19 nt, Homo sapiens
  misc_RNA (1)...(19): siRNA sense strand
gagcgagaucuuccugaaa

SEQ ID NO: 445896 - RNA, 19 nt, Homo sapiens
  misc_RNA (1)...(19): siRNA sense strand
gaucggcuccuucuacaag

SEQ ID NO: 445897 - RNA, 19 nt, Homo sapiens
  misc_RNA (1)...(19): siRNA sense strand
gcaagauccagaaacugaa

SEQ ID NO: 445898 - RNA, 19 nt, Homo sapiens
  misc_RNA (1)...(19): siRNA sense strand
uccagaaacugaaggacaa

SEQ ID NO: 445899 - RNA, 19 nt, Homo sapiens
  misc_RNA (1)...(19): siRNA sense strand
cagaucggcuccuucuaca

SEQ ID NO: 445900 - RNA, 19 nt, Homo sapiens
  misc_RNA (1)...(19): siRNA sense strand
gcacugugaccggcagaaa

SEQ ID NO: 445901 - RNA, 19 nt, Homo sapiens
  misc_RNA (1)...(19): siRNA sense strand
gcagugacagagaacauca

SEQ ID NO: 445902 - RNA, 19 nt, Homo sapiens
  misc_RNA (1)...(19): siRNA sense strand
uagaguucauucucauguu

SEQ ID NO: 445903 - RNA, 19 nt, Homo sapiens
  misc_RNA (1)...(19): siRNA sense strand
gaucaagagggccguguca

SEQ ID NO: 445904 - RNA, 19 nt, Homo sapiens
  misc_RNA (1)...(19): siRNA sense strand
ggaccugagccugauugua

SEQ ID NO: 445905 - RNA, 19 nt, Homo sapiens
  misc_RNA (1)...(19): siRNA sense strand
gaaggaggacucggucauc

SEQ ID NO: 445906 - RNA, 19 nt, Homo sapiens
  misc_RNA (1)...(19): siRNA sense strand
ucaagagggccgugucaga

SEQ ID NO: 445907 - RNA, 19 nt, Homo sapiens
  misc_RNA (1)...(19): siRNA sense strand
gaggacaagcucuucaaca

SEQ ID NO: 445908 - RNA, 19 nt, Homo sapiens
  misc_RNA (1)...(19): siRNA sense strand
guagaguucauucucaugu

SEQ ID NO: 445909 - RNA, 19 nt, Homo sapiens
  misc_RNA (1)...(19): siRNA sense strand
ccacuucuacccugacuuc

SEQ ID NO: 445910 - RNA, 19 nt, Homo sapiens
  misc_RNA (1)...(19): siRNA sense strand
gguggaggaccaaacagaa

SEQ ID NO: 445911 - RNA, 19 nt, Homo sapiens
  misc_RNA (1)...(19): siRNA sense strand
ccaacuaccugagcaccau

SEQ ID NO: 445912 - RNA, 19 nt, Homo sapiens
  misc_RNA (1)...(19): siRNA sense strand
aaacagaaccucgauuacu

SEQ ID NO: 445913 - RNA, 19 nt, Homo sapiens
  misc_RNA (1)...(19): siRNA sense strand
uaccugagcaccaugaaga

SEQ ID NO: 445914 - RNA, 19 nt, Homo sapiens
  misc_RNA (1)...(19): siRNA sense strand
agaguucauucucauguuc

SEQ ID NO: 445915 - RNA, 19 nt, Homo sapiens
  misc_RNA (1)...(19): siRNA sense strand
gauguacgcgcaguccaaa

SEQ ID NO: 445916 - RNA, 19 nt, Homo sapiens
  misc_RNA (1)...(19): siRNA sense strand
ccagaucggcuccuucuac

SEQ ID NO: 445917 - RNA, 19 nt, Homo sapiens
  misc_RNA (1)...(19): siRNA sense strand
uugguaagauguucaaguc

SEQ ID NO: 445918 - RNA, 19 nt, Homo sapiens
  misc_RNA (1)...(19): siRNA sense strand
acgugcagcuggaggauga

SEQ ID NO: 445919 - RNA, 19 nt, Homo sapiens
  misc_RNA (1)...(19): siRNA sense strand
gaaacugaaggacaaagac

SEQ ID NO: 445920 - RNA, 19 nt, Homo sapiens
  misc_RNA (1)...(19): siRNA sense strand
caaacagaaccucgauuac

SEQ ID NO: 445921 - RNA, 19 nt, Homo sapiens
  misc_RNA (1)...(19): siRNA sense strand
cuucaaaccgucccucuuc

SEQ ID NO: 445922 - RNA, 19 nt, Homo sapiens
  misc_RNA (1)...(19): siRNA sense strand
cuucggcagugacagagaa

SEQ ID NO: 445923 - RNA, 19 nt, Homo sapiens
  misc_RNA (1)...(19): siRNA sense strand
gacuggagcgguucuucuu

SEQ ID NO: 445924 - RNA, 19 nt, Homo sapiens
  misc_RNA (1)...(19): siRNA sense strand
cauauucugugggugaaag

SEQ ID NO: 445925 - RNA, 19 nt, Homo sapiens
  misc_RNA (1)...(19): siRNA sense strand
agaaacugaaggacaaaga

SEQ ID NO: 445926 - RNA, 19 nt, Homo sapiens
  misc_RNA (1)...(19): siRNA sense strand
gaccaaacagaaccucgau

SEQ ID NO: 445927 - RNA, 19 nt, Homo sapiens
  misc_RNA (1)...(19): siRNA sense strand
gaaggaugcgaagcacugu

SEQ ID NO: 445928 - RNA, 19 nt, Homo sapiens
  misc_RNA (1)...(19): siRNA sense strand
aagagggccgugucagaaa

SEQ ID NO: 445929 - RNA, 19 nt, Homo sapiens
  misc_RNA (1)...(19): siRNA sense strand
cgacggcuaccuccagauc

SEQ ID NO: 445930 - RNA, 19 nt, Homo sapiens
  misc_RNA (1)...(19): siRNA sense strand
ucgacaacccucagucaga

SEQ ID NO: 445931 - RNA, 19 nt, Homo sapiens
  misc_RNA (1)...(19): siRNA sense strand
aggacaagcucuucaacac

SEQ ID NO: 445932 - RNA, 19 nt, Homo sapiens
  misc_RNA (1)...(19): siRNA sense strand
acucugcacucgcucaucu

SEQ ID NO: 445933 - RNA, 19 nt, Homo sapiens
  misc_RNA (1)...(19): siRNA sense strand
ugagccugauuguagaguu

SEQ ID NO: 445934 - RNA, 19 nt, Homo sapiens
  misc_RNA (1)...(19): siRNA sense strand
guccaaaggcaucuacuac

SEQ ID NO: 445935 - RNA, 19 nt, Homo sapiens
  misc_RNA (1)...(19): siRNA sense strand
caagauccagaaacugaag

SEQ ID NO: 445936 - RNA, 19 nt, Homo sapiens
  misc_RNA (1)...(19): siRNA sense strand
gauuguagaguucauucuc

SEQ ID NO: 445937 - RNA, 19 nt, Homo sapiens
  misc_RNA (1)...(19): siRNA sense strand
gaaacaagcccuuuaaguu

SEQ ID NO: 445938 - RNA, 19 nt, Homo sapiens
  misc_RNA (1)...(19): siRNA sense strand
aacaagcccuuuaaguuua

SEQ ID NO: 445939 - RNA, 19 nt, Homo sapiens
  misc_RNA (1)...(19): siRNA sense strand
gcuugaagauggaaagaaa

SEQ ID NO: 445940 - RNA, 19 nt, Homo sapiens
  misc_RNA (1)...(19): siRNA sense strand
gagccaaacugacuauauc

SEQ ID NO: 445941 - RNA, 19 nt, Homo sapiens
  misc_RNA (1)...(19): siRNA sense strand
gaagauggaaagaaauuug

SEQ ID NO: 445942 - RNA, 19 nt, Homo sapiens
  misc_RNA (1)...(19): siRNA sense strand
gacagaaacaagcccuuua

SEQ ID NO: 445943 - RNA, 19 nt, Homo sapiens
  misc_RNA (1)...(19): siRNA sense strand
ggacagaaacaagcccuuu

SEQ ID NO: 445944 - RNA, 19 nt, Homo sapiens
  misc_RNA (1)...(19): siRNA sense strand
acagaaacaagcccuuuaa

SEQ ID NO: 445945 - RNA, 19 nt, Homo sapiens
  misc_RNA (1)...(19): siRNA sense strand
acaccgggaugcuugaaga

SEQ ID NO: 445946 - RNA, 19 nt, Homo sapiens
  misc_RNA (1)...(19): siRNA sense strand
gauccgaggcugggaagaa

SEQ ID NO: 445947 - RNA, 19 nt, Homo sapiens
  misc_RNA (1)...(19): siRNA sense strand
gcacuacaccgggaugcuu

SEQ ID NO: 445948 - RNA, 19 nt, Homo sapiens
  misc_RNA (1)...(19): siRNA sense strand
acaagcccuuuaaguuuau

SEQ ID NO: 445949 - RNA, 19 nt, Homo sapiens
  misc_RNA (1)...(19): siRNA sense strand
agaaacaagcccuuuaagu

SEQ ID NO: 445950 - RNA, 19 nt, Homo sapiens
  misc_RNA (1)...(19): siRNA sense strand
gagugcagguggaaaccau

SEQ ID NO: 445951 - RNA, 19 nt, Homo sapiens
  misc_RNA (1)...(19): siRNA sense strand
agaccugcguggugcacua

SEQ ID NO: 445952 - RNA, 19 nt, Homo sapiens
  misc_RNA (1)...(19): siRNA sense strand
ggcaucaucccaccacaug

SEQ ID NO: 445953 - RNA, 19 nt, Homo sapiens
  misc_RNA (1)...(19): siRNA sense strand
ccacucucgucuucgaugu

SEQ ID NO: 445954 - RNA, 19 nt, Homo sapiens
  misc_RNA (1)...(19): siRNA sense strand
cagagagccaaacugacua

SEQ ID NO: 445955 - RNA, 19 nt, Homo sapiens
  misc_RNA (1)...(19): siRNA sense strand
cgucuucgauguggagcuu

SEQ ID NO: 445956 - RNA, 19 nt, Homo sapiens
  misc_RNA (1)...(19): siRNA sense strand
acaugccacucucgucuuc

SEQ ID NO: 445957 - RNA, 19 nt, Homo sapiens
  misc_RNA (1)...(19): siRNA sense strand
gagagccaaacugacuaua

SEQ ID NO: 445958 - RNA, 19 nt, Homo sapiens
  misc_RNA (1)...(19): siRNA sense strand
agagccaaacugacuauau

SEQ ID NO: 445959 - RNA, 19 nt, Homo sapiens
  misc_RNA (1)...(19): siRNA sense strand
gaugagugugggucagaga

SEQ ID NO: 445960 - RNA, 19 nt, Homo sapiens
  misc_RNA (1)...(19): siRNA sense strand
cgggaugcuugaagaugga

SEQ ID NO: 445961 - RNA, 19 nt, Homo sapiens
  misc_RNA (1)...(19): siRNA sense strand
gaaacaagcccuuuaaguu

SEQ ID NO: 445962 - RNA, 19 nt, Homo sapiens
  misc_RNA (1)...(19): siRNA sense strand
aacaagcccuuuaaguuua

SEQ ID NO: 445963 - RNA, 19 nt, Homo sapiens
  misc_RNA (1)...(19): siRNA sense strand
gcuugaagauggaaagaaa

SEQ ID NO: 445964 - RNA, 19 nt, Homo sapiens
  misc_RNA (1)...(19): siRNA sense strand
gagccaaacugacuauauc

SEQ ID NO: 445965 - RNA, 19 nt, Homo sapiens
  misc_RNA (1)...(19): siRNA sense strand
gaagauggaaagaaauuug

SEQ ID NO: 445966 - RNA, 19 nt, Homo sapiens
  misc_RNA (1)...(19): siRNA sense strand
gacagaaacaagcccuuua

SEQ ID NO: 445967 - RNA, 19 nt, Homo sapiens
  misc_RNA (1)...(19): siRNA sense strand
ggacagaaacaagcccuuu

SEQ ID NO: 445968 - RNA, 19 nt, Homo sapiens
  misc_RNA (1)...(19): siRNA sense strand
acagaaacaagcccuuuaa

SEQ ID NO: 445969 - RNA, 19 nt, Homo sapiens
  misc_RNA (1)...(19): siRNA sense strand
acaccgggaugcuugaaga

SEQ ID NO: 445970 - RNA, 19 nt, Homo sapiens
  misc_RNA (1)...(19): siRNA sense strand
gauccgaggcugggaagaa

SEQ ID NO: 445971 - RNA, 19 nt, Homo sapiens
  misc_RNA (1)...(19): siRNA sense strand
gcacuacaccgggaugcuu

SEQ ID NO: 445972 - RNA, 19 nt, Homo sapiens
  misc_RNA (1)...(19): siRNA sense strand
acaagcccuuuaaguuuau

SEQ ID NO: 445973 - RNA, 19 nt, Homo sapiens
  misc_RNA (1)...(19): siRNA sense strand
agaaacaagcccuuuaagu

SEQ ID NO: 445974 - RNA, 19 nt, Homo sapiens
  misc_RNA (1)...(19): siRNA sense strand
gagugcagguggaaaccau

SEQ ID NO: 445975 - RNA, 19 nt, Homo sapiens
  misc_RNA (1)...(19): siRNA sense strand
agaccugcguggugcacua

SEQ ID NO: 445976 - RNA, 19 nt, Homo sapiens
  misc_RNA (1)...(19): siRNA sense strand
ggcaucaucccaccacaug

SEQ ID NO: 445977 - RNA, 19 nt, Homo sapiens
  misc_RNA (1)...(19): siRNA sense strand
ccacucucgucuucgaugu

SEQ ID NO: 445978 - RNA, 19 nt, Homo sapiens
  misc_RNA (1)...(19): siRNA sense strand
cagagagccaaacugacua

SEQ ID NO: 445979 - RNA, 19 nt, Homo sapiens
  misc_RNA (1)...(19): siRNA sense strand
cgucuucgauguggagcuu

SEQ ID NO: 445980 - RNA, 19 nt, Homo sapiens
  misc_RNA (1)...(19): siRNA sense strand
acaugccacucucgucuuc

SEQ ID NO: 445981 - RNA, 19 nt, Homo sapiens
  misc_RNA (1)...(19): siRNA sense strand
gagagccaaacugacuaua

SEQ ID NO: 445982 - RNA, 19 nt, Homo sapiens
  misc_RNA (1)...(19): siRNA sense strand
agagccaaacugacuauau

SEQ ID NO: 445983 - RNA, 19 nt, Homo sapiens
  misc_RNA (1)...(19): siRNA sense strand
gaugagugugggucagaga

SEQ ID NO: 445984 - RNA, 19 nt, Homo sapiens
  misc_RNA (1)...(19): siRNA sense strand
cgggaugcuugaagaugga

SEQ ID NO: 445985 - RNA, 19 nt, Homo sapiens
  misc_RNA (1)...(19): siRNA sense strand
ggagacggccuucguguuc

SEQ ID NO: 445986 - RNA, 19 nt, Homo sapiens
  misc_RNA (1)...(19): siRNA sense strand
gcgugcagcucgaagagaa

SEQ ID NO: 445987 - RNA, 19 nt, Homo sapiens
  misc_RNA (1)...(19): siRNA sense strand
ccacuggugcugcguagua

SEQ ID NO: 445988 - RNA, 19 nt, Homo sapiens
  misc_RNA (1)...(19): siRNA sense strand
gagaagucgaggcucuuua

SEQ ID NO: 445989 - RNA, 19 nt, Homo sapiens
  misc_RNA (1)...(19): siRNA sense strand
ggaagugguggcagagcua

SEQ ID NO: 445990 - RNA, 19 nt, Homo sapiens
  misc_RNA (1)...(19): siRNA sense strand
gagagugccaguuccaguu

SEQ ID NO: 445991 - RNA, 19 nt, Homo sapiens
  misc_RNA (1)...(19): siRNA sense strand
agucgaggcucuuuaugga

SEQ ID NO: 445992 - RNA, 19 nt, Homo sapiens
  misc_RNA (1)...(19): siRNA sense strand
ggucgcgccugcaauagca

SEQ ID NO: 445993 - RNA, 19 nt, Homo sapiens
  misc_RNA (1)...(19): siRNA sense strand
acgcaggccuguucuaugg

SEQ ID NO: 445994 - RNA, 19 nt, Homo sapiens
  misc_RNA (1)...(19): siRNA sense strand
gaagucgaggcucuuuaug

SEQ ID NO: 445995 - RNA, 19 nt, Homo sapiens
  misc_RNA (1)...(19): siRNA sense strand
cagaagcugccuccauuuc

SEQ ID NO: 445996 - RNA, 19 nt, Homo sapiens
  misc_RNA (1)...(19): siRNA sense strand
agaagucgaggcucuuuau

SEQ ID NO: 445997 - RNA, 19 nt, Homo sapiens
  misc_RNA (1)...(19): siRNA sense strand
gggagacggccuucguguu

SEQ ID NO: 445998 - RNA, 19 nt, Homo sapiens
  misc_RNA (1)...(19): siRNA sense strand
cgagaagucgaggcucuuu

SEQ ID NO: 445999 - RNA, 19 nt, Homo sapiens
  misc_RNA (1)...(19): siRNA sense strand
ccacagcaaggccuuugga

SEQ ID NO: 446000 - RNA, 19 nt, Homo sapiens
  misc_RNA (1)...(19): siRNA sense strand
ucacgcaggccuguucuau

SEQ ID NO: 446001 - RNA, 19 nt, Homo sapiens
  misc_RNA (1)...(19): siRNA sense strand
gaagacgcuuuacauaauu

SEQ ID NO: 446002 - RNA, 19 nt, Homo sapiens
  misc_RNA (1)...(19): siRNA sense strand
gaaaggaggagaucaagaa

SEQ ID NO: 446003 - RNA, 19 nt, Homo sapiens
  misc_RNA (1)...(19): siRNA sense strand
ugaagacgcuuuacauaau

SEQ ID NO: 446004 - RNA, 19 nt, Homo sapiens
  misc_RNA (1)...(19): siRNA sense strand
ggaggaauguguacaguuc

SEQ ID NO: 446005 - RNA, 19 nt, Homo sapiens
  misc_RNA (1)...(19): siRNA sense strand
guacaguucuucacgcuau

SEQ ID NO: 446006 - RNA, 19 nt, Homo sapiens
  misc_RNA (1)...(19): siRNA sense strand
caagaggauuugcuuaugu

SEQ ID NO: 446007 - RNA, 19 nt, Homo sapiens
  misc_RNA (1)...(19): siRNA sense strand
cgaaagacaccaaaucaga

SEQ ID NO: 446008 - RNA, 19 nt, Homo sapiens
  misc_RNA (1)...(19): siRNA sense strand
gcugaagacgcuuuacaua

SEQ ID NO: 446009 - RNA, 19 nt, Homo sapiens
  misc_RNA (1)...(19): siRNA sense strand
gaucguauaguccuagaaa

SEQ ID NO: 446010 - RNA, 19 nt, Homo sapiens
  misc_RNA (1)...(19): siRNA sense strand
gaaagacaccaaaucagau

SEQ ID NO: 446011 - RNA, 19 nt, Homo sapiens
  misc_RNA (1)...(19): siRNA sense strand
gacagaaaguggauuugug

SEQ ID NO: 446012 - RNA, 19 nt, Homo sapiens
  misc_RNA (1)...(19): siRNA sense strand
ccaagaggauuugcuuaug

SEQ ID NO: 446013 - RNA, 19 nt, Homo sapiens
  misc_RNA (1)...(19): siRNA sense strand
gcagauugaaauacaguuu

SEQ ID NO: 446014 - RNA, 19 nt, Homo sapiens
  misc_RNA (1)...(19): siRNA sense strand
ggacagaaaguggauuugu

SEQ ID NO: 446015 - RNA, 19 nt, Homo sapiens
  misc_RNA (1)...(19): siRNA sense strand
cugaagacgcuuuacauaa

SEQ ID NO: 446016 - RNA, 19 nt, Homo sapiens
  misc_RNA (1)...(19): siRNA sense strand
gacggcagauugaaauaca

SEQ ID NO: 446017 - RNA, 19 nt, Homo sapiens
  misc_RNA (1)...(19): siRNA sense strand
gaucgaaagacaccaaauc

SEQ ID NO: 446018 - RNA, 19 nt, Homo sapiens
  misc_RNA (1)...(19): siRNA sense strand
uaugacagauacagacguu

SEQ ID NO: 446019 - RNA, 19 nt, Homo sapiens
  misc_RNA (1)...(19): siRNA sense strand
ucuagaagccgaaguuaug

SEQ ID NO: 446020 - RNA, 19 nt, Homo sapiens
  misc_RNA (1)...(19): siRNA sense strand
aagaggauuugcuuauguu

SEQ ID NO: 446021 - RNA, 19 nt, Homo sapiens
  misc_RNA (1)...(19): siRNA sense strand
gaagucggucuuuugauua

SEQ ID NO: 446022 - RNA, 19 nt, Homo sapiens
  misc_RNA (1)...(19): siRNA sense strand
guuaugguccuauaguuga

SEQ ID NO: 446023 - RNA, 19 nt, Homo sapiens
  misc_RNA (1)...(19): siRNA sense strand
ggcgugaauuuggucguua

SEQ ID NO: 446024 - RNA, 19 nt, Homo sapiens
  misc_RNA (1)...(19): siRNA sense strand
gacaccaaaucagaugaaa

SEQ ID NO: 446025 - RNA, 19 nt, Homo sapiens
  misc_RNA (1)...(19): siRNA sense strand
guucuucacgcuaugauga

SEQ ID NO: 446026 - RNA, 19 nt, Homo sapiens
  misc_RNA (1)...(19): siRNA sense strand
aggaggagaucaagaaguc

SEQ ID NO: 446027 - RNA, 19 nt, Homo sapiens
  misc_RNA (1)...(19): siRNA sense strand
agauacagacguucuagaa

SEQ ID NO: 446028 - RNA, 19 nt, Homo sapiens
  misc_RNA (1)...(19): siRNA sense strand
aggauuugcuuauguucaa

SEQ ID NO: 446029 - RNA, 19 nt, Homo sapiens
  misc_RNA (1)...(19): siRNA sense strand
ggaagaccacggcguagca

SEQ ID NO: 446030 - RNA, 19 nt, Homo sapiens
  misc_RNA (1)...(19): siRNA sense strand
guauaguccuagaaacagu

SEQ ID NO: 446031 - RNA, 19 nt, Homo sapiens
  misc_RNA (1)...(19): siRNA sense strand
ugaauuuggucguuauggu

SEQ ID NO: 446032 - RNA, 19 nt, Homo sapiens
  misc_RNA (1)...(19): siRNA sense strand
agacuugcggcgugaauuu

SEQ ID NO: 446033 - RNA, 19 nt, Homo sapiens
  misc_RNA (1)...(19): siRNA sense strand
gcgugaauuuggucguuau

SEQ ID NO: 446034 - RNA, 19 nt, Homo sapiens
  misc_RNA (1)...(19): siRNA sense strand
ggauguucgugaugcugaa

SEQ ID NO: 446035 - RNA, 19 nt, Homo sapiens
  misc_RNA (1)...(19): siRNA sense strand
cuaugaugauuaugacaga

SEQ ID NO: 446036 - RNA, 19 nt, Homo sapiens
  misc_RNA (1)...(19): siRNA sense strand
cggcguagcagaagccauu

SEQ ID NO: 446037 - RNA, 19 nt, Homo sapiens
  misc_RNA (1)...(19): siRNA sense strand
agaagucggucuuuugauu

SEQ ID NO: 446038 - RNA, 19 nt, Homo sapiens
  misc_RNA (1)...(19): siRNA sense strand
uccuauaguugauguguau

SEQ ID NO: 446039 - RNA, 19 nt, Homo sapiens
  misc_RNA (1)...(19): siRNA sense strand
gaagacuugcggcgugaau

SEQ ID NO: 446040 - RNA, 19 nt, Homo sapiens
  misc_RNA (1)...(19): siRNA sense strand
agaagaucguauaguccua

SEQ ID NO: 446041 - RNA, 19 nt, Homo sapiens
  misc_RNA (1)...(19): siRNA sense strand
ugauguguauguuccacuu

SEQ ID NO: 446042 - RNA, 19 nt, Homo sapiens
  misc_RNA (1)...(19): siRNA sense strand
gaauguguacaguucuuca

SEQ ID NO: 446043 - RNA, 19 nt, Homo sapiens
  misc_RNA (1)...(19): siRNA sense strand
aaagacaccaaaucagaug

SEQ ID NO: 446044 - RNA, 19 nt, Homo sapiens
  misc_RNA (1)...(19): siRNA sense strand
guccuauaguugaugugua

SEQ ID NO: 446045 - RNA, 19 nt, Homo sapiens
  misc_RNA (1)...(19): siRNA sense strand
uaugaaaggaggagaucaa

SEQ ID NO: 446046 - RNA, 19 nt, Homo sapiens
  misc_RNA (1)...(19): siRNA sense strand
gaggauuugcuuauguuca

SEQ ID NO: 446047 - RNA, 19 nt, Homo sapiens
  misc_RNA (1)...(19): siRNA sense strand
guucuagaagccgaaguua

SEQ ID NO: 446048 - RNA, 19 nt, Homo sapiens
  misc_RNA (1)...(19): siRNA sense strand
gauacagacguucuagaag

SEQ ID NO: 446049 - RNA, 19 nt, Homo sapiens
  misc_RNA (1)...(19): siRNA sense strand
gacagauacagacguucua

SEQ ID NO: 446050 - RNA, 19 nt, Homo sapiens
  misc_RNA (1)...(19): siRNA sense strand
cagauugaaauacaguuug

SEQ ID NO: 446051 - RNA, 19 nt, Homo sapiens
  misc_RNA (1)...(19): siRNA sense strand
agaagccgaaguuaugaaa

SEQ ID NO: 446052 - RNA, 19 nt, Homo sapiens
  misc_RNA (1)...(19): siRNA sense strand
gggaggaauguguacaguu

SEQ ID NO: 446053 - RNA, 19 nt, Homo sapiens
  misc_RNA (1)...(19): siRNA sense strand
aagccgaaguuaugaaagg

SEQ ID NO: 446054 - RNA, 19 nt, Homo sapiens
  misc_RNA (1)...(19): siRNA sense strand
ggauuugcuuauguucaau

SEQ ID NO: 446055 - RNA, 19 nt, Homo sapiens
  misc_RNA (1)...(19): siRNA sense strand
ccaaggaagggaggaaugu

SEQ ID NO: 446056 - RNA, 19 nt, Homo sapiens
  misc_RNA (1)...(19): siRNA sense strand
ucagaugaaagccaaggaa

SEQ ID NO: 446057 - RNA, 19 nt, Homo sapiens
  misc_RNA (1)...(19): siRNA sense strand
ggacggcagauugaaauac

SEQ ID NO: 446058 - RNA, 19 nt, Homo sapiens
  misc_RNA (1)...(19): siRNA sense strand
guccaagaggauuugcuua

SEQ ID NO: 446059 - RNA, 19 nt, Homo sapiens
  misc_RNA (1)...(19): siRNA sense strand
ugaaaggaggagaucaaga

SEQ ID NO: 446060 - RNA, 19 nt, Homo sapiens
  misc_RNA (1)...(19): siRNA sense strand
uguauguuccacuugauuu

SEQ ID NO: 446061 - RNA, 19 nt, Homo sapiens
  misc_RNA (1)...(19): siRNA sense strand
gaagggaggaauguguaca

SEQ ID NO: 446062 - RNA, 19 nt, Homo sapiens
  misc_RNA (1)...(19): siRNA sense strand
caccaaaucagaugaaagc

SEQ ID NO: 446063 - RNA, 19 nt, Homo sapiens
  misc_RNA (1)...(19): siRNA sense strand
ucguuaugguccuauaguu

SEQ ID NO: 446064 - RNA, 19 nt, Homo sapiens
  misc_RNA (1)...(19): siRNA sense strand
uauaguccuagaaacagua

SEQ ID NO: 446065 - RNA, 19 nt, Homo sapiens
  misc_RNA (1)...(19): siRNA sense strand
cuagaagccgaaguuauga

SEQ ID NO: 446066 - RNA, 19 nt, Homo sapiens
  misc_RNA (1)...(19): siRNA sense strand
ugacagauacagacguucu

SEQ ID NO: 446067 - RNA, 19 nt, Homo sapiens
  misc_RNA (1)...(19): siRNA sense strand
uccaagaggauuugcuuau

SEQ ID NO: 446068 - RNA, 19 nt, Homo sapiens
  misc_RNA (1)...(19): siRNA sense strand
cggcgugaauuuggucguu

SEQ ID NO: 446069 - RNA, 19 nt, Homo sapiens
  misc_RNA (1)...(19): siRNA sense strand
aggaauguguacaguucuu

SEQ ID NO: 446070 - RNA, 19 nt, Homo sapiens
  misc_RNA (1)...(19): siRNA sense strand
ggaagggaggaauguguac

SEQ ID NO: 446071 - RNA, 19 nt, Homo sapiens
  misc_RNA (1)...(19): siRNA sense strand
guggacggcagauugaaau

SEQ ID NO: 446072 - RNA, 19 nt, Homo sapiens
  misc_RNA (1)...(19): siRNA sense strand
caacuauagaagaucguau

SEQ ID NO: 446073 - RNA, 19 nt, Homo sapiens
  misc_RNA (1)...(19): siRNA sense strand
cacgcuaugaugauuauga

SEQ ID NO: 446074 - RNA, 19 nt, Homo sapiens
  misc_RNA (1)...(19): siRNA sense strand
ggaauguguacaguucuuc

SEQ ID NO: 446075 - RNA, 19 nt, Homo sapiens
  misc_RNA (1)...(19): siRNA sense strand
gaagacgcuuuacauaauu

SEQ ID NO: 446076 - RNA, 19 nt, Homo sapiens
  misc_RNA (1)...(19): siRNA sense strand
gaaaggaggagaucaagaa

SEQ ID NO: 446077 - RNA, 19 nt, Homo sapiens
  misc_RNA (1)...(19): siRNA sense strand
ugaagacgcuuuacauaau

SEQ ID NO: 446078 - RNA, 19 nt, Homo sapiens
  misc_RNA (1)...(19): siRNA sense strand
ggaggaauguguacaguuc

SEQ ID NO: 446079 - RNA, 19 nt, Homo sapiens
  misc_RNA (1)...(19): siRNA sense strand
guacaguucuucacgcuau

SEQ ID NO: 446080 - RNA, 19 nt, Homo sapiens
  misc_RNA (1)...(19): siRNA sense strand
caagaggauuugcuuaugu

SEQ ID NO: 446081 - RNA, 19 nt, Homo sapiens
  misc_RNA (1)...(19): siRNA sense strand
cgaaagacaccaaaucaga

SEQ ID NO: 446082 - RNA, 19 nt, Homo sapiens
  misc_RNA (1)...(19): siRNA sense strand
gcugaagacgcuuuacaua

SEQ ID NO: 446083 - RNA, 19 nt, Homo sapiens
  misc_RNA (1)...(19): siRNA sense strand
gaucguauaguccuagaaa

SEQ ID NO: 446084 - RNA, 19 nt, Homo sapiens
  misc_RNA (1)...(19): siRNA sense strand
gaaagacaccaaaucagau

SEQ ID NO: 446085 - RNA, 19 nt, Homo sapiens
  misc_RNA (1)...(19): siRNA sense strand
gacagaaaguggauuugug

SEQ ID NO: 446086 - RNA, 19 nt, Homo sapiens
  misc_RNA (1)...(19): siRNA sense strand
ccaagaggauuugcuuaug

SEQ ID NO: 446087 - RNA, 19 nt, Homo sapiens
  misc_RNA (1)...(19): siRNA sense strand
gcagauugaaauacaguuu

SEQ ID NO: 446088 - RNA, 19 nt, Homo sapiens
  misc_RNA (1)...(19): siRNA sense strand
cagaagccauuccgacaau

SEQ ID NO: 446089 - RNA, 19 nt, Homo sapiens
  misc_RNA (1)...(19): siRNA sense strand
ggacagaaaguggauuugu

SEQ ID NO: 446090 - RNA, 19 nt, Homo sapiens
  misc_RNA (1)...(19): siRNA sense strand
cugaagacgcuuuacauaa

SEQ ID NO: 446091 - RNA, 19 nt, Homo sapiens
  misc_RNA (1)...(19): siRNA sense strand
gacggcagauugaaauaca

SEQ ID NO: 446092 - RNA, 19 nt, Homo sapiens
  misc_RNA (1)...(19): siRNA sense strand
gaucgaaagacaccaaauc

SEQ ID NO: 446093 - RNA, 19 nt, Homo sapiens
  misc_RNA (1)...(19): siRNA sense strand
gcagaagccauuccgacaa

SEQ ID NO: 446094 - RNA, 19 nt, Homo sapiens
  misc_RNA (1)...(19): siRNA sense strand
uaugacagauacagacguu

SEQ ID NO: 446095 - RNA, 19 nt, Homo sapiens
  misc_RNA (1)...(19): siRNA sense strand
ucuagaagccgaaguuaug

SEQ ID NO: 446096 - RNA, 19 nt, Homo sapiens
  misc_RNA (1)...(19): siRNA sense strand
aagaggauuugcuuauguu

SEQ ID NO: 446097 - RNA, 19 nt, Homo sapiens
  misc_RNA (1)...(19): siRNA sense strand
gaagucggucuuuugauua

SEQ ID NO: 446098 - RNA, 19 nt, Homo sapiens
  misc_RNA (1)...(19): siRNA sense strand
guuaugguccuauaguuga

SEQ ID NO: 446099 - RNA, 19 nt, Homo sapiens
  misc_RNA (1)...(19): siRNA sense strand
gacaccaaaucagaugaaa

SEQ ID NO: 446100 - RNA, 19 nt, Homo sapiens
  misc_RNA (1)...(19): siRNA sense strand
ggcgugaauuuggucguua

SEQ ID NO: 446101 - RNA, 19 nt, Homo sapiens
  misc_RNA (1)...(19): siRNA sense strand
guucuucacgcuaugauga

SEQ ID NO: 446102 - RNA, 19 nt, Homo sapiens
  misc_RNA (1)...(19): siRNA sense strand
aggaggagaucaagaaguc

SEQ ID NO: 446103 - RNA, 19 nt, Homo sapiens
  misc_RNA (1)...(19): siRNA sense strand
agauacagacguucuagaa

SEQ ID NO: 446104 - RNA, 19 nt, Homo sapiens
  misc_RNA (1)...(19): siRNA sense strand
aggauuugcuuauguucaa

SEQ ID NO: 446105 - RNA, 19 nt, Homo sapiens
  misc_RNA (1)...(19): siRNA sense strand
ugaauuuggucguuauggu

SEQ ID NO: 446106 - RNA, 19 nt, Homo sapiens
  misc_RNA (1)...(19): siRNA sense strand
ggaagaccacggcguagca

SEQ ID NO: 446107 - RNA, 19 nt, Homo sapiens
  misc_RNA (1)...(19): siRNA sense strand
guauaguccuagaaacagu

SEQ ID NO: 446108 - RNA, 19 nt, Homo sapiens
  misc_RNA (1)...(19): siRNA sense strand
agacuugcggcgugaauuu

SEQ ID NO: 446109 - RNA, 19 nt, Homo sapiens
  misc_RNA (1)...(19): siRNA sense strand
gcgugaauuuggucguuau

SEQ ID NO: 446110 - RNA, 19 nt, Homo sapiens
  misc_RNA (1)...(19): siRNA sense strand
ggauguucgugaugcugaa

SEQ ID NO: 446111 - RNA, 19 nt, Homo sapiens
  misc_RNA (1)...(19): siRNA sense strand
cuaugaugauuaugacaga

SEQ ID NO: 446112 - RNA, 19 nt, Homo sapiens
  misc_RNA (1)...(19): siRNA sense strand
cggcguagcagaagccauu

SEQ ID NO: 446113 - RNA, 19 nt, Homo sapiens
  misc_RNA (1)...(19): siRNA sense strand
agaagucggucuuuugauu

SEQ ID NO: 446114 - RNA, 19 nt, Homo sapiens
  misc_RNA (1)...(19): siRNA sense strand
uccuauaguugauguguau

SEQ ID NO: 446115 - RNA, 19 nt, Homo sapiens
  misc_RNA (1)...(19): siRNA sense strand
gaagacuugcggcgugaau

SEQ ID NO: 446116 - RNA, 19 nt, Homo sapiens
  misc_RNA (1)...(19): siRNA sense strand
agaagaucguauaguccua

SEQ ID NO: 446117 - RNA, 19 nt, Homo sapiens
  misc_RNA (1)...(19): siRNA sense strand
aaagacaccaaaucagaug

SEQ ID NO: 446118 - RNA, 19 nt, Homo sapiens
  misc_RNA (1)...(19): siRNA sense strand
guccuauaguugaugugua

SEQ ID NO: 446119 - RNA, 19 nt, Homo sapiens
  misc_RNA (1)...(19): siRNA sense strand
ugauguguauguuccacuu

SEQ ID NO: 446120 - RNA, 19 nt, Homo sapiens
  misc_RNA (1)...(19): siRNA sense strand
gaauguguacaguucuuca

SEQ ID NO: 446121 - RNA, 19 nt, Homo sapiens
  misc_RNA (1)...(19): siRNA sense strand
uaugaaaggaggagaucaa

SEQ ID NO: 446122 - RNA, 19 nt, Homo sapiens
  misc_RNA (1)...(19): siRNA sense strand
gaggauuugcuuauguuca

SEQ ID NO: 446123 - RNA, 19 nt, Homo sapiens
  misc_RNA (1)...(19): siRNA sense strand
guucuagaagccgaaguua

SEQ ID NO: 446124 - RNA, 19 nt, Homo sapiens
  misc_RNA (1)...(19): siRNA sense strand
gauacagacguucuagaag

SEQ ID NO: 446125 - RNA, 19 nt, Homo sapiens
  misc_RNA (1)...(19): siRNA sense strand
gacagauacagacguucua

SEQ ID NO: 446126 - RNA, 19 nt, Homo sapiens
  misc_RNA (1)...(19): siRNA sense strand
cagauugaaauacaguuug

SEQ ID NO: 446127 - RNA, 19 nt, Homo sapiens
  misc_RNA (1)...(19): siRNA sense strand
agaagccgaaguuaugaaa

SEQ ID NO: 446128 - RNA, 19 nt, Homo sapiens
  misc_RNA (1)...(19): siRNA sense strand
gggaggaauguguacaguu

SEQ ID NO: 446129 - RNA, 19 nt, Homo sapiens
  misc_RNA (1)...(19): siRNA sense strand
aagccgaaguuaugaaagg

SEQ ID NO: 446130 - RNA, 19 nt, Homo sapiens
  misc_RNA (1)...(19): siRNA sense strand
ggauuugcuuauguucaau

SEQ ID NO: 446131 - RNA, 19 nt, Homo sapiens
  misc_RNA (1)...(19): siRNA sense strand
ccaaggaagggaggaaugu

SEQ ID NO: 446132 - RNA, 19 nt, Homo sapiens
  misc_RNA (1)...(19): siRNA sense strand
ucagaugaaagccaaggaa

SEQ ID NO: 446133 - RNA, 19 nt, Homo sapiens
  misc_RNA (1)...(19): siRNA sense strand
ggacggcagauugaaauac

SEQ ID NO: 446134 - RNA, 19 nt, Homo sapiens
  misc_RNA (1)...(19): siRNA sense strand
guccaagaggauuugcuua

SEQ ID NO: 446135 - RNA, 19 nt, Homo sapiens
  misc_RNA (1)...(19): siRNA sense strand
ugaaaggaggagaucaaga

SEQ ID NO: 446136 - RNA, 19 nt, Homo sapiens
  misc_RNA (1)...(19): siRNA sense strand
caccaaaucagaugaaagc

SEQ ID NO: 446137 - RNA, 19 nt, Homo sapiens
  misc_RNA (1)...(19): siRNA sense strand
uguauguuccacuugauuu

SEQ ID NO: 446138 - RNA, 19 nt, Homo sapiens
  misc_RNA (1)...(19): siRNA sense strand
gaagggaggaauguguaca

SEQ ID NO: 446139 - RNA, 19 nt, Homo sapiens
  misc_RNA (1)...(19): siRNA sense strand
ucguuaugguccuauaguu

SEQ ID NO: 446140 - RNA, 19 nt, Homo sapiens
  misc_RNA (1)...(19): siRNA sense strand
uauaguccuagaaacagua

SEQ ID NO: 446141 - RNA, 19 nt, Homo sapiens
  misc_RNA (1)...(19): siRNA sense strand
uccaagaggauuugcuuau

SEQ ID NO: 446142 - RNA, 19 nt, Homo sapiens
  misc_RNA (1)...(19): siRNA sense strand
cuagaagccgaaguuauga

SEQ ID NO: 446143 - RNA, 19 nt, Homo sapiens
  misc_RNA (1)...(19): siRNA sense strand
ugacagauacagacguucu

SEQ ID NO: 446144 - RNA, 19 nt, Homo sapiens
  misc_RNA (1)...(19): siRNA sense strand
cggcgugaauuuggucguu

SEQ ID NO: 446145 - RNA, 19 nt, Homo sapiens
  misc_RNA (1)...(19): siRNA sense strand
aggaauguguacaguucuu

SEQ ID NO: 446146 - RNA, 19 nt, Homo sapiens
  misc_RNA (1)...(19): siRNA sense strand
ggaagggaggaauguguac

SEQ ID NO: 446147 - RNA, 19 nt, Homo sapiens
  misc_RNA (1)...(19): siRNA sense strand
guggacggcagauugaaau

SEQ ID NO: 446148 - RNA, 19 nt, Homo sapiens
  misc_RNA (1)...(19): siRNA sense strand
caacuauagaagaucguau

SEQ ID NO: 446149 - RNA, 19 nt, Homo sapiens
  misc_RNA (1)...(19): siRNA sense strand
cacgcuaugaugauuauga

SEQ ID NO: 446150 - RNA, 19 nt, Homo sapiens
  misc_RNA (1)...(19): siRNA sense strand
ggaauguguacaguucuuc

SEQ ID NO: 446151 - RNA, 19 nt, Homo sapiens
  misc_RNA (1)...(19): siRNA sense strand
gcaaagagcuguucaggaa

SEQ ID NO: 446152 - RNA, 19 nt, Homo sapiens
  misc_RNA (1)...(19): siRNA sense strand
gaacaaacagucccaauua

SEQ ID NO: 446153 - RNA, 19 nt, Homo sapiens
  misc_RNA (1)...(19): siRNA sense strand
gcacuucgauguuuaauga

SEQ ID NO: 446154 - RNA, 19 nt, Homo sapiens
  misc_RNA (1)...(19): siRNA sense strand
gaagaucaguugaaagaaa

SEQ ID NO: 446155 - RNA, 19 nt, Homo sapiens
  misc_RNA (1)...(19): siRNA sense strand
gaacacaguuucuaacaga

SEQ ID NO: 446156 - RNA, 19 nt, Homo sapiens
  misc_RNA (1)...(19): siRNA sense strand
gaacugccaucuguuaaua

SEQ ID NO: 446157 - RNA, 19 nt, Homo sapiens
  misc_RNA (1)...(19): siRNA sense strand
gaaauugaacguugcauua

SEQ ID NO: 446158 - RNA, 19 nt, Homo sapiens
  misc_RNA (1)...(19): siRNA sense strand
gaagcuagcugcacuugaa

SEQ ID NO: 446159 - RNA, 19 nt, Homo sapiens
  misc_RNA (1)...(19): siRNA sense strand
ucacaggucuuucuacuuu

SEQ ID NO: 446160 - RNA, 19 nt, Homo sapiens
  misc_RNA (1)...(19): siRNA sense strand
gaagaagucugaaacauac

SEQ ID NO: 446161 - RNA, 19 nt, Homo sapiens
  misc_RNA (1)...(19): siRNA sense strand
gaggaacucugcaguauga

SEQ ID NO: 446162 - RNA, 19 nt, Homo sapiens
  misc_RNA (1)...(19): siRNA sense strand
uggaagagcucaucuguaa

SEQ ID NO: 446163 - RNA, 19 nt, Homo sapiens
  misc_RNA (1)...(19): siRNA sense strand
gaugaaugguggagaguua

SEQ ID NO: 446164 - RNA, 19 nt, Homo sapiens
  misc_RNA (1)...(19): siRNA sense strand
gcagcaauaucauucauuu

SEQ ID NO: 446165 - RNA, 19 nt, Homo sapiens
  misc_RNA (1)...(19): siRNA sense strand
gcagaaaggugguugacaa

SEQ ID NO: 446166 - RNA, 19 nt, Homo sapiens
  misc_RNA (1)...(19): siRNA sense strand
gaagguguauuuaggcuuu

SEQ ID NO: 446167 - RNA, 19 nt, Homo sapiens
  misc_RNA (1)...(19): siRNA sense strand
ucaaaggacuggaggauuu

SEQ ID NO: 446168 - RNA, 19 nt, Homo sapiens
  misc_RNA (1)...(19): siRNA sense strand
ggaacaagaucaggacuaa

SEQ ID NO: 446169 - RNA, 19 nt, Homo sapiens
  misc_RNA (1)...(19): siRNA sense strand
aaacaucucuugaaagcua

SEQ ID NO: 446170 - RNA, 19 nt, Homo sapiens
  misc_RNA (1)...(19): siRNA sense strand
gaacauaacauccagauag

SEQ ID NO: 446171 - RNA, 19 nt, Homo sapiens
  misc_RNA (1)...(19): siRNA sense strand
caagauuucucugauguua

SEQ ID NO: 446172 - RNA, 19 nt, Homo sapiens
  misc_RNA (1)...(19): siRNA sense strand
gaacagggaaggacaauug

SEQ ID NO: 446173 - RNA, 19 nt, Homo sapiens
  misc_RNA (1)...(19): siRNA sense strand
gaauacacguuagaaagua

SEQ ID NO: 446174 - RNA, 19 nt, Homo sapiens
  misc_RNA (1)...(19): siRNA sense strand
gaacguugcauuaaaguuu

SEQ ID NO: 446175 - RNA, 19 nt, Homo sapiens
  misc_RNA (1)...(19): siRNA sense strand
ggagaagaauugcugguuu

SEQ ID NO: 446176 - RNA, 19 nt, Homo sapiens
  misc_RNA (1)...(19): siRNA sense strand
cuagaaagcugauccagaa

SEQ ID NO: 446177 - RNA, 19 nt, Homo sapiens
  misc_RNA (1)...(19): siRNA sense strand
cgaagaagaugacaugguu

SEQ ID NO: 446178 - RNA, 19 nt, Homo sapiens
  misc_RNA (1)...(19): siRNA sense strand
gaaugggccuguacagauu

SEQ ID NO: 446179 - RNA, 19 nt, Homo sapiens
  misc_RNA (1)...(19): siRNA sense strand
guaaaguacuugaagcaaa

SEQ ID NO: 446180 - RNA, 19 nt, Homo sapiens
  misc_RNA (1)...(19): siRNA sense strand
gugaagauguucccuauga

SEQ ID NO: 446181 - RNA, 19 nt, Homo sapiens
  misc_RNA (1)...(19): siRNA sense strand
agaaagcgguggaacauaa

SEQ ID NO: 446182 - RNA, 19 nt, Homo sapiens
  misc_RNA (1)...(19): siRNA sense strand
gagaacagcugguugaucu

SEQ ID NO: 446183 - RNA, 19 nt, Homo sapiens
  misc_RNA (1)...(19): siRNA sense strand
gaggaaaguuguagauaga

SEQ ID NO: 446184 - RNA, 19 nt, Homo sapiens
  misc_RNA (1)...(19): siRNA sense strand
gaucagaaguggcagucua

SEQ ID NO: 446185 - RNA, 19 nt, Homo sapiens
  misc_RNA (1)...(19): siRNA sense strand
gaacuggacggucuuauug

SEQ ID NO: 446186 - RNA, 19 nt, Homo sapiens
  misc_RNA (1)...(19): siRNA sense strand
gcaauaaggaugaaccuaa

SEQ ID NO: 446187 - RNA, 19 nt, Homo sapiens
  misc_RNA (1)...(19): siRNA sense strand
ucucgcagcucacacauua

SEQ ID NO: 446188 - RNA, 19 nt, Homo sapiens
  misc_RNA (1)...(19): siRNA sense strand
gcgaaagauugacaucaua

SEQ ID NO: 446189 - RNA, 19 nt, Homo sapiens
  misc_RNA (1)...(19): siRNA sense strand
gcacacagcuuugaugaag

SEQ ID NO: 446190 - RNA, 19 nt, Homo sapiens
  misc_RNA (1)...(19): siRNA sense strand
gcauuaagguauacuaugu

SEQ ID NO: 446191 - RNA, 19 nt, Homo sapiens
  misc_RNA (1)...(19): siRNA sense strand
ggaagcaacuaaucuagau

SEQ ID NO: 446192 - RNA, 19 nt, Homo sapiens
  misc_RNA (1)...(19): siRNA sense strand
gucaagagcucuauaggaa

SEQ ID NO: 446193 - RNA, 19 nt, Homo sapiens
  misc_RNA (1)...(19): siRNA sense strand
ggauuggccucuucaugua

SEQ ID NO: 446194 - RNA, 19 nt, Homo sapiens
  misc_RNA (1)...(19): siRNA sense strand
gcacuucccucaaccugaa

SEQ ID NO: 446195 - RNA, 19 nt, Homo sapiens
  misc_RNA (1)...(19): siRNA sense strand
gggaagagcuauccuuauc

SEQ ID NO: 446196 - RNA, 19 nt, Homo sapiens
  misc_RNA (1)...(19): siRNA sense strand
ggaggaaaguuguagauag

SEQ ID NO: 446197 - RNA, 19 nt, Homo sapiens
  misc_RNA (1)...(19): siRNA sense strand
ccacugcaauuccaacuuu

SEQ ID NO: 446198 - RNA, 19 nt, Homo sapiens
  misc_RNA (1)...(19): siRNA sense strand
guuagagcuucguuuauua

SEQ ID NO: 446199 - RNA, 19 nt, Homo sapiens
  misc_RNA (1)...(19): siRNA sense strand
gcagaaacaccucaugaaa

SEQ ID NO: 446200 - RNA, 19 nt, Homo sapiens
  misc_RNA (1)...(19): siRNA sense strand
caauaaggaugaaccuaaa

SEQ ID NO: 446201 - RNA, 19 nt, Homo sapiens
  misc_RNA (1)...(19): siRNA sense strand
uaauagaacugccaucugu

SEQ ID NO: 446202 - RNA, 19 nt, Homo sapiens
  misc_RNA (1)...(19): siRNA sense strand
uagcuuagaugaauaccua

SEQ ID NO: 446203 - RNA, 19 nt, Homo sapiens
  misc_RNA (1)...(19): siRNA sense strand
gcacaacaccugaugaaug

SEQ ID NO: 446204 - RNA, 19 nt, Homo sapiens
  misc_RNA (1)...(19): siRNA sense strand
gcucgacacuauucuguaa

SEQ ID NO: 446205 - RNA, 19 nt, Homo sapiens
  misc_RNA (1)...(19): siRNA sense strand
ggaagcagcuguuuuaaug

SEQ ID NO: 446206 - RNA, 19 nt, Homo sapiens
  misc_RNA (1)...(19): siRNA sense strand
gaagcugaaugaauuugaa

SEQ ID NO: 446207 - RNA, 19 nt, Homo sapiens
  misc_RNA (1)...(19): siRNA sense strand
gagaugagaugcugguugu

SEQ ID NO: 446208 - RNA, 19 nt, Homo sapiens
  misc_RNA (1)...(19): siRNA sense strand
ccaaagagcucuggucauc

SEQ ID NO: 446209 - RNA, 19 nt, Homo sapiens
  misc_RNA (1)...(19): siRNA sense strand
gaagagaaagagagaauau

SEQ ID NO: 446210 - RNA, 19 nt, Homo sapiens
  misc_RNA (1)...(19): siRNA sense strand
caagacaccuuccagacaa

SEQ ID NO: 446211 - RNA, 19 nt, Homo sapiens
  misc_RNA (1)...(19): siRNA sense strand
uaacuuggcucagcuguau

SEQ ID NO: 446212 - RNA, 19 nt, Homo sapiens
  misc_RNA (1)...(19): siRNA sense strand
gaaacggucugugaaacaa

SEQ ID NO: 446213 - RNA, 19 nt, Homo sapiens
  misc_RNA (1)...(19): siRNA sense strand
ggaaguaaccauuaugaug

SEQ ID NO: 446214 - RNA, 19 nt, Homo sapiens
  misc_RNA (1)...(19): siRNA sense strand
gauguuguccuaagcaaua

SEQ ID NO: 446215 - RNA, 19 nt, Homo sapiens
  misc_RNA (1)...(19): siRNA sense strand
gagcuucguuuauuacaga

SEQ ID NO: 446216 - RNA, 19 nt, Homo sapiens
  misc_RNA (1)...(19): siRNA sense strand
caacaugaagaucuacuua

SEQ ID NO: 446217 - RNA, 19 nt, Homo sapiens
  misc_RNA (1)...(19): siRNA sense strand
gaaguucucucagcugguu

SEQ ID NO: 446218 - RNA, 19 nt, Homo sapiens
  misc_RNA (1)...(19): siRNA sense strand
gaugaucucuguaagaaag

SEQ ID NO: 446219 - RNA, 19 nt, Homo sapiens
  misc_RNA (1)...(19): siRNA sense strand
gcuuucagcuuauuaguug

SEQ ID NO: 446220 - RNA, 19 nt, Homo sapiens
  misc_RNA (1)...(19): siRNA sense strand
ucagaaacaucgaauugaa

SEQ ID NO: 446221 - RNA, 19 nt, Homo sapiens
  misc_RNA (1)...(19): siRNA sense strand
gaaugaauuugaacaaugg

SEQ ID NO: 446222 - RNA, 19 nt, Homo sapiens
  misc_RNA (1)...(19): siRNA sense strand
caacaacaccuuacgcaaa

SEQ ID NO: 446223 - RNA, 19 nt, Homo sapiens
  misc_RNA (1)...(19): siRNA sense strand
acucaacgcuggucaaauu

SEQ ID NO: 446224 - RNA, 19 nt, Homo sapiens
  misc_RNA (1)...(19): siRNA sense strand
cgagggaacuucagaaauc

SEQ ID NO: 446225 - RNA, 19 nt, Homo sapiens
  misc_RNA (1)...(19): siRNA sense strand
gggaaugaauuggaaguaa

SEQ ID NO: 446226 - RNA, 19 nt, Homo sapiens
  misc_RNA (1)...(19): siRNA sense strand
caagagcucuauaggaaau

SEQ ID NO: 446227 - RNA, 19 nt, Homo sapiens
  misc_RNA (1)...(19): siRNA sense strand
gcaaacuacuggaggaaau

SEQ ID NO: 446228 - RNA, 19 nt, Homo sapiens
  misc_RNA (1)...(19): siRNA sense strand
caacuuuacuuggcaauau

SEQ ID NO: 446229 - RNA, 19 nt, Homo sapiens
  misc_RNA (1)...(19): siRNA sense strand
gaacagagcacugaugaca

SEQ ID NO: 446230 - RNA, 19 nt, Homo sapiens
  misc_RNA (1)...(19): siRNA sense strand
gaauuggaaguaaccauua

SEQ ID NO: 446231 - RNA, 19 nt, Homo sapiens
  misc_RNA (1)...(19): siRNA sense strand
ugaagaagucugaaacaua

SEQ ID NO: 446232 - RNA, 19 nt, Homo sapiens
  misc_RNA (1)...(19): siRNA sense strand
gagaagaauugcugguuuc

SEQ ID NO: 446233 - RNA, 19 nt, Homo sapiens
  misc_RNA (1)...(19): siRNA sense strand
gaaaggugguugacaaugc

SEQ ID NO: 446234 - RNA, 19 nt, Homo sapiens
  misc_RNA (1)...(19): siRNA sense strand
gaaagacuguucuauagcu

SEQ ID NO: 446235 - RNA, 19 nt, Homo sapiens
  misc_RNA (1)...(19): siRNA sense strand
gagcacugaugacaugauu

SEQ ID NO: 446236 - RNA, 19 nt, Homo sapiens
  misc_RNA (1)...(19): siRNA sense strand
agacaucauugcucaagua

SEQ ID NO: 446237 - RNA, 19 nt, Homo sapiens
  misc_RNA (1)...(19): siRNA sense strand
caauaacaaucacacagaa

SEQ ID NO: 446238 - RNA, 19 nt, Homo sapiens
  misc_RNA (1)...(19): siRNA sense strand
cagcagauguguucguuug

SEQ ID NO: 446239 - RNA, 19 nt, Homo sapiens
  misc_RNA (1)...(19): siRNA sense strand
gaaaguuuacgaacaagaa

SEQ ID NO: 446240 - RNA, 19 nt, Homo sapiens
  misc_RNA (1)...(19): siRNA sense strand
ggaguacucaaguuaauuu

SEQ ID NO: 446241 - RNA, 19 nt, Homo sapiens
  misc_RNA (1)...(19): siRNA sense strand
ggucaggcccacuugauua

SEQ ID NO: 446242 - RNA, 19 nt, Homo sapiens
  misc_RNA (1)...(19): siRNA sense strand
caaguuggacgguagcuua

SEQ ID NO: 446243 - RNA, 19 nt, Homo sapiens
  misc_RNA (1)...(19): siRNA sense strand
uggagaaguuguucacaua

SEQ ID NO: 446244 - RNA, 19 nt, Homo sapiens
  misc_RNA (1)...(19): siRNA sense strand
ggagaguuacgcagucuua

SEQ ID NO: 446245 - RNA, 19 nt, Homo sapiens
  misc_RNA (1)...(19): siRNA sense strand
ucagaauccuggaauugua

SEQ ID NO: 446246 - RNA, 19 nt, Homo sapiens
  misc_RNA (1)...(19): siRNA sense strand
gauguuaucuggcgucagu

SEQ ID NO: 446247 - RNA, 19 nt, Homo sapiens
  misc_RNA (1)...(19): siRNA sense strand
ggaugaagauauaacacuu

SEQ ID NO: 446248 - RNA, 19 nt, Homo sapiens
  misc_RNA (1)...(19): siRNA sense strand
caucaucuauuguuggaaa

SEQ ID NO: 446249 - RNA, 19 nt, Homo sapiens
  misc_RNA (1)...(19): siRNA sense strand
ggacaacugcagacaauga

SEQ ID NO: 446250 - RNA, 19 nt, Homo sapiens
  misc_RNA (1)...(19): siRNA sense strand
caacgucaucugcuacuua

SEQ ID NO: 446251 - RNA, 19 nt, Homo sapiens
  misc_RNA (1)...(19): siRNA sense strand
gcaaagagcuguucaggaa

SEQ ID NO: 446252 - RNA, 19 nt, Homo sapiens
  misc_RNA (1)...(19): siRNA sense strand
gaacaaacagucccaauua

SEQ ID NO: 446253 - RNA, 19 nt, Homo sapiens
  misc_RNA (1)...(19): siRNA sense strand
gcacuucgauguuuaauga

SEQ ID NO: 446254 - RNA, 19 nt, Homo sapiens
  misc_RNA (1)...(19): siRNA sense strand
gaagaucaguugaaagaaa

SEQ ID NO: 446255 - RNA, 19 nt, Homo sapiens
  misc_RNA (1)...(19): siRNA sense strand
gaacacaguuucuaacaga

SEQ ID NO: 446256 - RNA, 19 nt, Homo sapiens
  misc_RNA (1)...(19): siRNA sense strand
gaacugccaucuguuaaua

SEQ ID NO: 446257 - RNA, 19 nt, Homo sapiens
  misc_RNA (1)...(19): siRNA sense strand
gaaauugaacguugcauua

SEQ ID NO: 446258 - RNA, 19 nt, Homo sapiens
  misc_RNA (1)...(19): siRNA sense strand
gaagcuagcugcacuugaa

SEQ ID NO: 446259 - RNA, 19 nt, Homo sapiens
  misc_RNA (1)...(19): siRNA sense strand
ucacaggucuuucuacuuu

SEQ ID NO: 446260 - RNA, 19 nt, Homo sapiens
  misc_RNA (1)...(19): siRNA sense strand
gaagaagucugaaacauac

SEQ ID NO: 446261 - RNA, 19 nt, Homo sapiens
  misc_RNA (1)...(19): siRNA sense strand
gaggaacucugcaguauga

SEQ ID NO: 446262 - RNA, 19 nt, Homo sapiens
  misc_RNA (1)...(19): siRNA sense strand
uggaagagcucaucuguaa

SEQ ID NO: 446263 - RNA, 19 nt, Homo sapiens
  misc_RNA (1)...(19): siRNA sense strand
gaugaaugguggagaguua

SEQ ID NO: 446264 - RNA, 19 nt, Homo sapiens
  misc_RNA (1)...(19): siRNA sense strand
gcagcaauaucauucauuu

SEQ ID NO: 446265 - RNA, 19 nt, Homo sapiens
  misc_RNA (1)...(19): siRNA sense strand
gcagaaaggugguugacaa

SEQ ID NO: 446266 - RNA, 19 nt, Homo sapiens
  misc_RNA (1)...(19): siRNA sense strand
gaagguguauuuaggcuuu

SEQ ID NO: 446267 - RNA, 19 nt, Homo sapiens
  misc_RNA (1)...(19): siRNA sense strand
ucaaaggacuggaggauuu

SEQ ID NO: 446268 - RNA, 19 nt, Homo sapiens
  misc_RNA (1)...(19): siRNA sense strand
ggaacaagaucaggacuaa

SEQ ID NO: 446269 - RNA, 19 nt, Homo sapiens
  misc_RNA (1)...(19): siRNA sense strand
aaacaucucuugaaagcua

SEQ ID NO: 446270 - RNA, 19 nt, Homo sapiens
  misc_RNA (1)...(19): siRNA sense strand
gaacauaacauccagauag

SEQ ID NO: 446271 - RNA, 19 nt, Homo sapiens
  misc_RNA (1)...(19): siRNA sense strand
caagauuucucugauguua

SEQ ID NO: 446272 - RNA, 19 nt, Homo sapiens
  misc_RNA (1)...(19): siRNA sense strand
gaacagggaaggacaauug

SEQ ID NO: 446273 - RNA, 19 nt, Homo sapiens
  misc_RNA (1)...(19): siRNA sense strand
gaauacacguuagaaagua

SEQ ID NO: 446274 - RNA, 19 nt, Homo sapiens
  misc_RNA (1)...(19): siRNA sense strand
gaacguugcauuaaaguuu

SEQ ID NO: 446275 - RNA, 19 nt, Homo sapiens
  misc_RNA (1)...(19): siRNA sense strand
ggagaagaauugcugguuu

SEQ ID NO: 446276 - RNA, 19 nt, Homo sapiens
  misc_RNA (1)...(19): siRNA sense strand
cuagaaagcugauccagaa

SEQ ID NO: 446277 - RNA, 19 nt, Homo sapiens
  misc_RNA (1)...(19): siRNA sense strand
cgaagaagaugacaugguu

SEQ ID NO: 446278 - RNA, 19 nt, Homo sapiens
  misc_RNA (1)...(19): siRNA sense strand
gaaugggccuguacagauu

SEQ ID NO: 446279 - RNA, 19 nt, Homo sapiens
  misc_RNA (1)...(19): siRNA sense strand
guaaaguacuugaagcaaa

SEQ ID NO: 446280 - RNA, 19 nt, Homo sapiens
  misc_RNA (1)...(19): siRNA sense strand
gugaagauguucccuauga

SEQ ID NO: 446281 - RNA, 19 nt, Homo sapiens
  misc_RNA (1)...(19): siRNA sense strand
agaaagcgguggaacauaa

SEQ ID NO: 446282 - RNA, 19 nt, Homo sapiens
  misc_RNA (1)...(19): siRNA sense strand
gagaacagcugguugaucu

SEQ ID NO: 446283 - RNA, 19 nt, Homo sapiens
  misc_RNA (1)...(19): siRNA sense strand
gaggaaaguuguagauaga

SEQ ID NO: 446284 - RNA, 19 nt, Homo sapiens
  misc_RNA (1)...(19): siRNA sense strand
gaucagaaguggcagucua

SEQ ID NO: 446285 - RNA, 19 nt, Homo sapiens
  misc_RNA (1)...(19): siRNA sense strand
gaacuggacggucuuauug

SEQ ID NO: 446286 - RNA, 19 nt, Homo sapiens
  misc_RNA (1)...(19): siRNA sense strand
gcaauaaggaugaaccuaa

SEQ ID NO: 446287 - RNA, 19 nt, Homo sapiens
  misc_RNA (1)...(19): siRNA sense strand
ucucgcagcucacacauua

SEQ ID NO: 446288 - RNA, 19 nt, Homo sapiens
  misc_RNA (1)...(19): siRNA sense strand
gcgaaagauugacaucaua

SEQ ID NO: 446289 - RNA, 19 nt, Homo sapiens
  misc_RNA (1)...(19): siRNA sense strand
gcacacagcuuugaugaag

SEQ ID NO: 446290 - RNA, 19 nt, Homo sapiens
  misc_RNA (1)...(19): siRNA sense strand
gcauuaagguauacuaugu

SEQ ID NO: 446291 - RNA, 19 nt, Homo sapiens
  misc_RNA (1)...(19): siRNA sense strand
ggaagcaacuaaucuagau

SEQ ID NO: 446292 - RNA, 19 nt, Homo sapiens
  misc_RNA (1)...(19): siRNA sense strand
gucaagagcucuauaggaa

SEQ ID NO: 446293 - RNA, 19 nt, Homo sapiens
  misc_RNA (1)...(19): siRNA sense strand
ggauuggccucuucaugua

SEQ ID NO: 446294 - RNA, 19 nt, Homo sapiens
  misc_RNA (1)...(19): siRNA sense strand
gcacuucccucaaccugaa

SEQ ID NO: 446295 - RNA, 19 nt, Homo sapiens
  misc_RNA (1)...(19): siRNA sense strand
gggaagagcuauccuuauc

SEQ ID NO: 446296 - RNA, 19 nt, Homo sapiens
  misc_RNA (1)...(19): siRNA sense strand
ggaggaaaguuguagauag

SEQ ID NO: 446297 - RNA, 19 nt, Homo sapiens
  misc_RNA (1)...(19): siRNA sense strand
ccacugcaauuccaacuuu

SEQ ID NO: 446298 - RNA, 19 nt, Homo sapiens
  misc_RNA (1)...(19): siRNA sense strand
guuagagcuucguuuauua

SEQ ID NO: 446299 - RNA, 19 nt, Homo sapiens
  misc_RNA (1)...(19): siRNA sense strand
gcagaaacaccucaugaaa

SEQ ID NO: 446300 - RNA, 19 nt, Homo sapiens
  misc_RNA (1)...(19): siRNA sense strand
caauaaggaugaaccuaaa

SEQ ID NO: 446301 - RNA, 19 nt, Homo sapiens
  misc_RNA (1)...(19): siRNA sense strand
uaauagaacugccaucugu

SEQ ID NO: 446302 - RNA, 19 nt, Homo sapiens
  misc_RNA (1)...(19): siRNA sense strand
uagcuuagaugaauaccua

SEQ ID NO: 446303 - RNA, 19 nt, Homo sapiens
  misc_RNA (1)...(19): siRNA sense strand
gcacaacaccugaugaaug

SEQ ID NO: 446304 - RNA, 19 nt, Homo sapiens
  misc_RNA (1)...(19): siRNA sense strand
gcucgacacuauucuguaa

SEQ ID NO: 446305 - RNA, 19 nt, Homo sapiens
  misc_RNA (1)...(19): siRNA sense strand
ggaagcagcuguuuuaaug

SEQ ID NO: 446306 - RNA, 19 nt, Homo sapiens
  misc_RNA (1)...(19): siRNA sense strand
gaagcugaaugaauuugaa

SEQ ID NO: 446307 - RNA, 19 nt, Homo sapiens
  misc_RNA (1)...(19): siRNA sense strand
gagaugagaugcugguugu

SEQ ID NO: 446308 - RNA, 19 nt, Homo sapiens
  misc_RNA (1)...(19): siRNA sense strand
ccaaagagcucuggucauc

SEQ ID NO: 446309 - RNA, 19 nt, Homo sapiens
  misc_RNA (1)...(19): siRNA sense strand
gaagagaaagagagaauau

SEQ ID NO: 446310 - RNA, 19 nt, Homo sapiens
  misc_RNA (1)...(19): siRNA sense strand
caagacaccuuccagacaa

SEQ ID NO: 446311 - RNA, 19 nt, Homo sapiens
  misc_RNA (1)...(19): siRNA sense strand
uaacuuggcucagcuguau

SEQ ID NO: 446312 - RNA, 19 nt, Homo sapiens
  misc_RNA (1)...(19): siRNA sense strand
gaaacggucugugaaacaa

SEQ ID NO: 446313 - RNA, 19 nt, Homo sapiens
  misc_RNA (1)...(19): siRNA sense strand
ggaaguaaccauuaugaug

SEQ ID NO: 446314 - RNA, 19 nt, Homo sapiens
  misc_RNA (1)...(19): siRNA sense strand
gauguuguccuaagcaaua

SEQ ID NO: 446315 - RNA, 19 nt, Homo sapiens
  misc_RNA (1)...(19): siRNA sense strand
gagcuucguuuauuacaga

SEQ ID NO: 446316 - RNA, 19 nt, Homo sapiens
  misc_RNA (1)...(19): siRNA sense strand
caacaugaagaucuacuua

SEQ ID NO: 446317 - RNA, 19 nt, Homo sapiens
  misc_RNA (1)...(19): siRNA sense strand
gaaguucucucagcugguu

SEQ ID NO: 446318 - RNA, 19 nt, Homo sapiens
  misc_RNA (1)...(19): siRNA sense strand
gaugaucucuguaagaaag

SEQ ID NO: 446319 - RNA, 19 nt, Homo sapiens
  misc_RNA (1)...(19): siRNA sense strand
gcuuucagcuuauuaguug

SEQ ID NO: 446320 - RNA, 19 nt, Homo sapiens
  misc_RNA (1)...(19): siRNA sense strand
ucagaaacaucgaauugaa

SEQ ID NO: 446321 - RNA, 19 nt, Homo sapiens
  misc_RNA (1)...(19): siRNA sense strand
gaaugaauuugaacaaugg

SEQ ID NO: 446322 - RNA, 19 nt, Homo sapiens
  misc_RNA (1)...(19): siRNA sense strand
caacaacaccuuacgcaaa

SEQ ID NO: 446323 - RNA, 19 nt, Homo sapiens
  misc_RNA (1)...(19): siRNA sense strand
acucaacgcuggucaaauu

SEQ ID NO: 446324 - RNA, 19 nt, Homo sapiens
  misc_RNA (1)...(19): siRNA sense strand
cgagggaacuucagaaauc

SEQ ID NO: 446325 - RNA, 19 nt, Homo sapiens
  misc_RNA (1)...(19): siRNA sense strand
gggaaugaauuggaaguaa

SEQ ID NO: 446326 - RNA, 19 nt, Homo sapiens
  misc_RNA (1)...(19): siRNA sense strand
caagagcucuauaggaaau

SEQ ID NO: 446327 - RNA, 19 nt, Homo sapiens
  misc_RNA (1)...(19): siRNA sense strand
gcaaacuacuggaggaaau

SEQ ID NO: 446328 - RNA, 19 nt, Homo sapiens
  misc_RNA (1)...(19): siRNA sense strand
caacuuuacuuggcaauau

SEQ ID NO: 446329 - RNA, 19 nt, Homo sapiens
  misc_RNA (1)...(19): siRNA sense strand
gaacagagcacugaugaca

SEQ ID NO: 446330 - RNA, 19 nt, Homo sapiens
  misc_RNA (1)...(19): siRNA sense strand
gaauuggaaguaaccauua

SEQ ID NO: 446331 - RNA, 19 nt, Homo sapiens
  misc_RNA (1)...(19): siRNA sense strand
ugaagaagucugaaacaua

SEQ ID NO: 446332 - RNA, 19 nt, Homo sapiens
  misc_RNA (1)...(19): siRNA sense strand
gagaagaauugcugguuuc

SEQ ID NO: 446333 - RNA, 19 nt, Homo sapiens
  misc_RNA (1)...(19): siRNA sense strand
gaaaggugguugacaaugc

SEQ ID NO: 446334 - RNA, 19 nt, Homo sapiens
  misc_RNA (1)...(19): siRNA sense strand
gaaagacuguucuauagcu

SEQ ID NO: 446335 - RNA, 19 nt, Homo sapiens
  misc_RNA (1)...(19): siRNA sense strand
gagcacugaugacaugauu

SEQ ID NO: 446336 - RNA, 19 nt, Homo sapiens
  misc_RNA (1)...(19): siRNA sense strand
agacaucauugcucaagua

SEQ ID NO: 446337 - RNA, 19 nt, Homo sapiens
  misc_RNA (1)...(19): siRNA sense strand
caauaacaaucacacagaa

SEQ ID NO: 446338 - RNA, 19 nt, Homo sapiens
  misc_RNA (1)...(19): siRNA sense strand
cagcagauguguucguuug

SEQ ID NO: 446339 - RNA, 19 nt, Homo sapiens
  misc_RNA (1)...(19): siRNA sense strand
gaaaguuuacgaacaagaa

SEQ ID NO: 446340 - RNA, 19 nt, Homo sapiens
  misc_RNA (1)...(19): siRNA sense strand
ggaguacucaaguuaauuu

SEQ ID NO: 446341 - RNA, 19 nt, Homo sapiens
  misc_RNA (1)...(19): siRNA sense strand
ggucaggcccacuugauua

SEQ ID NO: 446342 - RNA, 19 nt, Homo sapiens
  misc_RNA (1)...(19): siRNA sense strand
caaguuggacgguagcuua

SEQ ID NO: 446343 - RNA, 19 nt, Homo sapiens
  misc_RNA (1)...(19): siRNA sense strand
uggagaaguuguucacaua

SEQ ID NO: 446344 - RNA, 19 nt, Homo sapiens
  misc_RNA (1)...(19): siRNA sense strand
ggagaguuacgcagucuua

SEQ ID NO: 446345 - RNA, 19 nt, Homo sapiens
  misc_RNA (1)...(19): siRNA sense strand
ucagaauccuggaauugua

SEQ ID NO: 446346 - RNA, 19 nt, Homo sapiens
  misc_RNA (1)...(19): siRNA sense strand
gauguuaucuggcgucagu

SEQ ID NO: 446347 - RNA, 19 nt, Homo sapiens
  misc_RNA (1)...(19): siRNA sense strand
ggaugaagauauaacacuu

SEQ ID NO: 446348 - RNA, 19 nt, Homo sapiens
  misc_RNA (1)...(19): siRNA sense strand
caucaucuauuguuggaaa

SEQ ID NO: 446349 - RNA, 19 nt, Homo sapiens
  misc_RNA (1)...(19): siRNA sense strand
ggacaacugcagacaauga

SEQ ID NO: 446350 - RNA, 19 nt, Homo sapiens
  misc_RNA (1)...(19): siRNA sense strand
caacgucaucugcuacuua

SEQ ID NO: 446351 - RNA, 19 nt, Homo sapiens
  misc_RNA (1)...(19): siRNA sense strand
caacacaccuuccaugaca

SEQ ID NO: 446352 - RNA, 19 nt, Homo sapiens
  misc_RNA (1)...(19): siRNA sense strand
gcacggugaugcgguauga

SEQ ID NO: 446353 - RNA, 19 nt, Homo sapiens
  misc_RNA (1)...(19): siRNA sense strand
ggugauuguuggugacuuu

SEQ ID NO: 446354 - RNA, 19 nt, Homo sapiens
  misc_RNA (1)...(19): siRNA sense strand
ccucaauacuccgcaaaua

SEQ ID NO: 446355 - RNA, 19 nt, Homo sapiens
  misc_RNA (1)...(19): siRNA sense strand
gaagguuuauugugauugg

SEQ ID NO: 446356 - RNA, 19 nt, Homo sapiens
  misc_RNA (1)...(19): siRNA sense strand
ggacggccauguuguggau

SEQ ID NO: 446357 - RNA, 19 nt, Homo sapiens
  misc_RNA (1)...(19): siRNA sense strand
gaugcgguaugaagagauu

SEQ ID NO: 446358 - RNA, 19 nt, Homo sapiens
  misc_RNA (1)...(19): siRNA sense strand
cgacacagaccgaaucaug

SEQ ID NO: 446359 - RNA, 19 nt, Homo sapiens
  misc_RNA (1)...(19): siRNA sense strand
acuggaagguuuauuguga

SEQ ID NO: 446360 - RNA, 19 nt, Homo sapiens
  misc_RNA (1)...(19): siRNA sense strand
aaagccagcuguacaucaa

SEQ ID NO: 446361 - RNA, 19 nt, Homo sapiens
  misc_RNA (1)...(19): siRNA sense strand
gauauggaggugauuguug

SEQ ID NO: 446362 - RNA, 19 nt, Homo sapiens
  misc_RNA (1)...(19): siRNA sense strand
ggaacgaggcagauaugga

SEQ ID NO: 446363 - RNA, 19 nt, Homo sapiens
  misc_RNA (1)...(19): siRNA sense strand
caucaaccaucccaugucu

SEQ ID NO: 446364 - RNA, 19 nt, Homo sapiens
  misc_RNA (1)...(19): siRNA sense strand
gacacagaccgaaucauga

SEQ ID NO: 446365 - RNA, 19 nt, Homo sapiens
  misc_RNA (1)...(19): siRNA sense strand
gaaagagccagggauuauc

SEQ ID NO: 446366 - RNA, 19 nt, Homo sapiens
  misc_RNA (1)...(19): siRNA sense strand
guggagcguuucaccuuug

SEQ ID NO: 446367 - RNA, 19 nt, Homo sapiens
  misc_RNA (1)...(19): siRNA sense strand
guuggugacuuugggauug

SEQ ID NO: 446368 - RNA, 19 nt, Homo sapiens
  misc_RNA (1)...(19): siRNA sense strand
ucaauacuccgcaaauaca

SEQ ID NO: 446369 - RNA, 19 nt, Homo sapiens
  misc_RNA (1)...(19): siRNA sense strand
caugaaucacuccucaaua

SEQ ID NO: 446370 - RNA, 19 nt, Homo sapiens
  misc_RNA (1)...(19): siRNA sense strand
acacagaccgaaucaugaa

SEQ ID NO: 446371 - RNA, 19 nt, Homo sapiens
  misc_RNA (1)...(19): siRNA sense strand
gcagauauggaggugauug

SEQ ID NO: 446372 - RNA, 19 nt, Homo sapiens
  misc_RNA (1)...(19): siRNA sense strand
gggauuaucugcacaaaac

SEQ ID NO: 446373 - RNA, 19 nt, Homo sapiens
  misc_RNA (1)...(19): siRNA sense strand
uggaagguuuauugugauu

SEQ ID NO: 446374 - RNA, 19 nt, Homo sapiens
  misc_RNA (1)...(19): siRNA sense strand
augaaucacuccucaauac

SEQ ID NO: 446375 - RNA, 19 nt, Homo sapiens
  misc_RNA (1)...(19): siRNA sense strand
gcugcauccucuccaaugu

SEQ ID NO: 446376 - RNA, 19 nt, Homo sapiens
  misc_RNA (1)...(19): siRNA sense strand
cagaccgaaucaugaauca

SEQ ID NO: 446377 - RNA, 19 nt, Homo sapiens
  misc_RNA (1)...(19): siRNA sense strand
guaugaagagauugagcua

SEQ ID NO: 446378 - RNA, 19 nt, Homo sapiens
  misc_RNA (1)...(19): siRNA sense strand
gaaagccucagccggaucu

SEQ ID NO: 446379 - RNA, 19 nt, Homo sapiens
  misc_RNA (1)...(19): siRNA sense strand
gaaucacuccucaauacuc

SEQ ID NO: 446380 - RNA, 19 nt, Homo sapiens
  misc_RNA (1)...(19): siRNA sense strand
acggccauguuguggauua

SEQ ID NO: 446381 - RNA, 19 nt, Homo sapiens
  misc_RNA (1)...(19): siRNA sense strand
aaacagggccucgugucaa

SEQ ID NO: 446382 - RNA, 19 nt, Homo sapiens
  misc_RNA (1)...(19): siRNA sense strand
gucaacacaccuuccauga

SEQ ID NO: 446383 - RNA, 19 nt, Homo sapiens
  misc_RNA (1)...(19): siRNA sense strand
gagcguuucaccuuuguag

SEQ ID NO: 446384 - RNA, 19 nt, Homo sapiens
  misc_RNA (1)...(19): siRNA sense strand
ccauuuaccagaacagcaa

SEQ ID NO: 446385 - RNA, 19 nt, Homo sapiens
  misc_RNA (1)...(19): siRNA sense strand
ucaaccaucccaugucugu

SEQ ID NO: 446386 - RNA, 19 nt, Homo sapiens
  misc_RNA (1)...(19): siRNA sense strand
gaccgaaucaugaaucacu

SEQ ID NO: 446387 - RNA, 19 nt, Homo sapiens
  misc_RNA (1)...(19): siRNA sense strand
gugaugcgguaugaagaga

SEQ ID NO: 446388 - RNA, 19 nt, Homo sapiens
  misc_RNA (1)...(19): siRNA sense strand
caucgacuacauccucaaa

SEQ ID NO: 446389 - RNA, 19 nt, Homo sapiens
  misc_RNA (1)...(19): siRNA sense strand
ccacugcagccaagaucuu

SEQ ID NO: 446390 - RNA, 19 nt, Homo sapiens
  misc_RNA (1)...(19): siRNA sense strand
ucaugaaucacuccucaau

SEQ ID NO: 446391 - RNA, 19 nt, Homo sapiens
  misc_RNA (1)...(19): siRNA sense strand
gggaugcagccgacacaga

SEQ ID NO: 446392 - RNA, 19 nt, Homo sapiens
  misc_RNA (1)...(19): siRNA sense strand
aggcagauauggaggugau

SEQ ID NO: 446393 - RNA, 19 nt, Homo sapiens
  misc_RNA (1)...(19): siRNA sense strand
gcguuucaccuuuguagau

SEQ ID NO: 446394 - RNA, 19 nt, Homo sapiens
  misc_RNA (1)...(19): siRNA sense strand
ccacgacuccuauggaaaa

SEQ ID NO: 446395 - RNA, 19 nt, Homo sapiens
  misc_RNA (1)...(19): siRNA sense strand
ucaccuuuguagaugagaa

SEQ ID NO: 446396 - RNA, 19 nt, Homo sapiens
  misc_RNA (1)...(19): siRNA sense strand
caccgggaccucaugaaga

SEQ ID NO: 446397 - RNA, 19 nt, Homo sapiens
  misc_RNA (1)...(19): siRNA sense strand
acagcaacguggccaccaa

SEQ ID NO: 446398 - RNA, 19 nt, Homo sapiens
  misc_RNA (1)...(19): siRNA sense strand
caauacuccgcaaauacaa

SEQ ID NO: 446399 - RNA, 19 nt, Homo sapiens
  misc_RNA (1)...(19): siRNA sense strand
cccagccggucaucgacua

SEQ ID NO: 446400 - RNA, 19 nt, Homo sapiens
  misc_RNA (1)...(19): siRNA sense strand
cagggauuaucugcacaaa

SEQ ID NO: 446401 - RNA, 19 nt, Homo sapiens
  misc_RNA (1)...(19): siRNA sense strand
ugcauccucuccaauguca

SEQ ID NO: 446402 - RNA, 19 nt, Homo sapiens
  misc_RNA (1)...(19): siRNA sense strand
caucccaugucuguuguca

SEQ ID NO: 446403 - RNA, 19 nt, Homo sapiens
  misc_RNA (1)...(19): siRNA sense strand
aaccaucccaugucuguug

SEQ ID NO: 446404 - RNA, 19 nt, Homo sapiens
  misc_RNA (1)...(19): siRNA sense strand
ggaagguuuauugugauug

SEQ ID NO: 446405 - RNA, 19 nt, Homo sapiens
  misc_RNA (1)...(19): siRNA sense strand
aaagagccagggauuaucu

SEQ ID NO: 446406 - RNA, 19 nt, Homo sapiens
  misc_RNA (1)...(19): siRNA sense strand
ggcaccgucucaucaugug

SEQ ID NO: 446407 - RNA, 19 nt, Homo sapiens
  misc_RNA (1)...(19): siRNA sense strand
ccucuccaaugucaacaca

SEQ ID NO: 446408 - RNA, 19 nt, Homo sapiens
  misc_RNA (1)...(19): siRNA sense strand
gugauuggcgggauugucu

SEQ ID NO: 446409 - RNA, 19 nt, Homo sapiens
  misc_RNA (1)...(19): siRNA sense strand
cguuucaccuuuguagaug

SEQ ID NO: 446410 - RNA, 19 nt, Homo sapiens
  misc_RNA (1)...(19): siRNA sense strand
caacacaccuuccaugaca

SEQ ID NO: 446411 - RNA, 19 nt, Homo sapiens
  misc_RNA (1)...(19): siRNA sense strand
gcacggugaugcgguauga

SEQ ID NO: 446412 - RNA, 19 nt, Homo sapiens
  misc_RNA (1)...(19): siRNA sense strand
ggugauuguuggugacuuu

SEQ ID NO: 446413 - RNA, 19 nt, Homo sapiens
  misc_RNA (1)...(19): siRNA sense strand
ccucaauacuccgcaaaua

SEQ ID NO: 446414 - RNA, 19 nt, Homo sapiens
  misc_RNA (1)...(19): siRNA sense strand
gaagguuuauugugauugg

SEQ ID NO: 446415 - RNA, 19 nt, Homo sapiens
  misc_RNA (1)...(19): siRNA sense strand
ggacggccauguuguggau

SEQ ID NO: 446416 - RNA, 19 nt, Homo sapiens
  misc_RNA (1)...(19): siRNA sense strand
gaugcgguaugaagagauu

SEQ ID NO: 446417 - RNA, 19 nt, Homo sapiens
  misc_RNA (1)...(19): siRNA sense strand
cgacacagaccgaaucaug

SEQ ID NO: 446418 - RNA, 19 nt, Homo sapiens
  misc_RNA (1)...(19): siRNA sense strand
acuggaagguuuauuguga

SEQ ID NO: 446419 - RNA, 19 nt, Homo sapiens
  misc_RNA (1)...(19): siRNA sense strand
aaagccagcuguacaucaa

SEQ ID NO: 446420 - RNA, 19 nt, Homo sapiens
  misc_RNA (1)...(19): siRNA sense strand
gauauggaggugauuguug

SEQ ID NO: 446421 - RNA, 19 nt, Homo sapiens
  misc_RNA (1)...(19): siRNA sense strand
ggaacgaggcagauaugga

SEQ ID NO: 446422 - RNA, 19 nt, Homo sapiens
  misc_RNA (1)...(19): siRNA sense strand
caucaaccaucccaugucu

SEQ ID NO: 446423 - RNA, 19 nt, Homo sapiens
  misc_RNA (1)...(19): siRNA sense strand
gacacagaccgaaucauga

SEQ ID NO: 446424 - RNA, 19 nt, Homo sapiens
  misc_RNA (1)...(19): siRNA sense strand
gaaagagccagggauuauc

SEQ ID NO: 446425 - RNA, 19 nt, Homo sapiens
  misc_RNA (1)...(19): siRNA sense strand
guggagcguuucaccuuug

SEQ ID NO: 446426 - RNA, 19 nt, Homo sapiens
  misc_RNA (1)...(19): siRNA sense strand
guuggugacuuugggauug

SEQ ID NO: 446427 - RNA, 19 nt, Homo sapiens
  misc_RNA (1)...(19): siRNA sense strand
ucaauacuccgcaaauaca

SEQ ID NO: 446428 - RNA, 19 nt, Homo sapiens
  misc_RNA (1)...(19): siRNA sense strand
caugaaucacuccucaaua

SEQ ID NO: 446429 - RNA, 19 nt, Homo sapiens
  misc_RNA (1)...(19): siRNA sense strand
acacagaccgaaucaugaa

SEQ ID NO: 446430 - RNA, 19 nt, Homo sapiens
  misc_RNA (1)...(19): siRNA sense strand
gcagauauggaggugauug

SEQ ID NO: 446431 - RNA, 19 nt, Homo sapiens
  misc_RNA (1)...(19): siRNA sense strand
gggauuaucugcacaaaac

SEQ ID NO: 446432 - RNA, 19 nt, Homo sapiens
  misc_RNA (1)...(19): siRNA sense strand
uggaagguuuauugugauu

SEQ ID NO: 446433 - RNA, 19 nt, Homo sapiens
  misc_RNA (1)...(19): siRNA sense strand
augaaucacuccucaauac

SEQ ID NO: 446434 - RNA, 19 nt, Homo sapiens
  misc_RNA (1)...(19): siRNA sense strand
gcugcauccucuccaaugu

SEQ ID NO: 446435 - RNA, 19 nt, Homo sapiens
  misc_RNA (1)...(19): siRNA sense strand
cagaccgaaucaugaauca

SEQ ID NO: 446436 - RNA, 19 nt, Homo sapiens
  misc_RNA (1)...(19): siRNA sense strand
guaugaagagauugagcua

SEQ ID NO: 446437 - RNA, 19 nt, Homo sapiens
  misc_RNA (1)...(19): siRNA sense strand
gaaagccucagccggaucu

SEQ ID NO: 446438 - RNA, 19 nt, Homo sapiens
  misc_RNA (1)...(19): siRNA sense strand
gaaucacuccucaauacuc

SEQ ID NO: 446439 - RNA, 19 nt, Homo sapiens
  misc_RNA (1)...(19): siRNA sense strand
acggccauguuguggauua

SEQ ID NO: 446440 - RNA, 19 nt, Homo sapiens
  misc_RNA (1)...(19): siRNA sense strand
aaacagggccucgugucaa

SEQ ID NO: 446441 - RNA, 19 nt, Homo sapiens
  misc_RNA (1)...(19): siRNA sense strand
gucaacacaccuuccauga

SEQ ID NO: 446442 - RNA, 19 nt, Homo sapiens
  misc_RNA (1)...(19): siRNA sense strand
gagcguuucaccuuuguag

SEQ ID NO: 446443 - RNA, 19 nt, Homo sapiens
  misc_RNA (1)...(19): siRNA sense strand
ccauuuaccagaacagcaa

SEQ ID NO: 446444 - RNA, 19 nt, Homo sapiens
  misc_RNA (1)...(19): siRNA sense strand
ucaaccaucccaugucugu

SEQ ID NO: 446445 - RNA, 19 nt, Homo sapiens
  misc_RNA (1)...(19): siRNA sense strand
gaccgaaucaugaaucacu

SEQ ID NO: 446446 - RNA, 19 nt, Homo sapiens
  misc_RNA (1)...(19): siRNA sense strand
gugaugcgguaugaagaga

SEQ ID NO: 446447 - RNA, 19 nt, Homo sapiens
  misc_RNA (1)...(19): siRNA sense strand
caucgacuacauccucaaa

SEQ ID NO: 446448 - RNA, 19 nt, Homo sapiens
  misc_RNA (1)...(19): siRNA sense strand
ccacugcagccaagaucuu

SEQ ID NO: 446449 - RNA, 19 nt, Homo sapiens
  misc_RNA (1)...(19): siRNA sense strand
ucaugaaucacuccucaau

SEQ ID NO: 446450 - RNA, 19 nt, Homo sapiens
  misc_RNA (1)...(19): siRNA sense strand
gggaugcagccgacacaga

SEQ ID NO: 446451 - RNA, 19 nt, Homo sapiens
  misc_RNA (1)...(19): siRNA sense strand
aggcagauauggaggugau

SEQ ID NO: 446452 - RNA, 19 nt, Homo sapiens
  misc_RNA (1)...(19): siRNA sense strand
gcguuucaccuuuguagau

SEQ ID NO: 446453 - RNA, 19 nt, Homo sapiens
  misc_RNA (1)...(19): siRNA sense strand
ccacgacuccuauggaaaa

SEQ ID NO: 446454 - RNA, 19 nt, Homo sapiens
  misc_RNA (1)...(19): siRNA sense strand
ucaccuuuguagaugagaa

SEQ ID NO: 446455 - RNA, 19 nt, Homo sapiens
  misc_RNA (1)...(19): siRNA sense strand
caccgggaccucaugaaga

SEQ ID NO: 446456 - RNA, 19 nt, Homo sapiens
  misc_RNA (1)...(19): siRNA sense strand
acagcaacguggccaccaa

SEQ ID NO: 446457 - RNA, 19 nt, Homo sapiens
  misc_RNA (1)...(19): siRNA sense strand
caauacuccgcaaauacaa

SEQ ID NO: 446458 - RNA, 19 nt, Homo sapiens
  misc_RNA (1)...(19): siRNA sense strand
cccagccggucaucgacua

SEQ ID NO: 446459 - RNA, 19 nt, Homo sapiens
  misc_RNA (1)...(19): siRNA sense strand
cagggauuaucugcacaaa

SEQ ID NO: 446460 - RNA, 19 nt, Homo sapiens
  misc_RNA (1)...(19): siRNA sense strand
ugcauccucuccaauguca

SEQ ID NO: 446461 - RNA, 19 nt, Homo sapiens
  misc_RNA (1)...(19): siRNA sense strand
caucccaugucuguuguca

SEQ ID NO: 446462 - RNA, 19 nt, Homo sapiens
  misc_RNA (1)...(19): siRNA sense strand
aaccaucccaugucuguug

SEQ ID NO: 446463 - RNA, 19 nt, Homo sapiens
  misc_RNA (1)...(19): siRNA sense strand
ggaagguuuauugugauug

SEQ ID NO: 446464 - RNA, 19 nt, Homo sapiens
  misc_RNA (1)...(19): siRNA sense strand
aaagagccagggauuaucu

SEQ ID NO: 446465 - RNA, 19 nt, Homo sapiens
  misc_RNA (1)...(19): siRNA sense strand
ggcaccgucucaucaugug

SEQ ID NO: 446466 - RNA, 19 nt, Homo sapiens
  misc_RNA (1)...(19): siRNA sense strand
ccucuccaaugucaacaca

SEQ ID NO: 446467 - RNA, 19 nt, Homo sapiens
  misc_RNA (1)...(19): siRNA sense strand
gugauuggcgggauugucu

SEQ ID NO: 446468 - RNA, 19 nt, Homo sapiens
  misc_RNA (1)...(19): siRNA sense strand
cguuucaccuuuguagaug

SEQ ID NO: 446469 - RNA, 19 nt, Homo sapiens
  misc_RNA (1)...(19): siRNA sense strand
gcacauuccuggcacauga

SEQ ID NO: 446470 - RNA, 19 nt, Homo sapiens
  misc_RNA (1)...(19): siRNA sense strand
agaagcagcuguuaaagga

SEQ ID NO: 446471 - RNA, 19 nt, Homo sapiens
  misc_RNA (1)...(19): siRNA sense strand
gcgcaucacuagcugcaaa

SEQ ID NO: 446472 - RNA, 19 nt, Homo sapiens
  misc_RNA (1)...(19): siRNA sense strand
ggaaggagcagcuggacuu

SEQ ID NO: 446473 - RNA, 19 nt, Homo sapiens
  misc_RNA (1)...(19): siRNA sense strand
caacgugucauccuucgua

SEQ ID NO: 446474 - RNA, 19 nt, Homo sapiens
  misc_RNA (1)...(19): siRNA sense strand
caagaggaccauccauauu

SEQ ID NO: 446475 - RNA, 19 nt, Homo sapiens
  misc_RNA (1)...(19): siRNA sense strand
ccaagaggaccauccauau

SEQ ID NO: 446476 - RNA, 19 nt, Homo sapiens
  misc_RNA (1)...(19): siRNA sense strand
gaccauccauauugacugu

SEQ ID NO: 446477 - RNA, 19 nt, Homo sapiens
  misc_RNA (1)...(19): siRNA sense strand
ggacaugcgagcaaucuuc

SEQ ID NO: 446478 - RNA, 19 nt, Homo sapiens
  misc_RNA (1)...(19): siRNA sense strand
agaggaccauccauauuga

SEQ ID NO: 446479 - RNA, 19 nt, Homo sapiens
  misc_RNA (1)...(19): siRNA sense strand
acacgcugcuccacgaauu

SEQ ID NO: 446480 - RNA, 19 nt, Homo sapiens
  misc_RNA (1)...(19): siRNA sense strand
aagaggaccauccauauug

SEQ ID NO: 446481 - RNA, 19 nt, Homo sapiens
  misc_RNA (1)...(19): siRNA sense strand
gagaagcagcuguuaaagg

SEQ ID NO: 446482 - RNA, 19 nt, Homo sapiens
  misc_RNA (1)...(19): siRNA sense strand
cggcaugcacgauaaguuu

SEQ ID NO: 446483 - RNA, 19 nt, Homo sapiens
  misc_RNA (1)...(19): siRNA sense strand
ccauccauauugacuguga

SEQ ID NO: 446484 - RNA, 19 nt, Homo sapiens
  misc_RNA (1)...(19): siRNA sense strand
caaggagaagcagcuguua

SEQ ID NO: 446485 - RNA, 19 nt, Homo sapiens
  misc_RNA (1)...(19): siRNA sense strand
gagaagcgcaucacuagcu

SEQ ID NO: 446486 - RNA, 19 nt, Homo sapiens
  misc_RNA (1)...(19): siRNA sense strand
ccaaggagaagcagcuguu

SEQ ID NO: 446487 - RNA, 19 nt, Homo sapiens
  misc_RNA (1)...(19): siRNA sense strand
aggagaagcagcuguuaaa

SEQ ID NO: 446488 - RNA, 19 nt, Homo sapiens
  misc_RNA (1)...(19): siRNA sense strand
cccaagaggaccauccaua

SEQ ID NO: 446489 - RNA, 19 nt, Homo sapiens
  misc_RNA (1)...(19): siRNA sense strand
aggagcagcuggacuucuu

SEQ ID NO: 446490 - RNA, 19 nt, Homo sapiens
  misc_RNA (1)...(19): siRNA sense strand
gcagcuggacuucuuugug

SEQ ID NO: 446491 - RNA, 19 nt, Homo sapiens
  misc_RNA (1)...(19): siRNA sense strand
caagcgcuaugccaagaag

SEQ ID NO: 446492 - RNA, 19 nt, Homo sapiens
  misc_RNA (1)...(19): siRNA sense strand
ccgacgguaucuucuguug

SEQ ID NO: 446493 - RNA, 19 nt, Homo sapiens
  misc_RNA (1)...(19): siRNA sense strand
gugcacaaggugaucauga

SEQ ID NO: 446494 - RNA, 19 nt, Homo sapiens
  misc_RNA (1)...(19): siRNA sense strand
gagcagcuggacuucuuug

SEQ ID NO: 446495 - RNA, 19 nt, Homo sapiens
  misc_RNA (1)...(19): siRNA sense strand
cagcgauggcuacaccuuu

SEQ ID NO: 446496 - RNA, 19 nt, Homo sapiens
  misc_RNA (1)...(19): siRNA sense strand
ggagcagcuggacuucuuu

SEQ ID NO: 446497 - RNA, 19 nt, Homo sapiens
  misc_RNA (1)...(19): siRNA sense strand
cuccagaagacaagaagua

SEQ ID NO: 446498 - RNA, 19 nt, Homo sapiens
  misc_RNA (1)...(19): siRNA sense strand
guccacggcaugcacgaua

SEQ ID NO: 446499 - RNA, 19 nt, Homo sapiens
  misc_RNA (1)...(19): siRNA sense strand
ccaaggagccaaggagaag

SEQ ID NO: 446500 - RNA, 19 nt, Homo sapiens
  misc_RNA (1)...(19): siRNA sense strand
gccaaggagccaaggagaa

SEQ ID NO: 446501 - RNA, 19 nt, Homo sapiens
  misc_RNA (1)...(19): siRNA sense strand
cagcuucugcucaaucuuc

SEQ ID NO: 446502 - RNA, 19 nt, Homo sapiens
  misc_RNA (1)...(19): siRNA sense strand
gcuaugccaagaagcgaaa

SEQ ID NO: 446503 - RNA, 19 nt, Homo sapiens
  misc_RNA (1)...(19): siRNA sense strand
ggagaagcagcuguuaaag

SEQ ID NO: 446504 - RNA, 19 nt, Homo sapiens
  misc_RNA (1)...(19): siRNA sense strand
gacaugcgagcaaucuuca

SEQ ID NO: 446505 - RNA, 19 nt, Homo sapiens
  misc_RNA (1)...(19): siRNA sense strand
acccagaccuagugcacaa

SEQ ID NO: 446506 - RNA, 19 nt, Homo sapiens
  misc_RNA (1)...(19): siRNA sense strand
gcugaggacaugcgagcaa

SEQ ID NO: 446507 - RNA, 19 nt, Homo sapiens
  misc_RNA (1)...(19): siRNA sense strand
gcaugcacgauaaguuugu

SEQ ID NO: 446508 - RNA, 19 nt, Homo sapiens
  misc_RNA (1)...(19): siRNA sense strand
aaggagaagcagcuguuaa

SEQ ID NO: 446509 - RNA, 19 nt, Homo sapiens
  misc_RNA (1)...(19): siRNA sense strand
ugcacaaggugaucaugau

SEQ ID NO: 446510 - RNA, 19 nt, Homo sapiens
  misc_RNA (1)...(19): siRNA sense strand
acauggugaugcuggaaug

SEQ ID NO: 446511 - RNA, 19 nt, Homo sapiens
  misc_RNA (1)...(19): siRNA sense strand
uccacggcaugcacgauaa

SEQ ID NO: 446512 - RNA, 19 nt, Homo sapiens
  misc_RNA (1)...(19): siRNA sense strand
agcgauggcuacaccuuug

SEQ ID NO: 446513 - RNA, 19 nt, Homo sapiens
  misc_RNA (1)...(19): siRNA sense strand
ugaguacccagaccuagug

SEQ ID NO: 446514 - RNA, 19 nt, Homo sapiens
  misc_RNA (1)...(19): siRNA sense strand
caacacgcugcuccacgaa

SEQ ID NO: 446515 - RNA, 19 nt, Homo sapiens
  misc_RNA (1)...(19): siRNA sense strand
gcagccacauggugaugcu

SEQ ID NO: 446516 - RNA, 19 nt, Homo sapiens
  misc_RNA (1)...(19): siRNA sense strand
ggagggcaacgcuuucaac

SEQ ID NO: 446517 - RNA, 19 nt, Homo sapiens
  misc_RNA (1)...(19): siRNA sense strand
aguagaagacucagaauua

SEQ ID NO: 446518 - RNA, 19 nt, Homo sapiens
  misc_RNA (1)...(19): siRNA sense strand
guagaagacucagaauuag

SEQ ID NO: 446519 - RNA, 19 nt, Homo sapiens
  misc_RNA (1)...(19): siRNA sense strand
gcuaagggcccaugugauc

SEQ ID NO: 446520 - RNA, 19 nt, Homo sapiens
  misc_RNA (1)...(19): siRNA sense strand
ccagauggacacugagaaa

SEQ ID NO: 446521 - RNA, 19 nt, Homo sapiens
  misc_RNA (1)...(19): siRNA sense strand
agaagacucagaauuagaa

SEQ ID NO: 446522 - RNA, 19 nt, Homo sapiens
  misc_RNA (1)...(19): siRNA sense strand
ggaagaaccagggcagcuu

SEQ ID NO: 446523 - RNA, 19 nt, Homo sapiens
  misc_RNA (1)...(19): siRNA sense strand
gcgucuaccugcucuacug

SEQ ID NO: 446524 - RNA, 19 nt, Homo sapiens
  misc_RNA (1)...(19): siRNA sense strand
gccaaugcccuugcuguga

SEQ ID NO: 446525 - RNA, 19 nt, Homo sapiens
  misc_RNA (1)...(19): siRNA sense strand
uagaagacucagaauuaga

SEQ ID NO: 446526 - RNA, 19 nt, Homo sapiens
  misc_RNA (1)...(19): siRNA sense strand
ugugccagauggacacuga

SEQ ID NO: 446527 - RNA, 19 nt, Homo sapiens
  misc_RNA (1)...(19): siRNA sense strand
caaugcccuugcugugaga

SEQ ID NO: 446528 - RNA, 19 nt, Homo sapiens
  misc_RNA (1)...(19): siRNA sense strand
cugcuaagggcccauguga

SEQ ID NO: 446529 - RNA, 19 nt, Homo sapiens
  misc_RNA (1)...(19): siRNA sense strand
aaguagaagacucagaauu

SEQ ID NO: 446530 - RNA, 19 nt, Homo sapiens
  misc_RNA (1)...(19): siRNA sense strand
aguagaagacucagaauua

SEQ ID NO: 446531 - RNA, 19 nt, Homo sapiens
  misc_RNA (1)...(19): siRNA sense strand
guagaagacucagaauuag

SEQ ID NO: 446532 - RNA, 19 nt, Homo sapiens
  misc_RNA (1)...(19): siRNA sense strand
gcuaagggcccaugugauc

SEQ ID NO: 446533 - RNA, 19 nt, Homo sapiens
  misc_RNA (1)...(19): siRNA sense strand
ccagauggacacugagaaa

SEQ ID NO: 446534 - RNA, 19 nt, Homo sapiens
  misc_RNA (1)...(19): siRNA sense strand
agaagacucagaauuagaa

SEQ ID NO: 446535 - RNA, 19 nt, Homo sapiens
  misc_RNA (1)...(19): siRNA sense strand
ggaagaaccagggcagcuu

SEQ ID NO: 446536 - RNA, 19 nt, Homo sapiens
  misc_RNA (1)...(19): siRNA sense strand
gcgucuaccugcucuacug

SEQ ID NO: 446537 - RNA, 19 nt, Homo sapiens
  misc_RNA (1)...(19): siRNA sense strand
gccaaugcccuugcuguga

SEQ ID NO: 446538 - RNA, 19 nt, Homo sapiens
  misc_RNA (1)...(19): siRNA sense strand
uagaagacucagaauuaga

SEQ ID NO: 446539 - RNA, 19 nt, Homo sapiens
  misc_RNA (1)...(19): siRNA sense strand
ugugccagauggacacuga

SEQ ID NO: 446540 - RNA, 19 nt, Homo sapiens
  misc_RNA (1)...(19): siRNA sense strand
caaugcccuugcugugaga

SEQ ID NO: 446541 - RNA, 19 nt, Homo sapiens
  misc_RNA (1)...(19): siRNA sense strand
cugcuaagggcccauguga

SEQ ID NO: 446542 - RNA, 19 nt, Homo sapiens
  misc_RNA (1)...(19): siRNA sense strand
aaguagaagacucagaauu

SEQ ID NO: 446543 - RNA, 19 nt, Homo sapiens
  misc_RNA (1)...(19): siRNA sense strand
gcacugggccaccucauug

SEQ ID NO: 446544 - RNA, 19 nt, Homo sapiens
  misc_RNA (1)...(19): siRNA sense strand
gggcugcucugcuuuaugg

SEQ ID NO: 446545 - RNA, 19 nt, Homo sapiens
  misc_RNA (1)...(19): siRNA sense strand
gagagacccuugggaucaa

SEQ ID NO: 446546 - RNA, 19 nt, Homo sapiens
  misc_RNA (1)...(19): siRNA sense strand
ggagauggagaguguguga

SEQ ID NO: 446547 - RNA, 19 nt, Homo sapiens
  misc_RNA (1)...(19): siRNA sense strand
cgacagccgucagacauca

SEQ ID NO: 446548 - RNA, 19 nt, Homo sapiens
  misc_RNA (1)...(19): siRNA sense strand
cgagagacccuugggauca

SEQ ID NO: 446549 - RNA, 19 nt, Homo sapiens
  misc_RNA (1)...(19): siRNA sense strand
gacgcuggccuuccucgua

SEQ ID NO: 446550 - RNA, 19 nt, Homo sapiens
  misc_RNA (1)...(19): siRNA sense strand
ccucacugaucuacaacuu

SEQ ID NO: 446551 - RNA, 19 nt, Homo sapiens
  misc_RNA (1)...(19): siRNA sense strand
caucaucauugggaaguuc

SEQ ID NO: 446552 - RNA, 19 nt, Homo sapiens
  misc_RNA (1)...(19): siRNA sense strand
ccacggggcuguauguguu

SEQ ID NO: 446553 - RNA, 19 nt, Homo sapiens
  misc_RNA (1)...(19): siRNA sense strand
uggccucacugaucuacaa

SEQ ID NO: 446554 - RNA, 19 nt, Homo sapiens
  misc_RNA (1)...(19): siRNA sense strand
ccguggagauggagagugu

SEQ ID NO: 446555 - RNA, 19 nt, Homo sapiens
  misc_RNA (1)...(19): siRNA sense strand
ggucaugccgggagacauc

SEQ ID NO: 446556 - RNA, 19 nt, Homo sapiens
  misc_RNA (1)...(19): siRNA sense strand
gcggcuggcuauccucaca

SEQ ID NO: 446557 - RNA, 19 nt, Homo sapiens
  misc_RNA (1)...(19): siRNA sense strand
gcccugccaucaucauugg

SEQ ID NO: 446558 - RNA, 19 nt, Homo sapiens
  misc_RNA (1)...(19): siRNA sense strand
ggcuguauguguucuuugg

SEQ ID NO: 446559 - RNA, 19 nt, Homo sapiens
  misc_RNA (1)...(19): siRNA sense strand
cuacaacuucguccuguuc

SEQ ID NO: 446560 - RNA, 19 nt, Homo sapiens
  misc_RNA (1)...(19): siRNA sense strand
gggcgcuguuugcagaguu

SEQ ID NO: 446561 - RNA, 19 nt, Homo sapiens
  misc_RNA (1)...(19): siRNA sense strand
uucacuggcugcuccauga

SEQ ID NO: 446562 - RNA, 19 nt, Homo sapiens
  misc_RNA (1)...(19): siRNA sense strand
ccucguaggcucccacauc

SEQ ID NO: 446563 - RNA, 19 nt, Homo sapiens
  misc_RNA (1)...(19): siRNA sense strand
cuucggcccugccaucauc

SEQ ID NO: 446564 - RNA, 19 nt, Homo sapiens
  misc_RNA (1)...(19): siRNA sense strand
cagauugccaucaccuuca

SEQ ID NO: 446565 - RNA, 19 nt, Homo sapiens
  misc_RNA (1)...(19): siRNA sense strand
agauugccaucaccuucaa

SEQ ID NO: 446566 - RNA, 19 nt, Homo sapiens
  misc_RNA (1)...(19): siRNA sense strand
ggcacugggccaccucauu

SEQ ID NO: 446567 - RNA, 19 nt, Homo sapiens
  misc_RNA (1)...(19): siRNA sense strand
gggcugcucugcuuuaugg

SEQ ID NO: 446568 - RNA, 19 nt, Homo sapiens
  misc_RNA (1)...(19): siRNA sense strand
gagagacccuugggaucaa

SEQ ID NO: 446569 - RNA, 19 nt, Homo sapiens
  misc_RNA (1)...(19): siRNA sense strand
cgagagacccuugggauca

SEQ ID NO: 446570 - RNA, 19 nt, Homo sapiens
  misc_RNA (1)...(19): siRNA sense strand
gacgcuggccuuccucgua

SEQ ID NO: 446571 - RNA, 19 nt, Homo sapiens
  misc_RNA (1)...(19): siRNA sense strand
ccacggggcuguauguguu

SEQ ID NO: 446572 - RNA, 19 nt, Homo sapiens
  misc_RNA (1)...(19): siRNA sense strand
ggucaugccgggagacauc

SEQ ID NO: 446573 - RNA, 19 nt, Homo sapiens
  misc_RNA (1)...(19): siRNA sense strand
gggcgcuguuugcagaguu

SEQ ID NO: 446574 - RNA, 19 nt, Homo sapiens
  misc_RNA (1)...(19): siRNA sense strand
ggcuguauguguucuuugg

SEQ ID NO: 446575 - RNA, 19 nt, Homo sapiens
  misc_RNA (1)...(19): siRNA sense strand
ccucguaggcucccacauc

SEQ ID NO: 446576 - RNA, 19 nt, Homo sapiens
  misc_RNA (1)...(19): siRNA sense strand
cagauugccaucaccuuca

SEQ ID NO: 446577 - RNA, 19 nt, Homo sapiens
  misc_RNA (1)...(19): siRNA sense strand
agauugccaucaccuucaa

SEQ ID NO: 446578 - RNA, 19 nt, Homo sapiens
  misc_RNA (1)...(19): siRNA sense strand
ggaauuguaccauggaaga

SEQ ID NO: 446579 - RNA, 19 nt, Homo sapiens
  misc_RNA (1)...(19): siRNA sense strand
gggcaagccugcucuagag

SEQ ID NO: 446580 - RNA, 19 nt, Homo sapiens
  misc_RNA (1)...(19): siRNA sense strand
acacggugcugcugcguaa

SEQ ID NO: 446581 - RNA, 19 nt, Homo sapiens
  misc_RNA (1)...(19): siRNA sense strand
gcagcaagauccggucugu

SEQ ID NO: 446582 - RNA, 19 nt, Homo sapiens
  misc_RNA (1)...(19): siRNA sense strand
gcucagacgugcagcuucu

SEQ ID NO: 446583 - RNA, 19 nt, Homo sapiens
  misc_RNA (1)...(19): siRNA sense strand
gagggaaucaccaccuauu

SEQ ID NO: 446584 - RNA, 19 nt, Homo sapiens
  misc_RNA (1)...(19): siRNA sense strand
ggaaucaccaccuauuucu

SEQ ID NO: 446585 - RNA, 19 nt, Homo sapiens
  misc_RNA (1)...(19): siRNA sense strand
acgugcagcuucuggaaua

SEQ ID NO: 446586 - RNA, 19 nt, Homo sapiens
  misc_RNA (1)...(19): siRNA sense strand
caacaugggcaacuacaag

SEQ ID NO: 446587 - RNA, 19 nt, Homo sapiens
  misc_RNA (1)...(19): siRNA sense strand
gggaaucaccaccuauuuc

SEQ ID NO: 446588 - RNA, 19 nt, Homo sapiens
  misc_RNA (1)...(19): siRNA sense strand
gacccgaguuggaggagau

SEQ ID NO: 446589 - RNA, 19 nt, Homo sapiens
  misc_RNA (1)...(19): siRNA sense strand
caacaugcccuggcugaag

SEQ ID NO: 446590 - RNA, 19 nt, Homo sapiens
  misc_RNA (1)...(19): siRNA sense strand
gcaacuacaaguccuuugg

SEQ ID NO: 446591 - RNA, 19 nt, Homo sapiens
  misc_RNA (1)...(19): siRNA sense strand
gaccagcugcgccaacaug

SEQ ID NO: 446592 - RNA, 19 nt, Homo sapiens
  misc_RNA (1)...(19): siRNA sense strand
cucggaagcucauuguuca

SEQ ID NO: 446593 - RNA, 19 nt, Homo sapiens
  misc_RNA (1)...(19): siRNA sense strand
ggagggaaucaccaccuau

SEQ ID NO: 446594 - RNA, 19 nt, Homo sapiens
  misc_RNA (1)...(19): siRNA sense strand
gaaucucggaagcucauug

SEQ ID NO: 446595 - RNA, 19 nt, Homo sapiens
  misc_RNA (1)...(19): siRNA sense strand
aguacauccugcccaauga

SEQ ID NO: 446596 - RNA, 19 nt, Homo sapiens
  misc_RNA (1)...(19): siRNA sense strand
ccacagccgaugcccgauu

SEQ ID NO: 446597 - RNA, 19 nt, Homo sapiens
  misc_RNA (1)...(19): siRNA sense strand
aggagggaaucaccaccua

SEQ ID NO: 446598 - RNA, 19 nt, Homo sapiens
  misc_RNA (1)...(19): siRNA sense strand
cacagccgaugcccgauuc

SEQ ID NO: 446599 - RNA, 19 nt, Homo sapiens
  misc_RNA (1)...(19): siRNA sense strand
cuauuucucugggaauugu

SEQ ID NO: 446600 - RNA, 19 nt, Homo sapiens
  misc_RNA (1)...(19): siRNA sense strand
gggcaacuacaaguccuuu

SEQ ID NO: 446601 - RNA, 19 nt, Homo sapiens
  misc_RNA (1)...(19): siRNA sense strand
caguacauccugcccaaug

SEQ ID NO: 446602 - RNA, 19 nt, Homo sapiens
  misc_RNA (1)...(19): siRNA sense strand
uuaccgaggaggaguauca

SEQ ID NO: 446603 - RNA, 19 nt, Homo sapiens
  misc_RNA (1)...(19): siRNA sense strand
caacuacaaguccuuuggu

SEQ ID NO: 446604 - RNA, 19 nt, Homo sapiens
  misc_RNA (1)...(19): siRNA sense strand
gcagcacccagaagaaguc

SEQ ID NO: 446605 - RNA, 19 nt, Homo sapiens
  misc_RNA (1)...(19): siRNA sense strand
ucucggaagcucauuguuc

SEQ ID NO: 446606 - RNA, 19 nt, Homo sapiens
  misc_RNA (1)...(19): siRNA sense strand
acuccaacaugggcaacua

SEQ ID NO: 446607 - RNA, 19 nt, Homo sapiens
  misc_RNA (1)...(19): siRNA sense strand
ggaauuguaccauggaaga

SEQ ID NO: 446608 - RNA, 19 nt, Homo sapiens
  misc_RNA (1)...(19): siRNA sense strand
gggcaagccugcucuagag

SEQ ID NO: 446609 - RNA, 19 nt, Homo sapiens
  misc_RNA (1)...(19): siRNA sense strand
acacggugcugcugcguaa

SEQ ID NO: 446610 - RNA, 19 nt, Homo sapiens
  misc_RNA (1)...(19): siRNA sense strand
gcagcaagauccggucugu

SEQ ID NO: 446611 - RNA, 19 nt, Homo sapiens
  misc_RNA (1)...(19): siRNA sense strand
gcucagacgugcagcuucu

SEQ ID NO: 446612 - RNA, 19 nt, Homo sapiens
  misc_RNA (1)...(19): siRNA sense strand
gagggaaucaccaccuauu

SEQ ID NO: 446613 - RNA, 19 nt, Homo sapiens
  misc_RNA (1)...(19): siRNA sense strand
ggaaucaccaccuauuucu

SEQ ID NO: 446614 - RNA, 19 nt, Homo sapiens
  misc_RNA (1)...(19): siRNA sense strand
acgugcagcuucuggaaua

SEQ ID NO: 446615 - RNA, 19 nt, Homo sapiens
  misc_RNA (1)...(19): siRNA sense strand
caacaugggcaacuacaag

SEQ ID NO: 446616 - RNA, 19 nt, Homo sapiens
  misc_RNA (1)...(19): siRNA sense strand
gggaaucaccaccuauuuc

SEQ ID NO: 446617 - RNA, 19 nt, Homo sapiens
  misc_RNA (1)...(19): siRNA sense strand
gacccgaguuggaggagau

SEQ ID NO: 446618 - RNA, 19 nt, Homo sapiens
  misc_RNA (1)...(19): siRNA sense strand
caacaugcccuggcugaag

SEQ ID NO: 446619 - RNA, 19 nt, Homo sapiens
  misc_RNA (1)...(19): siRNA sense strand
gcaacuacaaguccuuugg

SEQ ID NO: 446620 - RNA, 19 nt, Homo sapiens
  misc_RNA (1)...(19): siRNA sense strand
gaccagcugcgccaacaug

SEQ ID NO: 446621 - RNA, 19 nt, Homo sapiens
  misc_RNA (1)...(19): siRNA sense strand
cucggaagcucauuguuca

SEQ ID NO: 446622 - RNA, 19 nt, Homo sapiens
  misc_RNA (1)...(19): siRNA sense strand
ggagggaaucaccaccuau

SEQ ID NO: 446623 - RNA, 19 nt, Homo sapiens
  misc_RNA (1)...(19): siRNA sense strand
gaaucucggaagcucauug

SEQ ID NO: 446624 - RNA, 19 nt, Homo sapiens
  misc_RNA (1)...(19): siRNA sense strand
aguacauccugcccaauga

SEQ ID NO: 446625 - RNA, 19 nt, Homo sapiens
  misc_RNA (1)...(19): siRNA sense strand
ccacagccgaugcccgauu

SEQ ID NO: 446626 - RNA, 19 nt, Homo sapiens
  misc_RNA (1)...(19): siRNA sense strand
aggagggaaucaccaccua

SEQ ID NO: 446627 - RNA, 19 nt, Homo sapiens
  misc_RNA (1)...(19): siRNA sense strand
cacagccgaugcccgauuc

SEQ ID NO: 446628 - RNA, 19 nt, Homo sapiens
  misc_RNA (1)...(19): siRNA sense strand
cuauuucucugggaauugu

SEQ ID NO: 446629 - RNA, 19 nt, Homo sapiens
  misc_RNA (1)...(19): siRNA sense strand
gggcaacuacaaguccuuu

SEQ ID NO: 446630 - RNA, 19 nt, Homo sapiens
  misc_RNA (1)...(19): siRNA sense strand
caguacauccugcccaaug

SEQ ID NO: 446631 - RNA, 19 nt, Homo sapiens
  misc_RNA (1)...(19): siRNA sense strand
uuaccgaggaggaguauca

SEQ ID NO: 446632 - RNA, 19 nt, Homo sapiens
  misc_RNA (1)...(19): siRNA sense strand
caacuacaaguccuuuggu

SEQ ID NO: 446633 - RNA, 19 nt, Homo sapiens
  misc_RNA (1)...(19): siRNA sense strand
gcagcacccagaagaaguc

SEQ ID NO: 446634 - RNA, 19 nt, Homo sapiens
  misc_RNA (1)...(19): siRNA sense strand
ucucggaagcucauuguuc

SEQ ID NO: 446635 - RNA, 19 nt, Homo sapiens
  misc_RNA (1)...(19): siRNA sense strand
acuccaacaugggcaacua

SEQ ID NO: 446636 - RNA, 19 nt, Homo sapiens
  misc_RNA (1)...(19): siRNA sense strand
gcacgcaucuucuccuuug

SEQ ID NO: 446637 - RNA, 19 nt, Homo sapiens
  misc_RNA (1)...(19): siRNA sense strand
ggaaggcgaugacucagau

SEQ ID NO: 446638 - RNA, 19 nt, Homo sapiens
  misc_RNA (1)...(19): siRNA sense strand
gagcggacccugacaaguu

SEQ ID NO: 446639 - RNA, 19 nt, Homo sapiens
  misc_RNA (1)...(19): siRNA sense strand
guuaggagcucagacacuu

SEQ ID NO: 446640 - RNA, 19 nt, Homo sapiens
  misc_RNA (1)...(19): siRNA sense strand
gcaguuuccguuugacuuu

SEQ ID NO: 446641 - RNA, 19 nt, Homo sapiens
  misc_RNA (1)...(19): siRNA sense strand
gggagaaguuggagcagau

SEQ ID NO: 446642 - RNA, 19 nt, Homo sapiens
  misc_RNA (1)...(19): siRNA sense strand
aagcugaccuucauugaca

SEQ ID NO: 446643 - RNA, 19 nt, Homo sapiens
  misc_RNA (1)...(19): siRNA sense strand
gugaggaguuccagagaau

SEQ ID NO: 446644 - RNA, 19 nt, Homo sapiens
  misc_RNA (1)...(19): siRNA sense strand
gaagggagaccgaggugau

SEQ ID NO: 446645 - RNA, 19 nt, Homo sapiens
  misc_RNA (1)...(19): siRNA sense strand
gaaccgggcagcaucuuca

SEQ ID NO: 446646 - RNA, 19 nt, Homo sapiens
  misc_RNA (1)...(19): siRNA sense strand
caagggagagauuggcuuu

SEQ ID NO: 446647 - RNA, 19 nt, Homo sapiens
  misc_RNA (1)...(19): siRNA sense strand
guuggaggcugaaaugaag

SEQ ID NO: 446648 - RNA, 19 nt, Homo sapiens
  misc_RNA (1)...(19): siRNA sense strand
ggugaucgcugagcugaag

SEQ ID NO: 446649 - RNA, 19 nt, Homo sapiens
  misc_RNA (1)...(19): siRNA sense strand
gaagauuccagaagugaag

SEQ ID NO: 446650 - RNA, 19 nt, Homo sapiens
  misc_RNA (1)...(19): siRNA sense strand
ccagggcaguuuccguuug

SEQ ID NO: 446651 - RNA, 19 nt, Homo sapiens
  misc_RNA (1)...(19): siRNA sense strand
cagggcaguuuccguuuga

SEQ ID NO: 446652 - RNA, 19 nt, Homo sapiens
  misc_RNA (1)...(19): siRNA sense strand
ggacaucucccugcucuac

SEQ ID NO: 446653 - RNA, 19 nt, Homo sapiens
  misc_RNA (1)...(19): siRNA sense strand
cgaggaaggcgaugacuca

SEQ ID NO: 446654 - RNA, 19 nt, Homo sapiens
  misc_RNA (1)...(19): siRNA sense strand
gaaguuggagcagauggaa

SEQ ID NO: 446655 - RNA, 19 nt, Homo sapiens
  misc_RNA (1)...(19): siRNA sense strand
gacaagcugaccuucauug

SEQ ID NO: 446656 - RNA, 19 nt, Homo sapiens
  misc_RNA (1)...(19): siRNA sense strand
gggcacgcaucuucuccuu

SEQ ID NO: 446657 - RNA, 19 nt, Homo sapiens
  misc_RNA (1)...(19): siRNA sense strand
ggagaugccagccuuggau

SEQ ID NO: 446658 - RNA, 19 nt, Homo sapiens
  misc_RNA (1)...(19): siRNA sense strand
gggaugaacggauugaaag

SEQ ID NO: 446659 - RNA, 19 nt, Homo sapiens
  misc_RNA (1)...(19): siRNA sense strand
ugaccgagagcuacuguga

SEQ ID NO: 446660 - RNA, 19 nt, Homo sapiens
  misc_RNA (1)...(19): siRNA sense strand
uggauuugaugacauggaa

SEQ ID NO: 446661 - RNA, 19 nt, Homo sapiens
  misc_RNA (1)...(19): siRNA sense strand
aggaaggacugggcagaaa

SEQ ID NO: 446662 - RNA, 19 nt, Homo sapiens
  misc_RNA (1)...(19): siRNA sense strand
caaggacgagcugcuguuu

SEQ ID NO: 446663 - RNA, 19 nt, Homo sapiens
  misc_RNA (1)...(19): siRNA sense strand
cacgagggacggacaauga

SEQ ID NO: 446664 - RNA, 19 nt, Homo sapiens
  misc_RNA (1)...(19): siRNA sense strand
gaugccagccuuggauuug

SEQ ID NO: 446665 - RNA, 19 nt, Homo sapiens
  misc_RNA (1)...(19): siRNA sense strand
accgagagcuacugugaga

SEQ ID NO: 446666 - RNA, 19 nt, Homo sapiens
  misc_RNA (1)...(19): siRNA sense strand
ugugaggaguuccagagaa

SEQ ID NO: 446667 - RNA, 19 nt, Homo sapiens
  misc_RNA (1)...(19): siRNA sense strand
gaugaacggauugaaagga

SEQ ID NO: 446668 - RNA, 19 nt, Homo sapiens
  misc_RNA (1)...(19): siRNA sense strand
gagaugccagccuuggauu

SEQ ID NO: 446669 - RNA, 19 nt, Homo sapiens
  misc_RNA (1)...(19): siRNA sense strand
gggcuggccuacgucuuug

SEQ ID NO: 446670 - RNA, 19 nt, Homo sapiens
  misc_RNA (1)...(19): siRNA sense strand
gcucugaggguccgcugaa

SEQ ID NO: 446671 - RNA, 19 nt, Homo sapiens
  misc_RNA (1)...(19): siRNA sense strand
cacgguggcuucguuagga

SEQ ID NO: 446672 - RNA, 19 nt, Homo sapiens
  misc_RNA (1)...(19): siRNA sense strand
ucaugacugccuccaagua

SEQ ID NO: 446673 - RNA, 19 nt, Homo sapiens
  misc_RNA (1)...(19): siRNA sense strand
ggaaggacugggcagaaag

SEQ ID NO: 446674 - RNA, 19 nt, Homo sapiens
  misc_RNA (1)...(19): siRNA sense strand
gcagcagcacggaagauuc

SEQ ID NO: 446675 - RNA, 19 nt, Homo sapiens
  misc_RNA (1)...(19): siRNA sense strand
gggccgacuuccagugcuu

SEQ ID NO: 446676 - RNA, 19 nt, Homo sapiens
  misc_RNA (1)...(19): siRNA sense strand
ccucacaggcagacuauca

SEQ ID NO: 446677 - RNA, 19 nt, Homo sapiens
  misc_RNA (1)...(19): siRNA sense strand
guuugacuuucuucaguug

SEQ ID NO: 446678 - RNA, 19 nt, Homo sapiens
  misc_RNA (1)...(19): siRNA sense strand
uuacgacagcaauguguuu

SEQ ID NO: 446679 - RNA, 19 nt, Homo sapiens
  misc_RNA (1)...(19): siRNA sense strand
gaaggacugggcagaaagg

SEQ ID NO: 446680 - RNA, 19 nt, Homo sapiens
  misc_RNA (1)...(19): siRNA sense strand
gcacugccuggacgaggaa

SEQ ID NO: 446681 - RNA, 19 nt, Homo sapiens
  misc_RNA (1)...(19): siRNA sense strand
cguuugacuuucuucaguu

SEQ ID NO: 446682 - RNA, 19 nt, Homo sapiens
  misc_RNA (1)...(19): siRNA sense strand
acgacaagcugaccuucau

SEQ ID NO: 446683 - RNA, 19 nt, Homo sapiens
  misc_RNA (1)...(19): siRNA sense strand
gacacuuccuggcucagau

SEQ ID NO: 446684 - RNA, 19 nt, Homo sapiens
  misc_RNA (1)...(19): siRNA sense strand
cuucuuccgugacuucuca

SEQ ID NO: 446685 - RNA, 19 nt, Homo sapiens
  misc_RNA (1)...(19): siRNA sense strand
cuacaucgugcucugcauu

SEQ ID NO: 446686 - RNA, 19 nt, Homo sapiens
  misc_RNA (1)...(19): siRNA sense strand
gcaggcugaccgagagcua

SEQ ID NO: 446687 - RNA, 19 nt, Homo sapiens
  misc_RNA (1)...(19): siRNA sense strand
cgggaugaacggauugaaa

SEQ ID NO: 446688 - RNA, 19 nt, Homo sapiens
  misc_RNA (1)...(19): siRNA sense strand
cgggcuggccuacgucuuu

SEQ ID NO: 446689 - RNA, 19 nt, Homo sapiens
  misc_RNA (1)...(19): siRNA sense strand
uuccagaagugaagaaguc

SEQ ID NO: 446690 - RNA, 19 nt, Homo sapiens
  misc_RNA (1)...(19): siRNA sense strand
ccguuugacuuucuucagu

SEQ ID NO: 446691 - RNA, 19 nt, Homo sapiens
  misc_RNA (1)...(19): siRNA sense strand
ugaccuucauugacaugga

SEQ ID NO: 446692 - RNA, 19 nt, Homo sapiens
  misc_RNA (1)...(19): siRNA sense strand
cgacaagcugaccuucauu

SEQ ID NO: 446693 - RNA, 19 nt, Homo sapiens
  misc_RNA (1)...(19): siRNA sense strand
cauggagggaucuggcuuu

SEQ ID NO: 446694 - RNA, 19 nt, Homo sapiens
  misc_RNA (1)...(19): siRNA sense strand
agggcaaccugggcucuaa

SEQ ID NO: 446695 - RNA, 19 nt, Homo sapiens
  misc_RNA (1)...(19): siRNA sense strand
ggcagcagcacggaagauu

SEQ ID NO: 446696 - RNA, 19 nt, Homo sapiens
  misc_RNA (1)...(19): siRNA sense strand
auugagaacagcuucauga

SEQ ID NO: 446697 - RNA, 19 nt, Homo sapiens
  misc_RNA (1)...(19): siRNA sense strand
ucaaggacgagcugcuguu

SEQ ID NO: 446698 - RNA, 19 nt, Homo sapiens
  misc_RNA (1)...(19): siRNA sense strand
gagggacggacaaugaagu

SEQ ID NO: 446699 - RNA, 19 nt, Homo sapiens
  misc_RNA (1)...(19): siRNA sense strand
acaagcugaccuucauuga

SEQ ID NO: 446700 - RNA, 19 nt, Homo sapiens
  misc_RNA (1)...(19): siRNA sense strand
caguguggcagguggcuuu

SEQ ID NO: 446701 - RNA, 19 nt, Homo sapiens
  misc_RNA (1)...(19): siRNA sense strand
ucucacugcuguuccacau

SEQ ID NO: 446702 - RNA, 19 nt, Homo sapiens
  misc_RNA (1)...(19): siRNA sense strand
cggauugaaaggagagaaa

SEQ ID NO: 446703 - RNA, 19 nt, Homo sapiens
  misc_RNA (1)...(19): siRNA sense strand
gcacgcaucuucuccuuug

SEQ ID NO: 446704 - RNA, 19 nt, Homo sapiens
  misc_RNA (1)...(19): siRNA sense strand
ggaaggcgaugacucagau

SEQ ID NO: 446705 - RNA, 19 nt, Homo sapiens
  misc_RNA (1)...(19): siRNA sense strand
gagcggacccugacaaguu

SEQ ID NO: 446706 - RNA, 19 nt, Homo sapiens
  misc_RNA (1)...(19): siRNA sense strand
guuaggagcucagacacuu

SEQ ID NO: 446707 - RNA, 19 nt, Homo sapiens
  misc_RNA (1)...(19): siRNA sense strand
gcaguuuccguuugacuuu

SEQ ID NO: 446708 - RNA, 19 nt, Homo sapiens
  misc_RNA (1)...(19): siRNA sense strand
gggagaaguuggagcagau

SEQ ID NO: 446709 - RNA, 19 nt, Homo sapiens
  misc_RNA (1)...(19): siRNA sense strand
aagcugaccuucauugaca

SEQ ID NO: 446710 - RNA, 19 nt, Homo sapiens
  misc_RNA (1)...(19): siRNA sense strand
gugaggaguuccagagaau

SEQ ID NO: 446711 - RNA, 19 nt, Homo sapiens
  misc_RNA (1)...(19): siRNA sense strand
gaagggagaccgaggugau

SEQ ID NO: 446712 - RNA, 19 nt, Homo sapiens
  misc_RNA (1)...(19): siRNA sense strand
gaaccgggcagcaucuuca

SEQ ID NO: 446713 - RNA, 19 nt, Homo sapiens
  misc_RNA (1)...(19): siRNA sense strand
caagggagagauuggcuuu

SEQ ID NO: 446714 - RNA, 19 nt, Homo sapiens
  misc_RNA (1)...(19): siRNA sense strand
guuggaggcugaaaugaag

SEQ ID NO: 446715 - RNA, 19 nt, Homo sapiens
  misc_RNA (1)...(19): siRNA sense strand
ggugaucgcugagcugaag

SEQ ID NO: 446716 - RNA, 19 nt, Homo sapiens
  misc_RNA (1)...(19): siRNA sense strand
gaagauuccagaagugaag

SEQ ID NO: 446717 - RNA, 19 nt, Homo sapiens
  misc_RNA (1)...(19): siRNA sense strand
ccagggcaguuuccguuug

SEQ ID NO: 446718 - RNA, 19 nt, Homo sapiens
  misc_RNA (1)...(19): siRNA sense strand
cagggcaguuuccguuuga

SEQ ID NO: 446719 - RNA, 19 nt, Homo sapiens
  misc_RNA (1)...(19): siRNA sense strand
ggacaucucccugcucuac

SEQ ID NO: 446720 - RNA, 19 nt, Homo sapiens
  misc_RNA (1)...(19): siRNA sense strand
cgaggaaggcgaugacuca

SEQ ID NO: 446721 - RNA, 19 nt, Homo sapiens
  misc_RNA (1)...(19): siRNA sense strand
gaaguuggagcagauggaa

SEQ ID NO: 446722 - RNA, 19 nt, Homo sapiens
  misc_RNA (1)...(19): siRNA sense strand
gacaagcugaccuucauug

SEQ ID NO: 446723 - RNA, 19 nt, Homo sapiens
  misc_RNA (1)...(19): siRNA sense strand
gggcacgcaucuucuccuu

SEQ ID NO: 446724 - RNA, 19 nt, Homo sapiens
  misc_RNA (1)...(19): siRNA sense strand
ggagaugccagccuuggau

SEQ ID NO: 446725 - RNA, 19 nt, Homo sapiens
  misc_RNA (1)...(19): siRNA sense strand
gggaugaacggauugaaag

SEQ ID NO: 446726 - RNA, 19 nt, Homo sapiens
  misc_RNA (1)...(19): siRNA sense strand
ugaccgagagcuacuguga

SEQ ID NO: 446727 - RNA, 19 nt, Homo sapiens
  misc_RNA (1)...(19): siRNA sense strand
uggauuugaugacauggaa

SEQ ID NO: 446728 - RNA, 19 nt, Homo sapiens
  misc_RNA (1)...(19): siRNA sense strand
aggaaggacugggcagaaa

SEQ ID NO: 446729 - RNA, 19 nt, Homo sapiens
  misc_RNA (1)...(19): siRNA sense strand
caaggacgagcugcuguuu

SEQ ID NO: 446730 - RNA, 19 nt, Homo sapiens
  misc_RNA (1)...(19): siRNA sense strand
cacgagggacggacaauga

SEQ ID NO: 446731 - RNA, 19 nt, Homo sapiens
  misc_RNA (1)...(19): siRNA sense strand
gaugccagccuuggauuug

SEQ ID NO: 446732 - RNA, 19 nt, Homo sapiens
  misc_RNA (1)...(19): siRNA sense strand
accgagagcuacugugaga

SEQ ID NO: 446733 - RNA, 19 nt, Homo sapiens
  misc_RNA (1)...(19): siRNA sense strand
ugugaggaguuccagagaa

SEQ ID NO: 446734 - RNA, 19 nt, Homo sapiens
  misc_RNA (1)...(19): siRNA sense strand
gaugaacggauugaaagga

SEQ ID NO: 446735 - RNA, 19 nt, Homo sapiens
  misc_RNA (1)...(19): siRNA sense strand
gagaugccagccuuggauu

SEQ ID NO: 446736 - RNA, 19 nt, Homo sapiens
  misc_RNA (1)...(19): siRNA sense strand
gggcuggccuacgucuuug

SEQ ID NO: 446737 - RNA, 19 nt, Homo sapiens
  misc_RNA (1)...(19): siRNA sense strand
gcucugaggguccgcugaa

SEQ ID NO: 446738 - RNA, 19 nt, Homo sapiens
  misc_RNA (1)...(19): siRNA sense strand
cacgguggcuucguuagga

SEQ ID NO: 446739 - RNA, 19 nt, Homo sapiens
  misc_RNA (1)...(19): siRNA sense strand
ucaugacugccuccaagua

SEQ ID NO: 446740 - RNA, 19 nt, Homo sapiens
  misc_RNA (1)...(19): siRNA sense strand
ggaaggacugggcagaaag

SEQ ID NO: 446741 - RNA, 19 nt, Homo sapiens
  misc_RNA (1)...(19): siRNA sense strand
gcagcagcacggaagauuc

SEQ ID NO: 446742 - RNA, 19 nt, Homo sapiens
  misc_RNA (1)...(19): siRNA sense strand
gggccgacuuccagugcuu

SEQ ID NO: 446743 - RNA, 19 nt, Homo sapiens
  misc_RNA (1)...(19): siRNA sense strand
ccucacaggcagacuauca

SEQ ID NO: 446744 - RNA, 19 nt, Homo sapiens
  misc_RNA (1)...(19): siRNA sense strand
guuugacuuucuucaguug

SEQ ID NO: 446745 - RNA, 19 nt, Homo sapiens
  misc_RNA (1)...(19): siRNA sense strand
uuacgacagcaauguguuu

SEQ ID NO: 446746 - RNA, 19 nt, Homo sapiens
  misc_RNA (1)...(19): siRNA sense strand
gaaggacugggcagaaagg

SEQ ID NO: 446747 - RNA, 19 nt, Homo sapiens
  misc_RNA (1)...(19): siRNA sense strand
gcacugccuggacgaggaa

SEQ ID NO: 446748 - RNA, 19 nt, Homo sapiens
  misc_RNA (1)...(19): siRNA sense strand
cguuugacuuucuucaguu

SEQ ID NO: 446749 - RNA, 19 nt, Homo sapiens
  misc_RNA (1)...(19): siRNA sense strand
acgacaagcugaccuucau

SEQ ID NO: 446750 - RNA, 19 nt, Homo sapiens
  misc_RNA (1)...(19): siRNA sense strand
gacacuuccuggcucagau

SEQ ID NO: 446751 - RNA, 19 nt, Homo sapiens
  misc_RNA (1)...(19): siRNA sense strand
cuucuuccgugacuucuca

SEQ ID NO: 446752 - RNA, 19 nt, Homo sapiens
  misc_RNA (1)...(19): siRNA sense strand
cuacaucgugcucugcauu

SEQ ID NO: 446753 - RNA, 19 nt, Homo sapiens
  misc_RNA (1)...(19): siRNA sense strand
gcaggcugaccgagagcua

SEQ ID NO: 446754 - RNA, 19 nt, Homo sapiens
  misc_RNA (1)...(19): siRNA sense strand
cgggaugaacggauugaaa

SEQ ID NO: 446755 - RNA, 19 nt, Homo sapiens
  misc_RNA (1)...(19): siRNA sense strand
cgggcuggccuacgucuuu

SEQ ID NO: 446756 - RNA, 19 nt, Homo sapiens
  misc_RNA (1)...(19): siRNA sense strand
uuccagaagugaagaaguc

SEQ ID NO: 446757 - RNA, 19 nt, Homo sapiens
  misc_RNA (1)...(19): siRNA sense strand
ccguuugacuuucuucagu

SEQ ID NO: 446758 - RNA, 19 nt, Homo sapiens
  misc_RNA (1)...(19): siRNA sense strand
ugaccuucauugacaugga

SEQ ID NO: 446759 - RNA, 19 nt, Homo sapiens
  misc_RNA (1)...(19): siRNA sense strand
cgacaagcugaccuucauu

SEQ ID NO: 446760 - RNA, 19 nt, Homo sapiens
  misc_RNA (1)...(19): siRNA sense strand
cauggagggaucuggcuuu

SEQ ID NO: 446761 - RNA, 19 nt, Homo sapiens
  misc_RNA (1)...(19): siRNA sense strand
agggcaaccugggcucuaa

SEQ ID NO: 446762 - RNA, 19 nt, Homo sapiens
  misc_RNA (1)...(19): siRNA sense strand
ggcagcagcacggaagauu

SEQ ID NO: 446763 - RNA, 19 nt, Homo sapiens
  misc_RNA (1)...(19): siRNA sense strand
auugagaacagcuucauga

SEQ ID NO: 446764 - RNA, 19 nt, Homo sapiens
  misc_RNA (1)...(19): siRNA sense strand
ucaaggacgagcugcuguu

SEQ ID NO: 446765 - RNA, 19 nt, Homo sapiens
  misc_RNA (1)...(19): siRNA sense strand
gagggacggacaaugaagu

SEQ ID NO: 446766 - RNA, 19 nt, Homo sapiens
  misc_RNA (1)...(19): siRNA sense strand
acaagcugaccuucauuga

SEQ ID NO: 446767 - RNA, 19 nt, Homo sapiens
  misc_RNA (1)...(19): siRNA sense strand
caguguggcagguggcuuu

SEQ ID NO: 446768 - RNA, 19 nt, Homo sapiens
  misc_RNA (1)...(19): siRNA sense strand
ucucacugcuguuccacau

SEQ ID NO: 446769 - RNA, 19 nt, Homo sapiens
  misc_RNA (1)...(19): siRNA sense strand
cggauugaaaggagagaaa

SEQ ID NO: 446770 - RNA, 19 nt, Homo sapiens
  misc_RNA (1)...(19): siRNA sense strand
gcacgcaucuucuccuuug

SEQ ID NO: 446771 - RNA, 19 nt, Homo sapiens
  misc_RNA (1)...(19): siRNA sense strand
ggaaggcgaugacucagau

SEQ ID NO: 446772 - RNA, 19 nt, Homo sapiens
  misc_RNA (1)...(19): siRNA sense strand
gagcggacccugacaaguu

SEQ ID NO: 446773 - RNA, 19 nt, Homo sapiens
  misc_RNA (1)...(19): siRNA sense strand
guuaggagcucagacacuu

SEQ ID NO: 446774 - RNA, 19 nt, Homo sapiens
  misc_RNA (1)...(19): siRNA sense strand
gcaguuuccguuugacuuu

SEQ ID NO: 446775 - RNA, 19 nt, Homo sapiens
  misc_RNA (1)...(19): siRNA sense strand
gggagaaguuggagcagau

SEQ ID NO: 446776 - RNA, 19 nt, Homo sapiens
  misc_RNA (1)...(19): siRNA sense strand
aagcugaccuucauugaca

SEQ ID NO: 446777 - RNA, 19 nt, Homo sapiens
  misc_RNA (1)...(19): siRNA sense strand
gugaggaguuccagagaau

SEQ ID NO: 446778 - RNA, 19 nt, Homo sapiens
  misc_RNA (1)...(19): siRNA sense strand
gaagggagaccgaggugau

SEQ ID NO: 446779 - RNA, 19 nt, Homo sapiens
  misc_RNA (1)...(19): siRNA sense strand
gaaccgggcagcaucuuca

SEQ ID NO: 446780 - RNA, 19 nt, Homo sapiens
  misc_RNA (1)...(19): siRNA sense strand
caagggagagauuggcuuu

SEQ ID NO: 446781 - RNA, 19 nt, Homo sapiens
  misc_RNA (1)...(19): siRNA sense strand
guuggaggcugaaaugaag

SEQ ID NO: 446782 - RNA, 19 nt, Homo sapiens
  misc_RNA (1)...(19): siRNA sense strand
ggugaucgcugagcugaag

SEQ ID NO: 446783 - RNA, 19 nt, Homo sapiens
  misc_RNA (1)...(19): siRNA sense strand
gaagauuccagaagugaag

SEQ ID NO: 446784 - RNA, 19 nt, Homo sapiens
  misc_RNA (1)...(19): siRNA sense strand
ccagggcaguuuccguuug

SEQ ID NO: 446785 - RNA, 19 nt, Homo sapiens
  misc_RNA (1)...(19): siRNA sense strand
cagggcaguuuccguuuga

SEQ ID NO: 446786 - RNA, 19 nt, Homo sapiens
  misc_RNA (1)...(19): siRNA sense strand
ggacaucucccugcucuac

SEQ ID NO: 446787 - RNA, 19 nt, Homo sapiens
  misc_RNA (1)...(19): siRNA sense strand
cgaggaaggcgaugacuca

SEQ ID NO: 446788 - RNA, 19 nt, Homo sapiens
  misc_RNA (1)...(19): siRNA sense strand
gaaguuggagcagauggaa

SEQ ID NO: 446789 - RNA, 19 nt, Homo sapiens
  misc_RNA (1)...(19): siRNA sense strand
gacaagcugaccuucauug

SEQ ID NO: 446790 - RNA, 19 nt, Homo sapiens
  misc_RNA (1)...(19): siRNA sense strand
gggcacgcaucuucuccuu

SEQ ID NO: 446791 - RNA, 19 nt, Homo sapiens
  misc_RNA (1)...(19): siRNA sense strand
ggagaugccagccuuggau

SEQ ID NO: 446792 - RNA, 19 nt, Homo sapiens
  misc_RNA (1)...(19): siRNA sense strand
gggaugaacggauugaaag

SEQ ID NO: 446793 - RNA, 19 nt, Homo sapiens
  misc_RNA (1)...(19): siRNA sense strand
ugaccgagagcuacuguga

SEQ ID NO: 446794 - RNA, 19 nt, Homo sapiens
  misc_RNA (1)...(19): siRNA sense strand
uggauuugaugacauggaa

SEQ ID NO: 446795 - RNA, 19 nt, Homo sapiens
  misc_RNA (1)...(19): siRNA sense strand
aggaaggacugggcagaaa

SEQ ID NO: 446796 - RNA, 19 nt, Homo sapiens
  misc_RNA (1)...(19): siRNA sense strand
caaggacgagcugcuguuu

SEQ ID NO: 446797 - RNA, 19 nt, Homo sapiens
  misc_RNA (1)...(19): siRNA sense strand
cacgagggacggacaauga

SEQ ID NO: 446798 - RNA, 19 nt, Homo sapiens
  misc_RNA (1)...(19): siRNA sense strand
gaugccagccuuggauuug

SEQ ID NO: 446799 - RNA, 19 nt, Homo sapiens
  misc_RNA (1)...(19): siRNA sense strand
accgagagcuacugugaga

SEQ ID NO: 446800 - RNA, 19 nt, Homo sapiens
  misc_RNA (1)...(19): siRNA sense strand
ugugaggaguuccagagaa

SEQ ID NO: 446801 - RNA, 19 nt, Homo sapiens
  misc_RNA (1)...(19): siRNA sense strand
gaugaacggauugaaagga

SEQ ID NO: 446802 - RNA, 19 nt, Homo sapiens
  misc_RNA (1)...(19): siRNA sense strand
gagaugccagccuuggauu

SEQ ID NO: 446803 - RNA, 19 nt, Homo sapiens
  misc_RNA (1)...(19): siRNA sense strand
gggcuggccuacgucuuug

SEQ ID NO: 446804 - RNA, 19 nt, Homo sapiens
  misc_RNA (1)...(19): siRNA sense strand
gcucugaggguccgcugaa

SEQ ID NO: 446805 - RNA, 19 nt, Homo sapiens
  misc_RNA (1)...(19): siRNA sense strand
cacgguggcuucguuagga

SEQ ID NO: 446806 - RNA, 19 nt, Homo sapiens
  misc_RNA (1)...(19): siRNA sense strand
ucaugacugccuccaagua

SEQ ID NO: 446807 - RNA, 19 nt, Homo sapiens
  misc_RNA (1)...(19): siRNA sense strand
ggaaggacugggcagaaag

SEQ ID NO: 446808 - RNA, 19 nt, Homo sapiens
  misc_RNA (1)...(19): siRNA sense strand
gcagcagcacggaagauuc

SEQ ID NO: 446809 - RNA, 19 nt, Homo sapiens
  misc_RNA (1)...(19): siRNA sense strand
gggccgacuuccagugcuu

SEQ ID NO: 446810 - RNA, 19 nt, Homo sapiens
  misc_RNA (1)...(19): siRNA sense strand
ccucacaggcagacuauca

SEQ ID NO: 446811 - RNA, 19 nt, Homo sapiens
  misc_RNA (1)...(19): siRNA sense strand
guuugacuuucuucaguug

SEQ ID NO: 446812 - RNA, 19 nt, Homo sapiens
  misc_RNA (1)...(19): siRNA sense strand
uuacgacagcaauguguuu

SEQ ID NO: 446813 - RNA, 19 nt, Homo sapiens
  misc_RNA (1)...(19): siRNA sense strand
gaaggacugggcagaaagg

SEQ ID NO: 446814 - RNA, 19 nt, Homo sapiens
  misc_RNA (1)...(19): siRNA sense strand
gcacugccuggacgaggaa

SEQ ID NO: 446815 - RNA, 19 nt, Homo sapiens
  misc_RNA (1)...(19): siRNA sense strand
cguuugacuuucuucaguu

SEQ ID NO: 446816 - RNA, 19 nt, Homo sapiens
  misc_RNA (1)...(19): siRNA sense strand
acgacaagcugaccuucau

SEQ ID NO: 446817 - RNA, 19 nt, Homo sapiens
  misc_RNA (1)...(19): siRNA sense strand
gacacuuccuggcucagau

SEQ ID NO: 446818 - RNA, 19 nt, Homo sapiens
  misc_RNA (1)...(19): siRNA sense strand
cuucuuccgugacuucuca

SEQ ID NO: 446819 - RNA, 19 nt, Homo sapiens
  misc_RNA (1)...(19): siRNA sense strand
cuacaucgugcucugcauu

SEQ ID NO: 446820 - RNA, 19 nt, Homo sapiens
  misc_RNA (1)...(19): siRNA sense strand
gcaggcugaccgagagcua

SEQ ID NO: 446821 - RNA, 19 nt, Homo sapiens
  misc_RNA (1)...(19): siRNA sense strand
cgggaugaacggauugaaa

SEQ ID NO: 446822 - RNA, 19 nt, Homo sapiens
  misc_RNA (1)...(19): siRNA sense strand
cgggcuggccuacgucuuu

SEQ ID NO: 446823 - RNA, 19 nt, Homo sapiens
  misc_RNA (1)...(19): siRNA sense strand
uuccagaagugaagaaguc

SEQ ID NO: 446824 - RNA, 19 nt, Homo sapiens
  misc_RNA (1)...(19): siRNA sense strand
ccguuugacuuucuucagu

SEQ ID NO: 446825 - RNA, 19 nt, Homo sapiens
  misc_RNA (1)...(19): siRNA sense strand
ugaccuucauugacaugga

SEQ ID NO: 446826 - RNA, 19 nt, Homo sapiens
  misc_RNA (1)...(19): siRNA sense strand
cgacaagcugaccuucauu

SEQ ID NO: 446827 - RNA, 19 nt, Homo sapiens
  misc_RNA (1)...(19): siRNA sense strand
cauggagggaucuggcuuu

SEQ ID NO: 446828 - RNA, 19 nt, Homo sapiens
  misc_RNA (1)...(19): siRNA sense strand
agggcaaccugggcucuaa

SEQ ID NO: 446829 - RNA, 19 nt, Homo sapiens
  misc_RNA (1)...(19): siRNA sense strand
ggcagcagcacggaagauu

SEQ ID NO: 446830 - RNA, 19 nt, Homo sapiens
  misc_RNA (1)...(19): siRNA sense strand
auugagaacagcuucauga

SEQ ID NO: 446831 - RNA, 19 nt, Homo sapiens
  misc_RNA (1)...(19): siRNA sense strand
ucaaggacgagcugcuguu

SEQ ID NO: 446832 - RNA, 19 nt, Homo sapiens
  misc_RNA (1)...(19): siRNA sense strand
gagggacggacaaugaagu

SEQ ID NO: 446833 - RNA, 19 nt, Homo sapiens
  misc_RNA (1)...(19): siRNA sense strand
acaagcugaccuucauuga

SEQ ID NO: 446834 - RNA, 19 nt, Homo sapiens
  misc_RNA (1)...(19): siRNA sense strand
caguguggcagguggcuuu

SEQ ID NO: 446835 - RNA, 19 nt, Homo sapiens
  misc_RNA (1)...(19): siRNA sense strand
ucucacugcuguuccacau

SEQ ID NO: 446836 - RNA, 19 nt, Homo sapiens
  misc_RNA (1)...(19): siRNA sense strand
cggauugaaaggagagaaa

SEQ ID NO: 446837 - RNA, 19 nt, Homo sapiens
  misc_RNA (1)...(19): siRNA sense strand
gcacgcaucuucuccuuug

SEQ ID NO: 446838 - RNA, 19 nt, Homo sapiens
  misc_RNA (1)...(19): siRNA sense strand
ggaaggcgaugacucagau

SEQ ID NO: 446839 - RNA, 19 nt, Homo sapiens
  misc_RNA (1)...(19): siRNA sense strand
gagcggacccugacaaguu

SEQ ID NO: 446840 - RNA, 19 nt, Homo sapiens
  misc_RNA (1)...(19): siRNA sense strand
guuaggagcucagacacuu

SEQ ID NO: 446841 - RNA, 19 nt, Homo sapiens
  misc_RNA (1)...(19): siRNA sense strand
gcaguuuccguuugacuuu

SEQ ID NO: 446842 - RNA, 19 nt, Homo sapiens
  misc_RNA (1)...(19): siRNA sense strand
gggagaaguuggagcagau

SEQ ID NO: 446843 - RNA, 19 nt, Homo sapiens
  misc_RNA (1)...(19): siRNA sense strand
aagcugaccuucauugaca

SEQ ID NO: 446844 - RNA, 19 nt, Homo sapiens
  misc_RNA (1)...(19): siRNA sense strand
gugaggaguuccagagaau

SEQ ID NO: 446845 - RNA, 19 nt, Homo sapiens
  misc_RNA (1)...(19): siRNA sense strand
gaagggagaccgaggugau

SEQ ID NO: 446846 - RNA, 19 nt, Homo sapiens
  misc_RNA (1)...(19): siRNA sense strand
gaaccgggcagcaucuuca

SEQ ID NO: 446847 - RNA, 19 nt, Homo sapiens
  misc_RNA (1)...(19): siRNA sense strand
caagggagagauuggcuuu

SEQ ID NO: 446848 - RNA, 19 nt, Homo sapiens
  misc_RNA (1)...(19): siRNA sense strand
guuggaggcugaaaugaag

SEQ ID NO: 446849 - RNA, 19 nt, Homo sapiens
  misc_RNA (1)...(19): siRNA sense strand
ggugaucgcugagcugaag

SEQ ID NO: 446850 - RNA, 19 nt, Homo sapiens
  misc_RNA (1)...(19): siRNA sense strand
gaagauuccagaagugaag

SEQ ID NO: 446851 - RNA, 19 nt, Homo sapiens
  misc_RNA (1)...(19): siRNA sense strand
ccagggcaguuuccguuug

SEQ ID NO: 446852 - RNA, 19 nt, Homo sapiens
  misc_RNA (1)...(19): siRNA sense strand
cagggcaguuuccguuuga

SEQ ID NO: 446853 - RNA, 19 nt, Homo sapiens
  misc_RNA (1)...(19): siRNA sense strand
ggacaucucccugcucuac

SEQ ID NO: 446854 - RNA, 19 nt, Homo sapiens
  misc_RNA (1)...(19): siRNA sense strand
cgaggaaggcgaugacuca

SEQ ID NO: 446855 - RNA, 19 nt, Homo sapiens
  misc_RNA (1)...(19): siRNA sense strand
gaaguuggagcagauggaa

SEQ ID NO: 446856 - RNA, 19 nt, Homo sapiens
  misc_RNA (1)...(19): siRNA sense strand
gacaagcugaccuucauug

SEQ ID NO: 446857 - RNA, 19 nt, Homo sapiens
  misc_RNA (1)...(19): siRNA sense strand
gggcacgcaucuucuccuu

SEQ ID NO: 446858 - RNA, 19 nt, Homo sapiens
  misc_RNA (1)...(19): siRNA sense strand
ggagaugccagccuuggau

SEQ ID NO: 446859 - RNA, 19 nt, Homo sapiens
  misc_RNA (1)...(19): siRNA sense strand
gggaugaacggauugaaag

SEQ ID NO: 446860 - RNA, 19 nt, Homo sapiens
  misc_RNA (1)...(19): siRNA sense strand
ugaccgagagcuacuguga

SEQ ID NO: 446861 - RNA, 19 nt, Homo sapiens
  misc_RNA (1)...(19): siRNA sense strand
uggauuugaugacauggaa

SEQ ID NO: 446862 - RNA, 19 nt, Homo sapiens
  misc_RNA (1)...(19): siRNA sense strand
aggaaggacugggcagaaa

SEQ ID NO: 446863 - RNA, 19 nt, Homo sapiens
  misc_RNA (1)...(19): siRNA sense strand
caaggacgagcugcuguuu

SEQ ID NO: 446864 - RNA, 19 nt, Homo sapiens
  misc_RNA (1)...(19): siRNA sense strand
cacgagggacggacaauga

SEQ ID NO: 446865 - RNA, 19 nt, Homo sapiens
  misc_RNA (1)...(19): siRNA sense strand
gaugccagccuuggauuug

SEQ ID NO: 446866 - RNA, 19 nt, Homo sapiens
  misc_RNA (1)...(19): siRNA sense strand
accgagagcuacugugaga

SEQ ID NO: 446867 - RNA, 19 nt, Homo sapiens
  misc_RNA (1)...(19): siRNA sense strand
ugugaggaguuccagagaa

SEQ ID NO: 446868 - RNA, 19 nt, Homo sapiens
  misc_RNA (1)...(19): siRNA sense strand
gaugaacggauugaaagga

SEQ ID NO: 446869 - RNA, 19 nt, Homo sapiens
  misc_RNA (1)...(19): siRNA sense strand
gagaugccagccuuggauu

SEQ ID NO: 446870 - RNA, 19 nt, Homo sapiens
  misc_RNA (1)...(19): siRNA sense strand
gggcuggccuacgucuuug

SEQ ID NO: 446871 - RNA, 19 nt, Homo sapiens
  misc_RNA (1)...(19): siRNA sense strand
gcucugaggguccgcugaa

SEQ ID NO: 446872 - RNA, 19 nt, Homo sapiens
  misc_RNA (1)...(19): siRNA sense strand
cacgguggcuucguuagga

SEQ ID NO: 446873 - RNA, 19 nt, Homo sapiens
  misc_RNA (1)...(19): siRNA sense strand
ucaugacugccuccaagua

SEQ ID NO: 446874 - RNA, 19 nt, Homo sapiens
  misc_RNA (1)...(19): siRNA sense strand
ggaaggacugggcagaaag

SEQ ID NO: 446875 - RNA, 19 nt, Homo sapiens
  misc_RNA (1)...(19): siRNA sense strand
gcagcagcacggaagauuc

SEQ ID NO: 446876 - RNA, 19 nt, Homo sapiens
  misc_RNA (1)...(19): siRNA sense strand
gggccgacuuccagugcuu

SEQ ID NO: 446877 - RNA, 19 nt, Homo sapiens
  misc_RNA (1)...(19): siRNA sense strand
ccucacaggcagacuauca

SEQ ID NO: 446878 - RNA, 19 nt, Homo sapiens
  misc_RNA (1)...(19): siRNA sense strand
guuugacuuucuucaguug

SEQ ID NO: 446879 - RNA, 19 nt, Homo sapiens
  misc_RNA (1)...(19): siRNA sense strand
uuacgacagcaauguguuu

SEQ ID NO: 446880 - RNA, 19 nt, Homo sapiens
  misc_RNA (1)...(19): siRNA sense strand
gaaggacugggcagaaagg

SEQ ID NO: 446881 - RNA, 19 nt, Homo sapiens
  misc_RNA (1)...(19): siRNA sense strand
gcacugccuggacgaggaa

SEQ ID NO: 446882 - RNA, 19 nt, Homo sapiens
  misc_RNA (1)...(19): siRNA sense strand
cguuugacuuucuucaguu

SEQ ID NO: 446883 - RNA, 19 nt, Homo sapiens
  misc_RNA (1)...(19): siRNA sense strand
acgacaagcugaccuucau

SEQ ID NO: 446884 - RNA, 19 nt, Homo sapiens
  misc_RNA (1)...(19): siRNA sense strand
gacacuuccuggcucagau

SEQ ID NO: 446885 - RNA, 19 nt, Homo sapiens
  misc_RNA (1)...(19): siRNA sense strand
cuucuuccgugacuucuca

SEQ ID NO: 446886 - RNA, 19 nt, Homo sapiens
  misc_RNA (1)...(19): siRNA sense strand
cuacaucgugcucugcauu

SEQ ID NO: 446887 - RNA, 19 nt, Homo sapiens
  misc_RNA (1)...(19): siRNA sense strand
gcaggcugaccgagagcua

SEQ ID NO: 446888 - RNA, 19 nt, Homo sapiens
  misc_RNA (1)...(19): siRNA sense strand
cgggaugaacggauugaaa

SEQ ID NO: 446889 - RNA, 19 nt, Homo sapiens
  misc_RNA (1)...(19): siRNA sense strand
cgggcuggccuacgucuuu

SEQ ID NO: 446890 - RNA, 19 nt, Homo sapiens
  misc_RNA (1)...(19): siRNA sense strand
uuccagaagugaagaaguc

SEQ ID NO: 446891 - RNA, 19 nt, Homo sapiens
  misc_RNA (1)...(19): siRNA sense strand
ccguuugacuuucuucagu

SEQ ID NO: 446892 - RNA, 19 nt, Homo sapiens
  misc_RNA (1)...(19): siRNA sense strand
ugaccuucauugacaugga

SEQ ID NO: 446893 - RNA, 19 nt, Homo sapiens
  misc_RNA (1)...(19): siRNA sense strand
cgacaagcugaccuucauu

SEQ ID NO: 446894 - RNA, 19 nt, Homo sapiens
  misc_RNA (1)...(19): siRNA sense strand
cauggagggaucuggcuuu

SEQ ID NO: 446895 - RNA, 19 nt, Homo sapiens
  misc_RNA (1)...(19): siRNA sense strand
agggcaaccugggcucuaa

SEQ ID NO: 446896 - RNA, 19 nt, Homo sapiens
  misc_RNA (1)...(19): siRNA sense strand
ggcagcagcacggaagauu

SEQ ID NO: 446897 - RNA, 19 nt, Homo sapiens
  misc_RNA (1)...(19): siRNA sense strand
auugagaacagcuucauga

SEQ ID NO: 446898 - RNA, 19 nt, Homo sapiens
  misc_RNA (1)...(19): siRNA sense strand
ucaaggacgagcugcuguu

SEQ ID NO: 446899 - RNA, 19 nt, Homo sapiens
  misc_RNA (1)...(19): siRNA sense strand
gagggacggacaaugaagu

SEQ ID NO: 446900 - RNA, 19 nt, Homo sapiens
  misc_RNA (1)...(19): siRNA sense strand
acaagcugaccuucauuga

SEQ ID NO: 446901 - RNA, 19 nt, Homo sapiens
  misc_RNA (1)...(19): siRNA sense strand
caguguggcagguggcuuu

SEQ ID NO: 446902 - RNA, 19 nt, Homo sapiens
  misc_RNA (1)...(19): siRNA sense strand
ucucacugcuguuccacau

SEQ ID NO: 446903 - RNA, 19 nt, Homo sapiens
  misc_RNA (1)...(19): siRNA sense strand
cggauugaaaggagagaaa

SEQ ID NO: 446904 - RNA, 19 nt, Homo sapiens
  misc_RNA (1)...(19): siRNA sense strand
gcacgcaucuucuccuuug

SEQ ID NO: 446905 - RNA, 19 nt, Homo sapiens
  misc_RNA (1)...(19): siRNA sense strand
ggaaggcgaugacucagau

SEQ ID NO: 446906 - RNA, 19 nt, Homo sapiens
  misc_RNA (1)...(19): siRNA sense strand
gagcggacccugacaaguu

SEQ ID NO: 446907 - RNA, 19 nt, Homo sapiens
  misc_RNA (1)...(19): siRNA sense strand
guuaggagcucagacacuu

SEQ ID NO: 446908 - RNA, 19 nt, Homo sapiens
  misc_RNA (1)...(19): siRNA sense strand
gcaguuuccguuugacuuu

SEQ ID NO: 446909 - RNA, 19 nt, Homo sapiens
  misc_RNA (1)...(19): siRNA sense strand
gggagaaguuggagcagau

SEQ ID NO: 446910 - RNA, 19 nt, Homo sapiens
  misc_RNA (1)...(19): siRNA sense strand
aagcugaccuucauugaca

SEQ ID NO: 446911 - RNA, 19 nt, Homo sapiens
  misc_RNA (1)...(19): siRNA sense strand
gugaggaguuccagagaau

SEQ ID NO: 446912 - RNA, 19 nt, Homo sapiens
  misc_RNA (1)...(19): siRNA sense strand
gaagggagaccgaggugau

SEQ ID NO: 446913 - RNA, 19 nt, Homo sapiens
  misc_RNA (1)...(19): siRNA sense strand
gaaccgggcagcaucuuca

SEQ ID NO: 446914 - RNA, 19 nt, Homo sapiens
  misc_RNA (1)...(19): siRNA sense strand
caagggagagauuggcuuu

SEQ ID NO: 446915 - RNA, 19 nt, Homo sapiens
  misc_RNA (1)...(19): siRNA sense strand
guuggaggcugaaaugaag

SEQ ID NO: 446916 - RNA, 19 nt, Homo sapiens
  misc_RNA (1)...(19): siRNA sense strand
ggugaucgcugagcugaag

SEQ ID NO: 446917 - RNA, 19 nt, Homo sapiens
  misc_RNA (1)...(19): siRNA sense strand
gaagauuccagaagugaag

SEQ ID NO: 446918 - RNA, 19 nt, Homo sapiens
  misc_RNA (1)...(19): siRNA sense strand
ccagggcaguuuccguuug

SEQ ID NO: 446919 - RNA, 19 nt, Homo sapiens
  misc_RNA (1)...(19): siRNA sense strand
cagggcaguuuccguuuga

SEQ ID NO: 446920 - RNA, 19 nt, Homo sapiens
  misc_RNA (1)...(19): siRNA sense strand
ggacaucucccugcucuac

SEQ ID NO: 446921 - RNA, 19 nt, Homo sapiens
  misc_RNA (1)...(19): siRNA sense strand
cgaggaaggcgaugacuca

SEQ ID NO: 446922 - RNA, 19 nt, Homo sapiens
  misc_RNA (1)...(19): siRNA sense strand
gaaguuggagcagauggaa

SEQ ID NO: 446923 - RNA, 19 nt, Homo sapiens
  misc_RNA (1)...(19): siRNA sense strand
gacaagcugaccuucauug

SEQ ID NO: 446924 - RNA, 19 nt, Homo sapiens
  misc_RNA (1)...(19): siRNA sense strand
gggcacgcaucuucuccuu

SEQ ID NO: 446925 - RNA, 19 nt, Homo sapiens
  misc_RNA (1)...(19): siRNA sense strand
ggagaugccagccuuggau

SEQ ID NO: 446926 - RNA, 19 nt, Homo sapiens
  misc_RNA (1)...(19): siRNA sense strand
gggaugaacggauugaaag

SEQ ID NO: 446927 - RNA, 19 nt, Homo sapiens
  misc_RNA (1)...(19): siRNA sense strand
ugaccgagagcuacuguga

SEQ ID NO: 446928 - RNA, 19 nt, Homo sapiens
  misc_RNA (1)...(19): siRNA sense strand
uggauuugaugacauggaa

SEQ ID NO: 446929 - RNA, 19 nt, Homo sapiens
  misc_RNA (1)...(19): siRNA sense strand
aggaaggacugggcagaaa

SEQ ID NO: 446930 - RNA, 19 nt, Homo sapiens
  misc_RNA (1)...(19): siRNA sense strand
caaggacgagcugcuguuu

SEQ ID NO: 446931 - RNA, 19 nt, Homo sapiens
  misc_RNA (1)...(19): siRNA sense strand
cacgagggacggacaauga

SEQ ID NO: 446932 - RNA, 19 nt, Homo sapiens
  misc_RNA (1)...(19): siRNA sense strand
gaugccagccuuggauuug

SEQ ID NO: 446933 - RNA, 19 nt, Homo sapiens
  misc_RNA (1)...(19): siRNA sense strand
accgagagcuacugugaga

SEQ ID NO: 446934 - RNA, 19 nt, Homo sapiens
  misc_RNA (1)...(19): siRNA sense strand
ugugaggaguuccagagaa

SEQ ID NO: 446935 - RNA, 19 nt, Homo sapiens
  misc_RNA (1)...(19): siRNA sense strand
gaugaacggauugaaagga

SEQ ID NO: 446936 - RNA, 19 nt, Homo sapiens
  misc_RNA (1)...(19): siRNA sense strand
gagaugccagccuuggauu

SEQ ID NO: 446937 - RNA, 19 nt, Homo sapiens
  misc_RNA (1)...(19): siRNA sense strand
gggcuggccuacgucuuug

SEQ ID NO: 446938 - RNA, 19 nt, Homo sapiens
  misc_RNA (1)...(19): siRNA sense strand
gcucugaggguccgcugaa

SEQ ID NO: 446939 - RNA, 19 nt, Homo sapiens
  misc_RNA (1)...(19): siRNA sense strand
cacgguggcuucguuagga

SEQ ID NO: 446940 - RNA, 19 nt, Homo sapiens
  misc_RNA (1)...(19): siRNA sense strand
ucaugacugccuccaagua

SEQ ID NO: 446941 - RNA, 19 nt, Homo sapiens
  misc_RNA (1)...(19): siRNA sense strand
ggaaggacugggcagaaag

SEQ ID NO: 446942 - RNA, 19 nt, Homo sapiens
  misc_RNA (1)...(19): siRNA sense strand
gcagcagcacggaagauuc

SEQ ID NO: 446943 - RNA, 19 nt, Homo sapiens
  misc_RNA (1)...(19): siRNA sense strand
gggccgacuuccagugcuu

SEQ ID NO: 446944 - RNA, 19 nt, Homo sapiens
  misc_RNA (1)...(19): siRNA sense strand
ccucacaggcagacuauca

SEQ ID NO: 446945 - RNA, 19 nt, Homo sapiens
  misc_RNA (1)...(19): siRNA sense strand
guuugacuuucuucaguug

SEQ ID NO: 446946 - RNA, 19 nt, Homo sapiens
  misc_RNA (1)...(19): siRNA sense strand
uuacgacagcaauguguuu

SEQ ID NO: 446947 - RNA, 19 nt, Homo sapiens
  misc_RNA (1)...(19): siRNA sense strand
gaaggacugggcagaaagg

SEQ ID NO: 446948 - RNA, 19 nt, Homo sapiens
  misc_RNA (1)...(19): siRNA sense strand
gcacugccuggacgaggaa

SEQ ID NO: 446949 - RNA, 19 nt, Homo sapiens
  misc_RNA (1)...(19): siRNA sense strand
cguuugacuuucuucaguu

SEQ ID NO: 446950 - RNA, 19 nt, Homo sapiens
  misc_RNA (1)...(19): siRNA sense strand
acgacaagcugaccuucau

SEQ ID NO: 446951 - RNA, 19 nt, Homo sapiens
  misc_RNA (1)...(19): siRNA sense strand
gacacuuccuggcucagau

SEQ ID NO: 446952 - RNA, 19 nt, Homo sapiens
  misc_RNA (1)...(19): siRNA sense strand
cuucuuccgugacuucuca

SEQ ID NO: 446953 - RNA, 19 nt, Homo sapiens
  misc_RNA (1)...(19): siRNA sense strand
cuacaucgugcucugcauu

SEQ ID NO: 446954 - RNA, 19 nt, Homo sapiens
  misc_RNA (1)...(19): siRNA sense strand
gcaggcugaccgagagcua

SEQ ID NO: 446955 - RNA, 19 nt, Homo sapiens
  misc_RNA (1)...(19): siRNA sense strand
cgggaugaacggauugaaa

SEQ ID NO: 446956 - RNA, 19 nt, Homo sapiens
  misc_RNA (1)...(19): siRNA sense strand
cgggcuggccuacgucuuu

SEQ ID NO: 446957 - RNA, 19 nt, Homo sapiens
  misc_RNA (1)...(19): siRNA sense strand
uuccagaagugaagaaguc

SEQ ID NO: 446958 - RNA, 19 nt, Homo sapiens
  misc_RNA (1)...(19): siRNA sense strand
ccguuugacuuucuucagu

SEQ ID NO: 446959 - RNA, 19 nt, Homo sapiens
  misc_RNA (1)...(19): siRNA sense strand
ugaccuucauugacaugga

SEQ ID NO: 446960 - RNA, 19 nt, Homo sapiens
  misc_RNA (1)...(19): siRNA sense strand
cgacaagcugaccuucauu

SEQ ID NO: 446961 - RNA, 19 nt, Homo sapiens
  misc_RNA (1)...(19): siRNA sense strand
cauggagggaucuggcuuu

SEQ ID NO: 446962 - RNA, 19 nt, Homo sapiens
  misc_RNA (1)...(19): siRNA sense strand
agggcaaccugggcucuaa

SEQ ID NO: 446963 - RNA, 19 nt, Homo sapiens
  misc_RNA (1)...(19): siRNA sense strand
ggcagcagcacggaagauu

SEQ ID NO: 446964 - RNA, 19 nt, Homo sapiens
  misc_RNA (1)...(19): siRNA sense strand
auugagaacagcuucauga

SEQ ID NO: 446965 - RNA, 19 nt, Homo sapiens
  misc_RNA (1)...(19): siRNA sense strand
ucaaggacgagcugcuguu

SEQ ID NO: 446966 - RNA, 19 nt, Homo sapiens
  misc_RNA (1)...(19): siRNA sense strand
gagggacggacaaugaagu

SEQ ID NO: 446967 - RNA, 19 nt, Homo sapiens
  misc_RNA (1)...(19): siRNA sense strand
acaagcugaccuucauuga

SEQ ID NO: 446968 - RNA, 19 nt, Homo sapiens
  misc_RNA (1)...(19): siRNA sense strand
caguguggcagguggcuuu

SEQ ID NO: 446969 - RNA, 19 nt, Homo sapiens
  misc_RNA (1)...(19): siRNA sense strand
ucucacugcuguuccacau

SEQ ID NO: 446970 - RNA, 19 nt, Homo sapiens
  misc_RNA (1)...(19): siRNA sense strand
cggauugaaaggagagaaa

SEQ ID NO: 446971 - RNA, 19 nt, Homo sapiens
  misc_RNA (1)...(19): siRNA sense strand
gcacgcaucuucuccuuug

SEQ ID NO: 446972 - RNA, 19 nt, Homo sapiens
  misc_RNA (1)...(19): siRNA sense strand
ggaaggcgaugacucagau

SEQ ID NO: 446973 - RNA, 19 nt, Homo sapiens
  misc_RNA (1)...(19): siRNA sense strand
gagcggacccugacaaguu

SEQ ID NO: 446974 - RNA, 19 nt, Homo sapiens
  misc_RNA (1)...(19): siRNA sense strand
guuaggagcucagacacuu

SEQ ID NO: 446975 - RNA, 19 nt, Homo sapiens
  misc_RNA (1)...(19): siRNA sense strand
gcaguuuccguuugacuuu

SEQ ID NO: 446976 - RNA, 19 nt, Homo sapiens
  misc_RNA (1)...(19): siRNA sense strand
gggagaaguuggagcagau

SEQ ID NO: 446977 - RNA, 19 nt, Homo sapiens
  misc_RNA (1)...(19): siRNA sense strand
aagcugaccuucauugaca

SEQ ID NO: 446978 - RNA, 19 nt, Homo sapiens
  misc_RNA (1)...(19): siRNA sense strand
gugaggaguuccagagaau

SEQ ID NO: 446979 - RNA, 19 nt, Homo sapiens
  misc_RNA (1)...(19): siRNA sense strand
gaagggagaccgaggugau

SEQ ID NO: 446980 - RNA, 19 nt, Homo sapiens
  misc_RNA (1)...(19): siRNA sense strand
gaaccgggcagcaucuuca

SEQ ID NO: 446981 - RNA, 19 nt, Homo sapiens
  misc_RNA (1)...(19): siRNA sense strand
caagggagagauuggcuuu

SEQ ID NO: 446982 - RNA, 19 nt, Homo sapiens
  misc_RNA (1)...(19): siRNA sense strand
guuggaggcugaaaugaag

SEQ ID NO: 446983 - RNA, 19 nt, Homo sapiens
  misc_RNA (1)...(19): siRNA sense strand
ggugaucgcugagcugaag

SEQ ID NO: 446984 - RNA, 19 nt, Homo sapiens
  misc_RNA (1)...(19): siRNA sense strand
gaagauuccagaagugaag

SEQ ID NO: 446985 - RNA, 19 nt, Homo sapiens
  misc_RNA (1)...(19): siRNA sense strand
ccagggcaguuuccguuug

SEQ ID NO: 446986 - RNA, 19 nt, Homo sapiens
  misc_RNA (1)...(19): siRNA sense strand
cagggcaguuuccguuuga

SEQ ID NO: 446987 - RNA, 19 nt, Homo sapiens
  misc_RNA (1)...(19): siRNA sense strand
ggacaucucccugcucuac

SEQ ID NO: 446988 - RNA, 19 nt, Homo sapiens
  misc_RNA (1)...(19): siRNA sense strand
cgaggaaggcgaugacuca

SEQ ID NO: 446989 - RNA, 19 nt, Homo sapiens
  misc_RNA (1)...(19): siRNA sense strand
gaaguuggagcagauggaa

SEQ ID NO: 446990 - RNA, 19 nt, Homo sapiens
  misc_RNA (1)...(19): siRNA sense strand
gacaagcugaccuucauug

SEQ ID NO: 446991 - RNA, 19 nt, Homo sapiens
  misc_RNA (1)...(19): siRNA sense strand
gggcacgcaucuucuccuu

SEQ ID NO: 446992 - RNA, 19 nt, Homo sapiens
  misc_RNA (1)...(19): siRNA sense strand
ggagaugccagccuuggau

SEQ ID NO: 446993 - RNA, 19 nt, Homo sapiens
  misc_RNA (1)...(19): siRNA sense strand
gggaugaacggauugaaag

SEQ ID NO: 446994 - RNA, 19 nt, Homo sapiens
  misc_RNA (1)...(19): siRNA sense strand
ugaccgagagcuacuguga

SEQ ID NO: 446995 - RNA, 19 nt, Homo sapiens
  misc_RNA (1)...(19): siRNA sense strand
uggauuugaugacauggaa

SEQ ID NO: 446996 - RNA, 19 nt, Homo sapiens
  misc_RNA (1)...(19): siRNA sense strand
aggaaggacugggcagaaa

SEQ ID NO: 446997 - RNA, 19 nt, Homo sapiens
  misc_RNA (1)...(19): siRNA sense strand
caaggacgagcugcuguuu

SEQ ID NO: 446998 - RNA, 19 nt, Homo sapiens
  misc_RNA (1)...(19): siRNA sense strand
cacgagggacggacaauga

SEQ ID NO: 446999 - RNA, 19 nt, Homo sapiens
  misc_RNA (1)...(19): siRNA sense strand
gaugccagccuuggauuug

SEQ ID NO: 447000 - RNA, 19 nt, Homo sapiens
  misc_RNA (1)...(19): siRNA sense strand
accgagagcuacugugaga

SEQ ID NO: 447001 - RNA, 19 nt, Homo sapiens
  misc_RNA (1)...(19): siRNA sense strand
ugugaggaguuccagagaa

SEQ ID NO: 447002 - RNA, 19 nt, Homo sapiens
  misc_RNA (1)...(19): siRNA sense strand
gaugaacggauugaaagga

SEQ ID NO: 447003 - RNA, 19 nt, Homo sapiens
  misc_RNA (1)...(19): siRNA sense strand
gagaugccagccuuggauu

SEQ ID NO: 447004 - RNA, 19 nt, Homo sapiens
  misc_RNA (1)...(19): siRNA sense strand
gggcuggccuacgucuuug

SEQ ID NO: 447005 - RNA, 19 nt, Homo sapiens
  misc_RNA (1)...(19): siRNA sense strand
gcucugaggguccgcugaa

SEQ ID NO: 447006 - RNA, 19 nt, Homo sapiens
  misc_RNA (1)...(19): siRNA sense strand
cacgguggcuucguuagga

SEQ ID NO: 447007 - RNA, 19 nt, Homo sapiens
  misc_RNA (1)...(19): siRNA sense strand
ucaugacugccuccaagua

SEQ ID NO: 447008 - RNA, 19 nt, Homo sapiens
  misc_RNA (1)...(19): siRNA sense strand
ggaaggacugggcagaaag

SEQ ID NO: 447009 - RNA, 19 nt, Homo sapiens
  misc_RNA (1)...(19): siRNA sense strand
gcagcagcacggaagauuc

SEQ ID NO: 447010 - RNA, 19 nt, Homo sapiens
  misc_RNA (1)...(19): siRNA sense strand
gggccgacuuccagugcuu

SEQ ID NO: 447011 - RNA, 19 nt, Homo sapiens
  misc_RNA (1)...(19): siRNA sense strand
ccucacaggcagacuauca

SEQ ID NO: 447012 - RNA, 19 nt, Homo sapiens
  misc_RNA (1)...(19): siRNA sense strand
guuugacuuucuucaguug

SEQ ID NO: 447013 - RNA, 19 nt, Homo sapiens
  misc_RNA (1)...(19): siRNA sense strand
uuacgacagcaauguguuu

SEQ ID NO: 447014 - RNA, 19 nt, Homo sapiens
  misc_RNA (1)...(19): siRNA sense strand
gaaggacugggcagaaagg

SEQ ID NO: 447015 - RNA, 19 nt, Homo sapiens
  misc_RNA (1)...(19): siRNA sense strand
gcacugccuggacgaggaa

SEQ ID NO: 447016 - RNA, 19 nt, Homo sapiens
  misc_RNA (1)...(19): siRNA sense strand
cguuugacuuucuucaguu
